United States Patent Application Publication US 2014/0325702 A1 - sequence listing, part 41

SEQ ID NO: 88065 - DNA, 696 bp, Heterodera glycines
gtggcatgcgaaatttgatggcattcttggcatgggattttcggaaatttctgtccaaaaattgccgaccgtgttcgacaacatggtcacgcaacagaaagtgccggagccggtgttcgcattttggcttaaccgtgacccgacctctgaatttggtggtgagatcaccattgggggcactgatcagcgacgctttgtggccccaatcacttacacaccggtcacacacaaagcctactggcaattcaagatggattcgatcagtggaggtaatggcaaacttgcgtgccaaaatgggtgccaagccattgcggacaccggcacttccctgcttgctgggcccaaaaatgacattgaaaagattcagaaacacattggagcaattccgctcttccatggcgagtatatgatatcatgtgaacgtattcccacactgcccgatgtgacgatcaacatcggtggcaaggcgtacacgttgaagggcaaggactatgtgctgaaaatgaccagcatgggcaaaagcatatgcctttccggttttatgggcattgatttgccggaacgtgtcggagaactttggattcttggcgatgtgtttattggtcgttactacacggtgtttgatgtgggccaaagtcgtgttgattttgcgcaggccaaagacggaaatgaaattccaattgagcctcaagtgcg

SEQ ID NO: 88066 - DNA, 676 bp, Heterodera glycines
tgggtgaaaaccgccctggtacaattagcactgaaaatgcgcgaaatgcaaatgcgacaaccgcctacaagcgaccgcgtactggtctttcgatatccgaacacaactgttagacaatggggcagaactgggctcgcaattggaaccaaacaaaattcaccagcaatcgcccagtaaatacagcatttccaacaagaagttattgaaactttgtcgtgttgtttacgtgtcggcttgtccccaggaatttagtgaaaaattaattcttcatatggaacgatttggagaacttttcgattacgatatcaatgcaacgcctcaaattttcacatacaaagagccacttgatgcgcaaagagctgtgaatgaagcggtgggcagttttgaactggcaaaattgaaagtggaatgggcaccagtggcgaagggagtgaaggatgacaagaacatagtgccagacggggagaggaaaccatcggagcaggtcgctgcaaaggatttgatcgctttgctggaatacgatgaggaagaggaagatgacaagaaggagggagacgaggaacagttgtcggaaaaggagggaaatgactgattcatccagaccaaaccgactttaacatccaatgatgggtagtgtcgttcagttcaagctatcatgacattaaattcttcccaa

SEQ ID NO: 88067 - DNA, 697 bp, Heterodera glycines
cgaattgttaaccaaaaaacggctgaaatgctaattgcttatatccccaaacgaattcatctcaatttgaatgtggtcggtgctgcatttcgtcagcgtatgccgttttctgcggctgtgcttgaccctcacgatcagctgaaagattcagacaagccgatgtcggagcagatgaacccttcattctttaagatggtcgattactacttcgacaaaggcgctgctgccattgagccgaaattggttgagaacttcaaagcttcgcatgggaaatcgaaagaagagagggtcagctctgtcaaagggattcttgcggcgattaaacccgttaacaaggttctttacgtgaccttcccgcttcgacgcgatgacggatcttatgagatgattgaagcatggagggctatgcactcagagcatcgtactccaacaaagggagggattcgcttttcgatggatgtgaatgaagatgaggtgaaagcgctgtctgctctgatgaccgccaaatgtgcagttgtcgacgttccattcggtggagcaaagggaggagtgaaaatcgacccgaagaaatactccgcttatgaaattgaggaaatcactcgcagttttaccatcgagttagcgaaaaaaggatttctcgggccaggtgtttgatgttccggcgcctgacatgggaaccggagaacgagaaatggct

SEQ ID NO: 88068 - DNA, 769 bp, Heterodera glycines
  unsure (1)..(769): unsure at all n locations
tggatatttgacacatgaccaatgcaaatccgactaactgtgaacagactttggcgaatgaaccagtgccgtggcactttcgtcggcaatccccggcaatgatgaaaattcctcgtcgcccgccgttccctctgaacgaagtttagaattgctgaagaaatatttcggttattcgcgctttcgccccttgcaatacgaagtgatcgaagcggctctaagcaaacgcgaccaattggtcgttatgtccaccggttatgggaaaagtgtgtgctaccaattgccctctctcattcaaaataatctcactttggtcgtttcgccactaatttctttgatggaggaccaagtgaatgctctcgaaaatgtcggagttgaagctgcgtatttgggcggcaatcagtcgcgggaagcaattttcgactcaatcaaaaggggccggcttcgaatcctttacataacacnctgaggcttaccagtcaaccccagatttcatacagaacattcacgaatacgttggactgttggccgtagacgaggctcattgcatttcccaatggggccacgagttcaggccgggctatcgccaaattgccgatattcgcaatgttttgaccggtgttcctgtcattgctttaactgctacagccaccgacccggtgagaaatgacatcgtccaaaatttgcgactgagaaacccaaaagtgactttgtccgcatttgacaggaagaatttgttcattgaagtgcaaaaacgaactcaatcgctgag

SEQ ID NO: 88069 - DNA, 285 bp, Heterodera glycines
agtggaaacatctcatcggctgggattgttacgaccatcacaataattgtcgcccgtagactgttttatccttccctagcgacgggtggggcggaacccattggtggaaaaagtgcttaggtcggaaatgccctctgtttgcagccatctcttgctaccagatcgctcaacgcttacacctcctgctgctggccaatttgaaaggtgtggcgaaatcgattgaaaagaatgagggcacacctacgcgaacttgctgagaaaatgcctgtccatctatctaatcgt

SEQ ID NO: 88070 - DNA, 707 bp, Heterodera glycines
caaatggaagagccagcggagggatcgaaatcggcacgaggggcgacagctgctcaataagtgccaactcttccgcttctttgatttccgtgcccgattttgtgagggttgaagaaattcccgaggaatgtgccataaaacgcgtcccctcggctctatgttcatttgtcgacccattctgtgaccctaagaaacccgtcaaaacaacattttcggacatttccactgctgcatttaatatccgtgacggaatccttcggacgcccacaattaagtcagacgctctgtcgtcaatgtttggcgtcgatttgttcttcaaacaggagtatttgcaagtgaccggcagcttcaaagagcgaggggcgcgctttgcccttctgcgacttacggaagagcaacggcgaatcggagtgatcgctgcgtcggctggcaatcacgcactttccctggcttaccatggcagcaaattgggcatcccggtgactgtggtgatgccgaagttcgcccctctaatgaagatttcctgctgtgaatcttacaaggccaaagtcattctccatgggcttaacattcaggagtcaaagatattcgcttatgagttggccaaagagaaaaacctcaaatacgtcaacggattcgacaaccccgacgtaattgcaggccaaggaacaattggactggaaatactggaccaagtgggcgatgtg

SEQ ID NO: 88071 - DNA, 313 bp, Heterodera glycines
  unsure (1)..(313): unsure at all n locations
acctcgtaatttctgagaaaccgacagttttgctcacgttcacaacagcgccattctcagcaacatcgcacaaaaatggcacgccgacgaagaaagaaggagccgcgaaagcagtcgtacaagctgtacgttcgacgtgtgctgaaggaagttcatccgggcaaggaaatctcannatgcgtgcgttgaacatcatgaactccttcgtcatcgacgccttggaccgcattgcaacggaggcgacgcgaatggcccacaacgaccggcgcaaaaccatcacgcttcgcgacatggagttttctgtccgactggg

SEQ ID NO: 88072 - DNA, 736 bp, Heterodera glycines
gcctgaacatggtggaggaggaggagcggggacatcggcgaccaatgatggcatcggcacgggcaatggcgtgccatccgatcaacggaacatccggcgcttcgtcgccgagttggagcagcgcctggtggagagtgaggcggagattgcggcgctctgctccgagaagcgtgagttggccaaacgcgttggacacatggccaacaaattggacacggaacgcgtccaaaatgcgtcggcgatggaaagcgtgcggagggaccggcaattgttggtggaggaaaacgagcgggaacgcgcactgcacgcggtgatgcgcgacaaatttgacgagttgaagcgcaaatttgacaccattgccaaaacggtgttggacaaacagtccgagttggagaaaatgaccaaaatgaacacggagttgagccaacagcttcatgaacaagcggaagcattggaaaggcaccgtgccgagttggaaacggcaacaaaaatggtcgccgaacgggacaccgaactgaaaggaagcgaatgcgagttggccaagtgcagggaggagaacaccaagttggacgagctcaggcaacaaatggtccatttgctggaagaatttggtgccaatttggacaaataaataatttttatatgtggcggaggacaaatgcaattacaatacaatgtataaaatattttttatttttatacaaataaaaccggtatttctaaaaaaaaaaaaaaa

SEQ ID NO: 88073 - DNA, 337 bp, Heterodera glycines
  unsure (1)..(337): unsure at all n locations
taagctgcttattctagggaacgaattgttaaaccaacaaacggctgaaatgctaattgcttatatccccaaacgaattcatctcaatttgaatgtggtcggtgctgcatttcgtcagcgtatgccgttttctgcggctgtgcttgaccctcacgatcagctgaaagattcagacaagccgatgtcggagcagatgaacccttcattctttaagatggtcgattactacttcgacaaaggcgctgctgtcattgagccgaaattggttgagaacttcaaagcttcgcatgggaaatcgaaagaagagagggtcagctctgtcaaagggattcnttgc

SEQ ID NO: 88074 - DNA, 343 bp, Heterodera glycines
tctttgttttcgttctttcttttatttgcactgtccgacggattggaaaatgatcaccgatatgcaattgggtatcatggccaatgttctcggcgtctccattttcattttggtcattttctaccattacatcgtcgccaaccaaaagaaacagtcgccgcagtgagcgaaagaagcgaagaaaacgccgaagaaagtcaaatgatttgatgggttatgattaattaattaatttatgtattaattgagagggacggcgcataaatttgtaattgattcattgtaaagagaaaacaaagttaattaaaaaaaataaaaaaaaaaaaaaaaaaaaaaaaaaaaa

SEQ ID NO: 88075 - DNA, 664 bp, Heterodera glycines
tggattccctggagaatttccgttcgcagggctcgcgaactttactcggagatgacttccattggcttaatccccttcgaggaagtgttcaattcgctgctttcggctcaaattcccttaatagttcgtcgtcctctttcgacgtgactcattggctgcatgaaatgtctcgcctcggagtgcgcccatcggttaaaacgttcaatgccgctttgtcatcccttttgcaaatcaaagaaaagggagcaaattcatttgactatgggacggaagaaatggcagcagctgtaactccttcgactgaagaatcatcatacgataaagaacacctgtggaaaaccgcgtctgatttagtccatgaaatgcgttcgcttggaattgaaccgactttggcgacattttcttacactttgaaattggcaccaacaaaaatgagtttggatgctctgcttaatgagattttgacacgattggagtacaagctttcacgctccgaaccgatcgaacgtgttggggatgatgatgcaattttctaccgaaatgccatttcaatggcgcgcatactgaacaacgaattacagatggatcgtctggttaaaatttacagatccgaacacaacaaagtctttttccagaactatgataacgagcagagattctacgc

SEQ ID NO: 88076 - DNA, 502 bp, Heterodera glycines
  unsure (1)..(502): unsure at all n locations
caaatttttatttttccttcatttttgtatcttaattaaggcaatttcggggctccattgttggaattcgaacatgattttgctgagtgaaatgccggaaaagggcagtgtcactgtacgccaatgtccgtccgggcatcaatgcgtgacggcaaattgttggcttggagtcggcaattacattgtccaaaaatgcgtgccggaccagccaggggccagaaactattgcaaagacttcaacaacatttgccaaatgggctttttcggcatgccaattcattgctcatcttgtaagggtgatctgtgcaacgaagcgcgtaattaacaaatgatgagcaaattagtcaaattaataaactaattaattaattaaactggaataaagaaccgattttcaaattttatgtttgataaattattttatggctattgttgtattcaaattcaattcaattagaataaaaaaattgcccgcnnnnnaaaaaaaaaaaaaaaaaaaaaa

SEQ ID NO: 88077 - DNA, 395 bp, Heterodera glycines
cctactgaccggcacagagaaaggcttaaacgacacgttcggcgcaacttgccacggggcggggagggcaatgtcacgtgcaaagtctcggagggcactgggctttgagcaagttctgaacagactgaaacagcagggcattgccattcgggtggcatctccaaaactcgtcatgttttaggctccggaatcctacaaaaatgtttgtgatgttgtggacacgtgtcatatcgccggaatttcgaaaaaggctgtgaaacttcggcccatcgctgtcatcaaagggtgaaggaaaattatgaattgtttatataatttatttaatttgttgattttaacaaaatttaatgaataaaatcttcatttcgaaaaaaaaaaaaaaaaaaaaaaaaaaa

SEQ ID NO: 88078 - DNA, 708 bp, Heterodera glycines
tgaaggaggacccgacggtcgccgtttattgttattcgtccttttccgacattcgttccatcgattcattcgtcgacaaaattctcatcgccgtaaaagcgccttttgagccccaaccgcgttcttcgatcgaagtgcccgacccttgtgaaaccgggcgatacgaaatgaccgttcgtaatgaaaatggcggtcctctccaagcgtacctttgccgtgagcccacgcagaaaaacgcctcggaactcgcaccaaacaattgcaaagcggaaacggaggagaccaaagcgattgactctttggggacacaaagcttttgcgggcccaaaattccgtcgaatgagcttcggtcgccctccaaacagcagaaaatgctttcgccgttgaaattgctcttcgccaattctcagccgcaccccgacgccgtctcctcaaattccgtgggccccggcggcgttttcttcccgcccccgggcgattctttcctttcgttggaccccccttttgaggagaatgacccgtactgtccgctcttcatgaacgaccaaaacacttcactgaattcgctgttcggctgatcattcgctgcggcggagaaacgaaaggaaaaggcaaaagaaataacggaaagtgccaaaaaaaaagagagaaaagtgcacacatttaacattttctcatcagatgttctacttgcttctcataataaac

SEQ ID NO: 88079 - DNA, 784 bp, Heterodera glycines
ccgtacccgccgttcctttttcttcgtcccctctctctcctgcgccgaatgtcgcctctccgatcgcgtcactgtgccgaatattttgttccagaaaattgtcgaaatcacacaaaaaggaccaaaatggacaccattcatcgaaatgatagtcaaaggtcgtgaaaatgtgttcatctccgtttcggttgatgagctcctcttcaacggttaccaggacccgctgatcagtgaaatttgcagcaatgttttattcaaaatgatgtgcaaattggcgaatattccggacagaattggcctcttttacgggcaaaataacacggacgatggccaatatgcggtggacactggactgaacgaccccgattttttggaccgcgtgtactccttcaaagggatagagggaaaactgagcgacgaccattggtacggcgaaagggcgcggatgatcaacgggacggacgcggaactgtttggaccgaatttgatggatgcgccgaaattgcaaatattcattggccaactttgccgttccttcgatttggaagttcgtcagcccgctctcaccgccgatctccccgtcttccgatacgcccaacccgactcggcgttggacatcgctgtgcagcggtcgcaaggcttttgcaacccgaattccccgcttttcttcaacgagagcgtccaacccggttggctgtgctccgtccggtcttctcgacatgtcctcctgtttccccggctctcccccattttcttttcggcctcccattttcgaaatgcccac

SEQ ID NO: 88080 - DNA, 519 bp, Heterodera glycines
gaaatcgacaaaaaattcgttctctgtgtacaaaacgcatacgtctctttatttaattaatttgcttataagcaaagtttcctaaaatctgataactgaattgtcgttgctccgcatttgacaaaaaagaagaaaatgactctccagtggaccgtggttgcgttcattctttacgcagaaatagccacaattattgtgcttcttttgccatgggttcggccgacaatgtggaaaaaagtgtttaacagtcgcgttgtgcacaaactcaaacagttttccaatgtttacgcctacgctttcatttttgtgctcattcttttgttcgttgatgccacccgtgaggtgcgtaagtacagccacgtggacacgactagagagatggtgggacgagtggccgaggcggacgccgtcgttcacatgcgtctcttcagagctcagcgaaacctttatttgagtgggttttctctgcttatggcactgattatcagtcgcatcgtcactttgctcgcccgttgtgcc

SEQ ID NO: 88081 - DNA, 593 bp, Heterodera glycines
ttgggataacggaccatttatatgtgaatatgtgtggaattaacaagtttcgacagaatgttcgcagcactcgtcaaattggagtcgaaagagagttgcgtgtcgcaatacatttaccacaaattaatgggtcacgacgtggacgacatcctcttcaagctgatcatgccgaaaaagttctccgcccctggccttcccgaactcaaccacagtcaaatatcagcgattaaagccgctcttcagagacccctttcacttattcaaggtccgcctgggacaggaaaaactgtgacttcggccactttggtttaccatttggtaaagttgaccaatggacaagtgttggtttgtgctccttccaatattgctgttgatcaattggctgaaaagatccacagaacgggtttgaaagtattgcgattctgtgctaaggggcgagagactgtggacagttctgtcgcctttctttcactgcataatcagctgaaggcgcttcagtcgggagacctttttaaactgatgaaattaaaggaagaaataggcgaactttctcaagccgaccaaaatcgtttcatggcactgagaagacagaa

SEQ ID NO: 88082 - DNA, 350 bp, Heterodera glycines
caattggccgacctcgcaaagaaaacgctcatcctttttcgggatgccaacgaatcattcagcgaccaaaatgccgtctccgattggctccgccattccttcgatttgcctgctaattcgatttgcgaactctcctccccctcattggtcactaactcccaagtgtttttcattgttttcgacgaaattgggacagccgaaaggattttggaaatgagcaaatccgaggagagggctcagaaaacttttctgacttcagccaccgaatttttgcagtcgaattcccctggcaaatttacggacgccgccttttccgatgaaaatgcctggcgaaatttggcagcggcgtc

SEQ ID NO: 88083 - DNA, 450 bp, Heterodera glycines
caatcgcggacaaagaagtgctcaacggatttgaggatttgtacgaggcgtttgtgcacttttttacgcgtggtgcgcctgccgagcgatgtatggtcaatgacgcggcctttgaccggatggtccacaccgttgaagacaaacatctccgtgcacagcattatattggtggcaatgccgcattaatggctcagaaaatcgcctcttcgttccccgctgcaacggcttatttggttggtccgattggcccgcgaagccacgcgctgttacacccggccatcgttcgaaacaattccacacgaattgcggaggacgaattgcacctcattttggagtacaaacagggcgaaatcctcggggagtacgtttcgcccgcctcttctcgtttcattgtttcccatgaccaattcagtggcagtgcgatgatcatcgaaatgtttttcaaggcaa

SEQ ID NO: 88084 - DNA, 140 bp, Heterodera glycines
tatcggcgcaacagaggttaccatcacagcacacacaccaaaacaattcattgctcgtgaacgatgacgctaccaacgcaaggctaagtcggatgaagcagcaaatggcacttggaaaactcgacaaagtcggcattcag

SEQ ID NO: 88085 - DNA, 602 bp, Heterodera glycines
  unsure (1)..(602): unsure at all n locations
taaaaggggacgcccatggagagcagcgacgccaacaataacatcaacaacagcgagggggaggnccgaaaataccaccaaaaacggcggagaggagggcgtcgagaagaagatcttgagcaaaggcgtcagcggggtggtcaaatggtttaacgtcatgaatggatacggcttcatttgccgtgatgacaccaacgacgacatttttgtgcacaattcggcaattacagcgaataatccatccaaaattcagcgatcattgggcgatggtgaaaaggttatgttcgacattgttgatggtgctaaagggccagaggcggccaacgtgactggtccggacggagtgcccgtgcaggggtccaaatatgctgcagatttgagccagcgtcgacgttttgcgggtccacgacggaattatttcttccgcggaaatcgaaaccgccgtccccggcatagcgaagaagcggcaggtggcgaagtgccggtgggcgaaaagaaagaaggcgcanaagaaaacaatggaaaagaggctaagaaggaagaggttgcaaaggacgccaacggaggacgtggcggtgggcagcgtccaggccggggcgttc

SEQ ID NO: 88086 - DNA, 724 bp, Heterodera glycines
ggaagaatgtgaacaggaatgtgaactccgtcgaggtgatgacatccgcttgcaaatcgcaattgaagagagcaagcgtgaattggctcgttcttcaagtctttcgtctccgtctggtggaattgaccctgtcgaaaaacagggcacctccaagtcgcacggagctttggatgatttgctttcattgggactggatgacgtgttcaggagtaatattccaaatgcgactgcgccgggtagttctgcacaaacacaacaacagccacctcaactgggcgttttcaacgacccctggtcgccacggccttccacaactattccaatggttgaaactgcgccgcctgtctccgctcaccagacaattattcaaaacgacccatgggcacctgcggcttcttcctcggatccaagctttgtgtcctttggttcttcgtcgacgactcgaacaataaatcccgatgggggccacgttctcggtcctctcatgcaggcatcttcaaccaaaaatgacccatgggcatcatttgaaacacaaagttttgctgcatccgaaccaacgaaacaatcatcggatgatttctttggaaacattggtgaacctgcacaaacgacgaaccaaccgacaagtcagggacagcaaagagccggtgtaaagacacccgagtcctttcttggagagaattctgctcttgtaatcttgatatctgcttggccttccaccatt

SEQ ID NO: 88087 - DNA, 512 bp, Heterodera glycines
tgtcgtgttcctgtcgctaactgtcctcccttttcccttttttatcctcatcgttgtcctgaaccaaaaatgctttatcctgcacaagctaacattgtcaaccgtctgctgtctcgtccgagtccatcctaccgttgcaccatggacacacttcgtcgagctgatcgacgattagtgttcagtagattcagacattggaagtcattcagcgaagagtctgaagcacttacatgctgtgctttttcgcccacagataatcatgcttttctgggaacatatgctggtgacattttcgtcttcaacattcacactggaacagtcgaaacgaattacaatgcacagcattccgcgatcaggacaattcagccatcgaaggaccggttgatgctaacatcgtcagcctatgtaaagccttattgtattctttggaaaatggacgaaaagggaatttccatccatgagcgcttgattgatttcaatgaggaagaatcggtcgaatttgctaatttgtc

SEQ ID NO: 88088 - DNA, 771 bp, Heterodera glycines
ctattattttttgattatttttaatgccgaataattttgtagttacatcgcattgtcggttattatcagggcatacgtccattgacaaatgatcaagccaagaagttgacccatcttatcctggcattttcaacccctgactctcaaggcaatttgagtccattgttttctgtgcttaaacaagcgctaaaagcgggtaaatccgctaatggtgcgctcaaagtgatgattgccattggaggaggtggctttgatccggccatatttacttcgttagcatcaaacagtggcacacgtaaaagctttattaataacattgtttcttatctgaaaaccaatgagctggacggttgcgacatcgactgggagttcccaacttctagtgacaaggcaatctttgtgacatttctgcgcgacttaaaaaaggcgatggcacccagcggcgctgtgcttagcatggcatcggcagcaagtgccttctatttggaccctggttacgatttgccaggcattgagagtgccgtcgatttcattaacgtgatgtgctatgactattatggaagctggaccaaaacatcgactgggccaaactcgccactgtttaagggtggcagtgccgacccatcggacacattgaacagcaattggacaatgaattatcacttaatgaaagtgtataatcgagcaaagctgaacatgggcgtgccattctacggaaaatcttggaccaatgttggagcaccactaaacggtgacggactttggcgtcag

SEQ ID NO: 88089 - DNA, 665 bp, Heterodera glycines
  unsure (1)..(665): unsure at all n locations
caaaatgggtgccatgccttgcggacaccggcacttccctgcttgctgggcccaaaaatgacattgaaaagattcagaaatacattggggcaattccgctcttccatggcgagtatatgatatcatgtgaacgtattcccacactgcccgatgtgacgatcaacatcggtggcaaggcgtacacgttgaagggcaaggactatgtgctgaaaatgaccagcatgggcaaaagcatatgcctttccggttttatgggcattgatttgccggaacgtgtcggagaactttggattcttggcgatgtgtttattggtcgttactacacggtgtttgatgtgggccaaagtcgtgttggttttgcgcaggccaaagacggaaatgaaattccaattgagcctcaagtgcgcgattgcgtaaggggaggcgcactttgcttcgatcattccaacggagttgacgattctgatcagcagatggttgagggcgattttgtaatgacggactgaagaaaattgattttatttatgcaattttcagttttatacaatttttaatccatgacgaagcctatgagtaaactatttttcctagtctgataattgtaatcaccatgtaattatcaatcgatgtgataaataaatcattatttttccaaaaaanaaaaa

SEQ ID NO: 88090 - DNA, 587 bp, Heterodera glycines
cccattcttacaagaacatgaagcatgtgttgaagcatctgattgtaattaaacgtggtgacgccatttgcccgtgaggatgagaccgaattcatgtacggatgacaagaaagactgtccaaggaacggcaaacaggacggaatcgcatctattgttggacaacacagaaccgataggtggtgcagacatactgatggcgagctctgttcttgccattgttctacaacaatttgctctttttcgtgctgctcgtctttctctcattcttcattctctactccattttgcccatcttaactgtcttgtctcgatgtatggcgctgcgggcattgttttgctattctcaacttcaaagaagtaaaatgatgactatcattccgatacatgtataatttgttattctggagtgaacaattaaagattgtggtgatttattttaaaaagaatagcatatacatcatttgaaaatgagttacattcgttcgttcaatggaatatagtctggggtatatcctactatttcgtaagacaaaaaatgataactggaagacgagattaatcgtttgaaagcactcataaattcaaa

SEQ ID NO: 88091 - DNA, 509 bp, Heterodera glycines
aaattggccgtgtgggcattgtcggacatcgcgaacggcacccgggttcctttgacattgtgcacatcaaagacaaagttgtgaagggcagtacaaactgtgcaaggttaagaagcaggcggtcggtgacaagcaagtgccgtacattgtcgcgcagacgcgcgaacaccattcgctacccggacccgcacatcaaggcccaatgtgcgatttgctgtggtccgacccggacgattggagctggacgacgagctcaactactccttcctgcagtttgacccgccggccgcgcgtcggggcgagccgcacgtgacacgccgtacgcccgactatttcctctaggcaaggaccagggaccgacatacaaccaccgactgactgaccgaccaccaagaatgatgatggtgtatttgatggataatggaatatattctttttttgttttttaattgaatacagcaacaaaacaaacaattaattgccaaaaaaaaaaaaaaaaaaaaaaaaaa

SEQ ID NO: 88092 - DNA, 754 bp, Heterodera glycines
  unsure (1)..(754): unsure at all n locations
accggagtcgtcactcccttggagcgttttggcgatatttgcaatgcatatgacgttcttttcctcgtggacaccgtcgcctccatttgtggtgcccctttccatgccgatgcgctgaaagttgattgtgtgtatgccgcaactcaaaaagtgttaaactgcccgcccgggttggctcccatttcattcagcgaaaaagcactggagaaaataacgaagcggaaaacgcgagtgccctcattttatttcgacgcgttagagttgggcaattattggggctgtttcgacgagccgagaagataccatcacacggcgcccatttcgttggtttatgcgctacgcgaaggtctttcagcagttgcccaggaaggaattgggcacatggtaaaccgacacaaaatcaatgcaaaacttttgtatgacgcttttgaccaattgggactggaattgtttgtccaaaaagagaataatcgtttgccatgtctcaccaccgtacgcgttcccgaaggtgtcgactggaaggcggtgcaagacaaactgatggcccaaggatttgaaattgccggcggattgggaccaacggcgggtaaaatatggcgcatcggaacattcggaatcaattcgaacccggaggacattgagtcacttaaacaagcattgaaaggagcactttacgaacaagaggaggagggacagtcggaccatttcaaggcggncatctgatgacagagggaaaaaatggcaaataaattaa

SEQ ID NO: 88093 - DNA, 129 bp, Heterodera glycines
tccgagctgtactctcatacaaagccgctttccccgaagcgtgcccttccattaggaaaatggaggccgaatgtatccggattttgtgcagtctttttcacggaggtgccaaaagttgtggagtggtta

SEQ ID NO: 88094 - DNA, 268 bp, Heterodera glycines
ccaaaacggaggggatcgcgataatttcggatattctccaaattacaccgattagcaatgctcggatggaacggacaacaatttgctcaagaatgcgactgtggcgcaggtgcagcaatcggctctcgtccctggcggtgtcttggcttcggctgtttagaattgatgctttttgcctttgagaattcgtacgaatgcaagacgaaattgacgatttgctgtaaaataaaaaattaactaaaaaaaaaaaaaaaaaaaaaaaaaaaaa

SEQ ID NO: 88095 - DNA, 189 bp, Heterodera glycines
cctacacagagttgaggcttcggatacccaccgctatacggatgaaatgacggacaaggaactcccacttctctgcgtgggggcgacggacgcattcagaagggtgtgaactgtccgacggacatactcgcccgacgtcaaacaacagcgacatttatggacctttcactgacctgcagaggatcttcc

SEQ ID NO: 88096 - DNA, 512 bp, Heterodera glycines
ttaaaagatccgaaaaaatgccagacattttcaaaatccttctgattgtgcttttggccgtcgtctcattccgtctctcggcttctactggtgacaaaaaaactgctaatgatgggagtggaaacaactcatcagctgggattggtacgaagatcaaaagaattgtcaccgctggactgctcttcacttccctggcgacgggtggggcggaagcgattgggcgaagcaatgctcagggaggaaatgccgccggattggtgccatcgcatgtgaccaatcgctcaatggctccaccacctcctcctgtgcaatttgaaatgggggcaaatcgattagaaaaaatgagggcacacctacgcgaacttgctgagaaaatgccggtcaatgaatcgaagcgtctgtcaccgagtggacccgacccacatcatcattagggccatggatggatctaacggaggaagaaagaatggatgtttagttttcaaattctattctatcctctcttatttatt

SEQ ID NO: 88097 - DNA, 526 bp, Heterodera glycines
ccgtcaccttcgccttattatccatcccgacatcatcaaaggctgcgcttttgacactatacgaaggagacgatgacaacaacaaatctccgtcaaagccgttcagttcatgcaccagcaccaatggataaccgtggcatggcaattttattgtcccatgaggaggaatagccacagggggaggagactgattggttgtggctctgttctccaaccattccaaatagttgtccaacaaacgaacaaatgctcccgcgccagccttccttcccggtgcgacggtaagcttggatttcaaatctctgaagttttcgaatgggcgattggcgagcacaaaagcaacgaatttgtcgttgaatttctcgcaagcgttcagttctgtcacatcagactcattcagaaattccacacatttctgctccaattcgcgcatcaatttcaattgacgggcggaaatttgttcgttcgcatcgctgtcctcactgtcgtaactgtctgcgcgcatatcgacgtctccgtcgttgga

SEQ ID NO: 88098 - DNA, 191 bp, Heterodera glycines
taattcctgcgtattattgcggctgctgttctctgtccgtgccatcatcaaatcaaatcaacgaaagctgagccatcggaagtgtgcacaaatcgactaccaaacgaaactgggcaccacaaatcaacaaaatcatcattatcatcagcagtaaaagtggtgcagaaggaaacgcatggaccaaatcggcg

SEQ ID NO: 88099 - DNA, 247 bp, Heterodera glycines
gggagcgaaactttgccgcgctggcagaaatacaatggccgaatcgaaccaattgcacgctgcctgcatggacacgagcccaccgcttaattatctgaacgtcacttcgcatgcactcatcgaatttgtgcacgacttcaacacgcgctacggcacgcgactcgcgtacacttttgacgccgggcccaactgctgtctgctgttcgaattggaaaccttcgacctgcttcgccatgcgttaccaaat

SEQ ID NO: 88100 - DNA, 237 bp, Heterodera glycines
ggcgcccctttacttgtatttgaaatacctccgccgatcattacaaaagctcaaaaataatcccccgtaaagcgaacacaaaatgagaatgacccaagacgcaaatttgagcactttttgtgcccttttcactttccttctgattgttgaaggaactttcggcatttttggcattggcagcagtgacaatgacacaacgacgacgacgacacagggagggggagggacatcgatgac

SEQ ID NO: 88101 - DNA, 494 bp, Heterodera glycines
gaatactaaactgacatacattttttttcctttctatccttaattttgaaaatttgaattgattgaaaataatcgtgtccattcattcccgcttttcccattaaaatgtcccaatttggcccggcattcgctgtcaatgccaacaatccgtacgctcacttcaaatgctgctgtgcaacatttaatatcaaagaccatgcccagttttgcggtgtgctcagtttcgcgctgttcctctgcctcgtgctcatttccatgatgcttttcgggtcgctttctctgttttacattttcgttggtgtcgtcgtttacattcttttgatgaaaactctctttggcgtcgtcaacaaattgtcccttctcttttacatctttttcgaggccattcaaattggcttttacttggctttgatgctttacataattgtaccgttgctttttcttgaaattccccgtcgcaactgtcggaatgttgagataacagtgaaatttgc

SEQ ID NO: 88102 - DNA, 509 bp, Heterodera glycines
attgaaaatggctggcaaattcatcggcggaagaatgccttttcgtcaatcactttgggctccttcctttctcacagtttctcccctttggccttttcccttacgtcccaattccgctttttcccatgctcgtgtcttcaattccgaattcccttcttctcattctccgaaattgcgctgtgttttgtcggctaataataagacaaattctcgggcccggcgttaccaccacccgcggcctcatctggtcatcttcgacaaggacggcactctgatctgttttcattctctgtgggtcccgtgggtgcgaagctttgcccaaaaagttgatgaggcgggcatcgatggcattgccccgaacgtgttccatgctctcggcttttgtccagttctcaaaaaggtaaagcgtggtcttctcgctgagggaacgatgcgccaaattctggaccgagttgtccacctattggttcaaaacggtctccaaaggcgcgagtcactgaacgtcgatg

SEQ ID NO: 88103 - DNA, 165 bp, Heterodera glycines
catttcgacctgaatgtcagctgcggtttcttcttcgcgtccgatggaagattggaaatctgagttagctatgccagacaaggaccttcgatacaaaacatctgatgtgactgcgactaagggcgttgaatttgaggaatttgggctcactcgcgaccctcttaa

SEQ ID NO: 88104 - DNA, 283 bp, Heterodera glycines
  unsure (1)..(283): unsure at all n locations
ggactagtgatagtccaattagagcattcttatattctagttttttttctgaagaaatgaagcagccagaaccaataattaacaaagaaaatcttcgcccagccaatcagccaagcaataaaatgcatgaaggaataaattattcggagttcgganaggaatggaacgaaaaacaatggaaccctttctgactttgccatggacctcccctcggaaagggaaattccgaaaatttttttgggcgcccccccaaatttttcttttcgcgggggggctaaaaaat

SEQ ID NO: 88105 - DNA, 254 bp, Heterodera glycines
gtgattcgggatacgttgtaaggactgctcgaacgagtggagattgagccgaaatcttcttccgacacaatggccttttaaagacaatactgctggatatttcccaacttggccactttggacaagggcggccaatacaaaactgtcaaacaccgccacactgtccaagtccacccaaattcttgtttgtttgaagaccgacttcgttgggtgatttactacgaattggtattcacttccaaagagttcatgcg

SEQ ID NO: 88106 - DNA, 90 bp, Heterodera glycines
ggacgcgcccctttcctttctttgaaatcctccgccgatcttccaaaagctcaaaatatcccccgtaaagcgaacacaaatgagatgacc

SEQ ID NO: 88107 - DNA, 310 bp, Heterodera glycines
gaggtaagaagaagaaaagaagtcgaaggaagaagagggcgaaataatgttcgacgagaagtcgaagtcggaggatgatgagttggaggagaagaagaagtagaaggataggatggaaggatgaaaagcggtggtgaagaaaacaaacggacggatcagagaaaaacccaaaaaaatgcacccctcccaagcccattttaatcatcatttgtgtacccctccaattcctcgtcccgccccaaatttcattagccaattgcccccatcaacctgtatcatcatcaccaacccaattcaaaattagccattg

SEQ ID NO: 88108 - DNA, 396 bp, Heterodera glycines
attgcagtgcgcgggagattcggcagggttgtggcagagttacgtcacgagatccgcattcagttcgcaaatgttgaacaactcacaaaacatcgaggaattgcggcataacactgagggctttgccaaagcgcttggcttttcgtcgactgcgcaccaccgaatttcttccaaaatggccgggagtccccaaactgtccgcgtctttgtcgacgaactttccaggcgctttcgtcccgtgtttttctcccgactcgaaggcgcttggaaaacgtatgccgaagaacaggaagaaagggtgatttccgatttggaagcctttgatctcttttacatttgccgtaaagaggcagaacataaccaaaatgttgactctcttgagctgatggaacattt

SEQ ID NO: 88109 - DNA, 626 bp, Heterodera glycines
ccgtcgatgttggagacgcgccgcacatgatgttgacgcgggcaaagcgtgccagcggcggccgatggaccacgcagcagatcatcgagtgcattttcgcaattttcatcccgcccgttgctgtgctgatccatggcggccacgaatgggtgctccatctgatcatcaacatcgtgctttggattctcggctggattcccggcaccatccacgccttctggtactgtttcttccgctagatcgatgaaggatgatgatcaacaccgatcgagacccccatcattgttgaagaaccggcccaagaaatgagaatcctgccgccttatttttccgatcattttatgctttttatacatcaaccacaaaatacaacaacaaatcgccaacatattttccatatttggataacaaaaaaaaagcccgatgatgatttcgatcagccccatcaattttttaattgtttttttctccaatttttaaatttgttcaaagaatttgcttgctttttcgcacctccctcgtcgcccccccccccactcatttatttggtttatatgcttttatagaaaattttttaatctcatttaatgaataaagttctacaccccaaaaaaaaaaaaaaaaaa

SEQ ID NO: 88110 - DNA, 771 bp, Heterodera glycines
  unsure (1)..(771): unsure at all n locations
gcangaaaatggagacgacaaaagcgcaattgctcggcattttctgggactttttctccgaggcagcaaaagcgaatttattatggaagagattgcgatttgcggaccagcaaattgtcgagttggtagaccaattttgcagaattgacaagcaatatttgttgtcacattcccaaataacactggcattacgaaatgtggataatgcaatggcattttgccaaaattggcttgttgcgtgtgctaaagcagcaaatgccatgcaaacgaccattgtgatggacgcattttcgcattggatttacagcggaagaccaccattaaatggggctattgaaattgttcatttttggattgaactgttcagcaaaagaacggcaacaaatgacatcagacgaatgtgccgatggcccgaaatcgataagaatcttttccggcgaatcggcattctctttgtcgaagccaatgaaaaatatgtactcaaattgaaaatattagaaaaaatcaaaggagtcagacaattgttggacgaaatttgtgccaatgtaaatcatttgtcattgacatgttgtgcacataattctttgcaaattgcgatggaccaatggaaaacgacggtttgcccaaatggccaatttcgatatttacttcaaccaaaaaacaaaaaaaacaaacaaagcgcagaaatggtgctgtaccaaaatcgacaattaccgccggcacatgcaaatcaacaattaagtacaaataaatgtgcgatttgtttgtcgg

SEQ ID NO: 88111 - DNA, 732 bp, Heterodera glycines
accgcaccgccggtgctcgaccttacagccctcgtcacggtgacgacgttcctcgtgccgagccatgcccatcgcgaccgtgtggtgacgatctcgtcgcctgaaaactcgaactttattcagtgcgcccctagctatgcattccgcaagacgggtgttcttgaaatcgccaacttcgagcctcgttgggagcaaatgctgtacacgcttttcctggcggaaggctggatcgtgaatgcccctgaccacgaaggtcccgagagcgctttctcggctggccgctttggtggtcacatggtgcttgactcgatgcgcgctgcgaacaactttaagccgctccaactctcgaagcgccctatgcacattggtcacggctactcgggtggctcgacgcccaacggctgggctgcgagtctgcacgagacgtacgccaacgagctgaacgtggtgggctggtcgctgggtggctcaatgactgacccgctgtacacgctcaactccctcgacggtaaacctacttcgtcgctggtggtggccggtgccattggcttgatggacgcctacagggacgaagtcggcaacctgctcgatgacgaggtctggaccgaagaaggtaagattgccgaaaaggtcatgcgcaactcgtgtgtctacgaagctgttatccgctactttggtgccacgttccagtcggagcgctacatcaagggtggtcgcaacctgtcctcgtgg

SEQ ID NO: 88112 - DNA, 600 bp, Heterodera glycines
caagaaattgtcactttaagaatgaatgtccaacctcctcctaccgccactcattcgcagccgacaattttgccgatgccaattcagaattggtcccatgaattgggcattgaatttggggacgtgctcatcgctgatttgctgcgtcgtatgtgcagtcccgatttttcctcgcctttggcgccctcagctcgttggcatgacatcccattcttcgagcagttccgcagcgatctccaattccaatggactctgctccgatcggtgctcgtcgggggcaatcgtgggaaattaaatgccaaactgttgtccatccttttttggactgtgtcggatcgcgaggaatggcaaaaacgaacggttgcccgactcatttatgcggcaaaagacgacaaagagctggccaacctggtctccctcgtcattgctgtgttgccccaactttgccaacaccgacaacagtcgtcgggtgaacttggtctgatgagtgctgccattttgcttgctttggccgatgcccgtcgctttggcaccgaatgggaccaatttgtgatggccaccgatgccagtggaagcaccgaccccaaaaatggcagcaaa

SEQ ID NO: 88113 - DNA, 176 bp, Heterodera glycines
ggagttgaaaattttttttataacaaaatgatgaacaaaatttataccaccattcatttcttattgcttttgactgttattgctaacaaatcgactaattgtgctacaaatgttcaaggaactcaaactgttaaaacagcagatgcaacctatgatgaagctggaaaaattttcgc

SEQ ID NO: 88114 - DNA, 640 bp, Heterodera glycines
  unsure (1)..(640): unsure at all n locations
actcttatgtgcgtcggagcagctgccggactgaccccatccactccagggcatcatccattgcgacatcgccgccagaaattgtctctactcgaacggcgtggtaaaaatctcggacttcggcatggcgcacagaggaccagtgaagaaaatggagcccaatgcgcgcgtccccgtcaaatggctgtcaccggaagcactcgccgagcgctgcttcaccgcgaagagcgacacgtgggcctacggagtgatgtgctgggagatcttcaccaacggagaagtgccgtactcacaaatggcgggaagcgacgtggcggtatcgctgatcaacggacagaggctcgacttcccaagagatgcaccgtcaaaatttgtcgagttcatcttgcagcacacttgggatgcggagacgagcggcagatactcaatggctgcggtccacgactggctgaagcgacacacgtaaggagcctagtggtgaacggattcaaagccatcagaagagccagccgaagcaaacgtcattgtgtgtgtgtatatatatgtgataaccctatgcttgttgtatttttacatattgcttactcattgttgtataactactattatgatatgtataaatgactgatgtcctgaanaa

SEQ ID NO: 88115 - DNA, 247 bp, Heterodera glycines
tgatgttaaaatgcgacgaattctgttgagattgaggagagctcaggaaatgccttaactgacaatgaaaaaaaaatagacaacaccgacaaatcggtgcggcacattgaaaaagattctggcatttcatccactaatacttccgtagcggtgtccggaatttcttccgacgatggacgatataatgtcagaaggaaaacaaacaccgcaaattcgcccacaaaaacgacaaacaacggaaacgcca

SEQ ID NO: 88116 - DNA, 370 bp, Heterodera glycines
tattttttggtgtgatttaaaagtttatttgagtaaaaaaaaaaagtgaaaaataaatgaaaatggtggagaaagagaacgacatcgctgccgctgtgccaaacaacgctgcaaacaacggtcatgttgaagctgtcgacccatcggcatcgaagagcgctaaggaggtgccgaacaacaccgagaagcatagtgccgaagatctaatggggttggcccgtctcttcctgaaggaatattacaccaagcttagcgaccttcctagcgaagctgggattttctacggcgatgactcgcattttgtccatgctgatgtggaggagacgggccgcgagaacattcaacgcgctatcggcaacatggggcttcg

SEQ ID NO: 88117 - DNA, 550 bp, Heterodera glycines
cctttgcttctgcttgcttcccctattcatctgctttgtgctgcctttctcctccccgactcggcttcttccagaagtgatcaaattgccgctgctgcgcttatatctcgctgcgtttccactccgacgaagggccgcttggctggtgaaagcctccacaaggcggaacgcgtgtacaggatctaccacaatatggagccggtctatctgctccctacatataccttgggactgcgtccgatcattacgaataggaatactttgcgctcattaccatcggctcttctccccaatagtttgaagttgacatggacaccgggtctgacaacctttgggtgccagacacaacgtgcaattccacttctcacccaaaaatgctactgatggtgtcaaatttcattttactgcagcgccaactgtgacgaatactgtagcggccaaagcagcaaagtgaccacgtgtgatcaaaatagcgaatctaacagcggcatagtcgagcacatatgagcagcataggaaaagcattccagattatgtacggcaccggatc

SEQ ID NO: 88118 - DNA, 257 bp, Heterodera glycines
taatttgcttttaaatacttaaaatgcgcgccgttctcttcctggccatggtttgcttggtgatggctgttattcttgagacagccaattcaaaggcagcgaaaaaagaaaataagaaaggagcagtcgcaacgtcagcaaaaggaaaagcggcgccaaaaggagcagcgaaaggaggaattaaaaaagacgcaaaatcaaagggaaaaggaaaaaaggacgccaaaggcaaaaaaaaaaaaaaaaaaaaaaaaaaa

SEQ ID NO: 88119 - DNA, 615 bp, Heterodera glycines
ttattctgctctttgagacatcattcgaaataagccaaattgttttttaatcgcccccaaaatgaaccgacgctggctgtgtaatgacgtttggatggacattctgccgttttttgaccgtcctcagctcggcctcaaattggcaatgctttcgccccgtttcgatgctcttgtgggcatccatttcgatggcaaaacggaattgacgctttggagaccaatcgcaattcgcaacagtgccgcagcagtgccagaattacatgtgtttttcgacggtgccaacaattccgtgccatttccattgcccgacgtccattcgccgccgatgccaaacaacattcgttttaaggaccttcgaattaattgcattgaccattccgtgatcgcatttcttcgtgccaatcaactcattttccagaagggcaccaatttgcgtctgtcggttccttttggtccattcaacattgatgatgtgcagccaattttggatgattttgcgcgtcaaatttggcccatttttgcgtcaaccattcgccatttttggtttcccgattgccgtattttggacacattagcttcatcttctttcgccgacaattctcaccgatgatcaga

SEQ ID NO: 88120 - DNA, 132 bp, Heterodera glycines
gtgattcgaatttgctggtcggaatgaatggcacaacggaggacaaaacggcgcccggggccaatgccaatggggcatttttgtgctgtaaggcaacccaaggaaccgcaacacttttcatcgtcggcgtgg

SEQ ID NO: 88121 - DNA, 434 bp, Heterodera glycines
  unsure (1)..(434): unsure at all n locations
gtgatggacatgatgatgagtatggattcgccgcttgggattgacaagaccgacaaaatggaacgtgaggaggacgaatttgacgctctctcgtcattggaacgcgacgtgcagagacgaacacaacaggcgcaacagacactgcgtcaacgccagtgggtggtgcaacagcagacgccgagcgcaacgacgggacaccattgaaatacctaataaagcaatgttgctgcatacaaagcattcgtcattataattcactgtttattttctgagaaattcatctttaaaaagtaatttgcgtaaaaaaaaaaaaaaaaaaaaaaaaaaaaaaaaaaaaaaaaaaaaaaaaaaaaaaaaaaaaaaaaaaaaaaaaaaaaaaaaaaaaaaaaaaaaaaaaaaaaaaaaaaaaaaaaaaaaaaaaaaaaaaaaaaang

SEQ ID NO: 88122 - DNA, 781 bp, Heterodera glycines
gaggggaaagtgtgcgaaccaattaaccaagttgaggcgctaactgcggaaaagagacgaatggagaagacactccaaacgacgagcagagaacgcgaagaattggctcaggaaaacaagaaattggcagcaaaactgatgaacagaaaggcacaggatcgaataatcggagagcgagagaggggacttgaggaagagctgagacaggaaagactcaaaagcgagtccgccaatgcgcggatccgcgagttggagcagcgcatcgaatgcattcaggacatgaacagagacattgcagttgaaatatcaaacgcaaattcacctctgctcatcacaatttcttctttggaagagaaactgcttggattggagcgtgaaaatgacattttgacgcgttcgacgagacaaatgtccgccgaattgggggcaatgaaacggaggcacgaagccgaaatgggaacaatcgaacggagtttggaagaagaaaaacaacaaaatgcacaaaaaacggaggaattggcgaaggcgttcagcgaaagagcgaatattcaaactcgtatagaaaaactcgaagacgaattgttgcagtcgaaaagagagcactcggaaagggtaaaccgaatggagaagagaatggaacaattggagacagatatccaagcgaagaggaatgagttaaccgaatcgcaacgtaaaaactgcgaattccaacagaaaatcattgcatcgactgtggagcgaagaaaccatgccaattcactactcattgtgaacccattgg

SEQ ID NO: 88123 - DNA, 165 bp, Heterodera glycines
acaactccgaaaaaatctctgacgcctacgaaagcttcaaaatcgaaatcgctgaagacggccaagccgaaggcaatgaaggcctctaagccaaagttgccaaaagcttccaagcccaagtctccgaaggtttccaaatcgaaagctccgaaggtcaaaactgct

SEQ ID NO: 88124 - DNA, 203 bp, Heterodera glycines
ctccgacgttcgctactgattccattctgaccggactgaataaggaggaactgctccaattggtgcccaagtttgtgctctagcaaaaaacgcaattcggtgcccgcatttttaaaaaacttttgttcggtcggcacattgaaaacggcgagccattgatcacagctcaagaacttctgttggagttgcacagaatacggcca

SEQ ID NO: 88125 - DNA, 212 bp, Heterodera glycines
ttgataaaaattacatccctcaaattacctcaacatcctcaccaaccatgaacattctgctgaagtctgtcctattcatctctcttctgtcactgtttggtgattgcatgaaaaactcagatcaaattggagtcaaaagaaaatcagcaggaataagaattgaggaaccaaatgatgtaaaaggcaaaggaaaagtcgtcgaaacaagcata

SEQ ID NO: 88126 - DNA, 97 bp, Heterodera glycines
tggacgtaattgtcaaacactcagcttgttggccgttttctcgagaatgatcgtgggcctcaagcaatggctgagtttcttgctttgtttgaccggt

SEQ ID NO: 88127 - DNA, 646 bp, Heterodera glycines
gtggacgtattgtaaaacactaagcttgttggccgttttctcgagaatgatcgtgggcctcaagcaatggctgagtttcttgctttgtttgaccggtccattcaggaaacgacgactgaccaattgagcgagccggcgagggaaaaagtgcgatgtttgttcaatttgcgcgagaacaaatggggcgttgtcgcggaaccaaatgtcggcgatggtccgctgaccactgcttcgacttcggtgggtatcattggcccggacgatgttccgttaacggaggacgaatgcgcctttatggaagaaaacttggacaattttgtcgacaattctcccggcgaatctcaatgcttgaatgcatttgacgaggacaacgttgaggacgacttcgagaagttcctacaggcaacggccattcgtgctgctgagaaggcgttggaaaaggtgtccattgacgaggatgacgacgcctcttccattgtgtcatcgcacaaattctcgacaagcaaatgacgaaaagtggagaaagacatcggaacacaaagagaaggaagaaagaaaaggaaaaaagagctgacaatgagccagtcaaaaaagtaaactccgaaaattcgtttccgcacctccgcttcatgttttaaattaaaat

SEQ ID NO: 88128 - DNA, 187 bp, Heterodera glycines
aaggacctttaccgcagcaaaggagatacataatggaagatgtacaacatttctcagctcctcttcaacaaatacggcgttggcttttggcaccccggcgccggcattatccaccaagttatcctggaacactacgcttttcccggtctgttgctaattggcacggactcgcacacgccaaaacgga

SEQ ID NO: 88129 - DNA, 283 bp, Heterodera glycines
cagccggtgcacaaaattttgacactgcgaaccgccgccaatccgagcttaaaaacaaacaaatgcgccattgtgcatcgttctgtcgacgctgcattgaattggctcaactacgacgagcacaacccgttcgtgctgtgctcgcgctccttcgtgccgctgtactggggcaagccgcagaccgtgttccttctgctgcgcccacatttgccggctctgtttgcggtgtgtgcgaagtggcggagattggccgagaagcgtcgtcggatttgatgatttctaa

SEQ ID NO: 88130 - DNA, 295 bp, Heterodera glycines
  unsure (1)..(295): unsure at all n locations
actaaatccgaagaaatccctccaaaatgtcttcttccccgtccgtctctgtgctcgccatcgtcgcaattgtctgtttgatgtgccaatgttgcttttcggcaccgcatccgtgctgtcccggcagtcaaaaagtggtttcacttatgtccaattacgttggcacttttgccaattccatttccaagtcatcgctttgttcggatgcccaaaatgttgcggacgcgttgaaaggccaactgatcggctgctcgaaaggcggcgatcgaactcttttggccganatcgaagcatc

SEQ ID NO: 88131 - DNA, 592 bp, Heterodera glycines
atactgaagaaattcccgtcacttacggatgcgtttaagaagaagaggggcaacatactcaatttcgaggaagaggaatttgacgagatcatcagcaatggcaccagcaagcgcgacaacagtccgtacaccgaccacgactacgcaggcacgcgccaattggcgacggcgaagggagcgaccggcaaacaccaacggcagaagggcggcggagggacggcgaaagagccgaaaaagaaaacggcacttgtcaatgggaccgattcggtggtccgttcatcggcacggccgcaccgtccgaccaaacgttttgtagaggaaacaaacgaatcattcattcgtgggacttcgaaagtgcgccgaacatcgccacgcaaacatggcaagaaatcgactgcggagggaggaagcgaaggggaagaatcggaggatgacgggaaggagtacagcgtggaaaaagtgttcaagaagcgtgtgaagggtggaaaaatggaatactttgtcaaatgggctgggtatgacgacggttggaacacttgggaaccgcgtaagagcttgaaacatttggaagtgttcaagcagtacgagaagg

SEQ ID NO: 88132 - DNA, 691 bp, Heterodera glycines
  unsure (1)..(691): unsure at all n locations
tgggatttctcccgcagtattcttattttcacatacacgtcacagccgcagcatcgttctgcttcatcggtaatcgtcacgcaccatgaggaagttcgcctacttcaaactgtgccaagccgtgctcacttctgtttttctgtggcaaattctctcaacgcaccaattctgtggcgagtttgacgagcctacggccttcttcaactctgcagtctcctccagccattgcgaacagttcacgctcatcggaatggactccaccactggcgaatacggggccatgcccgacaagcagaagtggcacatgcaactcatggcgagcagcggcagtggccaaccaattgatgaacagcaacagaatcacatggacgagttttcgtcaaaattgccgactgttggccgtcactgtattccgattgcgttttctctcgtcaagccctgggttcgcgacaacaaaagtcatctgcagaaggtcgctgatttgtttgccattcaattgctctgcggattgctgtctctgtttgtcattgccatgcacgttttggaccaaccgcgctcttggggatatgagagcatcgactacgaacggaccactttttgtgctgtgctctggtgctgtcctgccctggtttcatctgttttgctgctncactggacctcctactggcattgcaccaattttcgcgcagat

SEQ ID NO: 88133 - DNA, 292 bp, Heterodera glycines
atcccaaaaactgataaaaaaaatggcgttcctctcccgtctctccatccttccaaattcgccaatttcgctgcttgcagtttctttggccgttttggctttcgtcgctttggcatcggccaatccgccgacggcacgcgaaacggcgccaaatgcacagcaaaacaatgccaattcagtggcaactggggaaattgcgaaaaatattgcggaaaagatggagcggatgaatgagttcattaattattttagggcgaagaagttcatcgatgcacataatttggcatttgag

SEQ ID NO: 88134 - DNA, 606 bp, Heterodera glycines
ccaaaattgactcgccgtttctaaaacaaaagctagctaaaattgatgaaatcgtcctgagccttgttctcccatttcaattttgtgatactttgacgcgtttctgtcaagggatgaccatctataacctctatttcttcaaccggcacggcgtttgtttggcctacaaagaatggtgccgtgaaaaaaagtcgggcatttcaccggacgaagagcttaaactcgtaaatggcatgttgctttcgttgcgttctttctcgcataaattggcaactcgggcggaccaagtgccaatgatttcctgcttccgaacttcgtcctacaaaatgaattacatggagacggccactggacttaaaatgatattgaacactgacccggatgccgtttcaattcccgaactgttacagtccattttttgtgtatttgttgagactgttctaaaaaacccttttgtggacacatccaaaagaattgactcagaactgttcaacaaaagggtagacgaattggtgcgggctcatttctgtttcacataaatatcaaaacgacgtcacacaaatttcttttatttccatttgacttttttctgcataaaatttcgtc

SEQ ID NO: 88135 - DNA, 564 bp, Heterodera glycines
catgtgaagggtgcccatgcgattcgtttgacccatccccgtcggaatctgtgctaacgtggcctttcatcctcataactttgtgggcgattacttctaccaacaatcccgtaaagagtcggttgacgtgggtcagttggcggaacgcaccacatggattctgcgcatgttggagaccaaccgcgtggtgcacgcacgaccaaaatatatcattgtgttgcgcgacggactgtcagaggcgcaattttccatggccattgatgaggagatgggtgctcttaaaatgggctgcatggattatgacgagagttacaagccaaagtttatgtttgttgtgggagccaagcgccatttcaaaaaattcttcatggttcacgatggtactgttgtcaatctgacgcccgggtcggtgattaacgagaaaatggttcggccggacatacccgagtttttcatgcaatcacactatccaaaaaaggggactggcaagccagtggagtacagtgtgttggtggacgaaatcggcatgacgcaggatgaacttcacggctttctgaatgcatt

SEQ ID NO: 88136 - DNA, 640 bp, Heterodera glycines
gcacaaaaggacatgcgctgttgtcacattacggtggtgggcatactgctaaggctgaaaaagaactgctcaaaatttacccggaatgccattggatcgatgccgatccgtcggatgaaatcaatgccgatatgactgaatcaatcggtggcacttttgttgatggcccaattggtgctgaggacggccaataaacaaccagtgatctcatggggagcaacgattactgagctgaaattacaaaaacaaatagggatcattgatttcttgaacaatcacacaaattggcaccaccatcccgtggatttgttgctaatggacattgagggagcagagtttcccatagttgaactgtttgcttatcactttgagcgtttcaccggctcaatttgtcagataaatatggaggtgcacgacccgaacactctgatcgccaattacacccaccagcaattcttccaatcatttgacactttggtccgatctggccaatttgctctaatgaacaccgatatgtatactggcagatgtaccactgcatatgtttctcagaatgttctttgtgaatgtggtggacgaaaagtgtacaaagaaattcctgtgctgataacaaattgaaattttccgaattttttcaatt

SEQ ID NO: 88137 - DNA, 646 bp, Heterodera glycines
catttccgaagcatttcccatgaccgattcaatcggcggcatttgccgaagtcacctgtgccgcagtcagtcggccacaaatgtgcccgaaagttgggccgaccgcccgtatccgaagatgacgcgggtccattccacgacggacatcgcacagcgatacgcggagatcaattcttccacgagatactggcccaaaaacaagccctattactggccgatgaccagcaacttgtgcaacatcgtctccaattacaacttttacccattgttccgttcttattggccttcctatcgcagttatttgttggacaccaattggtacaatcgccgcttcgaccgtttccaatttttgccacccgattcttattatagctattggccaatgtcctgcagttatcactattggtaccattatccatatttcaaacgatggtatctcggaggcctcggtggagtttcgcaattccacaaacaatgaaagtgaaaatggatgtatagcacagaaacacaatgacgcgtaccgtaccctttaccgtagttcgcttttctttgacgaaacgaatccctgcaattattgtgacatatttaagcagttttattactttcacagtttagtgtttaaaatcatttttcacaagaaaaaaag

SEQ ID NO: 88138 - DNA, 713 bp, Heterodera glycines
tggatttcgtttctttgattttgaagaaaatgttctttccgcgtgcccctggcccaactctttcgcaattcgtatattcatttatttttcctattttgattttccattgctttgggcgtagtttcattagattatttgcataaacttttcgttaacaattttaatgctacttaagttaatttttcaaagaaattttaggaaggaagggactgatgctgcgaaaaattgtcaacaccaataaattttttgtccaaaaaacaattttttgcttattatttttcaaattttaaaaattttggtacttgttgattatttatgcggagattttaaaaaaatatttttttttgtaatattaatcgggttttcaaagggtttttcttattagttgagaatttgtttagacttatttatcagcaaaacatttaaaaaagagagcaaaattataagataaaactgataaaaacaactgaaaaagcataatggtcagagacgaaaattaacgccccaattgtgtgtaaatgtttatttattgagctgatccgttccgctgcatttccttttatggactgaaagtgaattgctgctacttgagctgcttgaatatgtacgtctcaactcttcttcctgatacggctgttgttctccgtttttcatggccgtaaaaataaatttttttaaatataatttaattaatttttattaccttccaacga

SEQ ID NO: 88139 - DNA, 138 bp, Heterodera glycines
  unsure (1)..(138): unsure at all n locations
tacgccgccttggaacgngcgcctccacaaaatcatggagtaccttctcgaatgtatggacaaacagaatggagacctaacccaaatggttgtcaacgaatttcacaatccgacggtggcggagcctttgccggcgaa

SEQ ID NO: 88140 - DNA, 586 bp, Heterodera glycines
gtggcaaaaagtgccgcggaaatggtgttggcggatgacaatttctaacaattgtggcagcggtggaggaaggccgtgccatttacaacaacatgaaacaattcattcgctatctcatctcgtcaaacattggtgaagtcgtctccattttccttgtcgctgcgcttggcattcccgaagctctgatccccgtccaattgctttgggtcaatttggtcaccgatggtcttcccgtcactgcgctcggcttcaatccgcccgacttggacattatggaccgactgccgcgttccgcctccgaatcgctcatttccaaatggcttttcttcagatacatggcaatcggaacttacgtcggcgtcgccactgttgccgcttcgatgtggtggtttttgatttacgaggacggcccgcaagtgtcttattaccagctgacccattggatgcgctgtgaaattgagccggagaactttgaggatttggactgtgccgtttttgttacaaccatccaaacacaatggcattgtcagtgctcgtcacaatcgaaatgctgaatgcgatcaacagtttgtccggagaatcagtc

SEQ ID NO: 88141 - DNA, 410 bp, Heterodera glycines
atcctctcccctctacatctcttgccaagcggtgtccgaagatgttttggtgagcaaactgagcggagtcgcgcgattagaccaattaatggaggaattgattctcgaggacaatgacccgaaggaacccgaaccgcctttagccgcctcctcttcaaaaaatgccgattccgtgggaacgtacgatgaacgaagccatgcagaaccaccatcagcagaaacagatttgtcaatcatcgctccgaacatcggtcgattcctcgtcggtagtctcccattcgccatgggttccaaactttcccattgctgttgatgaacatcgctttccgattgtgctggatgccgcactgcaccaccaacggaatcaccatttgccctcgtcgacttcgccctcggccaattcccggtca

SEQ ID NO: 88142 - DNA, 711 bp, Heterodera glycines
tttactttactttcctccttttccgggcaacgacgcagcagtcgaaacaaccgacgcagaagtgggcgcaacggcaccagtcaaacggcacagtgacaacaccattatttatcatcagcaacagcaacagcagcgacgcatgggccaaatcaatctctgcgacgacgtttggttggacacattggcatggatcaatcgtggagaagtcggcatgaagttcgcgctggtcaatgctcggttcaacactttggtggacaggcatttcgagcagaggaagtggtgctttggcgagtttcacatctgtgagcggatgacggaagaatcgggcgcagaaatcatgacatcgatcgacggctccgacttcagcacgttgccattgcccaccactccgctgccggacagtgtcgtcggcttccaatcaatctccatttggtacatcaacgaagaggtcatcaattttctgtgcacaattcgccgtctcctcgccgaagacattgcgctggaattttccacttacttcacagaatatcgcagttggaaagtgatggcacgacacatttggccgctgttgcgggatgggatcagcactttgttcctgaagaagtgtgacttggccatgctccgtaaacacgtgtcgcccaccgtgctgttcgactgtgccggcctgcaccgaatccacacgcaaatgctgcccgagtgtccgtctgctga

SEQ ID NO: 88143 - DNA, 503 bp, Heterodera glycines
atttttcttacattaaagctctgctgaataatttattttgtcgtcacattggcaatctttgggttacgctccaaaatatctttgcttcatgtttgatgtgtccattgatcttgtttggtttgccgtcggcgaagcgatcatttctctgcatccgttgacaaatgctctgatcagctctgttccttcttcggccttatcgcgaggcgttgaaaccaatgctgccgtcgttcgcccaccgaattccgctgatgctctgttccaactcccagcggagtacgacaacagccaaccgaatcgtctactacagtacaggaccaacgaccatcgacgacttggctatttttggaggagtggccaatcgcgacgacactccgccaggtccattgtgacaacgaaacgctatgccttgccacaaatactaacaaaagtgccatcatatgtatcacatcatttcattaattagtcaatatgtttcttcctttcatcgaaaaaaacaagtttat

SEQ ID NO: 88144 - DNA, 773 bp, Heterodera glycines
cattctttctccctaacattttccctggtcattttgttgctgcaaatgccttccgaaatgcgctttatctctgccgattgttggcttttggtgttcgatttccttgcgccttctcaacttggcctcggaattgcactgatcagccgtcgatttgacttctacgttgatgaacacttcaagacacgcaaatggatgttgaacaaacaattgctaattacatgggacattgaagaaaatggcacgaagaaaatgcaaattatcgatgccgacagaaaagaaacattgccaatcccgcaaaagccgttgccgaacaaagtgatcggattcagcggacgcattcagatcatttacatcgatcaaaatgtgctcacttttctcggccattttcaccgttttttcgccacttctgcaatggatttggacattgtcattgaaaatggtcgcattttggaatttgttttgctcaacatttggccaatgttccgtgattcaattcgtcgcttgtttttgaacgccatcgcttttcgctgtttgcgtcaattggcgccgtcaatgctcaccgattgtccatccctttgcgctgtcgtcttcaatgacggcatagtgtccgaatttccgatcgatgacagtgccatggcgtcggatgttcaagtgctggcaaaatggctgttcacgcctcatccggacggtgtgccgaagtggctcaaatgctctgttaattcatcggtggaacaatggtcatcaacgattgaacaattcaaatcggcattttc

SEQ ID NO: 88145 - DNA, 696 bp, Heterodera glycines
  unsure (1)..(696): unsure at all n locations
gaccttttgcgaaatgagtgtatttactgcgagaaaacttttgccgaccgaaacgtattaatggaacacatgcgaaagaagaatcaccgagaagtgaacccgaagaataattattacgacaagttctacatcatcaactacttggaattgggcaagcgttggctggacgttttggctgaggactttgaggacacaatgccaacatttgtcgactctgacgatgaggaggaggattcgtggcacgagtggcaggaggacaatgcggacgagggggacctttttgcggtgtgtcttttctgccctcacgcacgggaggaactcgaggaaacgatcaaacacatgaatgagactcacaaattcgaccttatcggttacatccacgacaattccatggacacatacgaccggatgaaattcgtcaacttcatccgaaaacgaactttcaacactcggactaaagaccaacagacaatggaatccaaatgcgttgaaattcccgacaaagagcaatgggacaatgaggagaatttggtgccgctgtttgggaatgaccatttgctttggatgttggagagttggcatttggagcacgaaatggagcanatcggaaaacanaaggcgactgaatgtgatgaaccgatagagaaggctgtcactgaaagtgttgtcgattcaccaaaaattaacatgggcaca

SEQ ID NO: 88146 - DNA, 511 bp, Heterodera glycines
agaaaaacatttgacttcgatggagcctataatcccccgagaacaagctcaatgtctgcaaaatgtcttcaaacatttcgcacactttgaaattaatagcgcaaccaaagattggactcaggaagaattgcgtctttacaaacgcttgtttctcggcctgcggctttgcactttgacttttcctcctcaattgttacgcaatttgcaaattcttttcaaatgcatccgccaattttgtttcaatgccaaattaatgcgagaaaattgttggtcagcaaatttaaggatctcaaatgaagagaattcactctcaatctgtgaaattaatgaccagcgcattgagagagttcttcgagaattattcgttttattttttccgcaaaaaaatttggaatgtccaaaatcattttcgctgtttaaacttttggtggaacatgttacgccgtgtcttatccaaaccccaaaatggttggccgatgaagtgcaaaaagaaatgaaagatttgttaata

SEQ ID NO: 88147 - DNA, 471 bp, Heterodera glycines
ttccgccgtgcccgccattgtggcatcggtgaccgtccgttgtgtaggcgtcgttgagcatgaggaaaaaattccgagcgttatagtttgtgtcgactcgttcatccgtggtcggggcattgtccgtttacaattgctcatcacaatttggcgcacttatcggcgatacgttcaccatcattcagcccaatctgattcgattccgatggaaagattggggatgggacgacgactacaggaagatgaaggagtgcatcaaaagtacagatggacgaggagcaggagttgacaaaccatccgttgttgttgctgtttctggtgacggatacgacgccgaagccaaaagtgctgctgatgttgccaattcatccgcggaaaatcaccacaatgacgaccactatgccgagcactgtctgttgatgatccgtgccctcaatccctcgcgccaactgctgaagaatgggacgcctg

SEQ ID NO: 88148 - DNA, 255 bp, Heterodera glycines
  unsure (1)..(255): unsure at all n locations
ctgaagaagcgcaatgtcaaacgcagctgcgaattncggaaatggcaatggaccccaaaagtgcctcgttgatgaagaaaatgtcggaccgcagctatcctcagacagcgcagccgaacatccgccttcttatcgtcgtgccgcgccgccccgctcgccctcgaggaatttccaaaagcgtttgtcgtcgacgcgtccaacacctgcggcgtcaccgacgcgcaaaaagtcattgtccgccattagtgcctcagg

SEQ ID NO: 88149 - DNA, 616 bp, Heterodera glycines
gtaattaaccccagttaattacacatataattaactccttttatcgtgcattcctccgccgttctttcgtcctttccctttcccttttttctctctttttcactctctcttctgtccctttcccttccccaatcattcaattgcctgccattcttctcacattcattcattgttttttgactgatgaaggtcatcttttcgtcacacagtagaagtgggaaaaaaatttgccacccctcctttgtcggcacatgccattggctgctgcacggcaccgaaacggtgccaaagacggcggagcagcgcacctttacactccgttgtaggcacgtcgtgttggcatgcggacgacaacagcccaaactgttaggggtgcccggcgagtcggccgccgctgctgacggtcgcgtggtgtacagtctcagctcgttgaagcagcgattggaggagacagagggcggcgattcgggcgcgacagagacggcaacgacaatggcaccggcgaccgaagcgacggcgaccacaatggcacgagcgactattgccgccactgcggagacggaagaagtgtccggcgactgtcccgtggtggtggtcggcgacggcatttccgccg

SEQ ID NO: 88150 - DNA, 588 bp, Heterodera glycines
ttttatgctttttctttagccgtcgtccgtttctctgatgacgctctctaactctgaacaccgtcggccatgtccgaaaccccttgacgacttttactgttttaacggagggaaatgttctgtggaatttgaaggacaacgaattgttaacacttccttaagttgtcggtgtccacaaaactttcacggttatcgctgtctgcattcgttcgactcgcatattttcggattcagcaaagtgaacaatggagtggaaagcaaagcaattcccaccattgctgtgatactctttctggtgatcgtcatcttcatttggtgtctgttgttgcatcggaggagtgtgagttcctctgcgcggactttcctcaacaacagacaaacgtccgcctcccagtctcggttcgttcaaccgtcggtcgtctaatgggaagggtgacaccgtcgaacaccaacagacactgaatgccatcatcccaacgactaaatataactgacctaatgcaaataacctgcctgtaccattcctaactattattagcatgttcttttgtacttgataatagctctttgaaaatgaagtttgtcaca

SEQ ID NO: 88151 - DNA, 615 bp, Heterodera glycines
cattgggctgacaataaagcgcaacaatgtcttctgacgaatcgacgacttcttctgccagtgttgtgagcgttcagctgcgtgaagtgcccatcaaagacttcaaggacgtgcttccggtgctgcagaaaacgctcaacgaattggaacatccgttcatcaagaaggccgaagaaataagcggaatggaacgtgagaagctcttctacatcacttcctctcttgtgctgctcgtgttgatgctctgccctggcaatatgcttctctctactcttatcactgtggcctacccaatgtacgcgagcttgttgaccctcaacactcaaaacacatcggaatacacccagtggctcgtttattggtgcgtgttcgccgagttttgccagttcgactatctctttggctctatcaatggccttctgctgctgtacgtgcctctgaagaccgtctttctgctctacttggcccttccgcaaacttatggcgctcacaacttgtacgtgaagcatatccgcaaagtgcttgccgtgacgaacgtattggacaagatgaagaagatgttctgatcgagcagataatgtatcactgtgtaatgtctaggatgattctttgttg

SEQ ID NO: 88152 - DNA, 659 bp, Heterodera glycines
tattttgttgctgcaaatgtcttcagaaaatgaaatctttatctgcagcgattgttggcttttggtgttcgattttcttgcgccttcccaacttggccttggaattgcactgatcagccgccgctttgacttctacgtggatgaacacttcaagacacgcaaatggaaattgaacaagccatttcttattcaatgggacactcaagaaaatgggaccaagcaaatgcaaattgtcaattctgatgatggaagcccgctgccaattccacaaaatctgttgcccaacaaagtcatcggattcaaatacattgagatcatttacattgatcaaaatgtcatcgcatttctgcgccgttttcaccgttttttcgccgtttgctcaacggatttgttcattatcactgaaaatgatcgaattttggactttgttttgctcaacatttggccaatgtttcgccattctatgcatctgatgattttcaacactatcgtttttcgccgtctgcgccaattggccccgtcattgctcagcgattgtccatccattcgcattgtctctttccttgatgccattttccccgcttttccgcccgatgaaagtgccaatgcgtcggatggccaagcggtgaccaaatggctgttgacgcctcgtccggatg

SEQ ID NO: 88153 - DNA, 179 bp, Heterodera glycines
ggctacggaaacccttgatgacagcgccacaataactgccttcgatgcggccggcactgacaccgacagacccctggtcgcactaccgaacagcctggtccgtgctcggccgcacactatcatatgactactctcagtatagtggtaacgggacacatggccgaggggctgattgaaga

SEQ ID NO: 88154 - DNA, 744 bp, Heterodera glycines
tagcttcttggcaaaatatgccaccaaacgaacgcgtagtccgtcgcccaatttaactaatcggctaacaaacccgtcgtctgtgccaatcaaacagcgaaaacaggcggaggatgcaacaaaattattaccgaaaaagatggttgtttcacaatcgaaagaaaggatcgaaccacatggttttaaagaacgtgccaaagtcgagacattgtcaaaggaaaccatcaaaactgaaacctcaccgaaaaaggacctgttttacattcccaaaagaaagccgttacagggcgctccatcaatctcaccggcttcaactgctacttctactcccaagacaatttcgccacccatcgtccgtcctccttctgtggaaagcaccctccaacacagttcttcatgctcaccggaagactcatttgggtcaatgactattccaacgaaaccaacaagggactggtctcgggaatttacaatgatcctaaaccaggatgaggccaaacgttatcacaatattttcaaaaatgaatatgcagaatatcgacgctgttatgatgatttaacgcacgtagcccaagatttccttgcacttaagtcaacaatggacaaagcaaacgatgccatagaatgtcaaatggtcgtaaaacgtattcgcgagaagtttacaagcctacagaatgaccaacagttcatgttgaagcgacagcgacacactgatcttcatgcaaaattgaacgccatcaaaaa

SEQ ID NO: 88155 - DNA, 201 bp, Heterodera glycines
  unsure (1)..(201): unsure at all n locations
attccttcctatgtgaaggcgtgtaagaaatatgacccgaattgggagcccaaattcgtctattgcatcgtcgacaagngaatcacaacaaacgtttcttcgttaagggggcagcaacaagtcgagaacactgctccaggggcggttattgattcgaaagtggtacgcgtcgacatacacgagttttggatgcagtcacat

SEQ ID NO: 88156 - DNA, 304 bp, Heterodera glycines
ccagggaggaaatcccgaggaaaatattatctgtgcggtgccggaggactgccgacatcgggaatgctgaccggatcactgaatttgaaacgcaagaccatcgctagaaaattcgcggaggaaacccgacagctttatgaggggaaatgatagcgttgctaattcccgactgctatttcgatctgatcctaccttgaacatcactataaccatttgcattgcgccgtcaaaggcatcatcatgagctctaaccccccaattatacataattcatatttggtctgaaatgactggtcattctagt

SEQ ID NO: 88157 - DNA, 336 bp, Heterodera glycines
caaaaactgataaaaaagaaatggcgttcctctcccgtctctccatccttccaaattcgccaatttcgctgcttgcagtttctttggccgttttggctttcgtcgctttggcatcggccaatccgccgacggcacgcgaaacggcgccaaatgcacagcaaaacaatgccaattcagtggcaactggggaaattgcgaaaaatattgcggaaaagatggagcggatgaatgagttcattaaggcgaggaagttcatcgatgcacataatttggcatttgagaacggcgaagtgtcgttcaaagttgcgccaaaccatctgatgcattatacaccct

SEQ ID NO: 88158 - DNA, 355 bp, Heterodera glycines
aactttgacgcgctaaattgcgcccgtggagacggagagctaaatgcatgttgccctcatcaaatgacattgccgtggagaagacgccacagctggccgcggagttcgaccagtccggactgaaacacgtggaaacgacggtgaagaccaacatcgaagtgattgacaaggcggaacaaaactaagccaatggcgtgacataaacaacagatgttttgaagacggatttatgacgattatttttggtgtcttgatttgctttctattttgtaccttctttatttggtgagctttacaaattccagagattatgagataaatcgcgttaattccaaaaaaaaaaaaaaaaaaaaaa

SEQ ID NO: 88159 - DNA, 560 bp, Heterodera glycines
acaaagggactgtcttcgtgcctggaacatttccaccaataaacggattcgcatcgtcgtggtgacttcgggggtgcctgacgaaacgacataaaacaaatcgatgatgcattgctgcgcatgagaagccattccgttcgccgacaacaccgtccgagtgcgctattttcgattcgaatttcctttaatgcgtgggcacatttcgtcggcactggtgacctgttcactgatatgttgatggcatggctcgaggaaagcagggagcgatttgtgccattccgtcaaatgcacaatctcgtcaatgcaatcggtgatccgtcgtactttcgactttgcttttgcaatatagtcggatccaaacatccaactgagggaatctgcgcttgatgcacatccggatggaccttcttgcaccaaatgccgctagaatgaattatgtggaactcaacctttacacacatgagagaggaaatgagaacagtcaatgaagtggagactactaataatgcgtcttgtacatatcaatgaaacattggtattggctgcttatgtgctggaca

SEQ ID NO: 88160 - DNA, 673 bp, Heterodera glycines
ccgcgtttagtccaatttgccctttattctttcgtccttttcatctttcaaattgttcaacaagttcgtccaacaattgccattccgacatctcttcccgagcacagtaccttttccaataatcacaattcaacggaatgcctttgcgctgaaatggaaaagggccaaaatgcccccgggggaaaaaagacaaaagtttattttgcggtacggacaaattgtgcgaggccatgggagcgaatgttcatctgcggaggaagccgactgctgggaaattggaggcccgaaaaggcattggaaatggcacgagaagcggaggacggcgaagagaattccttcactgaataacgatttaagctcaaacaataagtcaaaaacaggttcatcactacaaagaagcggagaatataagtgagcttgggcagcagcagaaccgcggccaccgattgaccggagaagcggacgaaagagacgaattgcgatcatttcccactttggtcgacgcattgcaaagatatttttagactgtccgtcaaacagaacaagtacccggtgcttttcctttgtgtgggccaaaccgacagatgaacggagcaaagtgacccgagtgggctccaactttgccgcctgctccaaccttttggcaaggctaaaatgccattctttgaaattg

SEQ ID NO: 88161 - DNA, 563 bp, Heterodera glycines
tgtcgccttttaactgcagcgtttttaagctcaggcctcgctctaccggctccttatgatgctgaatcggtggtatcttctgaattaaatgttccactactttcagctgacgcaaatgttgaagcagcaattaccaatgaaagtgatgctgctgctgagatacaagctccatcaattccggtaccaattgaacatcaaactgctgctgacattactcatccaactgaaactggcaatgagtcttctattgcatcatcatcatccacgccgaaaagtgagcagacgccaaaaaaagtgatgaacatgaaaagcgcgctggaaggcgcggtggccaacgtgtacggggggctttcgttagacaagcagaccaagacgatcgctgaagcggcatcaaaagcaaagcagacgcccgccaaacttccggctgactacgacgtgaaccgcgtggcggaacgcgcagcaccccgtgtgtacgggtggcttccggaagacaaacagcctaaggagatctatgacgcggctgagaatgcaaagaacacgcccaaaaccgccgggcgactacg

SEQ ID NO: 88162 - DNA, 361 bp, Heterodera glycines
gcaccgcgttggtcgaactggaagagcgggcaataaaggatgggcctacacctttattttgcccgttgggcaggagaaaattgctggcgaagtttgtcgagcattcgaaacggcagacgcaacaccgccggaagatttgaaaaaattgtgggacgattacaaagcacgaatggcagccgaaggagtcgaagtgtactcgggaggaggtggctattccggctcgggctatcgttaccacgacatggaggacgaaagcgagttgaacaagcggaaaatgaccaaattggtctatggattgtaaagcggcatggaggacgatgttgccaacatcgactcggaattgggaagtatgatgaaaagc

SEQ ID NO: 88163 - DNA, 595 bp, Heterodera glycines
ttaacaactgcttgatgaggaggcatttctcttgtacatcgcggcttctgttggcgaccaccaccgacaacaaaagcgatgccgcatcggcaaaacagcaacagttcgccaaaatagaattgaagccgaaaacggggagcgacggtgctgtggcggagccggaacggacatatttggaggaaatgctcattgaacgggatgcggagccgaagacggcaggccaaaaagtaaaacgtgcggtggagacaaccttctacatttcgtttggcctcatctcctgcgccgttctgggcgtgatgacctacctcgtgttcaaggagttcttcgccttcaacacgccccagggcgtttaccgcgatgcggtgaaaagggtgaaggcggacgagcgctgtcgggaaatgttcggcaagcgaatcatgacatttggcgaagagtcgggccggggacggcgacggcacattctccacaataaatatgtcaaggacgggcaggagcggttgagcgtgatgttccatgttaagggtgacgcgggcattgggaaaacgtacgcggagatttacaagggcgaggacggcaaatgggactatcgttttgt

SEQ ID NO: 88164 - DNA, 538 bp, Heterodera glycines
ctgtagtccttaagcgttacacattttgccatctgtcaaccaactcatcatcgtcaacatcgtccgtcaacaagttcaacaacaaaacgttcaaaatgtctgcggaatcgccaacaacatcacaacgccgtgctcgcagtcgcaagacgaagaaacgtgcggtcagcgctggcgagaccaaaccactgcgacgctcggcacggattgcggcacagaaagcggcgaaggaaaaggcagccaaacagaaagctcgtgacggctccaccgcgtcaacgaagtctgctggtcgtggtcgtcctagtcgctcgccgaagaagtcaggcccgaagagtcgtcgctcgcccgccggtcgtggaggaggacgttctcagacgccgcgcaagaagaaacaaccgctgaagaaggcgccgggcccgagcagtcgcactcctggtcgacgcgcgaagaaaccgtcaacgaagaaatcgcctgctcctcgccgtgcaaaaacctccaccaagaagcgcggacgtcctgccaagaaagcggaacaagccga

SEQ ID NO: 88165 - DNA, 284 bp, Heterodera glycines
aagaaaaaactgccgattattgcattttgtgcagaagaaaggcagtgaatcgttggacaacgaacatatgcaaaatgacgaccgagagaacgacaaattgccagcacaaaggcagtgggaaactgacacaacaaaacgaaagtcatggagagccagactcctccggacattgtcagtggggagcccatccgtcggaagagtcatgaaagacaaagaaaagcaaagaggtgaaaagccgactagtcacttcgcgaatttggaccgggaatgggaggtggtgactg

SEQ ID NO: 88166 - DNA, 288 bp, Heterodera glycines
aaatacaatctgaaaccaaaaacggagagcaaccgtgctgagggggatccggaacggacatatactgaggaactgctctttgaacgggatgcagactcgaagactgcttgccaaaaagggaaacttgctgtgcagaccaccttgtacatttaaatcggtctcatctcctgcgccgctctgatgcgagatgacgtacctcttgtcaaggagctgttcggctttccacgccaaattgtcttgtacacggatgctgtgaaaacggtgaacgtggacgaacagctgtcagag

SEQ ID NO: 88167 - DNA, 434 bp, Heterodera glycines
  unsure (1)..(434): unsure at all n locations
gcactgtaggcctggcgtgcttaacgtgactcactgtttgatacnctgtcataactatcatcgacacgtacacacatcacagtggtgagataccgtcaacgagtcacaatagacacatgtatggtgcttctgcgccgtcatcaatcaagtaccatatgccgtctgtgcgtaacatctgctggtcatttcgaaacgttgtgatcgacatacgaacaacctcaacattactccatcactcctgcctgttcctcattcgccggggtcaatatcggcatatataccgaatacatactggatgcggcccgcaccatgtctactctggtcgaccgcataaaacgtgccctaccgtccttgctactgttcatacaggcattacagcacctacagatacagcggcttttatgtttggccggttatctacgctgttcactttt

SEQ ID NO: 88168 - DNA, 537 bp, Heterodera glycines
cataagggtattttagcgaaccctatttgctgtttatgtcatcatcaagcgtcattttcacttgtcatttgtgcaagcgtcggaatcccatcactttcgaatccatcgaccatctggaagcacattttgcacaacaacatttccaatgtttgccgtatgtttgtgagcagtgtccgcagtttgccagtggtctttaccctacagaaggcgcaattattgaacatatgaaattggtccatggctctgagagtgaatttgagtttaaaatcatcatccgtgaggacactgaagagaagcgggcaaaagtccgtgctgcacttgagcattgcgtccgtaattctggcgacgtggccacttcgtcgtccgctgccactacaacttcgaacaatgacagcacagcgattgaacttccacggacgcaacagcaagtgcaaacaacgcatcagcctcgcgttgtccaagtggttcctgcgccgacagttgttgtcaggacggaagtggtgcaacagacagcggaaaaacactcgggggcaaaca

SEQ ID NO: 88169 - DNA, 323 bp, Heterodera glycines
cgaccgcgtgctggactttcgatttccgaacaacaacatgtgtagacaagtggagtgcagaatctgggcgtcgctatatggaaccaaacaattttcaccactatgcgcccagtagatacagcatttacaacattaaggtatagaaactttgtcgcgtagtttaggtgatgggtcggccgcaagactctaaggataaattaatctctttgtatggaacgattgggagaacttttcgattgcgatctcaaagcaacgtctcatgtcttaacatacgaagagccacttgatgcgcaaagagctgtgattgaagctgagggcaattg

SEQ ID NO: 88170 - DNA, 336 bp, Heterodera glycines
ttaaagatccgaaaaaatgccaaacattttcaaaatccttctgattgtgcttttggccgtcgtctcattccgtctctcggcttctactggtgacaaaaaaactgctaatgatgggagtggaaacaactcatcagctgggattggtacgaagatcaaaagaattgtcaccgctggactgctcttcacttccctggcgacgggtggggcggaagcgattgggcgaatcactgctcacggaggaaatgccgccggattggtgccatcgcatgtgaccaatcgttcaatggctccaccacctcctcctgtgcaatttgaagtgggggcaaatcgattaga

SEQ ID NO: 88171 - DNA, 575 bp, Heterodera glycines
gctggacatctaacatatgcgaattgactaccgttagaacgacacattgccagcacgggggcagtgggaaactgacacagcaaaacaaaagttgtggaaagccaaactcctccggacattggaagtgaggcgagcccatccgtctgaagatggctgactgacaaaagagaaggcacgacgtgaaaagaccaatctctcacctttgtgaatttggaccgggagatgggaggtggagacggcactccagctgtgtctcaatttgtcagtgcacgatacattgcaaagggcactaaatgtgtgtgcccaagagccatttgcagtcctaaatgaacacagagtggatgcccatacggcataccaattggcagtccacgacaagaaaagaccatatcttgtgtccgctgttggcctcttcctgatagcaatgctttccacgagactacacgaagctagaaagccgggcgaatgtaaaccggatacgtccagaagcctatatgtacgcaatcagcggcgactcaatgttactgttggcgaagcgggatgagtccaatcatcaaaaagagtgtcgagcatag

SEQ ID NO: 88172 - DNA, 541 bp, Heterodera glycines
aacgactgaaaactggcaggaaactccggcttttcaaaagaccagcgaaatgatgtcgggaacggcggagagtgtggcaagcaaagtaaatgactttcgcaatctgtcgcttttcaatcgctcgagcccaaattgggtgctgctgtgaccaatgccaaagaggccgcttccacttccatcgaccatatggcgggcatacgacaggggcagcgcgaccgcccacggctgagacgagcaaaaactaggatagcgatgccaaaagcaacagccaaggccaatcgccactttctggaaagggcggcgtatggaggaaaaagcgtttctaccggacacgacactgtccctgcccgactttttatgcccctaaggcagttgacgatcagaatatggatgatggaagagcaactcgaagtgggtctgacaacggtcggaacccattgccacagccgatattgctgggaaacccaacgcgtaccgtctacaacaaatgtgaagccctttatagcccgacattcgtttcgtctgacctttctcctcatga

SEQ ID NO: 88173 - DNA, 454 bp, Heterodera glycines
gatctcgtctccgtactcttcctcgtcttgcgccgtttctgacgaacagtccttgtgcactcagcaccagtgccgttcgcaaagacattgacagtgccgcgaaatacgtcggagccggggctgcaactgtcggagtggccggttccggtgccggcattggcaacgtgttcggctcgttggtcatcggttatgcgcgcaatccgtccttgaagcagcagttgttccagtacgcgattctcggctttgcactgtctgaagccatgggactgttctgcctcaccatgggcttcttgatccttttcgctttctgaacattacgaagacgagcacagaggaatagataggaaatctttttttgttttttctcgcttccaataatagtatgtttttctatttttgtgttgccagataaagttggacagatcactacaacaaatcaaattataaccaggta

SEQ ID NO: 88174 - DNA, 155 bp, Heterodera glycines
ccaattgtggacggattatgcgcatacttgatgacgacgacttgcatgttgttcttgccaatgatacaggaggaggcacccaccgattgctaggaggtccacagatgggcttttgagcgacattataacaatggttgattgaagccgaacactgg

SEQ ID NO: 88175 - DNA, 369 bp, Heterodera glycines
gtgaagaggaaagtgaggaagaaaactacttggaagatgaagaaagaaaatggagaggaaaaggagagagaggaaaacgggggagagatggaaaaacaaaatgcctaaaaggaggaggaagaaagtgccaaacgggggaagaaatggtaaaggaaaatgtctaatagggggaacaaaaggaaaaagaaagtgccaaataacgggacaaaacgggcaacacaaccaataatgaaaatactgggggagaaaacaccaacgaaacagctactaatgggatgaataatgacaaaaaggaatgccgctcgaacaaaaattatgaactaaatgcatatgatatggacgaaaaacattcaacacattcactatacc

SEQ ID NO: 88176 - DNA, 504 bp, Heterodera glycines
ggatatggaaatgggacgatctccgatttgacgaaaatccgattgtaaattgtgatcaatatcattgatgctctaactgttggataacattaaatacactatgaaatagtaacgtcatcctgtatagtactaaggagaaatagcttatttacaaactcttgttaatcggccagccgcaaaactctaaaactttttacttctctaaagataccccggttggaacatcttttcaaatgcatcacaaaatttaggtccaatgccaaatcattgcaagaacatggttggccaggaaacggtatgatctaaaatgaacagaattcactctctatatgagaaatcaatgaccaccgcaccgagagaagagttggacaagtattcgatttattttttccgcaaaagaatctggaatgttcaagatcattttctgtgcttaaacttttggtggaacatgcaacacccctgccttatccaaacgcccatatggaaggccgatcaagcgcaaca

SEQ ID NO: 88177 - DNA, 627 bp, Heterodera glycines
ttactttgaaatacctccgccgatcattcacaaaagctcaaaaataatcccccgtaaagcgaacacaaaatgagaatgacccaagacgcaaatttgagcactttttgtgcccttttcactttccttctgattgttgaaggaactttcggcatttttggcattggcagcagtgacaatgacacaacgacgactactacacagggagggggagggacatcgacgacgacggcaaaaccaaagggaggagggacggcacacgacgaaaaccattccgatgactcatcaattcgcggcaaagcgcgcgagaagcgacagcaaacgaaccaacagcaacagcagccgaacttggagtctttgcccgtatgtgctaccggacagtcgcccattgcgccaattacgcccgccggccccgtccttccgatcggcgccattccgcccaccgtcgtttgtctgaagtgccgaccgcccaacggcccattgtccgggaacaatggcgcaaatggcaacaacggctcttaaaagcatttgccactggacgctttgtgaatggcaaccggtgaagagaaaagagaactaataaatgccatggaaaaaacatttggacgaacgctgactaatcattgctta

SEQ ID NO: 88178 - DNA, 100 bp, Heterodera glycines
aaaatccttctgattgtgcttgtggccgtcgtctcataccgtctgtcggcttccactggtgaccaaaaaactgctcttgatgggagtggaaacaactcct

SEQ ID NO: 88179 - DNA, 643 bp, Heterodera glycines
caatctgaggaattttttggggttgccttctttcgacgagtcgcttttcccgcccaagtcgatcgcattgctgaaagtgcttgattcggaaaaaaaccgattggaagtgaaaagggaggaaattgtggggagccaagcgaggctgacgggaaaatacaaagcattgtgcgatagggtgggaacaacggcgcgacaaatcgaaggagtgcacgacagaattatgtccgaagatgatttggacaaactcaaaggcgaggtggacgcgctgcatacttttgtcaacaaacggctcgagaaggcacttcagctccaagcggagagcaaacgaatctttgagaccattcgcccgtccatcaatagtttcaatgaagactacctccactttttgcgtgttgacttggacagccaatccaccgtgttatcgtctgactttctgaagaagatggaaacattgaatgaaagactgaaagatcatcacgacttgtgggctaaacaggtcgtcttccgctatgacgagctgctcgttaaattagacgagttgtccgcaaaatgtttccaaccttctacggagtttccagcaaagccaaatttgaaaaatctgagtgagaaggaactgctaaaattggaggaggaagttcgaatt

SEQ ID NO: 88180 - DNA, 627 bp, Heterodera glycines
cccatccccggccgcacacaacacgccacaaattgttgttaacatgcacctacctcaatgccacaacggatcagcaccaccagcattccgacgagcactgcttctggtcaacaaacggtgcatttgcaattggtgcctcagcaagggaacagtccgattcctggccaacagcaacaacaacagcagcaacaacacattataatttcggcgcaacccgtccagaccaccaatacgaccacagaatccgcagatgggaatccgattgctgcgtttatggagtactttgtggaacaacagcaacagccgacgtgttccacgaatactttgcccaacgttcagaccattcagcagtacgggtcgccagtgttggactcgaagttcactttgaaaaataaactgttgagcggaatggacaaaagttcggagaaggctgaacgggaagcagtgaaacgggcacggcaagcagaggcagcacgacaacgttaccataaactgacaccggagcagaaaaaggagttgaacttaaaaagaaccgaggcccagaagcggaagaagcaacgggagaaggaagttgctgaactcgagtccattctgcgcgccagcaacgacatcgtcgacgaccccgaa

SEQ ID NO: 88181 - DNA, 641 bp, Heterodera glycines
tgggatcgtctccccatttcttctgtactcaccatcgaaaaacgctgcaaaccttttcaacacaaaacaaatggaatgccaattcgatggaactgaagccggaaaatgtgctttttgtgtaaagcttccgtgtaaatttggagcagttaattgtgcagaggaagtgagcatctcttgtgtaaatccgcaagaattggaaaaatgctgcaatgcgcgtgacaacgaatgctgcgtgtgtgtgctatgcgagaaaaacaaagttatgaaggttttggtcgaatgttgcggaaagcgcaccgaaacgagtgccgaggccgggaaagcgctttgcatttgtgtgccgaaaattggtggaggcaaatgtggaggacaagtgcaagtgaaacaatgcgatgcgaagctggttgacgagtgctgcgcagctaacacggagagtggcgactgctgttgcgtctgtttgagctgcaatgaccaaaagtgtgtggtcaccgtccgttgtcctgctggagaagcaaagtcgactggtccaacttgtactgcttcaaaatgcgaaagtgtgaagtgctgctgaagtcaaaaaactgatcgaagactgaaaggatgcatgcatttaactgactcagttttaaaaatgctctttc

SEQ ID NO: 88182 - DNA, 642 bp, Heterodera glycines
aaattggggcaccgcaattgctctaattgtgggcaaaacaacgcaagatgcataactcacattttgatgactcggcggtcaaaatgtgggtctttgaagaggtggttgaaggacccaaacttagcgaaattatcaacgatgaaacaccaaaatgtgaaatatttgcccggaaagaaacttcccactaatgttatcgttgccactgatgttgctgaggcttcaaaaaacgcggatgttctcattttcatcatccctcaccaattcttgcacaaagtttgcgaacagctcaaaggaaacatcaaaaagagcgcaatcgcaatttcgctgatctaagggcttggccacttttcacgaaaaagacattgggctgcgactgatctctaatgaaatcgcgacctctcttggcattgacacttccgtgctaatgggtgctaatctcgcgaacgaagtggcagatgaccacttttgcgaagcaactactggaaccaaaaacccacagcatggaaatgaattgaagaagttgtttcacaccgacaatttccgaataaatgtggtcgaagacgcggcaacggtagatttgtgcggtgctcttaaaacatcgtggcatgccgggccggattctcatttgggctcggttatggc

SEQ ID NO: 88183 - DNA, 592 bp, Heterodera glycines
tcaacctcctatcagcccgatgggcgaaaggtggcaatacagtacggcactggctcaatgaaaggatttgtttccaaagacatatgtttgtatggcaaacagtttgtgtacaaaaacaggaattcactgaagcgaccagtgagcctggcctcaccttcgtggctgcgaaatttgatggcattcttggcatgggattttcggaaatttctgtccaaaaattgccgaccgtgttcgacaacatggtcacgcaacagaaagtgccggagccggtgttcgcattttggcttaaccgtgacccgacctctgaatttggtggtgagatcaccattgggggcactgatcagcgacgctttgtggccccaatcacttacacaccggtcacacacaaagcctactggcaattcaagatggattcgatcagtggaggtaatggcaaacttgcgtgccacaatgggtgccaagccattgcggacaccggcacttccctgcttgctgggcccaaaaatgacattgaaaagattcataaacacattggagcaattccgctcttccatggcgagtatatgatatcatgtgaacgttttcccacact

SEQ ID NO: 88184 - DNA, 403 bp, Heterodera glycines
tcgtgagccggaaacaattccgccatgcgtgggcgcattgagacataagctaggggcgcatccctgcggatgagcattttccattccattggcaaggcgactatacccatgtgattagctgtgttattgcgtgcgtttcgccattcactccctatggtcttgcgccatacaccgggcttaatgacggcaccatggatttggcattgatccccagagtcttccgtttcaccaacttacaaattataagaaaggtggccatgtacggagctcgtttcattaccgatgagtaccccgacgtcaaagtgtaccgggtgtcccgttggaaggtcacgcccggagcgctcatcggtccatcaagggaagacacggaccaagccgcggagcaggggcagcactcgggtgc

SEQ ID NO: 88185 - DNA, 382 bp, Heterodera glycines
gagagcatgaacacaaaatgaacagttcccatagtgcctaacggcaatattcatatgcccggtgatggcgaacgatgccttgccgagactggaattgagagccgtaatgagtgccaaaggggccgcacgcgaatactttgcagtctgtggatccacccaaaacggggacaaacgtagatgttggcgaccttttacacgtttgacggaacggactcctgcactacaacgacttgcaagaaccggacgcgaatatttaccgtctgagacaatttgctcccaacattgataaatagcacggaaggtgacagatctaacagctgaccaatgcaaatcattgcaacgacattagatggtccgattccgtgcaacagagttgtcccaa

SEQ ID NO: 88186 - DNA, 243 bp, Heterodera glycines
atgatggcgagtggaaacaactcatctgctgggatgggtgcgatgatcaaaacatttgtcaccgctggactgttcttttcttccctggagacgggtggggcggcaacgactgggcgaagataagcgtctgcaggaaaagcacaccaggtcggtggcatcggatgtgaccaatcgatcaatggtggcgccacctccggcggcgcacactacgctgggggcaaatcgactgaagatgatgccggc

SEQ ID NO: 88187 - DNA, 543 bp, Heterodera glycines
aatgccaaacatttttaaaatccttctgattgcgcttttggccgtcgtctcattccgtctactcggcttctactggtgacaaaaaaaactgctaatgatgggagtggaaacaactcatcaactgggattggtacgaagatcaaaagaattgtcaccgctggactgctcttcactttcctgtcgacgggtggggcggaagcgattgggctaagcaatgctcacggaggaaatgccgccggattggtggccacttgcactgtgactcaatcgctcaatggctccaccacctcctcctgtgcaatttgaaatgggggcaaatcgattagaaaaaatgaaggcacacctacacgaacttgctgagaaaatgccggtcactgaatcgaagcgtttgtcaccgagtggacccgacccacatcatcattatggccatggatggatctaacggaggaagaaagaatggatgtttagttttcagattttattctatcctcttctattgattagttcctcaaaacaaatttcttccacaactttttaaactat

SEQ ID NO: 88188 - DNA, 369 bp, Heterodera glycines
acgaagcaattgttccatttgacttggtcaccaccagaagcactgatacgattactatgagcaaacataatgccaattgggtgatgaagcgatgccaacttggacaaatggctcagcgggaggacgaaaagccgaacaatgttaacaatgccggccttatttatttcagtcggaacacaacacatgctgcctggaacgactttaataatatctgaattcgtttgtgcgcgcaacaacgagatactattgggccgtctttctccaccatccgccagttgaagcggcgaaaaagatgagaaatgatctggtatgttggacaatattgtatggacaaatagggctgatgatcagtgttgatgctcatttttg

SEQ ID NO: 88189 - DNA, 482 bp, Heterodera glycines
tttttattctgactgcgtacatgaatgaacactaatgtatagatctgctatgcatccggtccgtacgaattggtcaagagcacaaacaatgaaacgatgacaatgatcacacaaaatgccaattgggtgatgaagcgatgccaaattgggcaagtggttcggtgggaggacgaatagccgacgatgtgtacaatgccggcgttgttcatttgaacggagaccgaaaacattctgtttggaacgactttaataatatgtgcatttgtttgtgtggagacaacaaatcctatgggcctttttctccaccataggcatactcaaagcggcgaatatgatgacgatatgatcggctatttcggacaatattgaatggacaaattggtctgctgattacttatgatgctaatttttgctagtgaattatgatgtgttttttttaccaagaaattagtttcttcttgatgatataatgacaaaatgga

SEQ ID NO: 88190 - DNA, 182 bp, Heterodera glycines
acatgctccgatactaacttttcggttccttacccttggtcgcgatcgaacacactgaattactgacagagatcgccaccgacgcccataggggggtggaaggacaccattttccagcgctggagaacgcggagagcgaccaaagaggcgcatttatcaaagccaacgatggaatgtgcgaa

SEQ ID NO: 88191 - DNA, 465 bp, Heterodera glycines
acaaaccgcccgaggatgtcctcggcgttcatgctgagctggaattctggcgcatttccaccagttatattggtgcgtgttgtgccgagtcggtgtctccgctggagcgattgttggagacgagcaaagaggaaaaggtggacgaaatcagcttccacatattgtgttgcggccgattgcggcgccgaatgtggacctttctggagagaccgggctcctcgctgcaggccaagactttccaattgtgctcaacactgttcgtgatggtctccgtgctcggactcagtttcggcaccattcccgactttcaggtgacagaatatattccgacgggcaatcgaagtgtgatcacttcgaatggcacttcgattgagcgcgaggaattctaagcggtgcgcgtggaacaccccgcctttgtgttcacagaacgcattcgcatcgccttcttcaccatcgagtattgcc

SEQ ID NO: 88192 - DNA, 107 bp, Heterodera glycines
gggggggggggttttttttttttggggggggggcgcccaccccccccccccccccccccaaaaaaaaaaaaaaattttttttttttttttttttccccccccccccc

SEQ ID NO: 88193 - DNA, 383 bp, Heterodera glycines
caaaatgccaattgggtgattaagcgatgacaaattgggcatatggattactgggaagagaaataatcgatctattcgaactatgccaggattaattattttagcggacatataacacatcctggtaggaagaactttactgatatgtgtttttgtttgcgtggctgcaactgattgtataggacgcttattcctctatccacgaatctgggtggaatgcatagtaatacgattcctatctttacaaattgtatggaaactattgcgtggtatggcctttgacactcaatgccgaacgttttttcatcaacacaccgtatggtgcaagcactttgtgagttaattgaaacgacgggactttattttggacccggtcccaatgc

SEQ ID NO: 88194 - DNA, 387 bp, Heterodera glycines
acaaagtgctccaattacgacaaatcgaacgcctgatgccaagggagagagtcttttgtgttataatggacggagcaatggtacggagcatcaaagatttgctcacttgatgaactgaccccatggaattattttaaccaatattgccaatcggacactcgcttcagttccaaacatattcatgctaaaaaaaattctctcgtgatataacacgatcatattctacgacccggtcaatgtttagaggcctgaaagtctgatcatcttgatactatatgaaacattcaatgatcaaccttggtaaaaacatttactactcttgtgactgaaacagacagcgatgtttgaccggctcatttatgatttttatctactaattcgctcatt

SEQ ID NO: 88195 - DNA, 780 bp, Heterodera glycines
gcgcaggattggatgcgtcggagacactaaacggacgatgcgcagacgcgtcaatgaggtaattgacgagtttggtctggaagagtgtcgccatgagctcgttggattcagcggagtcgaaaagagcattttgggtggtgagacgcgtcgtttgctgttcgcctccgaattgttgaacaacccacaaatcatttttgccgatgaaccgaccacgggcctcgacttttcaatggcggacagtgtgatcagcgtaatgcgtgccctggctttgtctggccggactatcatttgcaccatcgttcagccgccattggacatttactggatggccgcaggaaataatgcgcgattgactcgtgacgaattgtttcgggcggttgaacgtctcagagaatccattcttctcatggacactgaaagagcccgattccgtcgttcgaacggggctttgctacggatgatcgtgcgattgtcaggtggcatcccgccaaattttaatcatgctcattttgctgctgctgcacagccggtcgtcaatgtgactgcggttctcgccaatgccaatcccactgggcagaattaccaacgccttctgaatttgaacgccgatttgacggagaccatcgcccgtttaactgtagaaatttcccaattgggatatatgaatgagcaattgacggaacagcttgaacatctcaccgaagtgcctccgaatgcgaattttaatctggatgatgttgcgtttcatccgcccctcgaccaacagcaccaagtgcctcc

SEQ ID NO: 88196 - DNA, 677 bp, Heterodera glycines
acccgaatttgcgtctcggcgatgtcacgagcgtaaatctgacaaaatcgagggcggagtgcagaccaatgtgatccctgcccaattcgtggcatattttgacatgcgcgtgacgccaaccgacgactttcagcaaatggaagcaatgatcgccaattggtgcaaagaggcgggcccggacgtcacttttgagttcgtccaaaagggaatgtgcaaatcgctgacccccaccgacgcctcatccccgtggtggcacgcgttttcgtcggcgcttagcgaagagaaatgcgctttttccaaggagattttcatcggtggaacggacgcgcgttttctgagagagaagggcatcccggcaattggcttctcaccgatgaataacacgcccattctgttgcacgaccacaacgaatttctcaacgaaggcgtttttctgcgcggagtgaaaatttacaccaaaatgatcccacggctcgccaatttgccgtcattttgagcgaagtgccggcagaacaaagaaaagaaggaatcaaaatgatttctcctctacgccaataaattaattatatttattttaattcacttaaggaattcctttgcccattttattgcctttgttttttaatttatttcattttgaccaaatttatatttcaaattgaaaccgaatttatgat

SEQ ID NO: 88197 - DNA, 241 bp, Heterodera glycines
  unsure (1)..(241): unsure at all n locations
aaaaaaggggggtgnnntccttttccccgggaaaatttnnnaaaagggggggggggtttttcatacccccccccccttttaaccctctttgtttttataaaaaagggttttttttttcccccccaccccgcgggggggggggnnnnnatannnccacaccccccgccgagaaaaaaaccgccccattttttttttttttttttgcgtgttcccccccccccaaaaaaaaaaaaaaaaaaaa

SEQ ID NO: 88198 - DNA, 406 bp, Heterodera glycines
  unsure (1)..(406): unsure at all n locations
gaggacgggcgcagcagcaactctgaagtgctgttagccgcgctgcaggacgtgcaaaagtacatgaaggagatgggacatgctgcttcacacatgaagcattgggtaccactttgggggatgcaatccccccaacctggggacaacccccccccccccccttttttgtggggagaaaaagcgcccccccccccggggggcccccccccccttggggaaaaaatatgggcgccggggggaaaaaaacccccaaaaaaaaggggcgcgcaaaaagaggggggggggccccccccccccccccccaaaaaaaaaaaaaaaaaaaacccccccccccaaaaagaggggggggggaaaaaaaaaggggggnntttaaacaaccccccccccgggggggggggaaaaaaaa

SEQ ID NO: 88199 - DNA, 102 bp, Heterodera glycines
ggtgttcgccgccaatggcaaatacactttcggcttccgtctctatgggatgtgccaagtgcagaattcgattttttcgcattcaaatttcctcgacgtgca

SEQ ID NO: 88200 - DNA, 79 bp, Heterodera glycines
aagcggaaattactttaatgtattcttggataacgaggcgcttgtcgaagcggtggtgagggtgaacgttttttcggag

SEQ ID NO: 88201 - DNA, 91 bp, Heterodera glycines
aggcggacactgagtccggtgttcagtgccgaggattggcttgagtttgtgctgcccgaaagtgtcggaatggacggggatggggtgccac

SEQ ID NO: 88202 - DNA, 76 bp, Heterodera glycines
gcaaggatttttttgttctttgaatcccattcattttctctcctttttgcttccgactttggagaagacacgacaa

SEQ ID NO: 88203 - DNA, 83 bp, Heterodera glycines
ttgcagcctattttagtgagtctacaccgcttacccatcgaccattggcttaagtcgacttccgctgcaaatggtccgaagaa

SEQ ID NO: 88204 - DNA, 383 bp, Heterodera glycines
cacttctaacgtaattattctgctctttgagacatcattccaaataagccaaatcgtcaaaaatgaaccgacgttaagcactcaaaaataaatctggggctgtgcaatgacgcttggatgggacattttggccgttggtttgaaccgtcctctaagtttggggctttaaaattggggaaagtgtttttccccccccgtttttttaagacttttttgggggggagaaaaccttttttttttttgtcccaaaaaaaaagagaatttaatatttttttttggggaaaaaaacaattctttttttttttttaaaccacggggggggggggggagaaaaaaaaaaaaaaatttttttcccaaaaaaaaaaaaaaaagggggggggggg

SEQ ID NO: 88205 - DNA, 509 bp, Heterodera glycines
ggtcggtgcgcgtcgttcctcgcggcgcgttatctgctccattgcacagaatactgacggcttggataaaatgcatgagaccgcccaggagtatccggataatgcggctccggagttgcgcgagatctgactcgacgtgctggatttgctagacatttgtctgaccctaagctggaacactctgcataccggtgtttttgctgaagatgacgggacaatcctcccggttcatgtgtgaggtcgtcccctgtgacgacctccgacacttttcgagccaaaagcactatgtgggtgccaaaatgtgtcggccactgccacagacaagaatgcatcaccaccgcatgccatttgtctttggctctgacgctaatgcgttctttgagttctacttgaacttctgaactcacccgacaaggcgtgccaactgcacacacaggcgttcccatgatgcgattgctgtgattgctcgctcaacgaggactcgattcgcgactgcgatcttgtcatgc

SEQ ID NO: 88206 - DNA, 639 bp, Heterodera glycines
tttttgctttgcccatataatggcatcgccgccaaaagcaaatgcgctgatcgaagcggccggcaagttaacaaactgttcattatgccgcccaatcggccgacacgcatcaaaaaagcgatgaacattttgtttggccgcaccgaggaggaaaaacgagtgaccggcaattttgtgtcacgcattgcgggacgcaacccccgtcgtgaggacatgccgaccacgcacgactggccaagtgtttggactaccgcgcagtacttccgttcatcggtggtgccgttgcccgtccgcatgggcttccgccgtaggccggaacggttcgcgccaaaagggccgtacgggaacttggaattgatgaaaattcccaactttttgcatctgacgccggcgcatgtgcagcgccatgggcatgcaatcaaaaaattttgcaccaaatttcccgaagagttgaagcaggccgacgtcaatgagcagtacacgccgttgcggttggtctacagcgactactttcaccacggcaacatcattcgggacaagcgagcgcgtgaagtgaccgccaaaattcagctgaactcgttcgggctcaaggacactcatgcgcacaacaaatgtcgtcagttggttggcgatcgctat

SEQ ID NO: 88207 - DNA, 773 bp, Heterodera glycines
taaggacgggaaattgtttggccgcggttccccgatgacaagggcccgtgctcggctggctgaatgtcatcgaaaccatgcaagggcttggcattgacatgcccatcaacataaagttcgtgttcgaggggatggaggagtgcggctccgacggattggacgaatgcctcgagcagcgcaaagattttctctccggcgtcgacttcgtgtgcatttcagacaattattggctgggcaaacagaagccgtgcatcacttacggccttcgcggtctttcgccgtttgccatcgaaatcagtgggcccaaccaggacctccattcgggcgtttacggcggcacaatccacgagccaatgaacgacctttgctggttgctcagccaattgactgacacaaaggcgaacattctgatcaaaaacattgacaaaatggtggccaaactcactgaggaggagcgcaacacttacaccaaaattgactttgacttgaatggattcaaaaaagacgttggcgttgagaaactcacttccgaagacccgaaacaaattctgatgagacgctggcgtgagcccgccctgtcaatccatggcattgagggcgcattctccgggaagggctttaagacggtaatcccttccaaagtgacaggcaaattcagcatcagaattgtgccggatatggtgccggaagaagtggacaaaatcgtcgttgattttgtcagcgaagtttggaaaggtcgcggctccccaacaaatgaaaatccttccgttggg

SEQ ID NO: 88208 - DNA, 80 bp, Heterodera glycines
tcttttactgtcgtgccaattcttttttgcttctttttgcctgctctttcgatttataagccaaattgggactcaattga

SEQ ID NO: 88209 - DNA, 92 bp, Heterodera glycines
agccgtttcttccgccgtttggtgcacgtccgacagatggactttgaattcgctgcttggcaaatgctttacctgctggtcaatccgcatag

SEQ ID NO: 88210 - DNA, 483 bp, Heterodera glycines
  unsure (1)..(483): unsure at all n locations
tagccgtttcttccgccgtttggtgccgtccgacagatggactttgaattcgctgcttggcaaatgctttacctgctggtcatccgcaaaagaagccaagatcatgggcccgcgatgaccccgcctttctcctccttttggcactttctctgctcggctcgagtgttctgtttgcattagcgctcaatttgtccttttcttcgttttgcgcctttttcctttgggttgtgttcatcgattgcatcggaattggcattgccattgcaaccgcactttggttcatttcaaatcgctttttgcgtcggacgagggattgcgacgtggtcgagggggcctattgcttcgatgtccatttgaatgcttttttcccgttgctcattcttctccacgtcgttttacctttgcttttctacggtccctcttttttttctttttttgaacaaaatattttttaggaccaccnaaaaaaaaaaaaaaaaaaaa

SEQ ID NO: 88211 - DNA, 678 bp, Heterodera glycines
ttaagaatttcgccggtacttgttggactgtgccgtcaatatttaattctcccatatacttttcgacttttttgccctcctttgcctcatccatatgatagactttaaacgagaatgtaatggtcgacttggctacactcttgttgaggatgattcttcactgttgggtggcatcacttttcgctcaattgtgtccggtgacaaattgccgttgttgcgcgattcaccgcccgagtcgcatgttgagccggtggcgcaactgttgcgatctccacgtgaccacatggacaacatcttcaacccagcggacaacaacattgtggacaacaccaatggcttcgctttggcgccttacaccgaacagcgacgtgcgcccagcggagtgttggcacagcaaacgatgcaacggttcggcaatgcgtatttcatgggtaatagtaataatagcactaacaacaccaccacttcctccgcctattcattggcaacaattggcaccaatacgacgacgtacagtggcggggcctgcaacggcagcggcggcacattggtcacaaacgcaactggcacaacaggcggacgtcgtaaagaggtgtacactgacggcattttgctcgattgcgacaccaatcgcattctttccggtggcggtgttgactttcggtccgcaaatgcgcc

SEQ ID NO: 88212 - DNA, 304 bp, Heterodera glycines
  unsure (1)..(304): unsure at all n locations
ttcctccccaaacgatgtcggtggtgngcggctttctntncggcggtattttttttttgcccccccctcttttttaaaaaacggaaatattttaccaacccttttaaccctggcaatttggctgggggcccggaaaattgcttaaaaaaaaaaattgggaaaaggggccccctttttttttttcccccccggcccaaagggggggggtttttttgggcacccccccggggggaaattttagagtttttttttggggggggggcgggggccccaaaaaaaaaaaaaaaaaaattttttttttttt

SEQ ID NO: 88213 - DNA, 226 bp, Heterodera glycines
  unsure (1)..(226): unsure at all n locations
ttttttaaactttntccaantgctcattttaaggattatagtaggattcgtctttatatgaggtttttagactatnncttataatntatatcaatatatggaagaaggattatggagccaactggatttttgacccgaaaaatccatttggaaaaaaaggcccctttataaaaaaaacccccccccctttttttaaaaaaaattttttttttcccccaaaaaaaaa

SEQ ID NO: 88214 - DNA, 338 bp, Heterodera glycines
  unsure (1)..(338): unsure at all n locations
tcccttcctttgtcttgccattgcataaacaaaagcccattgagtgttcttcttgggccagcccggctgtgaaatggactcgcaatgntncngctcanacaaatggcacccatttgcatcaaaaggtttttgcgccggggtccccttttccctttgtttaatcccctgaaacaaaaaaagggttttttggaaagggcccccccaaaaaggtttttttaaaaaaatttggccccggggaaaagtcccccccaaaattttgtcccccccccggggggggttttttaaaaaaaaaccattttttttttgggagaaaaggggggaaaaaaaaaaaaaaaaaa

SEQ ID NO: 88215 - DNA, 88 bp, Heterodera glycines
taggacgaagatacactttgaaatgccatggaagaagtcgaattaataaaagaaatcaaagatggcacagcctttaaagaatacacca

SEQ ID NO: 88216 - DNA, 205 bp, Heterodera glycines
gaactcggcagtttttccgttaggccgttgacgtcgaagggaatgaacatttcgactgttcccacgctcgaccattatccggacatttgttgggggaataacccaattgccggaaaaacctccctggacccattttgggggggggcccccccggggcccaaaaattttgcgggggggggcccccccccccccccaaagggggggg

SEQ ID NO: 88217 - DNA, 189 bp, Heterodera glycines
gatggaggaggacgggctgatcgacctgcacaccttgaagtctgatcgatgaccgcacccgtgccatcgtcgtcaaacaatccgtcccaatccccaccgggaattggttttcccctcgccgaaaaaattttggaaaaaaaaaatccctggaaaaaggggggcccccaaaaaaaaaaaaaaaaaaggggg

SEQ ID NO: 88218 - DNA, 104 bp, Heterodera glycines
catggtttgcttggtgatggctgtcctaatggaaatggcaaattcaaagctgtcaaaaaagacaacaaaaaaggagcagtggcggcatcaccagcaaaaggaaa

SEQ ID NO: 88219 - DNA, 225 bp, Heterodera glycines
aaatgcctttgggaaaaggtttggtccccaaaaacaaaactggaaaaaaaatggcgggggggtaattttgccccaaaaaaagggggaagaaaattgggggggcgtttaaccgcgcccttttttaagggggggggggggggggggaaaaaaagtgttgcaccccctctttatttttttctataaaaaaaagcggggggggggggaaaaaaaagggggggggggttg

SEQ ID NO: 88220 - DNA, 347 bp, Heterodera glycines
  unsure (1)..(347): unsure at all n locations
agaaggctgttgaccagtgttcgtcgccaagaccgggcggactcgctttgagacgtcttgagagcacgctgacncttctcccagtagcgcgaaggccacgaccanatgctgtcgtgatgaagacagaaactcactggaggaaaagtgccccattggaggatggcccaccctttgcccgaaaattttcccgaaaaatttctttcccaattttccaaattaaaaaattggggccttttttaaaaaattttcccccctctttccccccgggtttttaagggggtttttttccggggaaaaaaaaagggggaaagggggggcccccctttttttttttcccccccccaaaa

SEQ ID NO: 88221 - DNA, 215 bp, Heterodera glycines
  unsure (1)..(215): unsure at all n locations
tagnncncccnattgntntnncaaagactgnananagntnncgngnntnannaccgnnagggnnnattnanagnnncnanattntntngncngngtcggnanggaanggatactagtctagtggttccgacgaaaatgaaggaaattgcggagtcttcctcgtcacgaagtgaaaaatgccgtcgttactgtgcccggcttactttaacgatgct

SEQ ID NO: 88222 - DNA, 120 bp, Heterodera glycines
caatgaatttcctcctgtcctgcctggcggtgcaaaacacactacaaattcatgtgcaaaccatctcatggaaggaatatgaagcgaatgcactgaaatcggacggtgaattggagcgcg

SEQ ID NO: 88223 - DNA, 81 bp, Heterodera glycines
cccaactctgctggggtcactgcttttaattctaatggaagaagtcgcttcgaatttaactccgaatgaggggcccttttt

SEQ ID NO: 88224 - DNA, 86 bp, Heterodera glycines
ccaataagattgacacatcaaaaaaaaataataatgttgagccgtttctctaaaattattgtccgtggatatgcaaaagatctcaa

SEQ ID NO: 88225 - DNA, 75 bp, Heterodera glycines
cagcgaccgtggactgtgcggatcggtgccacttcggttgccagaccgcaaaaaacatttggccacaaaccggcc

SEQ ID NO: 88226 - DNA, 431 bp, Heterodera glycines
  unsure (1)..(431): unsure at all n locations
ggtccttgaaatcctagactgacttgtgtcaaaaaattgagtttccggatgagcctaatttcttttattcggatatggtggccagatacgaacagtccatgctaattgagacgggacatgtgtatgccccagncggngcgagaacacgctttggggnggaccccccaaaaaggcccccgggcccccccccgggaaattttttgggccctctttgggggacaaacactttttttgttcccacgggagccccccctaaatttttttcccccaaaaaggttttttttttctccccccccacaaaaaaatttttcccttgtggggaaaaaaaaaaacccttttcttttttttgaaaaaaaaaaaaaccgttttttttttctccaaaagaggggaggaggaatttttccccccccttttttggggggggggggggg

SEQ ID NO: 88227 - DNA, 75 bp, Heterodera glycines
gaataagcgtttgtaagacagactgtgctccaatcgcggaatgcttttctcttaaacgcctcgtcagccccgtcc

SEQ ID NO: 88228 - DNA, 166 bp, Heterodera glycines
tattctgctctttgagacatcattccaataagccaaatcgtcaaaaatgaaccgacgttaagcaatcaaaaataaatctggctgtgcatgacgtttggatggacattctgccgttgtttgaccgtcctcagctcggcctcaaattggcaatgctttcgccccgttt

SEQ ID NO: 88229 - DNA, 747 bp, Heterodera glycines
  unsure (1)..(747): unsure at all n locations
gcgaaagagtgctcgggttttgcgactttcgcttggacccgacaaatttcccaagggatttgaattcgatgttgaaggccccaactttccgatcgaagggttccgttttgtcggtttgatttcaatgattgacccgcctcgtgctgctgttccggacgccgttgcgaagtgccgtagtgcaggcatcaaagtggtgatggtcaccggggatcatccgatcacggccaaagcaattgccaaatcggtgggcatcatttcggagggcatggaaactgtcgaagatatcgccgttcggaaagaaatttctgtggaccaagtcgacccgagagaagccaaggcgattgtaatccatgggagtgatttgcgcgagatgaatgaggaccaattggccgaagtcatcaataaccacgatgaaattgtgttcgccaggacttcgccacagcaaaaactgatgatcgtcgagggatttcagcgtcagggacaaattgtggcagtcaccggcgacggagtgaacgattcgccggcactgaaaaaggctgacatcggagtggcaatgggaattgccgggtcggacgtgtcaaaacaagcggcggatatgattcttctggacgacaactttgcttcaattgtgaccggcgtggangaaagccgtctcattttcgacaatttgaaaaaatccattgcttatacgttaacttctaacattccggagatctcaccgttcctgatgtacattctgttcgggat

SEQ ID NO: 88230 - DNA, 458 bp, Heterodera glycines
  unsure (1)..(458): unsure at all n locations
atccgactgatgcggtccgccctgcctgagaagccgttcccagcaagcaggcatacactgcgcaccgtaccaacgcggcgcagatgcaagcgcaccagcagttccagccaagacgctttggacacctgaagttccagacacgcgagtacggcccgttgcacaaacagtgagggggaaaatgaatagtgccaccgcgacgaatggatgggagagggatgcataggaaaacgatcgacggatgatgataaaattgggcgagagcaaacgacgacgagatgccgagagttgtttattttgttgttttgattccagtgtctgatggagcactgcttttctctttcttttctctgtcatttccacacttttcccttccttttttcttgacatggtccaaaatgttgatgattgttttcgtaacaaaacttcaaattgtttnaaaaaaaaaaaaaaaaaaaaaa

SEQ ID NO: 88231 - DNA, 80 bp, Heterodera glycines
ttgacaaaaatttacaggcaatttaatgaaatgagcagatgttttttgcatttttatactgtcaaaacggatgaaaaagg

SEQ ID NO: 88232 - DNA, 81 bp, Heterodera glycines
cctgttcggcccactgtggttggtgacgcattctaaggtgctcccaaaacacacaaccggacctaagctaacttgcgtttg

SEQ ID NO: 88233 - DNA, 118 bp, Heterodera glycines
cccgcgcccctttactttatttgaaatactccgccgatcattcacaaaagctcaaaaataatcccccgtaaagcgaacacaaaatgagaatgacccaagacgcaaatttgagcacttt

SEQ ID NO: 88234 - DNA, 166 bp, Heterodera glycines
tttttttttttttttttcaaacaaaaaaaaaaaaaaaaattttttcgaaaaaaaaccaccccccccaaaatttgtgggggggggtttttttctccccaaataaaaaaaacaaaatttacatttttttttttttataaaaaaaaaggtttttttttttttttttccc

SEQ ID NO: 88235 - DNA, 125 bp, Heterodera glycines
caatattctccgtcgtctcacagtactcaccgtcgtccccccagtattccccatcatctcctaatactctccgtcctcccctcagtattctccgtcgtctcctcaatattcgccgtcgtcccctc

SEQ ID NO: 88236 - DNA, 520 bp, Heterodera glycines
  unsure (1)..(520): unsure at all n locations
tagagaaaaaagatatgtttttctctggcactctctatttattggtacacatctcgttttttgaaacggtgtgtgtatgtgacattcgtggtgagtcgaagtgataaataggcaaatgtctggtgatcagaaggggacccacgcgtttgggcgctggcattttggcgccaaaaaatataaaaattaaaatacttgagcagtgaaccctctcggagtggtaaatccattttaaaatgaattttgggccaagttttttttcaggtcggtgtcatcagtgcgttcaatttccctgccgccgtttacggttggaatgccgcgttggctctcgtctgtggcaattccgtgctttggaagccgtctcccagcactccgttgacgtccattgccatcactcgactcgttggcgaagtgttgtccaaaaacggactgtcgcccgacatttgctcattgatttgtggcggaggggacgtcngaatgtgccttggtaaggaccctcgggtcaatttggtctcatttaccg

SEQ ID NO: 88237 - DNA, 706 bp, Heterodera glycines
  unsure (1)..(706): unsure at all n locations
tgggaaggtacttcttttcgaaggtaagagggagggaaagttggcgaattggtggacgaaacgtgcaaaggcgcagccgcgcatagcggcggagtgttcgcgttgaattggcattcgggtggcataaaattggccaccgcttccggcgacaaaaccatcaaaatttgggatgtgcctggacgaaaactaattgggacggtgtccttcggctcggccatagaagaccaacaattggccgtggtttggcttaggaattggatcgtcagtgtctcattgagcggcttcatcaattacatttgccccgagacactgaaagtctgccgagtgctcagaggacataacaaatccatcaccgcgttgacgctgtccgaagatcgacgaatggcattcactgctgactttgagggacatataacccgttggaatgtctcggatggctcttctgaacgagtgactccccaagtgcacaagtcgcaagtgtccgggctgagtttgaccagcggcggtttgctcatttccatcggatgggacgattcggtcgctttcattgaaaatgccctttccccttccattgaaaatgttcagtcgctttcccaccgtttgtcctcccaaccacgcggtgtggcgagcattgggcaaaacggggaaagagttgcggtcgcatgccatcgctncattttcattntcaccgacaaaaaacaatcaa

SEQ ID NO: 88238 - DNA, 401 bp, Heterodera glycines
  unsure (1)..(401): unsure at all n locations
ggctttcggaaccaaaaactganngtcttcaagtcccgatcacttctccggacaacatttctcagctttgcactccgtcaaacccctcaccccctcagggcattttaagccttccggaatttgccaattcctaccaattggacattatctccgcgttgcgaggcaatgagcacgatttcctggcaaaggcagccattgcggacgcaattcgagcagttcaaagtgatgaggacaaaatggaactaattgatttcattgcgtcagaagaacacggggccattgccttaactntggagaacaatgcgtgcaaaatgttcaattgttcgccctctgaacttccgctggtttcgtccaattataagacgaaaaagcactttctgtccgaactttgcgagctgttc

SEQ ID NO: 88239 - DNA, 140 bp, Heterodera glycines
ggtgctttttacagaacgacacaaatggagggaaagctgatcaaaaccaaatttctccacccaatttattctcgacaaaattcgccgttcattcgatttggaagaggcgcaaaatgagcaaaaatcaacggaaatggccg

SEQ ID NO: 88240 - DNA, 377 bp, Heterodera glycines
  unsure (1)..(377): unsure at all n locations
aagaaaacctttccccgtccgtgtttttatgaatggcgcctttaaaagtttttaaaaggggccaattgaaaaccttaattggaaaaaaggaaaaaggaaaaggggtttttcccttttgggggggggggggccttttgccccccacatttttttntttttttttttgggggccccacaaatatatgcccccccccacccggggcgttttctttttaaaaaaaaaaaaaaaaaaaaaaaaaaaagaggggccgccccacaccactctctttttttgtgggggaaaaaaaaaaccaaaaaatttttccccccttccttcaaaaaaaaaaaaaaaaaaacccccccgaccaaaaaaaaaaaattttttttttttttttttg

SEQ ID NO: 88241 - DNA, 374 bp, Heterodera glycines
  unsure (1)..(374): unsure at all n locations
ggcatttgcgggcgcaatgaaacagacggacaaaaaaagcgaggacggtaaagaatcgctgagtccgacactgccaccatatgacaaatgggcggccggcgtttgttttgcgatgcgattcacgcaatatttcatctacacgaatctcgagacgattggctccggttacgccatgatgatngtcatgttgggacaagaaagcgntgggtactacaaatcccttggcccatgcttgggcccggggttttttcccattttgcaaatcccggggcttttatttttttgggggttgggggaaaaaaaaaaaaaaaccccaaagggggccttcggggttccctttttttccccccccttttttttttttttttgggggg

SEQ ID NO: 88242 - DNA, 118 bp, Heterodera glycines
  unsure (1)..(118): unsure at all n locations
gatctccgctgttactcgccattgtacccttccnatttcggctaaaattcgcgtgctgcacaatttgtcttcaaccatnntgnaataccgcacgacggattgaagcggcgggggccag

SEQ ID NO: 88243 - DNA, 75 bp, Heterodera glycines
cagcggacggaacctttacgcactacggcggaatggctactcgaaacggacggaaccgcacttctgagagtgcta

SEQ ID NO: 88244 - DNA, 78 bp, Heterodera glycines
atttcctttgtcccaggcggcggaacaaaagaatttggacgacagaccatccatggatgtgcacggatgactattttc

SEQ ID NO: 88245 - DNA, 85 bp, Heterodera glycines
gacgcaagcggttgatctcctgctttaactgtaccgacaaagcagagccgcggcatatttcggcatgttcgctgtccatcccttt

SEQ ID NO: 88246 - DNA, 425 bp, Heterodera glycines
  unsure (1)..(425): unsure at all n locations
tccttttgagactgaggaagcagcgaacagtgcaattgcaaaagtgaacgggggatgcttttggatgggaaaanagtgttttgttggaaaaattttttgcccacgttttccccgctccgtggaacaagcccaaaattgggtggaatcccgctccccactttcttttttcccccccagtgtttttttttttgggaaaaaaaaattttttggggggggggggcccccaaagagaaattttcggggaaaaaaaactttttcacccaaaaaaaggtttttttttctcccacccgtttgttgggggggagaaaaatatttttttttttctctcccaaaaggggtggttttttggggggggtataaaaaacccaccgccgggggaaatattccaccggaggggggggggggggggggttttttttttcncc

SEQ ID NO: 88247 - DNA, 78 bp, Heterodera glycines
acattgtttcctatcttagacacttaaatggcactgaaacgtatacaaaaggagctgcaggacctcggccgtgaccca

SEQ ID NO: 88248 - DNA, 96 bp, Heterodera glycines
  unsure (1)..(96): unsure at all n locations
tcatttgcgacaaatattgggacagagtgccgtacttttgttttgtctccccttntaattgctttctcttcgccccctcccccgcctttgtccaat

SEQ ID NO: 88249 - DNA, 436 bp, Heterodera glycines
  unsure (1)..(436): unsure at all n locations
tgggatttatgtttttacctgtataatggatgtccatgacgaggaagttgaaattattgggactaggtcaaatgagaggcaaatggaccgggctcatcgacaagaacaacagcaggaaaaattttactcccaacaacaaatgtctgaggaaagtgaagaagcattgttttgcatttctaagcatgacgttaaagaaataagccaagtggtcaaagcaatggcattccgagaccattgcacattaaatgtaagcaatgagggcattcgcttggcagttgacgaccaacacaatcagcaaggcagtgcctacttcagatccgagcacttccaagacttcaactttcgtacccaaacatgcagcattaaaataccgatgaggcctcttatggaagcactgaatatgttttccggtacgatgacaatggtgcannaattt

SEQ ID NO: 88250 - DNA, 211 bp, Heterodera glycines
accaacaccgccgccctcgccccgctaccacagccgttgaagggacgccgcagcagcaaaaacggacccggtgccaattggtgagaagctgacgaccgacaacacccacgaacgcccaaattggacaaccagcaaattttttttttgggccaaaaattttttcaattggggggccccccaattttaaaaaaaaaaccccccccccccccgg

SEQ ID NO: 88251 - DNA, 342 bp, Heterodera glycines
tgttgaatttttaagaagggagcgggggaaaggtgggggccacattttttttaaaaaagaaaaaaaaaaccgcccccccccccggggtggtataaaaaaaaaacccttttttatacacgggggggggcgcccaccacaaaaaaaaaaaaatccctttctcttagggggggggcccccaccacttttttcttttttgttggtgggggccgccaccttttttttttctcctatactccggggggggggggcgggcgcactccccttctccttcttttctcttttcctttttgcgaaaagggaagagagagaaatccccccccccccccctcccccccccctcat

SEQ ID NO: 88252 - DNA, 94 bp, Heterodera glycines
cgtagtccttaagacatgagtaaaagaaatgcgtttatggactaagtgtgtgcaactgatcacttatttgctgctgtcctttgtcgccttaact

SEQ ID NO: 88253 - DNA, 442 bp, Heterodera glycines
gcactgttcggaacaacgaaaaggaggcgatcggatttctgatgtcggacaagcgtttaacacaataatcactcgtgcggaagagcttttgatcatcgtcggaaatgccaaagtgatgatgagggattcgtcttggaaggagatgatcgactattgccgcaaaaacggtgccacagttgacatgccgtctgaagcggagcttttcccatcgggccaatttcaaaatgatgtgctgacggacagtgacaagagcagcagcagtagcaacagcgaagttgatgagaaggagcgaactgaccaacttgtgaagaagggcacgtcgagtgccgccgctgctgaacaacagaatctcagggccaaggcatcttccgccgaggaagaggatgaagacgattcgagtgttgctggggagacaacgacggaagacgatgacgaggaggaa

SEQ ID NO: 88254 - DNA, 221 bp, Heterodera glycines
  unsure (1)..(221): unsure at all n locations
acccctnttggaaaaaataacccaattttggcgaatggctttccaaaaattccccccctttttggaggggggccccccccccccgggcaaaaattttttggaaaacaccccccccccttttttttgggggggggggggggcccccccccaacaaaaagaggggggtttttatttttttttttttcgcggaaaaaaaaaatttttttttaaaaaaaaaaaaa

SEQ ID NO: 88255 - DNA, 282 bp, Heterodera glycines
  unsure (1)..(282): unsure at all n locations
cagccgaagaaggagccgtaccacgcgcagcaccaccactttaccaganaaccaattagtttgctattatttgcanaanctganggggtcacgtgttngccggaaatgtgaaaaagaaaaatgtcaaaccggagggcgaagaaagattcgggcgcggaaacaattggccccccggtttgaaattttccattttcgcccacccaaaagggggtttccccccttcttcccgggggaaaaggggggggggggccccctttttttttaacccccaaaggggggggg

SEQ ID NO: 88256 - DNA, 771 bp, Heterodera glycines
attctctgttcgtgttagcaactgacgaccggaattgttgtcctttgtggaacggactgtccaatcgttactcgacaaaaagatgattgttcgacaagaaattgacatgttcgaagcccacaaatcggctcggccactttcaacgcgaattttaacccccaaatggcacttgacatgtgcaacgacctcggcgccaatttgggcaaaggcatcgtgctaatttcgcacttccatttgctttacaattgtgtgccgttggacgtcgccgttcaagtggactggaatttgttctacaacgaatatttggggctgagcagcgaggagcggcagctaattcattcgatgggtctttctgaggctgttcttatccgtcacattcactcgcaccaccaacaaaaggacccgagcaaagggatgcgaatttacgttgtgtttatgcttcgtcaaatttggaatcagaagcccttgtgggaggtggcgcgttatttcggcgtcccccggggttggcttcagtccgttttgcagtccgccgtctgtcagtcgagctcaatcgttcgttttgcggagcgaacgcccgacctttgggcgttgcgttcgctgctgccggaaatggtcaggcgtctctgcgaatgctcccgccaggaattgattccgttgcttcgcattgaatgtgtgaaaattggacgcgctcgtcaactttacgagaacggatttcgcactgtcggatcgatatcgaaagcggagccatgccaactgatcaaagcgctggga

SEQ ID NO: 88257 - DNA, 492 bp, Heterodera glycines
ggagaagaagaaggaggaagcagcggcatcgggcgaggaaaagaaggaggaggcgaaggaggagaagaaagaggagaagcgggcagagaaggaggaagcatcagcggaaggagcagagaaagagaagaaggacgcgacaccggaggagaagaaggaggagcaggaggacaagaaggaggagaagaaggaggcggcggcgtcgggcaaggagaagaaggaggaggacaaggagacggccagcaagaaggagaagcgctgggtgctcagagccaaacgggtcgctttctgagaggccaaagacgcgggacgaggcgagacggacgcgcgaccctttgaccggcgaaccatcaaaccctcagactttctctcatcattttcacccatttattctgccattggaattcattttaaatttttcaacattttttgttaaattttcggtaaataaaacaatgatttcttattaaaaaaaaaaaaaaaaaaaaaaaaaaa

SEQ ID NO: 88258 - DNA, 131 bp, Heterodera glycines
ttaaattatcctcccaaatgcgtaccttctcttcatggcatggtttgcttggtgatggctgtcctaatggaaatggcaaattcaaaagcagtcaaaaaagacaataaaaaaggagcagtggcggcatcacc

SEQ ID NO: 88259 - DNA, 111 bp, Heterodera glycines
gaaatggtcggcacttggcattttgctatgttttgtcggttcattcgcatttatttgtctgtttccatccgtaccttaggaggacgtgacagccgttaatggaattgtcca

SEQ ID NO: 88260 - DNA, 224 bp, Heterodera glycines
ctaaacccgcatgaacagctttctccccttcttggtaatgacatgcagaacatttactagccctataataaacagaacccttagaagaacccatccaaagggggggcgcaagaaggctactctgcctaggtaccactaacttaatggataggggaataacggccaacaaaagggggcacacaaatgggaaaaaatctcccaccccttggacatgcataattcga

SEQ ID NO: 88261 - DNA, 225 bp, Heterodera glycines
  unsure (1)..(225): unsure at all n locations
aaccgcagcagccgaccgccaagaagtggtggtgcangccgacacccaattgaaaactgttaactncgcgtgccattgaaaaggcctttgggtttggcaaaaaatttgggggccccccaaaaattttttgggaaaagccgccaaaatttttttgtgaaaaaaaaagttttttttaaaaaaaagcgggggggtgggaaaaaaaaaaaaaaaaaaaaaccccccccc

SEQ ID NO: 88262 - DNA, 240 bp, Heterodera glycines
  unsure (1)..(240): unsure at all n locations
tncctctaaaaattcaaatcctctcagaaaatggcttcatctttctgctcctcaatcatttccatcgtcgcaattgtctgtttgctgtgcaaatgctgcttttcgacaccccatccatgctgtcctggcagccaacatgtcgtttcgatgatgaaagatcacaccggcacattctccgcttcgatgccaaagtcttcgctttgtatgagtgccgaaagagtcgccgctgcggtggaaaac

SEQ ID NO: 88263 - DNA, 246 bp, Heterodera glycines
  unsure (1)..(246): unsure at all n locations
ccccgtcgcgcagagagtacgccaaacttttcggggtccatccgaacgatgtgaaaatggaaaagaacggnaacggaggaggaacangacggcggacgacccttaacgcccgaaagaaacattngcccattttttgtgaaccctggttgggaattaacccttttggtgggaaaaacaaaaaccccctctttcccccgttgtttttttttttccgcgggaaaaaaaatttttttttttttttttttt

SEQ ID NO: 88264 - DNA, 250 bp, Heterodera glycines
  unsure (1)..(250): unsure at all n locations
gtgctatgccggagtttgtctaactgacaaagaaatagtaacacgaaacaagcacgtataacttcacggcgttaagggacaccagtcttttttccagggcttacgaaaagttttccgggnagtggatcggatggaattttgggggccccaaaagggcaaatttcccggggtttggggatcaccaattttttgaaaaaaattgggggggaaacacaaaaaatttttttttttttttgggggcccccccctt

SEQ ID NO: 88265 - DNA, 324 bp, Heterodera glycines
ctatcctttccttccttccaagtaaaccctccttcttcatttattcctgttaactgcattccaaaaaaaacattcttctattctgcaccccatacttttttttttttttttgggggttttttaaaaaaggcccccaaaagaaccacaaaaattttcccccccgtgggttttcccccccaaaaatttttttacccccccccgtttttttttttttttctccgggggtttttttttttttttttttggggggggggggggggggcccccccctccttttttcttaaaaaaaagaggggggggaaaaaaaaaaaccccccccccccc

SEQ ID NO: 88266 - DNA, 105 bp, Heterodera glycines
tgcgcacccgcgagcaatgcatttgtacacaaaatactggcacaccgagaggacatgatggaactgatggtacgcgtcaagaagaaggacgaagacattggggag

SEQ ID NO: 88267 - DNA, 79 bp, Heterodera glycines
  unsure (1)..(79): unsure at all n locations
gaggttgttgaactgccgctgatcaatccgagttgttcaaacgcgtcggcataacaccgcccaagggnctgtctttttg

SEQ ID NO: 88268 - DNA, 78 bp, Heterodera glycines
  unsure (1)..(78): unsure at all n locations
ggaaaagaagtcgaaagcaggaagcgagaaaaaggagaataggagcaaagcctgctggtagaangagaagcgcgccgc

SEQ ID NO: 88269 - DNA, 638 bp, Heterodera glycines
tccgaggccacgtgagagatgtgttcgacaggcacgtgcagctgctcctgcgtgctgttttttgatgagctggactcaattgctaaatctcgtggtggaaacgttggcgatgcgggaggggctgccgaccgtgtcattaaccaagtgttgaccgagatggatggaatgggatcgaagaagaatgtgtttatcatcggagcgacaaatcgtcctgacattattgactccgccattctgcgcccgggtcgtctggaccaactcatttacattccgttgccggacgagcccagtcgcctgcaaatctatcgtgcttctctacgcaagactcccattgcaaaggatgcggaattggaatacttggccaaagtcactgttggcttctccggagcagacatcactgagatctgtcaacgcgcttgcaaactcgccattcgcgagtccattgagaaggctgttgccatcgaaaaagatcgccaggccaaggaacagcgtggcgaggaagttatggacgtggccgaggatccggtgccgcagctgactcgcaaacattttgaggatgctatgaagtttgctcgccgcagtattttcgacaatgacatccgcaagtacgaaatgttcgctcaaactcttcaacaaca

SEQ ID NO: 88270 - DNA, 318 bp, Heterodera glycines
ggttgtacgactcctgtcattatcccaaagccgtttgccccttatatttccagaatcgcttttccgataccgtgccagtttggacactcttgcgaccgatatctatgctttgttggggcgctggggttgggggaacctttaaaacaaaatttttggggacccccccagggaaatttgggggggccccttttttttttctgctggggccctccaaaggcggggggggggggccccccccccctttttttttccccccccctcctctcaataaaaaaaccccccccccccccaccccaaaaaaaaaaaccccccccccct

SEQ ID NO: 88271 - DNA, 162 bp, Heterodera glycines
  unsure (1)..(162): unsure at all n locations
tgggcgagtggtgcgcgctgacgaagatccaantacctgagcaagagggcacagncgtggtgcagcactgtaaccgcaaccgcgtggaccgtgcccctgggaccgtgcttgttcccgaccaaaaaccccccaaaaaaagggggggttttccccccccccccc

SEQ ID NO: 88272 - DNA, 298 bp, Heterodera glycines
atgccaattggatgaggaattatctgaacaacggaggagaacaaacacaccacagacacagtaaaacagaagctagtcaccactgacccgacaattatgtaattggtcaaataataattaattattcgttaatatttaaattatgtatatttttattttggttcatcgctattttaatcttaacatttgcttcattccttcttcctccattaattaatattttgctaaataatttctaattctgacaaacaaatgataaacaaacaattataaaaaaaaaaaaaaaaaaaaaaaaaaa

SEQ ID NO: 88273 - DNA, 742 bp, Heterodera glycines
ggaccgcccgttggtcgtgcaccgattgcgccatggactcggaggagaacgacttgggccaggcggtggagtcctcatccgtggacgtacagcaacaaatgacgacaaaaagtgatgaagatgcggacattagcaacaacggcactgtcgtgccatcacgccaaacggtgagcagcggcaacgagcggatgggcggcatggatctgagcggagagccggcactgcttttctccgcggaaaccagttttgaggctataaacgcgtccaacaaatttgcacaacgccttcttcagccattcaaaccgttgccgttggcccaactgttgagcggttcggccaccgttggcaatgtgtacttgctgcagaatggggcacattccaaaattgggggcccgtcaacgccactgccttacaactcactcatttcggcattcactccgtcggctgccggtgggtcaagttcgtcaacatcgggcggcatgatgttctcctcgccgttggacagctgcaaaacggaggaggccaacgagaccggcggggacagcaacagcaccactcaaatgatgccatggaggatgggggggcgacacggcaaaaacgatgggcaacggaccagcagcttggatgccacatcggttggcagcagttcggtggattggagtccgcccgagtcgcgcaagcacagccgacgcaacacagcactcggcggtgggagtagcacagcaacaagcgctcactttgc

SEQ ID NO: 88274 - DNA, 688 bp, Heterodera glycines
gcaattcacccctttcaaccttaaaatataccaatgtcatcagaaatcgcgaaaaatgcaacggcaaacaaagggaatgactttcgaacagcgagaaaaatctcatctttggaaatggacgaaaataccggcgaagggaataagcagaaaatgcagcaaacgaagggaagggcaggcgaacgaaattggataatagtcactcgcatttccgaccgttcgatgttttacaaaacttttgaattggtctcccaaattggccaaggcaatttctccgacgtttttctcgtatttagctcggagaaaggcgaaaaatacgctgtgaaagaaattgacaaagaacgaatgagaagcaaattgcattttgtggagaatgaagttgcactgctgcagcggtgccggcacagaaacatttgccgactaatcgacgcctttgagtgccgacgggcgttctttcttctgttcgattatgcccagaagggcgaccttttcgagaccatccgacgcattggccgactgtcggaacgttcggccgcgcaaatcactcggcaaatctcttcggcactcgcttttctccaccgccgccgcattgtccaccgggacgtgaggccggaaaacattctgctcggggccgactccaccgccaaactgacggacttcggcctcgcctgtttttttctgggcccgcttt

SEQ ID NO: 88275 - DNA, 484 bp, Heterodera glycines
  unsure (1)..(484): unsure at all n locations
tgttctgaccgtaaacatgccactagcgatccgccggcggatttattcgccctggtggggagcttcccggaaacgaaagtcttccggttccgggggaagtatggttgcaaagctgaaacttaaaggaattgacggaagggcaccaccaggagtggagcctgcggcttaatttgactcaacacggggaaactcacccggcccggacaccgtaaggattgacagattgatagctttttcatgattcggtggatggtggtgcatggccgttcttagttcgtggagcgatttgtctggtttattccgataacgagcgagactctagcctactaaatagttggctcattgcttctgtgggcacaacttcttagagggattttcggtgttcagccgcacgaaattgagcaataacaggtctgtgatgcccttagatgtccggggctgcacgcgcgctacactggcnnanaaaaaaaaaaaaaaaaaaaaa

SEQ ID NO: 88276 - DNA, 511 bp, Heterodera glycines
ggccgccaccgagggcgccctgagcacgccgtccccgggcgaggcggccacccgcggcggatgggggctgccggagcgccggtccgcccgctacctcgccgcgtcgatcgggctcggagtggtcggcgccgcggggatcgcggcgtccggtgccctgggcggacgccgcctcgcgcgccgcctcggcctcccggcgaccggccgggcgcccgggcccgctcccggccgcgccgccgaccggacgggtgacggcgccgccggctgaccggccggctgcgccagactggtcgggtgcacttcacgacgaccgtcgagctcgcccgcaccaccgcgaccggcatggccgtgccgcccgaggtcgtcgaggccctcggcggcgggcggcgccccgcggtgcgggtgaccctcgccgggcacacctaccgcagcaccatcgcctcgatgggcggccggtacctcctgccggtcagcgcggaggtgcgcagcgccaccggcgtcgccgccggggacg

SEQ ID NO: 88277 - DNA, 519 bp, Heterodera glycines
  unsure (1)..(519): unsure at all n locations
ggcctgagcaacgcgaaggtcggcctcggcctgttaacaaacaaataattggtctctgtcctggtcgcttgtccctccaaagtccgcgcccttttcagccgacttttggccgcgtccaaatccaaccgtttcttctgcaaaacgcggcgctctctctgaatgtttcgcatttcgccctccaaaaagcgtttgattggcaccagcgtttgcccggccgtcgtttggaccatttccctttcggcagcgcccaatttggcttccgtctgcgcaattttttgcaaagcacctccgaatggcgtttcggtgccaaaggattgggcagcctcctgcatcgcctcgctaaggtattccaaagtgtttgagcgattgggggcgggcgaagtgatttccatcttttcatagaacaggtcgcccattcggagggctgggttcggctgcagatacgcctncatggcggacaacagtttcttcgactgttcctccgttntatccgccttggcgagcaattgctcgaaatga

SEQ ID NO: 88278 - DNA, 280 bp, Heterodera glycines
ggccgccaagccaaaatgtccttccttcgtctgatcacttttgttcttctgatcactctgtgctctttgccttctctggtcgaaagcggcctcattggcattgtcggcactcccgttgaagccgcttggtgcggtgttttgggcaaagaatccagtcattgccctactgctggaggcggtcaacacggcggaggaggaggaggaggaaattacggtggtggagccccgggcggaaattacggcggttccagcggctcatacaatggccatcgcgcacgcc

SEQ ID NO: 88279 - DNA, 435 bp, Heterodera glycines
ggccgcaaggtttattttaaagcgatgtcaacgtcagaagtgaaaccggaagataaatcaatggatgaaactagcaagaatgaattgcgggctgaggacacttccattaaggacaaaggcattggaagcgttaaaggttttattacttcgttatcaattttctttcgtttttagaaactgaaacaaatggcgcaataactactgacaatgaacctaagattcacgcagaaaagaacgagactggtgatgctgcagttggccaaaaatcaaccgaggaacaattcgacaaaactgacaagaaagcagagcaacaaaatgttcttgatgtaaacaaaacccaacaagaaccaaaggctcctcttgatgaagtgaaagagacgccacaggaagacaactcggaagaagttccaactgaagccattgttgttgatgttg

SEQ ID NO: 88280 - DNA, 300 bp, Heterodera glycines
  unsure (1)..(300): unsure at all n locations
ggccgccaagatttcatttgtattttatgctttatctctttgtgaaatgacttcgattttgaagaatcaaatcattaagcatctttcggcgtttgcgcgaaatttgaaaccggaacaaattacgatggaattgttacgggggaaaggccaactgcgagacttggaactcaatgaggaagtgttggctgaaaaattagagttgcccccgtggctaaaaattgtcagtgctcgttgcgatagagtcagcattaaaattccaagttggaacaaactngaggagtgctcccatccaattgtatg

SEQ ID NO: 88281 - DNA, 199 bp, Heterodera glycines
ggccgccaggatcttttaataatctactacagaacagattggatatctggagacaatcgtacagaccgttggagtgcccggtgtaagacctgctcactgaaccgaacaattggattgtggaccacctactgtctgaattgtccaatggactggaaaaggtgccctatattgtccaccgtattgtctgggactattattt

SEQ ID NO: 88282 - DNA, 610 bp, Heterodera glycines
tagcttggatccttaacggcgcaaatttaaagtaaattttgtgcaatggacattggaactgtgcatttgcctggtgggtcggtgacaatgggcgtgctgcggcctgcacactttcaccctatgcattagcgcgcactgggccaaatgcgcaggtccgctttgccgtcggcacgccaccgacacgcaaattgtgagaccgaaatacgaaggaagctgccgcgaggcgggcgatttgccaagaaaggccatgcgtgccgcgttagctttttacgaccgcaccgttcgccaccgcttcgccgatggttcgtcgggaggcgaagcacagcgcgaggaattgaaactttgtctcaattcattggtcagcactttggagagcgctgacgcggagagagaggcgaaatgggaacggctgaagcaatttttgagggtgtgcggaacggccgcaatttttgccgttttggcatttctgttcactttgtattggccgttgttctcttctctggcggttggcgttgtgcgcaccgtttggactctgatcagttctctgcgcgatctgttggtcgcccattggcctgatttgctcttcggggtttgctcctcagcactttcg

SEQ ID NO: 88283 - DNA, 327 bp, Heterodera glycines
ggccgccaaggtttgagatggatttgaatatttcgccaacgcttgaggacccaaacgcttcgttggttgacaatgagcagaccgccgatgaaaaaatggagaagccaaacagttcagcaaacgtttcattctccaatgtcaccgacaaattccgtgcccaccccgtggagaaggtcggtagtccgatcacaatcaatcagtccatttcggacccgaccacggagctgactgaggaggacattttccgcatgaaatcgatgtccattgaacagaacgggtggaaaaacggcccttgtgccagcgaattgcaatccgccgtctcgcagg

SEQ ID NO: 88284 - DNA, 450 bp, Heterodera glycines
ggccgccaagcaagtttgaggcgaaaatgcgaaaaatcattcctccgaatgcattaatgaacattttacccaaacagggcctcagttggccgctggccgccttttttatggtcactgacatggccatcggcggaatggtcactttgcccggggcgatctgccgaatcggtctctcccgcggattggcccttctccttctctccggtcttttctgctgttgttcggccattttactgggccaatgttggctgtttgtgctcgacaagtcgccccaattacgtcaaaagcattgccgaaggccatacgctgaaattggcttctgtgccctcgggcgttggatgagcattttggtgtccgtcggtgtcaatgtcactcagtttggcattgccacggtgtttttgctcctttgtgccgtcaatttgagccgcatttgttccacgttgttccatg

SEQ ID NO: 88285 - DNA, 241 bp, Heterodera glycines
ggccgctttcaccgccgtcggcgctgtgcttagtgtgactaaagtgccggccgcctcataacgaacagcgcccgactgcgactgaagtaaattatacacacagcgaatgaagcgattgcgctctcctggattgttatggcaaactttgtaaatcagttccacaattacgagttggaggatatcgccgaattgtgcgacttgttcgatacaacccgacaaataatccaatgcccgctgtcgg

SEQ ID NO: 88286 - DNA, 469 bp, Heterodera glycines
ggccgccaagattaaattaaatatattttttgccatgtcttctctgctgctctccatcttcccaattgtgtttttggtctgttgcaatgcaatgccaaatttcccgtgctgcccgggcagtcagcaagtggttgctgtgatgtccaaatacattgacactttctcttctgctgctgacgagtctacagtatgctcaaccgctaaaagtactgtggatggaataaaaaatgaactgtcctctcgcggcggatgccaaaacggaggagaagcacaaattgtggatgaaatcgatcgacagctgaagaacattgcgaaaatggaaatcaattatgaggacgagtgcccgtacaatttgggctttgcccgtgccatgttcgacttggccgctgctgctgctggccatgcggggaacggcacagaatggcaatacatgaaagtacaatttgagcaggaaagccaagcaatcaaa

SEQ ID NO: 88287 - DNA, 782 bp, Heterodera glycines
acttgacgtcgcatgcacgcgtacgtaagcttggatcctctagagcggcccgggaattccggaccggtacctgcaggcgtaccagctttccctatagtgagtcgtattagagcttggcgtaatcatggtcatagctgtttcctgtgtgaaattgttatccgctcacaattccacacaacatacgagccggaagcataaagtgtaagcctggggtgcctaatgagtgagctaactcacattaattgcgttgcgctcactgcccgctttccagtcgggaaacctgtcgtgccagctgcattaatgaatcggccaacgcgcggggagaggcggtttgcgtattgggcgccagggtggtttttcttttcaccagtgagacgggcaacagctgattgcccttcaccgcctggccctgagagagttgcagcaagcggtccacgctggtttgccccagcaggcgaaaatcctgtttgatggtggttaacggcgggatataacatgagctgtcttcggtatcgtcgtatcccactaccgagatatccgcaccaacgcgcagcccggactcggtaatggcgcgcattgcgcccagcgccatctgatcgttggcaaccagcatcgcagtgggaacgatgccctcattcagcatttgcatggtttgttgaaaaccggacatggcactccagtcgccttcccgttccgctatcggctgaatttgattgcgagtgagatatttatgccagccagccagacgcagacgcgccgagacagaacttaatgggcccgct

SEQ ID NO: 88288 - DNA, 603 bp, Heterodera glycines
ggccgccgccgggttcttgcgaatggtttcttcctgctgcgcaatcatcttgaacaaaccatccagggcctgctcggtcacgtagttctcaacgttggcgctcttggcatccaccgcgccaaaggccgcggccttaccggccagagcgttgtactgctgggccacgccgactttgtcggtggcggccttgacgataggcaggaacttggcgcgaatctcttcacggctgcttttgttcaggtactgggtggcggagtcctggccaccgctgagaatgcccttggcatcggtcacgctcatgttcttcacggcgttgaccaggatcggctgggcctgggtcacggcggtttctgcggccttgttcatgctggtttccagctgcgtaacctggtcacccataccgaacattttcagcttgtcggcgactttgccgagtttgcccggcaggccgatcttcacgtccgggttgttgctgaaaccaccgggcgtcccgagttgtttcacagcaatctgtgcaccttgggtcaaggcatccttgaggccgccgctggcgtcgccctgggacaggctgccaaggtccagggccatggcattggcgccgaa

SEQ ID NO: 88289 - DNA, 553 bp, Heterodera glycines
ggctgcggcgagcggtatcagctcactcaaaggcggtaatacggttatccacagaatcaggggataacgcaggaaagaacatgtgagcaaaaggccagcaaaaggccaggaaccgtaaaaaggccgcgttgctggcgtttttccataggctccgcccccctgacgagcatcacaaaaatcgacgctcaagtcagaggtggcgaaacccgacaggactataaagataccaggcgtttccccctggaagctccctcgtgcgctctcctgttccgaccctgccgcttaccggatacctgtccgcctttctcccttcgggaagcgtggcgctttctcatagctcacgctgtaggtatctcagttcggtgtaggtcgttcgctccaagctgggctgtgtgcacgaaccccccgttcagcccgaccgctgcgccttatccggtaactatcgtcttgagtccaacccggtaagacacgacttatcgccactggcagcagccactggtaacaggattagcagagcgaggtatgtaggcggcgctacagagttcttgaagtg

SEQ ID NO: 88290 - DNA, 459 bp, Heterodera glycines
ggccgctcgatgtcgcagaagagaatgatgcggttgtgttcggtggcgttttccgcgtagtggatgaaggtttcatcgaacaccaccgcctcgccgtcgcgccagtggtagcgctcgccgtccacctcgatgaagcaggccgggtcgttgggggtgaacagtcccaggtggaagcgcagcgagccggcgtagggatcgcggtgtcgcaccagcttcgagcccggcggcagttcggcgaacatcgccgccttgaccgagggaatctgccgcaacagggcggtggtctgcgggcagagttgtccggcggagggatgggcctcgtcgtaccatttcaggtagaagcgcttccagccgctcttgaagaacgagttgaaaccgatatcgtcgtactgttcggaacgcttgatgttgccggcgccgtgcaggtgcagcgcctcgctgcggatggcctgccagttg

SEQ ID NO: 88291 - DNA, 275 bp, Heterodera glycines
ggccgccaaggtttgagaaaaaacaatgtcttcctccctcataatgaactgcttaattgcccttaccattctggctgtgtttgtgtccaccatcgatgccattggcatgccaatgcaatgttgcggtcagcagcaacagtcatgctgtgggggcggcggtggcggctgtggtcgtagaaagcgcgacacggaagcggttcagccccacttcaaatcggacgaaacgccgtgcccacagacagagtggagacaagtcattgacgagagtatccgcg

SEQ ID NO: 88292 - DNA, 263 bp, Heterodera glycines
ggccgccaagaaagcataagcgacaagcgcagggagaagagaaccgaaagacaaaggaccgacgcgaaagcgaagctgaagatgatataattgggtggaagttgttgtcggaatttgtgttcatcagcgcatttccccaaaaataacattgagaattgtccatcagcgttttggaagtgccaaaatgatcgggaaaatggtgagagacgaaaggacagcagcctcgtggatcatcagtgggggttcttctccaattccgatgg

SEQ ID NO: 88293 - DNA, 101 bp, Heterodera glycines
ggccgccaaaatgcgtcggaatgcctcttcatcgtatcgccatgggcgagagccgattgatttagactgtgcaaagattgacgatattggtgacaatgcgg

SEQ ID NO: 88294 - DNA, 101 bp, Heterodera glycines; identical to SEQ ID NO: 88293

SEQ ID NO: 88295 - DNA, 535 bp, Heterodera glycines
ggcctgagcaacgcgaaggtcggcctcggcctgttcaacaaacaaataattggtctctgtcctggtcgcttgtccctccaaagtccgcgcccttttcagccgacttttggccgcgtccaaatccaaccgtttcttctgcaaaacgcggcgctctctctgaatgtttcgcatttcgccctccaaaaagcgtttgattggcaccagcgtttgcccggccgtcgtttggaccatttccctttcggcagcgcccaatttggcttccgtctgcgcaattttttgcaaagcacctccgaatggcgtttcggtgccaaaggattgggcagcctcctgcatcgcctcgctaaggtattccaaagtgtttgagcgattgggggcgggcgaagtgatttccatcttttcatagaacaggtcgcccattcggagggctgggttcggctgcagatacgcctccatggcggacaacagtttcttcgactgttcctccgttttatccgccttggcgagcaattgctcgaaatgagggtttttaccaagt

SEQ ID NO: 88296 - DNA, 93 bp, Heterodera glycines
ggccgccaaggtaaaattctaaatttgcttttgtgatgtctcgtatcgctctattggtccttttggtcgcgctgttctgcgcttgcgctttgg

SEQ ID NO: 88297 - DNA, 344 bp, Heterodera glycines
ggccgccaagccagcactcaagtcaagctccacacgcacacacacacacaccatgaagaccgcctgcttcgtcgctgccgccgttgtgctcgccaccgccaacgcacagatcttccgctccgccgacttcgaggccgacaagtgcaacacgcaggatctgctcgccaaggcatacccactgctcgtcaacccaaactacagcgtgtgccagaaggacgccgacttccagttctacccgatcacgggtctcccaagcgatgagaagctggccaagatgtgcgccagcccggcgtgccaggagctgctcaaggtcattgctgccgccgacttgccagactgcgacg

SEQ ID NO: 88298 - DNA, 186 bp, Heterodera glycines
ggccgccaagccgtcgccgagggcactttccgtcctccttatttccaccgaaattgtatgagcgaatttatgggtctgatcgttggccgatacgaagcgaaggagggtgggttcagcgcaggaggcgcgtctctccattcgatgatgacgccgcacgggccggacgcggcgtgcttcgaaaaggcg

SEQ ID NO: 88299 - DNA, 712 bp, Heterodera glycines
acagcttggtaccgagctcggatccctagtaacggccgccagtgtgctggaattcgcccttcgcgagctcaattaaccctcactaaagggagtcgactcgatcatgcccattcatcaagaatctagatcatgaagtgcataactatttatgctaaggagtggacaaaagtattgtaatatattgacacatgttttgtatcaatgtaaaaaataggagtttgcagaaattccattattataggcaggttgcatatgcttttgatcatttactatctcggctttcaacattcacctaataaacacatgaggaatacgaatgtgcaattagcttaagttgggaaagaaaacatgaagcattacgccgtaggcctaaaggactgatagcttatccatttttcttttctttcattctcgtctttccgatatacaatgacaacctacatgttctttgtactgtcagcttaatttaacatgtgatattaagttaattacgtataattattattaaaattaatttttagatttagtgacttgattgtgttaataatttttaaactgtcagtgaatatatcttttaaattcattagtaaacttgctaatccttaaataaaaaatataaaaaggccattgaaaaatcaaatggtagaatacttctctgatttaataaatatatgggaaaagaagtaattaaaaagagtctattaatcttcaa

SEQ ID NO: 88300 - DNA, 354 bp, Heterodera glycines
ggccgccaaggttattgtggaccaaaatgccgagcaaactgacaccgaaagcgacccggaagattatgaatatgatgccgacccatcctcgccacgggaaatgtgcaaattcaaacgacgacggatgacatactcttcaggaacagcgaagccacccaaattggagaaccggcgaacttctcacgtggagttcggttcttcaatgttcgactacgatgcgcaagtgatggacatcggtttgccactgccgacaattcaaaaagtggaaaacgtggaaattgtcattccatcgttccgtaagaagtgcggcctgttgtccgacttttccctctcccccacggaatgtgaacggtg

SEQ ID NO: 88301 - DNA, 665 bp, Heterodera glycines
tcgtacgtaagcttggatcctctagagcggccgccgactagtgagctcgtcgacccgggaattccggaccggtacctgcaggcgtaccagctttccctatagtgagtcgtattagagcttggcgtaatcatggtcatagctgtttcctgtgtgaaattgttatccgctcacaattccacacaacatacgagccggaagcataaagtgtaaagcctggggtgcctaatgagtgagctaactcacattaattgcgttgcgctcactgcccgctttccagtcgggaaacctgtcgtgccagctgcattaatgaatcggccaacgcgcggggagaggcggtttgcgtattgggcgccagggtggtttttcttttcaccagtgagacgggcaacagctgattgcccttcaccgcctggccctgagagagttgcagcaagcggtccacgctggtttgccccagcaggcgaaaatcctgtttgatggtggttaacggcgggatataacatgagctgtcttcggtatcgtcgtatcccactaccgagatatccgcaccaacgcgcagcccggactcggtaatggcgcgcattgcgcccagcgccatctgatcgttggcaaccagcatcgcagtgggaacgatgccctcattcagcatttgcatggtttgttga

SEQ ID NO: 88302 - DNA, 461 bp, Heterodera glycines
ggccgccaagctttattaaccaaaaataaaagaaaagtgaaccaaataaaacgaaaaagcattctttttaaatatttgtattttcaaaaacttccaaaatgcaccagtctctgccattgtttctgccgcttttcatcttcttcgtctacacgaccgattgtctaacggtctgaactgccaacaaggagcagaaatcaagccaaatggtcaaaaatttaacaacacggatcaaaaatgcccacaaaaggacgcgaagtattgtgtgacaagcatctgcacaaccgatgagattccgaattacacaaacattgcatggttttgtgacgtcataaaaaatgccgaaaaatgtgccaatcgtagaaaagaaaagtttaccggtttgaaaaatatttcgtgcaaatgcctttatggtgaagagggagaagatcatggcaacgcacaattcacgcctccgccgctgg

SEQ ID NO: 88303 - DNA, 247 bp, Heterodera glycines
ggccgccaaggtgcaacggcgcacttcaaattcgcgcactcgccaccgtttgccgccgcttccgaagaagcgatccttcgcagcaagcagaacaaacacactgccgacgagcaaaacgacggagagattaccacaagcaacagtgacaaaaccgatccgaaaaactccaccggacccgcgtcgtgtgccgccaccatcgacggcacagaagaaaacgcccacggacagtcggcccgggtcgaagggg

SEQ ID NO: 88304 - DNA, 440 bp, Heterodera glycines
cgccatttccgcctgtgagcagctcgcggccggcacgctgaaaatcaaccgcgagcgaccgctgatggagcgcattcagaacgtgttgctgacacgaaaaccgttgctggacgcggtggtgatgcgaatggcacgggacaaagtgatgaagcaaacccatggcaattacccggcaccgttgcgcattttggacgttgtccgcaccgggctggtggacggccagcaggagggctacgaggaggagacaaaggagtttggctatcttactcaaaccacacagtcggaggcgctcatcggactcttcaaaggacaaaccgagtgcaaaaagaacaaacacggcgaggcgcgcaaaacggagcgtttgggcgtcatcggtgccggtctgatgggcgctggcatcgcaaatgtcagcattgacaagggcattcatacgactcttg

SEQ ID NO: 88305 - DNA, 310 bp, Heterodera glycines
ggccgcaagtgggaagaacaacatattcagagatgcaatattgttcatcatcatcttcatcttctgcttctcctccttggcccaagtcctcccatttgttcgcctcgatgggcattctctgcagcacttgtgccctgctcgttctggtgttcctcgtgccgataattgtgcataaggcaaacattttgcgtgcagaacttgaggaaatgtccgttcgattcaagcaaaactcggacagggcgtggcaccaaatgatgcaaatggagccaattaatgataacccaacgatgcatacaacaattgttgcaag

SEQ ID NO: 88306 - DNA, 449 bp, Heterodera glycines
ggccgctgccgaactttgtgaaagcggtccaaaagccgtgcaattccccgggcacagcgatggacctgtatccgatgaccgagtcgcgtggcgtgccaacgtacatcgtcgaattggtgcccagcggcgcagtctctcgcgcgtcaattgtcgtgcacctctgcgtgctggtgttgtacaatgtcattatgaagccaccgccgaggcccgacgactgcggattgacgacgccaatgcacagcaaactggcgatcatcgaatcaacagaatttccgccctccagcaaaacatcccttccgatttcgctacaaagaccgtggtccgttgccactgcggccctccgatattgcgcgtgcatacttccggtgggacttggccatttcagatggacacgggcggagtgcgcccgtgggggaagcgcggcactgttgttgccattgtcgctgtct

SEQ ID NO: 88307 - DNA, 545 bp, Heterodera glycines
ggccgccagcactttgttccccttttgactgcacttcagcaacaatgctcatcagagaatatcgcatcgtcatgccgttgaccattgaggagtatcaaattggccaattgttttctgtggccgaggcatcgcgacaggagacgggcggtggtgaaggcgttcatgtggtgcgcaacgagcccttcgaaggccaaagtctgttcaatggccgcttcacgtccggacagttcacgcacaaaattatccacttagatacaaaagtgcctgcttttctgaggacgattatgccaagaggttcgacaacgctgcatgaacggtcgtggaacgcctttccgtactgcaaaacggaggtgaccaacccggactatatgaaggacgactttctgattcggattgaaacaatgcacttgagcgaccgcggcaccacaaaaaatgcactcggtctgaccaaggatgtgctgaaggaacgcaaggtggtgcgcatcgacatcgccaacgacaacgagtttctgcgtgcagccgacatccttgacaacaccagaccg

SEQ ID NO: 88308 - DNA, 512 bp, Heterodera glycines
ggccgccaagagaaaatgaattcccaattgctttgcatctttctgctggtcatttgcaccgtttccattggcacactgacacaagcaaagccaattccggaagaagctgcggcaaccgaaaccaaagcggacgaaggcaaaaaagaggagccgaaaaaggaaaagccgaagcgaaaaaggaagaagcgacgaaggaggagccgaaaaaggaagaaacaaagaaaggagagggcaaaacggaagaagctaagaaagatgaagccaaaaaggaggagccgaaaacggaagaggccaaaaaggaagaagcaaagcccagtgccccggccgtcttaactgaagctgccgataatgtgaacaaagcggtcgatgacttaagcgttaaacaggcaaaagcattgaaaaacgcggccgaagcaacggcagagaaaacgccggaagagcaggaaaaagcattgaaagaagcggcagaaaaaggaggaaacgaacagctgaagacggctgtcaacaaaatt

SEQ ID NO: 88309 - DNA, 253 bp, Heterodera glycines
ggccgccaagccttccttcaccgttcgctgctgatgaatttgccgccttcgtcttcttcttcccccgtcctgtttaatcggctgaccaatcgtcaaactttggctttttctgccattgtccgtcgtgtaactcgcggtttttctactcgtcaacgcaatctgtacaaagtgttgggcgtttctccttccgcctcacaaagcgacatcaaaaaagcgtattatacagattgcgttgacgagtaaaaaaacttgg

SEQ ID NO: 88310 - DNA, 375 bp, Heterodera glycines
ggccgccaagtacaaagattcaaaattccatcgcgtaatccggaacttcatgatccaaggtggtgattttacgcgaggtgacggcactggtgggaagtccatttttgagggcaaatcatttgaggacgagaatttcaaactgcaccactatggcgccggatggcttattatggccaatgcgggccccgacaccaacggatcccagtttttcattaccacggtccatactccatggttggatggacgccacgttgttttcggtaaagtgctcgagggcatgaacattgttagagaaatcgaagacggcgaaactgctggcggagaccgtcccaaaaaagacgtcgtgatcgttgacagtggagagctaacagtcag

SEQ ID NO: 88311 - DNA, 532 bp, Heterodera glycines
ggccgccattgtgttgtcgccataaccgagcccaactgagaatccggcgccgcatgccacgatgtttttaagagcaccgcacaactcaaccgttgccgcgtcttcgaccacatttattcggaaattgtcggtgtgaaacaacttcttcaattcatttccatgctgtgggtttttggttccaatagttgcttcacaaaagtggtcatctgccacttcgttcgcgagattagcacccattagcacggaagtgtcaatgccaagagaggtcgcgatttcattagagatcagtcgcagcccaatgtctttttcgtgaaaagtggccaagcccttaatcagcgaaattgcgattgcgctctttttgatgtttcctttgagctgttcgcaaactttgtgcaagaattggtgagggatgatgaaaatgagaacatccgcgttttttgaagcctcaacaacatcagtgacagcgataacattagtgggaagtttctttccgggcaaatatttcacattttcgtgtttctcgttgataatt

SEQ ID NO: 88312 - DNA, 310 bp, Heterodera glycines
ggccgccgttcctccgccgctttgtccgcgccctctccgccgcctcagtgcctttccatccttagcctttgtccgcttttctccgccgccgtgccaatgtccgccgctgcttccgctggccaaacgcaccgatggggcggaatggccgcaccgcaccgcagccgaccgccgctgcgctttgaccgcacctttcttgaggagcgcgacaatcagttgaagctcatccaaatgctgtgcggtctggtcgcccttctgctgacagtccaatgctggccaaatccgcttttccccttctgtttgggccgtgtcg

SEQ ID NO: 88313 - DNA, 154 bp, Heterodera glycines
ggccgccaagtgttcatcagcggaatgaaaacggctgacaaaggcggacgaaccattcccattgaaatgaagaagaaggcggccgtggaccagcagaaggaggaggagaagcagtagaaaaggacggcggaagtgaagacggactgactgtcgg

SEQ ID NO: 88314 - DNA, 310 bp, Heterodera glycines
ggccgcaagtgggaagaacaacatattcagagatgcaatattgttcatcatcatcttcatcttctgcttctcctccttggcccaagtcctcccatttgttcgcctcgatgggcattctctgcagcacttgtgccctgctcgttctggtgttcctcgtgccgattattgtgcataaggcaaacattttgcgtgcagaacttgaggaaatgtccgttcgattcaagcaaaactcggacagggcgtggcaccaaatgatgcaaatggagccaattaatgataacccaacgatgcatacaacaattgttgcaag

SEQ ID NO: 88315 - DNA, 230 bp, Heterodera glycines
ggccgcaaggcgcagtgttgatgaccatcacttatgggcagacgcaatggaagagacgccaatttctctgttgcgcatggcgcgcgaggcggagaaggagcagaaggaagagaaaaaggaggaaaagaaagaagagaagccagaggagggaaagaaggaagagaaaaaggaggaaaagaaagaagagggaaagcaggaagagaaaaaagaggaaaaaactgaagagaaaa

SEQ ID NO: 88316 - DNA, 214 bp, Heterodera glycines
ggccgccaagattaattggaaatccaattcaatttttgagtataaaatgaactgctccttcttcctctgtctcttcactgttcagctgattctgctcaatttcgcagtcgaaggaagagaagacgatgaactgaagagaaagaaacgcaacacggacgtggacgtgtctcggcactggtaaatattcacgcgccgtcgcgaaagaatgtgaacg

SEQ ID NO: 88317 - DNA, 480 bp, Heterodera glycines
ggccgccaagccaagtttgagtttttcgtttatcactttaattgacttccaatgtcggctaaagcagtgaatgaatattcgggcaaagagcttctttaccgctcactgaaccatgtccaagcactcgtcaagccaaatgctgtccaattggatgagaaccatttttccaagatgccataattaattgcgattggatcagcaaagaggggcaaggtgttctcaagcccgatcaattgatcaagcgcaggggaaagcacggattagtcaaaatcggaacgaccgacgaactcgccaaatggttcgatgaaaaaaaggggcaaaatgttcagatcggaaagaccacggggcgtctttcgaaattcattttggagccgctttgcaaacacggggccaaagatgagctttacatcgccatttatagcaaaatgaatgaggatgtgattctgttttacgaggagggcggcgttgaggttggggacg

SEQ ID NO: 88318 - DNA, 296 bp, Heterodera glycines
ggccgccaagcctggcgagccaagcgagctcaaagggcggaggagccagcgaggcggagccaaccacgccaaagttggcgaaaccgacgccggaggaggcggaggaagaggaagagcctgaggttggcgacgaggaggaggacgaggagtgaaagatgggccttttaacgaatgaacgaatgactcattgtccatccgatgatcagtcctttctcttctgatcagcggtggatgagagaagaaaaactcaccaaattgtcccaattggcttctcccattctctgtctgcgaatgcg

SEQ ID NO: 88319 - DNA, 229 bp, Heterodera glycines
  unsure (1)..(229): unsure at all n locations
ggccgccaagaatttgcttcctgcccctttggtcggctccattttgctgttagggcattttgtgtttgtttctgtcggttccaatttccacgtgctcaaaaaacggggatacgacgaaagcgaaagttacagcagtgaagaagagccacgacaagcgccccgtcanggcgggcgctttggtggcaaacgccaccgttacccaccggcgcatggcaagggacaccgcccg

SEQ ID NO: 88320 - DNA, 270 bp, Heterodera glycines
ggccgccaatcgttggcacagctgaaactgtcctattaccccaaaaatgccgatttcgacgacacttccagcatggtgtgccaatggatgttttggcttctctcttggcttctccttctgttcactttccccgtctccgtgtgcttttgcattaaaatagcaaggagtacgaacgagctgtgatctttcgattggggcgactgatcggcggaggcgccaaagggccgggtcttttctgggtgatgccgtgcattgagtcgtttgtacgtg

SEQ ID NO: 88321 - DNA, 622 bp, Heterodera glycines
  unsure (1)..(622): unsure at all n locations
ggccgccaaggagcatcaaacaggaccatgagcaacagcagtcccaacaacagcagcaggacccgatgctggtgggcgaggatggcattgtcgccggactgtccgtcggcgggacggagccgaggccgccgacgctgcaggtggagccgacttacagtgacaattacgtgttggatggccaacatatgatctccgagtcgcggatgcgcgacattctgatggaactgcagcagcggtggttgaaggagtacgagcagagcagggagaaactgttggtggaactcactgagaaacttcaccaggaatatctgaccgaccttcagcggaaacagaccgaatatatggcacagtgcagagaggaaatggaggccgaaagggtgcgtcaggatgagcttttccagcggcgtctccaggaggaagtgcaacggttgacggagaagcaaaggcgggaaatacaactgatcaaaaagaaacagtggtgctggcaatgcgaaaaggtgggcagggaacggagaacgcagtttcagtaggcggcgatgtaacaattcattntaggaggccatctaccactgttgctggaacacggcctattgcacggtggagtgccaacaggcgcattggc

SEQ ID NO: 88322 - DNA, 289 bp, Heterodera glycines
ggccgccaagcaaaatgtccttccttcgtctgatcacttttgttcttctgaaactctgtgctctttgccttctctggtcgaaagcggcctcattggcattgacggcactcccgttgaagccgattggtgcggtgttttgggcaaagaatccagtcattgccctactgctggaggcggtcaacacggcggaggaggaggaggaggaaattacggtggtggagccccgggcggaaattacggcggttccagcggctcatacaatggccatcgcgcacgccgattcgcttga

SEQ ID NO: 88323 - DNA, 405 bp, Heterodera glycines
ggccgcctcctggaggagggtgtgctgtgcgtacactgcgcggctgtgacattgacgcatcgctgcgctacagtgtcgagcgcgcactgcaggcggcggtctgtctgcgcaaattggcacggaccgaaactgcgattgagctgaatgtgctgtcggatgatggcggcgcatttgccgcctgtttggtcgccgccggtgtcgcaattgcgtcggctaacattgaaatgctcgacgttctgttggcttgtaatgtgttgctgattccgtccaattcgttgactgcaccgcttcgaattgtgttcgacccggacaaggccacaattgctgcacacgttggcaaagcatccgccctaacaatgggcgtcataccaaccattggccaggtggtctgtgccgaactgagtg

SEQ ID NO: 88324 - DNA, 111 bp, Heterodera glycines
ccctctagagcggccgccaaggtttgaggtaaaattctaaatttgcttttgtgatgtctcgtatcgctctattggtccttttggtcgcgctgttctgcgcttgcgctttgg

SEQ ID NO: 88325 - DNA, 225 bp, Heterodera glycines
caaggaaggaattgctgcttctgttctatgtccgttccccgggctttaccacttgttaatacgcttgtccttccactgactcgttgtttgtttgttaatttctgtaaaatttgtgtttgtttttttataattttaataaacagaatttctcttgttctctaccattctcccttttcctcacactctttcctccttttttttgtttctctgtaactctgtgactat

SEQ ID NO: 88326 - DNA, 204 bp, Heterodera glycines
ggccgccaagcggcgagaacggacagcccggccagcctggaaaccccggcccgcaaggataccctggcgacggcggaagccccggccaacccggcaaccccggaggcagcggcgagcccggacagcccggagcacagggatccagcggccaatgctaccactgcccaccgccccgcaccgcccccggctactgagtgtgatcag

SEQ ID NO: 88327 - DNA, 469 bp, Heterodera glycines
ggccgccaggaattttccccaacactgtgttcaaatcgaagggcgagcggaagcgcattttcgtcgccgacgaattggaccagtgcaccgaccgatcggcactgtttttcgtcttgccattcgaacggggatatcttggcagaaatgcagctgttgatggcgcggaacattgtgctgaccggcgggaacgccctcttcccgggctatcgcaaaagaattgagcaggaattgcgttccatgatgcccgaacagttcactcttggtgttcagcaaccgtccgacccgatttgccacgcgtgggaatgtgcacgcgacgcaatccaacaacaacagcacgatgccgagacttctgcatcatccgctgctcatgttggtgctgccacacaattctcgcctcggttgaccgccaaatttgacaaactcggcctggccggcgacattgaggcggaacacaagggcctgctgctgg

SEQ ID NO: 88328 - DNA, 628 bp, Heterodera glycines
ggccgccaagtgaaattgatgttttcctcgacttttcgcactgccgtccgagtgatcaggagcgtgccctcttctttgagttggaagcggtccttcagtttgcccagcgttccgccgattgtttggccatttacggcgctggtgctagtgccgaagttcgtgcagcactgcaaaattgtgatgatgctgacatacaaaatgcttctttcgccatcgtccgtcaattcgtccgtcgcattcgcaaatattttgaaacggcgcaaagaattgaaaaggtggtccctgagctgttgtgggagctctgttccggccctttgcctcccgttgagcagctcgactcggcccaggccctctgcaaacaactcgcccgactcatcgatttcgtctttcattttgacacaatgaaaatgaatacacccgcgatgcagaacgacttcagttttttcaggcgagtgatttcgcggagcgaagcggcggcgcgcgaagcggagaccgactgttccctcgagttggccaacaccattttcgctgttcctcgcctcgcccactccgatgctaaacgcactgacaaacgcaacagccgggttttgtccgagaccatcccgatttgccggtgtctaacacaaca

SEQ ID NO: 88329 - DNA, 116 bp, Heterodera glycines
ggccgccaagaaagcatagaaaatgccggaacgtttgacttatcgtagaaggctttgctacaacacaaagtccaataaaacgaaagtggtgaagacgcccgggggacggaatgtgt

SEQ ID NO: 88330 - DNA, 508 bp, Heterodera glycines
ggccgccagctcttaatattatttgctgctcgatgacttccgccggttttcttaaattttgcgcttgctgctcgctgtttcgctcctcgtcacctgttgccatggtcagaaggagagaaagcctaaaacgggaacgaccaaaacgagcacaacaacgacgactaccaccaccaccactacgaccactttgccaaaaatgactgcgccaaacaacaccgctgcaaacggaggcggcggcagcggcaacactctcctgttcattttgttaggagttggcgtatttgtggccttggcggttgctgtggttgtggcggtcgttgtgtggcgtcggcgacaagcgcgcactgattcctacgccgtcgatggtggtgatgcagcgaagggggcggcgtcgtccgatggtgccaatggcgcgaagaaagatgcggcaaagggcggatcatcttcatcacaaacggcgagtgtcgagaagttttcggcggtgtcgagcgtgccgtccagtctgaag

SEQ ID NO: 88331 - DNA, 707 bp, Heterodera glycines
  unsure (1)..(707): unsure at all n locations
ccctctagagcggccgcagcaacggcagagaaaacgccggaagagcaggaaaaagcattgaaagaagtggcagaaaaaggaggaaacgaacagctgaagacggctgtcaacaaaattttggaggcaaaagcgaaaaacgacgcggaattggaaagcgaagtgaaaacgaaaacggcaactccttctgaggacagcaaaaaggccagcgcagagttgactttgataattgaagacaaaaagacgactttggacgagaaggtgaagcggacggaggagctgacagccaaaatgtcggacaacacgaagaaggagctgaatctgaacaacagtgccgacgtcgtcgccttcgtcaagtcgtactccgccgtcgccgtgccggcggtggccacggagggcaaagcatgatcaatcagtctgatcggaggattcggcattgttgtgtgatgaaatgtagccaagnnnttttttttttttttttttttttcaaaattcatttttattccaaattcggttttatgtgagttcactttcattggggggggctacaaacaaacattgaagataatatatcattgagtaaaatccgtgaggaatgaagtaaagtgccgtctcaaactctcaaattatgtctatgcccttttaatcgtcgaagttcagtttcccgtcgtcgtcatgggtccgttccaacactttctcctcctcttcct

SEQ ID NO: 88332 - DNA, 201 bp, Heterodera glycines
ggccgcaaagcgaaactcagaaaagaagcaaacatcacgtgaagagagaaagagcgaagaccgacagaaccctaacaattaatagagtgatcaatccaccgatcgtcccatttctttgggtaattaatgttcgggccaatgacagagagatgataaagcttcgactgaccaaaaaaaaaaaaaaaaaaaaaaaaaactggg

SEQ ID NO: 88333 - DNA, 294 bp, Heterodera glycines
ggccgccaagcaaagaaattgcacagctggaggaagtgcaaatcagtgacaagcaaattggcacgctgtttgtaagcattgctttgaccactgctaacaatgaagtagagaaattggaggacgaaatcgttggcactcagctcacttggccactgttcaaaggtgttggcgatgtgtccaaagctgcgcaaatgctccaacagatgaaaatttgagcaaaaaagaatcgaaaatttgtggaaaaacaagggcaaaattggcgaaaaaaaaaaaaaaaaaaaaaaaaaaccttgg

SEQ ID NO: 88334 - DNA, 243 bp, Heterodera glycines
ggccgccaagagcaaacgcttcttctccctccaaccgtgcgatggccaaaatgggcttccactcgacaaagatggaagctgatctgtcaaaagagcagcagggcaaacgcgaggccgactcgatgcgcatgttggcattcttcggcgtttgcctgtccactgttgccacgatgatttgtgtggtgtcggtgccgggggcttatgaacactttcagcaggtgggcaccaaaatgcagggcgaag

SEQ ID NO: 88335 - DNA, 170 bp, Heterodera glycines
  unsure (1)..(170): unsure at all n locations
ggccgccagcgtaacaccgactccactttgctgggcatgggggtgatctccnagtacagagatggcggagtgacgactgtggcgatgatagccaacagagagcacaccgaggcgatcccgagaacaatgtgagtctcttgcgttttagcgctcaaacttgaaaaacttgg

SEQ ID NO: 88336 - DNA, 389 bp, Heterodera glycines
ggccgccggcgcttttgcgcccgccgcggcgatggcgcgccgccggcatggctttgctttttccacggattggtcaaacggcggggcgccgccgcgatttgggtgcgaatttttgcgggggaaacaacgccgggagcggaccaccttctcacgcgcccaattggacgtgttggagggcgttttcaagaacacgcgggacccggacattttcgtgcgcgaagaaatggcgacgaagatcaatctgcccgagtcgcgagttcaggtttggttcaaaaaccgaaggggaaaggcgcgcagccaaaagaaagcccagcagatcacccaccaccaccagtccgcttcttcctcctccggttcctctgtcgccggctccaatccgtcctcagccg

SEQ ID NO: 88337 - DNA, 272 bp, Heterodera glycines
ggccgccaagcattattcttcctatatcccccgggcactttggtggtgcaaatgtcttcaaaaattctttggtctactgtgttttcttctattggtcgattgtgccaccattcttttttggttcttttttggccatgtcaaaaaacgacgacgcccacataaaaacgaaatctttatctgcggcgactgttggcttttggtgttcgattttcttgcgccttctcaactcggcctcgaaattgcactggtcaaccgccgctttaactgcatcg

SEQ ID NO: 88338 - DNA, 402 bp, Heterodera glycines
ggccgccaaggaatgggtgctaaaggtggacgatgacattgcggggcatgtccgacggatggtcgaatggacggagaaaaaatttggaaaaatggctacagaacatccgttgatttattttggagtcccggcagatagaggactatctcgggacaagaacagcaaatggtacgtcccttatgaaatgttcccgggggaacatttcccaccgtttttgtgcggtgggtgctatttgacaactccaagcaccatcaaagccgtcttggaacaagctcacaaaaccaacagcttttatttggaggacgtgcttgctgtacacgggcattttggccgagttggccaatgtcaccgtatcggaccaattgagccatttttatgggaatggattgcagtttgaatgtg

SEQ ID NO: 88339 - DNA, 137 bp, Heterodera glycines
ggccgccagaaggagtccacttcgcccgggccgtcgccgttggggccggaagcagaagggcttcggcgggcagacgaagccgatcttccgcaagaaggcgaagaccacgaagaagatcgtgctgaggatggagtgtg

SEQ ID NO: 88340 - DNA, 254 bp, Heterodera glycines
ggccgccaataatttttaaaaatataacaaacatttttttgtgagaaatgggtcaagcatttggccaccaattgctgcaccgttttcgtcgtccagcattatttgcattatcatcatcaaagttttgtccattgtttcgtgccaccgccgccttcgcaacggatggagcagcagcaaaacaacaaccaactgcaagtgctgctgcacaacaccaacatcaacaagttgaacagcaacaaaaacagcaacaaccg

SEQ ID NO: 88341 - DNA, 532 bp, Heterodera glycines
ggccgcgtcgggcgtagtcaccaccaggcttatgcgtgcctgctgaggccaccgcgccagcagatcacttccgatgcggaaaaacgcctggaggcgatcgccaatacccaggacctcggcgctggctttgtactggccaccaacgacctggaaatccggggtgccggcgagttgcttggcgacggccagagcgggcggatccaggcggtgggtttcacgctgtacatggagatgctcgaacgcgcggtgaaagccatccgcaaaggcgagcaaccgaacctcgaccaacccttgggcggcggcccggagatcaacctgcgcttgccggcgttgattcccgaagactacctgccggatgtgcatgcacggctgatcctgtacaagcgcattgcctcggcggccgatgaagaaggcctcaaggacttgcaggtggagatgatcgaccgcttcggcctgctgccggagccgaccaagaacctggtgcgcctgaccctgctcaagttgcaggccgagcagttgggcatcaagaaag

SEQ ID NO: 88342 - DNA, 182 bp, Heterodera glycines
ggccgccaagtatttgttgattcatttttggtctttgtctgcgtgggtgcgacttgttcagcttctccatttggcactgcttgttcatcttttgctggcgcctgttcttttggccgttggccaaaccgattaaaaagttaaactaattcaaaagagagaggggccccccgacgcgaatttgg

SEQ ID NO: 88343 - DNA, 191 bp, Heterodera glycines
  unsure (1)..(191): unsure at all n locations
ggccgccaaggatgttttcaattttgcatttatataaaaatgtggtgtcaaaaatggcgaatgttgatttggcattggatgaaattatctcnaagtctcgccctcctcctcctcctcccgcaccacaacaaagaaactttgggggggagcgaccatttcgaatgagtgcgtaccaatcgtcccggggtcgg

SEQ ID NO: 88344 - DNA, 576 bp, Heterodera glycines
  unsure (1)..(576): unsure at all n locations
ccaggtttgcctatagtgagtcgtattagagcttggcgtaatcatgggcatagctgtttcctgtgtgaaattgttatccgctcacaattccacacaacatacgagcgcggaagcataaagtgtgaagcctggggtgcctaatgagtgagctaactcacagtaattgcgttgcgctcactgcccgctttccagtcgggaaacctgtggtgccagctgcattaatgaatcggccaacgcgcggggagaggcggtttgcgtattgggcgccagggtggggtttcttttcaccagtgagacgggcaacagctgattgcgcttcaccgcctgggcctgagagagttgcagcaagcggtgcacgctgggttgccccagcaggcgaaaatcctgtttgatggtgggtaacggcgggatataacatgagctgtgttcngtgtcgtggtatcccactaccgagatatccgcaccaacgcgcagcccggactcngtaatggcgcgcattgcgcccancgccatctgatcggtgggaaccagcatcgcagtgggaacgatgccctcattcaccatttgcgtgggttg

SEQ ID NO: 88345 - DNA, 173 bp, Heterodera glycines
ggccgccaagaagtttgagactgaaatggacaattatgctgaagaaagagtcaaaatattcaattttgaaaaacaaaaacgacgtgagcgtccgattcggcgtcgggcgccggagaatttgctgcgaagagcgggcgggttgaagaaatgtacggacttaaggtgtgagcagt

SEQ ID NO: 88346 - DNA, 206 bp, Heterodera glycines
ggccgccaagggaaatccaattcaatttttgagtataaaatgagcgggggccttcttcctctgtctcttcactgttcagctgattctgctcaatttcgcagtcgaaggaagagaagacgatgaactgaagagaaagaaacgcaacacggacgtggacgtgctcggcctggtaaatattcacgcgccgtcgcgaaagagtgtgaacg

SEQ ID NO: 88347 - DNA, 238 bp, Heterodera glycines
ggccgccaagatcgtttcacaatggttgatgtttcccgcacatcagattttcgacactccttaaacgcgcgactgtcaacagctcctattatgtctcatacgctgcctatggtgcctctgcttttcttgtgttggtttacgttacggaatggaagcgtttcgcccgttatattcccggactccgttcgcagatcaaatcggacgaatgaatgaatgtctcgtggggtgtgcggaacgg

SEQ ID NO: 88348 - DNA, 350 bp, Heterodera glycines
ggccgcaagacttaatctttgctttgtgccattcccagcccattcattccttttttgggcgatggcacctcccaatccgtcgttgcaccgcgtccatccgttgagtccaccggcggtgcctccccaccacgggaggcaacaatcgctgctcaacccacaaaaagggcatatgccaacattcagtgcagtgcccaatgaccaaaaggagcatccgaagcgccgccgctcgctccgtctaatggcatttgcgtcggtggcatttgccactgtgtcggtgttggccagtgccatcacattgccaattgtgtacagccatgtgcagagcatccaggcatttatgcagaacgaag

SEQ ID NO: 88349 - DNA, 263 bp, Heterodera glycines
ggccgccaagcgcgagcagaacgacagcgaatcgggccaccgtgagggctcgcgccgtgtgctcatcccggagggcatccaaaaggagagcatcaagtgcgagctggacggcggtcgtttgttcatcagcggaatgaaaacggctgacaaaggcggacgaaccattcccattgaaatgaagaagaaggcggccgtggaccagcagaaggaggaggagaagcagtagaaaaggacggcggaagtgaagacggactgactgtcgg

SEQ ID NO: 88350 - DNA, 113 bp, Heterodera glycines
ggccgccaagcgacattcgtttcgtctgtcctttctccttatggggggcattttcctcacttccgtgcattgtattaagccttggctcgggcgtatatatttatttggatgag

SEQ ID NO: 88351 - DNA, 179 bp, Heterodera glycines
ggccgccaaaggactgaatgtcccatccttcccacgccgtccctcttttgtttgaccgggacaatgaggcacaactgaacttgcccacctatgaaaaactcgtcaatgatcaacaaaaaccttccattggtcaaaattcacgcttccaatatatacccaatcgatgtgccttggaggcg

SEQ ID NO: 88352 - DNA, 226 bp, Heterodera glycines
ggccgccaagcactttcgtaattttttttccgccttgcgtcgggcgatgaccatcaccatttccactccgtatccctgcttctgtcttctgttaccaatccgtctacaatttggccgaaatgactgtggacatcgtcacgccgggcaccacccaaacagcgacaaggacgagaacgaggaggactgcttcacgccgtcgcttgtccgcagcgcgttcgagaactcg

SEQ ID NO: 88353 - DNA, 211 bp, Heterodera glycines
ggccgccaagattaattggaaatccaattcaatttttgagtgtaagggaactgctccttcttcctctgtctcttcactgtgcagctgattctgctcaatttcgcagtcgaaggaggagaagacgatgaactgaagagaaagaaacgcaacacggacgtggacgtgctcggcctggtaaatattcacgcgccgtggcgaaagaatgtgaacg

SEQ ID NO: 88354 - DNA, 443 bp, Heterodera glycines
ggccgaaagaaatttacactgaaaatgtcttcttcgtgtaccgtttttgttgttctgctggtaattgccatctgctgctgttcattaacaattgccatgccagcagcgggcaatgaaattgatagtgtgccacttcggcaaaagcgtgggtatggctatggtgggtacgggtatggggggtatggctacggggggggaatgggcggcggcggatttggcggtggaatgggcggcggaatgggcatgggcggcggaatgggcatgggtggcggaatgggcatgggtagcggaatgggcatgggcatgggcagcggaatgggcatgggatttggacgctgatccgtgaaattaattgcgccaataatcggattgtgaataaaaagataatgggataaaaggaataataaaaaaaaaaaaaaaaaaaaaaaaaaaaaaaccttggg

SEQ ID NO: 88355 - DNA, 341 bp, Heterodera glycines
  unsure (1)..(341): unsure at all n locations
ggccgccaaggactttatggcgaacgcgtcggtggcgtagcagctgtgcggctgccacnaccaggacgagggtgcccgagtgatgtcccaactcaaaattctaatccgcccgatgatttccaatccacccattcatggggcgcgaattgcgtccaaaattttgtgcgacccgaaattgcgccaacaatggctgggggaggggaaggggatgggcgaccgaatcatcacaatgcgctcccaactccgcgatttgtggggcaagggggggtccaagcgcaattgggaccacattgtgaaccaaatcggcgtgtgctgtgtcacgggaatcaggccggaacaag

SEQ ID NO: 88356 - DNA, 269 bp, Heterodera glycines
ggccgccaaggcaaaacggatcagattttggacatggacatgtggcctgtacgacacacaaccagctaatctgtccggactgaatgaagaattcatttccggcgctcggctggacaatttggtctccacgtacactgccatcaaaggggtggtcgaaagtttggaggacaccgacgcttttgacgcggacccaaatgtgggcagtcgcagtgcccagggggcccagtcgcactgtttcgagtggcttttgcgccgcgttttgtccaccg

SEQ ID NO: 88357 - DNA, 215 bp, Heterodera glycines
ggccgccaagaaaaattaattggaaatccaattcaatgtttgagtgtaaatgaactgctccttcttcctctgtctcttcactgtgcagctgattctgctcaatttcgcagtcgaaggaggagaagacgatgaactgaagagaaagaaacgcaacacggacgtggacgtgctcggcctgggaaatattcacgcgcgcgggcgaaagaatgtgaacg

SEQ ID NO: 88358 - DNA, 242 bp, Heterodera glycines
ggccgccaagcaaatttggggaggggtggttcgcaaggagtgccgagggtgaacagacaacgaaagggcgcgatatcacgccgctgttttgcaactgaagcgtggcaccggttcgtacgagtacaaccgaatcgcttacctgcacttcgacctgcgcgcgatgccaggtgctcactccgggccgactttccttccttggggtcgcgaatatttgaaacgttatgaaatcggtctgcgtgccg

SEQ ID NO: 88359 - DNA, 209 bp, Heterodera glycines
ggccgccaagtgcttagagcccattttttaagcgaagagcggcttcgcgtgctttcccgacccactgaactcgtaagtttggggcgctgatttttggcagacaatacattcaacggtgacccgaacggcgtgatgccgaaacaccttgtgtggctcgactttgttcgtttggtgtgccaaaatagatgcgtgtgtgcatatgtaatttg

SEQ ID NO: 88360 - DNA, 581 bp, Heterodera glycines
  unsure (1)..(581): unsure at all n locations
ggccgctggagttttccaggtcgggcagtggacgctgttgcgctgccgccaaagtctgcaagacccgcggtttgaaggttggctacgtcaggtacaggaggggcgggcatgaaagcgttaggtgaggcgtgtacgccacaagagtgtcagctggaagcggcggtgcgcggggttgccagttggggcggcaccggcgttcgttatgaaccggtcagcggcgggatttccaacaccaactggcgggtggaagtggccgggatcgacactgcgtatttcttcaaggtgccgggcgtgggcaccgagatgttcatcgaccgccgcacggcccacgacgccagcctcaaggcggcgcaaaccggctatggcgcgccggtgttcgcattccttgaagagttcggcgtggaagtcttcgagttatggagggctggcgcgcctcctccaaccacgacttcctcnaccgcgacgtgcgccacaacgcgctgcacgccctcaaggcgttcaacgaccagccgccactggtgcagaccaagaccgtgttcgacatgattgccgagcaccagcggcaggtggagcaactcaac

SEQ ID NO: 88361 - DNA, 418 bp, Heterodera glycines
ggccgccaagggtggagccatttttttccgttttgtgccttcggtgcaatttttggcgaatgattcccatcttttgcccctaatcggtcagttgtcgtccacaaatcgcgcctccgttcctccgccgctttgtgcgcgccctctccgccgcctcagtgcctttccatccttagcctttgtgcgcttttctccgccgccgtgccaatgtccgccgctgcttccgctggccaaacgcaccgatggggcggaatggccgcaccgcaccgcagccgaccgccgctgcgctttgaccgcacctttcttgaggagcgcgacaatcaggtgaagctcatccaaatgctgtgcggtctggtcgcccttctgctgacagtccaatgctggccaaatccgcttttccccttctgtgtgggccgtgtcg

SEQ ID NO: 88362 - DNA, 228 bp, Heterodera glycines
cggccgccatccatttgccatttcgtcctccggcgggtacaaggcgatggtccatttttaggggtgaaaatcagttacgtccagccctgcacccaatgggaccaattataagcacacttgctgagtcagaagaacaaagcccaaattcgatggagaagaaatagagcttggggaaaaggttaggaaaaaagagcggaagagagataccgtagccaattgtggccttgg

SEQ ID NO: 88363 - DNA, 271 bp, Heterodera glycines
ggccgccaagcaacaattggtgcgtgtttctttgccgcgagtgggcggtgtatccccatcccccgccgtgtttctcccatcgatgccctcctcctcctcgtggttttgggggacctccgccgttgggagccgcctgtgaccatgagccgaaggggcacgactaccagctgtgcttccaactgagcacgagttctgtgggtgtgcttcttccgcttgcgctgcgcgggagcttctgcgccaacacttgcgcattgatttgtctgtgcactcc

SEQ ID NO: 88364 - DNA, 262 bp, Heterodera glycines
  unsure (1)..(262): unsure at all n locations
ggccgccaaggaggatttcaatcaatttctttactaggtgtggcgtggaatctgtgaattttatcaatcatctacccgaaaaactttattttttggagtctgatggacangtttttcacaatttgaatgatatcgacgacggagagctcatccaattgcgttttcnagcatgtggaggaaaaggagggggtggggtcgggcttcntancttccgaattcacaagtcaagcaaccaattgatgtgtggaaatttgcaaggggg

SEQ ID NO: 88365 - DNA, 268 bp, Heterodera glycines
ggccgctttgctgatcactggcggtgttgtgggcgcaacgggggcgagtatttttgttgatcgtaccaaattctacgaagagacgatgaaggtgtcaatgggacttgcggttgtcttcggtcttgcgttcttacagtttgtgctccatgttggcatgaaaccgtggctgttggtgacctgcttcatttttggcgtgtgcggcttggctgcctaccccgtgggacttcaactgtcagcagagtgcactttccccgtctctgaaacaacg

SEQ ID NO: 88366 - DNA, 139 bp, Heterodera glycines
ggccgccaagctccgccaccgcaatgtcaacattgggcacaacaagtgtgagcgcatttgggtcttgcggttgctgctcttcctcaaccgactgttgctggggcggtgccgcttgttgcggctgctgtttggcttgcgg

SEQ ID NO: 88367 - DNA, 648 bp, Heterodera glycines
gtcttatgggagaaaataatactgttgatgggtgtgtgggcagaggcgataagaaataacgccggaacattagtgcaggcggcttccacagcaatggcgtcctggtcatccagcggatagttaatgatcagcccactgacccgttgcgcgagaagattgtgcaccgccgctttacaggcttcgacgccgcttcgtgctaccatcgacaccaccacgctggcacccagttgatcggcgcgagatttaatcgccgcgacaatttgcgacggcgcgtgcagggccagactggaggtggcaacgccaatcagcaacgactgtgtgcccgccagttgttgtgccacgcggttgggaatgtaattcagctccgccatcgccgcttccactttttcccgcgttttcgcagaaacgtggctggcctgggtcaccacgcgggaaacggtctgataagagacaccggcatactctgcgacatcgtataacgttactggtttcacattcaccaccctgaattgactctcttccgggcgctatcatgccataccgcgaaagggtttgcgccattcgatggtgtcaacgtaaatgccgcttcgccttcgcgcgcgaattgcaagctctgcattaatgaatcggccaacgcgcggggagagg

SEQ ID NO: 88368 - DNA, 277 bp, Heterodera glycines
cgccagagacattggggacggagacccggagagaatgtgcccaggggggtggcggaatacgtcaaaaaaacttttgagaattcgtcggtccgcgtttcgattatcgacgacgttgaccaaattcgccgtgactatccgcttatgtcggccgtttcgcgttgtgccaatgccatcgaggagcacaaagctcgtgtcatttggctcgaatacgacgggggagaagagacggagactctgtttttagtggggaagggcgtcaccctcgacacgggagggg

SEQ ID NO: 88369 - DNA, 282 bp, Heterodera glycines
ggccgccaaggccaggacagccaggaggccaaggaccgcccggacctcctggcgcgcccggtcagcccggccagcctggaaactctggccagcctggacagcccggagcaccgggacagcccggcaaggacagcggctactgtgcgtgcccgccccgctcttccgtgttggcagtcaaaaagaagatggcgggggcgaagaaagcataagcgacaagcgcagggggaagagaaccgaaagacaaaggaccgacgcgaaagcgaagctgaagatgatcataat

SEQ ID NO: 88370 - DNA, 463 bp, Heterodera glycines
ggccgccaaggtcggttccattcgtccacgacttcctcaatgcaggggcatcaccaccaccaccacaacagccaccatcaacgccacaaacgttcttattcttccgcccgccatgtgttgatcaatttcggcttccaatttccgcatgatttcaaacttggcagtggtcgttacagcaaagtgtacaaaggattttaccgcgaagcaaatcgttattttgcaatcaaaattaccgacttggaagccgtttctgacagattcaagcataagtttgtgccccgtgaactcaaagtctggcgcgagttgagtcacccgaaccacgtccgtttgtacaaggatttcatgaagaatgactttctgttcgagatcatcgacttggctgttggcggtgatatgctcaattatttgcggaaccatggaccagtcaaagaagcggtctgttctggctggatgcttcagctcg

SEQ ID NO: 88371 - DNA, 426 bp, Heterodera glycines
ggccgcatgccttttgctggccgacgacacacacacgttgtgctgaggacgttcgaccgactacgacacgacgcgtacgatgaacgaggaatactgcttctctacttcgactgctgttgcacagagctgggcccaaacaaacttccgaccagtggacgagcaaccgaacagccttgtggacacgctcatcgcgaaactttcgcgcacgactttcgagcagttcacttccgaagtcagtgctcaggacattcacaagctttgcgatatcaccgtgcagtgtgctccagcaacagtcaatgctcatccgtctgcagcctcctgtggtcctttgcggcgacatccatgggcaatttcgcgacttgctgagaatcttcacgacgatgggctttccgccggacaagaagcacctcttcctcggggattacg

SEQ ID NO: 88372 - DNA, 108 bp, Heterodera glycines
ggccgccaagaattttttgcattgttttgaactgatgcagcaggaggatctacaaggacgcgttcacagacgatgagctcgcctctgactcgttcccgatgaagttgg

SEQ ID NO: 88373 - DNA, 643 bp, Heterodera glycines
  unsure (1)..(643): unsure at all n locations
ggccgcgttgctggcgtttttcctaggctccgcccccctgacgggcgtacaaaaatcgacgctcaagtcagaggtggcgaaacccgacaggactataaagataccaggcgtttccccctggaagctccctcgtgcgctctcctgttccgaccctgccgcttaccggatacctgtccgcctttctcccttcgggaggcgtggcgctttctcatagctcacgctgtaggtgtctcagttcggtgtaggtggttcgctccaagctgggctgtgtgcacgaaccccccgttcagcccgaccgctgcgccttatccggtgactatcgtcttgagtccaacccggtgagacacgacttatcgccactggcagcagccactggtaacaggattagcanagcgaggtgtgtaggcggtgctacagagttcttgaagtggtggcctaactacggcgtcactanaagaacagtatttggtatctgcgctctgctgaagccagttaccttcggaaaaagagttggtagctcttgatccggcaaacaaaccaccgctggtagcggtgggttttttgtgtgcaagcagcagattacgcgcagaaaaaaaggatctcaagaagatcctttgatcttttctacggggtctgacgctca

SEQ ID NO: 88374 - DNA, 268 bp, Heterodera glycines
ggccgctttgctgatcactggcggtgttgtgggcgcaacgggggcgagtatttttgttgaccgtaccaaattctacgaggagacaatgaaggtgtcaatgggacttgcggttgtcttcggtcttgcgttcttacagtttgtgctccatgttggcatgaaaccgtggctgttggtgacctgcttcatttttggggtgtgcggcttggctgcctaccccgtgggacttcaactgtcagcagagtgcactttccccgtctctgagacaacg

SEQ ID NO: 88375 - DNA, 245 bp, Heterodera glycines
caacaaaatgtggaaataaaaaaaaaaacttcataaaccccgtaattcgggagcggtaccttcactcgtaccaattttgcctatacatattgcccttagaacttacaatcctcatagcaataactgcttcctttgataaattcttctcctctcaccattttacataacatactaccctcaattataaaacataaaacccttagtgcctaataactgatctaactcacattaatttttttcccctc

SEQ ID NO: 88376 - DNA, 346 bp, Heterodera glycines
ggccgccaagaacagacgcgcgacgagggaaagttcgttgagtgggatggtgccgagatgggaaaggtggtggtgcgttttccacccgaagcaagcggttatttgcacattggacatgccaaggccgcactgctcaatcagttctaccggcaccaattcgaaggtgggctgattctgcgcttcgatgacacaaacccggccaaagaggacgcacacttcgagaaggtgatcgaagaagacctgcgcctgttgcaagtcgagtgggacaaaatgagtcggacttcggaccattttgacgcccttttggacttttgtcaacaattgctggtcgctgggaaggcctacg

SEQ ID NO: 88377 - DNA, 749 bp, Heterodera glycines
  unsure (1)..(749): unsure at all n locations
gcatcaagcttggtaccgagctcggatccctagtaacggccgccagtgtgctggaattcgcccttcgcggatcctatactttttttgatttgctaaagtataaaatggcttatttagagttagttatggcgttgattaaaacattgacaaatgacccctttatataggggcttggggaatccaatcacagcaacgcaaattaaggctttccaatcaagtgtctttttctttattgtcattccctttagaaaaaatatttaatttaatttccatttgagtaaacatgtactctatcgaaatacacgaaaaggtagtccatgcctaaaggtagcggcttctaatctcttagaactagtttaggttgaccaagaatttcgagatgagtgaacaaaagactaaaagcaaatcaaagtgtttgaagactatagagaaaatggaatggagggaaaacacatgactcccaaaaatactttanaaatatgttcgagctttaaatatatgcacttatgatataagaaatatttatacaatcaaatcatttaaaagataattacaaataattttatttaataaatattaattcataacctacaataaatagtacgtgatttgctatataatttaaactatagtgatgatgtaaaaagttttcactatcagtatttgtatacgcttaaatgttaaatccgatatttccacttgcatctcaccaaatatctttgagttttcttcacaactactaacttcta

SEQ ID NO: 88378 - DNA, 318 bp, Heterodera glycines
  unsure (1)..(318): unsure at all n locations
ggccgccaaggagagaaaaataacttataaaatgatggcacgacgttgggctccaaccgaacaacctcccgtctattcgatatttgacaacttctgcgttttccaaagctcgctatggtttccggccttccggtggagcaggacaatatgcatttcgctttaaagaagcttttgctgcgcgtcaggtggcgccgactcttcgtgaacgccttctcggccctaccactggcaaaccatttatcgtcggaacttacgcacttgccggggcttcantttttggcattggaatgttgtgctactacggacttaccacgactg

SEQ ID NO: 88379 - DNA, 684 bp, Heterodera glycines
gcttccactttttcccgcgttttcgcagaaacgtgggtgggcgtggggaccacgcgggaaacggtctgataagagacaccggcatactctgcgacatcgtataacgttactggtttcacattcaccaccctgaattgactctcttccgggcgctatcatgccataccgcgaaaggtgttgcgccattcgatggggtgaacgtaaatgccgcttcgccttcgcgcgcgaattgcaagctctgcattaatgaatcggccaacgcgcggggagaggcggtttgcgtattgggcgctcttccgcttcctcgctcactgactcgctgcgctcggtcgttcggctgcggcgagcggtatcagctcactcaaaggcggtgatacggttatccacagaatcaggggataacgcaggaaagaacatgtgagcaaaaggccagcaaaaggccaggaaccgtaaaaaggcggcgttgctggcgtttttccataggctccgcccccctgacgagcatcacaaaaatcgacgctcaagtcagaggtggcgaaacccgacaggagtataaagataccaggcgtttccccctggaagctccctcgtgcgctctcctgttccgaccctgccgcttaccggatacctgtgcccctttctcccttcgggaagcgtggggctttctcatagctcacgctgtag

SEQ ID NO: 88380 - DNA, 371 bp, Heterodera glycines
ggccgccaagcttttttcctaatgaatttaaatttgattaattacactaattactgccattagttaatctatgccttttattattggcaatttcagtcacaaagcaattatttgattttccaaaaatggggaagggccgaactaccggtaatagcggaggaggcaaaggcggaagcggtggaggcggagacgaaaaaagcggcggaagcggagcggggaaaggaacggtggctgccggaagcggaggtgtacgcggaaagggtgccggacagagcggaccagcagcagcagcagcaggcactgacaaaacgcgtgctgcaaaagccgctgccgctgcgcgcggtgctcctgcggaagaaagtgtaaaatcg

SEQ ID NO: 88381 - DNA, 636 bp, Heterodera glycines
  unsure (1)..(636): unsure at all n locations
ggtgatacggttgtccacagaatcaggggataacgcaggagagaagcatgtgagcaaaaggccggcaaaaggccgggaaccgtaaaaaggccgcgttgctggcgtttttcctaggctccgcccccctgacgagcatcacaaaaatcgacgctcaagtcagaggtggcgaaacccgacaggactataaagataccaggcgtgtccccctggaagctccctcgtgcgctctcctgttccgaccctgccgcttaccggatacctgtccgcctttctcccttcgggaagcgtggcgctttctcatagctcacgctgtaggtgtctcagttcggtgtaggtcgttcgctccaagctgggctgtgtgcacgaaccccccgttcagcccgaccgctgcgccttatccggtgactatcgtcttgagtccaacccggtgagacacgacttatcgccactggcagcagccactgggaacaggattagcanagcgaggtgtgtaggcggtgctacagagttcttgaagtggtggcctaactacggctacactanaagaacagtatttggtatctgcgctctgctgaagccagttaccttccgaaaaagagttggtagctcttgatccggcaaacaaaccaccgctgg

SEQ ID NO: 88382 - DNA, 280 bp, Heterodera glycines
ggccgccaaggcagaaatcacctattattgcggacaatttgggttcgttcagcgatttggacggcaaaaagaacatcgaagagattttggcagcgaaaagggaggcgatcaaaagggcgacggcggtgttggagatggaagtgccagcggaggaggaggaggacaacgccaaattgataaggtggccacaacgctggagatggacaaaattcgagcgcgaggctttctgaagttcacctacaattacgacccattgctggacattggaaggaaagtcgag

SEQ ID NO: 88383 - DNA, 494 bp, Heterodera glycines
  unsure (1)..(494): unsure at all n locations
ggccgccaaggaacaagtccgaagcgacagcctcaaaggcacagagcggctccacacacgcagccatgacgttcgaactgccaaagctcagctacaactacgatgcgttggagccattcgtggacacgaccaccatgaacatccaccacaccaagcaccaccaggcgtacatcaacaacatcaacaactacattgggggggacaagggtgctgccctcaaggggaagtccatcctcgaggtggtgcagagcgccacggaggcgccagtgcgcaacaacggtggcggtcactacaaccacacgctgttctggacgttcatgaccaagccaggatcgaccaacacggcgccacacggtgccctaaaggagcgcattgagaaggagttcggctctttggatgccatgaaggagaagttcaacgccgctgcatcgactcgcttcggctcnggctgggcgtggctcngcgtgaaggccgacggcacgctcnccatcacg

SEQ ID NO: 88384 - DNA, 174 bp, Heterodera glycines
ggccgccaagccgtgctcacatccgcattttaactggtatgcgtgcgggctctcgcctccaatccgtcggccatcgccgtaggatggaaaaggagcggcgttccgtttggctgctcatttccatcgttttgctatttttcctctgtgataccggcggtgtgattatccgattca

SEQ ID NO: 88385 - DNA, 345 bp, Heterodera glycines
  unsure (1)..(345): unsure at all n locations
ggccgccttctcggtgccgtattgttcttgactttcgtcgcgcccggggtaattttacttcntctccttcacgcccgcctttcctttctttccagtatgaggacattcatttgtcctctgaggaaggaagatgtttacggcctgcttgccaacacccgggatctctcccactggttgcaacgtttctttctgcagcttcggcggcataacatcaatcttttcacgaggtgctctggagtttaatgttcctcagagtgccgccatattctatgggcatctgcagatcctctgggcctttgtgcccacatcttgacctccgcgtgcgtgcacctgcacaccccttgg

SEQ ID NO: 88386 - DNA, 532 bp, Heterodera glycines
ggccgccagcggagggacaccaatgattctggggcgatgtttgcggttatttttgcctttattcgtttttctccaacacttagattcatcggtgggaggagaacaacggagttcgaacgacgaggaccgagtggaagcggaaatcactcacaaagatccccgtttcaaagtgcaaattgaagatcgaggcgggcgaggagttggatcagttcttcaagctgacggactaagagggcaaactgatccgatccaatttccgacagaatccctataaatttgtgcttggccatgggcatgccatccctcccatggacaacgcaatgctcagaatgtgcgtgggcgaacagcgcccggtgaccattcctgcggaaacgtttgcggaaaaccaacgggccagggggtgggcgaggaccaagccatgcattactttgtggagcctcaagtccatctttcacgcattgccccgctagaaatggatggaggacgacagactgagcattgaggtcactctcaaaatacacgaagacaaatg

SEQ ID NO: 88387 - DNA, 328 bp, Heterodera glycines
ggccgccagttctccctatttaaagttttacaaaataatggggacagaatttttttaattaaaaaaataatttcgtcggctaaagcatgctgacaacctaaatttgaactgggtgcactataacggacgctttctgaaacgattgggccgaaagcgacggacagagcgcagcaaaattggcaaagtgtggtgctttctgttccgctgtacgcacccggccaccactgaccaccaccacaaccaccgccacttcaacaactttcgctcgtcacttttggccgcgacgcccgcgaagggccaacaacagaagcaaaatcagcaacacaac

SEQ ID NO: 88388 - DNA, 142 bp, Heterodera glycines
ggccgccaaggcggaagccccggccaacccggcgaccccggaggcgacggcgagcaaggacagcctggagcacagggatcaagcggccaatgctaccactgcccaccgccccgcaccgcccccgggtactgagtgtgatcag

SEQ ID NO: 88389 - DNA, 107 bp, Heterodera glycines
ggccgccaaggacttgcaaagtgaaccgtgcattgaagacttggggcccgatgacagtaccgttgccgaaaaattcaggtggccgataaatgccacttatgtcaatg

SEQ ID NO: 88390 - DNA, 220 bp, Heterodera glycines
ggccgccaagaaaatttgttatacctaagtcttgaaatgtcttgggtgttttggcatcaaacctcagccatcgtcgattcctgcgcctccggacgaccccaacagaaaccctcccacgcccgccgatgagaagcagcagaaaattggggcacagagtgcctacacatttgactcaactgcgctggaacgggcggcacaagcagcaaaaacgctggaaaag

SEQ ID NO: 88391 - DNA, 463 bp, Heterodera glycines
  unsure (1)..(463): unsure at all n locations
ggccgccaaaattgcgaaaaatgccgcgtcaaacgcgcagatttaatgtcaaaaaccaggcccctgagcaaggcggacaagttgcggggcaggcaaaatcggctgctcgcgcaaagccatcccgactttttggaggagcggcgcagtaagcggaagcagtacttggacgaagggtttgagccaacattttttgacgacgcggcggaggagggcgaggcgcaaaacggagcggcactgaccaacggcgccaccggcgccggcaaaaaggcgtcgtcgcggcggaagcgcggcacggcggaggagcaggcggacgcactcttccgcaacattcaaggggaccaattggacaatttgacgacggatgatgaggaggaggagggagcanaaatggcggatgaagaggaggagggaagatgttcancaggagggggagggagaagggggcttggacaggatgcagagg

SEQ ID NO: 88392 - DNA, 473 bp, Heterodera glycines
  unsure (1)..(473): unsure at all n locations
ggccgccaagctcaaacttattcaaaatggacttcgacgggcggggagggcttaccgcttcgtgggttactccacggtgtgcttctccatcatctctctgctttcggggtgcttcacgctgccgatgctgaagagctacgtgtccaacgttgggctgaagatggactctgagctcagctcatgccaaagcaatgcgaaggacatctggtcanaagtgagtcagctgaaggggctgccgttgatcgtcagcggaaaccgtacggcgcgtcaagtgtgcggtggcagcggcggctacggaagctgccaagactgtggctcaggcggaggacctggcccggctggcccgcccggacagcccggacgccccggaaaccctggagctcccggatcgcccggacagcccggacactccgtccagactccctgtgagcaagtgcgcccgccaccatgcacaccttgccccggcggtgagc

SEQ ID NO: 88393 - DNA, 145 bp, Heterodera glycines
cacgaaattttgccaaataaaaaatacattgagaattgtgcgatcagcgttttggaaatgccaaaatgatcgggaaaatggtgagagacgaaaggacagcagcctcgtggatcatcagtgggggtgcttctccaattctcgatgg

SEQ ID NO: 88394 - DNA, 383 bp, Heterodera glycines
ggccgccaagatttgttcgtctccaagtctcgtcgaacgtgtgcggggattgttcatcaatccttcatcggttgacacccgcgcgcacttcaaaatggacgccctcaaaagacttgcgagccgtgcacggcagaagtcggcggagatcatcctgagcgcggagaagaccgaaaatcggcgccgagcttgaacaattgcggaccaagaccgacaagacggaggagcacatgaagaagctggtgcatgccatcgaggtgtacctgcagccgaaccctgcagtccgagcgctggacccgcgaaaggacaaatccggccgacagaatacgctggacggtcttggggaggcgatgaaggaagcagcatcgaaagcggtgggcgccgag

SEQ ID NO: 88395 - DNA, 201 bp, Heterodera glycines
ggccgccaaggttgtaaataattccgctaatatttgttgattgatggtgggcctttctctgctaaatgcgactcgttcagcttctccatttggcactgcttgttcagcttttgctggcgcctgttcttttggccgttggccaaaccgatgaaaaagtcaaacgaattcaaaagagagaggggccccccgaggcgaatgtgg

SEQ ID NO: 88396 - DNA, 178 bp, Heterodera glycines
ggccgcctccgccgtttccgccccatccgccgccattgcctcccgggttgtatccgccgtagccgcgctttaaacgtaaagtgtcagatggagccgcagaatttgttgacgtgaaaatcagaagcaaagtaatgacaaaagaaaggaacaaaagggggaaagaaaaaaaaaaacttgg

SEQ ID NO: 88397 - DNA, 163 bp, Heterodera glycines
ggccgcgctccagaaaaatggctattttacattattgtggaggagcgaaatcacgctaaccttatggaaaagcttgaagactacgctaagatagaaaagtttattatggaccattacaattcgggcaatgaaattctgaatgaggctgagataccccaaaatg

SEQ ID NO: 88398 - DNA, 311 bp, Heterodera glycines
ggccgccaagtatgcattgatcaaatggtgctttcgggtgtgcatatattctctgtccgtctccccgtttctctcgctctctcctctacgttttttagtaattctcctcgtcgctgtccttcgccgccctttcgtcctcaaatgggtcaatcggccgcaacagaaatggacgccgcatgcatttgacgggttccgtaggcgagccgtacacatcgttcagcagcgtgtcgtccaggtccaattcgcccagcgaaaactgcacatttaaattgtgtgagtgttttggcgcatattttcgccaattcattacg

SEQ ID NO: 88399 - DNA, 207 bp, Heterodera glycines
ggccgccaagcgctgaccaactgcagaaaatggaaggcgaaacgggccttctgaagaacgatgtggcggaacgaaatgaaggttcgttgtccgcactgtaaacagccgaacggcgaattgcgcaatgacagcggacgcacttttcttctcgatttcagcaaacagacgggcacagaaaaaaaaaaaaaaaaaaaaaaaaaaacttgg

SEQ ID NO: 88400 - DNA, 242 bp, Heterodera glycines
ggccgccaagcactcgagcactgggagaaatttggaagcgaaacgaagggatcggaatgagattaatgattgccgaagcactgacaatgagacgaaaaagagaattgatgcttaatgcccgacaaaaatttatgatgatgaccaaatttctattatatctaacaagtcccattaatttctatatcggtaatcgattcacaaattaaattattacttgaaaaaaaaaaaaaaaaaaaacttgg

SEQ ID NO: 88401 - DNA, 320 bp, Heterodera glycines
ggccgccaagtttttattgtgctcgccaaattgacactagcagagaagtgttcggatatcagcagactcagttcaattacggcgcttacgcttcagcaaacggtcagcagcaaagtttcatcaattatgctcagcaacaaaacaattcggcgactgctccggtggcgggaaatgccacaacaaatgcatatgctgcctcccaatattcgttggctgcttcggcttacgcacaatacagccaagccgcaacacaacagcagtccgttgctgcaacttacggagttcagcctccgccaccacctcctgactattcagcttcg

SEQ ID NO: 88402 - DNA, 495 bp, Heterodera glycines
ggccgccaagggttttacattttttgtcttgtttttatcaacaacagatgcaggaaaaggctttttctgttcgatcgcaggaaggcgtccttcagcagcagggaacagctcaaaatgggaataaagaggaggaagccaagagacaagcggaacagcaggaaatggcaaagaactccattttgacacagattatcgacgaggaggggatgtcccggctgagcaatttgagggcggcaaaacccgaaaaagcgcgcgcagtcgaaggaatgcttatcgaaatggcgaggtccggtcgtattcgtgggagaatgtcggacagtgaattacgaacacttctcgaccgggtgtctgcagcgggcggaacgaaaagcaccaaagtgaagtacgacaggaggagagctgcaattgattcggacgaagagttagacaaaatggacgagaagggagcatcatccactgacgacgacgattagtgacctaagagccaatggatcg

SEQ ID NO: 88403 - DNA, 343 bp, Heterodera glycines
ggccgcattctcaggtgccgtattgttgttgacgttcgtcggcgccggtgtcgttgtcgtcgtacattcgcgcccgccgttccattcgttgcagcaggaggacgttcagttggcctaggaggaaggaagatgtttaggtcgagcatgccaaaagtcgggatttcgcccagtggttgcagcgtttcattcggcagctccggtggcagaacatcgaacgtctcaaaagtagtcgggagttcaatgttcctcagagtgccgccgtattctatgggcgtatgcggattttctgggcgtctgtagccacgccttgacctccgcgggcgtgcacgtccacgccgcttgg

SEQ ID NO: 88404 - DNA, 242 bp, Heterodera glycines
ggccgccaagcagcaaacgcttcttctccctccaccgtgcgagcgggaaatgggcttccactcgacaaagatggaagctgatctgtcaaaagagcagcaggggaaacgcgaggccgactcgatgcgcatgttggcattcttcggcgtttgcctgtccactgttgccacgatgatttgtgtggtgtcggtgccgggggcttatgaacactttcagcaggtgggcgccaaaatgcagggggaag

SEQ ID NO: 88405 - DNA, 472 bp, Heterodera glycines
ggccgccagctcaacttattcaaatggacttcgacgggcgcaggagaggcttaccgcttcgtggcttactccacggtgtccttctccatcatctctctgctttcggtttgcttcacgctgccgatgctgaagagctacgtgtccaacgttgggctgaagatggactctgagctcagctcatgccaaagcaatgccaaggacatctggtcagaagtgagtcagctgaagggtctgccgttgatcgtcagcggaaaccgtacggcacgtcaagtgtacggtggcagcggcggctacggaagctgccaagactgttgctcaggcggaggacctggcccggctggcccgcccggacagcccggacgccccggaaaccctggagctcccggatcgcccggacagcccggacactccgtccagactccctgtgagcaagtgcacccgccaccatgcacaccttgccccggcggtcagc

SEQ ID NO: 88406 - DNA, 379 bp, Heterodera glycines
ggccgccaagtcttcccaaagtcttctacgttgtgttcgaaacttcgatgggcgcaatgtccattgagttgtattggcaacacgcgccgcggacttgcatgaacttccaggaattggccaggaaaggttattacaacaacacaattttccaccggataattgctgattttatggttcagggcggtgatccgacacggacgggcagaggtggcacgtccatttacggcagtcgatttgcagacgaaatcagtgacgatttgcgacacacgggggccggcattatttccatggcgaattcgggtcccaacaccaatggttctcagtttttcattaccctcggcccaactcagcatttggacggaaagcatacaatttttgg

SEQ ID NO: 88407 - DNA, 498 bp, Heterodera glycines
ggtggtttttcttttaccagtgagacgggcaacagctgattgcccttcaccgcctggccctgagagagttgcagcaagcggtccacgctggtttgccccagcaggcgaaaatcctgtttgatggtggttaacggcgggatataacatgagctgtcttcggtatcgtcgtatcccactaccgagatatccgcaccaacgcgcagcccggactcggtaatggcgcgcattgcgcccagcgccatctgatcgttggcaaccagcatcgcagtgggaacgatgccctcattcagcatttgcatggtttgttgaaaaccggacatggcactccagtcgccttcccgttccgctatcggctgaatttgattgcgagtgagatatttatgccagccagccagacgcagacgcgccgagacagaacttaatgggcccgctaacagcgcgatttgctggtgacccaatgcgaccagatgctccacgcccagtcgcgtaccgtcttct

SEQ ID NO: 88408 - DNA, 300 bp, Heterodera glycines
ggccgccaagatggtttctttctgtgttgccattttcatttttggtctgcttttctctctgtctctgtgtgaatggacttcaaagagttggtcaaccaagcggaacgaaatgcgaagcggcaagagcgcaaagtgcacgaggcggaacgcgagatgaaggcgcgtcagcagagccaaatggaacgcctcgcttatgaaaaggcgcgcgaaaagttggtgttgaaacgacgcgctgtcgccacaatgcaacagcaaaaggaacagcaacaacagcagcagctacaacagtcacaaaagcag

SEQ ID NO: 88409 - DNA, 272 bp, Heterodera glycines
  unsure (1)..(272): unsure at all n locations
ggccgccaagcattattcttcctatatcccccggtcactttgttgctgcaaatgtcttcanaaattctttggtctactgttttttcttctattggtcgattgtgccaccattcttttttggttcttttttggccatgtcaaaaaacgacgacgcccacataaaaacgaaatctttatctgcggcgactgttggcttttggtgttcgattttcttgcgccttctcaactcggcctcgaaattgcactggtcaaccgccgctttaactgcatcg

SEQ ID NO: 88410 - DNA, 344 bp, Heterodera glycines
ggccgcattctcaggtgccgtattgttgttgacattggtcgtggccggtgtcgttgtcgtcgtcaccttcgcgcccgccgttccattcgttgcagcaggaggacgttcagttggcctacgaggaaggaagatgtttaggtcgagcatgccaaaagtcgggatttcgcccagtggttgcagcgtctcattcggcggcggcggtggcagaacatctaacgtctcaaaagtactcgggagttcaatgttcctcacagtgccgccgtattctatgggcgtatgcggattttctgggcgtctgtggccacgccttgacctccgcgggcgtgcacgtccacgccgcttgg

SEQ ID NO: 88411 - DNA, 279 bp, Heterodera glycines
ggccgccaggcttcgttggttgacatgagcagaccgccgatgaaaaaatggagaagccaaacagttcagcaaacgtttcattctccaatgtgaccgacaaattccgtgcccaccccgtggagaaggtcggtagtccgatcacaatcaatcagtccatttcggacccgaccacggagctgactgaggaggacattttccgcatgaaatcgatgtccattgaacagaacgggtggaaaaacggcccttgtgccagcgaattgcaatccgccgtctcgcagg

SEQ ID NO: 88412 - DNA, 417 bp, Heterodera glycines
ggccgccaagatttggatgggcatgttcaaatacacgatgaacttgggcattgcctttgccgacctaaattaaatggttgggccgtaaattgtcccatttgctctccgaagtgctcgtcctcgctgcgcttggtctctttgttacgctgcgtttgacaggtttcgatgccaactttacctttttgtccaacggctctttggtcgctgcggttggcttttgtggcattttgttcaactcggacaaattggccggcagcgaactgttccccaccggagtgcgcaatttgtcctgctcctttggccaaatttgcagccgaattggcgtcgtcggcgccccaatgcttttctttttggatgtgtgcgatcaccgctattgttctgtcttcccccatttcactatgattgctttggcacttg

SEQ ID NO: 88413 - DNA, 472 bp, Heterodera glycines
ggccgcaagcaacagtacaacaacaatcgccacagcagcaaccgtgggcgccaaagccgaaaccgccgccgaagaaagcggacacaacacacacaacgctgagcagaacaacaaatgtgctcatgaacaagcaaaattgcattatttcccgtgtgtgcgattataataccaacacgctgacaaaaaaatgaagaaaaaaaaaaacgattattcaaaattgggaatgaatgtagtgtgctgaagtcaatccaagtttatatatctgtacaatctgcgggcttagacattatgatgttttatttgaccggaaaacaattagtcgctgatgggacacagcacaaagtacaccactgggaaggtgcgcgaaaaattggcggttaaccgtccccctgctagtgattgatcgtccttagatcggcgattgaacaagcatttattcatttacggaagctgtgtggtgcctcaaacttgg

SEQ ID NO: 88414 - DNA, 538 bp, Heterodera glycines
ggccgccaaggtccttaagggtgtttccctgtgcttccgccccgggtccttcgtccgtttcgttagcttcgtcttcccaaatcccctcccccacgcatccaaaattcattctgtttgaccgattgttgcccaatgaattggtttgagccgcgcgtgttgcgttccgcccgtccctttgtgcccagcggcggcgaacggcgggacgaagtcggaaaaacgggcgatgaccaggcagtggttcagatgatgtgcgatttggtgttgggcgagattcaggcggagatcagccgagtggagaaggaaatggaacgacgacgacaggacgagcggagactgaccaatcagccagactattcctggcttatggactggcgactgcgtgcaaaacgacccctcagcttcagagaaagctccgaagtggaattgttatgttcaaaagtcagagccgaggaatggcggcgactgctcaaagaatggcacataaaagttcgctttgcggaaagtcgggacgaagttttggacacatttcgggcattgg

SEQ ID NO: 88415 - DNA, 146 bp, Heterodera glycines
ggccgccaagagaagcgctgggtgctcagagccaaacgggtcgctttctgagaggccaaagacgcgggacgaggcgagacggacgcgcgaccctttgaccggcgaaccatcaaaccctcagactttctctcatcattttcacccat

SEQ ID NO: 88416 - DNA, 146 bp, Heterodera glycines
ggccgccagaataagctaactcttcgagtatcatgctgtcgagcatttcgtacattgcagtggcggcctcgctcgctgcgctttcggtgcatggcgcgccgcttccggacctgacgtgctccaacatcctgcggcccgggatcatg

SEQ ID NO: 88417 - DNA, 245 bp, Heterodera glycines
ggccgccaaggaaagacggaggcactggtggacgcaaactgaccaaacagggccagaaggatctggaccgcattgcgtcacagctgcgttacggaaccgaagaatgaggatttcgacagatagatggggagaacaattttacttttctgttgttgttgcttgtttttttgtcatcaaagaaacatgaaaggagttaaaaaaaaaaaaaaaaaaaaaaaaaaaaaaaaaaaaaaaaaaaaacttgg

SEQ ID NO: 88418 - DNA, 410 bp, Heterodera glycines
ggccgccaagcgcggacggagcgacggtgaccaacgccaacgaacccgttgcgactacgacgacgacggctgcgacgaccaatactgaggcgaccgctccgacgacaacgacgacgaccgcggatggagcggcggcgactaacactgatgcaaccggagcggcgactactccgacgaccaatgcggcgaccaatactgaggcgcccgctgcgactactccagcgacaaccgcggatgtggcgttggattagcatcatggcacaacaacagaagaaggagaagaaattgacatttatccgattgagcctttgaattgtgcatatgtatttcgttgatgtgtgtgtgtcatgtatcaatcaatatctgatcacttaaaaaaaaaaaaaaaagaaaaaaaaaaaaaaacttgg

SEQ ID NO: 88419 - DNA, 113 bp, Heterodera glycines
aggtgggagttgttttcgttcgtttaaattacagagggtctccaaatgctcctttcttccactttgttggcgttggccgtgtcgcgtctcgtgccgttcaccgtttcttcctg

SEQ ID NO: 88420 - DNA, 332 bp, Heterodera glycines
ggccgccaagagtggatcatccgatccatccttttggctctgaggggttccgcgtgaacacggattccgcgtggactgagctgatggaggtgcagatcagtgtcactccaccgacccgtccgcgagagaatcccttcaactccattttcctacgccaaaagcgccagggattgcctccccaatgcgtttgccaactgcggcagccaagctgtgctcctgggcctcctgggccgcctgggccccccggaacacccggcgagcccggcggcgccgggcagccgggaagcccatgacagcccggacaacaagcaccgccatgccctccgcccgtg

SEQ ID NO: 88421 - DNA, 183 bp, Heterodera glycines
ggccgcaaagcatcaattgctgagcaaattgaaagaatttgtcggtggggtgaattcgacgaattgacggcactctgtgaggggttggccatcgtccaaacatttgacgaggcacagaaactgctggtggaatgtgcaattaaaaaagatttcgccgatggaaaggccggtttttaagggccg

SEQ ID NO: 88422 - DNA, 196 bp, Heterodera glycines
ggccgccaagaaataattccgctaatatttgttaatttatttttgggctttctctgctaaatgcgactcgttcagcttctccatttggcactgcttgttcagcttttgctggcgcctgttcttttggccgttggccaaaccgatgaaaaagtcaaacgaattcaaaagagagaggggccccccgaggcgaatttgg

SEQ ID NO: 88423 - DNA, 402 bp, Heterodera glycines
  unsure (1)..(402): unsure at all n locations
ggccgccaaggaatgggtgctaaaggtggacgatgacattgcggggcatgtccnacggatggtcgaatggacggagaaaaaatttggaaaaatggcgtcagaacatccgttgatttattttggagtcccgggggatagaggactatctcgggacaagaacagcaaatggtgcgtcccttatgaaatgtgcccgggggagcatttcccaccgtgtttgtgcggtgggggctatttgacaactccaagcaccatcaaagccgtcttggaacaagctcacaaaaccaacagcttttatttggaggacgtgcttgctgtacacgggcattttggccgagtggggcaatgtgaccgtatcggaccaattgagccatttttatgggaatggattgcagtttgaatgtg

SEQ ID NO: 88424 - DNA, 197 bp, Heterodera glycines
ggccgccaccataatggttgccaccaccataattgttgttgtcatgatgatagccaccagaagcaggcggacgagcaccatatttgccatcgtgctcgtccgacttatcgtatttgccagaaatgccaatgtgaacaagtgccaagaaaagaattgacaaaagtgtaaatttcatttttaaatttgctcaaacttgg

SEQ ID NO: 88425 - DNA, 108 bp, Heterodera glycines
ggccgcaaagaagagtcacaagagacatcgcagcgactcggacagtggggacgaacgtaagaagaagaagcacaaaaaaaaaaaaaaaaaaaaaaaaaaaaaacttgg

SEQ ID NO: 88426 - DNA, 154 bp, Heterodera glycines
ggccgccaggtcgtcctagtcgctcgccgaagaagtgaggggcgaggagtcgtcgctcgcccgccggtcgtggaggaggacgttctcagacgccgcgcaagaagaaacaaccgctgaagaagaaggcgccgggcccgcgcagtcgcactcctgg

SEQ ID NO: 88427 - DNA, 235 bp, Heterodera glycines
ggccgccaaggttggaggtgcaaattattttttaatactattcaagatggtgcgcggactaatcaacaaatcgcgtgacgaacaaattgaacaacaaaatgctcgcattgccgaacagcaacaagtcattcgagagtgtaaaacattgtttcgtcatgtcagtgcgcacagcaataccatcagttcggccttgctaatgttcacagaagatcacccggagttcgccgcgaattgc

SEQ ID NO: 88428 - DNA, 565 bp, Heterodera glycines
ggccgccaagagccattctttcacttttgctcactctcatttttcactgaaaaaaaccatcgccaaaaagtaacatggaaaccaagcgcaacaactacaacaacatcgactcgttgtggagcactttgtgtgacctcggctaccaaacctcgcagggattggcctactccgtcggcatgcccaacttctcattcggcgccttcattttgctgtccgtcatgacttggtgctgctttttcatgccgcccgtggctgtgttcttccgcggctatctgcgcgacgggaacgcgtgcactgagcatgtcatttacaacatcattttgtgctttttcctgtgggtgcccggcatggggcacgccttttggtactgcttcagcgacatgttcagcgggccgaagaaggagggcgccgggtacagcaaaaatgcctgagcagaagagcactggcgggcggacgaacgcagaaatgagcattctttgaaaaatgacgtcatcgatcttattaatttttgacacctaattaagcgataattaattatctctctcacccttttttcatcttgtaa

SEQ ID NO: 88429 - DNA, 184 bp, Heterodera glycines
ggccgcaaagcatcaatatgctgagacaattgaaagactttgtctgtggggtgaattctacgaatagacggcactctgtgaggggttggccatcgtccaaacatttgacgaggcacaaaaactgctggtggaatgtgcaattaaaaaagatttcctctatggaaaggccttcggcgaagggccg

SEQ ID NO: 88430 - DNA, 170 bp, Heterodera glycines
ggccgcgcaacaacttagcacctcactgcataataacaataaaacctctgccgtcgcatatggaaaaacgtcaaatttggaagtgaatttgccggcacttcctccgattgtttgtggacaatttgtcatcgcactgcttgaactacccgaacgggtgtttcccatttatg

SEQ ID NO: 88431 - DNA, 244 bp, Heterodera glycines
ggccgcccaatccaaacttggaatttaagtttttgtggtagctgctccacattaaagccatagtcggaatcgtcgtcaccacttcgcccacctgcagcctgtgaagaatggtcgttttgccagcaccgtcgaggcccaatattagtattcgcatttcccgatgaccaaacaaagacttgaaataagagaataggtgccccatccgcaaaaaaataaatcaggaataatcaaacctcaaacttgg

SEQ ID NO: 88432 - DNA, 246 bp, Heterodera glycines
ggccgcccaaatcccaaacttggaatttaagtttttgggggggctgctccacattaaagccatagtcggaatcgtcgtcaccacttcgcccacctgcagcctgtgaagaatgggcgttttgccagcaccgtggaggcccaatattagtattcgcatttcccgatgaccaaacaaagacttgaaataagagaatgggtgccccatccgcaaaaaaataaatcaggaataatcaaacctcaaacttgg

SEQ ID NO: 88433 - DNA, 456 bp, Heterodera glycines
  unsure (1)..(456): unsure at all n locations
ggccgccagcagaaaaatgccgcgtcaaacgcgcagatttaatggaaaaaaccaggcccctgagcaaggcggacaagttgcggggcaggcaaaatcggctgctcgcgcaaagccatcccgactttttggaggagcggcgcagtaagcggaagcagtacttggacgaaggggttgagccaacattttttgacgacgcggcggaggagggcgaggcgcaaaacggagcggcactgaccaacggcgccaccgccgccggcaaaaaggcgtcgtcgcggcggaagcgcggcacggcggaggagcaggcggacgcactcttccgcaacattcaaggggaccaattggacaatttgacgacggatgatgaggaggaggagggagcanaaatggcggatgaagaggaggaggaagatgttcancaggagggggaggagaaggggcttggacaggatgcanagg

SEQ ID NO: 88434 - DNA, 428 bp, Heterodera glycines
  unsure (1)..(428): unsure at all n locations
ggccgccaagtgtggagcttaaattaaatcttgcaccagtgctgttttcgtaaaatgctttctcccttctcctacgacccgttctatcgccacgtcgttgtgggctatgggcactcatgtgggcaacgtcctttcgcccttccgccagtgggagcgtgaactcgaccacttcttcnaggggatgcagcccatgcgtcgtgaccatgtcgctcagctgaacgtctcggacaagggggacctcacttacaaaggcgatgtgagcggcttccgccccgaggaaatcaacgtggaggtgattggtgatgagatcatcgtgaacggggaacaccgcgagcagaacgacagcgaatcggtccaccgtcagttctcgcgccgtgtgcgtcatcccggagggggtccaaaaggagagcatcaagtgcgagctggac

SEQ ID NO: 88435 - DNA, 327 bp, Heterodera glycines
ggccgccaagcccttttcctaaaattaatttacaaaatggggtccaagcttcttccgggcattctctgctgcttgtttttggcttctttcgccctctgctcgcccaaggctgctgatgtgctgaaattcaaacgagaagctgcgatcagcagttgtggagctggacagtttgaatacgggggcggctgttgtgcgacatgcacaagcgatgctgattgtgcgggcgggaagctttgtgtgcccatcctcaacttgctcagcgtcagtctgtgctttgccccatgcggaaattaagacagaaaagaaagcagcaaatgagggtgttga

SEQ ID NO: 88436 - DNA, 532 bp, Heterodera glycines
ggccgccaaggtgggagccatgttgtccaaaaagagtgaaggggggcagcaattgcacttgaagaaggactaattgacgtaacacgaaccgactccgaatcgaagccaatttgggacgatgccatccccctaaaccacgtggtcgtcgtcaggcgaagccgcgtcaaattgcgctccggcgtgccaacggggaatgtgtcctccattgagtcggcaaatagcaactcgctgttcctttactactcatacagacgaaatgcatacgcatggggaattagggagtgcgtcatcaaattcgagacgaatacggacgttgaaaaatggtgaactttgctgggaaatgcactcaccgcccaaaaacaccgaccgaaacgtctgtgggggtgcatcaacccattcggtggcgaaggagacgcaatttccatttgggagaaggaggtggagccaattttcaaattgggcaacatccaatacgaagtgcgcaagaccgaaaggggcgaccacgcgttggaaattgtgcgcgagttcagcg

SEQ ID NO: 88437 - DNA, 205 bp, Heterodera glycines
ggccgccaagtggaaatccaattcaatttttgagttaaaatgagctgctccttcttcctctgtctcttcactgttcagctgattctgctcaatttcgcagtcgaaggaagagaagacgatgaactgaagagaaagaaacgcaacacggacgtggacgtgctcggcctggtaaatattcacgcgccgtcgcgaaagagtgtgaacg

SEQ ID NO: 88438 - DNA, 216 bp, Heterodera glycines
ggccgccaagagcccggacagcccggcgagaacggacagcccgggcagcctggaaaccccggcccgaaggataccctggcgacggcggaagccctggccaacccggcaaccccggaggcagcggcgagcccggacagcccggagcacagggatccagcggccaatgctaccattgcccaccgccccgcaccgcccccgggtactgagtgtgatcag

SEQ ID NO: 88439 - DNA, 224 bp, Heterodera glycines
ggccgccaagggcgaagatgcgcagtactgtccttgccctccacgaacccaaggcgtggacaagcagccaacttatgagacgggcgcgtcagttcccgtggccaaaccgtacgaaacaaagccatacgaagtgcccaagcagcaaacgacgtacgacgtgaaggcggcggtggcgcccggagggtacgaatcattggggggggtcaaagcggcggcggcgcccg

SEQ ID NO: 88440 - DNA, 228 bp, Heterodera glycines
  unsure (1)..(228): unsure at all n locations
ggccgcgaattgctttcttctctccctttantgagggggggagggagtggcgctgatatttgtgaatttatttttgggctttctctgctcaaatgcgactcgttcagcttctccatttggggctgcttgtgcagcttttgcgggggcctgtgcttttgggcgtggggcaaaccgatgaaaaagtcaaacgaatgggggagagagagggggcccccnaggggaatttgg

SEQ ID NO: 88441 - DNA, 167 bp, Heterodera glycines
ggccgccaagaacgtcctaatttctgaaaccccattctccgaggggggctccctccattcgtctcatcaccacgtccaaggcgcctcctgcgacggggcacagccaggcagtgctcctcaacaaccagacgctgtacatcagtggccagaccgggatcgcggcgggg

SEQ ID NO: 88442 - DNA, 137 bp, Heterodera glycines
ggccgccaggctgattctgctcaatttcgcagtcgaaggaagagaggacgatgaactgaagagaaagaaacgcaacacggacgtggacgtgctcggcctggtaaatattcacgcgccgtcgcgaaagaatgtgaacg

SEQ ID NO: 88443 - DNA, 138 bp, Heterodera glycines
ggccgccgaggctgattctgctcaatttcgcagtcgaaggaggagaggacgatgaactgaagagaaagaaacgcaacacggacgtggacgtgctcgggctggtgaatattcacgcgccgtcgcgaaagaatgtgaacg

SEQ ID NO: 88444 - DNA, 273 bp, Heterodera glycines
ggccgccaagaaaaaaaaaaaacttttccaattttccctcaaatgtggtttcgaattaaaaaatgggccctctcttccatcgcttctcatctctctttgtgcttctgatgccgtgcctttccgtggtgcttctcccgtcaactgtgtgtaccggctctgacagtgccgccgcgccgttcgaccgaaagaattatccgaaaatcgatttgcgactgtgcgagtgggccattgcttcacattcgggctcgtccgctgaggtgtcttttatcgccg

SEQ ID NO: 88445 - DNA, 405 bp, Heterodera glycines
ggccgccaagcgctcagcgtcccacgacccgaagggagagaaagcgcgatttctcagaactgtgccaccgggagcaacaacaaattgttgctgttgcggagttgtgaacagttggacgaaagcaaccgaatacgcacttgtgcagtgcccagaaaaaggatgcacatgaatctcaccggactgccaaggcccagggtggagcgtggacgccgtctcttcaaatgacagtctcagcccggaagagctgaccgatcgattcaaacaaatcgaggccaagtcgggccagctcagcatcggtggccaagtgttcaatgtgcagcccaaagaccttgaacggatggaccagcaggggggtcaggtgggcaccggtgccagcggaagtgtgtgcaaatatcggttcagaag

SEQ ID NO: 88446 - DNA, 382 bp, Heterodera glycines
ggccgccaagtcttccacaaagtcttctcacgttgtgttgcgaaacttcgatgggcgcaatgtccattgagttgtattggcaacacgcgccgcggacttgcatgaacttccaggaattggccaggaaaggtgattacaacaacacaattttccaccggataattgctgattttatggttcaggggggtgatccgacacggacgggcagaggtggcacgtccatttacggcggtcgatttgcagacgaaatcagtgacgatttgcgacacacgggggccggcattatttccatggcgaattcgggtcccaacaccaatggttctcagtttttcattaccctcggcccaactcagcatttggacggagagcatacaatttttgg

SEQ ID NO: 88447 - DNA, 450 bp, Heterodera glycines
ggccgcgaattgctgtcttctctccctttagtgaggcgggatgtggggaaagtgaaagtttatagaatctttcaaaattcatggtgtaaggagactcacaaaatgaatcccaaagtccctatactctattaagcggaattacggagattctcattgtattttctttttggtgtctataaattccagcagactttgtggtgtggacgcgtgaactgcgctaaagcctgtgtttaattaccatggagactgaacccataaaatcaacagcggaaaccgctgaaccggacgtctgtgacactggtcaacatggcgacgcataacttccagagcgctctgttcatttccttcagttgttgcccggcagatcattggatgtgaaattgtatggcgacattcaaggtggtggcaaatttgatgcggcggagccaaggaggttcaagtgttatcttg

SEQ ID NO: 88448 - DNA, 177 bp, Heterodera glycines
ctgtttgatccttgcggcaacgcgttggagttaaggcgtgaagggtattgggcagttgtttgccaagtgagggcgctttgatgaatggcctcgatgcagcgggcatcgccgaggcggtgggctctggtgcaattacgcctgctttgggtgctgaacactttcttgggctgatcggtg

SEQ ID NO: 88449 - DNA, 503 bp, Heterodera glycines
ggccgccaaggttttatttctgaaatgaaaacttcaaagagcattagaaagcagaaaaactgcttcacaaatgaagtgaaaaaggaatgcccagaaggcagcagagaaccgcgaaaatgttgggacgtcgagcaggttaattgtgaagaatttgccgtgtggcaaaaagacgcgatgggacgaggccaaagttcgagcgcgcttctccaaatttggcactttgacggacgttcggctgaaactcagcgaaaagaccggagcttgcaaatttgcctttgtcggcttttcatctgccgaacattgccaaaatgccatcaaagcgttggacggcgcgtacattggcggctcaaaacttacggtcgaagagtgtgaagcattgacaactgaccgaacggcgatcaccaaacaactttcgttgaacaaacgcaaaaaactgaggcgaaaaggcgaatgcgaagttgatgaggaggaggacaaagaagaagctgccgaagaggcggacg

SEQ ID NO: 88450 - DNA, 267 bp, Heterodera glycines
ggccgccagggccgattacacatttccttctctccgttgctggcgggaactgctgccactttcaattgcccttcacgggaatggctgacactcctcctcctcctccgcctcctcctcctgctgctgctgctgccgctggtgggggtgatgaagccgttgatttggagcaacgtgttcgccaactcatcatgtgcatcgggctgggaaacgaagacgcagtgcgcgagatttccattctgatcgagtcattcaaccgggagcagttcg

SEQ ID NO: 88451 - DNA, 329 bp, Heterodera glycines
ggccgccaaattggtgttctccaaaagtcgaaccaataagctgcggaggcctcctgcagagctgcaaaggccaccgcctgaaagcgcatctccaagttgttgtgctgtgcaatttcgcgcaccaaacgattgaacggcaacttgcgcagcagaagttcagtggtgctctggtaacggcgaatctcgcgacggggaacggtgcctggacggtgacggtgcggcttcctcgtgccggtggcattcgatctgcgggccattgaaacaatgtgtttgcagagatggattattgtgtaatatgtgtatatgtgttcggtaacgctcaaacttgg

SEQ ID NO: 88452 - DNA, 488 bp, Heterodera glycines
  unsure (1)..(488): unsure at all n locations
ggccgcggctcatcacgttgatgcgcctgcgaacgacttgcggagaaacccatgaaactgcgtacgttaatgctcggtgctgcactggccctgacggctgtaacggggatggcgcaggctgacaccgcccccgtcgtcacgccttatcactacggcgagaagatggatgtgcaaaaggtacttgccatgcacgaacccgacaccaatgtctgcaaagtgatcaacgccgatatcaagttcgtggatagtcaagggaaagtccaggacgtgggttatcgcaaactgtcggaagcctgcgattgggagaactgatcccgtgcacttgtggggaggagcnannncttctcnncanngaaacncgggagttctgaattgacgccgtgactttgcgttcttcgcgagcgaggtcgctcctacatgggtatccttgagcgctcgctacgggtgaaaggattccccatgcaattggacttccgtcccctcgctac

SEQ ID NO: 88453 - DNA, 716 bp, Heterodera glycines
ggccgcgaattgctttcttggccgcactgtctcaccgtgacgcatgtgtgatcgcatccactgatgagcagaaacaaatggccaacacagtgagggacgaattctccaagatggattacagtgaccatttgatgcttatccgtgcgtccaatgccttttcgagggttaacggctcctgcagagaacaatggtgtggggcccgactgatcagcgagtcggcgatgcgaatgatttgtggaattcggcatcaattgttcattgagcttcgtcgtcttcatcttctgccttctcgcatgacgaatcctgatgacaacatgaacaatctcaatttgttcgcctccagttggcccatggtccagggatgcattgtggcgggcgcttacccaaacattggcttcgtccgatttggttcgaaactgaatcgaattcgcaccatgggctccaagaattgcgtccttcatcccagctcttgcctcaggcgtcaaactgccaacccatccaaacgatctgcgaagctcaatgaagtttttagccagaagggatccgagcctatgcttcagtatcttatttatcaggaattggtcggtgatacgcaccagcaacacatggtcccaactgtgactgctgtcacatcgctacacattctgttatttgcagggcctgtgcgaatggacctcaaatgcgtgaaatattttgaacttgttgatccacacggt

SEQ ID NO: 88454 - DNA, 153 bp, Heterodera glycines
tcaggtgcgcccaacaacaacacaatgacttctcactttctcgtcggcgctgcagccttcggggcggaatctgcttcgcgaagacgtacatggagaaaccgaagagcgaagacgacaaagaagcgcccaagaaggaagaagccacgaccgggg

SEQ ID NO: 88455 - DNA, 330 bp, Heterodera glycines
ggccgccaaattggtgttctccaaaagtcgaaccaaataagcttcggaagcctcctgcagagctgcaaaggccaccgcctgaaagcgcatctccaagttgttgtcctgtgcaatttcgcgcaccaaacgattgaacggcaacttgcgcagcagaagttcagtggtgctctggtaacggcgaatctcgcgacgggcaacggtgcctggacggtaacggtgcggcttcctcgtgccggtggcattcgatctgcgggccattgaaacaatgtgtttgcagagatggattattgtataatatgtgtatatgtgttcggtaacgctcaaacttgg

SEQ ID NO: 88456 - DNA, 218 bp, Heterodera glycines
ggccgccaagtttgagctgctgatatatttattctgaagaatgcctgtcgtaaaaccacaaacggacagcgaatttacaaaatttcttttaaacgttgggactgctccgtgtattgttgatttttttgctacttggtgccaaccatgcagtgcgatcgctccggtttttgacgaattatccaacaattatcttaatttgaaatttgttaaagtggatg

SEQ ID NO: 88457 - DNA, 130 bp, Heterodera glycines
cacgcgagccgccgcctccccaccaccggtgcgaccgggcggacactcacgagagaaatgtcccggtttgttgcagttgtggcagacattgtcaccgcctcccccgcgcgaccctccggacaaaagttgg

SEQ ID NO: 88458 - DNA, 372 bp, Heterodera glycines
ggccgccaagcaaaaggtacaccgagttgaccggtgccgacattgaaatgcgttccgcttcgctgttcaacatcaaaacgttgacttcataccaggagttgcacccgttcttccatgcgttgaccatgcaaaatggcactggacgaaagcagcgacacatttgcaatggacaaatggacgacagaagcagcaccattagcaacggtgttggaactgatgcgggcgaacgggaggaggacgaatttggcagcgaaagaagcaattcggaacggaaaaagaaaacaatggccccacggcttcgcgacgccgagctgctgaacggctcgcactcgttgaagagtgccgtggctcgcattgaacactcgctgtacg

SEQ ID NO: 88459 - DNA, 240 bp, Heterodera glycines
ggccgccaagtggcccatcaggaccccctggccagcccgggcagggcggggagaacggacagcccggccagcctggaaaccccggcccgcaaggataccctggcgacggcggaagccccgggcaacccggcaaccccggaggcaacggcgagcaaggacaggctggagcacagggatcaagcggccaatgctaccactgcgcaccgccccgcaccgcccccgggtactgagtgtgatcag

SEQ ID NO: 88460 - DNA, 163 bp, Heterodera glycines
  unsure (1)..(163): unsure at all n locations
ccccccccacttaatcggccgtgtgtccgtacttgaaacagtgccaaaacaattattgttgttaggacatttttttcttcatttcttctcccgggttttgttgaatgcgtgtgtttgnttcccatgaataggacacaaacaaacgcactcaaaaaaaacttgg

SEQ ID NO: 88461 - DNA, 240 bp, Heterodera glycines
ggccgccattgtaaattttgctaacacctcctacattccttgtgcgatttgttctcataaagccaccgggggctttcgggcagaaaccaaagccacaaattggacaacactcggaattgcagcaaatccgaccattagtctccagccccaattcaacggatcaatgtaggaaaacgcgaacgcaaaaatatgtgctgctactaagccaaaagtgatcatcagctggaagctggtgatcag

SEQ ID NO: 88462 - DNA, 169 bp, Heterodera glycines
ggccgccaagcttggcggtggtgacgagacagttggacagacgagggagcggacgtcgtttagcatttaaatgaaagtttggtgtgcctctggctttgcatttgctgcaacaattacctagcaataccaagccgatttcttacattttcaaaaaaaaaaaaaaacttgg

SEQ ID NO: 88463 - DNA, 207 bp, Heterodera glycines
ggccgcaaaggtttgaggagaaaatgctagcactcgttttggcggtgttgtcttcatttttgcattgcttattctggaaattgatggttgttatcggcgtcggaaaaaggacaaggacagtaacgagagcggagagaaaaagcacgcaaaaaaagaggataaggagtcgaacaagtcaagcaaacgcggaccgcgagggccgcctgg

SEQ ID NO: 88464 - DNA, 556 bp, Heterodera glycines
aggttggagttcgttccttttcctgcgtgtgtcttggttgtcctccccttttctccccctctttttcctttctttgccaattgcgtttgttttgtccggccgaactttgccgttcaccggttcgcaattggccaatgaagtggccagggcattttttaattccgtcaacacttgggacatgtgaattttcggagccgggactaagcagggggaggaccgttacaagatcagcttggacggcctggacagaatgaagaacagattcagagtgccgttgccggcggggcaggggttggaaaagctgctcaaatcgtacagagttgagcctctcagagaggattaccttggggtgaacaaagccagagaaagagtgtgggcaccgagtaaactgatggaactgatggaaaagctgggcaatgtgctggttacggacccaaaaatgcgccaaaagatcgacaaatacgacaaaaaaagagcggatgaggcggcgcgaatggcggcgatgatgccaccaaggcgagacccacaagcgattgcaaaacgcatgacgtggccg

SEQ ID NO: 88465 - DNA, 119 bp, Heterodera glycines
ggccgacaagattctttcccccatcggtcgaatcttcatcctggtgtaccgatggtcagagcaacaacggccaggacaagggcatcagcagcgcgagcacggagcatcaaaaccaatcg

SEQ ID NO: 88466 - DNA, 139 bp, Heterodera glycines
ggccgccaggccttgttccgttttccttcttctgatgtcagagtgtgccaggctttgctttctgaggaagcggagtatccgtgccaaaatgtcaaagccaatgaacgcgtcgtggctttggctgttttgtccgcgttcg

SEQ ID NO: 88467 - DNA, 210 bp, Heterodera glycines
ggccgcgaacaattggccaatgccggcgggcggtcaccgaattcatgcattttgtgattgaggcgaaggctttgcgaaaggtgttcatctccatcaagggagtgtattaccaagcggagattttgggcgaacgcgtcacttgggtggttggccacgaaagggccgtcggacgcgccaacgaattggacttttcggtgatggccaactttg

SEQ ID NO: 88468 - DNA, 204 bp, Heterodera glycines
ggccgccaagatttcggagaaatgaccgtatatgaagttatgaacattttaataatcagtagataatttcaatcaattctcatatttttcattgtctacagtctgatcttacgcgtcttcgtcgaaactttacaccgatggaaattcagcgtgatagccatttacgaagtatgaaagagcttctcagcacgatggacccgcaag

SEQ ID NO: 88469 - DNA, 171 bp, Heterodera glycines
ggccgccaagcttccatattcatcataaaatggaattacgacttttatttgcttccctatttgccctctgggcagtgacagcggcgatgcgcaagcagggggttgccatcagcggaaaattcgtgtgcggccacgcgccggccatgagcaattcgaccaaagttcgcattg

SEQ ID NO: 88470 - DNA, 130 bp, Heterodera glycines
ggccgccaagaggatttgcgccactcctcgattctttcgaagcgatgttacgccctaaattgttacatgcgtgtccgcgatgtttttgagcggccaattggcggtgtgccaggggcgaaagataaattgg

SEQ ID NO: 88471 - DNA, 221 bp, Heterodera glycines
ggccgccaaggtttctacaaaaatcaaagcacaaatcaaggtcactgtgagagatggcaaagtctaagaaccacaccagtcataatcaaaacagaaaggaccaccgaaacggcattcacaagcctaaaaaggagcgttacatgtcgatgaagggagtggacccgaaattcttgcgcaatttgcgttttgccaagaaacacaacaagcggaatgtgaaagcg

SEQ ID NO: 88472 - DNA, 174 bp, Heterodera glycines
ggccgccaagctctttgtttcgtgatttgttctcatcggtcccttaaaagcgtatatgttgatgtaccgacaaattgatcacagccaaaacgaacatttcgtcaggagcaccgaacttcctgagcatttgattctgctcaaggacaaattggaggcggaggaggaagaacgaag

SEQ ID NO: 88473 - DNA, 247 bp, Heterodera glycines
ggccgccaaggtttgagataaaaatgcgcttcttctttcttctgacgcttgctcttctctccgttgttcttctcctttccccaagtgcactcgcaaagaaaagagcccgccgttcgatgcccgttaacgctgccatgccggaatggaaaattttgtccgctgaagtggaaaacgatggcacagcataagaaggaggaggcgaactttggatcatcggcatgatcgaagaaggaatttgccaaaatga

SEQ ID NO: 88474 - DNA, 509 bp, Heterodera glycines
ggccgccgagaaggcggctgctcgcaaggctgctgccaagaagggccgcgagcatgccgcgaccgaggccgaccagaggaccgccgcgcgcaaggccgccgccaagaaggcagccgcgacccgcgcggcgaacaagacgtcagcggccaaggccagctgaccctggggggagctcccaggctgatatgagaagcgactgcccgctctccggaacgccggggagcgggtagtcctacgttcgatccggaagatcggatggagcttgcgggctacacgaacaaggccaagcagtggctgggtcctttcgggcaggcgtcagctgcggtagaccacgaccttgtcgccgacgtggacccgctggtagatccaggcgatcttcgaccagctgcggatgttgacacaaccgtggctgcagccgtagtacccgcgacgggcgaagtcgctggagtagtgcacagcctggccgccgctgaagaacatcgagtacggcatggacgagtggtagatcg

SEQ ID NO: 88475 - DNA, 145 bp, Heterodera glycines
ggccgccaagagcggaatgaaaacggctgacaaggcggacgaaccattcccattgaaatgaagaagaaggcggccgtggaccagcagaaggaggaggagaagcagtagaaaaggacggcggaagtgaagacggactgactgtcgg

SEQ ID NO: 88476 - DNA, 145 bp, Heterodera glycines
ggccgccaaggtccttaagagcgtctaagtcgcattcgcgcatttatggaggcattggagaagtacagacaaaaacagatggactcactgcatgaaacgtacagtcgccgcgtttcggccatccgcgacaattaccattcccaag

SEQ ID NO: 88477 - DNA, 126 bp, Heterodera glycines
ggccgccaggaggatttgcgcactcgtcgattctttcaagcgggtacgcccgaaattgttacatgcgtgtccgcgatgtttttgagcggccaattggcggtgtgccaggggcgaaagtcaaattgg

SEQ ID NO: 88478 - DNA, 268 bp, Heterodera glycines
ttcgaaaatgcatagtttagtataacatttaaaggtctgtataattttacaaggatcgcaaaagtttcttgatagaatatttggtctctttcagcgctttcatttcaattgtcaatccaatgaatccgtaccaaaaggaaaagccaatgaacaaagcgagcataaagcgaaataaagcaacggcagcgtaaacgtatggcactgtcaaatcgatgtttgcggtggcaacagtcagcgcaattaaaaccacgcagagaccaaggaaaag

SEQ ID NO: 88479 - DNA, 328 bp, Heterodera glycines
ggccgccgattccgcacgggttccggctccacgaagatctaggagaatctagaggggcctccccccctgccttccctattagcccgggtgccgcgcggaacaagcgccggccccgggctaatgtgctgcttcgtcccagttggtgccggttccggcggagacttccagcgggacgcgcagtgtgatggcgcggggcatttcctcctcgacgatcgcttgaacctgctcgagctcgccgggggcgatttcgacgacgagttcgtcgtggacttggaggaggacgcgggattggaaaggttggtcgcgggaggcgtcgttaagcgcggcg

SEQ ID NO: 88480 - DNA, 171 bp, Heterodera glycines; identical to SEQ ID NO: 88469

SEQ ID NO: 88481 - DNA, 298 bp, Heterodera glycines
ggccgccaagattctgaccacgcatcgctgaagagagagttgaaaagtttgctgaaaaaactacgaaaacaaaaatgtctggacgaattaaaaaaagcaatcattgctgagggcaaatacgtcaaatgtgtggtgtacaaaattccagagaagcagcaaacaccctatggtggacagatgaagtcatttccgcatttcatttgctgtaaaatttgcagatttcctgatttgctaactcatcaccaacttcgtccggttgctcaatgtttgcatcccttcaacaaagcccagaaaatgg

SEQ ID NO: 88482 - DNA, 280 bp, Heterodera glycines; identical to SEQ ID NO: 88278

SEQ ID NO: 88483 - DNA, 267 bp, Heterodera glycines
ggccgcaaagctcaaaatgtcgcctctccgttttatcattgcctttcttttggtcgttttgtgcgctttttccgcactgataaccgcgcaagaagagagagttgacaatgaacctgctgctctgcgcgccagacgcggaatgtacggttcgccgtacggcggcggaatgggcggcggcggaccatggggaggaaatttcggaaagaaatgagaagggagcaaaatgtggtgatcaagacgaacagaacaagccatttgattgaatat

SEQ ID NO: 88484 - DNA, 196 bp, Heterodera glycines
ggccgccttcacttttccgttcgccttcgctttgccgccctttccgctagccgtcgtcttcgtagtcgcttttccggctttcactggagacgccacttgagactcctgactgttggtcgtaccggtcgaagcagcggaggcaccacggttgtcagacattgagttgttgttgttggttgagaaaaaaaaaacttgg

SEQ ID NO: 88485 - DNA, 456 bp, Heterodera glycines
ggccgcaaagctgacatataagcgtctgtctccttcttcattttgttccccttttgactgcacttcagcaacaatgctcatcagagaatatcgcatcgtcatgccgttcgccattgaggagtatcaaattggccaattgttttctgtgaccgaggcatcgcgacaggagaccggcggtggcgaaggcgttcaaatggtgcgcaacgagcccttcgaaggccaaagtctgttcaatggccgcttcacgtccggacagttcacgcacaaaatcatccacctagatacaaaagtgcctgctcttctgagggcgattatgccaagaggttcgacgacgctgcatgaacggtcgtggaacgccttcccgtactgcaaaacggaggtgaccaacccggactatatgaaggacaactttctgatccggattgaaacaatgcacttgagcgaccgcggcaccac

SEQ ID NO: 88486 - DNA, 495 bp, Heterodera glycines
actgtaacggccgccagtgtgctggaattcgcccttcgcggatcctatactttttttgatttgctaaagtaaaaatggcttatttagagttagttatggcgttgattaaaacattgacaaatgacccctttatataggggcttggggaatccaatcacagcaacgcaaattaaggctttccaatcaagtgtctttttctttattgtcattccctttagaaaaaatatttaatttaatttccatttgagtaaacatgtactctatcgaaatacacgaaaaggtagtccatgcctaaaggtagcggcttctaatctcttagaactagtttaggttgaccaagaatttcgagatgagtgaacaaaagactaaaagcaaatcaaagtgtttgaagactatagagaaaatggaatggagggaaaacacatgactcccaaaaatactttagaaatatgttcgagctttaaatatatgcacttatgatataagaaatattta

SEQ ID NO: 88487 - DNA, 209 bp, Heterodera glycines
ggccgcctcataagagcaaactgagcaaaatggacgaacggacgcggctggcacacattcggctggtggacaccatggaacataacgtaaagcatgcggaggagctgaaggcggacaatgcgaacaacgaaaacaaagcgttgggcgaactgcgcaagagacaaaaaagcgggaaaatccgcgacggtcggcacatggaagggatgccg

SEQ ID NO: 88488 - DNA, 375 bp, Heterodera glycines
ggccgccaaggttcgatgcattttccaaattgtttttgcttttgcctattttgcttctccatctccaacaatcccaagcttgcttttcacgtggcaacagtggcgaaccgtcggatggcaatcccgaggcccaggggctaaaatcggaaaacgatgttcggactgttcagttgaagaaggaaaaacaaacggatgaaacggaagaggagaaagacgaggaaagttcggcagaacaaaaattgccatctgaattggacccggaatttgtgaaaacttatctgcgagaatttggtcatctgaagcacaatgagaatggcctttcccatggcgttaagcatttccaacgctttttgggctaccggcagacgggcaatg

SEQ ID NO: 88489 - DNA, 695 bp, Heterodera glycines
ggccgccaaggtttgaggaattaatttcttctcctaaacatgtcccgtccaactccttccgaattaacagtcgaaatgttgaaaaagcgtatcagtggcggacggatggacctcagttccttgcgattgaacaaagtaccaattgagctgatgtgtcgttctcttgcaggacaacgaattacttgtgtggacctgtcggacaatttgctgacttctttttctgctcaattcctccaatttttcccagacatacaagaactcgacttacactccaacaaaattaaacgattacccgaaaattttggtgttttgagtagcctgcgccggttggacctgtctgaaaatcaaataaagaaactaccgatcagttttgctgaactcgataatttgcggtggctaaatttggtcaataatccactcgaaaatgatttggcggaggttatcgggagttgctcaaacgatgaagaatgctcattcgctgctaaaagtgcagtgcaatacgtccaattcttttccacggtttcctccgaatcgacggcaattgcggacacagcatttttgcaaaatgagacttcgtcaacttctaacaattcagacaacataaatgtatcggcacttcgacaagcggacaatgcaaaaaacggcaaaggttttggcagtccgaatgccaaaccccagcagaaacaaattcccgg

SEQ ID NO: 88490 - DNA, 247 bp, Heterodera glycines
ggccgccaacagacattgcaaaacgaattaaaccgggaaaaggaccatcacatgaaagtgatggtgaacgcgcagaagcaagtcggagagttgagccaagagttggagaaggcattggtggcttatggcaatttggcaaaacagcagagcaatgacagcgcaaagtgtgtggaactgaacgcacggaaccaaaagatgggcgaggaaatcagtcaattgaaaaacgaagcgaaatgcgcctcagagg

SEQ ID NO: 88491 - DNA, 757 bp, Heterodera glycines
  unsure (1)..(757): unsure at all n locations
actgtaacggccgccagtgtgctggaattcgcccttcgcgagctcaattaaccctcactaaagggagtcgactcgatcatgcccattcatcaagaatctagatcatgaagtgcataactatttatgctaaggagtggactaaaagttattgtcaattatattgacacatgttttgtatcaatgtaaaaaataggagtttgcagaaattccattattataggcaggttgcatatgcttttgatcatttactatctcggctttcaacattcacctaataaacacatgaggaatacgaatgtgcaattagcttaagttgggaaagaaaacatgaagcattacgccgtaggcctaaaggactgatagcttatccatttttcttttctttcattctcgtctttccgatatacaatgacaacctacatgttctttgtactgtcagcttaatttaacatgtgatattaagttaattacgtataattattattaaaattaatttttagatttagtgacttgattgtgttaataatttttaaactgtcagtgaatatatcttttaaattcattagtaaacttgctaatccttaaataaaaaatataaaaaggccattgaaaaatcaaatggtagaatacttctctgatttaataaatatatgggaaaagaagtaattaaaaagagtctattaatcttcaacaccacaagtcagataaagatgtcactctgcagtagagggtaaatatcacatcgcattggtactnc

SEQ ID NO: 88492 - DNA, 212 bp, Heterodera glycines
ggccgcaagaattaattggaaatccaattcaatttttgagtataaaatgaactgctccttcttcctctgtctcttcactgttcagctgattctgctcaatttcgcagtcgaaggaagagaagacgatgaactgaagagaaagaaacgcaacacggacgtggacgtgctcggcctggtaaatattcacgcgccgtcgcgaaagaatgtgaacg

SEQ ID NO: 88493 - DNA, 348 bp, Heterodera glycines
ggccgccaagcaattatttgttcgtctccaagtctcgtccaacgtctgcatttattgttcatcaatccttcatcggttggcatccgcgcgcatttcaaaatggacgctctcaaaaagcttgcgagccgtgcacgacagaggtcggcggagatcatgctgaacgcggagaagaccgaaattggcgccgagcttgaagcgctgctgaccaagacagacaagacggaggaggacatgaagaagctggtgcatgccatcgaggtgtacctgcagccgaactctgcagtccgagctctggacggtcttggggaggcgatgaagggagcagcatcgagagtggtgggggccgag

SEQ ID NO: 88494 - DNA, 320 bp, Heterodera glycines
ggccgccaagaaaaaaggaatgggaagaacacatattcagagatgcaatattgttcatcatcatcttcatcttctgcttctcctccttggcccaagtcctcccatttgttcgcctcgatgggcattctctgcagcacttgtgccctgctcgttctggtgttcctcgtgccgataattgtgcataaggcaaacattttgcgtgcagaacttgaggaaatgtccgttcgattcaagcaaaactcggacagggcgtggcaccaaatgatgcaaatggagccaattaatgataacccaacgatgcatacaacaattgttgcaag

SEQ ID NO: 88495 - DNA, 276 bp, Heterodera glycines
ggccgccaagtttgagaataatcgtattgttcaaaaatgctttcttcttccgcctgctgtactctgttggccgcgctcatttcggcggcgtttttcgccatggcaaacgcacaaacggtgaagcagtgcctgtgctccgaaattcagccctgttccgaaaagtacatgaacacatggaagacatgtatgcagcagtgtaagggccatttttccagcgtgggcggcgacgtggaaaaattgggccactgtttggacagcaaccaggcactgctccag

SEQ ID NO: 88496 - DNA, 395 bp, Heterodera glycines
ggccgccaagcaagtttgagcgatgtcaacgtcagaagtgaaaccggaagataaatcaatggatgaaactagcaagaatgaattgcgggctgaggacacttccattaaggacaaaggcattggaagcgttaaagaaactgaaacaaatggcgcaataactactgacaatgaacctaagattcacgcagaaaagaacgagactggtgatgctgcagttggccaaaaatcaaccgaggaacaattcgacaaaactgacaagaaagcagagcaacaaaatgttcttgatgtaaacaaaacccaacaagaaccaaaggctcctcttgatgaagtgaaagagacgccacagggagacaactcggaagaagttccaactgaagccattgttgttgatgttg

SEQ ID NO: 88497 - DNA, 727 bp, Heterodera glycines
ggccgccaagtgaaatgtggcggaaaagaacaccagcaaaagcgcgagaaacaaattacccactggacaatgcgcaatgcgcaagtccccagcatttctctgccggaccaatgcatccgttccagccttggcagaacattgacggattggtgaacaaatacacggacaacatgtacgaatttgcgccccgtccgagctgctcaatgggcccggactgtggatcgaagtatttgttctgcgaccgttcccatggcaagccccgatgtgcggccaaagtccgaccgaatggcaattgtgccggattcaccaatggtgaagatgtttgtctgaatggcgaatgccaatatgggaaatgtgtgaaaaagtccccaccgccaaccacgccaaaaccaccgccaattgtgacagtgtcacccattgagtcgccctgctttaatgagcacgaatgttgcgcgaaatgggcagccgacggacagtgcgaatcgaacagcgaatacatgagccaattttgcaaagccagctgcaaaaaatgccaatattcgtacaacatgcaagaggaatgtgctgatcgtcataaaaattgcaaagctttgtcctaccaaatgaaatgcgattcaagctggatggctgaaaactgtcgaaaatattgcaacaaatgcaatgtaaaacgtatgcaaacatgcgctggcggttccccgggggggagaaaaacccacgctttcatatg

SEQ ID NO: 88498 - DNA, 263 bp, Heterodera glycines
ggccgccaaggtttgagcaatgattgattgccattgccatttggcggatgaaagctttaatgaggacattagtcaggtgattgaccgagcgaagcaaaatggtgtcaaagctgctttagtggtcgcagaatttaaggatgattttgagcgaattttggaattgacccatcaatttcccgattttctctttccatgtcttggaatgcatcctgtgcaacgtggacacatttcatgcagtgaagaaatgtacaaaaatttcgaag

SEQ ID NO: 88499 - DNA, 579 bp, Heterodera glycines
ggccgcccaagggcgcacgcttcgttcctcgaccaccgcagcggcaaaccgacaggcggcaatccgcccgcgcttgtgacgatgcagcagcccgtgttggtttgcacctcaagtcgagcggcggaccagcctgagccgttccacatccgaccgagacgcatcgacagcctccatccgcttccctcccggcaatttcaagcactctttaactctcttttcaaagtccttttcatctttccctcgcggtacttgttcgctatcggtctctcgcccgtatttagccttggacggaatttaccacccaattagggctgcattcccaaacaacccgactcgccgacaacgcctcgtggtgcggcagggtcccgggccgacggggctgtcaccctctcaggcacccccttccaagggacttggcccaggtccgccgctgaggacgcttctacagactacaattcaggcgacgctgccgcccgattttcatgctgggctcttcccggttcgctcgccgctactaggggaatcctcgtaagtttcttttcctccgcttaattatatgcttaaactcagcgggtgttc

SEQ ID NO: 88500 - DNA, 139 bp, Heterodera glycines
ggccgccaagcaaatccttccgaattgcccgcaatgtaaaatcgaatgccaaagatgggtttaccacacgtacaattcgtacaccgaagcatttgtccgcaaaccaaaggacaaatggaggcgaaaagctgaacaatgg

SEQ ID NO: 88501 - DNA, 221 bp, Heterodera glycines
ggccgccaagggtctacgaccgaatgatcgcctttctgttggacaataaaaattccgcgaaaatttgcgaggagcttaaattgcgcagaatcgacacgaccaatctgtgggatgtgctgttcgacatgatcattttggacgcatttgaagacatgcaaaaattgccgtcagctgttaccgctctactcagaaacgggttcatctccacatcaatgaaacag

SEQ ID NO: 88502 - DNA, 174 bp, Heterodera glycines
ggccgccaagtttgaggctaaacttattcaaatggacttcgacggccgcatcaaggcttaccgcttcgtggcttactccacggtgtccttctccatcatctctctgctttcggtttgcttcacgctgccgatgctgaagagctacgtgtccaacgttgggctgaagatggactc

SEQ ID NO: 88503 - DNA, 189 bp, Heterodera glycines
ggccgccaaggcccggccagcctggaaaccccggcccgcaaggataccctggcgacggcggaagccctggccaacccggcaaccccggaggcagcggcgagcccggacagcccggagcacagggatccagcggccaatgctaccattgcccaccgccccgcaccgcccccggctactgagtgtgatcag

SEQ ID NO: 88504 - DNA, 196 bp, Heterodera glycines
ggccgccagttcttggacgaagcggaaatgtcgctggtggagtgcaaatcgccaagtgtgccgtcattgtcacgcaatgtacgccaagacgaaaccaacggcacaacattgacggcattgttgacaaacatgacgacagttacaccgcaacaaacagctgcaacagcagcaggtggaaattgtgataaagacccgg

SEQ ID NO: 88505 - DNA, 210 bp, Heterodera glycines
ggccgccaagcgccaaaatgggcttccactcgacaaagatggaagctgatctgtcaaaagagcagcagggcaaacgcgaggccgactcgatgcgcatgttggcattcttcggcgtttgcctgtccactgttgccacgatgatttgtgtggtgtcggtgccggtggcttatgaacactttcagcaggtcggcaccaaaatgcagggcgaag

SEQ ID NO: 88506 - DNA, 124 bp, Heterodera glycines
ggccgccaaggtccatgcttcgtccgccgaataatgagggccctcggggcattcatcggaatgcgttgcgatcggctaaagccccattttgagcccattcagctcaccaattggctccgaagcg

SEQ ID NO: 88507 - DNA, 142 bp, Heterodera glycines
ggccgccgaaaaatcaaaaataacattgagaattgtccgatcagcgttttgtaaatgccaaaatgatcgggaaaatggtgagagacgaaaggacagcagcctcgtggatcatcagtgggggttcttctccaattgtcgatgg

SEQ ID NO: 88508 - DNA, 343 bp, Heterodera glycines
ggccgccaagctgaactccggctcaatgtcaagctggtggagcctgttggaccaactgaaaatttcgtacgtcaattggtcaatcactgacaaaagcgaagcttgtgcagcgctcactggcggaacatcggctgccaatgttggcacttcctcccgctggacgcagtctggcaatatggtagcttcgcaacacaagaaaaaatccaccggtgtgaaatgctaaataaagtctgaagtccggatgatcaactgaaactgaagaaaatggaaaatgtgaagattgcgaaaaataaatatatataaaatttgcatgcgaatgtttatcgaaattccgattaaattg

SEQ ID NO: 88509 - DNA, 679 bp, Heterodera glycines
tacagcttggtaccgagctcggatcctatactttttttgatttgctcaaagtataaaatggcttatttagagttagttatggcgttgattaaaacattgacaatgacccctttatataggggcttggggaatccaatcacagcaacgcaaattaaggctttccaatcaagtgtctttttctttattgtcattccctttagaaaaaatatttaatttaatttccatttgagtaaacatgtactctatcgaaatacacgaaaaggtagtccatgcctaaaggtagcggcttctaatctcttagaactagtttaggttgaccaagaatttcgagatgagtgaacaaaagactaaaagcaaatcaaagtgtttgaagactatagagaaaatggaatggagggaaaacacatgactcccaaaaatactttagaaatatgttcgagctttaaatatatgcacttatgatataagaaatatttatacaatcaaatcatttaaaagataattacaaataattttatttaataaatattaattcataacctacaataaatagtacgtgatttgctatataatttaaactatagtgatgatgtaaaaagttttcactatcagtatttgtatacgcttaaatgttaaatccgatatttccacttgcatctcaccaaatatctttgagttt

SEQ ID NO: 88510 - DNA, 759 bp, Heterodera glycines
  unsure (1)..(759): unsure at all n locations
ggccgccgctcgagccacctcacgagcaacctcatgacgagcggcggacaacgtggatgacacgtgctgcatcaggcacaacacaacaacaaacacacaacaacgccaacaccacagcaatcacaccagttgaaaaaaacaaacactgaacacacagcgcggacaaggtggacgacacgtgctgcgtgactctccgctccagccccattctgagccccaccagcgccatagccatcgccatcgccatcgccagccccaatgaggctctcctctccgttcccccccccccccccttggtgtgtgaatcccgtgcagttgtaaagcaacactcaagacataatggaaagccccccctgatggtggaaagataatggaaaacaaaataaataatactgtgcaacatggtcctacgtgtgcatcaatgctgcatgagttgtgtcatgtccgtgtttgaggtgacaacataagtacgtaataggatacgtgcttcattgggaatgattgaaatatgggtgagtagagtggataacaatgataggantggttgttatttgtgatattgttgataatacgttgcaatcgtgttgttataattatgatggtatgatgagcatgtgttgatgtacccattattaataatgatgttatgataacattacccctttggatgttgacataatttaataatccatgtgaaccacaataaatgttgtgattgatagtatatgatgaatattattttttaatacccaactgtta

SEQ ID NO: 88511 - DNA, 779 bp, Heterodera glycines
  unsure (1)..(779): unsure at all n locations
ggcccggactcggtaatggcgcgcattgcgcccagcgccatctgatcgttggcaaccagcatcgcagtgggaacgatgccctcattcagcatttgcatggtttgttgaaaaccggacatggcactccagtcgccttcccgttccgctatcggctgaatttgattgcgagtgagatatttatgccagccagccagacgcagacgcgccgagacagaacttaatgggcccgctaacagcgcgatttgctggtgacccaatgcgaccagatgctccacgcccagtcgcgtaccgtcttcatgggagaaaataatactgttgatgggtgtctggtcagagacatcaagaaataacgccggaacattagtgcaggcagcttccacagcaatggcatcctggtcatccagcggatagttaatgatcagcccactgacccgttgcgcgagaagattgtgcaccgccgctttacaggcttcgacgccgcttcgttctaccatcgacaccaccacgctggcacccagttgatcggcgcgagatttaatcgccgcgacaatttgcgacggcgcgtgcagggccagactggaggtggcaacgccaatcagcaacgactgtttgcccgccagttgttgtgccacgcggttgggaatgtaattcagctccgccatcgccgcttccactttttcccgcgttttcgcagaaacgtggctggcctggttcaccacgcggngaaacgtctgataagagacaccggcatactctgcgacatcgtataacgttactgg

SEQ ID NO: 88512 - DNA, 319 bp, Heterodera glycines
ggccgccaagtttttattgtgctcgccaaattgacactagcagagaatgttcggatatcagcagactcagttcaattacggcgcttacgcttcagcaaacggtcagcagcaaagtttcatcaattatgctcagcaacaaaacaattcggcgactgctccggtggcgggaaatgccacaacaaatgcatatgctgcctcccaatattcgttggctgcttcggcttacgcacaatacagccaagccgcaacacaacagcagtccgttgctgcaacttacggagttcagcctccgccaccacctcctgactattcagcttcg

SEQ ID NO: 88513 - DNA, 197 bp, Heterodera glycines
ggccgccaaggcatcaactcacccccgcaaagcgacatggcggacggtctcatgacgcttgctccaggaacgcgtgtctcaggccgctggatcatcataaagaagcttggtgccggatcatttggagccgtttacttatgccaagatgagcgagtgggaacaattgcagcactgaagacagagccattcaacacacg

SEQ ID NO: 88514 - DNA, 374 bp, Heterodera glycines
ggccgccaaggttcgatgcattttacaaattgtttttgcttttgcctattttgcttctcctctccaacaatcccaagcttgcttttcacgtggcaacagtggcgaaccgtcggatggcaatcccgaggcccaggggctaaaatcggaaaacgatgttcggactgttcagttgaagaaggaaaaacaaacggatgaaacggaagaggagaaagacgaggaaagttcggcagaacaaaaattgccatctgaattggacccggaatttgtgaaaacttatctgcgagaatttggtcatctgaagcacaatgagaatggcctttcccatggcgttaagcatttccaacgctttttgggctaccggcagacgggcaatg

SEQ ID NO: 88515 - DNA, 327 bp, Heterodera glycines
ggccgccaagcccttttcctaaaattaatttaaaaaatggtttccaagcttcttccggtcattctctgctgcttgtttttggcttctttcgccctctgctcgcccaaggctgctgatgtgctgaaattcaaacgagaagctgcgatcagcagttgtggagctggacagtttgaatacgggggcggctgttgtacgacatgcacaagcgatgctgattgtacgggcgggaagctttgtgtgcccatcctcaacttgctcagcgtcagtctgtgctttgccccatgcggaaattaagacagaaaagaaagcagcaaatgagggtgttga

SEQ ID NO: 88516 - DNA, 425 bp, Heterodera glycines
ggccgccaagcgttaatttatttctgtcactttccgttttttattctcttgaattgaaaatggttctgttgggtgccattgaccaggggacttccagcagtcgttttctcgtcttcgattccgaaaatggcaatttggtcgccggccaccaattggaagtgcagcagcaattcccgaatcccggctttgtggagatgtgtcccgagcaaatatttaagacgaccgtccgatgcatcaaaagcacttgcgaggaactgaacagacgcggcattgacccgaagaaagaaatcaaagccatcggcataaccaatcaaagggaaacaacaatcgtttgggaccgagagacggggtgccatctgagtaatgccatcgtttggttggactgccgaacgcatgagctttgtgacgaatacattcagaggacg

SEQ ID NO: 88517 - DNA, 197 bp, Heterodera glycines; identical to SEQ ID NO: 88513

SEQ ID NO: 88518 - DNA, 208 bp, Heterodera glycines
ggccgccaaggtttgaggtttaaataattccgctaatatttgttaatttatttttggcctttctctgctcaaatgcgactcgttcagcttctccatttggcactgcttgttcagcttttgctggcgcctgttcttttggccgttggccaaaccgatgaaaaagtcaaacgaattcaaaagagagaggggccccccgaggcgaatttgg

SEQ ID NO: 88519 - DNA, 585 bp, Heterodera glycines
ggccagcaaaaggccatgaaccgtaaaaaggccgcgttgctggagtgttcctatgctccggccccctgactagcatacaaaaatcgacgctaagtcagaggtggagaaacccgacaggactctgaagataccaaagcgtttccccctggaagctccctcgtgcgctctcctgttccgaccctgccgcttaccggatgcctgcccgcctttctcccttccggaagcgtggcgctttgtcatacatcacgctgtatgtatatcagtttggtgtatggcggtcgctccaagctgggctgtgtgcacgaacccaccgttcagccctaccgctgccccttatacgggaactatgcggcttgagtccgacccggtgagacaccacttatcgccactggcatcacatcactggtcacaggattacctgaccgatgtatgtaggcggagctacagagtccttgaagtggaggactaactacagctacactagaaaagcagtatgtggtatgtgcgctctggtggagccagtttccttcagaaaaacaggcggcagctgttgatccggcaaacaaaccaccggtggtagcggcg

SEQ ID NO: 88520 - DNA, 726 bp, Heterodera glycines
  unsure (1)..(726): unsure at all n locations
ggccgccaaggtttgagacattcaaaatgtcccgtgatgtcagttcggcagagaaattgccccttttacagtcgtccaatcctcgcacttacagtcgcacttcgtcgcgtgaggaggcgcggcccattgaccacaatgacccgctcaccggtgaagaaggggaggtccagggcggttttgtgtcctaccaacacggggatgccaacccaagaacaccgatgggacagggccaagcgcgcaatgtcaaccaaaatgggtctccatcggatgtcgcggaggaggacgacgaagactcgccgctaatgaaccgaggtccaatggttgtgtgccgggtttgtgaggccgaaattgctcttgacggcaaaacgacgctccatgtcgtccgatgccaaaactgcaacgaggtgacgcccatccgtgccgcaccgcccggaaaaaagtacgtgcgctgcccctgcaactgtctgctcgtgtgcaaggcgtcctccgcgcgcattgcgtgccctcggcagaactgtcgtcgggtgatcactttggccgcctcttctcccgtcggcacggcggtgcgggcgccggccggcacgtgccgcgtgcagtgcgcgcactgcgctgaggtgataatcttcaacacgctgtccaacacggtggcccattgtccgcactgcaanagcgtttcgtccgttggcgttcgcttcgctcgtgcccgttccactttgttttgcattg

SEQ ID NO: 88521 - DNA, 319 bp, Heterodera glycines
ggccgcaaaggtttgagcaataaaattatcgatgcgatcactgcagaaataccatattattgcggacaatttgggctggttcagcgatttggacggcaaaaagaacatcgaagagattttggcagcgaaaggggaggcgatcaaaagggggacggcggtgttggagatggaagtgccagcggaggaggagggggacaacgccaaattgataaggtggccacaacgctggagatggacaaaattcgagcgcgaggtatttagctttctgaagttcacctacaattacgacccattgctggacattggaaggaaagtcgag

SEQ ID NO: 88522 - DNA, 367 bp, Heterodera glycines
ggccgccaagcaaaaagtccgattgtggtcgcaggtggtggattggttggtctgtcagtggcctacggcttggccaagcgtggtgcgaaggaagtctttctttttgaacgccattgcatcggtgctcacaattcgacacgcatcagcacgggaatgatcaacaacccatgcttttacacggatcgctctctccaatccgtcgtacgcaaatcgcacgaattatacgcagaattggacagccgcgggacattagggttcactcgctgcggtcgtgtctatttggcgtccagcgacgacacggccatccaagcgcggcgtatgttcagccgactcagcgccgacccggccaattcggcagccgaactgg

SEQ ID NO: 88523 - DNA, 188 bp, Heterodera glycines
ggccgccaaggttttgaccgggaccgggaaattcccggcttttttcccggttttcccagccaaaaagtcccggtcccggtcttgcccaaatttcccggtcccactgcactctagtgtttacgaaaatggcaatccctccatttttagaatcgaatttctaattgcccaaatagtcaattttacatatg

SEQ ID NO: 88524 - DNA, 264 bp, Heterodera glycines
ggccgccaggtttgagttgatttgttgagctcttttcgggaattgctgaatacgagtgctactccctccacgcacacattccctcgcctattcttcgcgctgctaattaattaattaatcgcccttttgtcaattgctcattcatttgacggatcaaacggtcgccccccaccaacaaaatctctgccccaccgaagcacaacgaataattgacactgctcaaaaccacacaatccgaagctatgaacccatccattgaagaag

SEQ ID NO: 88525 - DNA, 154 bp, Heterodera glycines
ggccgccaggaacagaactatttgcgttagtatcatcatcccttcattatgcaataacaacaacacttcaaaagcgacctcatcgccgtttctcatcgttctttcgtccgtccgttcttcacatcaattcgctcgccgttttcgcaatggcacg

SEQ ID NO: 88526 - DNA, 226 bp, Heterodera glycines
ggccgccaagtttgagtttctacaaaaatcaaagcacaaatcaaggtcactgtgagagatggcaaagtctaagaaccacaccagtcataatcaaaacagaaaggaccaccgaaacggcattcacaagcctaaaaaggagcgttacatgtcgatgaagggagtggacccgaaattcttgcgcaatttgcgttttgccaagaaacacaacaagcggaatgtgaaagcg

SEQ ID NO: 88527 - DNA, 226 bp, Heterodera glycines
ggccgccaagcaagtttgaggttcggttaaattacgtgctataccatcggcaattaaaagagaagattgagaagctcagacgcttggcaagagaatgggaagaggtggaaagagcgttagacgaattgattgagcaacgccgccagcggggcgtactgcccgaggtaaccgaatgggtaccgcccgctggcggagggaggaggagagggaggaggtggaggggaag

SEQ ID NO: 88528 - DNA, 186 bp, Heterodera glycines
ggccgccaagcggccagcctggaaaccccggcccgcaaggataccctggcgacggcggaagccccggccaacccggcaaccccggaggcagcggcgagcccggacagcccggagcacagggatccagcggccaatgctaccactgcccaccgccccgcaccgcccccggctactgagtgtgatcag

SEQ ID NO: 88529 - DNA, 480 bp, Heterodera glycines
ggccgccaagggtaatcctccccccccccccccgagcgccccaaacagacgctctgtcgtcgtcggcgaagaaataatcgatgggcaaacgaagtgcggcagtgtccgccctgctgccgacccggacaaaagtaactcccgccggggttcaggtcggtaactgataaactactgttattatgataaactataatatgtgtatgactgagcaaacaccactcactcactcgtcatcattattatggtggtgattaatcattttaacctaatgagaaacgatctatcacatggtcggcagaaagtgatcaatgaaacgtaggcaatgtgattggacaagtgattactgatcagaataagtgcgtctccctttttgattgatcaatcaattcagccggtcggttgatcgtttatcctccgcccatcgtctgattcgttgtgttcgtcgctttgtcccctgggactgactttaccgggctcaag

SEQ ID NO: 88530 - DNA, 401 bp, Heterodera glycines
ggccgccaatgttccgccgatgaccgacccattgcagctgtgtctgagggcgttggtgaatctgctgagctgtgcatggattcaacgggaagtgatgcgcgacgtgcgtgtgcccatcgaaatcgccaacattctttacaaaattgtgctgactcgggacagcattcagacgcatcgaatttgcgtggaactgatcacgacattggtgaccaaagcagcaaaagacgcggtcaaagcaaaggaggagaaaaatgaattggacgaacagaacggaaatgccgttgatttggtgaatgggcatgaggaacatcgtgacactgactttggccagggacagcggcgggatttcggaatgaatgacggtgttttatcgtcctcgtcctcctccgatgcgacgcttg

SEQ ID NO: 88531 - DNA, 115 bp, Heterodera glycines
ggccgccaagtcgaaattggctcgttgaaacggtttcgccttctctgcacgacggacagtcgaagtgcgacgaacagtcacatttcgggacttgacgaagcatgaaaatgatttg

SEQ ID NO: 88532 - DNA, 436 bp, Heterodera glycines
ggccgccaaggtccaaataagcgttacacattttgcctctgtaaccacatcatatcgtaacatcgtccgtcaacaagatcaacaacaaaacgttcaaaatgtctgcggaatcgccaacaacatcacaacgccgtgctcgcagtcgcaagacgaagaaacgtgcggtcagcgctggcgagaccaaaccactgcgacgctcggcacggattgcggcacagaaagcggcgaaggaaaaggcagccaaacagaaagctcgtgacggctccaccgcgtcaacgaagtctgctggtcgtggtcgtcctagtcgctcgccgaagaagtcaggcccgaagagtcgtcgctcgcccgccggtcgtggaggaggacgttctcagacgccgcgcaagaagaaacaaccgatgaagaaggcgccgggcccgagcagtcgcactcctgg

SEQ ID NO: 88533 - DNA, 226 bp, Heterodera glycines; identical to SEQ ID NO: 88526

SEQ ID NO: 88534 - DNA, 195 bp, Heterodera glycines
ggccgccaggagctctctctctctatttctccttttctcccactctttcccattctccgcttttccatgctattttcgtcctctgcttcttcttcttcttaactgccgcttctcttatcgtcccctttcttccgcttctcttctgctgttgtctctgtgttcccccctccggcgccattctgtgccgcaccggcg

SEQ ID NO: 88535 - DNA, 188 bp, Heterodera glycines
ggccgccaagggaaaggcgagtgcgagcgaaaccaagcttacatgagttcatggtgtaaagcaagttgcagacaatgcgattttgactatgacattgacaaagaatgtggaaatcgtcacccgaactgttggcaatgggcaaacgaaggccaatgccaacggaaccttttttggatgaatgaaaattg

SEQ ID NO: 88536 - DNA, 312 bp, Heterodera glycines
ggccgccaagcgtatttcaattttattacaccaccgacgcgtgcgcaccggctccaagcacaatggacgttgacatgtggcaactgccctactaccacggactgctgccgcgcgaggacgtagtggagctgctgccgaacgacggggacttcctggtgcgcatgacagaagaaatttcgggcacggagcgtgtgtatgcactgtcggtgaacgtcggcggcttcctgaaccacgtcatcttccgccgacacaagggaatgttcaccgtggacctcaactccgacaagggcttccgaacaatcgaacgattcg

SEQ ID NO: 88537 - DNA, 213 bp, Heterodera glycines
ggccgccaagaattaattggaaatccaattcaatttttgagtataaaatgaactgctccttcttcctctgtctcttcactgttcagctgattctgctcaatttcgcagtcgaaggaagagaagacgatgaactgaagagaaagaaacgcaacacggacgtggacgtgctcggcctggtaaatattcacgcgccgtcgcgaaagaatgtgaacg

SEQ ID NO: 88538 - DNA, 167 bp, Heterodera glycines
ggccgccaatggtggacaatgagccgaaggaggtgaaccgcttggcacggttggccggctgctccacgttattggcgacaaccagttgccaaacaatgcagaaggcaatgagaacaaagtgcattttaatggtggaaatcagttaaaagtattttcctcaaacttgg

SEQ ID NO: 88539 - DNA, 309 bp, Heterodera glycines
ggcccagatatccccagggaaacacgggggatttgaggaagttcccgtgcccacggttgctcagccatcatatgtgctcggctttcgtggcacaattcatttcaacggcacactcagcgacaacgcactcgccttcttccgtcacgcgttgcccccgcccacaactttgtaccgcttctcggtgctggacgaattttatcgtgccaacggactgctgagcccgttcaaaacaacggaacgcatcaacatctttctggctcggcagttcgctcagcggacagtgtgtggtgttggtggagcgtcggccgg

SEQ ID NO: 88540 - DNA, 223 bp, Heterodera glycines
ggccgcctaggaaaaatttgttatacctaagtcttgaaatgtcttggatttttggcatcaaacctcagccgtcgtcgattcctgcgcctccggacgaccccaacagaaaccctcccacgcccgccgatgagaagcagcagaaaatatggggcacaggagtgcctacacatttgactcaactgcgctggaacgggcggcacaagcagcaaaaacgctggaaaag

SEQ ID NO: 88541 - DNA, 201 bp, Heterodera glycines
ggccgccaagcaagtttgaggggttttgagccgcccccggacgtcgaagttccgtcagaaccaccggtggaatggcgcgcgtggctcaacaaaagcaggcgtttccctccgtcggaagaagaaattcagctgaacctactcaaacaacaagctcaattggtacaaaacacagatacggaaaagaaagcgccaatgattgtg

SEQ ID NO: 88542 - DNA, 392 bp, Heterodera glycines
ggccgcagagaaggaggaaaagaagtcagaaagcaaggaagcagagaaaaaggagaatgaggagcaaaagcctgctggcaagaaggagaaacgcgccgcagagaaagaggaaaagaagacggaaagcaaggaagcagagaaaaaggagaatgaggagcaaaagcctgctggtaagaaggagaagcgcgccgcagagaaggaggaaaagaagtcagaaagcaaggaagcagagaaaaaggagaatgaggagcaaaagcctgctggcaagaaggagaagcgcgccgcagagaaggaggaaaagaagacggaaagcaaggaagcagagaaaaaggagaatgaggagcaaaagcctgctggtaagaaggagaaacgcgccgcagagaaagaggaaa

SEQ ID NO: 88543 - DNA, 710 bp, Heterodera glycines
ggccgccctgcacgagtcataccagcgcgcccaatgggctttcggagagattttccaggactgcgtcagcggactcgcgtttctgcatgtgggggacgccacgcgggcgcgaagtctgtacgaacgctccctcgagtcggcggttgcattgcatgggcagttgtctccttttgcttcaatgccagcgctactgctcgcggaaatcctctatgagcagaacgatttggatcgggcgcggcagctcgtcgccgactacctcgatgtcgcccatggtctggggtacgtggacaagttgatcgccgcgtacctcgtgaaggcccggctcgaagccggcggcggtcagatcgagaccgctcaaaggactctggatgaaggcgaccgctgcgcgcgggtcactggatttgcccggctgcatgccaacatctcgtgcgagcgaatgcggcttctctcggccaactctgccgcagtgctcgatctcgcacggacagcaggcctgcttggaagctgctcggcgctgcaaccgaacgtgggcgtcacgtcctccaccgaaaagctcgccatctcgtgggcatacgccgcgcgcgcgaatggcgacatcgacggcgcgatcagactcctgaagagctggtaccggttcgtcatggcaaggcggtgcttgcgttccggcctgcgtcttgcggtggagctcggcacgctgttctatcttcgcg

SEQ ID NO: 88544 - DNA, 124 bp, Heterodera glycines
ggccgccagaaaaaggcactttctttgcgaagcaaattttccgttttgaaaggagacatcaccaaaatgactacggattgcattgtgaacgcggccaacagctcactgcttgggggcggcggtg

SEQ ID NO: 88545 - DNA, 187 bp, Heterodera glycines
ggccgccgcttcgccgccctttccgcccgttttaatttcgaacatttccttgaacatgtcccgggcgcgcgacttgcaaaagtcgaggtccaactgaacgttggcctccaatgtttggatgtaatggacaatcagcgggaaaatgatcagacaggaggtgatcgccaccgtcgcgcagcacgtggcg

SEQ ID NO: 88546 - DNA, 377 bp, Heterodera glycines
tagacggccgccaaggttaaatttaggtcactgcatttacaattgtcatataaatgtctcatgctttcgtttcacaaccgcacaaaaattcggtgtgccttatgggatggccaaccacaaatcccgtgattatcagacaaaggcacggtgctcaaactgaacaggcacgcatttattggccagcaagtgcgctcacaacgacagagccaaattgaggacgagctcaaatgtgcccgcgactgagaatacccagaagagaattcggaagattggtgaatcacaggccacaccgctttcactcacaacgcactttcacattacacctgacccgccggccgccccaacgctattcccactttgccaccaccctttcacta

SEQ ID NO: 88547 - DNA, 209 bp, Heterodera glycines
ggccgccaagcggttctctccagcatcaactcacccccgcaaagcgacatggcggacggtctcatgacgcttgctccaggaacgcgtgtctcaggccgctggatcatcataaagaagcttggtgccggatcatttggagccgtttacttatgccaagatgagcgagtgggaacaattgcagcactgaagacagagccattcaacacacg

SEQ ID NO: 88548 - DNA, 710 bp, Heterodera glycines
ggccgccaacgcgcggggagaggcggtttgcgtattgggcgctcttccgcttcctcgctcactgactcgctgcgctcggtcgttcggctgcggcgagcggtatcagctcactcaaaggcggtaatacggttatccacagaatcaggggataacgcaggaaagaacatgtgagcaaaaggccagcaaaaggccaggaaccgtaaaaaggccgcgttgctggcgtttttccataggctccgcccccctgacgagcatcacaaaaatcgacgctcaagtcagaggtggcgaaacccgacaggactataaagataccaggcgtttccccctggaagctccctcgtgcgctctcctgttccgaccctgccgcttaccggatacctgtccgcctttctcccttcgggaagcgtggcgctttctcatagctcacgctgtaggtatctcagttcggtgtaggtcgttcgctccaagctgggctgtgtgcacgaaccccccgttcagcccgaccgctgcgccttatccggtaactatcgtcttgagtccaacccggtaagacacgacttatcgccactggcagcagccactggtaacaggattagcagagcgaggtatgtaggcggtgctacagagttcttgaagtggtggcctaactacggctacactagaaggacagtatttggtatctgcgctctgctgaagccagttaccttcgg

SEQ ID NO: 88549 - DNA, 248 bp, Heterodera glycines
ggccgccaaggtgcaacggcgcacttcaaattcgcgcactcgccaccgtttgccgccgcttccgaagaagcgatccttcgcagcaagcagaacaaacacactgccgacgagcaaaacgacggagagattaccacaagcaacagtgacaaaaccgatccgaaaaactccatccttacccgcgtcgtgtgccgccaccatcgacggcacagaagaaaacgcccacggacagtcggcccgggtcgaagggg

SEQ ID NO: 88550 - DNA, 157 bp, Heterodera glycines
ggccgcaaagcaaatcgaaggtgcaaatgggaatgtgacattggcactcgttttgccacggaatgcgtcgccagggttttttttttgcgccgtgcgattgttttcgattcattggtacgccccgtcggctgttcctgcgcctcctccgtactgaacg

SEQ ID NO: 88551 - DNA, 266 bp, Heterodera glycines
ggccgccaagaatttgcaaagggaacaaaaggtgccggtggtccatcagccggaggcggcagacctaacagggcggacgaccgggcggtgggccgtcacgaggggcgtacagaggcggggcacatccgtcgggaggccagccaaggagaaactgacaatgcattattttcgccatgttttgttgtttgctagatctccatttggaaccaattaacgctggaataaatttccaaagacaaaaaaaaaaaaaaaaaaaaaaaacttgg

SEQ ID NO: 88552 - DNA, 656 bp, Heterodera glycines
ggccgcaataatttacaataaaatggaaaatgaaggacagctcagtcccgcggaagagcaaatgctaatcgaacatgcgcaaattgtgcaacgcaattcgaccagcccttacagcaaattcgccgtcggcgctgccattttgaacaacgacggacagattttcagaggagcaaatgtggaaaatgcttcttacggggcgacaatttgtgccgaaaggagcgcaatttgttccgcaattgccgcaattgggcccaccaaattttgcccaaaagcaatttgtcgtcaaactttggtcgaattcggtgacatggcggtccttctctattcgcgtcccagcaaaaaattgttaaaaacgcgcgtccaaaatctgatcccaatggcattcactcccaacgcattgaacactttcaaaagtgacgcatcgatgagcaattaaccgaatgaatggacgcgcatttgaacagtgattgatcaaaccaattagagagttaatgatttaattcaatttaatttaaaagcaccaatccaatccccgaaatgcactaaaagcaattgtttaaattagagcatgaaaatgtttgttaaaaattcactaatttttagccatttatttttggttttattgtatatttctttttccaataatatgcataaat

SEQ ID NO: 88553 - DNA, 205 bp, Heterodera glycines
ggccgcctggcgaccagggcaagcagggcgggtgcgatcactgctcaccgccacggacagcgccgggctattgatggcatttttcgaatttattcattttatgtaaataccaactttttatttcaaattgaaaatcttttggcaataaagatgcattcagttacaaaaaaaaaaaaaaaaaaaaaaaaaaaaaaaaaaaacttgg

SEQ ID NO: 88554 - DNA, 398 bp, Heterodera glycines
ggccgccaagcactcaaaaggggacgcccatggagagcagcgacgccaacaataacatcaacaacagcgagggggaggccgaaaataccaccaaaaacggcggagaggagggcgtcgagaagaagatcttgagcaaaggcgtcagcggggtggcaaatggttaacgtcatgaatggatacggcttcatttgccgtgatgacaccaacgacgacatttttgtgcacaattcggcaattacagcaaataatccatccaaaattcagcgatcattgggcgatggtgaaaaggttatgttcgacattgttgatggtgctaaagggccagaggcggccaacgtgactggtccggacggagtgcccgtgcaggggtccaaatatgctgcagatttgagccagcg

SEQ ID NO: 88555 - DNA, 276 bp, Heterodera glycines
ggccgccaagctgtcgctgcacggaccgctgataaggaacgcccaagacacaacctgccgcggtaaaaactgcagagaagaagccgccgaaatcaaaaacggaaactgtgggcaaaagggaaactgttggtcccaagaaaaagaaaggaggcaagtaaatgacaacaagcggacgatcggatttgagacaatcgatcgcattcattgttttgccacatcatatttgttgaagaattgttattaaaaaaaaaaaaaaaaaaaaaaaaaaaaacttgg

SEQ ID NO: 88556 - DNA, 173 bp, Heterodera glycines
ggccgccaagtgccgccattgccaatagccatcaatgatcaaccgcaccgcggtttcccatcgccgcaaacagcagcaaggcggtcatactcaatgccaatctatgcacttccttctggcaaacaaaagcagcagcaacaggcgcaggacgacgacaaggagcagcagcgtgg

SEQ ID NO: 88557 - DNA, 371 bp, Heterodera glycines
ggccgccaaggttttttttaattgaatcaacaaaatgtctaccgaccgatatgatattgtgttgtacggtgcttcaggctttaccggccaacatgttcttgaatcattcgtaaagaatggtcatttggaccaatttaatttcgccgtcgcgggaagaagtgagaaaaaactcaaacaaacactcgaagacatcgaattcatcactgggaaagttttgaccaaaattccaattatcatcgccgattcgtccgatgctcagcagctcgcagaaatggccaaacaagccaaagttattgtcaatgttgttggaccataccggttgtatggtgaagcggtggtaaaagctgcggttgaaaatggtgcaagtcatg

SEQ ID NO: 88558 - DNA, 428 bp, Heterodera glycines
ggccgccaagccttaagcgttacacattttgccatctgtcaaccaatcatcatcatcgtcaacaagttcaacaacaaaacgttcaaaatgtctgcggaatcgccaacaacatcacaacgccgtgctcgcagtcgcaagacgaagaaacgtgcggccagcgctggcgagaccaaaccactgcgacgctcggcacggattgcggcacagaaagcggcgaaggaaaaggcagccaaacagaaagctcgtgacggctccaccgcgtcaacgaagtctgctggtcgtggtcgtcctagtcgctcgccgaagaagtcaggcccgaagagtcgtcgctcgcccgccggtcgtggaggaggacgttctcagacgccgcgcaagaagaaacaaccgctgaagaagaaggcgccgggcccgcgcagtcgcactcctgg

SEQ ID NO: 88559 - DNA, 353 bp, Heterodera glycines
ggccgccaagcttcttctgctgctggatttgcattgtaccggtgccaacaccggcctcggcttgcattttgttaaatctctatatgcttccggcacttattccgccattgtgttggcctgtcgaagtgaacagcgcgcgaagagcgcaattgaacaaatttgctgtggccaatcatcgccggcggaaaatggcaacggcacccaaacaaaattagaatttgcgaagttggatttgacctgcaatgattcggtccgcactttcgtctcccaactcgacgagcgtccctatcaaaagggcagtttgcgattgctcgtcaacaatgccggcattatgggccatccctttcaattgg

SEQ ID NO: 88560 - DNA, 501 bp, Heterodera glycines
ggccgcctgatctcggcgctgcggttcgaccgcgtgctggcgtgcaagtcgcgcaatatcgacctttcggcctccggcgccgagctcgacctgatcggcatcgagttcagccccactgatccgccgggtggcagcgcgctgatcctgttcgccggcggcggcgcgttgcggctcgatctcgaatgcctcgaatgcgagctcgccgacctcggtcgcgataggggctgatcgcaagggcagcggggcgccgttgatggtcgctcacgcaatcccttgtaaaatcaagcgaaagtctgttttgagtcgccccgcgggactttgcacttcacgaactggccggggcagggcatagctgcgggaagaaacctcggcttacccggcccccgcgacagcccttgtatccggaccccgccatgccgatccgtatcgacagccagagtgccgacttcgcggcgcgctttacggccttcctcgccatgaagcgcgaggttgcggccgacg

SEQ ID NO: 88561 - DNA, 265 bp, Heterodera glycines
ggccgccaagccttaagatggaaacaggccctcttaaattattgcgcaagaaattttccatcgaatggcgacagatcgaagcgattgagaaaatgaaaaagaaagggtcgcctaatgtgcgagtttttgcctttgaggatccaagttttaagcctggctgtaggaaattcgttgtctctgggcttcgcaatttttacctttggtacagagagtgtccgatccgtgcgcgacatttttacgagttgatcattgaacggatgccatg

SEQ ID NO: 88562 - DNA, 418 bp, Heterodera glycines
ggccgccaaggcaaaaatgacttccaattctactgatggttggggatgtaacaacagtgggtggggtcaaagccaagcaaaaatgacttccaattctgctgctgatggttggggatgtaacaacagtgcgttgcgtccgaaccaagcaaaaatgacttccaattctactgacggttggggatgtaacaacaatggctgggctccgagccaagcaaaaatgaccaattctactgatggttcgggatgtaacaacagtgtgaggggtccgcgcgaattttctcggagtttcagtggacgcccaggatttaatcgccaacctgtggttttcttttgtgttgtaaatttcggcacttcatcttatttctttagcctctaatgaacaagttgcctccaattcctccgtccacaatacttttcg

SEQ ID NO: 88563 - DNA, 283 bp, Heterodera glycines
ggccgcaaagaataaatgtcagacgaaggtcagcagttgttggagtccaccttgcgcaatgtgttggaccagcagtcgcttcgatggattttcgttggcggaaagggcggcgtcggaaagaccacgtgcagttgctctttggccgttcagttggccaaatatcgtcgcaatgtgctgatcatttccaccgatccggcccataacatttcggacgcgttcaaccaaaaattcacacggagtcccaccaaagtgaacggcttcgacaatttgttcgcgatggaag

SEQ ID NO: 88564 - DNA, 335 bp, Heterodera glycines
ggccgcctccgttgcaatgcgatccaaggcgtcgatgacgaaggagttcatgatgttcaacgcacgcattgagatttccttgcccggatgaacttccttcagcacccgtcgaacgtacaacttgtacgacacctttcgcggctccttttttcttcgtcggcgtgccattttggtgcgatgttgttgagaatggcgctgttgttgaacgtgagcaactgtcggttttctcagaaattacgcgtgcacacaattggtggcgatggcaaaaatgaacttggcggcctcgaattgctttcttctctccctttagtgagggttaattgaaaaaaacttgg

SEQ ID NO: 88565 - DNA, 267 bp, Heterodera glycines
ggccgccattttctcatcgacggtggcacgtacttggacttctgaggctgctgctgcgactgtgctgcctgttgctgttgttcgtcctccttcgccttcttgggctgttgctgtgtctgtggcgtttgctgctgctcgacttccctcggcttttgtggctgttgcgtctgtctttgctccttcgccttttgcgtctgcgcctgtgctgcctgttgctgttcggcctcccgcgcctcttttttgcgttgttccttcctgcgctccgcg

SEQ ID NO: 88566 - DNA, 187 bp, Heterodera glycines
  unsure (1)..(187): unsure at all n locations
ggccgcctttagtgcaacgcgcgtcatgaagccaaacgcttcattnaagtctcggaaagtgaagctctttttgatggcatcccttccctgctccatttgccacccgccctccttcagcaaaggctccaaaagttgctttcgttgcgcctcgccgagtctcgcgctgcccatcgtcgtaaatttgtag

SEQ ID NO: 88567 - DNA, 129 bp, Heterodera glycines
ggccgccagcgccggagaagtccccggatcagagcgcctacatgtgagaagatgcaacaacgaccggcggatggatggacgaaacctgaagagcgagcgacctgtcagaagatgcaaagataaagaaga

SEQ ID NO: 88568 - DNA, 417 bp, Heterodera glycines
ggccgaaaggttacacattttgccatctgtcaaccaatcatcatcatcgtaacaagttcacaacaaaacgttcaaaatgtctgcggaatcgccaacaacatcacaacgccgtgctcgcagtcgcaagacgaagaaacgtgcggccagcgctggcgagaccaaaccactgcgacgctcggcacggattgcggcacagaaagcggcgaaggaaaaggcagccaaacagaaagctcgtgacggctccaccgcgtcaacgaagtctgctggtcgtggtcgtcctagtcgctcgccgaagaagtcaggcccgaagagtcgtcgctcgcccgccggtcgtggaggaggacgttctcagacgccgcgcaagaagaaacaaccgctgaagaagaaggcgccgggcccgcgcagtcgcactcctgg

SEQ ID NO: 88569 - DNA, 182 bp, Heterodera glycines
ggccgcgctggcagtcggctgtacggtggtggtgaaaccggcggaggacactccgctgacggcactcgcacttgctcagacttcccaagaggcgggcgttccctccggcgttttcaatgtcattccatccgaccgagaggagactgccgaagtttccaaattcctttgcgagtcgcaagacg

SEQ ID NO: 88570 - DNA, 256 bp, Heterodera glycines
ggccgccaagatatttctgccttccgtcggctgatgcccaacacctttgccttccttcgttatattttgtcgccactccgttttttgaattactccgtatccctgcttctgtcttctgtataccaatccgtctacaatttggccgaaatgactgtggacatcgtacgccgggcaccacccaaacagcgaccaggacaaggacgaggaggactgcttcacgccgtcgcgcgtcaacagcagcgcgttcgagagctcg

SEQ ID NO: 88571 - DNA, 167 bp, Heterodera glycines
ggccgccaagagggcaagaccaatttttttgagaagcgagtgtcggagtaccaaaagatgggagttatttcaacagaagagcagcgtgaattccgtcttgacgctgatttttgagtgttttaaattaatttgatattgtaacttctcaccgatactcatcctattgg

SEQ ID NO: 88572 - DNA, 100 bp, Heterodera glycines
ggccgccaaggtttgaggtaaaattctaaatttgcttttgtgatgtctcgtatcgctctattggtccttttggtcgcgctgttctgcgcttgcgctttgg

SEQ ID NO: 88573 - DNA, 176 bp, Heterodera glycines
ggccgccaagctgttttattatctatttgcttttggttgattaccttggcctatttttgcaaaaatgcctcgctatgatgcgaccgatgacttgtcaggagcggaatatttggccagcatttacggcacagaaaaggacaaagtgaattgttcctttttcttaagattggcgcatg

SEQ ID NO: 88574 - DNA, 420 bp, Heterodera glycines
ggccgcaaaggttacacattttgccatctgtcaaccaatcatcatcatcgtcaacaagttcaacaacaaaacgttcaaaatgtctgcggaatcgccaacaacatcacaacgccgtgctcgcagtcgcaagacgaagaaacgtgcggccagcgctggcgagaccaaaccactgcgacgctcggcacggattgcggcacagaaagcggcgaaggaaaaggcagccaaacagaaagctcgtgacggctccaccgcgtcaacgaagtctgctggtcgtggtcgtcctagtcgctcgccgaagaagtcaggcccgaagagtcgtcgctcgcccgccggtcgtggaggaggacgttctcagacgccgcgcaagaagaaacaaccgctgaagaagaaggcgccgggcccgcgcagtcgcactcctgg

SEQ ID NO: 88575 - DNA, 145 bp, Heterodera glycines
ggccgccaagacggcggaagccccggccaacccggcaaccccggaggcaacggcgagcaaggacagcctggagcacagggatcaagcggccaatgctaccactgcccaccgccccgcaccgcccccggctactgagtgtgatcag

SEQ ID NO: 88576 - DNA, 214 bp, Heterodera glycines
ggccgccaagaattaattggaaatacattcagtttttgagataaaatgaactgctccttcttcctctgtctcttcactgttcagatgagtctgctcaatttggcatttcaaggatgagaagacgatgaactgaagagaaagaggcgcaggcaccggacgtggacgtgctctgtctgttaaatattcacgcgcacgccgcgaaagagtgtgaacg

SEQ ID NO: 88577 - DNA, 419 bp, Heterodera glycines
ggccgcaaaggttacacattttgccatctgtcaaccaatcatcatcatcgtaacaagttcaacaacaaaacgttcaaaatgtctgcggaatcgccaacaacatcacaacgccgtgctcgcagtcgcaagacgaagaaacgtgcggccagcgctggcgagaccaaaccactgcgacgctcggcacggattgcggcacagaaagcggcgaaggaaaaggcagccaaacagaaagctcgtgacggctccaccgcgtcaacgaagtctgctggtcgtggtcgtcctagtcgctcgccgaagaagtcaggcccgaagagtcgtcgctcgcccgccggtcgtggaggaggacgttctcagacgccgcgcaagaagaaacaaccgctgaagaagaaggcgccgggcccgcgcagtcgcactcctgg

SEQ ID NO: 88578 - DNA, 290 bp, Heterodera glycines
ggccgccaagcaattacctaacttgccaaatcagtttaatgtgtggcagggcgaacagcaaatgttcccgccgaatattggtctagcatcgaacatgatggtgaacagtccatacatgatcaatgccatacaaccgaatctgcccggcattgccaatcaacgtaccatcaacatcgacggtattccgcgcgatattcgtttctatgacgaagtgaccattgcatttatgaaagagaatggaggcgaaccaatggaaatcggtttccattccggggagcgtctcattctcg

SEQ ID NO: 88579 - DNA, 213 bp, Heterodera glycines; identical to SEQ ID NO: 88537

SEQ ID NO: 88580 - DNA, 532 bp, Heterodera glycines
ggccgccagcagagggacaccaaatgatttgtggtcaatctttgcttttatttttgcctttattcgtttttctccaacacttcgattcatcggcgggaggagaacaacggagttggaaggacgaggacggagtggaagtggaaatcatcaaaaagatcccggattcaaagtgcaaagtgaagagcgaggcgggcgacgagttggagcagtttttcaagctgacggacaaagagggcaaactgatcggatccaatttcggacagaaaccctataaatttgtgcttggccatgggcaggccatccgtccgatggacaacgcaatgcgcggaatgtgcgtgggcgaacagcgccgggtgaccattccggcggaagcgttggcggaaaacgaacggccccagggggtgggcgaggaccaagcgatgcattactttgtggagctgaagtccatctttcgcgcagtgcccggcgagaaatggatggaggacgacggactgagcattgaggtcactcacaaaatagaggaagacaaatg

SEQ ID NO: 88581 - DNA, 454 bp, Heterodera glycines
ggccgccaaggctaaatgtatgtgatcgcattgacaatcgacatataaatgtcttatgcttatgtgctacaaccgcacaaaaattcggtgtgccttatgggatggccaacgacacattcggtgattatcagacaaaggcaccgggctgaaactgaacaggcgcgcatttattggccaggaagtgggctcagaacgaagagcgaaattgaggaggagtttaaatgtgcccgcgacggcaaatacccagaagagaatttggaagattggtcaatcacaggcaaacggagtttgactcagaaggcgcttttccattacacggaccgtcgggcgggcaaaggctattccgactttgccaccaccctttactacggtcgcccttacatttggccgcccgttcgcgaaattaaccgatggcactttttcatttgtgtgacctttgccctggttattctcg

SEQ ID NO: 88582 - DNA, 193 bp, Heterodera glycines
ggccgccaagaaagcataagcgacaagcgcagggagaagagaaccgaaatacaaaggaccgacgcgaaagcgaagctgaagatgatcataattgggtggaagttgttgtcggaatttgtgttcatcaccgcatttccccaaaaataacattgataattgtcctatcatcgctttgcaagtgccaaaatcatcc

SEQ ID NO: 88583 - DNA, 201 bp, Heterodera glycines
ggccgccgagcaaccaatgcaccgccatggtcgaggcggacattctgtgcccgaccaaacatttcccagagttggcgtgggctcgtgaattgcctaaggctgactcccattacgtcacgaatgtcgaatttacggaaaaggacgaacttgggatggaagtgcggcgcaacggacggccaatgcccgtggagtatttactcg

SEQ ID NO: 88584 - DNA, 142 bp, Heterodera glycines
ggccgccaaggcgacggcggaaaccccggcgcacccggcaacccgggaggcgttggcgagcccggacagctcggagcacagggagccagtggccaatgctaccactgcccaccgccccgcaccgcccccggctactgatcag

SEQ ID NO: 88585 - DNA, 328 bp, Heterodera glycines
ggccgccaagcaaaatgtttccgttccgttttctcttcgttttcgctttcgctttgctcactttgtgcggcttttctcacatgacattggcacagcccggaagcaatgggccaattggcgaacctaacaaaatgttgcgcatccgccgggaaaatgaacgcaaggaaaattgacgttttccatggaacgaaccaaagaggatgaaaatgaccgaagaacaaaaaaaacactattagcaattaaattccgttttcattgttactttttagggtggtgttttggtataaaatccaaaaagaaaaaaaaaaaaaaaataaaaaaaacttgg

SEQ ID NO: 88586 - DNA, 266 bp, Heterodera glycines; identical to SEQ ID NO: 88551

SEQ ID NO: 88587 - DNA, 788 bp, Heterodera glycines
cagtttggtaccgagctcggatccctagtaacggccgccagtgtgctggaattcgcccttcgcgagctcaattaaccctcactaaagggagtcgactcgatcatgcccattcatcaagaatctagatcatgaagtgcataactatttatgctaaggagtggactaaaagttattgtcaattatattgacacatgttttgtatcaatgtaaaaaataggagtttgcagaaattccattattataggcaggttgcatatgcttttgatcatttactatctcggctttcaacattcacctaataaacacatgaggaatacgaatgtgcaattagcttaagttgggaaagaaaacatgaagcattacgccgtaggcctaaaggactgatagcttatccatttttcttttctttcattctcgtctttccgatatacaatgacaacctacatgttctttgtactgtcagcttaatttaacatgtgatattaagttaattacgtataattattattaaaattaatttttagatttagtgacttgattgtgttaataatttttaaactgtcagtgaatatatcttttaaattcattagtaaacttgctaatccttaaataaaaaatataaaaaggccattgaaaaatcaaatggtagaatacttctctgatttaataaatatatgggaaaagaagtaattaaaaagagtctattaatcttcaacaccacaagtcagataaagatgtcactctgcagtagaaggtaaatatcacatcgcattggtactccaaaaaag

SEQ ID NO: 88588 - DNA, 492 bp, Heterodera glycines
ggccgccaaggagaatggagccgtctctgctcagatatttctgtccccgtcagtttcgccgattggccaccacttccttttgcactttgagcccacggcaccgaataattgccgagggcggaatgccaccgttggagtacgaatttgagcgcgaaaagtgggcgatgggttaacggtttggccgctacggactgcgcggaggggtggacattagcaaactgtggctaaccgttgaggaaattgaagaggtcaaagcggtgcgaaggttcagaacggcgaaggaggcgcaacacattgcgaaaatggagtcagaaaaggagcaaatccgacgcaaaaacagactcgaccgtatcgagcgcaattgggcgacgtacgacgctcagttggccgagttcaatcagcgcgaagtgcagacggaggcggagaaggaaacggccgaccaggagctgaagcgacaggtggaggaggtgcgcaactatttcggctattggg

SEQ ID NO: 88589 - DNA, 349 bp, Heterodera glycines
ggccgccaagattcttcctatttcaatttctcgtcaaatattagacgacgaccgctcgacgacacgcgcacgcattgtccacaagacacaatgaaccctgatgagcggcaaatgtggagactgccgtaccaccacggattgctaccgcgcgaggacgtgacggagttgctgccgaacgacggggacttcctggtgcgcacgacagaagaaacttcgggcacagagcgcgtctttgcattgtctgtgaacgtcggaggcctggtcaaccacgtcatcttccgccgacacaacgggatgtacaccgtggacaaaaactccgacaaggtcttccgaacaatcgaacgattcg

SEQ ID NO: 88590 - DNA, 266 bp, Heterodera glycines
ggccgcaaagctaaaatgtcgcctctccgttttatcattgcctttcttttggtcgttttgtgcgctttttccgcactgataaccgcgcaagaagagagagttgacaatgaacctgctgctctgcgcgccagacgcggaatgtacggttcgccgtacggcggcggaatgggcggcggcggaccatggggaggaaatttcggaaagaaatgagaagggagcaaaatgtggtgatcaagacgaacagaacaagccatttgattgaatat

SEQ ID NO: 88591 - DNA, 377 bp, Heterodera glycines
ggccgccaagttcgtctccaagtctcgtcaaacgtctgcatttattgttcatcaatccttcatcggttgacacccgcgcgcacttcaaaatggacgccctcaaaagacttgcgagccgtgcacggcagaagtcggcggagatcatcctgagcgcggagaagaccgaaatcggcgccgagcttgaacaattgctgaccaagaccgacaagacggaggagcacatgaagaagctggtgcatgccatcgaggtgtacctgcagccgaaccctgcagtccgagcgctggacccgcgaaaggacaaatccggccgacagaatacgctggacggtcttggggaggcgatgaaggaagcagcatcgaaagcggtgggcgccgag

SEQ ID NO: 88592 - DNA, 312 bp, Heterodera glycines
ggccgccaagggacaacggaagtaaaaaatgccaactcgcatatgaccaaaatcagtgtcacctcgagctcatttcgttagcaaatggagaacctttggaccgaaagacggcattcggtcgaattgcttttgccacggcgacggaaaatttgaggccactcgaagagaaagtcggcacaaagcgcattcattcgccactcatttctttgggcacacccggcaaagcgaccgtttgggtggtcattttgaaagacccgaatgagcatgaaatttgttttgtgggcgacgaaggtttccaagaattatcgaaag

SEQ ID NO: 88593 - DNA, 739 bp, Heterodera glycines
ggccgccaagctagcattgtcatagccagtgacacttgtcctcccgagaaaatcttgatgaatcgagttgtgcgtcagaatctccgcgtcaaactgggcgatgtcgtcagtgtttcgtccgcttcaaatacgccaaatggactgcgcattcacgtgcttccgattgatgacaccgttgaggggctgaccggaaacttgttcgaggtgtttcttaagccctactttttggaggcctaccgtccggtttacaaaggcgacacgttcactgtcaacgcagcaatgcgaactgttgagtttaaggtgattgaaactgatccggcgcctgcttgcattgtggtcccaacaacgatcattcattgtgagggggaaccgatcaaacgtgaggacgaggagaacaatctgaacgacgtcggctatgatgacattggcgggatgcgcaagcagttggcgcagatcaaagagatggttgaactcccgctccgccacccgatgcttttcaaatccatcggcattaaacctccccgaggaatgcttttgttcggtccgccaggcactggaaaaacacttgtggcccgtgctgtcgcgaatgaaactggcgcattctttttcctgctcaatggacctgaaataatgagtaaattggctggtgagtcggagtcgaatttgcgcaaagcattttccgagtgcgagaagaattcgcctgccattcttttcatcgatgaaattgacgcaattgccc

SEQ ID NO: 88594 - DNA, 676 bp, Heterodera glycines
ggccgctctccagtcgtctttggtggccgtgaatgtgcgcgtatcgccggggatgccactgcgaaattcgacgtaacgaccctcgctgatcgagcgaatggtggcgggcattcgaccggacgaagtcaattcaatgtacacattttgaaaccgatgaaaagttttcccatccaaaatgagttttgttctgctccaaaagcactcgccggtggtgtcttccgctggcgcccgctgctttctcgcccccctcttcctcggccatttcgcctgcggtggaatggcatgcaatgcccgacagtgccactccatccccaatcgctccgtcttgactcagtccgccgcatcctgctgacgaacgttccgccaaatggcaatggttggccgagtcgctgcccaacgaatggacgtcctccgaaatggccgattccgacaaaagataagggagcatcagcgaagaagtggacgttcctccgatggtcggccctccaccgatggcaccagcaaaaccaccgacagcgccttcggttctgccgaagccaaggaatccgaaaggggagccgcttttcttcgtctgagtacgtctcttcgctgtgcctgctgcatctgtcagtccaatggcacccaaatgcagcgccgactcggcaccaacactcgacgagggaatcacgtcgttctg

SEQ ID NO: 88595 - DNA, 245 bp, Heterodera glycines
ggccgccaagagtttgagggccttgattatgcgtgtacccatttctccgtccataaagttaaatatagttgggaaaacagtagtacccttttttggctcagttgtccagtgtccttcttggagtgtcacgatttgtttcgaccgtgccgaattggattcatggacatagggtcgaatgcaaaacgaaagattggattgaactaacaaatccagccacaaatgaagtggtcggccttgtgcccgag

SEQ ID NO: 88596 - DNA, 260 bp, Heterodera glycines
ggccgccaagggcacgcagccacgttggccaaggcgtcgccagcgaagaagaaaagtccgatcaaaaaggcgaagaaagcggcgcctccagcgcccgcggcggtgccaaaaaagaccagtccaaaagtgccagcaccagcggcggtcaaaaaagtggcagtgaaaaagccgacaccgaagaaggcgccgaaagccatcgcgcgcaagtggccgcaccaccgccgccagcgccggcggcgaagaaagcgcccgtgccatcg

SEQ ID NO: 88597 - DNA, 213 bp, Heterodera glycines; identical to SEQ ID NO: 88537

SEQ ID NO: 88598 - DNA, 179 bp, Heterodera glycines
ggccgccaaggaggttttagaatgtattaccctaaaatgattaggcttccgtctgaacttatttccgaattggcgagtgctcttccccttgacccccgctgggccgtcatccgtgtgtcctcggcctttgattttttcgtttatgcaaaacagataatttataggaaaataaaacttgg

SEQ ID NO: 88599 - DNA, 352 bp, Heterodera glycines
ggccgccaaggtccaattaagaaaatcatactaacaaagacggctatggcatcatctggggaccagtcgttgagagacgcgttggagtgcccggtgtgtaaggacctgttcactgaaccgaaacaattggattgtggtcacacctactgtctgaattgtgtgaatggactggaaaaggtgccgaacattgtccaccgtattgtcggcgacgattatttcgacactcttggcgtcggtcccctctccacacttgtgcagtccgtccaaaacaatgttcaatgcccgcagtgccgcaaaatgtgcctggtgccggacagcggactgagcacgaactacgccatcaaagatatgg

SEQ ID NO: 88600 - DNA, 279 bp, Heterodera glycines
ggccgccaagcggcaaactcacccagggcccgcccgtcgtcggaccgcctggcccatcaggaccccctggccagcccggacagcccggcgagaacggacagcccggccagcctggaaaccccggcccgcaaggataccctggcgacggcggaagccccggccaacccggcaaccccggaggcaacggcgagcaaggacagcctggagcacagggatcaagcggccaatgctaccactgcccaccgccccgcaccgcccccggctactgagtgtgatcag

SEQ ID NO: 88601 - DNA, 242 bp, Heterodera glycines
ggccgccagggacatttagagctatcaataattatatttcgtccaatcgaacaacatgaaaggagttatacccaaaacagggtcaagactcgagtgtggtcacctgtttaaaccaaattctgttgcagattaattaatttgcagctctttgctcgtcacttcgtctgccgacgactccatcactgtgtacgactgtaacagcggcaacaaacatcggtcggtgaacagcaaaaaatacggcg

SEQ ID NO: 88602 - DNA, 576 bp, Heterodera glycines
ggccgccaaggcaaaagtccccaccttttcttatctcccgtttctttgtgtttctgtgataaataaaaatgtcttctcattcttcttctgttgtggttgataattgttgtccaccatcacaaatgacaacttcttcttcccccgctgcctttcgttcttctgcgctcgcttttcttcagttcctcaacaaatcggtcacccctttccatgctgtcgaatcggtcgaggccattctgaagagtgcaaattttgttcaaaagtccgagtatgacaagcttcaaattcaaccaaaggatcgtttctatgtcaaaaaaagcgagacttccatttttgcttttgctgctggcggtgcctttaaaccgtccgaagcgggggtttccattgtcgtcgcgcacactgacagtccttgcttgcgcattaagcccgtctccaaaaagacctccgaacaatttcttcaggtcggtgtttcgctgtacggcggcggtctgtggcgcacgtggttcgaccgcgacctgagcaccgccggccaagtggtgttccgcgagtcggcggacgcgcccatccgacacaagctgg

SEQ ID NO: 88603 - DNA, 250 bp, Heterodera glycines
ggccgccaaggtccaattaagatcgcggttgggacttggacaacacgaagtgatggacaattggcgaaggatgggcgggaggcggaaacgaccatgccaagtttgcaaaggacaggccgcaaatgttgtctctaagcattggcaaatggttgagcaatagagatgcggccatccattgccgcaatggacaaattaatgttcgaatgggcgaacattggatgaaaatggtggagaaaagcgatgacatcgg

SEQ ID NO: 88604 - DNA, 209 bp, Heterodera glycines; identical to SEQ ID NO: 88547

SEQ ID NO: 88605 - DNA, 198 bp, Heterodera glycines
ggccgccaccataatggtggccaccaccataatgtgtggttgtcatgatgatagccaccagaatcacgcggacgagcaccatatttgccatcgtgctccgcccaattatcctatttgccagaaatgcctatgtgaacaagtgccaagaaaagaatcgacaaaagtgtctattttttttgtaaacatgatcaaagtggg

SEQ ID NO: 88606 - DNA, 577 bp, Heterodera glycines
ggccgcaaattcgaccattccggatgtatccacatattgattatctacaaatattcgaattagtgaatattccagatattattgagatcggcgtaaatccctttgcgctcaaactgctctctgcaactccgacgaaatcgtggagacgtacgcctgtggggcctgataagtgaacattctcacgtaattctgagcgttactcactggccacctttcacgacatagagctgaatgccatcgtcaattaataaaattgctttcactcccagacatgctgtaaactgacggaacagccagtgtgtgtacaatttaaatgcaccgagacaggaatcagacgcaaggaatttgccagcagatcctcattgtccgacaatggatggtctcgctacattgccggcgatgtcgactcacatgtttggtggcgagtcacggattggcatagcatgaggtgcatgtgccaatgtattgctccactaccctatgattcatcacaatctgctggatgccctccttcttgtcaacgcctcctcccaaaggctgtgtgggtcgaatgggcctaccaaagatggaacgagaa

SEQ ID NO: 88607 - DNA, 352 bp, Heterodera glycines
ggccgccaagcttcttctgctgctggatttgcattgtaccggtgccacaccggcctcggcttgcattttgttaaatctctatatgcttccggcacttattccgccattgtgttggcctgtcgaagtgaacagcgcgcgaagagcgcaattgaacaaatttgctgtggccaatcatcgccggcggaaaatggcaacggcacccaaacaaaattagaatttgcgaagttggatttgacctgcaatgattcggtccgcactttcgtctcccaactcgacgagcgtccctatcaaaagggcagtttgcgattgctcgtcaacaatgccggcattatgggccatccctttcaattgg

SEQ ID NO: 88608 - DNA, 694 bp, Heterodera glycines
ggccgccaagaagtttgagacaaatttgtttgttttgttgaatttccaaatgctgcttattttaaagaattgttttggtcggcttcatgttatttgtcatcaacttacgcgcagaaattttcgtcttcttttgcatcgacgaaaggaattttccgtattccattaaacttcctgtccacaaaacgaatgaataaatgttttagaaaccgattttcttcagcgtcggtcagccaaagtcttctttcactggtggaaatgcatcgggcggtagcggcggaatgcctcctaacccttttcagggcatgtcaaactggcagaaaatggctgttgcagctgctgtgattgtcggactgcaatacttcatcaatcggctcgcttacacagaaatatcatggaaacagttctacacggactttttggaaaagaacaatgttgaacgcctcgaagttattgacaataaatgggtccgtgtcattaccagggatccaacgcagaccgttttttacttcaacatcggaagcgtagacacttttgagcgcagtttaacccaggcacagcaacatttgggcatggagacgagtcagcagcaggtgccggtgttgtacaaaagcgaatcggacatagtcggaatgattccccatatggttaactttcttatcacgggcatcttcctgttttacatgttcagaatgtt

SEQ ID NO: 88609 - DNA, 663 bp, Heterodera glycines
  unsure (1)..(663): unsure at all n locations
ggccatcgccgcttccactttttcccgcgttttcgcagaaacgtggctggcctggttcaccacgcgggaaacggtctgataagagacaccggcatactctgcgacatcgtataacgttactggtttcacattcaccaccctgaattgactctcttccgggcgctatcatgccataccgcgaaaggttttgcgccattcgatggtgtcaacgtaaatgccgcttcgccttcgcgcgcgaattgcaagctctgcattaatgaatcggccaacgcgcggggagaggcggtttgcgtattgggcgctcttccgcttcctcgctcactgactcgctgcgctcggtcgttcggctgcggcgagcggtatcagctcactcaaaggcggtaatacggttatccacagaatcaggggataacgcaggaaagaacatgtgagcaaaaggccagcaaaaggccaggaaccgtaaaaaggccgcgttgctggcgtttttccataggctccgcccccctgacgagcatcacaaaaatcgacgctcaagtcagaggtggcgaaacccgacagggactataaagataccaggcgtttccccctggaagctccctcgtgcgctctcctgttccgaccctgccgcttaccggatacctgtccgnctttctcccttcggga

SEQ ID NO: 88610 - DNA, 202 bp, Heterodera glycines
  unsure (1)..(202): unsure at all n locations
ggccgccaagcaagtttgaggggttttgagccgcccccggacgtcgaagttccgtcagaaccaccggtggaatggcgcgcgtggctcaacaaaagcaggcgtttccctccgtcggaagaagaaattcagctgaacctactcaaacaacaagctcaattggtacaaaancacagaaacggaaaagaaagcgccaatgattgtg

SEQ ID NO: 88611 - DNA, 163 bp, Heterodera glycines
ggccgccagaataacaaaatgtcccctcttcgttttctcgccgttctgctgctgatctgtgccatgttcagcttcaacaatttggggcttgccaatggcgaggaaagcaaagacagccaagtcgctctccgtcccgatgttgctgctgttcagcctgacctcg

SEQ ID NO: 88612 - DNA, 173 bp, Heterodera glycines
ggccgccaagcaaaatgcattttctctttttgagcgtcttttcactctttttggccaagcactgttcaaatgccattccgatcggtgctggtaaccaacgggatgtgcggcgatcaatggtcattgatcttcttaatgccaatcaagagtttgatcagttgcgaagccaattg

SEQ ID NO: 88613 - DNA, 266 bp, Heterodera glycines
ggccgccaagcaggccccgccctccctcggaccgcctggcccagcaggaccccctggccagcccggacagcccggcgagaacggacagcccggccagcctggaaaccccggcccgcaaggataccctggcgacggcggaagccctggccaacccggcaaccccggaggcagcggcgagcccggacagcccggagcacagggatccagcggccaatgctaccattgcccaccgccccgcaccgcccccggctactgagtgtgatcag

SEQ ID NO: 88614 - DNA, 437 bp, Heterodera glycines
ggccgccaagacttattttagcttaaattttcttcctaaaatggacatcgatgaattgaaaaaaatgagtcctgagcagcaaaacaagcttctcgaggatgttcgtcgtcaatcagacacccaatcggttctgtctttgttggcatccttctctgaaaaatgttcccaacggtgtatcacaagtccgggcaacactttgagcggaggtgaaaaacagtgtttgcaacgatgcgtggacagatggcttgacagcttcagcattgtttcaactgcttttgctgccaaggcccaacagatggccggcatgggcagtttcggctcgcccgacggaggaccatctttctcatgagggtggacagttcattgatcgttgagttatttgatttgttggtttttcgcttgtttgatcttttagtggtttctttttgaaaacagtg

SEQ ID NO: 88615 - DNA, 174 bp, Heterodera glycines
ggccgccaagcgcaatggaagagacgccaatttctctgttgcgcatggcgcgcgaggcggagaaggagcagaaggaagagaaaaaggaggaaaagaaagaagagaagccagaggagggaaagaaggaagagaaaaaggaggaaaagaaagaagagggaaagcaggaagagaaaa

SEQ ID NO: 88616 - DNA, 623 bp, Heterodera glycines
ggccgccaagtttgagatcaaataatgccacgtcgcgtgtatggcatttaccgttcggcgtccactgcgcgaatgccaagcgaatcgcgcgggactgaatttgcggctgcacgtagcgcttccttgccccgttctcgctctaacatcgacataccggcctttggatgtgccggtgccaattatatgccattcactggtttttctgccgtcaaatcggatatctaccgtgtgaacccattatattcattgcgcaattacatgtccgacaaatattaccatttttcgcatcgctacaagcgtacacaattccatcgccattattaccacggacaaattgaccagtacccgtatgaatggaacttcgaagggcgtggaacggcaacgggacaattttactttgcccgacgtatgaaattcaacccgtggcagttcgggtggaatcgcttctacgacccgtacagacgctactacgacccttaccatgacgcgtacatcaagctgtacgactacagaccacgtctgattgacggcatttattgaccaatcacacaattgatcaaagaaaaggggatgggacagacagaaattgatgagaaaaaaatgccaatgacaactgccagaaa

SEQ ID NO: 88617 - DNA, 136 bp, Heterodera glycines
ggccgccaagtttaaatatattttattaaattagaccaaaaactttttaaaatgcaattcggaactggcgctgatccggtgcttgaagaatgcgcattttgtggtgaaaaagtgacattgactgatcgattgatgg

SEQ ID NO: 88618 - DNA, 196 bp, Heterodera glycines
ggccgccacataatggttgccaccaccataattgttgttgtcatgatgatagccaccagaagcaggcggacgagcaccatatttgccatcgtgctcgtccgacttatcgtatttgccagaaatgccaatgtgaacaagtgccaagaaaagaattgacaaaagtgtaaatttcatttttaaatttgctcaaacttgg

SEQ ID NO: 88619 - DNA, 3762 bp, Heterodera glycines; identical to SEQ ID NO: 85123

SEQ ID NO: 88620 - DNA, 5442 bp, Heterodera glycines
  unsure (1)..(5442): unsure at all n locations
atgcattttcacaaattgtttttgcttttgcctattttgcttctccatctccaacaatcccaagcttgcttttcacgtggcaacagtggcgaaccgtcggatggcaatcccgaggcccaggggctaaaagtgccaaaaattttgaattttaaaattaaaaaattctcaaattttcagtcggaaaacgatgttcggactgttcagttgaagaaggaaaaacaaacggatgaaacggaagaggagaaagacgaggaaagttcggcagaacaaaaattgccatctgaattggacccggaatttgtgaaagtgagagaaattggaaaatttctttttaattaaataaatatttaaaaaattaaaattttcttttttaacattatttgatattgtctttatttttgagggttttgaaaaactattgaatatttttatcaatttaaaaaaaaatttttgcttggcttggaaatttttgaaaaatcttatttatttgggaacaaaatatttgaatttaaaaatgaacatttctttgaaaaaatattgtattgaaaatttaataattttttgaaatttatccaagttttttattcaaatgattcttttaaagacttatctgcgagaatttggtcatctgaagcacaatgagaatggcctttcccatggcgttaagtgcgtttaaataaaatttcaaaaagaaatattttaaaaatcacaattattttaggcatttccaacgctttttgggctaccggcagacgggcaatgtcgacttggcaacccttcaaaaaatgtcgtggaaacgctgtgccaactctgacgagggctacacagcacaaggtgggggcggatcgatgaattatggcattcgccaggattattttggagtaaagaaaaatgccggaaattgggccctcaaaatcgaaagtcaaactaatttcctggcaaagttaccacccgagaatggcacttgcatnacagggtcgttcngggtcgagaaaaatatcgggtcgggtttcgggtatcgggtttcgggtaccccggaacaaccctgttgcattacacaaagtgtttaatgcaatggcactggctgtgttttaaataaataataattattattttttaattagtccgataattaattaattacttaattattcgcatttntttttttcgctttagacccatcgcaactttgggaacgttcgacattgttctggaacctgaacgcgtcgcaccccaagcagttcactcatggcgaaacgaagtcagccaaaatttggcacantttgncaatttgaattagcactcattaaacatgttttattacatgcttttgcataattaacttaattgcgcttaattttgcagggaattaattgcgcaagcattccgcgcatgggaaattgtgatcaaaatcgactttctggagacgaacaatgcggacaatgcgcagatcattttcacatttgaaagcgacggagcaaaaaaggagaaaagcaaaaatggggaggaggagaaggaaaaggagggcaaaacaggcaaatcactttctgatttgataagcacngatcggttggtcaaaaagacagagaaggaaattctgatcattctggcaaaaaacaaaatttgatcactttagaatttgttaaaaatttttcaaagtcggaatattcaattcgaaaaacgaatttataaaagtatttgctgaacatcaatttattatttccccatattctgagtaaattaggcgagtttttttaatggctcaatgtttaagtttttaattttttactttttaaagagcaattaaattttgatattttaatcaattttattaattaagaaattaacaaaaaacatgaattcatcacataactcattaacttaattaagtgtttaatttgtattatttatgttttttgtgatttttaaatgctttttgcttttgttaaggcctcgccattgccaaggcgtcgtcgccgcccgttgcgcgaattgttttgaatgccgacgagaattggtccacttttcaaacacaagaagaggtgaaagttaaatattgctaatttaacaatttattttttcagggaaaaatcgacatttttgtggtaaaactaaatatatttttcgaaaatttttggcattttttgccaattttgaggttttactccacgaaattggccatgcgcttggccttcgccattcgggagacgaacattcagtgatgttcccaatgtttgagcgttctgttggcgaacatgtaaaattaaattaattaatttaaaaattaaaaaaatatttaaataaaattctctaatttatttcagttgccagtcatttcaaatgatgatgtcgagcatttgagagcactttacggtgattaactgctaacaattcattaattattttcttaacatttgtgtgtgtttgaagtgctaattaaaaaatggaaaattctaacattattaattaattttactctttgacaatttattatttatgatatttaaattattacatttttattttttttaaattttttaaacccttcncntaagccaatttgctaagcctttttttcttcgcttcggcttcatttgtttccgcatgctttttgttttgtttttttgccatcactttttgcttaaaatatttttcaccatgggatttcccattgctttttccatttttggcatttttcagcgcttttcggcaataaaaatgatgggcccaaactgcgcgtgaagcgcagtagcagcgtcgccagcagcgcaagtgccgccggtgccatcgctggtggtgccaatgccgattctaatgccgacaatgcgtttgcatcattttatgccgatgatgacaataccgttttgtgttgtgtgtgccctgcgccgatgacattaggcgatttgaagaaaagttcgtcgaaaaaaaataatgaaaaattattttgaaggctttgcggcttttcactatttagaattttcaaaaatccatttttaaatggcttaaaatagaaaatttgactcccaaaagtgcctgctntgctttttctgctttcttttttcgtttttcgactattagagccgggtcttcccgggaggccgaaaaatgagacaaaaacctctccacggaggccccaatccaaaccacacactccgaaaagtatgccattacaaaaaaactccattttgtacctggacaaatngaagaaaaaattccaaaaatgccacatgcctggcttttgaaaattttgtgnttcacaagatttaaatcaattttcaggcttaatattccaaatatatatttctcgtaaaaacattcgtctatatttnaacgcgtgtttttcactttgctttttcttttgccgtgtgttttgcactttattttaaattattttttaaattaatttttaattaaatttattacattttattttctgatcactttcagagggcgacctcaccgatcgaccaacacttgcggccgatctgcgcccaacgaggcccgtgcccgtccagggcggcacgcacagcacagagtttaaatttagaaaaataaaataataataaataaaaaataataaaaaataaacaaaaatggttaagctcatacggcggcgaaggagctacgacagcagcaggaaaagaagctgaaaaatgccctcactccatcacaacggcagcgaatggtaaaaaaggggggaaaatttctttttaaattattttttaaataaaaaggaattattttttaaataaaattaatgcccccccccccaattttgcttttttcagttaattccgagactttgttcctcttcaaggacggttacgcatggcatttgagcagaggaaaattggtcggaggcccctacaaaatcagcgaggtgtccctcctaataatgcgatttttttgaagtttttgaaaattttcgcccagtttttcccggacggtcctgaaaaggtcgacgtcgcattttcatccggtcgactgacagtgctggtcaaatcgcgcatgctgttcggctatgagtttgatcagaaaacggcccaattcacgtgagacaatttttgatttcattaaattattcgaaaagaaaaaggactgagatgctttctcgagtcatgactaattatcacccgagaatctcgaacatttgcccttcttttcgaggttagaataaaaacggaccggggttgggattaacgaattcaaaataaatttttattcgacaattttcgaaaaataatcctaatgagaattttggaagtccanatgggactcanatcacttccaattccgctatttattctcaaatacaaaanatgaactcatttatatcattaaaagaaaaatcatatgttcgaatatcatttctaaaataaataattttaattatttaaatatttcaaaatgttttanttgtatttaatttttaggcgtgaccaccgttacccccgcgaattgcacagccgaattcttttctaccccgagggcgcttttccgattgtcaatggaagcgtaattttgttcaaagtatggcaaaaacaaataaaaaataaatgttctaaaattgaaattcaggacgatgtgttcgccacttacaacgtggagagcaacacgccgcatttggtaattagttaattaattcattccaattaattaattgattagaatcattagttacgcaattaattaattaatgagtaaaaattccagttcggaagcatgtccgaatttttccccggactgccccaaaatttgcgcgccggttttgccgccacgcccgattttaccacctaccatatgctgaccaatgattacggtaatttgctgccacaaacaataaccgatcgattttgcattttgtgccctcaaatttcaatgaaaatttacaattttgaacctaataaaaaataaaaatgaacttttatgccaaaattgggcttgatttccaaaagctctttcttctccgcattaatagggcaattagcacaaataattaacaataattaacaaatgttttcagcatttttgtacgatgttcgcgtggcacgaacagtcagctcacaaagcattggccaatttgttggctgtgaggggaacaaattaatggtgaaaagcaatttattaaacattctatttgtataattaatttataattaatgtttcttaattaacactttaaattaatttaaatcattatttttattaattttaattattaatttatatttttaataaaaataatagttttaaatttcgtttgttaattaattaaatttttagcctcctggtccaccgatgcctcatcttttcttcccataccagccgtaaatttatatatatttaaaataataattatttttaaatgattttaattttaatttaatttttaggtctccacctcaaaatccgcgattcccacaacaaaattatggaaaataa

SEQ ID NO: 88621 - DNA, 977 bp, Heterodera glycines
gatcattacccaagtgattcctattcaccacctacctgctgtcctgttgggctagcgttggcaccaccaaatgcccccgtccgctgatgggcacaggtcgttcgagatgacttgtggacgctgcccaacattacggggcagctgcctcacgagccatgcttttggggtgcttccatacgttggagctgtggtataccgctcagtgctgcacatgtgaaagcctgtgtatggctgctgcgtggcaatgtgtcggtggcgggccgcctcgcttggctggttcgctgcgccaatgtgggatgcacgctcgtggggcgacctaacggctgtgctggcgtctgtgcgtcgttgagcggttgttgtggcaggcacataacacactgactggggatggtggtttcgttcccggtcttacgtgccgtaactagcggtgtgtttgtgcttgctgctacgtccgtggccgtgatgagacgacgcggtagggcccgtgcttggcctagcacgtggcttaagactcaatgagtgtcagctcgggcaccgccagctttttctttttttttcattatttttttttacacttctgttgaagaatgaattctagtcttatcggtggatcactcggctcgtggatcgatgaagaacgcagccaactgcgataattagtgcgaactgcagaaaccttgaacacaaaacattcgaatgcacattgcgccattggagttacatccattggcacgcctggttcagggtcgttaccataaaatgcactgcttgtgcgttgcttcgtgggatcatgtacttgtacgtgttcttacgttacttgctcagctcggctgtggggttttggtgtgctggcgcgaacttgtggttctaattcgcgttttacggaccgtaactcgggcgcaccaatgctttgcatgctgtggcggagtgcctggattactggcattcctgctttgatttttcgacctgaactcaga

SEQ ID NO: 88622 - DNA, 378 bp, Heterodera glycines
tacccaagtgattcctattcaccacctacctgctgtcctgttgggctagcgttggcaccaccaaatgcccccgtccgctgatgggcacaggtcgttcgagatgacttgtggacgctgcccaacattacggggcagctgcctcacgagccatgcttttggggtgcttccatacgttggagctgtggtataccgctcagtgctgcacatgtgaaagcctgtgtatggctgctgcgtggcaatgtgtcggtggcgggccgcctcgcttggctggttcgctgcgccaatgtgggatgcacgctcgtggggcgacctaacggctgtgctggcgtctgtgcgtcgttgagcggttgttgtggcaggcacataacacactgactg

SEQ ID NO: 88623 - DNA, 1191 bp, Heterodera glycines; identical to SEQ ID NO: 85166

SEQ ID NO: 88624 - DNA, 1597 bp, Heterodera glycines
caaatgtgccgactccaagcaactcatctgctcgctcgactctttctgcttcttgcgctttgcactgctctcgttagctctctcactgctgttgccccgccattcggccaattgtccgtttccggcaccaatttggtcggcgccaacggacaacccgtacagctgatcggcaactcactgttctggcaccaatggtacccgcagttttggaacgctgacacagtgaaggcactcaaatgcaattggaatgccaatgtcatccggggggccatgggcgtggacgagggcggctatctgagtgacgcgaacacggcttacaatctgatggtggcagtgatcgaagcggccatttccaatggcatttacgtgatcgtcgattggcatgcccacaattcacatccggacgaagcggtcaaattcttcacccgaattgctcaagcgtacggctcctaccctcacattttgtacgaggatttcaacgagccgctgagcgtttcgtggaccgatgtgctggtgccataccacaaaaaggtcattgctgccatccgagctattgacaagaaaaatgtgatcattctcggcactccaacatggtcccaagacgtggatgtggcatcacagaacccaatcaaagactaccaaaatctgatgtacactctccacttttacgcgtccagtcacttcacgaatgatcttggtgccaagctcaaaacagccgtgaacaacggtttgcctgtgttcgtcactgagtacggcacatgcgaagcgtcgggcaacggcaacttgaacactgactcgatgtccagctggtggactctgctggacagcttgaagatttcatacgccaactgggcaatctccgacaaaagtgaggcctgctcagcactgagccccggtacaactgctgccaatgtcggtgtttcgtcccgttggacatcctccggaaatatggttgcttcgtactacaagaaaaaatccaccggcgtaagctgtagcggctcaagttccggcagctcttcgggctcgagttctggctcttccggttcaagttccggcagctcttccggctcaagttccggcagctcttccggctcaagttcgggctcctctggttcgagctcagggtccagctcgggttcgggatccgccagcatctctgtagtcccatccaacacgtggaatggcggtggtcaggtcaacttcgaaatcaaaaacatcgggtccgtgccattgtgtggcgttgtgttcagcgtctctcttccctcagggaccacgcttggtggatcgtggaacatggaatccgcaggctccggccaatacagcttgccaagttgggtcagaattgaggccggaaaatcgagcaaagacgcggggctgacattcaacggaaaagataagccaacggcgaaaattgtgacgacgaagaaatgttagggaaaagacaaagcgcaaaatgggaggaaaagaatgggaaaatgaaagagtggagaaaaagaacaaagggaaagaaagacaaagaattaatgattatgataagagataataactgataaagtttagcataaaatgttgaccaaagtaaaaaaaaaaaaaaaaa

SEQ ID NO: 88625 - DNA, 819 bp, Heterodera glycines
atgaattcgtccgtcgtttcattttcgctgttactttttgggttattcacaattcgcactgcaaaatcgcaatgcgagaaacattgcactaaaagcaaaccgatgggccaatgcaatgaggcggaagaagtgattctgcgcaactccgactgtgccttcatgaagaaaacggaaacggcattcgaatttgtggtcggaatgaatggccaaacggaggacaaaacggcgcccggggccaatgccaatggggcatttttgtgctgtaaggcaacccaaggaaccgcaacacttttcatcgtcggcgtggccaacaaacggctgatgttggccaaggacgtggtcaattacaaatttcatcaaaacatctcaatcgatgattttgaacgggaaaagcaagtgttggaaagtgtttcggcgcagggacaaaaagccggcattggggacaattatggagaaaaattcttccaggaccaaatggacgccaacaaaatgattcagaaaggctatgtgaagctgtggaccgccaacaaatcgttgcctcctcaaaatgtgccggatttacagaaagatacccggcccaaagtgacggcggcgacagaagaaatgattttggcactgaaagtgtttcaacagtttcgaaagaacaaaaattgttgggcatctgtggaaaaggaactcttaaagtcgcaaagctttttgagtttggccgaacccaacggaaaggacgcaatgcgaaaagcggcggtgcgattgtgcgcaaaaatggaagcgaaaattgaggcacaaattgacgaaacggcaaagaaattgttggcctga

SEQ ID NO: 88626 - DNA, 808 bp, Heterodera glycines
ttgattacgtccctgccctttgtacacaccgcccgtcgctgcccgggactgagccatttcgagaaattcggggacggttagtgttccggcttcggtcggtatgcagactggaaccgatttaatcgcagtggcttgaaccgggcaaaagtcgtaacaaggtagctgtaggtgaacctgctgctggatcattacccaagtgattcctattcaccacctacctgctgtcctgttgggctagcgttggcaccaccaaatgcccccgtccgctgatgggcacaggtcgttcgagatgacttgtggacgtctgcccaacattacggggcagctgcctcacgtgccatgcttttggggtgcttccatacgttggagctgtggtataccgctcagtgctgcacatgtgaaagcctgtgtatggctgctgcgtggcaatgtgtcggtggcgggccgctcgcttggctcggttcgctgcgccaatgtgggatgcacgctcgtggggcgacctaacggctgtgctggcgtctgtgcgtcgttgagcggttgttgtggcaggcacataacacactgactggggatggtggtttcgttcccggtcttacgtgccgtaactagcggtgtgtttgtgcttgctgctacgtccgtggccgtgatgagacgacgcggtagggcccgtgcttggcctagcacgtggcttaagactcaatgagtgtcagctcgggcaccgccagctttttctttttttttcattatttttttttacacttctgttgaagaatgaattctagtcttatcggtggatcactcggctcgt

SEQ ID NO: 88627 - DNA, 724 bp, Heterodera glycines
cgccccgggggcggatttgccgttggcattgtgcctggaggggcggccgaagcgttggaatcattccccggcatgaatcggctgattacgtcacggagaaaggggttcgtaaaattggccatcaaacagtggtgtcgcaattgtgccggtgtttcatttgggagaaaccgacgtttatgagcaaaaagaaagcagagaggggagcacattgaagaaaacgcagaatttgttgaaacgattaacccgcgtcagttttccgttggcctatggccaaagtttcatcgctgcccttttgccggaagaaacggcacaaaaattgccgcgatggcttcgcgtcggaatctttccgtaccggcggaaaattgtaacaatcgtgggcgagccaatggaaattgaagaaaatgcaaattgtgaggacgaacaaacggtggacagaatacacgcggaatattgccaaagactgcggaaattattcgacgaaaataaagtgaaattgggaggactttcggaggacagcgaaatcgaatttgtgtagagaaagagagagagtgagtggggaacggggagggcagtgaataagcagagacacgcgaaagacaacggttacagagaagagggagacagcagacagacagacaaaaacaaaagtgatcaattcacaaattgtacaccttaaaagaattaattagagacaacattttgatttaaaaaaaaaaaaaaaaaa

SEQ ID NO: 88628 - DNA, 689 bp, Heterodera glycines
gtgcaaaccgagcgggttttggaccaggcggtacgccagacgttgtcgctcagcgacgcctcacgccaagggttggtcgactcggcactcgccgacatcctgatggcaccttgcggcttgtccgagggtggcaccgaagtgtcgctgatccgtgccgtttccaagggcctcgttgacgcgtccaaaggcgtggtggtcgacccgcgcttccaacgcgagctgtccgtgcgcgaggcgtacgaccgcggcatgttcacctcgcttcgctcggccatgcatctggccgcgctgctcgacgtccatccgtcactgatgacgcccgtgaagaagaagccgtactcgaagaagcgtatccaacgcccgggccagccagcactggcagaggaccaagtgaaggtgacgcttgccgaagcgatgcgccagggactgatcgacgcacgcacgcagcgcttccgccagggcaaccaggaaatgtcgcttgacgacgcgctgcaccgggggctgatcgacccgcagagtgaatggattgtgccgtcccgtgcgtccggcattgggccaacgattgaggagcgcacgcaggagacagtgaccgagacgggccaacaattggcaccgaaaatcttcccggacaaggaattgcaagaatcggtgaacacggtgaagcgcgtgcgacggacggagaccagcgc

SEQ ID NO: 88629 - DNA, 1080 bp, Heterodera glycines
tgcggtggcgccgccgttcgggcaattgtccgtcaaaggcaccaatttggtcggctcaaacggcaaaccggtgcagctgatcggcaattcgttgttctggcaccagtggtacccacaattttggaatgcccaaacagtgaaggcactcaaatgcaattggaattccaatgtcgtgcgcaccgcaatgggcgtggaacagggcggctatctgagtgacgcgaacaccgcctaccgactgacggcagctgtgattgaggcggccattgcacagggcatttacgtgatcgtcgattggcacgcgcatgagccgaacgcggacaaggcgattgaattcttcaccaaaattgcgaaagcgtacggctccaaccctcacttgctttacgaaacgtttaacgagccattggatgtgtcttggaacgatgtgcttgtcccttaccataaaaaggttatttctgcaattcgtgccatcgacaaaaagaatgtgatcattctcggcactcccaaatggtctcaagatgttgacgtggcggcccaaaatccgatcaaaggattcagtaatttgatgtacactctccacttctatgcgtccagtcactttgttgatggacttggcaataagcttaagaccgccgtaaataagggtcttccggtgttcgtcactgagtacggtacatgcgaagcgtctagcaacggtaatctgaactccggctcaatgtcaagctggtggagcctgttggaccaactgaaaatttcgtacgtcaattggtcaatcactgacaaaagcgaagcttgtgcagcgctcactggcggaacatcggctgccaatgttggcacttcctcccgctggacgcagtctggcaatatggtagcttcgcaacacaagaaaaaatccaccggtgtgaaatgctaaataaagtctgaagtccggatgatcaactgaaactgaagaaaatggaaaatgtgaagattgcgaaaaaataaatatatataaaatttgcatgcgaatgtttatcgaaattccgattaaattgttttttgagcgcagataaatcgcaaagcataaaaaaaaaaaaaaaaaaa

SEQ ID NO: 88630 - DNA, 1511 bp, Heterodera glycines
ggtggcgccgccgtttgggcaattgtccgtttccggcaccaatttggtcggcgccaacggacaacccgtacagctgatcggcaactcactgttctggcaccaatggtacccgcagttttggaacgctgacacagtgaaggcactcaaatgcaattggaatgccaatgtcatccggggggccatgggcgtggacgagggcggctatctgagtgacgcgaacacggcttacaatctgatggtggcagtgatcgaagcggccatttccaatggcatttacgtgatcgtcgattggcatgcccacaattcacatccggacgaagcggtcaaattcttcacccgaattgctcaagcgtacggctcctaccctcacattttgtacgaggatttcaacgagccgctgagcgtttcgtggaccgatgtgctggtgccataccacaaaaaggtcattgctgccatccgagctattgacaagaaaaatgtgatcattctcggcactccaacatggtcccaagacgtggatgtggcatcacagaacccaatcaaagactaccaaaatctgatgtacactctccacttttacgcgtccagtcacttcacgaatgatcttggtgccaagctcaaaacagccgtgaacaacggtttgcctgtgttcgtcactgagtacggcacatgcgaagcgtcgggcaacggcaacttgaacactgactcgatgtccagctggtggactctgctggacagcttgaagatttcatacgccaactgggcaatctccgacaaaagtgaggcctgctcagcactgagccccggtacaactgctgccaatgtcggtgtttcgtcccgttggacatcctccggaaatatggttgcttcgtactacaagaaaaaatccaccggcgtaagctgtagcggctcaagttccggcagctcttcgggctcgagttctggctcttccggttcaagttccggcagctcttccggctcaagttccggcagctcttccggctcaagttcgggctcctctggttcgagctcagggtccagctcgggttcgggatccgccagcatctctgtagtcccatccaacacgtggaatggcggtggtcaggtcaacttcgaaatcaaaaacatcgggtccgtgccattgtgtggcgttgtgttcagcgtctctcttccctcagggaccacgcttggtggatcgtggaacatggaatccgcaggctccggccaatacagcttgccaagttgggtcagaattgaggccggaaaatcgagcaaagacgcggggctgacattcaacggaaaagataagccaacggcgaaaaattgtgacgacgaagaaatgttagggaaaagacaaagcgcaaaatgggaggaaaagaatgggaaaatgaaagagtggagaaaaaagaacaaagggaaagaaagacaaagaattaatgattatgataagagataataactgataaagtttagcataaaatgttgaccaaagtaaaaaaaaaaaaaaaaaa

SEQ ID NO: 88631 - DNA, 715 bp, Heterodera glycines
tttggtccgtcgacgattcggtcattcacacggattactccgcactccgttccattgtaatgtcaaaccgcgaggaaaccgtaaaaatgccgatcaacgagccggccaagtcacgcaaagcggtttcacagattcaggagtacgtggattactacggcggcgcgggtgttcagcacattgctctgaacccttcggacattgttcacgccatccaatcgctgcgcgcccccggcttggagtttctgagcatcccggacagttactacgcgtctctgaagcagcggctgagcgacgcgggcgtggagttgaaggaggacttggagaaactgagggagctgaagattctggtcgattttgacgagcagggctatttgctccaaatattttcaaagccatgccaagaccgccccacccttttcctggaaatcatccaacggcacaaccaccagggctttggcgccggcaacttcaaagcgttattcgaaagcatcgaggcggaacagaacgaacgtggcaatttgttctacaaagacgtggcggtgggaggggaaaaaatcgaagcgaaaaaaagcgaatgaaaacgggcgatagaaaagaaagaaagacagccctaattgaaaaccaatgagaataataagaaacaaaatatttatcaaaaaaatgcaaaaaagtgaacgaaaaaaaaaaaaaaaaaaaaaaaaaaaaaaaaaaaaaa

SEQ ID NO: 88632 - DNA, 787 bp, Heterodera glycines
gtggtcattggtacggatgacagcggcaaaatgccgatgactgaaaaacaggagacggcaccaaaatgtgccacaaatgttgcggcacggagttgcgcatgttgtgagcatgtcaccgtgcgcaaaattcggctggacgacgaagtgtgcgtgaatgtgacttatttgcccaccaaaattggcgtccgattggccgtgtcggtagatggccatgtgtactattccaaggatttggcagtgttcaacccggagtcggcctgctttgaagtgcccgagatgcgcgagtacgcgagcatttgcatcaatttgtacaatatggaactcaaaaacaacaagctgaccggttgcgcaaagttggaggccatcctgctgcatttgagggtcgcccagcacaaaattggctgcttcagcataccgatttgagaggagctttgtttattacaaaaaaacagtacaaaaaagaataccgtatgccacccagctgataatacagtatggaatccaaaatacaaatagcactcttaacgtattgattcttctgtgatctttttaagcccccatcaattcgacatatgacgtcattgtacaaattcctcccccctctaattaattgttcaattattctaccatcttatgcagagcagtgctcgtaagtgtgctcattttttgagtgtgaaaaaaagccaaaagtgctgatttttgaggtttcgacataatttttgaaaaatataattttttgcaacaaatctcattaaaaaattttcttttttaaaaaaaaaaaaaaaaa

SEQ ID NO: 88633 - DNA, 1245 bp, Heterodera glycines
ttgattacgtccctgccctttgtacacaccgcccgtcgctgcccgggactgagccatttcgagaaattcggggacggttagtgttccggcttcggtcggtatgcagactggaaccgatttaatcgcagtggcttgaaccgggcaaaagtcgtaacaaggtagctgtaggtgaacctgctgctggatcattacccaagtgattcctattcaccacctacctgctgtcctgttgggctagcgttggcaccaccaaatgcccccgtccgctgatgggcacaggtcgttcgagatgacttgtggacgtctgcccaacattacggggcagctgcctcacgtgccatgcttttggggtgcttccatacgttggagctgtggtataccgctcagtgctgcacatgtgaaagcctgtgtatggctgctgcgtggcaatgtgtcggtggcgggccgctcgcttggctcggttcgctgcgccaatgtgggatgcacgctcgtggggcgacctaacggctgtgctggcgtctgtgcgtcgttgagcggttgttgtggcaggcacataacacactgactggggatggtggtttcgttcccggtcttacgtgccgtaactagcggtgtgtttgtgcttgctgctacgtccgtggccgtgatgagacgacgcggtagggcccgtgcttggcctagcacgtggcttaagactcaatgagtgtcagctcgggcaccgccagctttttctttttttttcattatttttttttacacttctgttgaagaatgaattctagtcttatcggtggatcactcggctcgtggatcgatgaagaaacgcagccaactgcgataattagtgcgaactgcagaaaccttgaacacaaaacattcgaatgcacattgcgccattggagttacatccattggcacgcctggttcagggtcgttaccataaaatgcactgcttgtgcgttgcttcgtgggatcatgtacttgtacgtgttcttacgttacttgctcagctcggctgtggggttttggtgtgctggcgcgaacttgtggttctaattcgcgttttacggaccgtaactcgggcgcaccaatgctttgcatgctgtggcggagtgcctggattactggcattcctgctttgatttttcgacctgaactcagacgtgaacacccgctgaacttaagcatatcagtaagcggaggaaaagaaactaacgaggattcccttagtaacggcgagtgaaa

SEQ ID NO: 88634 - DNA, 647 bp, Heterodera glycines
agtcctaaagaaaaacgttcaaatgtttcgcttttcgctgcttctgctgcttgtccctctcgtccgctgtgtccccaacccaaagcctttgttcggaattggcatcggtcgcaagcaaagcgcgggagcggaggggaagctgacctgcgctggagagccgttggcggatgtgaaggtgaaactgtatgatgacgaccgcggggtggacacggatgatctgatgggcgagacgagaacggactcagagggacgcttcagattggaggggtacacgcacgaaatcaccaccatcgaccccaaaattaacatttatcacgactgcaacgacgggctgaagccatgccagcgcaaaatctcaattatgatcccggacaaatacatcgcctcgggcgaacatcccaatacgtattacgacgcgggcacagtcgaattggagggcaaattcagtggcgagacaagggactgtctgcactaattgcattggaactgatcatttggcactttctgatcagttgggactgaccaattggaactctctgcactgatcactttcccatttttgtttctgttttgtcaccgattttccccaaagtcttacaccacccaatgtgaatttgcataaatttgtccgcaaaaaaaaaaaaaaa

SEQ ID NO: 88635 - DNA, 797 bp, Heterodera glycines
aacaaaacaaaacgaacatttgccagcagttggctaggacaacggcccaaagagaagtgaagtgaattgcctctgctctgaacactgatgatgatggttcgttcttcctcctcttccttttcccttccgtcgtacttcctttctctcctccccctccttctcctccttttctcccaatgttcccaaatttcttttgcttgccaatgccaatgggccccgccaaaggacaattattgttcctccgattgggttgcccacgtgcaggtgatcaaacgacaggacggcgtgcgaatgccggcggggatcaccgaccgacagacggacttaaactcgcgacacgaagtcaaatatttaaggatgtttaagatcagcaaacaaatgccggtcaatcagcagaaccaagtgattctccctgtcaatgtttatacggccaccgaggatgccgcctgtggcattttgctcgagtcgggacaccaatatttgttggccggcgattacgtcaacggcacaatgctcaccggactgtgccggcaaattctgctcgaagaccttaaggagtcacgaaagcacgacattctcgagtggacagaagtgccgcaaaagctgaaagaacagctggaaaagcaggaatttgatcagaaatgcaactgaacagaatggaaaaagaaagagaggacaaacaattgcaaatgaatgatcagaaaaatcaaacggacagagaaatggcccaatcgggcactttttgctgaacgaacatttccaataaacgacgaataaattaaaaaaaaaaaaaaaaa

SEQ ID NO: 88636 - DNA, 725 bp, Heterodera glycines
aaaaagccaacaaagaacaacacacaggaagttggctctatggaatgggcaagaattgaacttgaaaagcgctttgcggaatcaatgcgccgtttggctgaaatgcaagaacagtgtgatagagtcgaacatataaaccaacagcttcaattagagaatgaaactattgccgatcatgttgtactgtatcaacatcagcgacgcttgattcgtgaacgtcttcgtctgaaggacgaacaaatggcggctcttgagaaggagcgtgaacgtgttgtggctagatgtaatgaactacaagaagcgcttaggcaagtcttgggtaatggtcgagatgaggtggcggagtttcgcccccgtttatacagccattcaacggtggacgaatttagtggagacgaagagtgcattgtcgacagtgcaaaagagaattctcaatcccttctgccaaatgttcatcactcaccagaaacaaatggtcaaaaagaaattcgatcaactgaagagaattcaccatcaactgattggacaaatcgcgaggatgcggtgaagaaaatcatggacatcatcgacgatataaagaaaccgtccatgcctttgtcttcagttaaaatgcagtgtaaacagtgtatcggacctgttctacatctttagcaagagttacatttttgtactacaaaattgcataacttttcaaaatagcctagtttgttctttgttggcttttt

SEQ ID NO: 88637 - DNA, 1284 bp, Heterodera glycines
cttcctcggcatcgtcaacttccttctccaattgtttctgtttgttgtcaccggtggcagacgcaatattttggcagttccgcaaagacaacgtttaacggccgaggaacgctcagcagcagaaatggaagagcatcagcagcagaagaaaacggcagaaatttacagcaaatattttgtggtcggcgaacatcgcctttcagtgaatttgccacaacaacacaacgccaacacttactattcaaatccgccgtattcggtgcacgtgcgggattggattgacggcaaaaaatgggaattctccgtcacgaagccgatcaactcgcagcagtgccttttgaaactggcaatgctcgagacggatttggcctcaaaccccgtgacggccgaaattgtcttttggcaatggttccgaggaaagcaggcgcacattttgcaaaagagtgtcaaagtgttttgccagtcgggtgcccaagtacagcttcagcacaacgccggcgctgccaacgcggcaccgtccgatggctttttcaacgttctcatccgcttgttggagaagagggagcatcaaatcattgaaaatccgtgccccccgtgcgactcggagaacgaagttgtgctgaaggtgggccccgagcagttcactgtctccaagcactttctgatgtccgtgtcgcccgtcttccacaaaatgttctccgtcgacatgttggagaaggcacagggcgaagtgagcctggaggaaaccaacggggaggagttcggcgcgtttctggacgcaatctcgcccaaaatggcatcgccaaatcctgccaatgtgatgggaatgctcaaattggccgaccgtttccaagtcgatgcgttgcgcaaccgatgcgaggcgcatctgatcaattgcgtggagatcagtctgatcgaacggcttttgtgtgcggaaatgtaccgattggaaaagctaaagaatttcattctgaaaagtctgaacggcgtcggaatgcgcgagttttacgaggagaatcaggcggcactgaatttgctgagcaaagatttgctcatccaactgacagttcgcatctgttccagttcgaaaatcgatcggtcggcactgtgccataattgcacgaaaattttgaatgaatgaaacgtaaaaccgaagggatttgaagaaaataaaagctaatgtttatatttaaaaggaattttttgttttgtttttctttacaaatttaaatattttgatttgattataaaatattctttatgtgtaaaaaaaaaaaaaaaaaa

SEQ ID NO: 88638 - DNA, 660 bp, Heterodera glycines
gaatttgtgttcatttacaaacttgcagcaaaaaacaaaccagcaaaaagatgaaacgcaacggaaattccatttgctcagaaaccaagccaccgcttttggaattgacgccaaagaatgtattaactttccgtggcaaactcggccacgtcggttccgtctctttggacatcaaaaattgtgagatctgctccgtttacttcaaagtcaaatcaaatgccaaccacttctattcggttcgtccaaacaccggtgtgattggggcgtacgggcgcgtgaaggtggtcatccaattgcacgacgacagtctggcaaagttggacgagattgaggaaaacaagcacaaattcctgatcatggcagcgattgtttcggatgcgtccattggaacggagaaattttggaaaggcaaaaaagaggggatggatggcatttactcgagcaaaatgaagacggaggtgcacaaagtttgtcggtgggaaggagggaagggtgtgctgagccaacagaactcggaagaaaatgtgccgaacggaaagaactcagtgtctgtggagaaagtgccaaaccaaattttggagttgtgttcggagaaggaagcgccgaaccaattctcgaacttggaggaaaatgtgccgaacggaaagaactcaatgctgc

SEQ ID NO: 88639 - DNA, 630 bp, Heterodera glycines
aaaaagccaacaaagaacaacacacaggaagttggctctatggaatgggcaagaattgaacttgaaaagcgctttgcggaatcaatgcgccgtttggctgaaatgcaagaacagtgtgatagagtcgaacatataaaccaacagcttcaattagagaatgaaactattgccgatcatgttgtactgtatcaacatcagcgacgcttgattcgtgaacgtcttcgtctgaaggacgaacaaatggcggctcttgagaaggagcgtgaacgtgttgtggctagatgtaatgaactacaagaagcgcttaggcaagtcttgggtaatggtcgagatgaggtggcggagtttcgcccccgtttatacagccattcaacggtggacgaatttagtggagacgaagagtgcattgtcgacagtgcaaaagagaattctcaatcccttctgccaaatgttcatcactcaccagaaacaaatggtcaaaaagaaattcgatcaactgaagagaattcaccatcaactgattggacaaatcgcgaggatgcggtgaagaaaatcatggacatcatcgacgatataaagaaaccgtccatgcctttgtcttcagttaaaatgcagtgtaaacagtgtatc

SEQ ID NO: 88640 - DNA, 630 bp, Heterodera glycines
cttcgctttaacattattaatgtttgctattattttctaagttttattttccttcaatcatcggctaataaaattcaaatgtccatcagtttggctgatcggatgaagcttttgttgaccaatggcgatggggcggacattcaatttttggttggccaaggagaggaaaaggaggttctaaaagcacacaaactcattttgatggctgcttctgacgtgttcaaagcaatgttccgtttcgacgctcaaaacgcaaagacaaaaacctcctcttccgctgaacagttacaatccgtggagatcactgacatcgacgccaatgtgttcaaagtgatgctgagctttatctacgcggaagattcaagcggattgaccggagacaatctcatcgctgtgctttacgcggctaagaagtaccacatttctttgctggccaaggcttgcgcggactttccactggaaaatgaattgcccaatgttttcctcgcttttgaccaggctcagcttctcgatgagaaagatttcgcaattcgttgcttggattacattaatcgaaaggcggaaactttgtttggttcagaagaattccttcaaatcggccaaaatttgttgtctaaaatttttgcgagt

SEQ ID NO: 88641 - DNA, 606 bp, Heterodera glycines
aaaattaataaaatttgaagaaatgaattttcaaattatgtgatcaaaataccgacctattaggccatagaattacaccaattatgtcaagaaaagtgcgagaatttatattttttgaaacgacctaataaaaggaatagtcatggtttacgtcttccacgggtccaatggttgctgctgttcgggctcattgaagagatgttgttgcggcatgtcgtgcacttctgacatcgcatccgatgggcgcggcaaaacagtgccagcagcaccgacagagactggtctacttggcatccgttgcggtggcggcgtttgtggcggtcggggctgaaaattttttttaaacaattattttttattgttatttcttttatacaatagcagtatttttcttaaagataagtggaggggaatcccaccacaacgcgctgaaaatgacggtccgtcgcgtcgccggtagcgcgacgatggccagaaacaccaccgctcctgtgttggctggcattgtcatcagctttgtcaaagcctccgttggaaacaccggacatcggaggagtgccaaagtcctgctgaagtgccagcggttgttgaagcacatcagaatga

SEQ ID NO: 88642 - DNA, 630 bp, Heterodera glycines
gtccaattaaggaaacccaattatgacgagctcccaacccattatttatgagaaaattgtgcaacaaaatggtagcaaaaacagcgctgaatggtgtctggcctcggaacggcgactgctccaaaaactgatccatcataagccggtggggatcaatcggcacttcaacctcaacttgttggtcatttacatgaacaacattttcgactttgaggaggacattaactttgatgactatctgagcgaaaaggatgttgaacagttgaagaggcggcgtatggagggcaagcaggacgagcgaaggccaatggcattttcaccgtcctacgcaattcgaccgaccacgaaacaggttgaagaaaagttgaacgaatacttcgacatggagctgatcggggagaacgagtccccctctgaagaattggaaaagaaagctgtttttgaactgccccaagagtaccaattcaaggaggaaatggtcccacgataaatccatcacatttttggcatttaatacaatttttttacgtaataaccaaatcctttggtttctatcgaaattttctgtaaatgtgtaaaaaaatggcataaaaatacatagggatgaaaaaaaaaaaaaaaaaaaaaaaa

SEQ ID NO: 88643 - DNA, 873 bp, Heterodera glycines
gctcaccggtcagcaaaggcattttgcaatacgacatgtgggatgttgtaccaacggatttatgggactggccgctgctcaaagaacgcatttcaaagttcggtgttcggaacagtttgctggtcgcccctatgccaactgcttcgacagcacaaatcctcggcaacaatgagtccattgagccgtacacttcaaatgtgtacagccgtcgtgtcctttcgggagactttcaaattgtcaatccgcatttgatgaaggatttaattgaactcaatctttgggatgatcaaatgaagaacagactaatcgcggagaacggatcggtgcagaacatcaagcagttgccgcaagaaatcaaagacctgtacaagaccgtgtgggaaataccgcagaaggacattttgaaaatggccgccgatcgcgccgctttcattgaccaaagccaatcccttaacattcacatagcgcagccgaactatgctaaactgagctccatgcacttttacgcctggtcattgggacttaaaaccgggatgtattacctgcgcactcgtccggctgtcgatgctgttcagttcactgtggacaaaatggcccttcggggaacaattgccaaggacgaatctgtcgaaatcgacgttttgaaagacaaggaaaacatttctgccaattcggagttgcgcttgccgtccaaacgcaaatacaatgaacaattggaggagagcgatgggtgtttgatgtgttccggttgatggattgtttttccatttatttgattgtatttttgggcattttttttatttggctttaaccattggttttcgttaacatatgataaattgatattttgcttaaaaaaaaaaaaaaaaaaaa

SEQ ID NO: 88644 - DNA, 370 bp, Heterodera glycines
ccaattaagagcacgctaattaaacaaaattattcaatgcaatccaacggggctgcgaccggcacggcatcggcggcggacgccgggcgggcgaacacggcacaaatggcgcaggcgaatggtggcattgaacgtgagcggaagccgttggagagtcgtcaaattgttgcacaatacatcaaatatgcagtgaaattggaacggatcatttgagcgaaggcacacggctggagaaaatcggacgagtaaacgaaatgttataacgaaaattttgtataacaaatgttgtgttgcttcgttttactttgacaattcaattcaatgcaataaaaaaaaattggtcaaaacaaaaaaaaaaaaaaaaaaaaaa

SEQ ID NO: 88645 - DNA, 685 bp, Heterodera glycines
tgagctttcacaataaaagaaaatgatgctttggggttctccgtcgccagtttctacggatgagacgaaggataaaattggccatgattactcacaccttgaattgatcaaaggtgacacttacgaaattggaatggagccgtcatcagttggtgggacttctgctggacacaatgcgaagccgttcttcgctctcgatcagctgaaacaggcgggagtcccgcttaaggcgcagattaacccatacttacagttggatccgtcaattttcaaggagagccaaccacaaatcatcatgcctgaaggttatgagtctggtcggggaaaatttgagttcgctctcggttacatcggttgttcggttatcggaggattcggagttggaagtgttcgtggaatgttcggcgagttaggaaatccacagaacagaactttggcttggaatccgtggtacactcggatgctgaatgccgccactaagcatggcagcggatacgcacaaactgctgggactgccatgtttctctattcggtcactgagttggggctgaagctgtcacgagccgatgacttgcttaattcttttatcgccggaccaatcgctggcggacttttccgcggattgcctcatgggctgcgtgctggcagtgttggtgcattggccggactgggtttgtcaccgtct

SEQ ID NO: 88646 - DNA, 1165 bp, Heterodera glycines
gtccaattaagagacaatttatttaatctttttgaaagtatcttaaaaaaatatttttgtgcaaacaatgcgtgtaacaattattgctggtgaaaatgttgcttcattggagatttcggcagacatggaactggaaaacttcttggccttgtgcaagttcgaactcccctccattgccgacacaccaatcgaaagaatcgcgctcaactgcagcggtcggcaattcatcgccaatgctggactagcaaagaaacagcttaaggagttgaacattcaacatgaagacgcgattcatttcgaaacgatcagtgcttcttccaccgcccaaaccccccactcgtccctttccacgccgtcctcagccgcttcgacctccctcggcgcgccgctgcaaacttccaatttgatctcttccctcgtccaaaacatcaaagtgccccagaagcaaaagagcgtggcggaagaccgcgccatgtccgaccaaatcttcaccatgctccaacacccggcacggctcgacttcctccgggtggaccaccccgagttggcagctgcttatgagaaaaacccaacggacaaagatcttttttacatcgccttcatgaagaacaaagaagaacagacgcgacgagttcggctgatgtacgaccatagcagtgaggagggacagcgatacatcgcccaggaaatcgaacgggagcgaatcactcgaatgcaggagttggccatggagcacatgccggaggcgttcatcccggtgcatatgctgtacattcggatgaagattaacaaccaccttgtgatcgcttttgtggactcgggtgcccaggcatccattctgtccgagagttgtgctcgacgctgtgacattttgaaatacgtggaccgccgttaccgagtgcaggcccatgggattggcgggtcgcaaaagatggtagggagaatcttcgcctgccaagtgcaggtcgatgacaatgtttttgcgtgtccctttgaagtgatgagcgacagagacgtcgacattttgttcggcctgaacgcaatgcttcgccaccggtgcaacatcgacctcaagaaaatggtccttcgctttggggacggcacggagacgccttttctcagtgagcaggaagtcaagcgggagaaagaagcgattgcaatggcc

SEQ ID NO: 88647 - DNA, 742 bp, Heterodera glycines
  unsure (1)..(742): unsure at all n locations
cctcgtgccggtttgagtgcatttcctttaatttatttgctttctgaacaattgaaattgcgaccatatttaagcagtttgatgtagttgaagcatgtccttgcagtgcctaacacaggaagaagtgaacacaatttgcaaagacgtcctcgaaaatctgatcggtgcctcaacctatcagcataccgaagcagtaaaatggaaccaaagtgtcgttgagaaaatcaccgccagattggtccagcttcaaaaaccctataaatattgcgtgtgtgtaattttgatgcaaacgggttcgggtgcgggtcttagcgttgcgtccatgtgcttttgggaccgacggtgtgacaattccttcgtcgtccgttgggagagcaaagccgtgaccgctgtttgcaacatttttgcgattgccgtcgactccggcgctgtgtcgcccgtgccaatgatggacaacgacgccgccactgatggggagggcggcactgttgctgcgtccgccaccgcaaccaccaacggcggggacatcgtcggcggcggcaaaagcgaatgcgagtgacagcgacaaaaatgtgaccaaacgcggcggacggagggacgggcgcgaacgacttgccatcatttcaatgccccagcaaaaaattagaggaaaaaaaatgcaaaaatttgatttgatttttattgattgatttgtgtgtgacttttanatgacgggagagaaaaaaaaaaaaaaaaaaaaaaa

SEQ ID NO: 88648 - DNA, 941 bp, Heterodera glycines
gagcctaaattattttgttctcatttaaaatcacaacagcctgaaatgtgcctgaatcgtgtggtattggggcctgaaattacgcgaaggccggcggcgatgccattctgggccgatttggcccagggcaataatgacaacagagacggggccaactgggagggagcgcggcatttcgaacattggctaaggagggggagtagagcccataagtgccctatttgtcagcacctcactcccactcagtccgtcatgttggccttattcgcctcaattttcgaatgcatttttctgctctttagcacatttggcgccctggcttcagtcatgcgaccaaagatgaagggctttctgttgctcgcattgcttccgctggtcacatttttaccagaaacaatggcgaaaagtatacaagccgctgaaatgtcggaaatgaacgacgaattgtccgactaaaaagccaccgatcgcatcgcctgagggaaacacacagcaaacgcaaatctgcggacaccaaatattcgggtcttccatttctttttactcttcctttgtcaccaaataatattttcaaatgaaaaatgacgacctaattgattgtttttgtgtgtttcgtaggcaattctgggaccatatcgagaaattttcgattcctcagaggaaacttcccaaaattgtccatatttatttatttgtgcgtttgtaatttttgggtttgttcatttataattaaaaacatgtataatgcaaaattaaaacaacaggattaaaaacgctgttttttgagtatttcgggacgccacagcagcgggtgagaatcttctgactaaaagtggaagagaatcaaactatgaatagccaatcattccctcccacattttcttgccgctggttttgtaattaaaatataaatgtgaacatttctcaccgcttccgagtcc

SEQ ID NO: 88649 - DNA, 145 bp, Heterodera glycines
agagagagagagagggggcgggggggggaagtgatcagttgggacaaaaagtgccattaatttgtgtttcatttttagtgtgaatttcattaatttatcatttaaaagtataaatgtttaccttaaaaaaaaaaaaaaaaaaaaa

SEQ ID NO: 88650 - DNA, 690 bp, Heterodera glycines
catcccaagaaaatgcacaagggcagtttagtgccactttttggcaaaaatttgcaacaaaattcgtggagagcgtttggggagaagagcccactgaaaaggtggcgattaaacaaattaagtgccttcaaatggcttattagttttctcttctccaaatcgcttcccctcgtccttctgctgatcattttgctgctttacttccaatttcctctgaatcttttcggcccgagcgatggcaccgattttgggcgaattatttccaatggcactttcctcgccaaatttgttgattttcaaaaacgtttttcaaaaaattattcaaccatcgaagaaaagctgacgcgattttcaatttttgttgccaatttcgaacaattggaaaagatccgaagggaaggcgaagtgtacggaattacgacatttttcgattgcagcgatgaagaattgaaagaattgataatgccacatgaatactttgaaagcgttcccttttcttgggctaagccaatccgcgaatttcgtccgatggatgcgaattttaagcggccgagcgaattcgattggcgcaaaaacggagtggtcaatcacgtgaagaatcagaggcgtggcggcgcgtgttgggcttgtgccaccgcaagattgggccaagtcacagcacccaattcacagcggaacacggggtcactc

SEQ ID NO: 88651 - DNA, 867 bp, Heterodera glycines
taagcaaaaaaaaggatgattcaaattaatacgtcaagcgatttgaacgaaaaagtgtacgatgccattgtcgttgtgtcggatgggataaattcgctgtcgaaagtggacaaattcagtgccgaccttcgaaatgccgtcgagtcttattcaaaaattgaccattcgctggacaaaggcaaagtttcgcttatccaagcggacaaattccacgcaaaacgaattgtttacgcgagcaccggcacagtgcacaaagactttgacgatgttcgacggtacacaaaagcgggcattgcagcgggtgaaactgcattgtccgccggcgttcgttcgcctctcctcgtcgctgtgccctccgagcgttttccaaacgcgtcgcttatggctgcgcttggctttctccacactttgtacacaccgctgaatttggctgtgccggacaagcccatccgtaaggtcgacctgctcggcatctttgaggtcgaagccaacgaaaaaagcaatgtgggaccttcggtttcgatgctgcaagcgttgcaacaatcgtttaacgtcgccagagacattggggacggagacccggagagaatgtgcccagcaaaagtggcggaatacgtcaaaaaaacttttgagaattcgtcggtccgcgtttcgattatcgacgacgttgaccaaattcgccgtgactatccgcttatgtcggccgtttcgcgttgtgccaatgccatcgaggagcacaaagctcgtctcatttggctcgaatacgacgggggagaagagaccgagactctgtttttagtggggaagggcgtcaccctcgacacgggaggggtccacctcaaagtgaacggggccatgctccgaatg

SEQ ID NO: 88652 - DNA, 654 bp, Heterodera glycines
atcaaaaacacaaatttctccatccaatttattctcgacaaaattcgccgttcattcgatttggaagaggcgcaaaatgagcaaaaatcaacggaatggccggtggccaatcagctggacagtttcgaagccattgacatcaccggcggtgccgcgtttatgtcgtcgattttaaaagttacgttccattggaaagagcccaaaaaagcacatccctttcccgattctgttgtactaaagattcctggcccaaaatacaattctttggtggcacaaaatgggagggaagaacaaacggacaacgcaatggaagaagaaagctccgattatctgatcaaagcgcacaccaatgagattcttttctacaaaaactttccgcgcttcgacgcgtccctccgtctgcccaaattttacttcggttccgactacagtcccagccacaataatgggttgatcatcatggaggacctgagcagccgcgcttcgtcccttctcactttgccaggcttcgacgatgcccatgtgctggtggtcatcgacgaactctccaaaatccacgcaatttcttggaagcacggcgaactgaagcaacacttcccgatcgaaattcggcccagttttatcgagtcaatgcgatctaacgcgaaacaattg

SEQ ID NO: 88653 - DNA, 529 bp, Heterodera glycines
atgacttgtgtcaaaaaaattgagttcccggatgagcctggttttttttgttcggataggttggccagatacgaacagtccatgctaattgagacgggacatatgtacgcccaggcagcgcgcaacaactctgaggcggcgcgcaacaattctgtgacggcgcaagagagtgtccgtgctatggtgaacaaggaccgtttggtggcagacaaggaattactattggcacaacaaaagatagaactggacgaaaaggaccgcttaatcgcgacgctgagggacaccatccagaacaaggaccagaggatcgtttacttggaaggttatatcaacggacttggtgttccattgcccgcgccggcagaacagcagcagcaggacggcggcggccaatgagagagagaggcctctgacagaatccgactgaccagaagaaaaaaattcgcggacttttctttgatgtggaatgttttgttttgtttttttgatgctttgcgcctaaaaaataaacatggcttctgacaaaaaa

SEQ ID NO: 88654 - DNA, 865 bp, Heterodera glycines
aaaacgtcgactcggttcgagtgcggcgatatattcgcttggcatgtcacaacgaatgtgccaaagaatgtgcgagacatcccggcttcgaaagtcaatgctggccccactgcacgaagtactgcttggactacgcggcaacacatggaatgctcgactgctcgggcaaagaatgctaatctctggaggaaaaaggcgatgatttttcggctgattgaagaattagtgacataattagttatgtccaagcataaagcacaaattatcgtttatttcccttccgtcactttccttttcttcagtcgctcaactagttcggccagttttccatcgtcgatctgttgagcccattctggctttcggctcgacaccgacatttgtgccattatttgttttatttcctccgttttcactctgtccaaattgaaatcgttgggtttgtgctgaattgagtccaaatccgctgcgggtgggggagcgggcaacagccaattgctctgacaatgcgttggacttgtggcggtgggcgttgaggcgggcggggagggcggcgcgtcgtcgacggcggaggagggcaggaggacgtagccgcagttcagcgacggaccattctcagcatcgaacgcagtgttgtggccatcttccgttgcatcgctttcactttccgctgattcgtgcggacggtcgacgcccgcgacaccgacgcgcatttccacgtcgaacccaattcgccacccctccgccctccatcccgcgatttcatcatcatcactttcaacagagtcaattctattcggtgtcgaagacgaattatgtttatgtgcttcttcgtttggtcccatgcgataaaaattgaaatttgttc

SEQ ID NO: 88655 - DNA, 456 bp, Heterodera glycines
gttttcagcgcgcaaatctaaaaatggcatctacccaggaattggcggtcatttacgctattttggcacttcaggacgaggagttgccgatcacggcagaaaaagtgcaaacgatggtcactgctgccggcgttaccgttgagccgttttgggctgggctctatgttaaggcacttcagggtgtcgatgtgaaggctcttctgtccgccgttggcagtccgggctcgggagcggcagcacctgcgggaggcggagcagcggctgctgcgcctgcggctgaagcagcaccggccaaagaggagaagaagaaagaagaggttaaggaagagtcggacgacgacatgggattcggacttttcgactgatcacgtacacatgctattatgtgtttttgttgtttaccagaatttttgcgtattaaatttgtttgttgaaaaaaaaaaaaaaaaaaaaaaa

SEQ ID NO: 88656 - DNA, 906 bp, Heterodera glycines
aatgcttttcccctttcgtttcgtcctctctatcagaattggtgctgctttgcctcattctttttgttccttttctgatgcttttccatcgtctggtgatcgaattctcattcgaagagagaatttcaaccgaaatagaccaaggcttttgaaaaggaatgaaaagagtcttttggctgagaatcggcagggaattcccacggcgacggactgtgcaacactcgtgctgttctgtcagttgggctcaccatccgccgaagaaagttgggttctcttcacacaaagggcgaaaaggatgaagcatcatgccaacgaaatttcgtttcccggaggacggatcgagcagggagaaagtgtagagactgcggcgatcagagaggcggaagaggagatcggactggaccggaacgacgtggaactgtggggcactcttcgtccgctgttcttcggagaggcgggcgtcgtcactcccgtagtggcaaccattgggcaaaacgtggagcaacggttggcctcgctgagatgtgccgacgccgaagtgcagaatattttcatggcatccgtttcggatttgctcgcccgaattcactacaccacatttcgattttctggaaaaccatccgatgacaaaatgccgtttttcttccgaatgcccattttccactcgaccaaaccgcgacttttgtgcaattcttcgctggtcaattgtccggaaaagttccgcatttggggactgaccgcgcgcactttgctggaggcgctcaatgcgtttttgccggaggacgcgaaggaaagggaggcgagcgaattgctaaggaaagggaagacagacaacagctgctgatcagatttatgagcagagagagagcaatcagtcggggatcagccaaattcacatttattggc

SEQ ID NO: 88657 - DNA, 636 bp, Heterodera glycines
attaatagcaaatttctattgtttgtaaagtgcaattcttctcccttccttttcctaatgatgggaccaactcaaaagaaggcgaggctcaacttcaccatcgaccaactcatcgtccgtccgttgcgcgactcgcaacgcgtcaacgtcgttcctccgccgaccgtaacaaacgcagcacagcaaacgcagcagccgccgttggctgcacttcagcagcagacattgcagcaactgacaaatgtgcgttggccctctcttccgtcgtccgcctttcgacccctttttccccctcctctctccgcgccgttcgctttttctcccttcgctcttccgtctctttttttctcttctccgcccttctctcttccgattccgtcttctttgcccaacaatttgtcttcatcgtttcatccgtcaccttttttgatgctcactccgccaactcgcgccgctttgatggccatcgccctccgaagacaacagcagcagcattttggaagtgcgggcagttcaacagggcctagcagcacatgctcatcctcacagtcagcgggcacgacggagtgtgttgccattcgtaccgaaaatcgcccatgcgttgtttctccggcgttgcgacacaaaaatttgacg

SEQ ID NO: 88658 - DNA, 575 bp, Heterodera glycines
atttgtctgtcatccaactttgtgtcacttacggcaacaaaaatttggcttttcgcctcatggaccgactgaatgcgtacgaggagcaagtgaaggcttatctcatcctcggagaagtgaaaaaggcagcgacattggcagttgaaagggaagacttgcaaatgttacagagcatcaaatgccgactggcgccatcttctgccaattgggaggaagtgaagaaaatcacggacacattgctgaagaaggcagcacatgcctaattgcgcaatgattttcatactttatttacttatttttattatattattatttatgggtacgcgggtcggttgagccaacgattcagtccaaaacccataaagagaaaaacaaagctttagtcatataatcttaatttgaatcacttctctttaatgaagtggttggattaagcaagaaaaaccaaaaaagcattggcacttaactgacatagtcagtcaattttattgtttcccaatatttccatttttaaatactgcaatattattataatttaaatgattgtcaaaaagtgatggctgataaatatatat

SEQ ID NO: 88659 - DNA, 554 bp, Heterodera glycines
cattaaattcgaaattattttcaaataaattatagtaataggcacccaattcgggcatttttttcatttttccattcgaattcatagatatttttttaattttcaatttgcttccgttttccaggccgaggccgaccttcgcgttgctcaggccgagtttgacaaacaattggagattttgcgcattttgttggagtcactgcaaacggcacaaaaccaacagtcgaagcatttgttggaatttgtggaggcccaggcccaattcttttccgcctgccaacagcacatggccgacctgaagcgcgagatcaattcggccagcggagaacgcttcagatccaacggaattaatggcggcggtggcatttgaggggaacgaccgacggacagcgaaagaacggccgagggaaatgccgcaaagcgaagaatcccccaaaaaacgcattattttaccaataatataaatgagaaaaatgaatttatttaaattatgctttcatttcattttatacactgactgctaattgcatataaacgaacgaatcctttaaaaa

SEQ ID NO: 88660 - DNA, 532 bp, Heterodera glycines
  unsure (1)..(532): unsure at all n locations
gtttgaggcctaatcttaaaaacctgctcattggtaaaaaatgaaatccttctttaatttcccatttgtcttttgtgttcttttgctcattggctgcgttgacaaatgcgtcggaggagtcgcggcattgccgccaaaatatttgggcattgaaaaccatgacaaatgcttaaccgacgagccaataggctcttcgcgtcggctttgtttgccagcgcagaaaaaaatcgaatgccaagatgaaacgttgaaagcgcttaatgatttggaagaaggccaacatccgccgacttgcgcatgaatccgaagacagaagcgaaagaagcaaatgaagggattgaagaatgacagggaaaagcctggctgaacaaaattttgtctacaaaaatgaaataaaaagttattgaaaataaaaaaatttattgatttgattgaaagaaaaaaggctgtattctattgaaattttcggcgcccaattattctgattcggcataaaaaatttccatttaaaanaaaaaaaaaaaaaaaaaaa

SEQ ID NO: 88661 - DNA, 647 bp, Heterodera glycines
gtttgagaaaatccaattccaaaacactacgccaacaattcgaaccctccgcttgcaacaaaatgttcaaatccccaacaattgtgctcgtgttgatcaccttcatcatcctgcacattgctgtgcccagcgctgaatcattcatcaatctgtcggccgtcggagactttttcgctaatttgtgggactcgcgcgcggacaactgtttttacgcggcccgctaccatggcaatgtgtccgaccaattccatgaaaaagtcaaatattgggagattgaggatgtgcaaaatgtgagcgaccgtcggatctccaaggattgttcgggctcattctatgggtgccagacccacgcgtgcattgatgcaaaagggaaccccgtttttgtgttcaacttatgtgcttcttcggctgctgcttccggagagaacaacactggtcactgctctcaccctgaattggaagaactttgcgccatggaggggggcaaatcgaaatgtgccatttgcgagaatggcatgtgcaatgaggcgaacattgagctgcaaaatgtgatggggctggacatcaacggcaccattggcacggcggtggtggagaatggcacgaaaagtgccaaaacgggcgagaccggcggagacacgacggac

SEQ ID NO: 88662 - DNA, 516 bp, Heterodera glycines
attccttgtgcgcttcgtctttttaattctctttttgcaatatgaatccaacgtacccaatggtcttttttctgctcgttttggtggccgttgttctttcgtccgttcatctgaaggaagacaaaattgatgtgccgcagcgcgttaaacgcggagaatacggcggcggtgcctatggcggtgacggcggtggcgttggtgcgcctgccccgggcggtggcggcgcggcgaacattgccaatgtgaacataaaccaacagaacggatgcaacgggcggggaccgcagtaccaatgggcgtacacgcggaagacgggatgggtgtgcatcaacatcataaacgtgatcatcaaccagcaaagcggcggaaagtgatgagaggagccgaaaaaaaagagagagagggaaacggaatgccaaacggaaaaaaagcaatcgaacggtgtgaaaaaatcatactgtaacggatgtacgataaatgttttttggaatagttaataaataaaaaaaagattgc

SEQ ID NO: 88663 - DNA, 382 bp, Heterodera glycines
  unsure (1)..(382): unsure at all n locations
gtttgagagataaatttttaataccaaccggcggagtggagagagtggccaggccaattgctcaaaaaatatttgcccgaaacactcgaggacagaacagcacaagacaagcagaaagcagttgaagaggcattttggcattgccaccgacttatttggcgtgtcgaagcaagatgcgttccaatgaatgccgagtggaaagaatccgtcgcaattcggttgctaaaattggacaatttgaactgcaacttgaaaaacgaaaatatataattaaatgggaggaaaaaggggatattctcattgtcagttcaattggtggataaattttcctggtgcgctgaaaggcgtcgaaggattccnaaaaaaaaaaaaaaaaaaaaaa

SEQ ID NO: 88664 - DNA, 615 bp, Heterodera glycines
gtttgagcaattttgcactacaatgggtagcgagggcaaaattttgactggaaatattaatggggaaacagaaagcaaagaagtgaattcggatgaaatgaattatttgcggcaagtgggtgagattttgagtcgcggaacggtgcgcactgacagaaccggcacaggaacaatttccatttttggcatgcaaacgcgctatagcctccggggagggaccattccattgctcaccaccaaaaaagtgttctggaagggcattgttgaggagctgctttggtttattcgcgcagaaacgaatgccaaaacgctttcttcgagaggagtcaaaatttgggatgccaatgggtctcgtgcctttctcgactccgcgggtttcactgatcgcgaggagggcgacttgggccccgtttatggcttccaatggcgtcactttggcgccgagtatcgcggcacggacgccgattacacgggcaaagggactgaccaattggcggaactgatccaaggcattcggacggacccgaacagtcgacggcacattttatgcgcatggaatgtgacggacattccgcaaatggcacttccgccttgccatacgttgtgccaatttta

SEQ ID NO: 88665 - DNA, 315 bp, Heterodera glycines
gtttgagataaaaatgcgcttcttctttcttctgaccattgctcttctctccgttgttcttctcctttccccaagtgcactcgcaaagaaaagagcccgccgttcgatgcccgttaacgctgccatgccggaatggaaaattttgtccgctgaagtggaaaacgatggcacagcataagaaggaggaggcaagctttggatcatcggcatgatcgaagaaggaatttgccaaaatgatgaagaataaaccaatgaatgttgtggatttgtagaaattcattcaaatgccgggaataaaaatagttaaattaaaaa

SEQ ID NO: 88666 - DNA, 691 bp, Heterodera glycines
gtccaattaagcgctcaaatactttcttttgtcgtagcacttttaaccgttgaaatatcgacaaatggctgaagaagcggtcgttgtgccggagatggaatcgcttgctctcacttcttcgtcaccgtgttcgccggtgctctctctgctcagcgaggaaatgcttcagaaagaggttccttgcgtgtgctgtgatggcgagaaagttgtggtccgtctctccatcttgtcgcagtgcggattctttgccaaaatgttgcaggacctcaacgtggaagccaacggactgagtgaggactttatgttcgacatgaccaaggcggagattccggcggagactttcaaaaagattgtcgcttggatggaggaacacaagggtcagccggtgcctgaattcgaggaggatccgaacactttcgagcgcaaatggctcacccaaaacgattttcagcagaatttcttcaagtgtgaatttgcggaggctgccgcgtttctgaacgccgccaacttcctcgacttgcagtctctgttccgtcacgcaacgcaggcggtggccgcgcgtattaaggaccgttcgccggaagagattcgtgaaatgctccacctcaacgacaaggaggacaaaccgttgacggaggaggaaaagaaggcgattcgcgagaagaatgtctggtgccactactaattgtga

SEQ ID NO: 88667 - DNA, 1149 bp, Heterodera glycines
gatatttaaaattaaaaataataattccaaaaatggcttcacgtgatgagattggccaaacggtgtgcgatttggtgggaaatacgccgatggtttacctgaacaaaatcaccgatggatgtgctgcaaaaattgcggtcaaagtggaatggatgaacccggccgggtccgttaaggaccgcattggcattgccatgatcgaagaagcggaacgccagggcaaaatcaagccgggcatcaccacaatcattgaaccaaccagcggaaacacgggaattgcaatcgcttttgtggcggttgcgcgtggttatcgtttcattgcaacaatgccatcgacaatgagcggagaaagacgcacacttttgcgtgctttcaatgccgagttggtgctcaccgatccggcactgggcatcaaaggctgcgtggagcgtgccgaacaattagctgccgccattcccaactcattcattccgatgcagttcgccaacgaagcaaaccccgaaatccattaccgcacaactgggcccgaaatttggcgtcaaactcagggcaaggttgacgcatgcgtttttggcataggcaccggcggaacgatcactgggtcaggccgttttctgcgtgagaagaacccagcaataaaattttatgcggttgaaccggtggaaagtccggttctcagtggaggcaagccaaatcctcacaaaattcaaggaatcggtgctggcattgtgccgcccattttggacacaaaaatgtacgaggaagtcgttttggtgcactcggacgaggccattgctatggccaaacgattggcacgcgaggagggccttttgagcggcatttcaagtggtgccaatgtggtggctgcgcttcgcgttgcgcaaaagccggaaatggccggcaaactgatcgtcaccgtgttgcccagctcgggcgagcgctatcttacttccgccctttactcggacattcgcgcagaaatggaagccatgtcgcatggtgaaacgctggaggacaatttgaagcgtcttcttaaagtggaggatgccaacagcaaacagtgatgaatttagcggaaatttttttaccggaattaaaatttaaaaaattaaaatttggctgtttgttttttttttgcctaaagctctg

SEQ ID NO: 88668 - DNA, 492 bp, Heterodera glycines
aaaactttcaaaatggcaatgtcagcaattccaattgaacatgatgcagcatcacaatgggactggccgctacaacacactgacggagttgtcaaagtgcacaacacaaaagataaatttgaggttggattagacgtgcaattttttgctccacaagaaattgaggtcaaagtgtcgggccaagatgtgatcattcattgtctccacgaaattcgcaaagatcagcacggaagtgttaagcgcgaaattcaccgtcaataccgactgccaaatgacgtcgacgcggcaacattgaaatctcatctgtccacccgtggcgtgcttacattgacagcctcgaaaaaggactaactgagaaggaaaattgagtgaatttgatgggaaattaggacggaaattttgctcatcttgtgagctgctgttgaaataaattgaaacaaattgctaaaattaaaataaaataaaatgctccaaaaaaaaaaaaaaaaaagg

SEQ ID NO: 88669 - DNA, 554 bp, Heterodera glycines
aaagattataaattctctgctttgaacatttttaagatgacacttaatccgcctcatttaactttgcgaggttatgagggtcacgattacatgggagacactttcaagaaaacgaatgattacgcccaaacttggttcgttccgttgatgaggggacaatctatagacaacagacaaattcctggcgatgattgtggattcttcgaagatcaatcggttagatgttttactgcttttggtgcaaaattgggccgtttatattgcgaccttgagcatagggaccttcaggaatgtgtttcgcgcacaaaaaagaataaacggttctggaagatcagagatgttcgcttcaaaaaatggctcagaggtgaaacgccacacattttcgaaccattggctgactatttgaaatcggttcatggtgctccgacttcctatccgactggtcatcgtgtgaagaaatgattagattagatatatcgtgagattctggtttttaataggagtcacatatgcatatgtatatttctgcgcgataaaatgcttttgttcaaaaa

SEQ ID NO: 88670 - DNA, 871 bp, Heterodera glycines
ccgatttggtggtccgcagttttgactacaccacaaagcttgtctctgacactgattgttccccaacaaccaaatttgttccgcttattcaactccgtttgcattgtgaggaccgacaaaagtgtggcacagtgcgcacattcgaattcactctcccggaggcccgtcaatttttactcagtttaaaagccgaggacgacgacgacaaaaataacaacaacaacaacaatcgccaactgtcgcactgatgttttcgaaaaccgcctccccctcctctgtaccctacgacaaagtgtcgggactcaaattgcccaagccgagacggttggtgtacacgcgcacgtcgttgaccatttcagtgctcctctccggtggcattggctattacatgtacaaaatattgcggggcgacgagcgcttacacagggaatgggttgttccgatggtccaccgttggtttgctcccgaaagtgcgcacattctcggcgtcaaggcggtcagattgggtttcctcgacgattttgtggagagtcgcaaggagtaccccgagttggcatgtcaaatgttcggcaaacagttgaacaacccaatcggtttggccgccggctttgacaagaatggggaggccattgacgggctgcgcaagtcgggcttcggcttcatcgaaattggcacggtgacgccaaaagcgcaaattggcaatgatcggccacgcgtttttcgcttgagagaggaccaggcggtgattaattcgtatgggttcaacaacgacggcattggcacggtccttggccgtgtaaagaaggcatttgtgccggacagtggcgtgccgttgggcgtcaatttgggcaaaaacaaaacggcggaagac

SEQ ID NO: 88671 - DNA, 621 bp, Heterodera glycines
gttcagttaaaatttaactctaatgactgatcggttgaaagaattatcagaaactcgcctgcatttaaaagcaactaagacaagggttacacgcgaagatggctcagtgatcgaagaagagaaaactgaaaatggcgagtttgttgtaatttttgagcgagccaatggaaatggaaatccgagtggatttaaacaatccaagcgaatgcaaaagggtcgtggctatgtcattgacctctcgcccgacttgcaagtggccaatgttagcaaaagcatttatttgagcagtcaggacgttgctcaggacctctctctgctgcaaaggcatggcatcactcacattgtaaacgcagcgtcgggcgttcgctgtttcttcccaaaggaaatgctgtatttgaagttaaagctcctcgatatgcctagtgaaaatttgaagaagcatttctgccgggttcatcggtttatgaaaaagtcaatcgacaaaaatggaaaggtgctcgtccattgcaatgcgggcatttctcgttccacagcccttgtgctttcgttccttatgcgcttcgaaggacaactgctcactgaggctttggcgcttgttcgggagcagcggccagttgcaca

SEQ ID NO: 88672 - DNA, 1183 bp, Heterodera glycines
gtttgagcctatatttaattttcttcttctcaaaatggcttcagaagatgcttccaaaatcgtcacagagcaacgtaattttttcaaaaccggcgcaactcgtgccgcggcatttcgcaaggaacagctgaagaaaatgcgcgaaatgattgttcaaaacaaagacaaaatttgcgaagccatttacaaggacttgcgacgtaacaaggagacaaatatgaaaatggaggttgatgggcctttgcaagccattgactattgtctgtctgagttggacgaatggatgaaaccccaaaagctggaggaccaccaattgggcaagccgttggtcatttttgagccgaagggcgttgtgttggtgatcaccgcgtggaattatcctgcagccctcgcttttcaaccggccattgaagcaattgctgctggaaacaccgtggtgatcaaaccgtcggaagtgtcgccgaacacttccaaattgttgaagcaaatgtttgatgccacttttgacaaaaaattcatcgccgttgtggagggggcggcccccgaaacgcaggcgcttctcgaccaacgctttgaccacattttctacaccggaagctcgtcaattgccaagctgataatgcaagcggccgccaaaaatttgactcccgtcactttggaactcggcggaaaatgtccggtggtcgtggagaatgacgccgacttggagaaggctgctttgcgtatcgcagaagggaagtggttgaacagcggacagacttgcctggcgccggactacgtcatgaccacggccgagatgaaaccgaagctggtgaacgcactgcagaagagcattcagacgctctacggagagaatcccaagaagagcgagcagtattcgagaatggtcaatcaacgccatttcgaccgagtgaaggcgttgctggacaagacgaatgggaaagtgctgtacaagaatggggagccggaccgagacgatgtgttcattccgccggtcttggtggatacggacttgaaggacgcactgatgcaggaagaagtgtttggacccgtgctgcccatcctcaccgtgaagggacttgacgaggcgatggacgtgatcaacgacggagaaaagccgcttggggcgtatttgttcacgaacgaccaacaaaaggtggacaaatttttgaacgaaacttcc

SEQ ID NO: 88673 - DNA, 729 bp, Heterodera glycines
caaaaattttcaatttattattgctgagcaagtgggtatttaagcggggtttccttttgcaattaattaattgtaattaattgatcgtctccccaatggcttcttcactcaccattgaaaaacgctgcaaacttttcaacacaaaacaaatggaatgccaattcgatggaactgaagccggaaaatgtgctttttgtgtaaagcttccgtgtaaatttggagcagttaattgtgcagaggaagtgagcatctcttgtgtaaatccgcaagaattggaaaaatgctgcaaggcgcgtgacaacgaatgctgcgtgtgtgtgctatgcgagaaaaacaaagttatgaaggttttggtcgaatgttgcggaaagcgcaccgaaacgagtgccgaggccgggaaagcgctttgcatttgtgtgccgaaaattggtggaggcaaatgtggaggacaagtgcaagtgaaacaatgcgatgcgaagctggttgacgagtgctgcgcagctaacacggagagtggcgactgctgttgcgtctgtttgagctgcaatgaccaaaagtgtgtggtcaccgtccgttgtcctactggagaagcaaagtcgactggtccaacttgtactgcttcaaaatgcgaaagtgtgaagtgctgctgaagtcaaaaaactgatcgaagactgaaaggatgcatgcatttaactgactcagttttaaaaatgctttttcaattagcaa

SEQ ID NO: 88674 - DNA, 596 bp, Heterodera glycines
ccaagtttgagtccatataatttcgagccctactgatggcactatttagtcatttttaattttattatttgtgaatggcctgctactaatacaccatggatattcgatctgaccagcaccggtatcctttttgcattgtttggacgccaatccccctcatcagttggttatttccctttattggacacattggtattgcaactagcaaaggtataattcgtgattttgccggcagcaattatgtctctgaggacaatatggcatttggatggccgacgctttatcatcaactaaatcctgaaaaagttaatggaggttcagaggcatgggataattctgtggcagaagctagcgatgaatacaaacgtcgtttacacaatttgttccttgacaattgtcactcgcacgtttcacttgcattaaatacaatgcgatacgacgggaaaagcaattggaataattttcgggtcgcagcggacattaatttacacggaaaattcgtccgcttttgtgggttcttgcgacagtttttgccattttctctgatccttttgataattgctttcgcattatttttcttagtttaaaataatgat

SEQ ID NO: 88675 - DNA, 620 bp, Heterodera glycines
gtccaataagctttgtatttatgagctctatagaattcagtttgcctgtgttttgttcgccaactcagctaaattttgtgattggaaagcgagatttatgcgagagcaaaccgatacaaatattcaacccttacaatcatttactgcgctttaaattcttttcaaatgcgcctgagcgttggcgcgtggaaaatgctcagggcggcatccgggccaacaattacgtcacgacgacagtccaactgcgcgagccgcacacaatccgacagccgaccagcgactgtctccgcgtggaaattttcagggacggcgaaagcgttgcggtcggaagaaaagacattttgctcaacattttgacggttgagccgccctcttcgtccgtcgatggcgcaaattttgtcgaattttctgacggcaccgacgcggcattaaacagcacggcacagcgcggcgaggccaaattgcggacgaattccatccacaatttgacgggcgaaaatagccaacaacggcgacaccagcaaatgaggccctccccctggcaattgtccactttctattggctcgccttggccggtctcttcgcctgccttttctgccttttgctgccccccacggcg

SEQ ID NO: 88676 - DNA, 617 bp, Heterodera glycines
gttaaaaaaggcctttccccacaaaaatgtccaatttgtttgtggcttcttctgctgttgtttttctccttctccaattgcatttcgtcgtcactttcgcatcatcctttgaaggggcgccgccaaaagcaaatgaagaagcaatgccaacgacgggggaacaaaacggaggtgccgaatttggtggaagcaagcagaaaatggcacggaaaatgatgcgatacaatggcaacaattttgacaaggtgtccgtcctcttcattcgacgtgaaatggcactgcgaaaacttcagctccaaatcaacgttttggagcagcaattggccaatgctttgtcgtccgctttcgccgccggctgtcccccctccggcgtttcttccgtttccgatggcatttcgcaccgacgccatttgccaatgccccgcgagtgaaagtgcgacagagaaaggaacacaacccgatcagtgaacgcatcagatgagaaaatatcagaaaagagtctcccccccccatttttgatcatttgagtaatttataatgtatccatccataatcaatggttttgataacgaggattaacaaatattgtaattttgtctaggatattccgcataaat

SEQ ID NO: 88677 - DNA, 773 bp, Heterodera glycines
gtcgttggaatgtctcccgtcttccgctgccatttccccgcctttgccaattcgctgaccttcgctttggctttgttcgtcgccgctttttcggttgcttcagcagaacaaacagtcactccggggcggcacgacgactcgctgggccacagatgcaattattcggggcccggccactgtccctcggggttcgcctgtgtcaacaccaaatgcgttcgtcgctgcttcttcagtggcaattgccccgagggcttcttctgcaaaagcaatttcatttgcgtgcgaaaggaatgcgccgcgggggacaccgaatgttgcgcgaattgtgccgagatatgcatcgatcactcggagtgtccctccgatgggtggggctgtgtgctgctcaaatgccgaagagtcgaatgccgtgcccgccccgattgtccctccaattggccatgtctgctcggcagatgctatgcctcgaattgtaaaagtcacgaggaatgtcccgagggatggaaatgcggcaaaaagcggcgatgtgaaaaaggaaaagccgaggagaaggcaaagggaaacggcgaagaaaacgatgggaaatgaccaaaagaaaatgcgcagttcaatgatgaaaatggacaattcaaacattagaatgcttttttaaaggttttaacggaatatccttccctttcttttggctcttctgttgttaaacaatttcaaaaatatttatttccgaagaattgtttgtatttgcgcagacaaagcaagaaaattacaaaaaa

SEQ ID NO: 88678 - DNA, 689 bp, Heterodera glycines
ccaagtttgagttattactgttgtcctaattaaaaataacatgtaaaaatggcagcaaaggaactgttccttgctcagcagcccgacctgttcaagccgattcaatccatcaatgccgtgctcatactgatctgtctcggctcctccaccgccgtgccgggcattggcgtcctttggttcatcggcctttgctctctgatcgtctcagtcaccgccacggtgatctttctgctgaaccgtgaaaatggcttgtccggcgtcaccatttccggcgcttttctcccctggggcgtcattgaatttgtctattcgtctgtcctcacgctgctctgcggggtgggcttttggctttcattcggcttcgcctcccacgtgccggacaatggccattcggccggctatattttcgcggggattttcctggtggcccaagtggcctgctatgccatccctgtgctgatcatttacgatcggagccgaacggacggtccggcagccgccggacacgaacaaatcgccaacgtacatccgtttggggtcaccacggacggatgtgagcagcactaccagtcaatgcaacatgaacgtcccattgtctgacattgccaaagttccgttcgcattgactcctcccattttttggcccaatttcaccattttttgtttattaattattaaacagtaattgc

SEQ ID NO: 88679 - DNA, 679 bp, Heterodera glycines
gacgactcgcacattcgcgaccaggcaatttccatgagggcgcaacttgcagaagcggacactttggtgctgggacttcgcgacagactccagcaaatcgacacgaatgctgcggtgattgaacagcaattgggacagtttagcacggacaaggaaaccacccataaagagctgtctgttggagtgaattatgtgcaaacacaaggagaacagcacttggcaaaagcgcaggaggcgttcgaccgttacggggaaaagagtcagcaattgtcggatatcgctggcgaatccaagtagttgtctgataggcaggagcagcgtcgccgggagatcctttcgttggctgagcaaattcggaaggagtcgcggcaatcgctcagcgacgccaacgaagcaatttttggagcttcaagcaccagtctgcaaatttctgctttgttgaccgaggtccacgagttggaacagcgactgaaagccgtccaacaaatggcgacggaacagtccctcgagacaaaccaaacacacgacggggccgccttcattctgagcggagtggacagtatccgtctgccgaacgttttttctgatgagttgatggagaaagtcaaaagggcacaggaagagggtttggaagcgctgtctaaaacacggtcggaggcggaaaacaagcggaattggt

SEQ ID NO: 88680 - DNA, 629 bp, Heterodera glycines
aaaccgttcacatggtcggcattgaccggcacagcgggcactttgtgccgttgatgcaaattgggcacagtgtgcttgccgacgaccagctgatcagcggggcggcacagctgatcagtgcgcggacggagcgctgcttcaccgcattccgtcagcgttttctcacctttctgtacagagagttccaacggaagggccaaatccaacagtttttgcaccatttcgacctctttcgacatgtcaaaatgcgcaagctgcaatttgttgggcccgagctgctgctgattcgaatggagcagccgaagggcgacgatgattttgacgaccaccaattcgcttcctcctccttttgccctccctcttcatcatcatcgtattcgtcatcatttgctgcttctaatcaccaacatcatcatcatcatcattaccagcatatgtttgtgctgttcgagtggcgagtggggcgcattgtcggcgtgttcaaccgctcctccgaggcgttgttcgccgcgttcgagcggcacaacgagcagttccgcaacgggcacattgtgcgcacaatgttccccacttccatggagcattgcggtgcggaacgggcccaacacgaggcgctcaagcagtcttcc

SEQ ID NO: 88681 - DNA, 901 bp, Heterodera glycines
gctgattccaaggagcgtctttccctgcgccacacgctcgaatcccacaagaactgggtcacctcgattgccacctcggccgaggctccggacttgctgttgtcgggttcccgtgacaagaccttgctcatctggcaattgacccgcgactcgcaaaactacgccattgcccgtcgtgccctcactggccacaaccactttgtgcaagagattgccatctcgtccgatggtcagttcgccctgtctgcctcgtgggacaagacccttcgcctttgggatctgaccactggcaaggctacccgccgcttcattggccacaccaacgacgtgctctcggtctcgttctcggccgacaaccgtcaaatcgtctcaggctcccgcgacaagaccatcaagctgtggaacacgcttggtgagtgcaagtacaacattgagggtgctcacaccgagtgggtctcgtgcgtccgcttctcgcccaaccccgagaaccccattatcatctcggcaggctgggacaagctcgtcaaggtctgggatctctccaagtccaagctgcgcaccaaccacattggccacaagggctacatcaactcgctcgccgtgtctcctgatggctcgctctgcgcgtccggcggcaaggacggtatccccatgctctgggacttgaacgatggcaagcacttgtactcgctcgatgccggagaggagatccacgccctgtgcttctcgcccaaccgctactggctctgcgctaccaccacctcgggcatccgcatctggcatctccaaaccaaggagcacattgacaccgccattgtctcggacgaggacgagttcgacatgggcgagagcaagaagaagttcgtgcccccgactcccttgtcgctcgcttggtcgcccg

SEQ ID NO: 88682 - DNA, 983 bp, Heterodera glycines
tttaagagtattaaatggctggacccgactctcgttttattctcgaattcttcaaccgtgaggctaaagagattggagtaacgcaggaattgcttgacaattcacagccgtccgatcagttgatccaggcctactactttctgtgtgatttgatttttgaaaatgtcggcaccaccaaagagaacgagtatgaaatggccactgaactgacgagggctcgtccccagatgatcatccgaacgcaacagcattgggatttggagaaccaactggaaatttgccaagggttggtcaacgaactccgagcggaagtcgattcattgcgcggcgaactgagcgaatgcaaattgcctttccgaatttccaacagcgaacttcaaaatatcaccgttcgtcactctcgcactggcgacgccgtggagcgaattgggccacggaaagcgaacaccaaaagtctgctgaagccacgtgcgcgtctctgttccaacactccgaaaatggctgtgccgtctgaaaagcgtgccaagcgtggattgaccaaagacagcgaagatgacgacaatttccgcaccgcggaatttgtgccgaccactccccgtccgcaatttctgttgcctccgcttgtgctcaccccgctcagcagccgtttcccccctcttccgcggcgttcattttctgtcgaaccaactccaactcatatacagaaaaacgctgaacagcaactgacaatgattcgggacggcaacggcgacatgccgtgtccgtccagtcaaaagcggctgaatgacaacggcgaaattcagtgtccgtcttcctccacgtcctccacctttgctgcctcaacttcggatggttccgctgtcagtgttttctccgccgacggcggtttgttgggcccactgacctttctccgacggcggaacatcggcgacccgcaaacttcgtggctggccaaccgaattcgcaaccaaggactgccctgc

SEQ ID NO: 88683 - DNA, 525 bp, Heterodera glycines
gagacattaaatttgcctcttaaatatggccgaatttgcccaccgtgccggtgctccgttggagtgcctttgcatggctttgaaggtccaaaagcgtcaggaaggaacggacgccgaaggcaatcggcgatggaaaattggcataagtatcggcggtggcattgaccaaaaccatcgacagtccgtctacagtgattccggaatttatgtgaccagcgtggaagcaaattcacccgcggaagaagctggactgaaagtgcatgacaaaattctgcaagtgaacggcgtcgattacacgatgatcactcacgaaagagcagtcaaatatttgaagaaggagtccgtgttggatttgctggtgaccagggccacacccaaacacagcacggaaatgcaaatgtgaacagattgtccgactgctgatctaacacaacatttcatccaaataaacacacattccaatctttgatccatgtattggtccaatcgaaaaaataaaactttttcttgaaaaaaaaaaaaaaa

SEQ ID NO: 88684 - DNA, 423 bp, Heterodera glycines
tacaaatgaaaactcaattcatttttcttttggcacttctgccatttctgttggctcccaatttgttgtgaacaatgcagttgggacgacgtgaataacatttgcgttggagattgttcatcactgtgtgtgctgaaagattttgacaattgcaactgcaaccgcttaccaaaaaatcttcaattcttcaaaaaccgtcgtaatttcggcaacttaaaagcattggcaaagaaagaagaaacaaacaatggcaaattgatgtacaaaaaataaattttcgaaaggaggcggattaaaattcaagatcaaatgggatggagaaaaagaaagtgcaattaacagatgaataaataaatacattcagtgattgaattaattgataaaagataatttaataaaaaaaaaaaaaaaaaaaaaaaaaaa

SEQ ID NO: 88685 - DNA, 653 bp, Heterodera glycines
cctcgtgccggtccatttaagctaatttatttgcccgcacttaaacataaaataattaataagcgctttttttattattgttattgaaaatgacgtccgaaactgtgtcaagtgacgcgtcggcagcgggaggggcggacaaagagaacacaaaaacggacacaaccaccgacccgagttccagcgaaaattcggcgtccatcgaggcggaccacaacaacagcaaattgcgctacgccgacgagaccaccatcatcccgcacgacctcgtggagcggcattttctgcaaaacacttgggctctctggtacttgaagggcgatcgcaacaagaattggaccgattgtctgaagaaagtgtccacctttgacaccgtcgaagatttctgggcgttgtacaaccacatccagccggcgtccgggctgagctggaacagcgactattacctgttcaaggaaggcatcaaaccgatgtgggaggacaaaggcaatttggagggtggtcgttggcttgtgcaggtgaatacgcgaaacacaacccagtctcggcttagtctcgaagtggacaaacagaagcgccagaccaagctggacatctactggcaggagatgatgatgtgcatcattggggaacagtttgagaagtggagtgac

SEQ ID NO: 88686 - DNA, 626 bp, Heterodera glycines
aacccatccaattgtcggaggtctccgaaggtgtgcaaaagctgaacagaattgttgctcagtttaagcaggacatcgagctcagagtggctgaagagatttccgcctgcgaagagttggccaaaagagtgggccatctgagcgaagcgaacagtgccgaggagacggcacaacactttttcaatgagcaacgactgaaccgactgatcattgaccatttgttgcgcacggggcatttcgcaagtgcgcaggcgctggccgactttgtcggtttagacatcagcgcacaataccaagtgtaccatgtggcgaggcaggtggaagaatcgctggcgctgaaggaccttggcccctgtttggcctggatccgagacaatcgctcgcgtctgcaccgaattggcagtccgctggaaacggaagtgcgcattcagcagtgcgtcgagctgatcaagcagggccaccaccacggggcgttgaaatatgtgcaggcattctttgggggtcgctgcgacgtcaacggggcccattgggcaacaaatggcaatctgttgcacctgatgggcctcgtcgcacttggcaaagagtcgactcggccagagcatcggccgctgctcagcgacgagcgc

SEQ ID NO: 88687 - DNA, 1040 bp, Heterodera glycines
gtccatttaaggtgtctccgcttttgcctttggactgttcactttcggcagaaatgaacggtcttccaccatttcagccgcaactgtcgctgtttggggacccgcaactgttcgctgccaccgtctccaacccaaccgtcggtagcacaaacgcggcagcccccgcggcggagtcggccgcggcgctgcaaatgcacggacgacagcagcaactgcggatgagaaaggaaatctatcggtacacttgcgaagagccgttgtacgccgctgcgtggtccaacaaattgtacccggacaaacgcttccgattggtggtcggtactctgctgctggacgaagagggcatcagcagcaacaagatgtacatcattgaactggacgaaaatgtcggcgaacttgtcaaacgattcggaattttgcacgggtacccatgcactgccacgcaattcattccaaatacggacgtttcccaaccagaattatttgctaccacttcgaattgtctgcggattttccgataccatccgtcctccgcctccatctcccaagaatgcgaactgagtgcgacaaaatcgagcgcctattcgtcaccgctcacaaatttggattggaatgaagtggacccttcccttgtggcaacgtgcagcatcgacacgacctgcacagtttggaacattgagacgaatcagccgattgggcaggcgccgtccatcaaagggctgcaaaagactcagctgattgctcatgagaaacccgtgcatgacattgcattcacccgactggacaacggacgggaccaattcgccaccgccggcgccgatggaagcatccgacttttcgatttgcgggcacttcaacactcaaccattttgtacgaagatgccgaaaggagaatgctgaaccatctctcctggaataagcgggacccgacaaaattggcaacggttgcccaagagtctaaagaggtcgtcattctcgacgttcgggtaccgtgcagacctatggccaaatttggtaatcaccgagctgcaataaatgga

SEQ ID NO: 88688 - DNA, 431 bp, Heterodera glycines
agcaattattaaagctgctaaaatgtcaactacagatgttgaagagactatcaagagaattcaatcgcaaaaaggtgtcaccggagtgattataatggacaatataggccgtgccattcgttccacgtttgatgatgacaccaccgcgcaccatgccgcacttcttcaacagctctgcgaacggtccaaaaatgttgtgcgcgaaatggacacgagcaacgacctgagcttcatgcggttgcgcaccaaaaagaatgagatcatgatcgcaccagacaaagattatttgattgcagtgatttataagaagagccgctgaaagacaagacaaaaaaaaatttattccccttatttctatttttcttcacccctttttccatgtatttgataaatgcgatactctgctaaaaaaaaaaaaaaaaaaaaaaaaa

SEQ ID NO: 88689 - DNA, 639 bp, Heterodera glycines
ctcattttaagtggtacaaaatgagtattattgacattgacgctgaacaaaataaccattcttttgctgttgattctcagtccaacaattattttttggtcggccgcggcggtgacaaatcgattttactcaacgaaacgagcggcaattcgtatgctttcagtaatgtgcccacattgccgtccgtccattaccttttcaaaaacaacaaaatccactttaacggcatcttctcctatgaaatccacgagttcttccaatgttccattgacaacgctcgcacattgtactccattcgcgacttgaaagagttcgccaaagcctgcggcggtggcactgaattaataccattttttggctacgctttgcgcatcgttgtcgaggcgcccatcgaattggggacggacacaaaaacggaggaggacgatggccaacagcagaaacaatggggcgagtgcgcaacttttgggagtggaaagacggagaaagaggccgaaattatcttcgaaaagaattcccaagaagcgccggcggagacatttagggacgaaccgttcttcgaatttgtcaaggcaattgtcagcaattttctcgattggggcactgaacgctttcgtcatgggcgccgttttgcgggcg

SEQ ID NO: 88690 - DNA, 601 bp, Heterodera glycines
cctcgtgccgaattcggcacgaggccaagtttgaggccttccatattcatcataaaatggaattacgacttttatttgcttccctatttgccctctgggcagtgacagcggcgatgcgcaagcagggggttgccatcagcggaaaattcgtgtgcggccacgcgccggccatgagcaattcgaccaaagttcgcattgtcgacattgacacagggcccgacccggacgacactttggacgaaaagtttgtggacgctgccggtgcatttaaactcaatggctacacacgggaactcactgacattgatccggtgctgtacgtgtggacagactgtaacgacgggcatacgccatgccatcggaaaatcaaatttttgatcccaaaaacaaagatcattggtgaagacccgaaagccaatgattggcttgacatcggagtggtcaatctccaatccacctttgaagaagagaaaagagaatgcattttttgatcgagtcgctcatttaacagcagaaggaaagagaatgaatgaattgatgttataaaatttattttttatatttaatttttagttacaaaataaataaatttaattcaaaa

SEQ ID NO: 88691 - DNA, 506 bp, Heterodera glycines
cttaagcaattttacttccatttggttagcaaaactaattataagacgcaaacaaaaaatgccagtgaaaatcgaaacactcaaagcgggagatgaagcgacttacccagcggttggtcgaaaggtcgtttgtcattacgtactgactttggaaaatggccagaaaattgacagctctcgcgaccgcggaaaaccattcgaattcactattgggaagggcgaagtgatcaaaggatgggacgaaggcgtggccaaaatgtcagtcggtcagcgggcgaagctgaccatcagcccggacatgggctacggagccaaaggaatccccggaacgatcccagggaattcgacgctcatcttcgacgtggaattgatagccgtaaaataatggagagaaatgacagtgatgaggggaaggaccgactaattgagccgcgcatttgcattaaatgtttaggatttcattccgtttttctttgtgttcactaagtaaatgggctttcgaaaaa

SEQ ID NO: 88692 - DNA, 378 bp, Heterodera glycines
cgcaaaaccatctctttgttcgcttacctcaccagacatcgatagttgttgacaaggacccgctgaaggagttgaagatgatgaggcggcgattgatccagctgacgaaacgcgtttccgaattggaaacgcaaaatgagcagaaaaatattgagaggaaagtgctgctgggcattgtgagtacgtcgactttgttgagtgtcgttttgtttgttcgcacatggctgaaccgttaggagggacccgtacaggaaatatcggaatgtccatatgttaatcccgtgttatttccttttctgtaccaacgaacttaaaatttttgttttattttcgcgaataaatcgttaacaacgaaaaaaaaaaaaaaaaaaaaaaaaa

SEQ ID NO: 88693 - DNA, 364 bp, Heterodera glycines
actcggcgacgtgagggagggcattgaaagcgccgaagccattggcgtgtcccacgggcgacaacgccgtgaaagtttgcttgggctggacgtgccgtacaaagcgcaatcgacggaaaaccaacaacagcaaaacgccgaggggcaaatgggggagcaaaaaagcaaagacggaattttggaggaaagagcggcgggaagagaaacagagaaacagccggtgaaatgagcaaatggcgagaagcatatgatgaattctgtgaaattcacaagcaatcacttttttctgtcacataaattatttaagacaatttattattaattaatggggctgtaaatttcacataaatatttattttttcct

SEQ ID NO: 88694 - DNA, 633 bp, Heterodera glycines
cctcgtgccgaattcggcacgaggaaatgactgcaaatttggcaatggcattggacgaaatcatcaaaacccaggtcaaagcaccacgtgcttctgctgctggtagaagtgttggttctggacgccgtcttgccggtgcgactacaaactctcgttttcgttttcttcagagaggatttgtttcgggggatgttcctgccggacaatggaagcatgacaagtttgcagagctctatggaggtggcaagaagcgcatgggtggagctagcctgggacctctcaaggcggtaaagggcggtgcggggagttccattggagcacgcattgcacggaatgcaatcgagcggaattctgggggtatggtgaagctccaagtttctaacttgcccggatcggtggtcactttggatttggaggaacttttccaagacttcaatgttttcggagtcgctgttcattatgatgagatgggcaatcatttgggaactgctgacttgttcacagaccaacaatctgccaccaacatccttaacgaattcaaaaacatcgctatcgatggccaagaaatcaaattttgtttggttactgaaggcgctgattctgttggaggtaaaagagggaacattcgcgacc

SEQ ID NO: 88695 - DNA, 671 bp, Heterodera glycines
cacattcctacccctcctagcattaaacctcaacgaacaaaatgtctgaagcgaatcttcagcagcaaacgcacggcccaattgctggcactgactacgattcggcagatgaatatgtggtgattgaacaggaggaagaaaccgacttggaaaagaactcaactttgccggagacggtggctacgaacactaattcgactcccagtgacgtgcaaagtgtggcagcatcagtcggcactttggacgcggtcgctgacattggcaatggcctcgacggagcaaaactcagtgtttcgtctgttttcccacagaatgcaatgagcggctcgaactattcgcaaaatggcttcaattcttccatttttggatccttcgtgatggaagaccaacttcgcgatttagtccgttctgaaaatgagcagaaccgtctaatgttggacagcatcaaaaatgcaattggcgaacttacgaagcaaaaatcgaataacaacgaactgaatgcgctgatttcacaacaaaaaaagtcacttggagaggctttgacgaagctcgacaattcggaaaaattgagccgagagaaagacgagagaattgtcgaacttgaacagaaaatccagcagctgagtgaggcattggacgattcggcagccaaaacgacccaattgggcgag

SEQ ID NO: 88696 - DNA, 467 bp, Heterodera glycines
attttatttattattttattgcgccttttcctaaaattcaatttccaaaaatggttgccaagcttcttccagtcatcctctgctgcttgtttttggcttctttcgccctctgctcgcccaatgctgctgatgtgctgaaattcaaacgagaagctgcgatcagcagttgtggagctggacagtttgaatacgggggcggctgttgtacgacatgcacaagcgatgctgattgtacgggcgggaagctttgtgtgccaattctcaacttgctcagcgtcagtctgtgctttgccccatgcggaaattaagacagaaaagaaagcagcagcaaaagagggctctgatagtgtgataaattgataggattaaatgaaagattgggagttaattattacttaaatgcatttaatagtgattgattgatcaataaatatttttcggaaaaaaaaaaaaaaaaaaaaaaaaaa

SEQ ID NO: 88697 - DNA, 624 bp, Heterodera glycines
attaagcaaaaatgcagcaaattcccattctttccctctccaatttcctccccattttctcacttatttcggtgccctttttattgtcctttccttccacggccttcggttgctcttgtgcacccaccaaattcaatgagtcgatgtgtgtggccaaatgggtgtcccatgtgaaggtgttgcaaaacacaacaacaacaaactcccaccgcattttcactgtccgacatttggaagtgttcaaaagtcccaacggcaccgctcacaatgaccaactgattgggaaggaaagtgccgtttggactcccatttttacggcggcgtgcggagtgagagaattggacactgaaaaggaatatcttttggctggcactgtggacaatttgggaacaatgcaaattaatctttgtctgtttattccaatcgaagacggacagccaaatgccgagaatggcattgtcgaatgggcgaaagtgccggaggggacgaaggcgcgaatggccaattgggacgacgaacagtgccagtaaaattgcacaaaatgccagacggaagctgaaccaatgacaaagcaacaaacaaaacattttttcgttgcttaatccacaattacaagcccaaatt

SEQ ID NO: 88698 - DNA, 470 bp, Heterodera glycines
caatttatcttttttttaatgacggaagcaacaaaaatttacaacagactcagtgcttttcaaaagtttcgcatcaatttgaactgccatttgcgtcgcgtccggtcgaattggttgtatcagctttcgacggcgctggtcttcgttaccgccttaaaccatgccagcatttacctcacttacgggcccgaccacccgcgatgcatgcaacaatggaaggaacggaaacagcgcggattgttaacggacgaattgctttggaaggagcggctgctgtacgcccgcaggcgtgagtttctcactgctgttgatggttacggcacagttgacaattggaaacacccgagggcgacgatgggagcgtcgactttgtccagcaaactgttttaggaagaaaagcaaacaatccaaccttcgtttaatgcaattattaaatcggattaactccaataaactttttgtttgtcaaa

SEQ ID NO: 88699 - DNA, 632 bp, Heterodera glycines
gtccatttaagttgccctttccgccatccatttctttttctgttcaatgtcttcgtttttcatgcatcaccagcagaagcggtcgcaccaacaagcggccgccgtcactttggcggacattcgctggatggaaccgatggccgcgactgaaagtgccgctacttcaacaccggcaaagcggctgttggcacgactcggcacaaccagagtgggccgctacgttcaacagttggccatcgattacgcagcttccttccgcgacatcgtcgttggaatgcgtcagcgaccgctgcgagccgtcgcttgcggcgccgccttggcttcgcttgtgttcactttaaaatccaatccggacgaaattgcgctgcgcgcgcgtttggctcagttgcgtcagcaaatggtgctcatcccggcgtccattcacagcactcgtgccgacgaacggctcgagcagtacaccgtcctgttgaatgggaatcggcttgaactcgtcgactttttgctcttctctgtgctcgttgagcgtccgtttgacaaaaagaatgacttttacgctgcccacgacaaaacattgcgtggatggccgtggaccgagctgtggcggaacgcgtgggacatcggcgcgttcggcc

SEQ ID NO: 88700 - DNA, 377 bp, Heterodera glycines
cccaagtttgagcaagcattcttcctttcctgtccgttcttttccaattgacaaatggcaaatgaaattcttgaatttccactgaaatatgacaacgatatacactatttaaaagtccgacgtactgatacggtgcgcgaattaaaatttgtcatcgaggcaaaattgaaaattcccccggaagaacagagattgatgattggcaactgtgtgcagccggatacccgccttttgagttcaatgaaagggctggatttggtgcgtgagacgggccctgctgctcctccctaaattggcaatgctgagtagtttgagaaagacgaatgattattggcttttgactttgtttgttgcgaataaaaattaaaaagcaaaaa

SEQ ID NO: 88701 - DNA, 552 bp, Heterodera glycines
gtttgagctaaaatattacttttgacttttcaaaatgtcatctcgacgtggcggtggtaataatgttgagggaaaggtttacgttggcggtctgccagaggacgcaacttccgaagagctcgacgacgtcttccacaagttcggcagaattcgtaaaatttgggtagctcgtcgtcctccaggttttgcctttgtcgaatttgaggacacgcgcgacgcggaagacgcagtgcgatcattggacggaacacgcatttgcggtgttaaagctcgcgttgagttatcaacgggccgttctcgccgcgatcgcgatgaccggggcggtggtggtggcggataccgaagcggcggcggtggtggcggcggcggttaccgtggcggtggagggaaccgcgactattcaagatctcgttcgcgttctcgttcgccgtaccagcgtcgcggaggaggaggaggccgttctcgctcgcgttcccgttgaaaaatgggagggatctacaatttccgaagaagttgtgacgaactgatgcgatttcaaccattggcgatttt

SEQ ID NO: 88702 - DNA, 798 bp, Heterodera glycines
attcgttcgccacgggcggcacggcgtggacacggacggacttgtccatgctggcggacaccacggacttggcatcgtcggcaaaacagacgccggtgactggctgagagtgcgcgttgaactgggcaatgttgttccaacttttggcctggaaaatctgcacgttgctgcccccgacggccaaataggcgccagactggtcaaaaattcttcagtttgcgcaggtcccaaattttcacttcgccgtccgttgacccggtggccaagtagtagccattttcggaaaacgaaatggcaacaaccgcctcctggtggcccgggaattgggccacgttgatctgctccttgatatcccagattttgacgacgctgtttttgccgccagtgccaaagatgagtccgtcggggtgaaactggccacagcaaattcccggcacatcgtcgtcgtcggatttcacttttatcaacggacgtccagcattgaggtcgatgagcgaccaatgcgaatcctcagaggaacagagcacataatcgccggttgggtgcagagacacgtcaaaaaaaagtcggtcgtggatgccaatcacatttctggcactttgatcatccgcgttccaaattcgtatctgtgagtcaaaagagcccgagacaattgtttgaaggttgggatggaggcggacggcactgatgcgtttctggtgccccttgaacgtgttcttgatggtctccgtctctgagtcgaacagcacgatggtcttgggcataacgccggttgcgatgagatttttctgcaaatcc

SEQ ID NO: 88703 - DNA, 450 bp, Heterodera glycines
  unsure (1)..(450): unsure at all n locations
caaacagtccatcccaaaaattaaacttttttctccataatgctcgccaaccatcgccaacttttcctccattttctgttcgcaattgccatttttgtctttgtcattgcgccactgatggccgattcggagcacgaaatccacgctgatcagcaaagtgccataaatcccagagaaaaacgctggggcggcggatggggcggcggttggggacgcccgtggggttggggcggcggatggggccgtccttggggctggggcggcggatggagacgcccatggggcggctggggctggggacgatgagccgccgattccgtgccgtgttatgccatcatcagtcgtgccgtgtcagaaaaatgatttacgatttgaataatttttataattgatatgtgttgttcgagagataaacttttggctgataannnnnnaaaanaaaaaaaaaaa

SEQ ID NO: 88704 - DNA, 576 bp, Heterodera glycines
ctgaatttaagccctattaattcgctttaatattaaaaatggacgccaccaaatggcacacttttgtcaaccaagtggccgccacgggcccaatcacaaaggcggcgatttgtggccaagacggaaatatttgggccaaatctgacaatttcaatttggacccaatggaagcgaatgtggcagtgagcgcctttagaaatcccggcgttttggcaaaccgtggcttagcctgcgaaggagtgacgtatccaattacgcagcccccgtccacgaccaacaacacttgcctcagcggagagattgacggacagcacggcgttacgattgcaagaacgaacagagcatttctcgtcggagtgaccgaagggacggacacggacgtcggccgagtggaaacggtttcattggcccagcaattggccactcagtacggctggtgaacaacgcattgatgcggatgaatacaattgttctacactgatgagcatgggctataattgttctgacaccttgcaattatttgcgtcatttctattttctatgaaaattaattggataaatgcaatttattcaaaa

SEQ ID NO: 88705 - DNA, 693 bp, Heterodera glycines
ctttcgagaaagataatgatgcagcaacaatcgactcaggctcaacattcaaatccgtctcagcaccttcggaacactccgcaaagtcccgcagcgacggcaccgccgacgtcgagtcaaagccaacacttccaacagcgaccacacgtcgcataccatcagccaccacagcagcactatccgttgcagcaggagacgaaccaaagccaacacatccgtccccagcctggcgtaaggccggcacatccgcagcaacacccaaccgagcagcagtacccatcaatggccgggccattgttccaatcgcaaccgtcgagtgtccaagcccttcaagagcatgagattggcaatgttggacagccgaggcttgcgcagcatggccacacgcacatttctcaccaacaacaagtgatgatgggacaacgccacgcgacccatcacccgtcgcagcagcaaacactgatcagccaacagcaaagccaacacccacagcagcagcatcccaccacggcgattcgaatagaacaatccggccaagtggtgcatatgcacgcggcccctccggcgccaccgcagcaccaaacccagcgaatttttgtacaacagcagcagcagcaacaaatggtgcctacattgccaccccaaagtgcgcatgacccgtccctgcacccgccccctcttccgcacccgcac

SEQ ID NO: 88706 - DNA, 575 bp, Heterodera glycines
tgctttttcaggtcgaccctttgatgctgtccaatttttctctcattttgggcggttttgccaccgcctttgccccctttctctcccgtctttggatgttcgccctttactgttttccgtttgcctttggtgctgcgagttttgccgcccttcgctccatcatttgcgtggaattgctcggcattgaccgactgacaagtgcttttggtatgcttatgcttttcatgggcgtcgctgctcttctcggcccgccttttgcgagggcacttaaaaattggtcgggtgactatggactcgcctttcacattatgggctcactgatggcattaagcggttttcttggtattcccctccgacgaatcaacgaatgggaatgtgccaaggagcgaaataggaaaatgattgaagacgaaggcgaaacccaagggacgaaaaatggaaggaaatcgggagaagaaaagcaatgaaagggaaaagaatggccaaaccaatgtgtcatttcatgtaatccgaaggagttttgttaaactaaataaaaacaaaaagcacatggaaaaaaaaaaaaaaaaaaaaaa

SEQ ID NO: 88707 - DNA, 548 bp, Heterodera glycines
attttctgtcccaaatgattcgcctgccctttctttcgttggcactcgccttttccgccgttctcctcgtcctctgcgacgatttgccatgtcccaccgatccgtcgtccgcgcctcttccgcccgggtgccctccgcccccggcggacggtaaaaaagcacccgccgacggaggaaaggatggcggaaacaaaggccgaaaaaaacgagacaacattttacgtgccaaaagagaggacaaaagcaaggactctgaacaaaaagcggacgacgacgaagcggactgtgcgccacccaatggcacccctccgcccggcgcccctccgccgggaactcctccgccgggcacttcaccgccttgccgtcgtcagaggggtgggcccgccggaggagggggaggagcagcgcagcacccgccgaacggtccgccgccgaccacgccgaagccatgagaaattggcaaaaaaaaagagaagagcggatgtagcacacataagcacttggatgaaaagtgttcatagaagaagtcgtatgatcaaatattgcat

SEQ ID NO: 88708 - DNA, 669 bp, Heterodera glycines
attttttggctaaatttttattaaaaattttcatggaccttttttggatttaattcattaaaaatcaaggcatattcggcatctcagagagtttaacctccaagctatatccatccaagtctccaatacggtgaccgcacccaataccgttgcttccgtcgccgatttcgccgatgccaatgtcgccacagccaattttgcgcaccatcaacggacagactttaattaaaaaatgcacatttatcgatgcccaactaaatgccaaaaatgaaaacagataatcaatagtgattaaaaagactcaagcactcgataactcatcaatcttgtcttgtccaattcgtaaattatttcttccctccgtatgtgtatgggtaataatacatataatagtatgacggattgtaagtggctgacgacgaatcatccgatgaagaacgaagcttccaactcccgctcgacgcgtcatagctgtaatacggattattgtcagatgcgctgctaccgtagtaactgtagtacgggttgtaatagtaggcaggataataatattggccagcgttggaaaagtgggtgatcatcggcataaatacgacgaggaaacagatcattcgggtcgttagcattatgaagttgagataatgagcgtgtcgaaacttttgttgattg

SEQ ID NO: 88709 - DNA, 731 bp, Heterodera glycines
gtttgaggcttattatgtttgctaagcatttgcgcaatttcccttttggctgtccttttgctgcgcgtcccttgaggcgatactcagcccatggactgcaggtgcacagggacaacgagcggaacaatccgaacacgcctttccaatttacggaagccaatttggccaaaattacggtgctgttgaacaatttcccggagggacataaaggagctgctctcattcccgtgttggacttggcccagcggcagcacgggtggctgcccatttccgcaatgcacgaagtggcacgtgttttggaaatgcctcgaatgcgcgtctacgaagtggccaccttttacacaatgttcaacagggaccccgtgggcaaatactttctccaggtgtgcggcactacgccgtgcatgttacgcggcgcagaagcaatcatcgaggcaattgagaagaaattgggcatcaaaaagggagggacaacggcggacggactcttttcgctgcaggaggtcgaatgtctcggggcttgtgttaacgctccgatggtgcagatcaatgacgattactacgaagacctgacccctcgggacattgaagagataatcgacgagttcaaggcgggcaagcgacctttgcccgggccaaggagcggccgtttagccgccgaacccctcgccaaacaaacgacgctgacggagacaccgccggggcccggctttgggcttcagcagggattg

SEQ ID NO: 88710 - DNA, 810 bp, Heterodera glycines
attaagttaatctttaaatcctttacataattattgaaataatgattaatttatccatctcaacaaataaaaccgaatttccttatctggtgcgttatccggcaacaatggctttggttgaatttaaggtaaaattggagcttgtggtaggaatttattctgctgatatgaagcttgaattgcgttcgcacgaagggaaatttatttcagaattaattggcgacgaccgtaccttagaagaattgggagtccgagatcagtgcattgtgaatgtttgcgataccagtgaaacaagaaatgataattccacgaatgaccccaatgcattttatgtaattcccgaagagagatacgccaatagaaaagacacagctcgaaaatggaaacaacaacttatgacaactgcaacgacaacaaccgatgtcgaacgatccgagcagcaagtgccaaataaaattgggcctgggaagcgctgtattgtccaactccgtgatcaacctccacgaaaagcccaaattgcttttgtcggtcctactcattttggcgaaaatccggggactactcaatgggttggcgtaatttatgacgaagcaactgggaaaaatgacggttcacttgatggacacaggtattttcgttctgagccttcacatggcgggtttgttcaaattcgagcaattgtaaatgttttggatgacgtggaacaagccgccaatgacaaagagcaaatacaacagcagatggaaattgaagaaatctaatgaccattcattacatgaaacaaggagaaatcccgtttatgtctgcatt

SEQ ID NO: 88711 - DNA, 645 bp, Heterodera glycines
caagtttgagaaaaactttccacgccttatcatcccctaaacactttgtaaaaatgcgttttacttcaatcccgttgattttttgccttattgcactggtttgcgtcattgcatcagttcctgaactcccgcaaaaattcctcaaatcctggtcggttgatcattccgaaaatttcgacgaatacctggaggccaaagggtacggctggttcatgcgccaagtggtcaagcttgccggcatcaccaaaacattttcgaagaatgagaacggcacatatgcatgcaaaattgaaaccaccaaaaagaatgtggagtggcccagcttcaaattgggcgaggagttccaagccgagtatttggacgactcagtgcctaagatcaccttcgactacaacccaacaaccgacgagctgatcgaaacgcacaaaaaggtggactcggaggagaagccggacatctacaaatacaacatcgactcggacggctttctggtgatgcaaatggaatataacggagtgaaaacgaagcgcttctataagaagaatgaatgagcggagggtgaatgctttgtgggggtcaagaacgatgtgcagatggagaagaagcgacggatgattttgatttttgcctgattaattgccgatg

SEQ ID NO: 88712 - DNA, 301 bp, Heterodera glycines
gtccaattaagcccatagttagaataaagcgaaacgcttttttaattcgaaaatgtttgctacaccggaatttatggatgccgaagacagtttgatggagatgaaatcgaatcagttcaaaatggacaaaaatgagttcattgccgcggagaaattgatcgacaaggactactacagggactttggcgatatctttgacccggatgtgaagtaaatgcggctactttttgtgcggaaataagcaaaatgtaatgttgttgtttttgatttttgagacataaaattgtgtatgaggtaaaaa

SEQ ID NO: 88713 - DNA, 408 bp, Heterodera glycines
ttttgtgctttatctggtggtctctgtagcaatttttgatggtaccgaagacgctcagacagctcacataacccgcaacatttggcggtgtttttatgtgcgttcggcaaaacaccatacattggccgttgtgaattcgatcaattccttcctgacgacaacactcggaatggtccacttttgaggtggcgcagtcgaacgctttgctcagctgagcagacggacaatgggagccgagcaaagcgattagcagcttttcttgagtgaaagtgtcgaaattgcaaaactgttggcacgtggagggcaactgctgtttctgacagcacagctccaatttggcattgggcgtcatcagtggggagactgtgacagcagcggaaacagtagccaatggaaggtgcggtactg

SEQ ID NO: 88714 - DNA, 561 bp, Heterodera glycines
gtttttacttccatcaactaattatttgtagaaggttaatgacttcgcgaattttaagactttggcagcccggagctccccgtcctagggtatttttgcctgatttctggataaaattggttgagcaaccgagcaagggttacaaccgtcttccaaaaaatgccgctgcgtttgaggtcgacctcaaaatgtcgcgaatggatgtccgcgaatatttggaaaaaatttacaaatatccggttcgggatgtgcggattcgtgtcactatgggggatatcacatgggaccaccccaaagaccgggacaagagaagagcactttggaaggaagaggaccgaaagattgctatcgtcttttttaaaaagggtttcattgctgaagtcccggatctgttccccggccgtggcaccgatgctgaaattgatcagatgaagaagttccaagagcaggacgcaaatactttcaacagtcgctttgtcaataggggaagggcagggataggagaaatgctacctatttaatgctggaatttttgttgataaaatgcgatgaatgtaaaaa

SEQ ID NO: 88715 - DNA, 490 bp, Heterodera glycines
atataatattttattgctggagaatgtcttcgtctgcgatgggaactcaacccgctctcttcgaccgttccaacatttcctttgcggtgtcctttttggccgggggtttggccattggctatttgctcggctggcgaaccgcggcttcaaaattggcccgatgcaacacgcgagtgcagttgagcaaggacaaagtggtggacactgtcgaattggaggacattggcgagaaaaaggcatattgtcgctgttggcaatccaaaaaatttcctttgtgtgacgggtcccacaatgagcacaacaaaaagacgggggacaatgttggcccattgattgtaccgaaggcgaagtccgcttcatgagcagcggaggacagaacaaaaaatattaaacaaagcattggattttattgtttggttggaaattcgctcaattgttaagaaaaaatttaacaaataaattattctttaaaaaaaaaaaaaaaaaaaaa

SEQ ID NO: 88716 - DNA, 764 bp, Heterodera glycines
aggctgtgatgagtgttggcgtactttttcgtcttacaattaggccaagcccggcggggcttcgactgacttgttttttggccaccaattaccatcacaatcttcatcagttcaacaacaactgcttggtgaggaggcatttctcttgtacatcgcggcttctgttggccaccaccaccgacaacaaaggcgatgccgcatcggcaaaacagcaacagttcgccaaaatagaattgaagccgaaaacggggagcgacggtgctgtggcggagccggaacggacatatttggaggaaatgctcattgaacgggatgcggagccgaagacggcgggccaaaaagtaaaacgtgcggtggagacaaccttctacatttcgtttggcctcatctcctgcgccgttctgggcgtgatgacctacctcgtgttcaaggagttcttcgccttcaacacgccccagggcgtttaccgcgatgcggtgaaaagggtgaaggcggacgagcgctgtcgggaaatgttcggcaagcgaatcatgacatttggcgaagagtcgggccggggacggcgacggcacattctccacaataaatatgtcaaggacgggcaggagcggttgagcgtgatgttccatgttaagggtgacgcgggcattgggaaaacgtacgcggagatttacaagggcgaggacggcaaatgggactatcgctttgtactggtaaagagtgacggggttccgaagaaagccattttcttaattgacaacagg

SEQ ID NO: 88717 - DNA, 638 bp, Heterodera glycines
gccattttaaagtgcacagccaccaaaagccattcgtaagacgcccgcccaatgccaacttttgcagaacttttcgaactcagcgcaacggatgtcgtcctcgttgttctgttcgtatacgtcgtctacaaattgttcttcgctcgtcgccatattccgcctccccccgacgtgccgcaagtcgaaccgttggagaagcaggacatgacggtggagcagctgagacgctacgacggagtacaagacgaacacatttgcatggcaatctgtggaaagatttacgacgtgacaaagggaagggactattacggacccgagggggcgtacggagcattggctgggcatgacgcaactcgtgcactgggcacgatggatgtcaagcaaatcaaagacgaatttgatgaccacgccggaattgacccatccgatttggaagaagcgaaagagtggcaacagcgcttgtcattgaaatacccgttcgtcggccgacttttggctccgggtgagcaacacacggagtatgagactgttgcagaaaaccgtgagggaaattaaacagcggttgacgcgtaagaaattcacacattccttcacttcaatttttccaccttttcactttgctccataaaatcactatc

SEQ ID NO: 88718 - DNA, 684 bp, Heterodera glycines
attactgttcgttcactctcttcatctttggcccaatcactttgaattatttaatcaatactaacaaataaataattcgctatttaacttttaacaatgatggaaatggcgaatactgacgaaattaatctggtcactgtggatgtgccaccgaattgtcatttcactgtttatgtgcagaaaccgagagagaatttggagggcaaaactgtttttctcactgtccatgacgtcggctccacctcccaatcgttcatcgaatttgtgaacagttcgcccatgaacagcgtcaaaaatcatgccatgttcttgcatgtttgtgtgccgggccaggaagaggacgctcctccgctggacggggacttcccatcaatggagcaaatgggtgagcatttggtgcacgttctgaatgccatggatgtgcagaattgcgttggcattggcgagggcgctggcgcggacattctttgccgttttgctatggcttggccaaaccgtgtccttgggctggttctgatccattgtttggccacttcgcacggaatcatcgaaagcctcaagcaaattttcttaaatttgcgagtggaggacgggaacatgaacaatgccgcgtgggattaccttttcttgcacaaatttggattgcacgaaaaaacgttgaaagaagcgttcattgccgagctg

SEQ ID NO: 88719 - DNA, 127 bp, Heterodera glycines
ctttttcagcagattaattaatatacgatgacaggtgataatacaatattgatacgcaatatgcatcgcagtaatgcgtgaatatatatagaagataaagtttttaaaaaaaaaaaaaaaaaaaaaa

SEQ ID NO: 88720 - DNA, 665 bp, Heterodera glycines
gtccaaataagcattttcaacaattttcttacattcacttttctttttgcacatttacaaacacataattttgatatttcacaacacatgcatttgaatgcgtttggccatgttcctcgatgagcaacccatcgcacagtcaattcacaatgctttcacagattggcagcggttcgtttggcaaatgctttctgtgcaaaagggtggcggacggtgcccaaatggtgttgaagaaagtgcggatcagtgacgagtccaaaaatgaggcacgtctacacagtctaattttacacccgaatgtcgtgcgcaccttcgaaagttatttgagccaacgcagcatttacattgtgctggagcacatggcgggcggcaatttgcacgaacacatcaaaaggaatgaggcggaggagttcaaggatgaggacattctcagcatcactgcccaactgacagccgcgttggaacacatccatcagcttcggataatccaccgagacgtaaagccacggaatgtgctgctcagcgaagactggaggactgtcaaactgtgcgactttggcatcgcaatcaaattggcggacggacagaaggccaagggacgctttggcgaagttggcaccatcaactacatggcaccggagattctggagggacgcgagtacgac

SEQ ID NO: 88721 - DNA, 1009 bp, Heterodera glycines
ggagcttacttatgctcactcatcggaaataccgtctcttgcaatttgcatccgtttctggtcgggcactaacaataagtccggaattcaggcagctcagttctgtttcgtccatcccatcaaattcgcataaaacctcaaagtcagatggaaaggcgcccaaatcgagcactctttggcttaatttgccctccaatgcggaagaggatgtgcgaacacgtgttcggagctctttcttcggcacttacgtcgctttgttattcccagccgccacttttgctttgggttgttggcaatggaaaaggcacaaatggaagaccgaactcatcgaaaaactgaaaattgcaacaaaaactgcacctgtggaattccctgtggacaatttgtccgcgattgatgatatggagtttcgcaaggtgcacgtcagagggtattaccttttcgaccgccaatttgtcattcggtggcgctgtcggttggaccccgcaaataccggcacttcgaattcggaaaaatatggggcgtatgtgatcactccgatgagactggagggcacaaacgttacaattatggttaaccgaggatgggttccaaacgaaaacatcgaatccgaactgaagaagggcaagcaactgcgggagtccgagctgaaggatttgaacgcggtcgtcagaagtgctgagaagggctctcctttcgtcaaaaaccacccggaaaagggaatttgggccttcaaggatttggaagaaatggcaaggcaaagcgaccccgtcccaattattgtggatgccgatttcgaatcgactgaaaaagacggaccgatcggcggacagaccattgtcgtcctgcgaaaccagcactacagctacatggtccaatggttcggattgaccgttggtgtgcttggcatgtgggccttgcgtttcttgtgacgctgcgaacaggagggaccagatggcatttgtcatatcgtatttagggtctttgctgtccatctctgttgcctttc

SEQ ID NO: 88722 - DNA, 1164 bp, Heterodera glycines
gagttccattttgagaattccctccacctttttctccaatttcttaaatgatgtccaacgcaaccaaaaacattctcggcactccaacaatcgtcgacaatgttagtttcgaccccaaagtgagcgccaatttccttcacaaagccatcgaagagaagcgaaaggatgagattatccatttgctgtgcaccatttccaaccaacagcggcaagaattggcacgcgaattcaaacaattgttcggcgaagatttgtccgccaaactgaagaaggcactctctggcgactttgaggaactgattttggctttgttggaaccgccagctgtttacgatgcgcagcaaatgcaccgcgcgatgtccggcctcggcactctcgagggatcggttctgattgagattttggtcacgcatagtaaccgacaaattgatgagatgaagcgcgtgtacgagcagctgtacggccatccgctggagaaggacatcgtcggggacaccagcggcgcattccaacgactgctcgtgtcgctgtgcaacgattcgcgcgacgaaagttggagctccgacccgatcagagcgaatatgacggcacgtgctctgttcaaagagagcgaggtggagagcggggtcaacgacgttctgttcaaccaagtgctggccaacgagaatttcattcagttgcatttgattttcgaggagtatcagaaggtcagcggtcatcccattgagcaggcaattcagcaacagttcagcggagacacgagggacggttatttggcggtggtggaatgtgtgcacaatcggcacgccttcttcgccaaagtgctccaaaactcgaccaaaagcttcctcggcattggcaggcgcgactcggacttgatccgactgattgtcactcgtgccgagtgcgatatggtcgagatcaaagagcagttcatgcaaatgttcaacactccgctggagaaggccatcgaaagcaactgttccgggccgtacaaagacggacttttgactctggtcaaagggaattgatcggcggaagaagcgatctgaagatgattgatcattggcattggattgattgatcggatttgccactcgctttatcatttattttgcttgcatttggtcagtgtcaccaattgtaaaggtcaaacgttaaaaa

SEQ ID NO: 88723 - DNA, 648 bp, Heterodera glycines
ctttcatttcgtccgctttttcagtgcgaaatgaatggcaagggaaaaaacaaaaagacttcgtcttataaagaaaggaaggccatttcgtaccagcagggcagtgaccctccgtttttggcacaattcaaaaacaaactcggatacaaagaatggaccgtcgaggataagtttgccaaaagtgatgacgaggaggaggaggagggggcggacaatccgacggatgacatccgaaagatgcgagaagaggaaagaccccaagtggtggtgttggacccgagaacggatctgtcggcggaagaactgcagaaagagattgagaagggaaacgaggaggaagacaagcgcaaaataatggaaggaaaaattatgtttcggaagcccgagaaaaggaagacggaaaatggatgtgggaaagaaggaagcaaagaggaggaggagaaggagaaacgagccaaaagagaagagaaaccgggacagcagcagaaggagcagaacagacgacttctttcgtttggagaggaagacgaatgaaccaaaggatttctcgatttttatgcgatggtttaaaagcatctcgatgtaattttagtgaataataaaaaaaaaactcgactcttaaaaaaaaaaaaaaaaaaaaaaaaaaaa

SEQ ID NO: 88724 - DNA, 283 bp, Heterodera glycines
gttttatattctcacaaattcgacgagcccctttttctcttcagctctttttggcactgaaatatgcgagcgaagtggcgtaagaagcgaatgcgtcggctaaagcgcaagcggagacaggcgaagaaatgagcggacggacggagagaaaactcagccgaacgcggaaacggaggcacaaaatgttgttgctgtttttttgttattgttgtcaaccgcccctttactcagataaaatttgttgcaaaaaaaaaaaaaaaaaaactcgagactagttctctct

SEQ ID NO: 88725 - DNA, 701 bp, Heterodera glycines
ttaaagatctttaatatcttcaaaaatagctgaatacgaaaatgacaaaaccgcaacaggttcttgttcttgatccgaataacgaactcagcttcaagggaccgtttactgagtatgtgaatgccaatctcacactgtcaaatccctcgcgaaaggacgtttatttcaaggtgaaaacgactgcacctaagttttattgtgtccgtcctaactctggtgttatcaaggcgaatgataaaacccaaatcaacgttatgctgcagccggttgaatcgcctgagactctcgagagtgagcggagccggcacaaatttatgattcagactgcatttgcgcctgatgacgagcagcttcctgtggaccaattctggaaaactgttgacccaacattagtcatggattcaaagctccgagtggtgttccagcgaccttttggatttggcgatgaaaacaatcgggacgaaaccaatgcgactggtccgtttttcaatttcaacaaaacgggcgaaccgaaaaacgaacagccaacgcaaactccaaaatcgaccgaagcaaattctggcgatattcaacttgctttgcaaagggaagttgaacttcggatgatgtatcaggacgagaaaaaaaacctcgaaaaggagaattacgcactcatcgataagctcgaaaaattgactcacaatgctgctgcgggaggcgtc

SEQ ID NO: 88726 - DNA, 693 bp, Heterodera glycines
cctctacttagatttgccagccgcttttgctttggcacagctttggattaaaaagtcgctcaaagcgggttatattagcaatgaattggcctccggttgcccgacggggaatattcgcagtcgcagccgcactctctcacagggaccagacggcaaactttcatgcctcgacgaagaccaacatccaaaaaatgcaacccgtgctgacaatgagagcgaattggaggagtgcgcgcaccagcccaatcggaacatcatttgagatggtcgttagggaatagaataagacggacgttcttgcatagatgccgatgattgtttgacatgagttacctttcggcaaatgtccgtacactttgaccgaaaattgtaaatttacgaaaccgttaaccccatttgcctattctgttcgttttttgatacatttgctcgttattttatcgttagctatctatttattacattgcaatttgtctttttcattttcctccgttacttccttatcgatcttcatcgctacagatatgtcataaacgaattcatccatttatccataatatcagccttctatgtttttccaacatatttatctttgacaacgagaaaacgtattgaatgtacaatcagagcaccccattactccaactagattaaacccagccattcgatcgcgggtcccctcaagttaaccaa

SEQ ID NO: 88727 - DNA, 631 bp, Heterodera glycines
aattccatcaaatcagccaaagatccttcaaaaatgtcttctccttcttcgtccgtctctctactcgccatcgtcacaattttctgtttgctgtgcaaatgttgcgtttcggcaccgcatccgtgctgtcccggcagtcaaaaagtggtttcgctgatggccaattacgttggcactttcgcccattccttttcaaaggcatcgctttgttcggatgcccaaagtgttgcgggcgcattgaaaggccaactgatcggctgctcgaagggcggcgacgcaactcttttggccgacatcgaaggatttcttggcactcattctgctgatgagtgtgcccacagcctcggcttcgtccgtgccatgttcgtcattgccgcctccgcttcttcccatgccagcaacaacagcgaatggcaggcattgagtgcccagtttggtcagcaaatcagtgaaattgactcgaaatgtgccgagtttggcattggcattgccaaagtgccatatgacggccccaagggtgatcactcccaacgaaatgtgcctggcacggacagtgtgatttcgatgcccggattgaccggctcacacaaacaatgaaaatgagtcaatgagatcattttggagttcattt

SEQ ID NO: 88728 - DNA, 657 bp, Heterodera glycines
gagcttttctctaacaaatatttgtatgaattaatcccaatgatttgctcccgtcttttttcgtctcccatttcttcgtcggtttgccgacgatcccttcggcgaattggctactgtgccgacccgaccatcggcctctcctcggaacaaatcgaaatccaacggatggccaaggattttgccaagaaagagctgtatccggagatggacaaatgggacaagctgggccaacttccgatggacgcgcttcgtaaagccggcgagttgggcttcggtgccatttactgcgacgacgcgtacggcggcgcgggactgagtcggtccgacgctgcgttggtcttcgagcagttggctgccgggtgttgcagcaccgccgcttacatggcggtgcacaacatggtgccgtggatgatcgaccgttttgccaacgaggagctgaagcaacggtacatccccgaattagccagcttcaccaagttggcctcctattgtttgactgagccgggcagcggctccgactcggccgcactgcgcaccaacgcacggagggaaggcgaccattacattgtaaatggctccaaggcgttcatcagcggcagcggcgtgtccagcgtttatttggtgatgatgcgtcacaaagacgcgccgccgggtccc

SEQ ID NO: 88729 - DNA, 702 bp, Heterodera glycines
attaagatgctttcgaagaaactaattgccttttgttccgatactttttccggaaaaggtttgtcgtctcgaagactgatcagttttgacctatctgaccaacataaagccatccaggatggagctcttaaattcgcgaaggaagtggttgcgcctaaagccgcggaatatgacaaaacaatggcatttccttgggacattatcaaacaggcgcatcaattgggattgatgaatccgacaattcccgaaaaatatggtgggcctggttgttccaatttggagactgctctgatcgttgaggcgttatcttatggctgttcggctattcaattggccattatgggcccatcgcttgcgttagctccgcttcttttggccggaaacgaaactcaaaaacagaagtacgccggcatgttggcagcggaaccactgattgccgcgtattgtgtgaccgagccgggggcaggctcggacgtgagcggagtgaaaacaaccgccgttctgaaaggagataaatgggtgctcaacgggagcaaggcctggattaccggtggcggatacgcaaaatggttttttgtcttggcgagatcggactcggaccccaagacacccgctggcaaggcattcactgcctttgttgttgacggagacacgcctggaataacccgcgggaaaaaggaaatcaacatgggccagcgttgc

SEQ ID NO: 88730 - DNA, 836 bp, Heterodera glycines
gtccaattaagatgttcggatgtcgcaaaatttattctattaaacaaatttagtagtttttcctccaacttcagtttcaaacaaattattcccattcgaaccattttcacaattcctttgcataatgcaaaatttgtttcccggcaaatttggtcaagccgcgcaagcggccaacacagcccaaatgcaaatgaaagcggagcatgaccctagcgcaggatttccgtggtgggttcgatttctcgccaagggccttggcatcgtcggtggttttgttgccatatttttcggagtccttgccctcttcaccatccatcccatgtgcatggtcgcagcgcttcttcaactcgccgctggttttttgaccattgcccttgaagcgcccttttgctgtgctttcgtcgatttcatcgaaagaattgctcaattttccgagtcgcgtgcgtattggcaaaaggcagcactttatggcgggatgggtatcgtccccattttgctgtgtgccgggactgagactattttgggtgccgggatgatatgcgcttcgggcgtcgcctacggttttatggcattgggaaagaaggctgaccgtactacgatgttaggcggtgctaataccgctggacaggacccggcatggagcccacaactgaaccaaccatttccacaacctgccggattcaatcagccctaagtgattgaagagaccgatgatggatcattttcttattccaattctctcattttgacacttacatttgaaccctaaaaccctttcaaaagcccgctggaaaattgtgcatttttaaaggagatgaatcgacattggcaatgca

SEQ ID NO: 88731 - DNA, 888 bp, Heterodera glycines
  unsure (1)..(888): unsure at all n locations
gcttttgccaataatcggctaaatttgcgaaatgagacagaacaaaattttccgcttaatctctgccgtcccttcgcttctcctccccccaaatggactttgtggcgcttcgattgtcgcgactttccgaatcattgcacagtgaaaacatgtgcattttgtgccgaagtgaacaaattacggccgaccgccaaaaacattgtcaacgaaacgcacgcccgctgggattcgatgaagcgcgagaaaagcttcgacgacgcgccgactctgctcagaatggccaccgatacatttctgcccagcaaattgacgaaaagtgtttttttcaatcataaattgggcgtcgcaattttccgcgacgaaattccgccaaaattcgaaagtgtcgaaaatctctccggcggcattttccaattgtattttcacggcacttcgggtcgtcaaagtgcggtgaccgtgcaaaaactcgacgctctgttcatccaaactgtccgctcgctgttcggaatgccctctccaattgcgtgccatgtccacggattgttctaccgatgcgaaattaacccgggcaatcgccgtgatccgatatcctatggcaacttgttggacttgccattcatggccaaatttgaggtgccattatgtgcgaggaactttctgatcagacagaattggcaaaaatcctttaaactttgataatcagagtgatcatttaagatttggattgatgacgtcgtgaacagacgactgatagagcagtcgttcatttatcaccccaattttcaatgaccaatttttaaaattattttttaaaatttattattttttatttatcccaaatcgattcgataaatttttgatcacaanaaaaaaaaaaaaaaaaaaaaa

SEQ ID NO: 88732 - DNA, 631 bp, Heterodera glycines
gtttgagcacctaaaaacagtggccctgattgtaaattaccactaaaatggcgacttcttcaaattcgaccacaacagtcgctgagccgttgccgacaaaaacttcgatgaaaattgccgaattgcgcagccgcgttctgatcggcgatttgccagccgactttttgcgcattccgccggtctcttcctccgtaaatctctcgtccgcccccgaccaaattgttgcccaacaaccgcaacagattgtcgtcccttatggccatccgtacgctttcgtcaatccggcggagcacttttattccttcgttccaccgcacacgcgggggcgaattgcggtgaaaattgtggaggcgaaactgaccaaaagttacggtttgcccggcgtccgaatggatccgtacgtccgacttcgaattggcaacactttgttcgagacgcccacctgcgtaaatggcggcaaatcgccgcattggaatcggacggtgaacgcgtatttgccggacggagtggagtcgatttacctgcaaatttatgacgaacgtgcgtttaccagcgatgaatgcgtggcgtgggctcacgtcattatgccgccggccattttcaaccacgagacaatcgacgaatggtacca

SEQ ID NO: 88733 - DNA, 646 bp, Heterodera glycines
gtccaattaaggatttatgccattccttttactccaatgaaaaaaattgattgtcatccaccgatggcaaacagtggtgaacattcctcgcgccgtcagcagcaacaacaacgccatcctaacaccacggcggaaaacaactcggacattgagggcactgcgcatcgggtggcgtccgttactttgaacacggagtccgactcgcgcacatccgccgacctgccggcatatccttttcggagtaaacggcgcaaaaagttgccacgtcgagacaaacaacagggggccgatatggatgttgatgaacatcaaccgccatggaaaaaactgtcggtgaacaccgtggacaatttgactcttccaagttgtaaagtgcaaatggactgggagcatggacatggacaggcactgtccactgccaatgacagcactcaaaaccaatcgtccagcacaacgagacaagcatcggacatggaaaacagtgtatccgaccagttttcccattcacaatccgaatctgaggccagcacttccaacattgacgcggatgatgaacaaagtgactggcccggaaatgaactcgctcgtcatccccaactgtcctcctcctcttcggtcattgtgcccttccaactcgccccaccac

SEQ ID NO: 88734 - DNA, 602 bp, Heterodera glycines
tatcgttttctttcaactttttcccaatttttcattttgatgttttttcttttgatctgctcatttttgacgaccaatgctctcaaatgctggtccggctccaatatgacggtgagtctgttcaacgtaagcaccaaagttgaggaggagcaatgcgcggtagaagtgacaaattgccaccgaaagtactgcaaatacgggaatgggtcggcttattactctttgggctgcgggggaatggacgcgtgcgagtcggggcccgtggcgatgctttgccgggcgagcggccaattggcatgcaccaattgcacgggcgaactgtgcaacggagcgggggcaaaccaccgctttttgggcggcactttcgcagcgacacttttggccattttcatcgcactttttgttcttcaaagcaaatgaaaatgacagaagaaaagagggaaaagtgaggacaacagggacgattgattgacaaaacagatcaaccaacaattggctgataatttatcattttgtaatttgacaatttcagttaagaaaatatttgggaatacatttaaaattatgttaatgaactaattaaaattaaaatatatgaaaaa

SEQ ID NO: 88735 - DNA, 635 bp, Heterodera glycines
aattaagataaataatatctaagtcaacaaaagctcaaggaattctcaataaaatggccgattgttgggacgatgaagactacgacccatccgcgcaaatggcggacaaaatcgccagcctcggcttggacgacgtcattcggcaacagcaaccgaaaggggaaaaagtgccgacgcaagcgacgaataacagccgaaaagagggcacagcgaaagagggggcgacggaactgagcgaaagggaaaagagagaggcgcaaatgagggcggacggaacggcggcgatggatttgttcggcttggccgtcgagcgcaaggagcccacctttgacgaccttcgcacgaaggacgactttcaggcatttgcggataaattgggcgaacaaatcggggcgaggaatgaccacgcgaattactcactgtttgtcagtgctttggttgaccatatgacaaagccaatgagcaaattgcaactgcaaatcgtcatggcaaaaatacaggcccatttagacgttcatttgaagcgcgaggaggaggagcagaaactgcaacaggaaaagaccagcaaaaaggagacgaaaaaggccaagaaaaaggagttggaggaggacgtcattgaggacgaatacgacgac

SEQ ID NO: 88736 - DNA, 496 bp, Heterodera glycines
attaagaatatatttaaaaaatgacacttcatttgttgcttgtccttcccgttttggcgatggctttcgcttttggcaactgccaaagtcaaactataattagcggttccggctgtgtgtaccataacggatgggtgactgaaagtggacgctcgcggccgttgaccaccaacgaacgcagtcaacttgacaattaccagcgccaatcgcaaagtgccgccgctgctttttccgccgcatttcgtccgccctttccttttggagggccaattaacccgcagttgaatttgccgcagatgccatgtttctgttccgctgcctcatgcgcgggcggtgtgtcatgggttgacaattaatcagtgggccgatggacagagggaattaattattcactaatgaaacgaatttgtctgattcacagtcgggggattacaataaagcacataaatattgcggataaaatgctttctaaaaaaaaaaaaaaaaaaaaaaaaaa

SEQ ID NO: 88737 - DNA, 635 bp, Heterodera glycines
gtttgagtaaaattcttgcatttttttcgtctctacctaatcatgaatcgtggacggaacaatcaaaattatttaattcatggaattagcaaatactggcaagtcgtcggcgctctgggtctgtgcgttgttatggtatgcatcacttatcaattgtttctgcacgtggacgaaaagcacaaatcgttcaaactgatgatcagtggacatttcaacgatatcaagcaaatcaacaacgatttcacggcgtggtcaaaaaatttcacatcgcatctcaatgagcgtttcgaacagcaacaggctcgatcaagggctcgtttcaaacaacagttggcgaattttgtcaaaatccgtttggattttgataaacaatttcaaaaaacaatgtaccgttttgccgaagttgagttggaaaccgtgctgaataaaagcaaagcctccggcggtggctgacattgacgtttgtttgttggttgttttttgccgctcaatgtgatctcctccgacttttggacttcaaaatttttgccccgttttgtgggaaattggattatttacattgttttttctttgttgctttgccagtgactgtttttttgtttgatgcgcaaacgaccacattattttgcacaaaa

SEQ ID NO: 88738 - DNA, 368 bp, Heterodera glycines
caagtttgaggatttttttctcgaagataattcaaatttccattaaaatttacaactcagtctccaacaactgttttgacaatgtctgctgtacaattcaaacagtcatttgacaaagtctgtgccaccacagccaacgcatttcgcttcagcctccaatggtgttttgtgccgctggtcgttattcttggctttcgtcgcggtgccgagccgttgccgaacggcgaaattgtgccattgtcgatcgcgtcactcttttggggctgaacttttggcgtgtgatgtttgacgccgacaaaatatattttcaataataaaacgagcaaatgtttttttgttagtccttgaataaacaatttttccaaaaa

SEQ ID NO: 88739 - DNA, 572 bp, Heterodera glycines
attaagtcctctgcttctgcttgtcagataatgattgtgaacccaattagaaatatattcgtgaggaattttgcctgtcaattcggaccttctgaactcgctcgttcctatgtcaccgatggcccactgacagtgagcggacgcagtgcgcctgtcaaaaagcgcacaaatgccgcagacgaaattgcgcggacaaagttcgagcttttggaacctatcgctgttactgacttgccacgggcgcaacaacgttttgctcgtcaaatccacagatccaatcggactcgggtgcaaaaaatatttgccaagaatatcaaaatgatcaaaaacggcctggccggcattgcattggtggtcgccatttatttgtacacatttttcgtgatgcgaaaggaaacattcttggaagaaattgacgaagaaatggcaattgaacggggcgaaatgaaactcgatgaccaagggagactggtggcagtgaaatgagcacttttgttaatttgattttagcacttcatttgtctaatttgttttgttttattttttgaagagaaattaaattgttttgttta

SEQ ID NO: 88740 - DNA, 796 bp, Heterodera glycines
gtttgagaaaaattcattccatcactccatttgtgactaattaattttgacaactgctgctgctgctgctgctattgacggcgcatcgcatgagtaatccgaagcgtgttcgattggagaggcttcatgcattggattttggtgaatcggatgacatttcagagacacaaagcctcgatggttctgctatcacttttgccaatttaaacactgttaacgccaaaaatcagcagcgcaaaaagatgaacaaccgtgatcattttgaattggaattgagtgccgaatcggatcaccgatcaccagacaaatcatcaaaatttcaaagaatgccatcgtcatatttttcggatgccaaacggatcatcgattacgtgttggtctacgaggagaaggaaatgacgaacagcaactacaacaacaattgcgatgacaacaaacaacgcgataattcacgatcatcccccaacggcacgcacaaaaacagttgtttctctgctccgtctgagtgcccatttcttagccggtcttcatgcattggaacggctctgacaactttccatggatgccaatgccatcggcggaggggcgaaagacaacgcaaagggcggagagacggcagacgccgagctgcctctgcgcagtgcttccctcgaaaaattggatctttcatccaatgccttgcgcagagtgccgaccaaattggtggcccattaattgcattccctcaaaattttgagtttggcggcgatttcaatcgaacggatggaaccgaaattaatggccaatttcagcgcat

SEQ ID NO: 88741 - DNA, 413 bp, Heterodera glycines
gtttgagataattaaaatcatttaaaatggcaataaaattggaatttgccggagggcctgacgcaatttttaatgggaaacgcgagaccgaagctgaaaatgacaatatttcgactgttcgtcaattgttgcggtggctttcggacgggcccttgcggggcaatgatcggtcggaaatgctcatccaacgcgacaccgtcagaccgggcgttttggtgctgatcaacgacacggactgggaaattctgggcggattggacgctcagctcaacggcggagacaaagtgacattcatttcgactttacacggcggataaaacagcaaaataattgaaaaataattcattcgttttttgtccatttttgcagaagcataaattataatttttaaaaaaaaaaaaaaaaaaaaaaaa

SEQ ID NO: 88742 - DNA, 630 bp, Heterodera glycines
aaagaatctccaaaatccctaaacttcgaaaatggcagaaaccgccgagacaatcaacaccacgatctcatcgccgccaccggaatccgaaagctccaccactatttctgcaatgacagatccaacatctcaagaagcagcctcaaaagacacagatctgacgaaagaagccgaatcagagaagaaaccaggaggaatctctctccgaatctggccaccgactcagaaaactcgcgacgccgttctgaatcgcctgatcgagaccttatccaccgaatcaatcctctctaagagatacggtactcttaaatctgacgatgcaaccaccgtcgcgaaacttatcgaagaagaggcttatggtgttgcttcgaatgctgtgtcgagtgatgatgatgggattaagattcttgagctttattctaaagagattagtaagaggatgcttgaatctgttaaggctagatctaatgctagtgttggaaatggaagtgtggaggatgctaatactgatgctagtgaggtttctaaagatgatgctggtcctgcttcagaggaggagaagagtgaggcttgagaaatttggttttacttccttattataatctcttgtctcttagggttttgctgttc

SEQ ID NO: 88743 - DNA, 634 bp, Heterodera glycines
gggaaataatcaaggtggatttcacaaacgagaacggactggggatggttcccaaaggcgtgcaaccggcggaggtacaatccagatcctctcgtcaagctcttcaagcactgggtcccatcaaactcctttgcaaggtcaaatatcctccagcaccgatgacggatgtcccgtacaaatgaaaatcgccaaacctgacttgatggctgaggattctttggaatttgcccacaatgagtatcctgtcgtcttcaaatggcattccgatgctcaacctgccaaacatgtgtatttgactggttcatgggacaattggcgtaagaaaatccctcttgtgaaatccacccacgatttttctacgattatcaatctcaatccaggacgttacgaatacaaatttcttgtggacggtaaatggatggtcgatgatacaatcgcaaaaacagacaatcagatgggaagtcagaacaatgtgatgtccattgatgaagctgattttgcggttttcgatgccctcgacaaagatttggcctcctcaaatgctggcgaggcaatgcgttcgatgaattcgacgggtgcacagccatcgcaagacacgccaaacgatcgcgagttggaacgtcttcgcgaattc

SEQ ID NO: 88744 - DNA, 628 bp, Heterodera glycines
gagcttttgactttgtcacccgccaatgccgacctttccgtggagtaaaaagagaaaggcatccgacgatgaggtggtcgagagtgggatgacggtacgccaaatattggaggagcgggaggagtacgtgaaaaacattggcattgagtatcgattcggctgctacgaagaaaagcgcgccgattcgtgccaatatttgggcgaatatttcgaagccgtccaaaccgacttcaaatccgccttcgacactttccgccaaaattgtgagcagcgaaagttcccccgcagttgcttcaaatacggccaatatttggccgctgggagggcgtgcgaggcgagcttcaaaaaggcgatcgaaccgctcagattgtcctgcgatgcgggcatcgccaagggctgtcgcgtgttggcgctgattttgtggaacggggagtcggaccgtccgccggactcagcccaggccgagcagttcatgaaacgggtggccgaactgggcgattacgaggcgagctggacattaagcacttggtatttgggtgatacaataaaataccaacgtgaaaagtcggcgccctatggtcacaaaatgggggaattgtccagggatatgcaaaaggcgcttatgtac

SEQ ID NO: 88745 - DNA, 1471 bp, Heterodera glycines
cgtgtcgtccctttgagcctttcgatttgttccgtttcggtgcagtgaatctcgacccgctgactgagacgtacggattgcccttttatttgcattatttggtgaattggcccgattattttatggtcgctgaacatctctccggcgaccttatgggatacataatgggcaaatcggaggggcgcgaccaaaattggcacggccacgtcaccgcggtgagtgtggcgccggaataccgccgcatgggcctggcggccagattcatgcagaagttggagttggtctcagagaaggaggactgtttcttcgtcgatttattcgtgcggattagcaacgaaacggccattaatatgtacaaacggttgggttatacggtttacaggcaaattgtcgattattattctggcgatgacacccacgaggacgaagatgcattcgacatgcgaaaggccttgccccgagacgtggacaaaaagtcagtagtaccgctgaagcaccccgtgtcatgcaatgagatagactttgactgaatttccgtttttgtttcgtatttaaaatcaacaacgatgaaaaatatggataaaaattcattccttttcatcttttttcttttcaagtccatatcggcttaacaattcttcggaaggcgaagtgggcgaatttgtcattgggcaacggccggaagatgcctttggaaatgccatgacgtcacggatcgtacacttcgcattcccttcgaaattcaagagggcaataaatcggtccactcccaaggcgaagcctccgtggggtggtgcgccaaaactcaaagcattgaggaaatgctccaattcttccgtcttcaatttgagtatttgttccatcacatatcgctgcacttttgaattatgaattctaatcgagcctccgccaatttcgacaccattcaggacgaggtcataatgttgagcttcgatttggtcgagatccttcccctgacaaagtttttcaaaatgttcgggaattggcgcagtgaatgggtggtgcgaactttccaagcaattggtggagtcgtttcgagtgaaaagcgggaatttgagaacccacacaaaatcgaaacgaggaaaagaggcatctgagccgatgtccttaaaaatcatggtttatcagtgccgaatttatccatggcttcacgatgagacattctcggaaaagggatggtcggtttgggagtaatttcatcaggccatgaattcacgatcatttgctcaatcagtgacaaaaccatctcttgtgaggtgaatgaaagttccaagtcgagctgagtgaattcgggttgtctgtcgggctttgcatcttcatcacgataacaaatagcaacttggtaataacggtcgatggagccacacattagcaattgtttgtatatttggggactctgcgggagactgaagcagtcgccgtttttgttggcggggattgggaattccgc

SEQ ID NO: 88746 - DNA, 333 bp, Heterodera glycines
tgattgggataaaaaggtggccggttgggacgacaagaaagtgaacaaaggctgggaggaagccgaagcaccgctcaacatccgtgcccgtcgcggcggatgggatgagcgcattttgggcggtcgtgaacaatgaatggagagaatgagtgaagaagaagaagaagaagaattcgggatggatgccaaaaaagtaaacattcattttcaatttaattccccctttccgcccccatttgagcccctttttccaaatttcaattatcaaatgcataaacctgttctttctctcccaataaatgatccgatttaaaaaaaaaaaaaaaaaaaaaa

SEQ ID NO: 88747 - DNA, 532 bp, Heterodera glycines
gtttgagaatttttttttgcgtcaaaataatgtttttaaaatttttgattctggccttctgttttcaattggcaatggctaacctatttggtcaaaaacaatctgtagctgttgttggaatgctcaaatgtaaagggaagccaagtgctggtacaaaggttaagctctacgacaatgaccattttacgactgatgatttgatggcacaatccaaaaccgacaattatggacgtttcaaattgagtgggacggcataaagaaattacgaaaattgacccaaaattgaatctgtaccatgattgcaacggcgatttcccatttacaccatgcaaatggaaaattacaattaaagccttggatgggagtcgagcccacgccttcagctagtggttcaagcagctctaccattgtgccaccgagacaaaaccacaactttatatatttgtagaatttaaattgtaatcacaattttatattttaatttttataataaaatattagccacttaaaaaaaaaaaaaaaaaaaaaaaaa

SEQ ID NO: 88748 - DNA, 473 bp, Heterodera glycines
ataaagttcatcctaattgattcacttttcttgctgttatggttcgaatgactcccgatgagtgccgttcaattgcgagcgaaggcgaacgatcccttagagaaggcgacgctgttaacggcataaaaatactcgagaaggctcttcaatgtaacacgtttgatttgtctctccaatgttcactccattctcaattgggtaatgcgtattatgcccgtggtgactacaggaaggcgaggttcccttcaaccgttcggtctttttactccccgacccattaaagagaccatcacatggctgacctttgcgcttctagattgcaaaaggacgaattgcaacaagcgaagacattgtccaatttgtccgcaacttacattctgtaatggagattatttttgtttgtaattatttgtgtgaactattagtaaataagggctagcggaaaaaaaaaaaaaaaaaaaaaaaaaaaaaaa

SEQ ID NO: 88749 - DNA, 350 bp, Heterodera glycines
attaagcccatagttagaataaagcgaaaacgcttttttaattcgaaaatgtttgctacaccggaatttatggatgccgaagacagtttgatggagatgaaatcgaatcagttcaaaatggacaaaaatgagttcattgccgcggagaaattgatcgacaaggactactacagggactttggcgatatctttgacccggatgtgaagtaaatgcggctactttttgtgcggaaataagcaaaatgtaatgttgttgtttttgatttttgagacataaaattgtgtatgaggtatatgaaatggaaacaatgaaagcgtagaaattccaaaaaaaaaaaaaaaaaaaaaaa

SEQ ID NO: 88750 - DNA, 698 bp, Heterodera glycines
gttgcgacaattaaggtttcttcttcttccgctcatcagttgcacaacaacgcatcaataattaacattgacactgtccgtttcacttcgcactcaaaagagaatgacaccgaaaatagcaatggaagtgatttcactgtgaataatgggggcacttttgtgaggcgaaaggacccagtagaacggaaagtccaaccgaatgtgaacccgtcttcaaacccttcgtcctcttttacttcccatgaccactacccaccggtcgttagtgacggtgatgaaactgccgacgatggcaccggaactattcgaatcatttctccctcaaaagcggtccctccaataccacctcatcattttcatcgacaacaacaacaacaacttcagcacaaccaggtcaacaatgtgccatctacttttgttgccgatgtttcggttggcattgctccgccaccgcctacaatccgtggcgttcgctgtagctcactagagaacacactgcttcctgcactggataagttgactcgaactcggcacggtgccgcccatttggacacaattgctgtcgcactgaaacgcgctgaacaggcaagccccgggctgtgcgatcacttagtcaccgaattgatcaccaccatggcacatccccaatgcacgaacgcggagctgcgcaaggctatcgaccgattgaccacgcgaag

SEQ ID NO: 88751 - DNA, 639 bp, Heterodera glycines
ccaagtttgagactgtttggctcgaaattcataccattttttcatacgattctcatgagcagtggtatcattgaatttgctgtggccaggggattgcacgtcaaatccagagaaacggcagtgccatatttgcgcagttccattcgccgttttcccgttgatgaacaacgcgtgccatggaatgtgcctcttgtggactattctccgtgcgattacaccgctgattcggtgcacggaaagccatgggctgacccatcggagccgtcaaaatgtaaattcaattcgatggacgacggggtgaacagagtttcgtttcacggcagttacaatttggacaccgatgggaggcctctaaaccctttcggacggacggggctcagaggcaggggactgtttggccgctggggtccaaaccacgcggcggatgccattgtgtcacgacggctggcgaatggccaattgcaatttgtggctattgaacggcgtgacactggcgaactcgcactgcccggtggaatgttgaacaaaggcgaaccgccgactgaagccgccgtccgggagtttagtgaagaagcaatgggagggcatcgacgggaggacaaattggaacatttttggaaaaaggggaaaactgtgtac

SEQ ID NO: 88752 - DNA, 891 bp, Heterodera glycines
gtttgagaagtttaaaaatgcaagagacgcaaataattgtcggagtggcctctctgtgctccattttggccatcctcgccaccgttgttgtggtgccatcgctgtactcggagatcaatgagatcgccaccaaagtgcacgacggtgttcaggctttccgcgtggacactgactcggcctggaccgacctgatggacttacaaatcacagtcacgccgccgtccaagccgcgtcagaacccgttcagctccatcttccgccagaagcgtcagttgcccggccactgccaatgcgcgggtgtgcaacagccgaactgcccgcccggcccaccgggaccggcagggtcgccgggacagcctggccagcctggacagcccggaggacctggacagcccggagtaccaggacaacaaggtccgccttgccctgtctatacgcccccgtgccaacactgtcccgcgggaccccccggacagcccggaagccaaggaccgcaaggccgccccggagcacctggtcagcctggacaacctggacgcaacagcggacaaggcccgcctggacctcccggaccccagggaggagctggccaacctggtcgccctggaggacctggccaacccggacagcccggagcaccaggagttatcaccacctccgtgcccggaccgaagggacccccgggcgcacccggccaacctggacaacccggagcgcctggacagcccggcaaacccggaaacgctggtcagcccggggcacagggcccgcccggacatccaggacagcccggatctcctggccaacctggaagccccggacctgctggacctcccggaggcgacgcggcttactgtgcttgccctcctcgcaacgctgtgctcatgaaga

SEQ ID NO: 88753 - DNA, 864 bp, Heterodera glycines
  unsure (1)..(864): unsure at all n locations
ggtctccctaatttggggttttccattttctattcgtcaaaatgtcaatgcgtcggtcgcggtcggccgatttgagtttgatcagtcgtgagaaatatctgtcgcgatggtctcgcgagaacactccgatggattgtgtggaccgatggtgcagcaatgtgcggcgatcattcactccggtgcgcgacatttcaggatacgagaacattcgtaacgaaagacgctcccgctccgtggacagttaccgttctccgctgggcatcgttacggtgccttaccacacaaatgtcaattattaccaggaaaatcagccggtgcgaaagtacgacgttttccaagcgcggacatggtcatacccaatttacaagtatatttacggaagggataatcattactcgcggcccggcagttacacgcgcgtgtacggccaacaatcgctgtacacgccatccgtcatggcaccagaggccaaattggccaccgaacggcgcacttattcggggtacaattatgtggcaggcgaacacagcttcaatctgtccacgaagccctggtcccagtccaattaccgcttcctccgcgtctctcacatttcttcggtcccttggtatttccacggccaaaccagcaatgtcagacattacaacagttaccgcccgccctccttcactccgcgtctgtccacctattggaaaagttatttctgaccagcgaccgttcagaatggcatttcgttgtccttttgaattctttgccttttcacctttcatttttccctttgctttagtccctccattatcattctgtgcatagaaaatgagcgtaaagtgtcaataaatgtgcacaaaagcnnnaaaaaaaaaa

SEQ ID NO: 88754 - DNA, 681 bp, Heterodera glycines
aatttttagctcctaaaaaaactaaccctactcatcgctctcttttgttttgattcgctaacaatgcactcaccactgttcggctcaatgttggacaacaaggaatattcacgtcatatcgaaaacttccgttcttctatttctccacccaaaggcatcaccaacggactccactgtcatgacttcagatctccttcggatttcgacgttttagtgaagttggcaaaagaccccgccggggtgggcaaccgcgaattgcagcaacggatggaccaggaccaacaattccgacagcaagttttgtgtgcaattgtcaacggtggaaaagaacgttttctgcaattgtgcatcgattgcaacggatgtttcgtcattcagaagttagttgagaacggttcaaaagaaaccaatcaaatgttgctcaatttggtccgtccgctcgcctttaaaatggtgctcaatcgttttgcttgtcgcattgtccagaagctcgtcgttaatttgtccgggtcccaagtccgccaattgttctgccaacagttcaaaggacacgagaacactttggtcaccgaccaaaacgggaaccattttgtgcaatgcgtagttgaccattttgcgcccgacgtgtacggaccttttatcctcgccttggccaactgtcccacccgactgagcgccgtt

SEQ ID NO: 88755 - DNA, 383 bp, Heterodera glycines
attgagattcaaaagcgtttcaattaaatgatgagtttattggccagtaataatgcgtcgtccaatgggacaaacgctgctgccgttgcacctttgtcgccgctagcttcgtacaaggagcagcaacagaagcacaaattcaaaaagcctaacccgctagaccgttttctctacaaggttgttccggctcagacgcatcccttcacccagctttgttacaccgctctcatctttggcttatgggcgcaactcgggcgttatatgcgatgattctacgacgaaagaaggatgactaattttaggcttttgactctatgtgtgtgtatcgtcgcaaacacttgaataaaagttaaaaagtaaaaaaaaaaaaaaaaaaaaaaaaa

SEQ ID NO: 88756 - DNA, 676 bp, Heterodera glycines
atatattgataatcccccctcactttcacttaaatttattggcgaaatgtccactgccactgacgttcagcacaagagcatctacgactttaaggccaacgacatcgacggtcacgagatcagttttgacaaataccggggcaaagttctgctggtggtcaatgtggcgtccaattgcggcaccaccgagttcaactacagccaactgaagcagctgtacgacaagtataagggcaaaggcttcgcggttgccgccttcccgtgcaatcagttcggaggacaggaaccgggcaatgccaacgaaatcaaagactttgtgcacaaaaagtacaactttgagccggaccttttcgagaaaatcgacgtcaatggatccaacgagcatccgttgtacggctttctgaagaaagagcagcacggcacactcatcgacgccatcaaatggaacttcaccaagtttttggtcgaccgaaatggcaatgttgtgcagcgttactcgcccaacacagagccaagggacatcgaagcggacattgagaagttggtggctgccgcagcctaatcgcaaaaaccatttgaaagaaaacgaaatacgacgatcgacgagaccaaaaattaaatgatgttcatttaagcaaatttctaaatttactttggaataaaaaaattatgattt

SEQ ID NO: 88757 - DNA, 1010 bp, Heterodera glycines
ctgattccttcagcaaataaatcatttcatttctcttacttatggtttttgccattcgtcgtttcgttggcaaatgttcgccttttcccaattgttttttgcttcgtccctcttcttctttcaccccttccgccgatggaaacaccgacaaaagagaagatgcaattcgacttccaatccttcccaaaaaatcgcggtccgcaggacagccctattctttagtggattataaaaatgtcttttgcaaagcgggcaaaggcggggacggacgtgtatcgtttctgcgtttaaaaaaagttgaatttgcgggccccaatggaggcaatggcggaaacggtggccacgtcattttccaagctgactccaaaatcactgatctgtcacaagtccattcaattctcaatgcgcaggacggagtggaaggccggggcgactgtgcccatggaaagtgcggagaacacctttacgtgcccgtccctctgaacactctgatcaaaaaaccgagcacggacgaactgcggccaagcaaagtgacattacacgaactgtgccgtgagggcgatttgttcatcgcggcacgtggaggcgcggggggacacggaaacgcattttacgtgtcgaatttggtgagaaagccgttgaaagcggaggagggcggacaaggcgaagagatgagctacgacatcgaaatgcgcatcatggccaccgccggtttggttggcattccaaatgtgggcaagtcgtaagccttctcttccgccttaattggtcactgtccatctcttcattattacaattagcacacttttgcgtgcgatttcgagggcaaagcctaaagttgccgcttatccgttcacaactctcagcccaagcgttggaatggttcagtacggcgacttcttccaattggcagttgccgacattcccggattggtgcaaggcgcacatcgcaacgagggactcggcttcagtttcctccggcacattgtgcgctgcgaatgtgtgctctt

SEQ ID NO: 88758 - DNA, 647 bp, Heterodera glycines
gtccaataaagatttccacaatttctaacatttacattaacttcttaacttaactcatccaccgttaaccctccctaactaattgcccacccccctgccccgcccctcttaatgcttaaccacatttacaacattaacaccaccaccgccgccaccgcgcagcagccgcgcaagcgcggcaccaccggcacaacaaagcacggcacaatgccggccccaacaacgacaaaggcgagcggcagcagtgaacgcggaggcggcacgcaacaccaccagttcacgaatgggcgacaggttaccactggccaaagacggaaaggcgccacaggaaatgaggcacgcgaccgtaccctggccagtcagccgcctttgctgccaccgctcacttccgtctacgatttcaaagatgtcgttggcatcggttccggtgcgtttgccaacgttttccgcgcccgtgaattgataacggcggcgccggccgaacgctaccgccacgtggcactcaaacggattaatctgtcagccatcgaaaaagagaaccagctgatgtacgaatcggtgctgaacgaggtggacattttcaagtcgctttcccacaccaacattgtcaaatgcttctactcattcaccgaaatttcgccccattc

SEQ ID NO: 88759 - DNA, 634 bp, Heterodera glycines
gtccatttaagcattaactaaaataattttcttattatgaatctcggacggtgtagcatttgcactttaagctttgacttaaacgatgtttcagctctcaaatgtgggcatacgtatcattaccaatgcatcgacaaatggattgcgaattccaaaacttgtccaaattgccggacatcgaatctcaagcgcgacatattgaagcttttctttgatgagggcgaaaagtcttttagtcaattggtgcaagaaccggccaatgcagaacttcttgctcaactgaaagaggcgcaagacgtgaaatgctttttggagaaaaccattaaagagcagcacgagcgactgacccttctggaatttaagctgaagcaacaaaagaccaaaggcaacgaattgaacatgcaaattcaaaggaaggcacaacacatcgccactttggagtcacagctttttgaccagaaggttctgaaggaaacaaacgaaaagtacaaacggcgcctcgttgtctgtgaattctatgatttgctgatgagaggcggtggcgatgagggaaaaattgacaagtacatcaatcagaatggccacccagacgaagctaagtttctcgacttgatgagaaagcaacgcgacgaag

SEQ ID NO: 88760 - DNA, 671 bp, Heterodera glycines
cctcgtgccgaattcggcacgagggtccaattaagcaaagatttctgcattatgtaattcttgattatgtcgagtgttggaaaaagaggcacaagaaaaaccacgcggaatgacagcgacggcagttgtaattccgcggaaatgcaagacagcgaaaacaacgccgaaaatgagaggagaggggaaagcggaggcgccggtcgtggagaagaagacggggcatttgaaccgggcagttgggaatgtacagtttgcacatttcgcaaccgttacgaagcattcaaatgtttgatgtgcgacactcgaaaagggacttcaactcgaaagccgcgactaaatccctctgttgttcagcagcaaactttggtgcaaaaattagcggttgaagttgaaaaggcacaccaaaatccgtgtacttcggcaatggccaattcgccgaagccctcacgtgccccatcggccaatggtggactgtccaacaaacaacagtccaaactgaccatccgtcgtcggcccgtccctttccgagatgccctcgtcgttcggagtgcagccaagaaaatggtggtcaatgtgagcggtgtttcgttcactgtcactgagtttaaaccgcgcacatcgccgcgagggcgcaagaaattgccggtcaatcaaaacaatggcaaacacaa

SEQ ID NO: 88761 - DNA, 634 bp, Heterodera glycines
agaaaatgtataattatcatttaatctttttgcttgtcgcactaataagaggatttggtctgatagcgccaatgaaaattgaagaattgaatgacctggacgcggaaaattttgtgtcaaagttgggcaaaatttttgaaaattcagcttgggtagtccaagaagcctatggagaaaggccatttgaaggtgtggaccaattgttcaatgcaatggaacgggttttaatgaatgctggacgagaaaaacaactgaaattgatccaagctcatcctgatttggcggggaatgaaatgtttagtggaaatctaacgcaacattctacgagcgagcaggctaatgctgggcttaacgcattaacggctcagcaattgtccgagtttaattcgctgaactccgcttacaagtcgcgcttcaattttccgtttattattgcgcttcgagaccaaaaagaaggcattgatggcattttggcggcatttcgtcgacgacttaacaactcggaagaacaagaaatcaacgaggcactctcacaaattggacgaattgctcgccatcgattggacacattgatgatctaaccccaaaattacataaatttcaaaaattctaaccaaaattgaaaaaatagtca

SEQ ID NO: 88762 - DNA, 718 bp, Heterodera glycines
gcactctgaattctgagcattttcagcagcatctgctccatccccaaacacaatggccaagtcccgacaaatcagaatccactttggatcgaacttgtcaagcaaccccaaaaaaacaatggccgcctcaacaccatttgcaacctccgctgccccagcgccatcccggtccaaggccccgctcggccaagcgactcactcggttgacaagaacgcccttggcttcgacttcaacaagcttgtgctctacctctaccaaaccgtcccgcaattcattgcccccttgcgcatcgaaaagtttgccctgggccaatccaaccctacgtttttcctcgtcgatggccgtgagcaaaagtacgtcctgcgcaagaagcccgccggcgcactgctctcaccgaccgcacacgccgtggagcgcgaatacaaggtgctgcacggtctcggcacttgcggccatgtgcccgtaccgcgtgtgtacacgctgtgcatggactcgtccgtgatcggcacgccattttacgtgcggatcatggctgtatcgaggtttatgtcatgcagagcgttctcacgcacgatccctcgttgcggcacatacatactaggtcatggaattcgtcaagggccgcatctttccctcgcccgcacttcccgaaatcccggccacggaacgtcgcgcatactgggaagccgccatccgcacactcgcgcgcctgcattc

SEQ ID NO: 88763 - DNA, 691 bp, Heterodera glycines
gtttgagaggagtgttcaaaaatggtgacccgtttaaaatgtgtgtcccgagtggaaaacgacgggaaggccatgggacgttcagcaaacgggtttgttgcattcggatgcgagcgcaaacggatgggcgaagaggaaaatggtggcaaagtgttttatctgctgctgaccactcggctgaacaaaggacacccacgcaaaattaagttgagccatttctaccgactgtttgacaaaatgaagcgcaatgggatggcaaccttccaatttgctgacccgaacttgacagtttacgtgtcgcaggcagaccctaaagcactttgccagtttttgctgcatctgaacggcttgttacgacatgccgttgatgccaacattagatgttccgccccatcatgttcatctcccgccaatgtgccgtcatcgcccccgccaatcgcaacagtttcgactgtccatcgccaatgcacttcagcaattgcgtcagcgaaaccgaccaaaatttgcattcaatcgcgacaggaataccagtcgatgatcagacaagcttcatcggccaatctgcaacgcctcgacattgtcgggattggctttcgtgccgtggacattcgttggtttggcatgcgccgcttgcaacaactttcgttggctgccaacaaattgggctcggacgaatggtgcactgaacgca

SEQ ID NO: 88764 - DNA, 631 bp, Heterodera glycines
ccgaggcgagggcggttttctgattaataacgaaggggaacgcttcatggaacgctacgccccggtggcgaaggacctcgcctctcgggacgtcgtctcccggtcgatgaccatcgaaataatggagggacggggagtcggacctctcaaggatcacattttccttcaacttcaccatttgcctcctgaacagctcgcacaacgtttgcctggcatttctgaaacagctaaaatcttctctggcgttgacgtcaccaaagaaccgatccccgtgttgccgactgtccattacaatatggggggaacaccgaccaattacaaaggccaagtgatcagattctccaacgacaaaggcgaccaagtcgttcccggtctttgggctgccggcgaatgtgcggcacattccgtccacggagccaaccgactgggcgccaattcactgcttgacttggtcattttcggtcgcgcatgtgccattaacattttgtccgccaataaacccggcgattcgctgcctcctttggaaacggatgccggagagtcttccattgccaatttggacagcttgagaaatgcgaatggtgacgtgtcaaccgcggaccttcggctcgaattacagcggacaatgcaa

SEQ ID NO: 88765 - DNA, 289 bp, Heterodera glycines
tgcttgaccaaatgttgaaacggatggacaaacgggtgaaggagttcaccgaggcagcgctacgccatttggagaccattgacgcgtttgacatttacccgaccggtgccacggaggagcaaaagtgccggtgccgtgagaagcgcaaatgcatggtggacactgtgcaaacgctgctcaacgaaaatgacaaatacacattccgactagaccaataccgcaaatcgttgttgtacaaataaattattatatttttggttgattgtaaaaaaaaaaaaaaaaaaaaaaa

SEQ ID NO: 88766 - DNA, 474 bp, Heterodera glycines
  unsure (1)..(474): unsure at all n locations
tgagattattctcttttggctatggctgactcaattcaaaaccttaacaagcctaaagatgcctttgaacaattggaggaagaggagggcactcgccagggattctgtcacatccgaattcagcagaggacgggtcgaaaaacgatcacaacggtgcagggaatagcgccggaatacgacttgaaaaagattgttcgctacctcaaaaaggaatacaattgcaacggcacaatcgtcgagcaccccgagtatggcgaagtgattcaactgacaggggaccaaaggcagcacatcaaggactttctgtgcaaggtcgggatcgtcaaggaggacaactgcaaaatccacggattttaagcaaaacttattccatttgtgtatcaatgagcattaaacaaaatgtgttgaccgtccctaattcgttgatatgtcaccgtaaataaacgaaaaattnaaaaaaaaaaaaaaaaaaaa

SEQ ID NO: 88767 - DNA, 675 bp, Heterodera glycines
gtttgagtcaccgttatggatgtcacttcgaatcccaacggatcggtcgaatttgaaaaggtcccaaaaagtctaaagaaaggttctgctgacactgggctggattttgatgaggatggcctgacaattcacgaattgttcagccaaggcaccgggctcacgtacaatgacttcaacattttgcccggttacatcgacttcccagtctctgacgtcgaattgggcacgcatttgacaaggaaaatccgtctcagtgcgccgcttgtttcttctccgatggacacagtcactgaaagcgaaatggcaatcgcaatggccttgaacggcggaattggcataatccacgccaacttcaaaacgacccaggatcaagtcgcggaggtgctgaaggtgaagcggtacaagcagggcttcatctccaatccgcagtgcattagcgagacggataccgtttcggatttgcgtcacatcaaaaggattcatggcttcaccggcacgccggtgaccgacacgggcaaagtgggcggacgactgatcggtttggtgacttctcgcgacatcgatttcatcaaacgcgaaaattacgagacgacgcgaattgcggatgtaatggtgccgagggaacgactgattgtgggacataagaacatgacgctgagagaggcctattgcatc

SEQ ID NO: 88768 - DNA, 534 bp, Heterodera glycines
cctcgtgccgaattcggcacgaggcaaaaaaatgcccgcgccgcaacagtcaaccgatgaacaggctgaagaggacgcaaccgaattgaagttcccgaaagagtttgaagtgtccagctgcgatgctctgatgatttcggaagtgtttctgctgctcgaccatcgccgcaaacaatcggaggaaaaggaggaaattgaggacattagcgaagtgtttttgaagacgctcaattacacgcgacggctgtccaaattcaaaagtcgcgagaccattcgctccgtccgcggtatcttcgctgggaaacacaacatgcacaagttcgaagttgctcagatcgccaatttgtgtcccgagacggcggaggaggcaaaagcactgatcccgagcctcgaaaacaaaatggaggacgaagaattggacgaacttttgaaggaattgcacgcgaagaaaacattccaataaaaattttttgtataatttctctatcttatcattttccctatttttttgttgcgtaaaagttttagtttttc

SEQ ID NO: 88769 - DNA, 659 bp, Heterodera glycines
gtccaattaagcctttaattttggtgaaaatgtttaaatttgcaaaaccgatgaccaccaccgccgctcggatgattgcgcgcaagtcgcgtttggaggtgatgccgatggccaagaagtacaccgagtcagactaccagcgtgagctcacttaccggcgttccgactattcatttcccgcattctgcgagtccgatgtcacccacttcaagcgtggcgaagtgcaccacaaattgatgcagggcggcgcgtcggagggcggcttcacattgactgcgtatgtgctggttgctttgctggagaaccacgtgcagaacaaagtgacggaattggcacgaagcaatttggtgtcacacctcgccgacttcaaagaggacccgtacgcgttgacgttgtgcacttatgtgctgcatttggcgaacagtccggagaagggtgacgtgctgaagatgttggaaggccttcaaacaaccggcaccacagatggcatggtccattggacgacgaaggtgtcaaacggtgccaaagatggctctggtggagcagcaaagaacatcggcgatgtcgcttgggacaccaaccagtacttctctcagccccagtcggccgacgttgagatgagcgcttatgccttgctcacatacatgctgctggacaac

SEQ ID NO: 88770 - DNA, 378 bp, Heterodera glycines
gtttgagattcaatggaactggaaccttttgtgaacaaatgtgtgtccattatcactggcgacgggcgaaacattgtctggactgcatgaaaggctttgatcaaactgtaaacattgtgttggaagattcacatgaacgggtgtacagtatcgattctggagttgctcaaattccgcttggactttacattgtacgaggcgataatgttgcggtgatcggagaggtcgatgaaacaattgacaaacaattggacttggaaaagatgaaagcaccaccgttaccggcaatttggattccttaaaatatctttttcgtttaaataaatttgacggattttaaaaaaaaactctaaaaaaaaacgccaggcccccaaaaaa

SEQ ID NO: 88771 - DNA, 596 bp, Heterodera glycines
caattaagccaaaatgaacaaattgtttggattgctaatgctttttgctgctttattggcccatttcattgattgtcgcccgatccgatcatcaaaacgacttgtcaaagttggagtccaattggacaacagcgaaaaaactgcttcagcatcaggcaacacatacaaattggagttcaccaacctttcctacaaattggtgtgccaagtcaaattccgtattgaactgcctcagacggcaactttggacgagtattggaacattaaccccatcggtcctgctgatgaccacctgttcacattgcctgttgaacaaatgtacccgggccgttccttcaccagtgctcgcgtcaaactgaacggtgttggagagccgaaagttacgataatggatactgtggatgttctgagcacaaaaccgtgcccaacagtgccaaacttttaatttggtaaataagcaaaacgcgagacttcaacccatttacatgataattgaagtgaattaatgataatgttcaaccatttctttaataattgttcttttttatttgggtaaaatttgcataaaatttggttttaaaaaaaaaaaaaaaaaa

SEQ ID NO: 88772 - DNA, 274 bp, Heterodera glycines
gtcagggcaaaattcaagaatgatgatggggaaaagcccataaaatggcgattttggcgtgatcagaaaaaacttaaattgatttgtctgattttgcatttagactccgtccgatcgatcgctcctcggcatatccttcccctcccctcccccaccaaataatccccttaattcatactcattcgcatttaaatattattttgtatgctaaggttaccaaattacgtaattaaaatatttagtttctaaaaaaaaaaaaaaaaaaaaaaaaaaa

SEQ ID NO: 88773 - DNA, 696 bp, Heterodera glycines
ttgagtttcaattagcactcttaattagaatgtctttttgtcgtgcgcccagcactttctccgtgccagctcaactttttgtcgacaacagagtccgtttggtgaaggctttgcgtgaaaaattgggcggcgctgctcccggcacgtgcgttctgttgcagggaggcaaagacaatccgcgctataacactgacaccaccgactcgcccttccgccaggaatcttactttttctgggccttcggtgtccatgaaccggaatgtttttgccgcggttgacgttgaaagtggcaaatcggccattttcccgcccaaaatgagtccggacagtgcaatttgggacggaaaaattcagcccgaaaaatggttcctggacaaatacaaagttgaccacgtgaactttcaaacgaatggcgccgaaattggccaatttttgcacaaacttttcaacgccaaaaaattattgcttttgaaggcagaaaatacggacagtggaaatgttttggagcccgcaaagttcccgggaatggacagtttctccaccgatttggcctccctttacccgacgatggccgaacttcgcgtcatcaaaactgaattagagttggctgtgcttcgttatgcctcaaaaattgctaacgaagcgcacaaagaagtgatgcgacacgttcggcctgagatgtacgagtaccaattg

SEQ ID NO: 88774 - DNA, 563 bp, Heterodera glycines
  unsure (1)..(563): unsure at all n locations
tttttttttttttttttttttttnnaaaatgctatattttcatagtcaaatcaataaaacgcatcatttgaaaagggaatacgatccaaggatcatcatcaatctcatcttttccttatgggcgttgcttctgctgatgatgactcagtgcctgatccaattgtgattaagttgggcgagtcattgagcctttctcagcttgtgcaaaaaattgaacaattacaaaaccgaactgttcgagagctgcttgttaccctacgtcgtcgcacgtacgaaatgcctgttgggcctcccgacccaaatggagatcgctttttccaaaatgggcatctcctagtggaagatgttgtgtacaattgggtaagaaaaacgcgtaactccatccacggaattgtccagcttcatgtgttatatgaggggattgcaatgctcgatgaagtcaattatcacttttagcgattggttaaagaaaatcttgcaaaattatttgccttaatatttcgtactatatgcgaatttgacaataaatttgttccaatgtnnaaaaaaaaaaaaaaaaaaaa

SEQ ID NO: 88775 - DNA, 732 bp, Heterodera glycines
gatttccatttgcactcaatttcgtttctcattttaaatggatcaattagaagtttttttgtccgagcatccgacggtggaggagagggaactgttcaccacttattctcttgcgggacgtttgcttcgtcctcttctgccgcgcgatgagaaccaccgacgactggtttatttcaccgaggaattgaacagcactgattactttttttctgatggtcagaacgggagattttgtgtggtttctctgcgacttatgcgtgccgataagcgtcagagaatgcgcgagtattttaacgagaacatggcagttttttctgaaacgtacgactgttcattcggtttccacgaactggaggcgatggagtgggacgtagcggtcattaaagtgtaccgtgagcacatggctcgttgctggaacgacatgatgggacagcttctgtacgtcgttaacatgtacgatcggggtcttgacccagtggatatggtccgcacgccgtctgctggtgagtcgtcgaacaatggctcggatcagtctgatgtgtctcataatgatccgttgccttcggtgtagcaaagagaatttggacggacattttcactccatgttttgaaacgttaagcatttttattgttacaccaaaagttaaaaatatctcgcaatttttgtggaataaagaacatcccaatgcaaaaaaaaaaaaaaaaaaaaaaaaaaaaaaaactcgagactag

SEQ ID NO: 88776 - DNA, 522 bp, Heterodera glycines
tgacacctttttgcaccatttcgacgtgaatacggtcggccccgtcatgaccaccgccgcctttcttccgctgctcaaaaaggccgcctccgccggggagttcgctcgcgtggtgaacatcggttcgtcgctcggttgtattggacaggcggccgtttcgcctcggctgagtccgtatcagaacgtggcttatggcatgagcaaagctgctcttcatcacttctccaaaatgatggctttggacgagtcggacattgtcaccgttgcgattcatcccggttgggttaaaacggaaatgggcggtgctaacgctatgatgagtgtttccgactccgttgcaaaaataatggcgcggatttgcgcactcacaaaaagcgactcgggaaaattgctataccgagaaaaggaattgttgccgtgaagaaaaaatgatgccaattcttcccaatttgccttttgccgactttgaaccgtttctgtgaaattatgcctatttttaggccacataaattcgtaatttaa

SEQ ID NO: 88777 - DNA, 628 bp, Heterodera glycines
  unsure (1)..(628): unsure at all n locations
caaaaacaaaaatttcttttgccattatggccaatccttcaaaaaatattgccatgctgcgcgaagcgcgctcctccccgtacattggcggcggcggaagcgtcggcactttgccacctgacgcgctgcctgcttcaggcccgatgcacacgcgcctgcaacgcaatcgtcgaccggattcggccaccgcgcccaacactgcacgactgcagaacgctgcaagcgctgaacattttgagcagttgaaggaactcatccagttcagcgctggctcgtcctcttcaacctctctgattgctgctggacgccattttggcactgaacaatccattgaaaattatgggcgactcaaagcggaaagtgtggnacaatttgtcggaggtcagcggcatttgtccgaccagcagcaccgttccgtccatttcggaaagtcgcgcatcaatcacttcaatgacagccaccgcggggagcatgagcccaactctgatggagacgaccaatttgcgttcatcagccaagcagcactgttcagagaccaatttgcatgtgcgggaaggcgttgttgggcttagagacaatggattcaaaattctcgaaaaatgctgttctgtggagctgtcgccggcaa

SEQ ID NO: 88778 - DNA, 902 bp, Heterodera glycines
attttaagaaaaatcgagaaattactcttcaattatataaaaacgattttcgtaaaaagattgccgcatttctccggatcgagggatggcgcaatcagctgaaaaaatagtttttgtgcgtggggctgacggcgatgatgaaaatggcgacggaagtgagattaagccagtaaagaccttactccaagcccttcgactttcgcatggaacttcggaagtcgattttttgcgcgtttctgtgtcatcaaaagaaggacaaaagcaatgggaaaagccatctaaatcggcgatgaaaaaggcaatttcgcgtttggaagaagaacgacgtaaacgggaaaaagcaacaaattccgcggcagcgaaattaacggaagaggcaaagtcagtcgcagaacagcaacaagaaatggcacgagaaaaacgtttggaagaagcaaagaaaatgcaagttaaattggacgaatccttgcccgaagcgaagcgaaccaaaattcgcgaatgtccggcactgtgtggccagcgggtgaaagtgttcgcattcgtccatcggatgagacagcaaaggaaaaacttgatgttcctcgtccttcgcgatggctccggcttcctccagtgcgttctcaacggcactctctgtcaaaccttcgaagcgttgacactgactactgaaagttctgtttgcgtgtttggccaaatcaacaaattgcccattggaaaagttgcgcccggcggcatcgaattgacggccgatttttgggaacttatccacggatcaccgcccggaggggttgacaatgtgctgaacgtggaggccaacgtggacgtgaagttggacaaccgccatttggtggtgcgtggagagaattgctcagccattctacgaattcgcgccgctgtgacac

SEQ ID NO: 88779 - DNA, 634 bp, Heterodera glycines
gtttgaggtacgacactttggtgtttatcctttcccttctcattccttctgacattgtaaaataacaatcaaaacaatcgcacgggtcatttgtgactgccatattattgggcaagaaaatgaaacgaactttgaggaaaatttggatttgtaacgacgttttgatggacattctgccgttttttgaccatgctcaacttgggctcaaattggcactgatttcgcctcattttgatgcactggtggacacgcattttgatggcaaaagcgatttgacaatttggagaagaataacaatttggggcttcggcgaaccgaaaataattgtcgagcgcaaatcggaagaatttccattgcccgaccgtccgctgcccagcaaaattcactttaaggaccttcacattcgcaacatttgctctcctgtctgtgaatttctccgttccaatcggcacatttttgacaaaggcatcaatttgcgtttggatatggatctgcctgcctccgtacagcgagtggtttcccggccggattggcattttctggtccaacaaatgttgcccatttttgtgccaaacattcgccacctggaattgattggctgtggcagcattgacatgttgttccacatttcgcc

SEQ ID NO: 88780 - DNA, 335 bp, Heterodera glycines
gttcgctgtcagacctgcagcggccatcagaccgggacctaaagcgccttcatatcgcccgccgcctgggaagtttgcgattttcatgaacatttataacgacccattccaatggtcctttgtgaaaagtgctcttggcttttgcgtgggaatttgtgctgctcgcattttgagtgaggaattgagttcagtataaatcatttgctcgcgcacattgttgatgtgtttctttgattgcatcgttaacaattgtgcctaatggctgttgatcacatcaaatttgaataaatacgattagaaaaaaaaaaaaaaaaaactcgagactagttctctct

SEQ ID NO: 88781 - DNA, 714 bp, Heterodera glycines
caagtttgagcgtctttccattgtccgatgattctgcaatttccattcggggattttaatgttttgttgctgcttacaatcagcactgttcttttggccagatgtttaggcacaattgtacagtttgaagatgaattagaattgatggaaaacaccgggacggcggatgaatccgccgatggtccgttgggtgctttttgggaatggcatcggatggtcgctggggctgacaaattcggctccatctcgcagcgaatgcttcatctgcgtccttctttgaaagtgccttccgtctccaagcgaattgccttcccttcgaccgccttcccaaatccaaatccgaacaatgccatccctccgccgaatgtcgtccgtcgccgtgcccataacattccaagggacaaacccccgtgccttcgaccgatggacagaccattccgagaacatcggacgtacccgcgcagttgggaaatgcccggctttgaggcgaccattccccgccagtgggactggcgaaatgtgtccggaaccaacttttgttcgcccaaccgtaaccagcacatcccggtctactgtggaggctgttgggtgtttggcactttgggctctctccaggaccggtttaacgtggcacggaaaaatcgttggccaatgactatgctttcaccgcaggaaattattgcgtgtaatggccgtggaagttgcaacggaggg

SEQ ID NO: 88782 - DNA, 567 bp, Heterodera glycines
gtttgagattattttcgttcgaattttatcattaaatatccataataatatatctcttctcccaatcaacaaaatgtgccgtccttcgttcccttcaatgtttgcttttctgctgctcgttgctgctgccattgctctgatcattttgccttccgcttcttgtgcccctctcgacaatgcccaaggcgtcgttcccgacgctgcccccggcatcggttccgccagtgccgttggcatcgctccgcgacatcggaggcaatggctgtcggccgcccgcggtgccggcggagactccggcagtttttggagtctgttcggcaaaagatgaaaagccgtgaaggttccgtgccaatcgagacaaaaaactggtctttcaatgcccagaaacaacgagattaatacaaaatcattctctttttgtatattttacgggataactaaatttagaattccaaaaaatatctaaaaatctctgcttttcagtttaattggaattttaaatttattacaattttttcaacatttttgtcatattgacaaatattcagaataaattttacaaaagtg

SEQ ID NO: 88783 - DNA, 651 bp, Heterodera glycines
gtttgagagtaaattatggataggagattcactgtcttccttgtgatcgcattggttacttctatttatgaagtgcttagtaatggaaatttgaacgatggcgacgactcatttaaacaattcgatgaactcgaagaaaacccagcgcataaatattcaaaagaggcccagaaggggttcgaaatggaggaggaggaagtcacaatccgagaaccttcggggacgaaggaatcgttcaaattgcccatcaatatgccgccagtgaaattttctttttgtgtctcatgtggttatcgccaagcatatgaacagtttgcgcagattttacgcgaaaaatatcccggaattgacatccacggcgaaaactatcctcccggcattcttcgcacggtgggagcgcaggtcatcggaatggtcaaaattgcactgattgtgtgcgttgtgtccggaaggagtcctttccccaccttgggacttgaaaccccaactttcttccaatggatgctcagcaatcgtttgtctgccgcacttatgctttttttattttccaatgccatcgaagggatgctccaatccacaggagccttcgaaatttacattgaaagcgaacgaatttggtccaaattggaaagtggtcgcgttccgtcacct

SEQ ID NO: 88784 - DNA, 608 bp, Heterodera glycines
gtccaatcaagtttcgaatttaaacataatttccaaatgaccaacgaaattacgcccaataccacctttggagacataacatcggaccgagtgttttatcgtcctacttttgtgaccggtgatcagatggatttgtccctggccgcgttggcactgcgcgaggggagcaaatcgccaacggaaagtgtgtgcagtttcgacttgatgtccgctgttggggaggacggagagcaaaacatcgccgacgaattggcttccaatggaactgctggagaagtggaggagcagcagcagcacactaagcagaacaacaagcagaataatgaaaagaagtgtttcgccattctcaaagttcgaccgattagcgtcaattcgaccgcggcgcattgtccgaatttgaaattcgaattcgtctcgaaaaacactgctgacaatggcacaacgcagcagcagcaactttccactgccgcttcttcgtcttcctcctcagctgctgcttcttccgctgacgaagtgccaccgattgccccttccgttggccaaatgtccgtggacattttgtcgcgtcattttggcctcacatgggaacagctgatggcacagtttgt

SEQ ID NO: 88785 - DNA, 659 bp, Heterodera glycines
cgccgatgctaaggaaagcacaaatgaaacgataaaggacaaagaaaagatccattcgcgaagtgatgtcggacaattgatgggcacaagcggctgtgtaagaacagacaaagggctgctgcttcttgacagcatttggaaacgaaagtggcatcatcgtcgctcatccaaatctgttcatcctcaacacagccgcaaaaatattcctggagctgaagacaggcgatgagctgagccatgtcaatctcctcaggtttatccaacaaaatgcgaagacgacaactggagagactggccaacagacgcaggaattgcttatccgacgattttagccaatcggcgcccaaactttgtgccgcacaatagctcagttcgaagcataatttgacatattcctccgggatattgaaagtgcgcaagagtctgttaagcacgacgcgaaggtcagcaggccaggaaagggaaatgtattcggctcgttgttttgcgagtatttttggcgagttggcgagaaaatccaagcattgtttaatctcatcaagaaggtcagacggagggaattcactcgtgtcctccttaattgttcgtaatagctgattaaggcaagaattaagatcatccaattgctgagaattcattcaaaaaagcgctaacaaaaa

SEQ ID NO: 88786 - DNA, 607 bp, Heterodera glycines
ccaagtttgagaaaaaacaaaataaaatattcgttttgaatggattacgccaatcgtcacacatgttgttggggaccgttccgcaccagaattgaaacgggaaccactgtgatggcattgttcggatttgggctcggaattctttctgcaatttccagctatgttggctttcacaacatctatgccggaatggtgtacctggcttcgtctcttttctatctgtcggttattattgccatgaaaaagaaggagccgtcactgttcctgccttatctgattttcgagggtatcggcttgttatgcgcagcggtgatctcattgactatgtttatctttggaatttggtctccacagcaagccttctctactaaggaacaggaaatgaattttcgttccctcatgcttttctttgccgccaccgtgggcattgacgtcgctttgaacgcctggttctactccatcatttaccgcacctacaatttgctcaaaaagacaacaaagttggtggcatcggcttccgccgtcgcttcggcacgcgtgccgccgcccgtgtgatttatggcgagagattgatttgatgagtaataacaatggatggatgtgatcg

SEQ ID NO: 88787 - DNA, 632 bp, Heterodera glycines
attaaatcgtcacattacaccactaaaaggctcatcattttgcttttaatttacgcgtataaaatgaccttgcgcaatgatactccgatgcctccggacgaagaattgagagtgcctcatgagatttcgctgtcttcgccttggctaagggctgtggcggtttatatgggaatcgcctgcgagaaggaggccaaagagtttatgcttttgcgttccgaacgcgacaacgacccgcgcaaagcgttgccggtaggggcgcgcagtgactgcgtgcgctatcaattttttgcgcaaaatgcgccgcgagtgcggtgacgaaatccgcgactacgccaattgttttcacagagagtccggcagaatgcatttgcatcagtgtcgccgtgcacaatttcctatggatatttgcgctgacgaaaagctgggcgttcgtcgtccgatggtcggttacttcaacaaattgcatgtgcacgaaagcgctgtcccaccgccggaccctttggaaagacagaaattgtatcgcgattacaaagcggaggccgccaaattgttagaagagctcccggaggattggaagacggaccccaaatcagttcaagaagtaccggaacaacttcgttttcgacgcgttc

SEQ ID NO: 88788 - DNA, 621 bp, Heterodera glycines
gtcggacattcaaaaagcgattcaggcactggaacgagaatacgccgaacagaaagagctgttcgaaaaatggaaggaagaaaatgcatccgaagctgatactgaaccatacaatgcatatgtagagcagttccgaggatgggagaaggatgtgatggacaatttgaaggaactgcgggcatccatcgcccgacagcccgtggcgccggagcccgagttgcccatggtcgacctggacactcagctgaacaacttgttggaccgtgtcgatactccgcaattcatcatggcttttatgagtatgagccaacaggacccaacgtttttggcaaaggcatttgaggttgtgatggaagagtgtcgtaccaccggcttctccaatccgattatgccccaaagtgccaccattccatctcttcggcctgtccaccgtctgcccactccgctccaccaacaaccgcccggcgtcccttccgcttcgtcgtcagcacggcatcaatcggcgagaagtcctggctctttgtacctgccgcctccgctgcagcccaaagcgtatgtgcaaggctcatccctgctggggccatctcggccaacttccaccgtttcttacacgcaaattac

SEQ ID NO: 88789 - DNA, 1267 bp, Heterodera glycines
catacatattatttgaaataaaccaaaatggctgtccctcaggaagtaattgacaaaattgaggctggctacaaaaagcttcaggcggcggctgattgcaaatcgttgttgaagaagtacctcaccaaggacgtcgtcgatgcatgcaaggacaagcgtaccaagctcggagcgacttttttggacgtcatccagtcgggggttgccaacttggacagtggtgtcggcgtgtatgcgccagatgccgaggcttacacactcttcaaaccattgttcgacccgatcatcaacgactatcatggtggctttggaccgagcagcaagcaaccggcaacggaccttggtgaggggaagactcaactgctgacggacttggacccggaggggaaattcatcaattcgactcgcgttcgttgcggccgctctcttcaggggtatccattcaacccatgcttgaccaaggagaattacgtcgagatggaatcaaaggtcaaagcggtcttcgagcagctgaagggcgatgccgagttgggaggcacctactatccgctccagggcatgaccaaggacgtccaaaatcagctgattgccgaccacttcttgtttaaagagggcgaccgttttctgcaggaggccaatgcttgccgttattggcccaccggacgcggaattttccataacgccaagaaaacctttttggtgtgggtcaacgaggaagatcacctccgtatcatttcgatgcaaaatggcggcaatgttggacaagtgctggagcgtctcataaagggagtcaaggccatcgaatcgaaagttccgttttcgcgtgacgaccgtcttggctggctgactttctgtcctaccaacttgggaacgactgttcgcgcgagtgtgcatatccgacttccgaagatcagcgcaaaacccgacttcaagtccatctgcgacggcctgaaattgcaaatccgcgggattcacggcgaacattccgagagcgctggcggcgtttacgacatcagcaacaaggcccgtcttggtctcacggagttcgaagcggtgaagcagatgtacgacggagtgaaacacctgatcgaattggagaagaaagcataatgggaggaccgatctatgatgatgactttatattgcgtaatgtggagatttgctagttgttctgaatctcttaggctttaactatttaattattgtcccaaaatcgtgcttcatccgtatgattatttccgtgcataaatttgttcgtgttcaaaaa

SEQ ID NO: 88790 - DNA, 499 bp, Heterodera glycines
gtccaattaaggtcgtacatttatttttgttgcttcgatgtcgccaaaatcgtctcatgtcaattacgatcttctgccggaagtttctcacaccttccgcagccctgaaccccgaccatctgttctagtttctgacatgttttctgttttgtgtgcttcgccgcttatcatccttttccttttgtggcttcgtattggcatcaattttggaaaattcaagttttcgctcagtgctcttgggtttcatcttggtctgtgtgctgtttttgggctctacgttttcttttggctcgagttgaacatgttccagacgttgaaatggctggctgttattggcgtgcccactttgttccttggaagtcgtctttccttttaaaaccaaggctttaaagcttaacacacaattttttgggatatattgtatttcttaatttatatgttgggaaataatattatggttttttaaattccatttatcccccacaaaaaaaaacaaaaa

SEQ ID NO: 88791 - DNA, 621 bp, Heterodera glycines
gtcaaattggccactgcttccgacgatgcgaccgcgcgcgtttgggacttcgcgcggtgtgcggaagagcgcgtcatgcggggccacggagcagacgtccgatcggtggattggcacccgacaaaaggacttttggccacaggttctcgcgactcgcagcaaccggtcaaactttgggacgtgaaaacgggccaatgcttggccactcttcatgaccacaaaaattcggtgatggctgtccaatggaatcggaatggcaattggctgctcaccgggtcgcgcgaccacgtgatcaaaatgtacgatgttcggatgatgcgcgaaattcggtcattccgtgcacacaaaaaggaagtgacatccctcgcttggcaccccgtccacgagggactttttgtcagcggaggcggcgacggatccatcggttattggctggtcaattcggagaaagagttgactctgctcgagcaggcccatgacatggccatttgggctttggaatggcacccgctcggacacattttggccaccggttccaacgacaacaacaccaaattttgggcacggaatcgacccggggacacgcaggaggatgtgttcggcatgacaagcgtgggaggg

SEQ ID NO: 88792 - DNA, 624 bp, Heterodera glycines
gtttgaggtaattgcatttacaattgtaatataaatgtcttatgcttttgttcgacaaccgcacaaaaattcggtgtgccttatgggatggccaacgacaaattcggtgattatcagacaaaggcacggcgactgaaactgaacaggcgcgcatttattggccaggaagtgggctcagaacgaagagcgaaattgaggaggagtttaaatgtgcccgcgacggcaaatacccacaagagaatttggaagattggtcaatcacaggcaaacggagtttgactcacaaggcgcttttccattacacggaccgtcgggcgggcaaaggctattccgactttgccaccaccctttactacggtcgcccttacatttggccgcccgttcgcgaaattaaccgatggcactttttcatttgtgtgacctttgccctggttattctcgtcgactgcaaatggtttgtttcgtccttcgaattgtttcgtccgcccaaatcggaagccgcgactttggaaggcgactcggtcgaatttgaggatcggaaaaaaacttcagtttcgacgaatggtcaaatttagattaattcccttggaaataaattcagttcaaaaaaaaaaaaaaaaaaaa

SEQ ID NO: 88793 - DNA, 670 bp, Heterodera glycines
gtccaattaagaaaccgaaaggaatggaaatcgaagaaaatggcaaagcgacttcatccgaggactccaacatgaaatggaaaactgaagaggataatttgtccgggacagcggagcaaacgaatccattcgatgacccggtgcataggacgaagtgtctcattcagtacatacggcttcgaaaacagcgtgccgaagcagaacaagcgaagcgaaatgcaatcaaaaaacagaaaatgaccgcacgtgcgaccttacaaagtgcgcgagaggaaaaggcagcggcagaaaccgaagaaagacaatgcgcaatgaaaatcgaggagctgaaccaggagaagcaccaagtgttggctgcactgaaagccattcacagccgcgaaacggagcggaaaaggaagcgggaagaacaagaaagacagcgccgtgcactggcggaggaacagcgacggaaagaagaacagcggagaatggcagcgcagcagcagccacaacagcagcaacaacaacaatcactagctgcgcttgagtaccttttgcagctgaaaaatgcgcaattaagtgcaataatcgcatcagcaacgggcgaaaacactcaattgggcacaccggcggtgggcggacattcgcttgcttcttccctgcccccttcgattctctctcttctcat

SEQ ID NO: 88794 - DNA, 837 bp, Heterodera glycines
gctcaaagaacagcagcggttgcgcgtggcgttcaacggcttcatggagcagcagccgagcttcgtccccacctacaaattcgacccgggcacacacaattgggacacgagtgaaaagaagcgtgtgccggcgtggtgcgaccgcattttgtattgggtcaaggacaaaaatgtcggcattgaacaagtgacctacgaatcggcacaccaagttgtgctcagtgaccacaaaccggtgctgagcacattcagagtccaagtgaagaaggtggacaggcacgagaaggagcgcaatttatgagcagttgttgtagggaagtggacaaacgtcaaaatgaacttttgccccaaattacattgtcaaacacagaattccatttcagcaccgtcctcttcgaccagccatcgttggccgtgctgaccatcacaaacactggacaaacgcccacccatttcagcttcaaacccgcgaggcccgaggctgacagattggaggaatggctgaccataacgccgctctcctctttcatcgacgttggtggtgccgtggaggtcactctgcaaatcctcgtcttcgatgagtcggcctgcaaagtgccaaaggatggcgccgaattgagttccattatcattgtgcatcttacgggtggaagagattatttcattgttgtggacgccaaatatcagcgagaagtgaaggatttgatcagcttcaactaattttaatttttgctttccaacccaaaatttaattcatttgtttgttctttttttgtgacataattccatatcccaaaagcactcaacctaatgatcaaccaattagcattattctaa

SEQ ID NO: 88795 - DNA, 626 bp, Heterodera glycines
gctcgtcaggaggcccatcaaataaggggtcggattcgactgctcattggtgacagagatttggaattggctgccaatccatcgccgacaacaaatgaagacgttaattacggattccgttttatctcggaaaacaatcttaacgccgacgacaaccaacaaatccctaacattattgcctttggacgagaaaatggtgaggcagacgatgaccaaaacgagaacaatagcgaagagggaagagagatcgaacaaacgcaaaacaccaccggagaagaggaagaagaagacaacgcaaccgacgacaatgtcggcatgagttccactgaaagtgatggccaagacaaaatgaaagccaacaacggaaaagggacttgtaaaaatgaagacgaatccaagccaagtccaacggttgaaacagaacagaataaagtgcatcagtccgcttctgaaactgtgataagtcaaaaggccaatgccaacaattcggaggaatgtaaggaaagcaatggagagaacggcacgcgcatttcaatgaaacgacaacggcgttcacattcagtggacagttcgccacagcaaaagcgagtcttttcacgcaaaaattttactgccgaggacaaacc

SEQ ID NO: 88796 - DNA, 387 bp, Heterodera glycines
gagaacagaaaaacaaacgctcataatcactattccataaattcgacccaaaatgagcaaaccaattataaaagtgcgaattgttcagattattgaagcagacgaagctgctgggcaacctaagcaagtggtggctgagtatgtggacgacccgagcagacgagttaccatgaaagcaagcggagaggtccgaattggccaacttgttgctttctttgaaggtcctgacagaaaccgcattcagcgatgcttcacgaacaacaacaacaactgatttgaaggatttgataaaaataaatttgaaaaacgtacatatgtaatcctttttgaaagcgcaataaaaaaagcacattaaaaaaaaaaaaaaaaaaaaaaaaaaaaaaaaaa

SEQ ID NO: 88797 - DNA, 375 bp, Heterodera glycines
gagagatgtttgaccgcgtctttcttcgctttaatccctttaattgctcagcgttcattgggaaagcttctccagtcgctgtgttgcaggtgcgattcaactgtccatggcatcggagcggttacacgccaaattttttcggttttaaagtgaaaagaaaactgaaaatgcgaactgttgaacggttgagtcagacagaaggaagtcggcacattttgatgagacgcgtcctctcagagaaacattttgtcgcatggaattggccatcaaagaaaccgcggaatgatcgactgaattaccctctctgatcgttgacattttgttgatagaataaacgctttggattgttaaaaaaaaaaaaaaaaaaaaaaaaaa

SEQ ID NO: 88798 - DNA, 884 bp, Heterodera glycines
tagcaaaatagctggggaagctgtagcagttgggacaactgtatcaactggaaagagcctaccactaccaccatctactcctgtatcatctatacaaccttctgggattttgctaaataaagcaggtaaaagtgctgatagatgtagcgtatatcctgctagtcctgctcctaaggtacttttccatcatatagcggttggaccagctggagcagcggtatcaactggcaataatgagtttctatctgaattacctttagtagagaagaaaaaagagcttcttttaaaagaaatacaaaataaaaacgaaagagagggggtaatacagaaaaagggtcctactctgccacctaaaccaacacaaagtgatgtcacccctagcaaaaggagaacagaacggttgctaagtagtacttcgaatagcgcatctcctatttcaaggttaagtaaagaaaacgcagatctacaagctgaattaataaaagcaatgtataagagacgcaatgattctggttacgatgatagcgaagatgacagcgaagatgacagcgaagatgtttctttggttgctatgaaagctactgaaagtggattagataatgggaatcaggtaaaaaatggtgttatttctagcaaaacgggagcaggaggggcctcttctagccaagtagctagagtagttcaaggaagaagtagtacttcgaatagcgcacctcctattaacgctgtgcttaatgaacaaataaataatcttttaagtgatattcaagaagggaagtccctaaaaaaaacaaggagatggaaagtaaaagaaaatggagaggtggaattcgtcaaagaaacacagccaagtgagggggattcggtcaaagaaccacagccaa

SEQ ID NO: 88799 - DNA, 410 bp, Heterodera glycines
  unsure (1)..(410): unsure at all n locations
gttctgtccttcctaataatcatttttatcccttttctcattccaatatggcagtgacttttgcggatttctttaaagtcatttgtgccatcattttaccgccccttggcgtttttgtggagacgggctgctccatccaccttttgattaacatcattttgaccattctcggctacatccccggcattatccatgccctctacatcattttccagtactgatgaagatatcgcaattgtgaaaattcgatcagttaaaagaattatttttaatttgtcaatttgcttttcaacaatatcggatgttttttgtgatatgtaacagttctcgccaattctctcctccattttcacttctcatttcagaataaaattatggataatttnnaaaaaaaaaaaaaaaaaaaaaaa

SEQ ID NO: 88800 - DNA, 853 bp, Heterodera glycines
gtccaataaagatttgtctgatttcaaattggattgaaacttgagagtgccgatcttaatcgaattttgaagataatttcagaattcccatatattctttcgtaaaatgccccaaattttggatggaataaagcttgactttcgtgatgttttgctaatgcccaaacgttcacagctcgccagtcgttcagaagttgacttgaacagagaatttgtttttaagaactcgaaagcgacgtacacgggaattccaataattgcatcgaacatggacacagttggcacttttgaaatggcggaaacactcagccaatccaatttgttcactactgtacacaaacattacagtgttgaggaatggaaggaatttgctaatcgcgtcagaaacaattcgaatgtgctcaacaatatcgctatttcgtccgggtcgcgttccgatgaccttaccaaaatgcgtgacatttgcgacgccgtgcccgaaataaaattcatttgtctcgacgtggcaaacggctattctgaaactttcgttgactttgtgcgcaaagttcgggaggaattccgcacctccacaatttttgctggcaacgttgttaccaaagaaatggtggaacagctgattctgtcgggtgccgatgtggtcaaagttggcattgggccgggcagtgtgtgcaccacgcgtaaacagactggcgtcggttatccccaattcagcgccgttttggaatgtgcggatgcagcgcatggactcaacgggcacattatcagtgacggtggcacaacatgtgccggcgatgttgcgaaggcatttggcggcggcgctgacttcgttatgattggcggacaattcgct

SEQ ID NO: 88801 - DNA, 290 bp, Heterodera glycines
cgcaaattgcgcaacgatgtcgccacggaatgtgccaatgtcgccattcatcgccagcagcagcagaagaacggaagtgccatcatcatgcaaacttaagcagaggacggacgagtgggatgaagaatgatggtgctggtgccaacaaacattcaatgcgatgaaatgatataaagcataatatgtatttctcagctgtattccattgtattgtatattccattatatcgcctatatgcgtatgcatggtctcaaataaactcacctagaaaaaaaaaaaaaaaaaaaaa

SEQ ID NO: 88802 - DNA, 781 bp, Heterodera glycines
  unsure (1)..(781): unsure at all n locations
gtccaattaaggattaaaaaatataattcggaatgggattttcgacaaagccaataattattgacggaaaagatcatttgcttggacgtttggccgctgtcacttcgaaacagcttttgcttggccagaaaattgttattgtgcgatgcgaatccatcaacatttctggcaacttccaccgttccaagctcaaattcctcgcatttttgcgcaaacgctgcaatgtgaagccatctcgcggacccttccactaccgtgcaccatctcggattttctggcgcacggttcgtggaatgcttccgcataaaaccgcacgaggtatggaagcactgaaaaagttgaaatgttttgacggatgcccgcagccgtatgacacaaagaagaaattcgtacttcccaattctcttcgccacatcgcattgaaaccgcgacgcaaatattgcacagtcggccgtctcgctcacgaagttggttggcagtatcaaggcgttgtagagaaattggagacgaagcgaaaggtcagaggcgctgctttccatgagaagaaaaaggcagtgctgaagctgaagaggaaggcggtcgaaaatgcaaagccaaagacggcactgttcgacaaaattctcgagcaatacggacacgcgtaaagaagacgacgaagaccagtcagaaatgtgggaccgtttacggtgaataatcaccttttttgttgttaccatttgttgaatgaaagtatttcaaaaagaaaaatttttcatttcttaanaaaaaaaaaaaaaaaaaa

SEQ ID NO: 88803 - DNA, 425 bp, Heterodera glycines
attctcgaagaagaaatgaagccatcattcaacttcaaacttttcgcatccgtctttcttgtgctttgtgtggcctcacttgtcctctgtcagcataagccagcagcagcatgtaaaccgcccaaaaacgtgggaagaggcaacttggcactcacgcgatggtggtgggacggccgtagttgtaagcaattcacctacaaagggcagggcggcaacacaaacaatttcccatcaaagaagctttgtgatcaagtgtgcaagccatgaatgagtcgtggaggtgcagcgtgaagagaccagcaaaagaagaaaagtgaagaaattaaaagaaaaatttttcaaaaaataaaattgtgcattaataactacataatgatttgtggaataaataaaattgcatctgaaaaaaaaaaaaaaaaaaaaaa

SEQ ID NO: 88804 - DNA, 759 bp, Heterodera glycines
ccaagtttgagatttttttccaattcctcagcctgaaaatttattctttgacaatggcacaacaccaggaatcgttgatccgtcagaattttgcagctgaaactgaagccggcatcaacaaacagatcaatattgagctgtacgccagctacgtctacttgagcatgtccttttacttcgaccgtgaggacgttgctctccacaacattgcgaaatggttcaaaaaacagtccgacgaagagcgtggacacggcaccactttcatgaaataccaaaactctcgtggtggtcgtattgtgcttcagaacgttcagaagccggagaaggatgagtggggcagtgccttggaagcattccaagccgctttggctctcgagaagttcaacaatcagtcgctgttggagctgcacaacctcgcttcccaacaaggcgactctcagatgtgtgactttcttgaggacaaatacctccgtgagcaggtcgaatcaattgaggaaattggcaaaatcatcaccaatctcaagcgtgttggaaagggtttgggcgagtttctttttgacaaggaatttgccgagaccgactgaatgaatgtgcattttggacacattcaatgggttgccactggctgaatccaataactttgcagattgtcagatcatttacgaattttattaatctctccaatggcgttcattctcctttttctctccgacatttataaacacgtggataaattaatgaatgcgcaaaaaaaaaaaa

SEQ ID NO: 88805 - DNA, 793 bp, Heterodera glycines
gtcgctatttcaacgaattttcggcggcggttcctcaacgccaaagaagcaatttgctgatgcgggaacgtcatgcagtccagcaaagaaaatgatgacgccgagcacaattggctttcgctttcgaaaaccgcgttggcccctctccaatttgcgttcttcggctgtctccgcaacggcactgacaaaacgctcttccaaccaaatcccccaaaacttccgatggcatctttcttcaccaattctaacattggaaaagtcagcggaagatcaaaaaaagcaaaacgaatgctgcgaaatttcaccgccaaacgccacaaaaaatgagggagaagaactactgtacgacgacagaatcaaagaatggatttatccgatggacgtcggcccaatgattgaagaattggagaaattggcctatttttgtcgatcgcaagaaaaagactctgtgatgaaccatttgcgggaaatgcccgttggccatttcgcgctgcgactgtccggcacgaggcgaagatttttggcactgagtatccgagtggaaagggatgagaagaatcagaaagggattgcccactatttggtgcttcgcaatgagcatgggtttcgcatcaaaggttccaagcgttacttccaatcgcttcccatgctgatcacccaccactcagtgatcactgaccaattgccgtgccgtcttttgctgtccgattggcgttggacacggggagacgcaaatcaacgacgacgtcaaagcagcgggggaagcactttggcagtgctaagggcaaccgaa

SEQ ID NO: 88806 - DNA, 492 bp, Heterodera glycines
ctctgccgagggtcgtctgacggacagtgccgccgccgtctccgcgccgtgcgattggctccgcttgttcggccttggcccctcttcgtccgtccgtttccattctcagcgatcgcttctcatcgtcaaagtgttggcggagcccacaaaggtgttggacgtgtggctgaacaaagacttgccgagtcagaaggcattggtgcgcgggttggtccaactgttgcgcgacgacttcaaggacgagtccatcatgtgccaaagtcagtacaccggctgtatcaacgttctcaaaacgtgtgactctcgtctgaaggctcttatcacctctctgaagtgatcggcgattcgcttggcggattgcctacaatgaatgatttttgactttaaacttttacatacattaatgcttttacagttttttgttcttttttcagtttcgcttatgtcatcattcattcttaacataacataaagcattctttctcttaaaaa

SEQ ID NO: 88807 - DNA, 252 bp, Heterodera glycines
caccaagctatggagccccagaaccgccaagctatggagcacctccgccaccgccaccgcctccgccgccgcctccgccgccgccaccaccgccgcctccgccaccaccgccgcctccgccacatcaaccaaaatatcctccacagcaataagcgcaagatggatgcaatacggatgagataatatggagataaagctgatattgataattaaatgcgctcactttgttaaaaaaaaaaaaaaaaaaaaaaa

SEQ ID NO: 88808 - DNA, 721 bp, Heterodera glycines
gtccaattaagctagtccaattcggttgatctgctaattgtaagagcatcctttgccaatggataatttcaaaaactctgctaacatttcgccggtcgacgaactgtccgagtggaaaggccgtgctttgtttttggaacagtccgtgaaaaggctggtgcaggagaatcgcgagttgcgccacgagttgggacggaccaaaaatcaggtgatgcaatgtcagaaggactgtgaagaggcgcgccgacaaagggaccgcgaagtgaacaaaaaacggaccattcagcaatttgaggaggaggagcgtcgtgcgcgtgcaattgcttccgccgcctttgctgaccccgtgccgctgacggcggacgaacgcggccatgccgaactgatgaagcgcatttcgccgatgcccatgcgacgcatcatggtctccgccacgcagaatcagcagaaaaccgaagctgcggcgcgtgttgtcgccgcttacgaccgcacggcgatggcggcaccggcaccgcaatttgttcagcagccgagggggcgcacttttcccaccgctttgtcagtgtttggcgaatgcgtgccaaataattgtcgtcgtgtcggagcaatgccctcaaaaaacatcgtcggagttcgcctaacccagcagaccaattctgtggcaaacgcttcgcaactgaagcgaacttttcctggaaagtgagaaatattgaaacgcaga

SEQ ID NO: 88809 - DNA, 546 bp, Heterodera glycines
gttaaaccaattaattacagttgcacttgcacgttgcactttcttgatttcttcacaacaagaacatttcgtataaaatgactcgcggtaaccaacgcgacttggccagggagcgcaatttgaagaaacagcaacagcaaaaaaagcaagagcagggcacgtccactgagaaacggatggaaagggacgcagaagcaatgcgcctaaaacagcagaaagctgcagcgaaaaaagccgaagaggaaaaggcaaatgcacaagcgccgaaggtggtgaaagtggaccctttgaagggactgtgacaagcgaaaagaaccactcggctatgggatgcacaaactgacgcttttccgtgctttatttagtcaatttttcgaattcttttcagcaaaaaccataattaacaaaacttctgcccataacaaaagcatcgcatttaagctatgtagttgaacgccttcatattctttcaaatgcttcatgtttttatatgtgtgttacgcttcaataaaggctatccgtttaaaaaaaaaaaaaaaaaaaaaa

SEQ ID NO: 88810 - DNA, 708 bp, Heterodera glycines
caagtttgagaaatatttcgaatttttaaaatccaattaaaatggcccatcaaatggcacgagcggcgatcaacaaaggggcacgagtgctgagtgtacttgagaaggtcaaattggtctgctggtttgaggagacgcattcctttgcgcaagttgctcgaagatatcgggccgagttcggcatggagccaccgcaaatggaccaagtgaagaagttgcaccaacgattcctgaacacgggctcaattctgaatggcaccaccacaccgcagacgatggcaacggcattatccgccggcatcgatgacgtcgtggtcaaccaatcccagcaaatgtcggtggtgtgcgatgcgggcgcgttggatgccgaggaacagctgagaatggcacggatgtgaaatggtgttgttgttgaacggcgagtaccaagaaaaacaccaagacaagttccaacatttttgtaaaatgtactttttatacatagtctccctcattttgaatgccttttcggtgtcatgacaactcatacaattggcttaggctaggcctagaattaggcttaggcctaagctttattcctatgcttaagcttaggctttttgtaaaaaattttactgtacgagttgccattgacgtgccttttcactcccccattgccgtgtcttatttttgcacgaacgctcatctctcaatctctaggctagggct

SEQ ID NO: 88811 - DNA, 829 bp, Heterodera glycines
ccaagtttgagaagttatatttaaacaaagaaacggttaagctaccagcagtaataatacctactaagtcagttgttttctgtcaccaatgctggttagtgcgcctctcatccaacaacagcaacagcagcaagtgttccaacaacaacgcccttccacttccgcttcttccgccgatgctgttttgcttccgcatgccacggaagcttctgcaccaactccctatcagcagcaacaaacggaggatcagctcgaattgccgacctccgtaccctccgctgccgactcccagcgccaacaccgcgccacccaacaaccgcagagattcttcaaatccggatcgggtatcagaataatcgacaatgatttgccggagggaccgggcagaaggcttcgcaaaaatgtggccaatgttcggaaacacatagactacatcgcaaacgcactcaatcacatggaggcacgcctttggcagtctccgcaccgtcgccaattgcggtgggaacgtccggtcattcagccggacattctctaccagtcgtatgtgttaatgccgaaacttacgccagaagtgccggtggattgcgttttgagtaaatttgtgcgtgccgcgatgaacaaagtgaagtgtccgatttactcactttgctggaccccggagggcaaacgactgatcaccggcgcatcatccggtgaatttacgctttggaacggaaccgcgtttaatttcgaaacgattctacaggcgcacgacgtggccattcgggcgatgaaatggtcccacaatgaccaatggttggcgtcggctgaccacgacggctttgtgaag

SEQ ID NO: 88812 - DNA, 427 bp, Heterodera glycines
  unsure (1)..(427): unsure at all n locations
aacaaatttacgacgatgggcagcgcgagactcggcgaggcgcaacgaaagcaacttttggagcctttgctgaaggagggcgggtggcaaatggagcagggaagggatgccatcaaaaagagcttcactttccgagactttaacgaagcgtttggcttcatgacgcgcgttgcactaaaggcggacaaaatggaccaccaccccgaatggttcaacgtgtacaacaatgtggacataacactgagcagccacgacgtgcagggcatttccgagagggacgtggcattggcatcttttgttgaggatgtgttcaaagcgatgaacttatgatgatgacgataatgaagtgttatttatacaaattattttcatctcaaacccgaatgcgaatataaattcatttcanannaaaaaaaaaaaaaaaaaa

SEQ ID NO: 88813 - DNA, 634 bp, Heterodera glycines
cacaaattcagccgaacacttttgttaaccaaacatcgaatagtcttggccgtttctgaccacatttcaatagcgtacatctttgtttcttacattctctactacatatccctgccgcttatttggctcttcaattgtatgcacaattggagcaagccaatcaaaacaactccatactcaaaacgctgtggcctcaacagttcgctgattgggcctcgggaccgaactcccgagtttaatatgccgtcttcgtctgacctttcgcgacagccgatcagcagcacaccgttccgtttccggctgaatttcgacgatccgtctgcatacagtgacaatgagaatcggccctctccagccaaccaaacttccgtctctctgcctgacaacggctgcaacgtttctccgtacgcgcgttacacgggcagcggagactcaccgaccagcagtcggtccggcaacggacggaagcggcgcccgcgcagaggcgacgaattgttcatggacagacggcacttgcgcaagagtcgagaggtggaggaggatgaactggacgaagtggaaaatgactacacaatgggcgacgactgacttttctaatctcctttgaaacggtgctgactatatattctattct

SEQ ID NO: 88814 - DNA, 669 bp, Heterodera glycines
atttccgtaaattttcaacccaaaattcgattcgaaattccaaaggtatttcccttatgaccagcaaaactgcacattggtgatcagctcatggacgtcggacataaagcaaaaataaaattgataattaaaataattacttaattggcttaaaaaggtccattgactattggccggacagtgaaacggttaatctttactcattcattccaaacgaagaatgggaagtgatgtccttcaaaattcatcgagtggtggagaaattcgtctgctgtgatggtgaatctcgttctgcccacttcggtgatcactttggtggcggtcaccggctttttcacgcccgcctccaccagcaatgaacgccgcgaaaagctcagtttgggcatcgattcgttattggcaatgtccattctgatgatgatggtcagcgaacaaatgccaaccacttccgaatatgtgccattgttcggtctcttctacctgtccatcattgtcattattttttctggcactttgatcaccgccctcgtcctcaatgttcaccttcagaagacctataatcgtccgattccgcctttgatcaccttcatctttttccataaaatcgccccttggcttggcatccgtccttcaacaattcttttggaactttggcaagaaactggagtg

SEQ ID NO: 88815 - DNA, 494 bp, Heterodera glycines
aaaaataataattttgtctcaaagtgccaaaaattgcaaagatttaacccaccaaaaccccttttatattttgaaaatgttaattctattgttcaaccaccaaaatcacaccacagtaaatgtgtcaccgttaaagtgatatgcatccattccttcgttgaattctgttttttttaaaattttcccggatgctttggcataacgtcgtcccgtgttccccgtttgaaaatggaattgattggagcttatcagaagttatcagcagcaggacagtaaatccgcacattagctgctgatcacttaagacttggctccctctcccctcccccctgcttttgctctctgatcgcaccgttgtgagcctcgaccatataaattaattagcccataacacactcactaattgacccaaccaattattattgctcgtatatatatttggttattattatatttttcattttttgtagcataaatctttctgaaattaaaaa

SEQ ID NO: 88816 - DNA, 598 bp, Heterodera glycines
attccaatgaagcgatccatgtcagcaccgtgatccaaactgcccaccatgcccaaccaaacgctcgcctcggccaacggccccgtctcgccctcgggcaccccggtggtcagcaagtctgccgctgtcgcccgccgcgccaccaaaccgctgcgcgacattgccctcgacgtgtacgccgggctcaactcgaccgacacggccatgcaagcccaagttgtcgccgactactttgacaactactcgacgtttgccgatccgctcgtcgtggcttcctcgaccaacctcatcaagggcgtctttgcaggcaacctgctggcattctcgtccatcgaaaagcgcgtgctgtccatcaccgaatcctcggacctgcccgttgccgacacgcacgtggtgtgcatcgacgccgatgtcgtttaccgtctccgctggcttcccttctcggtcacggtccgtaccgtcagcaaaatcacgctcaacaaggtcacgggcgacgttgtgcatttcgaggacatttggagtctcatggacttgattgaggaggtgccgatgtttggtaccttgtattccaaggcgctgcgtcccgtgctcggcacgg

SEQ ID NO: 88817 - DNA, 306 bp, Heterodera glycines
gtttgagtcatttcttctgagcaaatacctaaattcgaagtctaaaaatgtttatgcctatggaccacaacattcaacaacaggtccaggcctccgcttctaggaaggcccgtgacgactttttcacgttcatcgcttgtggcttcatcttggagatcggcactcgcgcacttcgttatgttggattcgattcttttctcgtctaatttcgcaggaattgtttttcaattttcgcaggaattgtttttcaattgaaagtcgtaaaaaataaacattgtttttgcaaaaaaaaaaaaaaaaaaaaaa

SEQ ID NO: 88818 - DNA, 716 bp, Heterodera glycines
gattgtttctagaaacaattatattcacctaataaaagcagctgaccagctttattacaaggacaaaactttgtatacagccattaaacccgaattaatccgaagcgacacgaaccgaccaaaagacgctgaaaagcaccagcaaatacagaaaagtgggaagaaaacggcggacgataattctgggaaaaaggctgctgaaaatctgaaacaaaacaatgtccaacaggcgaaaaacggggagagcaaacgcagtaaattgcaagaaatgatcggccaagccaaaaaaactgttgaaaatgcgctcggttcttcgcacggatcgttggagagtcaccaaaattcgattgaccttcgtcaagaagtggcggaaatcaattcgaaatgcgcggatttggccaatttgctcaatgcgttggaacagaggctgagagccgtcgaagaactgacggaggggattgccaaaaagatcggctacagcagctgatgagtgtttgagtgagcggagtttatcggggcaatccccagaagatgatttcgatgatgatccagtgcagcaccaccaatctgatctttttgctagtgtaacatttgatttttgatcagatccaaaaacgggaaacgtttattgttttgttagaatattgttgcttttagtaattgttgcatgcgaaaaacatttatttcctccattcattgaaaaagcgtaaattgaa

SEQ ID NO: 88819 - DNA, 702 bp, Heterodera glycines
tgtttcctcctcctcccgctttttgccatgactgtccaataacagcagcagccgtcctccactgccccccatgtgccgtcctcctccgcctcgtcgtccgttgccactgcaccgaaacgccaattccggccattggccgagtacagaaaggcactcgaagagttctcggcagagcgccagcagcagcgtgaatcaatcaccgattcgtcttccgacccgcctttggtggatgagtttttggagttcgtcgctttgtccggtcaatcgcatttgccatggactttgattcagcccgtcatcgtttggaagcttcaagctgtgatggacgccgtccacgtgaaggaagcggaggcgcaacgcgacgatttggccaaagaagcgctgataaacgacgccgagattaaggacacaaaagcatttattatggaaaaggcacgctcattcgacggcattcccttcacaatccaacgcctctgcgaattgctcacatcgcccggcaaacattaccacggcaccggcacttatttgcgtgcgttggagaagaacatcaacgtggttacaacggtgacggaaaacggaatgcgaataacgggcgctgatgaggaggaagaagcggaaaaggacgcgccaattcgagtggagagcaatttcattgtcagcgtcgatgaaatggacgaaccattggcattgaaattggagaga

SEQ ID NO: 88820 - DNA, 460 bp, Heterodera glycines
  unsure (1)..(460): unsure at all n locations
ccaataaccgaattacctcttaattactagccctatttttaattgcacaaaaaatgtcgctactccgttttttcaccgcttccaatttgatgacacttattctgctgctattggttgttttgatggtccaactgaacgagtcggcaccggcagatggccaaggaggacacttggcaatggttaatgaagcggaaaacgaagccgaccattctcttaccgttttgcgctttaagcgttcatgtccacccccgtgtcaagaaaaagattgtccttctcctatgtgtgctctatgcagtttctgcggatgagcgttttaaaataggcgaaaggaacattttgcgaaggcatgataaatgaatgaaaagaaagatttattttttaattaatttgatggacaatttagttttttatgaaaataaatttaatggcagcnctnnnnaaaaaaaaaaaaaaaaaaaaa

SEQ ID NO: 88821 - DNA, 491 bp, Heterodera glycines
ctgacacccgccaacaaccgtccgcaatctgcccatttctcgctcccctccgcgaccccccgcccgacacttcaaacaacgaccaccccccaaatacaacaccatgtctgccattgctgaaaaggccgtcaagattgtgcactgtgaggaggcggaggtcgaggaagtcgaagaagtcgagatttccgaccccaaggagcaaatcgccgaggagtgccgcgagcttccgtccaacgccccgctccgtgaggcgcttgaggcgtgcactgcccgcgttgaggccggtgccgaggagacctgcgttgaggagttcttcaagcttcaaaaggccgtcgaccaatgcacctcggcgaccctcttcaccaagctcaagtaatcagccagtgtcgaccactttcccccatcctacattccgatgtcctctactctctaaacttcttagccgccttgttttccctccgttcctccatgtatttctttttcttctctta

SEQ ID NO: 88822 - DNA, 604 bp, Heterodera glycines
ggaacgccttcgagaaaaattagcatcactaattatgacggagaatcatctgctcagagaaacacttgccgagtttgttggcactttcttccttttgctcaacggaatttcggccaacatccaatccttccaggcggcttctgtccatttcgggcctcaatttacctgggggcttgacctcgcttttggtgtttatatttcggcacaaatttcgggtggtcatttaaacccggccatttctttggttcagatggccaacgggtccatctctctggtccgatttgccctgtatatttctgcccaattgtgtgccgcttttctgggcagtgctgtggcatttcctggccatttcgagaattgcatgcaaattcaaacacgaaatggcaatcaagaattctcacaacttttcgccacttttccaagtactaatttaagcatttggggcagtgttgctgatcagatgatcagtactgcaattttggccatttgcataagtctgatcatggacaaacgcaatcgcgtccccattggactggcgcctctgctggcaggcctttccctgacaatgatcgcgatgactttcgacacaaatggcggctttgcc

SEQ ID NO: 88823 - DNA, 800 bp, Heterodera glycines
gtttgaggatgttaattggttcattaataaacaacaaaaatcgacaaacttggcagttttcttccttttcttcaattttatttaataaaagccgcaaaaaacaactcaattttcttcatttaaattttttaaggagtacttctgcttcatcttcgtgcgtcgagtcttttcccgaatggcggcatcaaaatatgtccaacgaatttagtccgtcaaattggccaattcttccgacgactgttcagcccgactcggagcagttcaaacagaacgaagccgaaatggcagaatcgataagcgaattcaaaaatgtggtcgatgcggtgatcgatggccaaatggtggaaaaaacagtgatcgaacggcacaaaaacaaaggcaaattgttggccagagaacgcattgaacagctcatcgaccagggcggttcctttctcgaactcagccaattgacggcttacaaagtgtacggccaagagaaagtgccggcgggcggcgttgtcgccggcattggcccaatctgtggccgattgtgtgtcattgtggcaaacgacgcgaccgtaaaaggtggcacttattatccgattacggtgaagaagcatttgcgggcccaggaaattgcccttgaaaattgtttgccctgcgtttacctcgtcgactcgggcggtgccaatctgtcgcgccaagcggagattttcgcggacaaagacaatttcggccgaatctttttcaaccaggcacaaatgtccgccaaaggcattccgcagattgccgttgtgatgggttcgtgtacggctggc

SEQ ID NO: 88824 - DNA, 755 bp, Heterodera glycines
gtccaattaaggtgaattgaaatgccaatattttttgcaaggcctcttccggccgagaaaaagcttccaattctgaataaaaccccagagccaacagagtcacaaaaggacacgttgagtgacgacggccaagacaaccaggacagcggtgcctcaacttcctcacagaccaacctaatcaaaaatgtgcgaattcttcggaaagaggcggcggaaacatcgctcgagccatacattcagtttcaatgttttgcgcatttcgcaatttcccggaaatgtgttaacgaattgtgcgctgatgtgtcctcggatggcgtcgatgtccacatttttttcgaggatgactttccgcgtcttccccgcattggcttctcctgcctgtctttgcaagagctttacgaagaccgtgctctgctgagtgaaaaaaacgcaacgccagaccaactcagtttcatccaattggtgcgttttgtggacaacgggttgaacgaaatacccaattggctgttggttgctccgaagcggggtcaaattttcaccatttctctggacttggccgacggaaacggagtccgggttcgcttctcatttgggagtgtgagtccgactccgtggtacagtgtgcgttatcctccgtataaatcagacttttctctcgtcatcgaagtggacaaaaaggcggtgttgaggcggtcgtacgaagaaagtagcacactgagcattttgagcagctttggactgttggaacgaaagct

SEQ ID NO: 88825 - DNA, 746 bp, Heterodera glycines
gtccaataaagtagggatgcgatttttggattttaactgcgcgcctaaagtgtatataaaagcaacctgcttcattcacattcacttttgccaacaccaccaactgttcactcgtaatttctgagaaaccgacagtttgctcacgttcaacaacagcgccattctcagcaacatcgcacaaaaatggcacgccggcgaagaaagaaggagccgcgaaagcagtcgtacaagctgtacgttcgacgtgtgctgaaggaagttcatccgggcaaggaaatctcaatgcgtgcgttgaacatcatgaactccttcgtcatcgacgccttggaccgcattgcaacggaggcgacgcgaatggcccacaacgaccggcgcaaaaccatcacgcttcgcgacatggagttttctgtccgactgtgcctgcctgacgtcatggccaaagatgcgaaccagaaggctcagaaaacggtgaccaagttctatgctgcaaaggtgcgggatcggatgagaaggacggagatgcgtcgtggcgaatttgcgatgatgcagatggcagcgctgtgagcacactcaacttttggacgaccggcggatgaagccacctgtatattgttgatgattggccccgtatcccccattactgtatgtgtatgtattatacaatgtatctaccattcttgtgtgtgtatgtattattcactatgtgctttatatgtatacctggtcaataaaatataaccccattc

SEQ ID NO: 88826 - DNA, 827 bp, Heterodera glycines
gtccaattaagcattttaaaattaaaagctgataattatttaatccggcataacattcgtgttctaaatgtcatcatttggccctgttttatcgtcgttcgtaaattcaatgctgtcggaatcgtcctcaattgtcgacatcccttctccatctcccagcaatggcactcaaacccttggcactgctgtcaatggcattggcacttcccactcatccacacgtcatgacacttcttcgcctttggtcgcctccgaaacgttcgtcgacgacgcgccggacgactccgactcatcgtcggcggtgttttatgtgcgcaacaacggcaccgatggcggcaaacaaaaggccaacaaaaaacaaaaggacacattcaaatgcgcaaattgcaacatcaatttcaagtcggatgaaatgttggaattacatcaaaataattgtcgccgctccgttctctctgcccccgccaatttttgctcatcactgtcattttgcgacatttgtaaccgaaaattcatctctccacgcggggtggcacttcacaaaggcaaggcacacaaaggggagagcagcagcaaattggtcaagccgaagaatatggcgaagtgccccatcgccacccgcgcagtcaaacggggccgtccccgtaaggttggcgtagtgccgccgacgtttgttgacactgccaaaaaaggacgagcccattccattgccgccgtgccgccgattggccatcaaaaccttttgagtggccgtcaccgcaccaaacccacaaacgccgccactgctcagcagcaaccaaatggcaatgtgcaaattccgaagttgc

SEQ ID NO: 88827 - DNA, 491 bp, Heterodera glycines
  unsure (1)..(491): unsure at all n locations
acaccattcaatcaaaaccaaccaaatccccactcattagctcattatgaaatttgcccctctggctttgcttgtgatccttttggtgtctttggtcgctgccgtctctgctaattccaacaacccttttgatgcggacgcggccgacaacggtggcatgaagcgcgtcaaacggcagcaacagcaatggcgttggagtccgcaacagcagcgctgggtgccaataaacattgcgaatgtgaacattgctcagaatggataagcgcactgagaaggagccgaaccgaccgaccgatggacggacggagacgaagacaaaatgccaagaatatgtgtgatcagtgacaaattcaaacccaatgccgcgccctttcgatttatttccgatggaatgacaattccaaacttttttttaatttgttaaaattaaagagtgcatggtaataatttaaattcgtttaccgttaccaaanaaaaaaaaaaaaaaaaaa

SEQ ID NO: 88828 - DNA, 749 bp, Heterodera glycines
ccattttctttggcattttcccaatttttgctggacaaatgtcaatttgcgttgatttgcgtctgtcttctgcggatttgccggtttgtggtcggcatcggcgtgtgccgtcccgcactctgctgttcttctgctcaatttttgaggcactgaacttttggactcgactccgttgggtgacacttttgcgccgacggttggccatcgtcgacggatctgcctcatttgtgcgcctttcccttcgccgtcggcggccgacatcaaagaaagcgacggactttcacattgacaagcgctgggactcccgactctcggcactcgtacaaaaggttctgcatgtcgagaccgagctttggcgcctttcaacgcttggcggcgctgtgtccgcaatgggctttttcagtcggaaatttattcggcatgcctttgtgatttccattcgtcagctccgtttggccatcgaaattggtgacccggtgctgatttcgcgctgcttcctttacatttcactcgcatttgcccaaaaagggcaattccttacggcactcaaaattgtgcgccaggaatggaacagaggcactgagcttaagtccgcttttttgctgaattgcacccgcggcgtttggtccactatcaaatggctgatgatgaacagaaaagtgatgatgcttaaataatttcgcacacatattttttcctttaatttattgttttgtgttttggctaattaatcaaattaattgacaaat

SEQ ID NO: 88829 - DNA, 624 bp, Heterodera glycines
gtccatttaagttgtttaaattataaattaaagcttcccatggccgtgctcatcgaaacaacccttggtgacttggtcatcgacctttttgtcgacgaacggccaaatgcgtgcaagaatttcctgaaactttgcaaaaacaaatattacaatctctgccaattcttcaccatcgagccaaaatacatcgcccaaactggggacccaacgaactccggaagaaggggcgaatcaatttatggcactctttttggggagcaagcacggttcattgaaatggaaaatgtgcccaaattgcggcacagtcagcgcggcattgtgtcgatggtgaacaacggcgatgggatggtcggctcgcagtttttcgtcactttgggcgacgaattggattatttggacggcaaacattgcatttttggccaagtgggcgaaggcatggacacagtgaccaaactgaacgaggaattagtggaccgaaacaaccgaccctaccgggacattcgcattgcccacacaattgtgttggaagacccatttgaggacccgcctcggctgtccatttctcgtcgttcgccttcgcccaccatcgatttgattaagttggacaatcaaattgcgttggac

SEQ ID NO: 88830 - DNA, 621 bp, Heterodera glycines
gtccaattaagagcctttctattaacattgaagtggtagaaaacgaaaatcgtcataaatggcaggtgaagaagaagaagaaacagtggtggaacatcctttgccgaaaggctgggagaaacgaatgagtcgttcatccggtcgtgagtattacttcaatgtgttcagtcaaaaaagtcaatgggaacgtccgacgcgtgacgccgaagacacggcaaaaaaacccgaaactgtccactgttaccatattttggtcaaacacgaaagatcaaggaacccaaagtcgtggagaagtgacaaagtcacacgaagcaaggaggacgcgaccaaaacactcgaatcttatcatgccgaattggttgcattggacgttggcgaacgcttttcccggttcaagaaaattgcgcaggaattcagcgattgctcttcggccaaacgcagcggcgatttgggcccattcggtaggaataaaatgcagaagccattcgaggaagcatcttttgcactgaatgtggggcaaatgtcggatattgtggacaccgattcgggccttcatttgatctatcggttcgcttaattttgaagacgagggtctgtttgctttcaacgtttaatataatt

SEQ ID NO: 88831 - DNA, 644 bp, Heterodera glycines
aagaaattaaattaacaatgttttcttttgtaaaaatcacccatcgtttttattccaccgaaccgttggtaaaaaaactaacggtgattggctcgggtttgatgggcgcgggcattgcccaagtcagtgcccaggcaaacgtaaaagttgtgctggtcgaccaaagtcagtcaatcgttgagaaggccaaaagtggcattgaaaacagcatcaaacgggtggcgaagaaacaattcgaagacccggggaaacagaatgaactcgtcacccgcgctctttccaatatttccctgtcgacggatatttcgcaggccgtgtcgggcgccgatttggtcattgaggcaatttctgagaatttggacgtaaaacggaaactgttcgcagaagtggagtcggctttgccacaaaatgggaaaatggccacaaacacttcttctctgacattggccgacattgcggccaatttgaagcgcaaagattcctttggggggctgcactttttcaaccccgtcccaattatgaaacttctcgaggttgtccgctttgatggcaccagcgaagagacattcaacgttctgatggactttggcaaaaccattggcaaaacgaccgtcgtttgcaaggacaccccggggttcatagtt

SEQ ID NO: 88832 - DNA, 995 bp, Heterodera glycines
gtccaattaagtttgccaaataaacattttattccatctttctttcgcttttttcgaagttttcactgttttttgtccacaaaatgccttcgtccgcccaaagaaagcgtgccgaattgcactggggtatcatcggcttggggaacatcgccaatgattttgtgcttgcgatggcttattgtcaacacccgaacaaagtgaccgccgtggccacttccaattccgtggaaagggcgcagcaattcatccaaaaggttggcctgaacagcgaacaggtcaaggcttatggcaactacgagcagttgctgcaggacgccgacgtggacgtcgtttacatcgccaccattaacagcacccatttgccccttataatttccgcacttgaacaccacaaaagtgtgctgtgcgaaaagccaatggtttattcaagtgccgaactttccgttgtccaaacggtgcaaaaaacgatcaatcgaagggagggaaagaaactctttgtgatggaaggcttttggtctggtttctttccgagttggcagaaaatccgacaaacggtgcgcgacggacagatgggcaaccccaaattggtctcggtggatttcagtcaaaaattgcccgacaaacggcgcgacctttccaatggcatttgtcccctggtggacatcggctgttacaccgtcgatttcgccacttttgtttttgagggcaaaaaaagtgatcgacgtgaaagtgatcggagatgtgtctgctgaggacggtgttgacaattgggcctgtattgccttgcgctttgagggcggcggtcactccgtttgccattacaatggcaatttgtcgaccaattcgaatgcttcggtgacttttgaaaatggcagtgttttggaattgccggaacgcttttgggcgtccaccgatttgcgcagtcggagcgaattgcaaacgcatcgaaagggccaatggcacgacgaacattttgcattcccggagagaaaggg

SEQ ID NO: 88833 - DNA, 684 bp, Heterodera glycines
gaccggttggccctttgggaccgattgatggtgttggcctcgaaggtgcaaaaagtcatcaatctgtcgtccaaaatttcatctgtccagaacacggaccacatgatgcaacagccaacggaggaacagcgccagcgaatttatcaaactgataaagcaaagtctgcactgcttcatcttctgctcactgattgtctagcgaaaaatgatgaaacaaccgtttttgaccgttttaaaatgttaaaagaggaaaacaattgtaaaattgctccagagatgttcagcaatttaccattggcacgattattagtcaatttggaagggaatgacaatgagacgaggactcgcgtcgaagaagtcagaaatttgctctttcgtgcattgcaagtgcttattgacgcggaaataacgccatctgatgaattactctatagcttcgagcagcaaaaaatgtacgaagaggcgaagctaagcggtttgagcacattacaatggttggaacgtcagagatcattgaacaagaggggtaaaaagcggaagcaggaagtggacacgaaggcatcgaaaggacgcaaaatccgttacgtggagatcccatagttagtcaatttctttccccgcacccccgaaagaattgcatggacacacgaaagacgggacgagctggttcagacgttgtttatt

SEQ ID NO: 88834 - DNA, 670 bp, Heterodera glycines
gtttcggtggcttcggaatgccgcgacagcagcagcggatcaggcaggacacggcggtgacacacgaattgcccatcagtttggaggacctgtgcaaagggtgcacaaaaaaaatgaagatcaccaagaaaattgtgaatcctgacggcacgtcgcggacggaggacaaagttttgacgataaatgtgaagccgggctggaagagcggcacccgcatcactttccccaaagagggcgacgtgttccccaaccgtatgccagcagacatcacttttgtcatcaaagacaaaccgcaccccaaattcagaagggacggctcagacattcggtataaacaagtggttccattgcgagacgcactttgcggcatgtccataaaagtgccaactttggagggtgacatcatcccgttgaacatcaagcacgtgaccaaacctggcagcacacaacgaatccacgatcgtggcattccgaaccctaagacgggcaaacgcggcgacttggtggtggagtttgacgtgcgcttccccgattcgatagcgcctgccgcgcgggaactaatcgccaatgcattgccaccaaactgatcggacgaacggagggccaaaagacgggaaagcgaaagaatgtgcatttgaaatgttcaattgacaagcgataaaaggctttt

SEQ ID NO: 88835 - DNA, 635 bp, Heterodera glycines
ttgagttgtaaaaagaagatggcacaactgttcgaaaacattggcgttcgacgcaaagttgatgacaaattggtgaacgggcaagaggcgctaaagggttgcgaagtggtggcgctttatttcagtgcccattggtgtccaccgtgccgcaatttcacgccggtgctcaagaaattttatgacgagttgaaaaagtcgccggagacggcgccctttgaaattgtttttgtgtcctttgatcgttccgccgatgatctgagcaactatttgcgcgaatcgcatggtgattggctgtacattccgcttggaagtgagcacatcgaaacattgtccaaaaaatttggcatcagtggcattccggcattggttgtgctgaagcaggacggcactttggtcaccaaggatggtcgagcggatgtgcagaacctatcaccatcaaatgcaatggccaaatggcgctccggctaagagaacaccccttcactggggagactgatggaagaaaatcaaaaattttgatatggatggacacattaatacattagtagtgatatatcgaaaactaatttttacaaattaaatttttaaacaaaataaaaaaatcttttgttaaaaaaaaaaaaaaaaaaaaaaaa

SEQ ID NO: 88836 - DNA, 647 bp, Heterodera glycines
ttgagattttataagcatccgttcttcttcttccctttccaaatgttctcccattcgccctcctctcttcttcctcatccctcctccattcatccgtccggcataaccaccgctggtgcctctaataacactctttcatccgaaaactttttcgaggacgaagaacggccggaggagaacatttacgagaggcattttgcccagcagcaaatgaccaaggaggagacgaggctggtcgagttgcaaaagcgcaaagagaaagcgatggaaaaggcggacgcaacgcaacaaattgcgcaggacataaatgacttgaatcagatcatgcaggacttggcccaacttgttcatgaacaacatgacatggtcgacagtattgaggatcacgtggagcgttcaatgcaagaggtcaaatcgggcgagcgcaatttgcgtcgtgcggtcgcttcaaacagtgccaagtacccagtggccgccgctgcagttggcggtgcggtgatgggcggaccggtgggaatcgcggccggctcattggtggcagggattgcggcagccgtagggggcgcttttgcaggcctttacggagggcgtgtgctgcaacggaaagtgaagcaaagtacagcagtcgactcgcagcaatcagttgt

SEQ ID NO: 88837 - DNA, 595 bp, Heterodera glycines
atttaagtttgcattttgattttaaaaatgaaaaaacacgtcacgttcactccgagtatcggagacgatgtccattccaccaatgtatcgtcggtagcggagtctgagttcagcgttaaagagcgtgccgaagtgccagaaatattcaagaaattggccgacgatgcctttcaaatattgcctttgcccgacatcgacccgaccgtcacttcgaccccggcggtcgtcaacaatttgatcgaggcggtcgagtcgctcgactcgcggatgcctttggcgttccaagagcagcagcaaatcctgaaaatgcaaggcgaaatgctgcaactcggcgtcagttgcaaggaacactacaagaagatacacgagcagtccgtgatgcgttacaatctcgagaagagtgtcaataaaaacatcgacgatctgaaggagggcgcagttgtcgcgcagaaattggtgaaggcgaagagtgcgtacgaggaaatggtagcgaaggcggaggcgttgctggccaaggcaaacaaatgacggatgaagacgagtcgattgagatggaacatatgatggacttatttgataaaatgttttttctttc

SEQ ID NO: 88838 - DNA, 886 bp, Heterodera glycines
gtcattttctttccatccattcaaagagtcattctcccatcacccagataaataattaattaattaattgactgctcgttgattctcttaattgaccacaatgtttctgctaattgctctactgctcgtcgtttttcctctcttttgcggtgccatccccgcgctgcccaactcagccgcggcactaactcaacagcagcagcgcatgatgcaaattgatgctttttctgcggcggatgacgcacagcgaaaggacagcgacgccgcgggcggtgcggcgcccttcgctttcgaaccctccgagcaaaaggcattcgtactgaaagggttgcgtcgcgtgaagaatccgtcgccgccggcggtcgttccgaaactgacggcagatgccaaaatcatttcattgaacgcggacgacgacgagtggcgagaaatgggacaacaacagaaacaacagcagcaacacggcatgggccgacttttgccaccgacggattctttggcgcggagaatgagcggcgccgcggccgcggtggggacacaacgcgcgcaacggccgacggcgacggaagtctttggagacgcagcaaatggcgacgcactgataaatccggcagcgtttttcatgggcggcgccgacctggacagaattgctgcgccctcgtgccatttggtgggctgcgtcggccctttggccaacgacggggacatcgccatggagggacggacggggccgggcgcgggcggcacgcgccagtgccaccaaacatttgtgccgttgaacggctgctgggagaggggggcggtacgcgactcgtaccccgtgggaatggtgtgcacaatttgctgtgagtgcagcgctcagttagcggcagagatgcggcgcagt

SEQ ID NO: 88839 - DNA, 319 bp, Heterodera glycines
gtgacacaaattctccaatattagttgtttagcatggtcgaaatttctattagagcccggattttaaaattgccattacttagaaaatggacagggacttggtcccgagattcacgttttccgggactcccggtcccggtattttgtccaaaaaaaccgtggacctgaaccacgagtctcggcaaaatcccggtccctacaagcctaatttatctgcgttttttggattttctccggtatttatctggtcaatacgctttgtccaatctctaattaaaagaataaaacaatatccaaaaataatgggaaattgtaatta

SEQ ID NO: 88840 - DNA, 661 bp, Heterodera glycines
gtttgaggacaaatggttgccgccaatctgaagctttccctgatttttgtggccggcttttgcctgctgttcatcgccgactccgatgccgggaagtcgtgcaaaccgggagaaaagggaccgccaggccctccagggaagccgggaaacaaggggaagcccggcgtgtgcaagcccaaatatgaaacaacttccaagtacggtacgactacttccaagtacgacaccaccacttccaagtacggtacaacaacacccgaatacgatacgacaacatccaaatacgatacaacgacttccaaatacgacacaacaacttccgactacggtacgacaacttccaaatacgatacaaccacttccaagtacgatacaaccacttccaagtacgacacgacaacttcaaagtacggtacgactactcaaaagtaccgtggcaaacgctttgcggatgccgtgctcgttcgggctgctcgcgctgagtacgacgccgattgcccggccggtcccccgggagatgccggcattgccggaccgcccggcccccccggcgagccgggcaaatgctatggcagcgggtccaaagagtccaaagaaaaggagtacaaacccagcaagcgcagcattgacaacttcgagcatggcttacgcgtcgccaggg

SEQ ID NO: 88841 - DNA, 304 bp, Heterodera glycines
aaaattccctcaaaaataaaaggtctattgcgcaccgccctccctatcatgctcgagagcatttgtatgtgtataaaatttatcaaaaaaagagatagccatttttctgggataacctctaaatataaaaatcctctgtgaaataaaatggcgattgagcacagccctccgtctcatacgcaagcgcttttgcgaggtataaaatttctcaaaaaaagagatagccatttttctgggatagagtataaatttaaaaattccctcaaaaataaaaggtctattgcgcaccgccctccctatcatg

SEQ ID NO: 88842 - DNA, 609 bp, Heterodera glycines
gtttttatgcctttgcattttaaaagacgccgaaacatcgacgatctcctcaaggaacacctcatctttaaaaggtccataaatcagaacacatcttttcgattagaagcggcgattggttccgattctttgcacgacaggaaaatccgttttgaagaaagtacaaattcattggaagagaacgaactcgtcaattttgacggtgttgtcgttttggaaggaatggacgcttttactggaacgacttcgggcgttttgaaaggtctttgcttttccaattcttcatttctcaattatcgaactgcgcaactttcttcgtctgccgatttttccatttgttccgtctccgatgagcaaaatcagccgaccaaagcgttgccttccgcggtgaccgcaatgagtttcagcggggcggatcagatggaagttttggtcgggcgcgagaatggccgcgtcgaccatttcaattctttgactgaccaattcaatgcgctttttgctttaccacagccttccgaactcaaaggaattcatcgcatcgacggtgatcggattctgactgctcaagaatgtggcactttggctgtttggagcgcttctggagaacgg

SEQ ID NO: 88843 - DNA, 631 bp, Heterodera glycines
gtttgagctaatttattctccaaaatgccgtgctctctcgctacacaatcttctgttctgaagcgcagagcacctgcgtctcctcagcaggcaaaaatgcatgacaaaaagagacactttgacgaatcggcaaacaatggacaagaaaaagcggacaaagtgccatccaaaggggacaaagtgtcaccgacaaatgaggaaaagaagaaaaatgttgcctttgccacattggcaatccatgcgggaaatgaacccgagaaatgggacatgaatcaggtggttccaccaatttcactggcaacaacatataagcagcaatttgctggaatgcccaaaggtcatgattacgcacgaggcggcaatcccacccgtgatgtgctacaacaaagcattgccgcgctggaaaatgctcgtcactgtcgcgtgttcagctccggactttcagccacagcagcaatggcaaattggcttcattctggcgaccacattattgcgtcggatgatggctatggtggcactcaacgctattttcggcaaatctctgtccagcatcatggcatggaattgagctttgttgatttaacgaaattgtcaaaccttgaagaaggaatttaagccgaatacgaagatg

SEQ ID NO: 88844 - DNA, 695 bp, Heterodera glycines
caagtttgagagataccatttattcgccttttgtgaagggcacaatgtacaaaattgtgcagcgaaaggaacgaaatgctgatggcacggcaaaaacagacgctgaaccttttgcaactccatcaacttcaacggttgtgcccttagtcagaattgcgaaggcaccccatcgtaaggccaacgacacaacagtagccaatgttcctgcggaagtgccgacctcaaataccagtgccgatggtctctcatctgccgctttaaacacagttcggacagaaatcgcaaaaagcgggggagtgccatctccagcggcgaaacaatcggcaaaagacgcaggggcaaccacggaccaagcccaaatggacgcatcgatccgactgattgacgatgaaatggaactgatcgacgctgtgaaggattttctcattgagtccaacacaaaatattcggtcattggtgcgattggggcacaaggcactggcaagtcgaccatcctcagtatgctcgccgggaacaatccggtggatatgtaccgccagtacatttttcgtcctgctgcgagggaagctgttgaggcgtgtcgttaccaaaccacaaaagtctcagtgtatgttgtgcccaaactgcgcactttctttttggactgtcagcccttaaattgtgctccacttctcgaggactttttgcgtgcgcga

SEQ ID NO: 88845 - DNA, 566 bp, Heterodera glycines
gtttctctgatgacgctctctaactctgaacaccgtcggccatgtccgaaaccccttgacgacttttactgttttaacggagggaaatgttctgtggaatttgaaggacaacgaattgttaacacttccttaagttgtcgatgtccacaaaactttcacggttatcgctgtctgcattcgttcgactcgcatattttcggattcagcaaagtgaacaatggagtggaaagcaaagcaattcccaccattgctgtgatactctttctggtgatcgtcatcttcatttggtgtctgttgttgcatcggaggagtgtgagttcctctgcgcggactttcctcaacaacagacaaacgtccgcctcccagtctcggttcgttcaaccgtcggtcgtctaatgggaagggtgacaccgtcgaacaccaacagacactgaatgccatcatcccaacgactaaatataactgacctaatgcaaataacctgcctgtaccattcctaactattattagcatgtttttttgtacttgataatagctttttgaaaatgaagtttgtaatttataaa

SEQ ID NO: 88846 - DNA, 1094 bp, Heterodera glycines
gacagacgctgaagtccaatcggacgcacggcagccaaaaatcgccggatggtggaaatttgttgaaagcactgaaggctgcggtggtcagtgccgtgttggagcagcacagatgggattcaaaagcgttggattatttgcgtgttatccaattgaatgccgtcgctgaccaagtggtgcccgaccgaagggcgtgggaccaatcgtgcgctttccttgccaacgcggcctctgaccgaattcgtgaacttaaaaagacattggaagaatctcgcggtccttcgggatggtcacgttggtttggttggagttcgccgacgcctgagcaactcgtcaaccaaacggttcaagacgaacttcgagctttgctcgtcaataatccggagcataaacaatctttgctggacgacgatttgactgtgatccgacggaatttggagacacggaatttgccagggcccaacgaactttctgccgaaatgattcgtcagcaatggcggctcatttacagaaagcattttctcgaacgaatgctccaagctggtcacgattgccaaagtttttaccaaaattacaaattgggcgtacgctcggaagactcggacttggactgtcaagcggtggtgttcttctaccgaattaatcggatgctcgatctcagttgcaacgcgctcagacaacaaattgtgaacacggaacagcgacggttggaaaaggaagtgaaggaagtgctgaacgactggtcagcagacacggacaagaagaagcagtatttgaccgggagacaagtcgaattggccgaagaattggcccacgtgcgcttcatccaggagaagttggaggagttcattattcagcttcaccaggagaagccttggtagagcgactcgcattgccaacttatgtccatcaatctcatgtctcgcttttccactctcaccattatttgaggcttttctttctgtgtttaatatgtctccttttactttgcttccttgtcgttgatacgtgtgacaattcgttgttatcactttttgattttcctttgtttttccaccttttcctgtaattcagaatataaatacgatttattt

SEQ ID NO: 88847 - DNA, 812 bp, Heterodera glycines
  unsure (1)..(812): unsure at all n locations
attttaaaaagaagtaaaatggtcgatgcgcaacattttacccaactgctcatcggaatgatgaactccgaaaatgaaattcgaagtgaggctgaaaaacagtacgaagcgattgcactcaaagacaaaggaccacttttgtttaaacattacttgatttcctctgcggatgttgagtctcgctctttggctttggttcttctgcggcgtttgctgtcgaattcctacgaagaattcttcacagaaactcaaattcaaaaggaccaatttcacaacgaattcattgtgtgtatcaatggtgaaacggagcccgttttgcgcaaaagactcaccgatttgttggcggaacttgcgcggaattccattgacgacaaaactggcaaacagacgtggactggcatcatgcagttcctggacatgtgcgcaacttcggacaatcccacctttcgcgaggctggcatgtcgctcattgaaagtgtgccaaatgtgttcggctccgactcgttcaaatacattgccgggattaagacaatgttccattcttcgctgctttacggtgccgacagttccgtgcggactgccgctgtccgtgcctatgtcgcgtttgtgtgcgacaatgaggagaacgacgctgtgatccgccaactgtccgacttggtccctgccgtcatcaaagtgtgccaacatgtcgtggacactgaggacgacgacgatgtgcctttgcaatgtttgggcgatttggcctccactcttcccaaaattctcgcccctcacatgagcgacattntttcgctttgtgcagggactgtggc

SEQ ID NO: 88848 - DNA, 120 bp, Heterodera glycines
ggttaaccataatggtttccttaaaatattagtaaaaataaaaacaaaatgattatgtaaataaatttctttattccttttttggacaagaaatgcttaggaaaattttttactaaaaaa

SEQ ID NO: 88849 - DNA, 396 bp, Heterodera glycines
  unsure (1)..(396): unsure at all n locations
gtccatttaagatttaatacagacaaaaaacgctcacgttcatgctagcgcataaatttgaccaaaaatgagcaacccaattaaaattgtgcgtgttgttgagattattgaagcagacgaagctgctgggcaacctaagcaagtggtggctgagtatgtggacgacccgagcagacgagttaccatgaaagcaagcggagaggtccgaattggccaacttgttggtttctttgatggtccggacaaaagacacattcagcgatgcttcacgaacaacaacaacaactgatttgaaggatttgataaaaataaatttgaaaaacgtatgccatcctttttgaaagcgcaataaaaaaagcacattnnnnaaaaaaaaaaaaaaaaaaaaaaaaaaaa

SEQ ID NO: 88850 - DNA, 805 bp, Heterodera glycines
ttgagatttaaaataatacctaatggcttcagcagtgagagctttggaaggtaaaattgcagttgtgactggtgcttctcgtggtattggacgagggattgcgcttcaacttggtcaagctggtgctacggtttatgtcactggacgagctcctgccgcttcgtactctctgattgagaagggacttccatctttggaacaaacagcgaaggaaatcaaaagtcgtggaggagaagctcatcctgtgtattgtgaccacgcgaactctgacgacgttcgccgtttgtttaagcgcgttgaggaagaacagaacggccgactgcacattttggtgaacaatgcctattccggagtgcctagtctgattgaaaatgccgggaaaaagttttgggaatgcgaaccggagttttgggatgacatcaacgaggttgggctgcgcaacgtgtacttctgttcaacgcttgccgctcgtctgatggttccgcatgaggatggccttattgtgcacatcagttcggctgggggacttcaataccttttctcggttccttacggagttggcaaagcggcggttgaccgaatggcatccgacatgggactcgaactcaaatctcgcggagtggcagtgatctcactttggcctggttttgttcaaacggaaattacgacgatgggagaaaaggcggaacaatttgcttctgccgctcgcatgtcaatggatgcattcaatgcggcattgaaaggtgccgaaacccccgaatttgtgggcaaagccatcgttggtttggcgactgaccgccagcga

SEQ ID NO: 88851 - DNA, 923 bp, Heterodera glycines
cacacacacgtgatacattatatagtttttctccgtgtttttattttcttttgagatgatgtccttctcttctacctccgaaaattcatttgacgaagtgccaatgccaatcgtgggaggacgtgtcgaggggcccccttcccttcccgtttctcgctcgacttcgtcatcttccttcacgcgccattcgtggactgagttaaaaaccgatacgaatatttcggacgaagaatacgcagatcagtgggcgcgagtcggacacggccaatcccttcggcagatggaattctcagacaatgactcgactttcggaacatttggctgtgaaatcgatggcacggcgtccgacgcattaaagcgaaatttggccaaaatggcactttttggaattatcgtagcgatgatcttcggaaagagcgtttacccttggggggatataacgaaaattaatgaaatgagcgaagaaaatgcgacgaaattgcgcacggagttggacaaaatggtggccgataaatgggaatttgagttgaaattggtgaaactgcgagaagaattggagacagagagaaatcgccgtaaggaagcggaaaagacattacggaaggcgcacgaacagttggaaattgatttgaacgatcgaattcgactggagacggaattgggaaagacgcgggcagaactggtggaaacggaggaaaaggtggcggaagcggagagagaggcggacggaaaatggatgggcggtggagggatgggccaactgaacagagcgtaccgcaaagtcaagcgggcgcagttggcacacggcaaattgagggagacctccgagtggtgggtgccgttgtattggcgcgtggcgcgcgtcactctcttcaacgaacgctgaaaatgttttgtccgaatgctctctttcggtaggataa

SEQ ID NO: 88852 - DNA, 381 bp, Heterodera glycines
gcagcaaatttcacactgaaaatgtcttctttgtccaccattcttgttcttctgctgataatttccatttgcttgtcattaacaattgccatgccagcagtggacaatcaaattgaaagtgttgcacttcgtcaaaagcgttatgactatggctatggctatggctacggctacggcggcagaagagtctaattgacggcggaatgggcatggatgggctttgatggacgcatgggcatgggcggcggatttgaacgccgaccctgacccatgaagaatataatattgtgaatcatctgaaatagattatttacaaaatgccattcgcaattaaataaattttgaataaaaaacttttaaaaaaaaaaaaaaaaaaaaaaa

SEQ ID NO: 88853 - DNA, 649 bp, Heterodera glycines
gtttgagcgtattcgcctcactttttaacacgtggtgtccttctccgacactcccatttattttatcatcaaaaatatcgcattcggcaacttttttcgctttcctttcatttattggaggatcgccttttgatcctttggcaaattatttatttcaatgattggcacttacgaaaagcgtcgccacagcgaattgcccccgcacttacaacataaattcagccttccccataacgacccgtccattgcggccgccgcggccgagggggcgcggatgggcgtggagggcgccaagttggggccgctgtcgcatcagatgatacctccgcgaaaggaatcggccaagcagatgtcctccgggggagcgcaggtgttcctctgtattttgggcgttgtgctaagtgtctgtgtcagtctttggacggcaatgtttagcaaggactctcttccgcggagaatttcaatttccgccgtggcgggcgtttgttcccttatcttcgcgcttcttgcctatgcagcttttaagaaacggacaataaagacaccgctggacgacgtcgaaatcagtcagtccattttgcgagaacatcgcaaatcgatgaccaactccttgagaaaaagcacgaccaacggagacgatctgatcgga

SEQ ID NO: 88854 - DNA, 498 bp, Heterodera glycines
gtgaagttggttacgccttggactgtgttaggaaggcacccggcaatgaaagtgtgtggagttatttgtccggcattctgatcaatgaaccattgggcactgaccgtcccgaaattgtgcactgctgtgacgaactgttggctcgtcagccgccgtgcaactcgtcccatctgttccaatttctcatcgacaaaattgcggacaaaatgcgcgaaaatgcggttgcaaatgagcaacaattgacggaaatggcacaaaaaagtggcgaatatttggatgtgttggagcggattgacccgattcggcacaatttctggaagtacaggcgggcacagctgcaaacattggcagactcggtgaagttcaacagcagtaacagtgccagtgctgctgcagcttcggcatgagttgtgcaaattgtgcccgactcatcggcggaagatgagagcatttattatttatattttcgcaattttgcataaattttttgcattttta

SEQ ID NO: 88855 - DNA, 440 bp, Heterodera glycines
gtccatttaagtttttctcggccggctattcatatcatgaaaaaaaaaatcaacaaaaaggaagaagaacggcgaaagcggtaccgaccaggggagaaggcacttaaagagattcggaggtaccaaaaatccacagacaatttgatgccccggcagccgttccgtcgcttgatccgggaagtgataagcgaaataacatggaactctcaccggttggagacccaagcggccactgctcttcaggaggccgctgaaacttttctcacaaccttttttgaagccgctaacagatgtgccgtacacgcaaatcgagtcactattatgccgtccgattttgtccttattcgctggatccttcacacttttggcaataatattgtttgactaaaaactcacatttcttttttcattccatttgctgtataaaattgcgacttttt

SEQ ID NO: 88856 - DNA, 805 bp, Heterodera glycines
agtccttaagatacctgaacaagttacctgaaactttgtaaacataaattaatatttttgtaaaagaagaggattgaaacctatttattgcgtcatggcgaagtggggagaaggggaccctcgttggattgtcgaagagaggccggatgccacaaatgtgaacaattggcattgggttgagaagaatgccactccttggtctcgggaaaggcttcgcgtgcttttgttgggtcaaaccttggaaaaagggccggtgcgaattgaattttccgacttcaaaaaattggagggcgaagcgacggcgaacaatcggaaggcgaaactgattttcttcttcgagtggtccatcgacgtcaatttcattgcaactgtttctggttccgaaactgagtacaaaggaagtgtggaaattctgaatttgagcgatgagaacgaggcacacgaaattgagatttccgtgcacattgaaacggcgggcccacatgaaaacgaaattcggcacattctctccaccgatgggctctcattcgtccgttccaaagtgggcacttacgtgcgcgagttgaaggaggagttcagcaaagggatcattttgccggtggacagcaaaggcgccattcgtccgcaggcggtggcaacgcaagggaaaacggtggtggacaagaggcgctttcagaatgataagacggaggagaaagtgaccacggcggaaactcaaaacgctctcaaaactggtggtttcgaactgaccgagacattcaaagtgccgcccgaacgcctttttgagattttgactgcgtctgag

SEQ ID NO: 88857 - DNA, 1071 bp, Heterodera glycines
gtccaattaaggtttgttaattaaattccgtatttctgtgttcttccaatacacaatgctccaagaaacagaggcaaagtccgattcgagcaaagctccaaacgaagtggctttatcttctgaaggtcgtatcagcaagctttatgtggaatgtttcaacgaacgcgagaagtgtttaacggtcatcggagggggcaaaatggctactgctttagtgcatggattagtttccgctggttttatcgacaagtccgaagtgaatatctgctcaagatccaaagaaacggcctttcgttggacgacacaaggttaccaaaatgcatatacaaatgatgaattttacagcaaagtgaaaaagccacgtggaattgtgattgtcgcagtaaaaccacagatctttcccgggtttctcgacgaactgcgtaaaaatggttggcttaactttgttgggcctgaagtgctttgtgtgtccataatggctgggattgcacttgacacctttaaacagcagttgaaattggttggtttcaatggccatgccgcccgttttatgccaaatgtgaattgtctcgtttctgctggtatcgttttggtctgtgccgatgactgtgttccgacggagatggtttagcagaaattgctctagttatcaaattcatgcaatttttcgaatcgacgagtcgctttttgacgccgcgtccgcccttgcgagctgtgcacctgcatatatgttcactgtgattgaggcattggcagacggaggcgtactgaacggcctgagccgagagatgtccgtccgactcgccgctgaaatggtcaagggctcagcgcagctgatgctaaaatcgccggaagtaacttctccagcgcaattgaaggacagggtttgttcgcctgctggcactaccattgctggactgcgtgagcttgaatgctctggggtcagatcggcattcattgaagcattaagcgcttccactcgtcgtgccactgaaatggctccgaagacaaactaacaatttttctggttttgatagttttttcgtcaataaataattgtttttgtaaaaa

SEQ ID NO: 88858 - DNA, 766 bp, Heterodera glycines
atttctctaaaatatatttgatgaagccgcaagaattttctggagctgacaatgagcagccatctccgagtcgccactcaataattggtgttaagcgcaagttcagttcgattgattatgcgtcatctaacagtcctgtaaaagtgctgccgagttttactagcacatttctgcctgatttatcaaatgcgcaagtgttgaagccaaagcccaccaatgttgatcgtcttcctttatcaaatgaagaatttataactccaactcagccaaaaaagcagcaaagtcgtccaaattccccagcaaatggcgtatccaaattgatacttccgagaagccgagtcgcttcaatacgtcgtgagtcggattgcaattcagagaaaggatttggtgaggcggaagcggcacacgaaaaaatggtaaaatcggcacagcaagtcgcgatgggttttgaggatttttgtctcgacgacaaggctttcgaggagcgcaaaagggccaagtcgttgtctgagcctatttgcattttcaccaatgcgttccttccccaatgttcgtcaccgtcgccgagtaggggttcaatggatggacagaaacaatgctattctccgtctgcccagcaagtcgtccgcagcaatttggcgtattctccgagtccgagtccaactccgtctggcactcagtcaatgcaccgaatgaggtcttgcgagagtcaaacgcaccttcccgatgattaatttattgaattcgctgaaataagagactatta

SEQ ID NO: 88859 - DNA, 1235 bp, Heterodera glycines
gtccaattaagtgtctttctcgtcaaattgcgcctcctttcgatgctttgtttgcgaagggttctttcaaatggacattcgttcgtcttttctgtttcgtcagagtgccgttccacttatttgaccacttcttccaatgacccgtccgaatttacggcggacgatgtcggaaaattgtacaaagtgcccagcaatctgatgaacgtattgaatgtcagaaggaaaatgccggagttcttcgtaagacaattggacacgttgcgcgaatgcgtttggctttaccgtcagcaaacgcaagaagctttccattgtcttcacgaggtcgacttggctcatcggcccgcccttcgcctcgtcctttggggccattttggcaccggaaagacaatcactttgagtcaactgaaccacttggcaattaacaaaggatacatcatttttggcgtgaaagatgcgttgcgttggtctcgtgacaattaccgtcctgtacaattgtccacgtataaacccggtcggttggacagtccatggtgggccgtccgtttgctgaccgccttcaaagttgagaatggccacgcgtggaaaaaactcgcggaattgaaaacaacgaaagattacgaatggacaaaggtggaaaagacgccgaagagaaagcctttgacggacattgtcgaaatgggtctgaccgcccccgctttgtccaccgattgtgtgggcgcactttgtcgcgaattgcgcgcgcacgcctccgccggctcaataaaacttctggtgaccattgacaaggcgaacggtctcttcagcgaaaaatgcgcggtgaaatggccgacggatcggagaaaagcaactccggatgaattgtcgttgaacatttttattcgtaagtttttgatgccaatttggtcaaatggactgtgcgcaatgattgccgacaaagcggtggtcagcgacgcgcgtgaccatctgtccgtctctccattagatccacgcagtttatttggcgaaagaggctatgaacaaattgagccattcgtatcggtggagtcacaacactattcggaggccgaattcaatgtcatccacgactattatttggaaaagaattggattagacagaagaagggacccgagggggaggaggcaaagcgacagatgatgtatttgagtgcattcaatccgagccattatgagagactttgctcattctcgtggaaccttagctgtagtgttcccgt

SEQ ID NO: 88860 - DNA, 797 bp, Heterodera glycines
gtttcatatttgttatattgacataagtatctaattagcactttgttattttctgcaaaatggaagagcgaatcaaaactgaattgcgtggtagacaaccttctgaagtccaagaccttctgctcgacagctgcaaagcgaacacaattagcgggctgacagaacaattcacaagtctcacaacactttcgctgataaatgttggattgactacattggatggtcttccgaagttgccgactttgcgaactatcgacctcagtgacaacaaactcagcggtggtcttgataaattggtcgaatgttgccctcgtctctaccacatcaatttatgcgcaaacaaaattacgtccatggaggcacttgctcccttgagcaagttggaggaattggcggcacttgacctgttcgactgtgctattaccgagggaccggaatatcgtagcaaagtgtttgctatgatcccacagctgaaatacttggacggatttgacataaacgatgtcgaggcagaaatttcggatgaggaagaggaggagggagctgaggacgcgctcgaagatgaagacgactcagaggaagaggaggagggagtggacacggacgacgaggcggcgcttgcctatttgaactcatcgaaagctctcaatgatgaggacgaatcagaggactatgtggaacaacggaagaaaccaaatgacactgcgaaagaggcaacgaacggggaacagaaagccaatgccaacaaaaattctggcgataacagaaagcgtaaactcagcgacaatggcgaggcg

SEQ ID NO: 88861 - DNA, 362 bp, Heterodera glycines
aatcattcgctgagaatgaaattgacaatattcgccattctgtttgtggcattgtttattgccatcgctgaagcagatggcaatgtccgggcaaaacgccatgaagaacgattgaagcgccaagacaaccgagctgatgaggagaaccgccaggtagacagtgctgatcgggagaagcgccaagacaaccgagctgatcgggagaagcgccaagacaaccgagcaataatgtattaagccattacggatgacattagattttccgacaagaaacgtctactatgaaaatgtttcaataatacaccgaaccttattatgtaaaataatcaaataaaattttaaaaaaaaaaaaaaaaaaaaaa

SEQ ID NO: 88862 - DNA, 589 bp, Heterodera glycines
gtgatacaaataaatcaatgaaatttgacaaaaataacaaaatgaatgcaccaaagcgtcacaacagcgtcagtttcactgacccatcaattttgccgacagaatgccaaaataggacgaaatggcgaagttattccacaaatttccaatcgaattgccatcctcacgggtcgctgttgagttttgtgatgcgacacaaagtgaaaaacggaggccccagcagagaggcggcgatgttcgctgttccctcctcgattccctcacttcccatggccattctccaggcgatgatcgccccgaatctgaagaaaggccattcctcgggtactttttcgttggacggcgagggaccgtccgttttttcgtcggtttgctcttcctccgtatcaacgacaggcgctcagagcaacgctttcggaaggactagcgaatgccaattgggcacaacgccaaatcggtcatccgacgatttttgcgtttgcccttcgccgtggaaatacgcgcaatcggaggaaaaagaaacaaatggatatttgttcattttgcactcaaattgggcactgcaaaaggaacgaatggaaaatcgacg

SEQ ID NO: 88863 - DNA, 590 bp, Heterodera glycines
ttaaggttttgttttcgttttttgataatttttggcaatggacgaggacgagaaagacccggacacttacggaaattggcaatatgaggagaagccatgtgcctgccattgttcgtatctgcgtgccaagaaattctaccgagttgattgtgacttcatggaccgcactaccaaaattgttttggatgctttcttatcggatactgcgctcagcggactagacattacccacaccgctttggaggtgcactacgaatgcatactttgtctcgaaattgcctacaaaacttacgaaattgtgtgtgaagacgaaacgagtgacagatggggccgttacatgacaacgtacggagatgagcccatcgttggcattcgcaccacggattttgatggcattcagcgcgtgtttgatggcatgtggaaggactacaatttaattgtcagcaattgcaagcattggaccgatgatatgatcagacgtctcagttaaagcagaaattcccataaataaataattcgatttgatggatttcacaacggaattcgaagttttaattaaatccattggaatttgttaattgaagcggaaa

SEQ ID NO: 88864 - DNA, 781 bp, Heterodera glycines
acaataaagttgttttcgttcgttataaattcacaaataaatctccaaaatgctcctttcttccaactttgttggcgttggccgtgtcgcgtctcgtgccgttcaccgtttcttcctgtcgacttccgctgtgcgccttcagcaacaacacaaagaagaagaaaatatggacattgaaaatctcttctcggaacagcaaaatctgccgcaatcgcagagcgaagaccaaccgcaggtgttcgatgcaccgaagcgtcgcttcaacaaaggaatcaaccgtgttgaattgttgggcggtgtcggcagtcagccattggtaaaacagaccgcgcaaggctccgcttttgcctctttcaacttgtacacaaatgtggagcgtcgacttggcgatggcaccacaacgaccaacacggaagtgcacagtgttgtcgcattcggctccatggccaaatacgtggagaaaaacgtggaacggggcactcgtgtctatttgactggccgtcttcactacaccggcggtgcacttttccccgacgggacgcgctctccacgtatttgttcggtgaacttggaaagcatttacccgctctccaagcaaggcgcaattttgcgttaatgcgagtgaggcaattagaaaacgaattttggcgatgatggttgaattgaccagatgatgagacattttgatgatttgatttgtttttgtttattttttgagtcgttgttatgtcgtacaataatagaaaaataaaaaaaaaaaaaaaaaaaaaaaacaaaaaaa

SEQ ID NO: 88865 - DNA, 632 bp, Heterodera glycines
ataagacagaaaattatttaacttattccttaaaccaaaaaatcatggttcgtcgtggtggtcgttcttcttcaccaaaagctagcgctccggttcgaagtgtgaaaagcacttctcctgctcgttcggccgttccgtctcgtcctgctggtactcaaccaacttccggtgcaacggcaccgcagcagaaagggcctgggctgctcggacaaatggctgcaactgctggaggagtggcgattggttcggcaatgggtcatgccatcggtaatatgttctctgggggtaatgctcaagaagtcgctgctcagcaagatgttcctgccaattcggacaactttgaaaccaccaagcagtactcacagccctgtgagattgagtggcgccagtttcttgagtgttctcagaaccagagcgatgttagcatatgccagggattcaacgacctcttcaaggaatgcaaagctcgctttggccgttagaccttgaaggaaggaattagaaccaatgagaaacgaagaggacgatttatgtgttaactgtccaacggaacattgctattattgatatatgaattaggtgttgggacataaagcatttcttgcgctaaaaaaaaaaaaaaaaaaaaaaaa

SEQ ID NO: 88866 - DNA, 844 bp, Heterodera glycines
aagattcaagacaaggagggtatcccacccgaccagcagcgcctcatctttgccggcaagcagctcgaggacggtcgcacgctgtcggactacaacatccaaaaggagtcgactctgcatctcgtgttgcgtctccgtggtggcatgcaaatcttcgtcaagaccctgaccggtaagacgattacgctcgaagtcgagtcctcggacacgatcgactcggtcaagaccaagattcaagacaaggaaggcatcccacccgaccagcagcgcctcatcttcgccggcaagcagctcgaggacggtcgcacgctgtcggactacaacatccaaaaggagtcgaccctccacttggtgctccgtcttcgcggcggcatgcaaatttttgtcaagacgttgacgggcaagaccatcacccttgaggttgagtcgtcggataccatcgattccgtcaagaccaagattcaagacaaggagggcattcccccggaccagcagcggttgatttttgccggtaagcagctcgaggacggccgctttgtcggattacaacattcagaaggagtcgaccttgcacttggtgttgcggttgcgcggcggtcagtaaaagtgctcgtgtttgcgcgtgcggtccgccctcattgctctcgctcgcccctcgcccttatgatgacgctttgttgtccttgtgttttgtaagagtgtgagtttgtacatttattaaccccctcacgccatccagcaatcttcccccgtcgagttcgttttactgttgtttttcacaatttgaaaacttgtttatatacattccaactcgtctctcgaaaaaaaaaaaaaaaaaaaaaaa

SEQ ID NO: 88867 - DNA, 393 bp, Heterodera glycines
gaaaagatggcttcttcctcaaatgctcagcaagcggccgcgttgcagatggtcgcggatttggagatcgaaatgatgacggacatgtaccggcgtatgactaaaagctgtcaagaaaaatgcgttgatactcactacagggaggccgaccttaccaaaggggagtctgtgtgtttggatcgctgtgtttccaaatatttggaggtccatgatcggcttggcaaactcctaacgcagatgacgcagcaggacgatcgtgcagttcaacagcagcagcagaatttggcagcggctgctcaaaagatgcacatcaacaaatgattagattgtctcaccgttgatttttgtcattgtttgctcaattcccaaaattaaacaatgctaagcgaaaaa

SEQ ID NO: 88868 - DNA, 962 bp, Heterodera glycines
gttgttaataagtgccaatgactttccctaggaacagtttgcttcgttctccaagaattcgaccaaatttgctcaatttttccgcgtgtttctcctcaccctctgatggcagtgctccccgattggaaggttcttcaccaccaccgttggcatcttcaattcgcttcccccactttgtttctcgtcagaaatttactctctcttccacatatgaaaagcaagactggttcccaaaacacatgggcgttcaactgaaagtaatggagggaaaacttcgaaccgtcgatttggtcattgaagtgcatgacgcccgggttgccctgaccggaaggaatccttcgttcggtgccaaattatattcagtgcgaccgcacattctcgtctttaacaagatggatttaatcaacatgaaacgctacaaggaacccatcgaagagtactaccggaatgagcagaacattaccaatatttgctggacaaattgcaagaatttgacaaacaaaacgcagtttcaaaatttgatggacaaaatgttggatttgttgcgaaatgaacatcgcttcaacagaacagtgaagacggaataccaagtgatggttgttggtattccgaatacaggcaaatcctcgttgataaacgcattacgcaatgtgaatttggactttggaaaagctgtgaaagagggcgcgaggcccggcgtgaccattcgggtgcaaaaccgtgttcgaattctcgatcgtccgcccacctatctgatggacaccccaggagtgcttaacccatgggctaacaacattgacgcggcgatgaaattggccatttgcaatttggtgttggatacgaccacacggcccaatttcgtggccgattatttactctattttatgaataaatatcgcgacttttcctacgtcgactttctaagaatcagagagccatccgacgacatcaaacaagtgctc

SEQ ID NO: 88869 - DNA, 787 bp, Heterodera glycines
caaaaatattttttcctttctatgtttataaagaaaggccaatctaacgttttaaatgcaatttttatgccattttatttgtgtcgtcaaaatgcagcagcttttgttttttctgcttttggtggcggacatttcgcacggaaaagggcaaaaagaggaaaaatccgaggcaaaatgcgacgaaaaaaataataatgaagcgataaggcttcacaattggggcggcaatttcaaattttgcacccaaaatgtcgaatatccgcgcaccaccgccgaagtgcaacaaattgtgcggagggcacaaaagctgcgcgtttttggcagtcggcacagctacaacaaaatcgcggacagttgcggcacgcttttgtcaacgctcggaatgaattcgatcattgccatcaatggaagccgaccgaccgtaacggtgcagccggggatcacttacacggacttggcaccgacactttatgccaacaatttcgctttgccaactttggccgcaattgccgaaataaccgtcgccggtgccactcaaacatgtgcccacggcagcggactgcccaactccaacttggccacccaagtgcgttccatgcgaattgtgctggccaatggcactgaggcatcttttggcccggagagtgccgaactgcatgccgtcgcgtgcggattgggcgcctttggcgtcatcaccgaagtcaagctgaatttggtgcccaccttcgacacgatcagctacaatttcgtcagttcgccaaccgaaagtctttactcgcattttgac

SEQ ID NO: 88870 - DNA, 644 bp, Heterodera glycines
attttgcatccacgtgtcatcgaatgggaaaagatggtgcgcggactaatcaataaatcgcgtgaagaacaagttgagcaacagcaagaagtcattcgtagcctacaagaagagaaccgttcgttaaaaacattgtttcgacgtgtctgtgcgcacagcaataccatcagttctgccttactaatgttcgcagaagatcacccggacactttccttcagcatccgattcttttgccgcaacaacaaaatgtccccacgccgagtcagctgcagttgttgccaactcgccatgacaacacgtcgtttagcgactcatggccaatactcggcggagcgagccaaagcctgacaatgcgtgcaagcgagacgtttcgaaaaacaactcacccgccaccgaatcttgggcttcatctgtttggcattcaagaagaggcgattattcccggtggaactgttgcagtgacgaaagacgccgaagtgacaccggcgagaaaaggaaagccgagcccgaagaaacaccgtccgtttcgcaatgttttcaaagctttgggcgacggcgtgtcgaaactgaagttctctacgcgaaagcgcccagagaagcagcagcacgggacgacactgtccgggacggatcagcgccgacc

SEQ ID NO: 88871 - DNA, 604 bp, Heterodera glycines
gtttgaggagaatctcagcatacaaatacatattttttgtccaaattcccgtccattgttgtaaatacacaataataaacaaacgatgagtgacacaaatgtggtgaccaatttcatcgctggcggcgtcggcggctcatgcgccgtcatcaccggccatccgttcgacacggtcaaagtgcgactgcagacaatgccaaagccggcgcccggacagccgccactgttcaccggtgcgctcgactgtgtgcgccaaaccgtggcacgggagggattttttgcactttacaaaggcatggccgccccgctcgtcggcgtttcaccactctttgccgttttctttggcggcactgcactgggcaaatggctgctgcagaacgagccgggccagcagttggacttcaagcagaatttcacggccggtgccattgccggcgtgttcaccaccgctgtgatggtgccaggcgagcgaatcaaatgcattctccaagtgcagtccatggacggcagtgccggcacaacgcccaaatacaccgggccggtggacgtggtgcgcaagctgtacagagagggtggcattcgcagcatttaccggggcacggcc

SEQ ID NO: 88872 - DNA, 1036 bp, Heterodera glycines
ttgagatggtcgaatgttctgattgttcggttggcgttgcgaaggtcaaaacggccaaagatgggctcccccgttgttcggattgtttcatccgttggtttgagaaagacgtacatgaagcaattgaaaggatggcaatttttacgcccggcgacagaattggcatcggagtgtccggtggcaaggactccacggtgttggcacacgtgctaagtcggctgaacaaaaggcattcctatggattgcaattggtccttttgtgcgtggacgagggcataaaaggttaccgggacgactcaattcgcgaagtgcaaaagaatgaagcggacctttctctgccattgacaattaccagctacagggacctttatggatggacaatggacgaaattgtggccaaaatcgggcgcaggaacaattgcacattttgcggggtgtttcggcgccaggcgctcgaccgcgcggcactccgtgccggctgcaataagttggccaccggacacaacgcggacgacgcggcggaaacggtgctgatgaactttttgcggggagacattggccgactgcaacggatgggcgctgcggcgcgtcagccgacggacaaagcgacgacaaaacaattggggaacaatagcgacgacagtggaacaacctcagccgtggcggcagcagaaacgggcgacgacgagtcattgccgcgagtgaaaccgatgaaatatgcgtacgaaaaggacattgtgatttacgcacactttggcaaattgaactatttctccaccgagtgcatctacgccccaaatgcttaccgttcaaatgtgcgctcttttgtcaaggagttggaaaaaagtgaggcctctggcatcctcgacctgggtctcctcggggaatccactcgtctgaaggcacacgttctccagccaaactggggaaatggggaccgttggggataccatgccaagccaaaattttgcagggggggccaacctttggatggactgaatgttaaacgggggccccccccaaaacaagggcaaaa

SEQ ID NO: 88873 - DNA, 784 bp, Heterodera glycines
aagcaaatgggtctttgtaagtgcccaaaaaggaaggtcacgaatttgttttgcttcgaacatcgcgtaaatgtgtgcgaattttgtctgctttcgaatcacgaatcgtgtgtcgttcaaacgtacctttcttggcttaccgacagtgattatgatgccaattgtttgctctgtttcgaatcgcttagctccaaagagacattgaggttgaggtgtcttcatttattccactgggactgctttgattcgcgggctcgtcagttgccccaaacgacggctcccgccggttacaaatgtccgagttgtttggaatgcattttcccatccgaaaaccaatcgtcaccagttgttgacaaactcagggccaaacttcagacagtcaattggggtcgctttggtcttggccttcccagtatccccgaaaatgagcaaaaagttttggctgccaaagtcattgaaatcgcttcgaattctaatcaccgaagcgatgaaaatgtcagcaatcgtcacattgaagctcacacacagtcgccaatgatcgccaattctattacttgccatgaagatccattcgaagcgaacactttcactgcgaggtccaaatttcccacgaattcaaatggcaattcttcgaacagaatttttatcggtaatgaggacgactcaaaatatgcgaaggctgctgcggcagaaaaaaatattcggaatcgcttcgttcggcttccccgtcctctcaaacgtgtgttctttgccttactcgtcatcgctttcctttacttcttcc

SEQ ID NO: 88874 - DNA, 394 bp, Heterodera glycines
cacaacagcaacaacaaaatgatggcattgccttccgacattccctcccatgtcagccgaactcggcgagcagttcatcgacggaggagaaaaggccccgcggcattgcacccggctcagtgcagaaactacaaatgcaaaccaaagaaaacgaccaacgatcggattcgtcggctgctccgcctgacccggagacggcacgacttttgcccggccaaatacatcacttgtagaacaacgacactacacattaccacactaatcactcattaaacataattatattatgcactttggccgagtcccttcccaaattcccattgctcattgtcttgtcgtcttaaattgtgataaatgacttaatgatttaaaaaaaaaaacaccaaaaaaagaa

SEQ ID NO: 88875 - DNA, 123 bp, Heterodera glycines
gaagatggtccacgatgtgagctcaaccgttttgttcctttgcctgattatccatcgatgtgtgaaactgtagcattagtagtactgtattgtcgatggaataaaaattttattaaagaaaaa

SEQ ID NO: 88876 - DNA, 463 bp, Heterodera glycines
gtttgaggaaaaagtaataaaaagatgcttgttcgccaaaacaaaattatcgctgccgctgcccggggcgttttgttggtttccaaccgttcgacaacgcgtacgcctaccatgtgcgcaccgccaatgcgttgtccgagtgttcctaaacggttcggcatgttcttcttttgctgtgtgtccattttgggttatccgacttatgtgatgctgaaccttgacaatgtgcgtccgttcaagcagacgcacttcaacgacgagctcaatgagaagctggaggagcgccgtcgcttacgtgctgaaggcaaattgaacgttcttcaaaagaagctgtgagcacaaagatgtagaaaaggaatgacaattatagcggaagatgattaattttgctgacaaaacattgtcaaatttagtgctatgaaatatacgtgatcgtataaatttgtttttccaaaaaaaaaaa

SEQ ID NO: 88877 - DNA, 635 bp, Heterodera glycines
aataaattcaaccttaaagaaggactttttgtcttaatcaaatggttcgaattttgttgccaaacggtgagtcggccaacgtcagtccttcagaaagtgttgaagaagcgattaagcattgcgttggtggagatatttcatcgcagaatgactattcattggttttctttggtcgcaaattaaactccgaccaacgcttagctgacattccgcatttggacggcgagtcacgctcagttcgattagtctgccgaaaatcgcccggtgttagcattgaaaagaacctggcggatgtggacaaactgcggtcacaatgccgaactttgtaccagaatcttggcgaggaacttcagcaaaagctggagacatatatggtggacgataacaatgccatattcaattccattctcaaagaccatcccgaacttgtgcatgatccgatcgcccttcccattgtcaaggatttgcgactgctggtgcctgccatcattgagaaccataaatttgcctacgagcgtcctgtttgtgccaagattttgaagaaaactttgctccaattcggcataatgcagcaagggcccgcagattcgtttatggcacaacagggagccaatgggtttccgggacaacgaatg

SEQ ID NO: 88878 - DNA, 826 bp, Heterodera glycines
aagaaagggcttgtccttcaaggtggttgtggacatgaatggaaacacggtggtgtacaacgacagggacgtgccgatagggacgggttctgtgcggaaagtgggcgaacgatcatatgaggcggtgatcagcaagaatctattcatcactcggctgaaggatgtccggaggggcccatgctgcagagagttgacgggcgaagaatgcaccgaacccattaagttggccaacccgcagttcagtcacccgagccaaagggacgacaatggcacgacgaggctgacctggcccgactgtttcgacatgtccatcgatgtcactttgccaccaactgttcatatcaatcggctggccatgaactattggcagaagcaaggcgcaattgacgtgtggatgaagttttttgaacgggcgcccaaccgagcggagatggaaaaagagttcttctcgcagttggacaatcctttgctgggcaaagccttcaaattggccatcatcggcgaatggttggccgccaacagtttggaccagggaagttacacgccgaccaactcggaattgttggagttttgggtgtcaaaaagagcgcccgaccgattgttggcatgcgagcacggcgtggtcgactacgaaattgagggctccaaagtgaaaacgaatgttttgttcgaagcggcaacgaccgcaggaaatttgccgaacattttcaaggacaaaaagtgtgccacgtttgaaaagttgcaggaggaacggttcaaacaggaagtgcacgagttcaagcagcgcgggagcggcggaggcattatcggcagcattggcaacttt

SEQ ID NO: 88879 - DNA, 603 bp, Heterodera glycines
caatctcaaacataaataaattgaatatttgcaatggcgtcaatgtcggatcggatgaagctgatgctaagctcgggaaagggcgccgatgtgcactttttggttgggcaaagcgacgcgaagaagattctcgcagcccataaaacaattctgatttcggcctcggatgtgttcgagacaatgtttcgctttgacgccaaaaatgcaaatgttggaaacgtgaacaatcccgtggaggtgcccgatgttgaagttggtgcattcaatgtgatgctcagcttcatttatgccgacgatttgagccaattggacggagacaacgcaatggcagtgcttaacacggccaaaaaatacaacatcactggactggtcactgccattaagaacatgccaattgcgaagatatgcggcgacgttttcatgacattggcccaaagtcgcctatttgaggaatcggatctcgtcgagcgttctttggcgtacattgaccaaaatgcggacactgtgctcaaatcggaggaatttctgcaaattgaccagcaaacgttgtgcgaaattttggggcgcagtcaattggcggtggaggaggaaattacgatttgg

SEQ ID NO: 88880 - DNA, 610 bp, Heterodera glycines
gagactttagctcaaatttcttagagaagagtgcgttctcttaatttttcaacaaaatttatgtgctccgacaacaacgaattgctgaaggacccttccgccgcccacaaattgacgcttttgttggccaaccgccaccgttgtcataaaagcagaaaaactttggccgattttttacgaaaaaaatttcattttcataaccgtcgtgtgaaaaactgtgccaccaatttgacgacgacgacaaaattttttaccgatattagaaagggttgttacacgaaaagcattgaaagaggaggaggaatagcctaacaaaagtcgaggacaaagtgccgaaagtcgagacaaacgaacaaaaaaaagtgacagaaaattttgaaaaaaaaaatggggaagaaacggaacaccaacaaagtgtcgttggcattgccaagtgtgtcggcactgtccgctgctgctgcaaatccaaaaggtggtggtggcggttcggtgtgtggccgtgaacggttggagttgctcagcgaaatggacgagttggaaagtgtgcactcgtcgatgaccggcggcggagcggacattggcggctgcggtgattccgatggcgaaaaca

SEQ ID NO: 88881 - DNA, 403 bp, Heterodera glycines
cggaaaagtcactttcaaaattactttgacaagtgatccaaaatcgccgttcaaagtactgagtgtccccgaaaatgctccgttcactgccgttttaaaattcgccgctgaggaattccgagtcgacccatccacaagtgccataataaccgacgaaggcgttggagttaatcctgcgcagaaagcatcggacattttcatgaagtacggctcggaattgcgactgattccgagagacagagttggccaaggcgaatgaaagaggaaatgggtctaccgacacacgcggacatatcatttggcaaaaagggaaactgacaggaccgtctattgagactattgtgattgtttctttgttattttttggtagctaattattcggaaaaaaaaaaaaaaaaaaaaa

SEQ ID NO: 88882 - DNA, 497 bp, Heterodera glycines
  unsure (1)..(497): unsure at all n locations
gagcgcagcgcaattgatcgagccaaccgggcagaaattaacaaagtgaagatgcgcctctgtctggcattatttattgccgcttcagcattgtcacttggccgatggattgaagctggagtggtcgaggatgtaaaagactacgtcgatgccttttccgaaataagcgcaccggcagcaaccattggcgagcagctcaggaaaatttcagcccgagtttcaaagctggttcagttaggaggtccggtcggaagcctcgcagcattggctatgcagaaagcccttgaaccggagagcgaggaaatggtcgcgttgaaattgttgcactccaccatggtcaagagattcgatgtattggaccgtcgagttgagcatttgggcaataggctagttcagcacatggcattggtcgaatatgaccatgtatgagtattactattcgattaattactgtgttaatatatttaactagacnananaaaaaaaaaaaaaaaaaa

SEQ ID NO: 88883 - DNA, 620 bp, Heterodera glycines
aattaagaaaaaataatttgctgttaatttattttccgccgctacacaaattctccagtattaccgaaaaaacgacctcaaaatgagaactgtgcaaaccgcacgcaaaagcaccgggggaatgccgccaagaaagcaaactgcgcgcaagtcagcaggagggtcagggcagcgactgcaaactgcacgcttgccagcagcaggaggaggggaaccgattctgggcactgcgcgcaggtcagccggagggtcaggacagcgactgcaaactgcgcgcaggtcagcaggaggtgcagcaccgcgaccgcaaacggcgcgcaggtcagccggagggtcaggacagcgactgcaaactgcacgcaaagcagcagcgggaccctccctacggaatgatgtggctgatgaggatgatgacgatgaatcggtgtcagaagaaatggaggagtcgtctgaggacaatgagccgccccaacttgttcaagaagttcaccaaggctgacggcatttcggagatggcacagcagcaacagcaatcatctgatctgattgatcgatgtcggatatttcctcggcacacaaaatatttgattgtttttttaattaaataaatctgatccaag

SEQ ID NO: 88884 - DNA, 499 bp, Heterodera glycines
  unsure (1)..(499): unsure at all n locations
cgagtgttgttcatctgtttctgcttctgacaatggcactgctccttcttcctcctcctcttcttgggctgagttgggtctttctgatgcgactcttaacgctcttggcacaatgaatttcccttttccaactccaattcaaaatgctgtgattcctatcgctgttaaattgaaaaaagacataattggtgcagccgaaacgggcagtgggaagactctcgcatttgccattccgattctcgagcattggctgaccaatgcaattgccacaaatgtccaacattttccggtcaaaggctctctttttgcgcttataatttcgaccacgagggaattggatgttcagcagggatgtgcctagggcaacgaacatttggcggatttgtccgcacttcgatttttggttgttgatgaaattgatcggatgttggagcaaggccattttgagaatttcaagaaaaagaaatttaaaatttnnaaaaaaaaaaaaaaaaaaaaa

SEQ ID NO: 88885 - DNA, 533 bp, Heterodera glycines
cctcgtgccgaattcggcacgaggcgtcaacgtaaagaaataaagtcatcaaacaaacatgccgaaatacccgtcgtcgattgccgccgttgcgatcgtgggcaagctcaacaatccgctgctcgtccactcgttttccaacgacacggacctcaagtatcagtttctttctcacgcggcgtgcgactatgccgacgcggccttgaactccgacaccgtatcaggatctgggtacttgggcctcctcaccacattggacgacctcaacgtattcggccaccaaacaaacaccaaagtcaagttcttcctctttgtccaatcgggcatctcgccctcgacccaggcccagacaaaggacgtcgaagtcaaagcggcattcgaactcattcaccaagcctacctcgacctgctcgcaaaccccttccatgacccagaccaagtcgccatggtccactcgccgcggctactcgcccgattgcaatcctttgtcaccgcctccccgtcatcacaataaataatcaatacctccaaaa

SEQ ID NO: 88886 - DNA, 616 bp, Heterodera glycines
  unsure (1)..(616): unsure at all n locations
gcgagatgcacactcgacttgacagtataaaggcgtcctgcaattcgggtccttcaagctcaagtctggtcgcacctcgccctactttttcaatgctggtctctttaacacgggcgaccttctcaaccaagtcggacggttctatgcatccgccattctcgaccacgaggccacattccgcccatcagtactcttcggtcccgcgtacaagggcattccgctcgtcgccaccacggccgtcaacttggccgtcatgggccacaacatgccctacgtgttcaaccgcaaggaggccaaggaccacggtgagggcgggtcgctcgtgggcatgtccaagctacagggcgagcgagtcttgattgtcgacgatgtgattaccgccggcacggccattcgcgaaagcttcccgctgttgcgcgaccacaatggcgccaccgtggccggtgtgttnggtggcgttggaccgcatagagcgccgacagggcgagcggtcggccatgcaagaggtcgagcaggacatgggtgtgcccgtgcgcgcgattgtgactatggagaacatcatcgagtacttggagaagaagggtgggcaggacgaggcgcttgctgccatgcgcga

SEQ ID NO: 88887 - DNA, 888 bp, Heterodera glycines
gagaaataaagcccttgtttaatttaaagcaatttaaaagataaaattgaaatgtttgggctaaaaaccgcgcgaaatttgcagaaatatgttcaagtcgagtgggaagatggtcttttggcaaagttcaattacgtttggttacgcgacaacgcccgccggagtccgtcgttggaccatctcgacctcaacgcgcggccccaggaaatcaaatgcagcagagaggcactcgaagtgcaatggccgccattcattgcctcaagatacacttccaattttcttcgtgacattgccctcgatagccccgtggaaaggctttacggcgctcatagaggcagacaaaatggtcaatttggcaggtcaaagccatcgatggctggcccactcaatggccatttgctggctttttctgacgcgcgagtgccaattgaagacggaatcgaattaggcaaatgttactggggagaggaagcgcaagagccgggcacaatttggccgcacctcgccaaagtcccttcggttgttgcggtggacagtctttccgggccggctaggctttccttcgtcgacgttgagaaagtgctcatcgaaatgaggaagcgataccccaaacatttggtcttcctcgggacttgtgttctcgagtacgccgagggccctttcttcgcaactcatcccgtcgttagggtggacgaccaaggccatattctgccgtagggctttttcaacaacgccgcgcgttccagcgcaattaccgtccattccctggacgaactttacgagtcgctgcaaaagtttggccgcgtttgcgcagaaaacatatgcgacattcagctgatgcccggacaacgactcttcttcacaatatccgcggaatgatcggtgcgc

SEQ ID NO: 88888 - DNA, 840 bp, Heterodera glycines
caattaagcttatcaatttttaccctttccacttaaaatgacttatgtttcggcccaagcgcacaatgttttgtcggacattgacaagaagttgcatgagaacaatgcgttcaccaatttgctgggcaaaattgagaccaaaactggcctcaaacgtcttcacgtctttggagccttggtcgtcctttacatgctttaccttctgttcggtcgttgggctcagctggcgtgtaacatcaccggctttctctacccagcttacatctcaataaaagcgattgaaagtcaccagaaggaggacgacacccaatggcttacctactgggtggtttttgcgctgcttaatgttgtggaattcttctccaacaccattctgtactacttccctttctattggttgatgaagtgtgctctgctgttgtggctgtacttgcccagcactttgggtgctcagctgttgtacacgcgcattattcgtccgttccatcttcaacagcacaagaacattgacagcatgtacaacaaattggctgggggtgcacaaaaggcatacgaagagcacgtgaaagagacctgaacaatcgtcagaacaagaagatgaagaagtacactttttgacatcacctctctctctgatttcgtatattacaattcttgacaggaaactttacccattttttgctgtcttaccaatatttgcgtctcttttgtcgtttgctgttcatttggctttaaaataatactctcgcgagacaattttgctatgctttgattatctctctgatcaatttgcagttaataaacttatgctagtttgaaaaaaaaaaaaaagaaaaaaaa

SEQ ID NO: 88889 - DNA, 634 bp, Heterodera glycines
attgttacaaaaatgctttcttcttccgcctgctgtactctgttggccgcgctcatttcggcggcgtttttcgccgcggctaacccaccaacggtgaagcagtgcttgtgctccgaaattcagccctgcacccaaaagtacatgaacacgtggaaggcgtgcatggagcagtgtaagggccatctgtccggcgtgggtggcaacgtggacaaattgggccactgcatggacagcaactcggcactcctccaatcgtacaatcaaatgcacccaatcgcatagccaaacggcatgtgccaaatcggcggcatcagctaaacaggtgccaaagcgataccctgaaacgttggaaattgctacaatcagtgagatcaatcggatggtcaacagcatgggcatcgaaggcgcaatgaaaggtttgatggatgccggcaaaaaaatgtacggctgcacgagcaaatgcatgaacagcaaggcgggcaactgcgagaagtcgttcaagtgcggcttggactacccgccggacaacgtggcggtacaggaagtgaagaagtgcgccctcaacagcggactgaacaccgccaacgcgcaagcgctgtgcaaatgcgcgtccgccgcgggcgttaaaaatttg

SEQ ID NO: 88890 - DNA, 803 bp, Heterodera glycines
caaataagtaatcaaagttaaaaatggtcattccatcgtcacttttctctttgatggaaattcggaaaacgaagaccttctccgtctctccctcttcaatctccgattctcctcccaactcttccgctgacattgcttcttctctgccctccggcgatgacgaagtgtacgacaccgccttcatctcgcgcggctcaaattgtgtggcggtggcgacaaacagtgcggagttgcgcatccattgtttggactcgggcgaaagtgtcggcgttggccatggccattcccaaagcattttgtgcgttgactcgccgagttgggacgatcaaatggtcgcctccgggtccaaagacaattccattttcttttggcgcattggtggagtgaagacggactcggccagcgatgggcaccaaaatttgacggatgcatttatggccgacaaaattgcagtggccacagggcacactcattccgtggcaagtgtcgccttttcccactccaaaagtttgccctttctcgtcagtgtgtcgacggacaccacactgaaactgtggcccctctccgaactgattgtcaagcaggagaagggcgaacagcagcaacaacttggagatttcaaactgtcggcctccgccaccgatgtggcccactccaaggacatcaacagtgtggacataagtgccaacgacagactgtgcgtgaccgcgtcaatggacaagacggcaaagctttggcacatcgaccggaagactggccaactgagcgcgggtgggacactcggaggacaccagcggggcgtg

SEQ ID NO: 88891 - DNA, 602 bp, Heterodera glycines
gttaagaagaccacttaaattttaacgaatattcgtgatggaaaatgcgagattggagtcttttgctacaaagaaacgtgataagatcatacaaataacgaaggagcagtttctggcgcccatcaaggacgaatatgtacggcgactgtcacaaacgcccattgaacagattgtcgatgacggatataacccaggcccacaaaaaccggacggtacggtgaattttgagtgccattgcgttgcccatctggtggccagcccgtgcgggcacgacttccgcaaagcgatcagttgccaaaaagcggccaccgacgcggagttggagaagggcaaatgcacggaggagttcttctcgttcatgaaatgcgcgatgaaaactcagtgcttccgatcaagagatgaagaaacactcaacgacccattgcagcctcaggacgcggagggcgatcactgatgagaaggcgggaagaaccactggtgatcaatcacaatctttgttggtctgcatattttcatttcatgttttgttattttttgtttaaatattgcacgttttgtatttttttaggctccgattggattaaaaaacaagaataaaaaaa

SEQ ID NO: 88892 - DNA, 560 bp, Heterodera glycines
caatagtcgctcatttgtcgccaaatcatgcgactgaatgtactgctcgcaatcctcgcccccctcctcctgctaattgcaacagcaacgctttgtggtgccaccggcaaagaagcggcggccaacaaaatcggtgtcgccgccgtcgctttgtcagaggcggacaattcgacgacgccggcgccaccgccgccgccttcgccgggtggcagcgatgacaagaaaaaggacgatgacgataagaagccggacgaggatccggcaaaaaaagggcaacggaacggacacgggcgacgacggcaaaaaaacggacgaagcgggcggagcatttggcgcggggtccatttttgttgccattcttttcggcatggctttgatgttcggactgatcaaaatgtatgtccattgggagaagcggcgcgagtcggacccaccgaactatcagatgtattgaaaaaacatggaaagcattgggccaaaacaaacaaagatttccttatttcatttgttgttgttttttgcatcatttttatcacttctcattaaaatttctctaaaaa

SEQ ID NO: 88893 - DNA, 508 bp, Heterodera glycines
atttgtgtacacgcatctaacgattatgagcggcggtcgaccaattaccacacttgcagaggctagggctgactttggcagagctaagggccagtttaaacgtgctgtcatggcacttccaaaccactcactggacggtaccttcagctctttgagcgcctatttcggcttggactcgagcgtcggtgttcagattgttcgtgacttggggctgaccgatccagcagccatttttgaaaaacgggtggaccatctatgtgagatggtgtcagaacactgggacgtccaaatgtttgggcaagcgactcgttacttacgtctccgctctttgaactacaatgatctcgcaggttgtttccgtcgtcccagcacttcgtgaaatctcgcattcgcatcacgaaaaagaagtgaccgttgattttgatgttttcatgcgtcaatttcgtattgttgatgatggtgctctgttgtcgttgaccataaagtcttgttcagataaaaaaaaaaa

SEQ ID NO: 88894 - DNA, 698 bp, Heterodera glycines
ggaggacgagcatggcgccattgcgttggtgagaatgtgtaaggcccacagagagatgacagtggttgcgattggaccgttgacgaacattgcaatggccgttcgcctcgatcccgactttctctcctacatcgacaagctgtacatcatgggcggctcgctcctcgccaagggcaacgccacgcgcactgccgaattcaactttgcctgcgacccagaggccgcccacattgtcttcacgtcctcgaccaagcactcgacacgcgctccgaaaatcgtgctcgccccgctcgagctcacgttcgaccaagcattcgactgggacctgattgcccgcctcagcgacccgtcgcggcacgccgcgcacccgtggtccaagttcctgtaccgcatcacggcggcgctgcgccgcatgttccggtcgcccgcgcacctggatgccgtggcgcaggcaaaggacaagcaccaggcacgacgtgcatgtgccgccgcaccatgttgcgcgtgtggatacgtgcgagtcccattacttggccatttgcgattcgtgcgccacgtttccgctggccgtgcccgagtgtgtggatcggaccgtggatcagcatgtggagattgagttggcgggcgcaaagaccaggggcatgatgatgttgcagtggtgccccggcgcggatcgcagagggttggcaaagaattgt

SEQ ID NO: 88895 - DNA, 626 bp, Heterodera glycines
gtttgagatatggcactctctctattccttctgttggtcggaacaatcattgctaattgcaatggtgacccaaagatgaaatctgttgaagagaaaagtgtgccgcctgccgccttttggccttacattttgcatccaaaaacacctcggcataaatcagaagagagggaggattactacgatgccgtacgagcagaagaggaggaggcggagaaggcaacattgacaagcagtacagcagcaaacagaggcaacgaaaagcaacaagaagaagaggaggagcaggaagaagcgagacaattacagcaaatgatggcacttctgttggccaacattgacccggtgccaatgtttaccgccaacagcgaaaagccaaaaacgatagcacaaacgatggcaccgacaaaggcagcaaccgcgttgacaatgtctaaagtggacggggaaacgtacgacgaacggacagaagcgggcaaagacgacgaagagacagacgatgatgatgacgaagagcatgaaacccgcaaaatggttgacacggaattgaagaagcacaaattggttgtgctgccggacggatcggactctgccgatgtccgagaagcggatgcagaggcagacggagt

SEQ ID NO: 88896 - DNA, 662 bp, Heterodera glycines
gttcaccaatgcttccgctgacaccagcaaaaagattcgtctccaaaaagcattgtgtcgattcaattcgatggctctctctccaaaggacgacttttgcgaagacaattccgcccggtccgcttctgttttcccatgtttatttgccggaacggacgccggacggacagccgcagcgcaaaccgtccgaacacccggactttatgaaatacgatttcatggcggatcccgaatttgaaaaaccaccgccgccggtcgaactttttcttcttgaggatataaaagaccttggcgaaaagtttgacattgtcaaagtgtccgccgaagtcgcgcgttgggatttgctgctgaagcgaagggcggtgtacgcgtcgccgttcaatttgaaatattacgcggagaagagaaagaagtatttggccgaaatggaaagtcgtgtgcgcattccgctcgatttgctcaaaatgtcggcacttctcatgagccaaattttgcctgtgaccgtttccgcggacgttgagtggacgctgagcagtgagatgctgatcaactccacccagagcttgggtttgtacataaccgagccgggcatcatccatttggacaatgtgtcgacactcaatgggccccgaccgaacattgagggccgtctggttccgttt

SEQ ID NO: 88897 - DNA, 536 bp, Heterodera glycines
ggaatagccgcatggcaaacgacgtttggctggacactctgttttggattgaccgcactgaggctggtggccacgcatttcaaactgcccaaatggaagctgggcgagctgggcattcatcgggcaccaagcggatgggactggggcggcacggcgactgtcaccgttatggacgaccacccgatgatgaatccactgccgcttgccaagtgtcctgcaccgaacggcgtgattggcttccgtgccatctacatttggtgcgtcgacctggaagtgatcacatttctgcagtgcctgcaacgcgttctcaacctcggcatcgctgtgcagttcaccatccattcgaaggatgtccgctgctggtatttcgaagcgccgagtgccatttcggtcaattacgtcgtcgtttgtcatcgcgtcgcaacaccgaggtcgttgagcgggagaatgaacggacgggcgagtggctgacgctgcgttggcgtgtgcccgcggaggctgtggttgtacgccagcggagcggcacggatcggcgc

SEQ ID NO: 88898 - DNA, 642 bp, Heterodera glycines
ctcatttgtccattttgccattccgatgtctccaccaaaacgtgccaaagtgtcagccgatgatgatggggagacaatttccgacgacggggagccatcaacgtccgcgggggcaaagcgaaagcaaaaggcgtcgaaaccacgccagcggaaggcgcacgaggcattcattttgctggtggacgtgggccgttcgtctgccgaaaactcggcgggggcacagagcgatcacggcaccaccactgacctcgaccgatcggtgcaaatcgtcgattgggtcctttcacgaaaaattttcaccgaatcctccgatcgcttctctctgatgttcttcggccacgaaaacacgtccagcgacgaccatccgaatgtttacgtgcacaacgaacagttcgccacggcgcgggtcgtaatggctgcacgtgttgcagaacgaagtgcagacgaacgtcaaatgccccggcgattacgtcgacgccctttacgctgcgttggacgcactgaaagtgcactttgacgacgcaaaagaggcgggcgaaccgatgagcggagcgacggtcactttggtgagcaatttgagcggattggacgacgagcgggcggtgatggacggagtgggtgacatcgcggccggcttcaaag

SEQ ID NO: 88899 - DNA, 623 bp, Heterodera glycines
ctttagggtaaaggcctaaaatgaacaatgaccaattgcacgattggctggccgaccttcacggacgcttttgtcccggcagataccgtcagcaactgtcgtccgatggctctgacgtcgtcgctccgccggcgaatggcgacgcgtcgacggccccggcggcgctgtgcccttcgcccgagtcgccctcccaatggcgcccttcgctgtgccatctaagcccccccaccaacattttgctgcagtatttcagctgcaatttcgaggacgctcggctcagctctccgcttgtcgcccaattgctcgctctttactacaaattcggcgccgcgcgttgttttgtgcttcaattggtccccacatttatttatttgtacctcaaagcgttaaacaagcggtggctgaacgcggcacaaatgctcgagacgctctttttggccatttacaatgaggaaattttggccgcagggcccggcactccgtcgatggtcaaacggtcggaagaggtccttttgcctctgttgcgcagtgccagcgttgtgccgtcgtcggctgccgactttggcaccatctctggcggcagtgttccggggaaagtgaacatttgtccggagtcggccagc

SEQ ID NO: 88900 - DNA, 614 bp, Heterodera glycines
gtttgaggacaaaatcacaacgtaaatcaaagaatgtcttcaaatcctgtagaagggactgaaaacttgggccaactacgccaaacggcaccacaacaaacgactgccgcggatccgtcgtcattgaattcttcgaattccgctgccgttgaatcaatggattcggagggtgtttatctttttgctgaccgtacccaatcctccaactcgctcacccccgaacaggccttcgtccacatggtcaaggcaatgcttggcaccggacttctctctctcccttatgcgttttcccattctggtctttatcttggtttaatccttttggtcttaatttgtcttgtttgtatgttttgcatgcggcaaattgtttttgcggcccattacatttgtacaaagaatggtcgtgagattattgactatgccaacattatgcgtggtgctgttgaggcagggccgtcatggatatcgagcaggggatacttcttcaaacagcttgtcaatgtgaaaatgttcgtggcgcaattgggattttgctgtgtttaccaagtcttcatgtctgagaatatcgcagattttttcaacaaaaacaccgccattcggttgagtaccggcgt

SEQ ID NO: 88901 - DNA, 577 bp, Heterodera glycines
agattctttattcatttttcatatatcacctacaacaatgcaacatgcgagatgcccctatgttaaagaaaatgcaccattgccgacaaacatcaaagaggcattgccaaaggatgtgtcagtgaaaattcaacaaatccatgacgatgggtcgttgagcgcggagcaaaaaatggagcgaattgactcgatcatttgcactctgccggagaatgacattgaccaaattccggacccgccagaagttgcgcaactcccggctgatgtgcgccagcgcgtcaaacaaattgaacgccagcagggaaagtcattcagcactaaatttgaagagatcatgaaatatgtggacactttgcctgaaggcacaaaatcggctgccaaaaacattttccattgaatttttcatggaaaaagaggagaggaaagaagtggaaaaagcagcatggattaatgaaagcaaggctaaacaatatttattaaatattttattttttggtaaaatatttccaatttttcatttccaataaatatttttgctttaaaaaaaaaaaaaaaaaaaaaaaaaaaaaaaaaaaaa

SEQ ID NO: 88902 - DNA, 673 bp, Heterodera glycines
tgagcatttcatcgcttttcctaaaatatttttcatttttaaatttgcccaatttccttccaaaacgccaatttatttctgctcctccccaccctcaaaatgctcgtcgactctctccgtcccgccactctttcgtcctccaaaaaacgttcagcgcattccatcgacgacaccgaccaattcattgaccacagtcccccgcacaaaaaacaactaatggacgaggaaaatgaccaaattttgacacaaaatacaccaaatgattcattggtaccggcggaggccaattgcctttgccacaaaagcaattcacgcggggaatcggccagaacagtgggacatgaaccaggtcgttccgccaatttcgctgtccaccacttacaaacagtcgagaccgggagagcccaaagggcacgactattctcgagccgggaacccaactcgcgacgtgctgcaggagaacttggccagcctggagggcgcgcggttcgcccgcgtgttcagttccggcctcgccgccaccgccgcaatggccaattggctccgcacgggcgaccatctcattttggcggacgacggatacggcggcactcagcgctatttccgcgacatcagtgtggcccaccatggcgtgcagcttaatttcgttgacctgactaatttgaacgagttg

SEQ ID NO: 88903 - DNA, 638 bp, Heterodera glycines
aggtggacctggtcaccgaccgtggcgagctggccgaacttgcgcacattctcaccgagggcaccgtgggcggtcaaccgatgaaaacgaagccggtcaaactcggcaaacttggcgcaatgattgcccggaatcggtgcaccaacaacgatagtgatgatggtggcgcagctgctggcgccgatggttcggaggtggacgacgatgccgttgtgggcggcattcatcccgcgcagcggcaaggacgcgacgcggaatggcaccggcagtacaaccaactgatcagcattccggcgcacagggccaattggaccaccactcgcaagctgttcggcgaccagttgggctggccccaattcagcgcccttttcttcgccagtgcgctgcgcggcgacggcatcgatccgttgcgccaacatttgcgctcggtggccaaaggcgtggacaaatggcgcatgcgcgcgaaggacattagcacatcggacccgcgcatgctgtgcgcggagcacacgcgttccgcgctgctcaaccgctgccccgcgtacattgcgtacgcgctgcgcacgcgcatcaccgagtgggaggagtcggagcgcggcggcgtgctgcgcattgcggtcgacgtgttctgcgacaag

SEQ ID NO: 88904 - DNA, 611 bp, Heterodera glycines
gtccaattaagttggcggtttaataataaatttatttaaacaattaatggcagcggcaacaacaacaatgccgtcattttattttcacaaacatttttttcaacgaatttttcctggcaaaccttttttcgtgcaagtattttcggcaggcgttctcgcagcaaccggcgacattttgtgccaaaaattcattgaaaagcgcgacaaatgggacccatttcgcacgtcgcgctttgctctgacgacagccattgtcattgcacccatccaatttcattggtttcgcttcatggaccgacgtattggcaaccccaaaagggagggcccggctggcaaagtgacccttcagacggggctcaagcgggtgctggtggatcagagtctgatcgcgcccgctttgaccgccgcctttttgttttccgtcaactttttggattcattttccacacaaaatgcgattcagcggacaaaacgcatttacttggacgtgttggtcaacaattacaagttttggcccttcgtccaaattgtcaatctgacggttatccctcttcactttcgcgttgtgttcctccaattcttcggcattttctggaatattttcctctcct

SEQ ID NO: 88905 - DNA, 624 bp, Heterodera glycines
taagaatggcgcgtcctttcattggctttgcgtttgatgccttcaaacggcgtttgggtgcccatgacttcccatttctccgtggtttcatccatggattcaattattatgatgcccaaagggtcaaagaaattggtgccgaaagggccgcggccgaatgggtcgtccgttgtgaggggaaagtgaaatttgaccattccccccacattttctccgattacaacgctttgcagcggttcacttccgaattggacccgaaaagagagtccgaccgcgtccatttggtggccgtcgatgccactgactcgtgcatttcgggctggggctgtcgccatttcgatgggctcagtcgcctccaaaatgttcaatttgtgcgctgcaaatcgctgacagacaatggcctccaaatgctcgccgattcgtccgtctccgacactttgctaacacttcacatcgaaaagtgtccgaaagtgaccaattcaggcatcagacatttgcgcaaattgaaagtgctgaattcgctgactttgcaaaatttgaaaaatgtttggaagccggaaaagactttggacgaaatcagaccgaatttgccatcggattgtcacatttcttacaaggaaaaat

SEQ ID NO: 88906 - DNA, 628 bp, Heterodera glycines
gtcgcgcaagggggagacgacggtgcagcctttacaagtttctttggaagacctgtacaaagggaacaatacaaaattgcaattgacgaagaaagtgctgtgcaaaacgtgcaacggaattggtggaaaacaaggctcggttcggaaatgtgaccgttgtcaaggaagcggaaaggtctttcacacgcgtcagattgggcctggaatgatccaacagatggcggcgcgatgtgatcaatgctcgggtgaaggagaaatggttgatgaaaaggaccgatgtaaaaaatgtgttggaaggaaaacggtgcaggaacaaaagataatcgaagtgaaaatcactccgggaatgcgcgataatcaaaagattgtcttctacggagagggggaccacgagcctgggattgaaccgggggacgttgttttggtcatcaaaacgaagtcacacgaacaattcaagcgaaagggcgaccatctcttcatgaaaaaaacggtaagtctcgcagacgcgctttgcgggttcactacgaccattaaacatctcgacggaaggcaaattaccctcaccacgatgcccggcgatattataaagccagaatccatccgaggagccatccaagaaggaatgccc

SEQ ID NO: 88907 - DNA, 791 bp, Heterodera glycines
ccaattccgaaagtgttccaccttcgcccacttcgtcatccgctgggggtggtgatcctctgacatattccgctccagtgaaccaacgaagcatggctaggatttcggcgtccactcaagcggcgaccatgatggtcaattccatcccggctggtcttgctgcgccgcaacaaattccgcaaacttcccaagtaattgccgcaactgttattagtgcgaccggtgcttctggcgttttgcaattgggtcagcaaagctcaaattctgaatttctgtcagccttcgaatgtcccgtttgtcttgattacatgcttccgccatatctgcaatgtccatcgggtcatctggtttgtggaaattgtcgtcctaaagtcactgcttgcccgacatgtcgaggtccaattccgagcataagaaatcttggaatggagaaaattgcagcaagcctgcaatttccatgcaaatttgctcattccgggtgcacccaattcttttatcatcatgagaaagttgagcacgaagagatttgcgagtttcgtccttaccaatgcccttgtcctggagcttcctgcaaatggcaagggagtctggcagatgtgatgagccatctaatgaaattgcacaaatcaatcacaactttgcaaggcgaagacattgtttttctggcaactgacatcaacctccctggggctgtcgattgggtaatgatgcaatcgtgctacaacgcctttttcatgctcgtcttggagaagcaagacaaacaagaacaatcaggtcaaagctaccaaatg

SEQ ID NO: 88908 - DNA, 674 bp, Heterodera glycines
gtttgagtcaataaattcggttaccaagcatataattgttttcatttcctgaagtatcgtgtgaacgaacagccactgagagcataatgccgcctggtttcaaggagtacttttttctcgacaaattggcaaaagcgtttaatattgtgaaacaaactgggggcatccgagcagccattaaacagcgttatttgatggacacgaaccgtgctggcacattgataggcgaggatcagtttggcaaccgatacttcgaagacaacacttatttcgtgccccggaatcgctacgtcgtctacgccgagagggtttggctcgactacgacgcctcgcaaatcccgcccgaatggcaccgctggttgcaccacatttgcgacaaaccgccgaccgttgagccgccgccggagcgcaagaaatggatgttggaacatgagccgaacaattcgattgtaatgagcaaaaaatacgtgccctattcgaccacacgcccaaaagtggagggatgggtgccggggaggaagagaagcgaagaggggacgacgcactgagtgagggcgaaggaatgggacgaatgaccgacggacggacaaaagacaaacggacgaacgaacgcaccaccaacccattcagttgtaatatttgtgagaggagaaggaataaacccaattaggact

SEQ ID NO: 88909 - DNA, 455 bp, Heterodera glycines
gcagggcttttgcaagattaagatctatgccatcaatccggagattgctgaacaggcgcgcaacatgcttgagtttttgcaaaagcatgtcaaagtgccgcatgacaaagttgggcagatgatcggcaagcaaggcaaatcgattcaggacattgtggacaaatcgggcgtcgtacgcgttcagattggcgaagaaaatccggaacatggccttgtcgacttcaccttcaccggcacgcgcgaatctattggcaacgctgaactgatggtcgagtttctgctgaagcacatcaaagaaatggacgaaattcgagaggaggaggaggagtgcaagcgaaaattgttcaactctcggcactcgcccttcacttacccgaacaatgggtggcagtcccatcagcagttgaacgccagtcagagagcatccatcaatggtggtggtggtggtggtgtga

SEQ ID NO: 88910 - DNA, 645 bp, Heterodera glycines
attttaagtaaatttgttatgtttcattgttattcgttggccatgctatcactgataacgctgctgttaagtgtcggtgccggtgctttttggccctattcgggtggccaacccgtggacgcctcaactgctgtgagtgcaccgtcgggtgcacattcgggtgcggtgtcctccagttaccatgacttgagcctggtcaacaacggatgcgtttaccataatggcatgatcaccgagaacgggggacaggcacgcaaagcaaccgctgaggaggaggccaaggtcaagcagtattttgcatcgtcccaacgctcccaggaacagttccagcaggccatggccgagaatatgagacgcatgttcgctgcaccgtttggcgcctggcaattccccccattcccgcaacaattcccattctcgtccatgccaatgatcgagacgccgtgcttttgtgaaagctgccgaaatggcgcgtcaatgaatcacaaagtgcagtcgtcgatgagcagtgtgatgggcgagaacaacggcaactcgtacaacgagtacagcgtggttgatggtcaacagcagacggaagagcaccagcagtagagattgttgtgtttggaaggaaatgaaaattggcggaaaattttcgcattt

SEQ ID NO: 88911 - DNA, 618 bp, Heterodera glycines
gtccaataaaggtatcattaatttttccaaatgcgttctgcaagggttaatcaacgccagcaaattgaagaattggcccaaaattcggcacttctgcaggacatgacaattctgccacacaactacaactttgagataccgaagacgatttggaaaatccggacaattgatgccaaaattgtcgctttgcaatttcccgagggcctcacaatgttcgcctgcgtaatcgtcgacattctcgagaagcacaccggcgccgagttcatcattctcggcgacgtcacttatggagcctgttgtgtcgacgatttcactgcgcgtgcgctcggctgtcagctgttggttcactacgggcacagctgtttggtgccaattcaggacactgttggcatccatctgctgtacgtgttcgtcaacattgacatgggcacggcccatttgctggacacactgcggcacaattttttgcccaccgccggcgatggcatggaaaaaatgccgaaattggcattggtcagcaccgtccaatttgtggcgacacttcagattgtcaagcgtgagttggccaaggacggtttcgacattgtcatcccgcagtgcagtccgttgagtccgggc

SEQ ID NO: 88912 - DNA, 620 bp, Heterodera glycines
agcacattcatacaaatataatacatacttatatttaattatttctgtttttccaaattggcttaatcaacaaatgtcgtctcccagtgccggaaaacgaagaatggacacggatgtgctgaaattgattgaatcgaaccatgaggtggtcatcaccggtggactgaatgaattcctggtaaaattttatggcccaaaaggaactgcttacgaaggcggagtttggcgagtaagggtcgatttgccggagaaatatcccttcaagtcaccttccattggcttcatgaacagaatttatcatccgaacattgatgaagcatccggcacagtttgtctggacgtgatcaaccaaagttggacagcactttatgatctttccaacattttcgagtcgttccttccccaactgttgacctatccgaacccagcggatccgctgaacggcgaagctgcttccctgtacatgcacaagccggacgaattcaaggcaaaatgcatggaatatgtgcgcaaatatgccaacaaagaagccttggaggcgttggacaagaagacaatgaaaggaacggagaatgagggcgacgcgggcgaagagtcggacgattcgaccatttctgatt

SEQ ID NO: 88913 - DNA, 674 bp, Heterodera glycines
cttaagcatatcaaatattataatggacttaagtgctggtgatgaacagttgaagcggaactttagctgcaaaatttgttttgagcccttctccaaggatcgtcgttatcccatttcgctaaattgcggtcacaccttttgcgctcgttgcgtcaggcagctcagcagcttcggcacttcaattgcttgtggtctctgtcgccgaggcacttactccgactttcgtcaactcggcaagaacgtcacactgctagatttgcttgagaatgccaaccttttggccggggaggatccaaacgaaacgacggacgacgacgaggacaatgcgccactcaatcagccctggcgaggggccaaccatttcgtttccagtgctgcattaaccgcttttatcgaccgtcacgccgaccttcgttccagcgttcgacagtttttgtcgccctcccaatgggccgaatttgacggaccgctggacgcaattcgctgtagccttttcaccatcgaaggacagctccgagatgcgggcgactcatttgttctgcaggagggacagttggagcagcttgaacacctttttcaacgcatgatgtccgagtattaccatcagcagcaacaaatgcaaggccctttcagtggctttgtgccggttcgttgggctgtcagtggcgattccg

SEQ ID NO: 88914 - DNA, 668 bp, Heterodera glycines
tttactgtcagtggcgaagtggaagaatttttgtctaccctcaaagatgggactgttttatgcaagctcgcaaatgcgctgtcgcccaattcgataaagaaaataaacaccagtaattttccattcaaacagatggaaaacatttcattctttttgggttttgctgaaaaatatgtgaacaaaagtgaactgttccaaaccgttgatttattcgaagggcaagacccaaattctgtgctcatttgtctggctgcacttgctcgaaaatcggagaaatcatttggaaaggcggggcttggtcccaaagaagcggagggctcgaagaaggaatggacgtcggagcagctgcgtgccggtgacgctatcatcggcttgcaaatgggctcaaacaaaggcgccaatcaaagcgggatgattatgggaaacacgcgtcacatgtgaaaagaagggacagactgtgaaggaccggaattttgtgtaattacttcacttaaaagccttttgtttgtgatagtgctgaattgaccttaccacggatgacacccttaatacattccttcttgccttgacacttttgcaattccatttaaaatccaagatgcatatttctaaattatcatagaataaattagtatgttttgaaaaaaaaaaaaaaaaaaaaaaaaaaa

SEQ ID NO: 88915 - DNA, 921 bp, Heterodera glycines
gtccaattaagtttctaatggcctctcctcctcataacatagacttaaataacaaaacaacggcaaaaatggcggtcaaatggcaaaaactgttgactgacttgacttcgtcctgctctcggctaatttccagcgaggcgttgggtttaccgccagcgctaagcggaggcccaaatctccgaaatgaacggccgtcggcggagggcccttcgaaatgcatcaacgaaattcgcacaatcgcagccgaattaagccccgaaatgcttcggtttggccccgtcaacccttcccttctatgggcctcgagtttttgtgctccggtgtacgagcagaaggatctgttcgaaatgcacgtgttcggcctacgctccgccggccattccattccgttgcacgaccatccgcggatgtacggattcattcgtccgctgcacggtcgcatacgaatctgcactttttcatggttggagcccgaagaagagcagaaaattgtcactgagaggaggaaacgcgcgggaatggccaaaggagcgtcgggagtgatcagacgaccggccaaatttacgggcgaactcatcttggacggggcctgcaaagacccgccgattgccatcgtcgagccgaacacagcaaatgttcattccatcgaggcgttggaggacggcgccgctttcttcgaccttttggtcccgggttacaacgacagtcgctcgtgtaattattacactctgtcggatgacaagggcaatggtaaaattggcatcggagacttcgtttggttggagggttcagaagaagtgcctagagaatttaccatgcaacagcttcgtttcgatccattccttatgtcaaataccaacagattcgattgaaaatgtcggaaaaatagtggcctaactaatttattttattacttttaaa

SEQ ID NO: 88916 - DNA, 710 bp, Heterodera glycines
gtccaattaagggggagcgataaatacggcaaaattggcttttaaatggctcagagccccataaaattgttcgacgttgccaaggaatggtgctttgcgagcgaacattttcactgtcagagcctttgctgcccgaaacaatcaaattcatcaaggagagcttggaaaagcaaggcgaactccatttcgaattgccccatgtttttgtggttttcggcgcatcgggcgatttggcaaaaaagaaaatttacccaaccctttggtggctgttccgcgacggattgcttccaagagacactcacattattggctatgcccgctcaaggcttacgcttgaaacattgcgcaccgcctttgaaaaacattgcaatgtgcgagacggggaaaggcccaagttcgagcagtacatcaaacattgcagttacatttcgggtcaatacgacacggacgagggcctaattgcgctggacagagccatcattgagatggaacacacattcaaaaagcccgccaaccgtctgttttatttggcactgcctccggaagtgtttgagacagttactgagcacattcaacggcattgcatgagcaaatgcgcctcggcatggacacgggtgatcattgagaagccgttcggctacaacgacgtctctgccgcgcgcctttccacgcatttggccaaactttttgcggaggaacaaatttatcgc

SEQ ID NO: 88917 - DNA, 628 bp, Heterodera glycines
cctcaacctcaagtcgtcaacactctcatcatgtctgccccgctccagctcaacctgatcgaagccaaccacgcctcgggcaacggcattggccagttcacgtccacgggcatcgacgcggccgccctgggccgcatccagccgggccaggacgtgcaggtcaacgtgatccagcagaatgccgcgtcgggcaacaacattggccaggcgcaattcaccaacgtcgacgccctcgtccacaagatcaacgccaacccgaacgtgggcgacgtgcaagtcaactttatcggtgccaaccaggcctcgggtaacaatatcggccagtcgcaggtgtcggacattggtgtcgtgtcgacgtcgggtcacgcttggtccggccatcacggccatggccacgggcccaccacgggtgacatccagaccaacatctcccaagccaaccaagcgtccgggaacaacattggccaggcgcagagcgccaacgtggacgtgaccgccgtgggccactcgcactggggccacctccacggcggcggtgccggcggcgacgtgcagaccaacgtcatccaggccaaccaagcgagcggcaacaacattggccaattccagaacgccaacgtggacgtga

SEQ ID NO: 88918 - DNA, 953 bp, Heterodera glycines
cgctgttctccgttttcccacagaatctcttcgggtattcttgcaaatcgttgtcgggaaaggaggtcgattggtttgtcgcttacaaattgcccgatttggggtccgatggcgacggcaccgcctttctttattcggacgcgaacaccgccgcttggcgcctttccgacaaaaatgtggaggacaaaacttcagcaattggactgaccgtctcgcaactgttcacagcaaagaaaaaaaagggcgatttctttaccttgtttaatgatgagaacccaaacaatggcaaaacggactcaaatcgagcgcatatgaaaggagtgctcgtcttcgacgacatttccggcttttggctggtgcactctgtgcctaagtttcctgccagcactggggccgattacctttacccacagagcgggaagagaaacggtcaatcgatgctttgcatcactctatcgagcacagcgcttaaggaaatcggtcagcaattgttcgttgctcaacccaatgtctacgacttccaattgcccgactctttcgcccgccttttccccgacttggccaaggcggtcaatcggacgacatttccctacaaaaaaagggttcccttctctgtcaccgacgtccattctctcaagggacagtcattcaccacctttcacaaacacaaacaattcggaaaggatttatacagtgaattggtcgcccctcggctgaagtcgtccatctacgtcgaaacttggctggtcggcagaggcgacctcccctccgattgctcctcttcatttaaggtgcacaatgtactttccgtgaaggcctcaaaattcgcattcaaaaacactgaggatcactcaaaatgggctgtcagtgaaagtggtcggtggacgtgcattggggacatcaaccggcaacagtcgcaggcgcgccgagggggtggcactgtttgcctgtcc

SEQ ID NO: 88919 - DNA, 648 bp, Heterodera glycines
gtccaattaagatttgatctgcgtcaaatggctaatgattctcgcagttcttcgagcgcttcctcccgttctcgctcgcgtagtcgcagtcgttcgccacgccgtcgcgagcagcgtcggcgccgctcgcgttccaccttttcacgttctccatcacctggccaaaaacgactgcacatcggcaatttggacgagtcggtccgtcgtcgggacattgaagacgtttttggaaagtatggacggatcagcgactgttggatggccagttaccctcccttctacgctttcgtcgtgttcgaaaacaacaaagatgcgtccgcctgcatgaaagacttgggcaacacggcgtacatcaaagggtgtcgtgcgcgtgttacggtggctcttccaagaaaaggatcttcacttgatgccaattcaatgaatggtgcgacttatcgtcgcggaccgccgcctcctccgcgacgttattacgacgaggaggacagtcaccgacgccgtcgtcgttcgcgtactcgctcgccccgtcgtaggcgctcgcccagtcgctcgcgcagtcgcacaccgccgcgccgcagtcgttcgcctcgtcgttcggcgcgtcgccagcgcccgccgtcgccgaagagagaacccagaaacagggga

SEQ ID NO: 88920 - DNA, 831 bp, Heterodera glycines
  unsure (1)..(831): unsure at all n locations
cagctatctaaataaaactgacgcattaatgctgtatttaatcagaatttttttgtctcattattatcaaaatggcgtcatttattttgtttattattttgattattacgaaagctaataactcaatgggacaggattctggtactaatgatgtccaattaacgttggtcaacggttgtccatacaaaatttatgttgccggtgcggtgcaagtgaatttgacggtcaatgaaagacaaacgaaaaatgtgccgtcagtgagcacagcgcaacgattatgggccaacactgactgtgacagcgaaaacaacccgttgtgcaaccttcaagcagcgatgccgccaatttcactcttcgagtggacctttgatgcggacgggaaacaaacatatgatgtcagttatgtggacggtgccaatgtgccgatcagtgtacgtgtgctgaattgtcctggtgtcaatttcaacaaaaaattgggcaacagtttggacactttggtcgaccagttgcccgatgcaatgaaaatggatgtatttggtaaaaagcgtgtcaaaagcgtgtgtttggcgtacaacaccgactcagtgtgctgtcgaagcccatttggtacgccggaaacgtgtggcccaaccaaggggtggaccgatgatcagaaaaagggctacgaagcaatgttagccgcttttcccaactcgtacaactacgcgtatgatgatcacattgcgacggaagtgtgcataaatgccaaacaattcacgatcggattttgcaccaacgtgtaaagaaacataaagcaaagcgtttttcnnaaaaaaaaaaaaaaaaaaaaaa

SEQ ID NO: 88921 - DNA, 612 bp, Heterodera glycines
tttaataaatgttttgtcaaataaatctctaatttcctttttcctcctccaaatcttcttcgtaagctttgcctctcgtgccgtaaaacggtcgctttactcggcgaaatttccattggcactaaatgaaattcgatcagtcgtatcactgaattcgtactttagcaaaattgtccaattttgcagcggagtgttactcacagaaaacattgttctgaccgctgcccattgcattttgagcgacgaatttggtttggccgattacatccacgtgaagggattcggatggaatgcccactccaccgaattcgtaattcgaacggattttatttttctcgatttggaagattcaatttgcgcggacattgctttgatttttttgcccccaaaagtgactggaatttttggcactgccaaattcacaaaattcacagagagcgaatggtccaataaaagtgactccgacagtaaaatttacgcacttggctatggaataactgaacttcaccgtatgtccttccgggctcgtaaagtcccgttgaaaaaattggaacaaaaagtgccgaagtgttctttggaattttatttcgccgattcggcactttcttgctc

SEQ ID NO: 88922 - DNA, 467 bp, Heterodera glycines
  unsure (1)..(467): unsure at all n locations
agagcattaaaaatggcttcaaaaaaagccgatgaaaatgatgagcctgaaggttccgagggttctccaaccaacaaaaaccggtgggacgcggatgcggccaatttggaaaaggtgaccgatttccatgaagaaaaagatgagatgaacgaaatatcgaaggaatcgttgggcaatttgaaagcgcagcccggcgaaaagcgattcagcgtaaggaaggaggacgtgcaggcgattgttgacgacttggaagtgtccagaataatcgccgagaagaagctgatacagcacgaaggaaatctgaaagcggcactgctcgaccttatgggcttcgcggagaacaaccagtgaatggcgtcatacctaaatatatttctgtcaccaatttattgtttaaatcctttatcagcgattatcgtaaataaatacgatggcgcgaatgactaanaaaaaaaaaaaaaaaaaaa

SEQ ID NO: 88923 - DNA, 607 bp, Heterodera glycines
ctcagcatcagtcatttccggcggcgaataacggccgcatcgtaccaagcaaaaagtcgggcaaaaagaacatgcgaaaggagcgcgggaccaccatcaacgtgaaggagttagctggttactttggagaccgtggcttggatgaaattttgcgcgagtttcaacccaatcagccaaacaccggcaggacggcaccaaaaaaggaaaagaacggcaccgatgccaatgtcgtcgccaccgccgctggggccgcgtcagcggccgtggcagtgccaccaccaccagagcaaaagcagcagcagcagccggagatcacagctgacaacaatgagccgagcacaaagaaagggaagccgaagcacgtttcctccacggcccatcgccccacgctgacgaaacagcagcgacggcgtcagcagcagcagttggcgactcaatcgcgaggcagcagtgcagaggaaggtggaggttgccatcgagctggacagagaaggtggtgggtggtgggtgttgctgatgtgaaaccggaccaagactccgaccctactcttaatgcagaaacagtggctgaagcggctgcttcggaggtccgcaacagtttggagaa

SEQ ID NO: 88924 - DNA, 702 bp, Heterodera glycines
gtttgagattttcgccttttttagattatttgtgcagaattctattgacaagcaattaatgtgataaaggaaatgcgatcgttcaacagtaaatctcatcagtatgactcatcaaagaatttccaagagcttttgtcgcctcgtctcttccagcgtcgacaacagaatggcggtacgattgttcagcgagtgctccaacagcagcaattccagcaaatgttccaacaatatcagctccaacaacagcagcagcgcgaatcgccgcctccgtccaccgtttttggcaacagttgtgatggcactttgtgccaaagcgatcgtctgaccagcgactcatcgcaaacattgctgcacatcggtccaaatggagacgactccaatgacctggtcggcgtcggcgctgccgaccattctgccgatgttacgccgcttgaaactgctgacaacgtccgcaactctgacagcatgcactctcagcaacaccaccaccatcaccaccaccgtgcccatcttcagccgatgccaccgcagcaaaaccaacaacattcgtccgctgtttcacgggccagcagtgtgcgcagtgcgccgctgcgcccgtcccgctacgagtcgagcagtttgccgcgcatgggcgtcaacggcggtgtcggtagtagcaccacaaacatcaacagcaatgggcatggtaccaactgcagccac

SEQ ID NO: 88925 - DNA, 617 bp, Heterodera glycines
gttcactcacaatcaataacgatattttggacgacgttatcgccttcatcaaacggtccgaattggctcaaaatttctcattggtgagtcaccatttcaattcgcttgcccaacggagaatgcacgacgccaacgcacattgggtggagggcgactgcgtgttcattgccaatgcgaccaccacgcgaatgatcatccccaggggaaacaacgggggatttgaggaagttcccgtgcccacggttgctcagccatcatatgtgctcggctttcgtggcacaattcatttcaacggcacactcagcgacaacgcactcgccttcttccgtcacgcgttgcccccgcccacaacgctgtaccgcttctcggtgctggacgaattttatcgtgccaacggactgctgagcccgttcaaaacaacggaacgcatcaacacctttctggacacgtgcgtgcatttggttgagttgggcggcgacgaggcgttcgtcggcgcatttttgaaccttccggtgatgcgccaacgcgtccgaaaattgcgtgccacccgacacagtgaactttttctcaattggctgcaacagagtgacggcgaatggggacagttgcgcattatg

SEQ ID NO: 88926 - DNA, 596 bp, Heterodera glycines
gtttgagcaaaatcacttctgatgtctttaaataattcaaatttgttggggaaacggaaggtggcgttgaatgagcgcagaaaaatttacatccaacgcgactacagccaagcattagttgtgaaattcagcacagactttcctgaagagctcgaacattacattgacagggatatttggctgaattttgtcactgatctcaaccaaatttacgcggaggcggagaaactgacggcgattgcttacctcgagaacattctcggcctggtgacatgccatctttccatgctgtgcttcaaatcattgtggaagcggaagttggaggaagcgcgggcacttttatacgaaaccaaccaacagaactttgtcaggaacggagtctacgtttgcaaccccttggagaaggggttcagagtgatcgaagtcgttctgctcgatgagccgattcctctgcctgctgttcaagacgaaaataatgagaaaaattccgttcccaagccaattgtattgcagccgaggcaatgagggagggagcaaatccatttctatttaacaatttgccgattcatttcacaaataaatacttaattcactta

SEQ ID NO: 88927 - DNA, 385 bp, Heterodera glycines
cggatggggagttatggtttctcaccgttctggcgaaacggaagacaccttcattgctgatttggttgttggactcgccactggacaaatcaagactggcgcgccgtgccgttctgagcgtttggccaaatacaatcgtattatgcgcattgaggaggaattgggcactgacgctgtctacgccgggaaaagtttccgtaacccgcaaaactaagagcgtgtggaaacgaagaaaaataggactgttcgttgactattcgctggatgtttagtttcctgacattgattatttgttttcgaaaagtcacttgaatgctatgagtatattatttaattaaactgaataaaagttatttctcaaaaaaaaaaaaaaaaaaaaaaaaaa

SEQ ID NO: 88928 - DNA, 446 bp, Heterodera glycines
ccacactatcacatatcaaaaatggctcccgcaaagaagaagtggtctaagggcaaggtcaaggacaaggccaacaatgccgtcacccttgacaaggccacctacgacaagatctacaaggaggtccccacctggcgtctcatcaccccctcggagctcgttgaccgtctccgcctgaacggctctcttgcccgcgttgccctcaaggagctcgctgacaagggtgagatcaagctcgtgtctgcccacggctcccagctcatctacactcgctccaccattggtgccgagcccgttgccgctgcctaaattgccccggttgttctgtttctcccacacgaaaaatgaaataactcgtcttttggtcttggcaatttgatgcggtttcgtctgacgcaacctgctgttgtccgtcgagtcgtaatgtacattgttctaccgccaaa

SEQ ID NO: 88929 - DNA, 384 bp, Heterodera glycines
gtttgagctaaattttaaatttttcaaaactgattgtgagacttcattcaaatgcagcaacaacagcccgttccgaagtgtggcaatgtgaaatgcccctgtggagacgcgtgccagtgcggcactgactgcaaatgcggtgcgaaggaggccagcaactgcgcgaacgagaagtgcgtttgtgagaattgcaagtgcggcgccgactgcaagtgtggccagtaaacgacaccgaagaatgggccggagggttgtgataagaagagcaaaaaacagttaccttatttaatttgatcgtgaccgaccataattttgacatgtttattttaaaatgctgattgatacaataaatattataagaaaaaaaaaaaaaaaaaaaaaaaa

SEQ ID NO: 88930 - DNA, 511 bp, Heterodera glycines
  unsure (1)..(511): unsure at all n locations
cctcgtgccgaattcggtacgagggtttgagaatgcactcattgctttgtccacgtgcgtccagctcccaattatcggccctttttaaacgtttttccgtcgggaatggcaccgcttcgaccgattgtgccaccaaaaaagggcctgtcgatgtgctgcgtgcacggcttctctaccagagcagaaagcgtgggatacgcgagaacgacattttgatcggtgggtttgctgaggaacacttggtcaaaatggaggaacacgagttggagcagtacgaccggatcatcaacggacgacacaccgaatgggaattgttccattatttctccggcgtaaaagaagcaccagacgatttggacaaaaatgcggttttccagcggatgcgccaacactttggggagaaaacaccacgccaattctgatggacaaaatgatttgttaacatttacaaataaaaacccagtgcttggtaaattgtgtaattgcaaanaanaaaaaaaaaaaaaaaaaa

SEQ ID NO: 88931 - DNA, 668 bp, Heterodera glycines
tgtttgttttgttgaatttccaaatgctgcttattttaaagaattgttttggtcggcttcatgttatttgtcatcaacttacgcgcagaaattttcgtcttcttttgcatcgacgaaaggaattttccaaaccgattttcttcagcgtcggtcagccaaagtcttctttcactggtggaaatgcatcgggcggtagcggcggaatgcctcctaacccttttcagggcatgtcaaactggcagaaaatggctgttgcagctgctgtgattgtcggactgcaatacttcatcaatcggctcgcttacacagaaatatcatggaaacagttctacacggactttttggaaaagaacaatgttgaacgcctcgaagttattgacaataaatgggtccgtgtcattaccagggatccaacgcagaccgttttttacttcaacatcggaagcgtagacacttttgagcgcagtttaacccaggcacagcaacatttgggcatggagacgagtcagcagcaggtgccggtgttgtacaaaagcgaatcggacatagtcggaatgattccccatatggttaactttcttatcacgggcatcttcctgttttacatgttcagaatgtttcgagggttcggaggaaaaaagcccggccaacgtggcggcggcggaggt

SEQ ID NO: 88932 - DNA, 743 bp, Heterodera glycines
ccaagtttgagccaattttattcacaaaatacattttttttgttgccgaaatgagcacggaacgctattccttctctctcaccaccttcagtccctcggggaagttgatgcaaattgagtatgcgttgaatgccgtcaagggcagtgcgccatctgttggcacccgagcaaaagattgcgttgtgttcgccaccgaaaacaaacactccgtcctcacacagcccgtcagcaaaatctccaagttgtccgaccatattgcatgcgtgtacagtgggatgggcccggatgcacaacttctcgtgaagaaagcgcggaaaattgcgatggattaccaagtgctgtacggctatgaaattcccgtgcctcaactcgtttcccgggtggctgcggtcatgcaggaatacacacagtcgggtggtgttcgtccgtttggcgtttcattgctcattggcggatgggacagtgaaaagggggcgcttctttttcaagccgatccggcgggttcctattttgggtggaaaagcacggcgatcggcaaaaacgaccaattggccaagaaattgttggagaagcggtacaatgaagacattgagaaggtggacgcgatacacatggctctgcttgcaatgcgcgagacttacgacgttgccatgactgaggacaatgttgagttggccgtgtgcacaaaggacggctttgaacggatgaacaaagaagcgctccgtgagcagatccaacccctc

SEQ ID NO: 88933 - DNA, 601 bp, Heterodera glycines
gttcttgccatggcaatcgctaggcagttccgctactcaatttatcttctgttagttttggttcgtttttctctccatcaaagtgccgaattggaggacctccaacgcctttgccccgacttaaaaggcgctttctgttcccattgtgaccacaaaagtgttgagcaaatttgtccaatcgaatgcaacttttgctcaacttttcgctcaaacgaaacgccaaaattcttcggaaatgccgcagaaaatttgattgagctgaaaaggcaatgcgccaccattcgattggccttttgcaacgtttgtaagatcacttcgatcaacgaattgtgcgtggaagaatgtttggactgcgaagcgggcctaagagacgaacagaaagaagtggtgccattggtacagacctggcaacagtcagcgggggatggactcgcaattggcgacgatggcacaaattcagcgggagaagctgccgaactgagcgagtctgaggccgaaggaagagaggtgccagcggaagtgccaattgaaatggacagtttggcacttttttgaccataaaacacgaacaaccaaaagcatttgtttattggattgacaa

SEQ ID NO: 88934 - DNA, 397 bp, Heterodera glycines
gtgacaattcgatggcaactttggacgctgttgaggaaccgcttgacctgatccgactcagccttaacgagcgtgtttatgtaaagctgcgccaggaacgcgaactccgcggccgactgcatgccttcgaccaacatttgaacatgattttggccgatgtcgaagaaacggtaacaatcactgaaacggacgaagaaacattcgaggaaattcacaaaccaagcaaaagaacaattccaatgctgtttgtgcgtggagatggcgtcattctcgtctcgccacccacaaaatatgtcccatgatcagacaaaactgcttttgttctccatatttttcattgttaaagttctttcaatttgaaaaaaaaaaaaaaaaaaaaaaattttgtattttaaaa

SEQ ID NO: 88935 - DNA, 1346 bp, Heterodera glycines
caacaacccttcccctccctcccatgttgtgtgatacgctgggcactgacaaaaacaaacggactcttttggtctacggccatttggacgttcagccggcggcgtttgaggacggctggaacacggaaccgttccaactcatcgaaaaggacgggaaattgtttggccgcggttccaccgatgacaaagggcccgtgctcggctggctgaatgtcatcgaaaccatgcaagggcttggcattgacatgcccatcaacataaagttcgtgttcgaggggatggaggagtgcggctccgacggattggacgaatgcctcgagcagcgcaaagattttctctccggcgtcgacttcgtgtgcatttcagacaattattggctgggcaaacagaagccgtgcatcacttacggccttcgcggtctttcgccgtttgccatcgaaatcagtgggcccaaccaggacctccattcgggcgtttacggcggcacaatccatgagccaatgaacgacctttgctggttgctcagccaattgactgacacaaaggcgaacagtctgatcaaaaacattgacaaaatggtggccaaactcactgaggaggagcgcaacacttacaccaaaattgactttgacttgaatggattcaaaaaagacgttggcgttgagaaactcacttccgaagacccgaaacaaattctgatgagacgctggcgtgagcccgccctgtcaatccatggcattgagggcgcattctccgggaagggctttaagacggtaatcccttccaaagtgacaggcaaattcagcatcagaattgtgccggatatggtgccggaagaagtggacaaaatcgtcgttgattttgtcagcgaagtttggaaaggtcgcggctcccccaacaaaatgaaaatccttccgttgggcggcactttggcatggctcggcgacttcaaacagccgcactttcaagcgggagtcaaagcgattaaaaaggtgtatggcgtagagccggactttaccagggagggcggctccatcccagtgactctgaccttccaaaatctaacgggaaagagtgtgatgcttttgccgatgggcgcttcggacgacatggcacattcgcagaacgagaaactgaacgtgaccaactacgtgaacggcatgaagatgttcgcggcctacattttcgagtgcgccaaaatatgaactggcagaaattatttatcactcatagacattccatttattttccattccatcgactttctaacttctaattacttttaaaacccttgttaacttcgaaaatatatcactttctcacttaaaaaaaaaaaaaaaaaaaaa

SEQ ID NO: 88936 - DNA, 415 bp, Heterodera glycines
ggcactgattcgaccaataacggacattacactgacaatttgaacattgcggcgcctggcgttgttactcagcatgtgtgcaaggcgtccaacctcaaccagttccagctgagtcagatcaattcgctgcacccggacactggcgttgtcggcgtttatctgtcgaccgaagggaccaaagttctcccatttgtcaaagccgctgcccagggcttacgcgaaatggcatccaaaccgatcagtgacgagcttctccaggcttgcaaattgttggccaagggaaccgcactgacacccgacgaattcattgcccttctgaagacagtgactgcggacgatgtgaaaaaggctgcttccccaactttgcgccaaagcccacacttggcaggcgaggttcaccaggccgggcccaccg

SEQ ID NO: 88937 - DNA, 1250 bp, Heterodera glycines
ctaaacttaacctcacaatgaagcggttcaattcatgggcctcccaattggagaacgaactcgagggatggaaggacggatgtccctgcgactttcttccgaatatgtcgccaatttcggatgcaaatgactcctcttccctctcctcttcttcctcctggtcttcgccactccttcacaaatatcgcttgctaattgagcccggtaattctccgtttgaatacgtcgcccccggtgttagagctgttcgtcgtctttggaattttttgattttgcaagagaatttagctccaatatttgtgcgctattctttcgcaaaagcgaaggataaaatcgcttcttcggtcacaaaaggagcagatttgaacagtattttgaatgtaatcaaattagtccaccgcgagcacgacccaatcgtcgcatttgcagcgaattcgattaggcccggtgtgatggtcgtctccactgggcgtgagcttcaggaactgagcatcgaccgtgtgttggatgagcatgagcgggtcgtctcccgtctgcagcactatccgtcgaccagctcttttcttcttgcgcagaattgggccgagttggacatttcaatgcagcaaatccgtcgtgacccgctcagggacaacgatgactaccaattgctgatcccgggaagcgatggtcagccgggcaagaacatccccacgcaaacatcagcccatttgcggaaacgacttttttctggcgttcgccgtttggaggcccattcatcgctgccctactatgccagtggctcttccgatggttctgttttcctatgggaatggggcgttgaacagcctgtgttcgtcgcccgtgttgctggccaattcgcaaaagtggctaaattggcattcgctcagaacggcgcccgttttgcggctgtcgatggggatgggctgctgtccatttggcaggcacaacctggtgttccggcaaagaagccttatttcattcaaaagtgtcacaccaaatttgcatcggacgtcaaattcctcggacaaaccagcactcttctggtcactgctggtctcggcatgaatgaccaaaacatcactctttgggacattttgatgcctcactccaaatgtgcggtgcattcatttgtgggccatccagacggagcgttttgtgtggcttatcagcccaacactcagtcgcttatttctggcggaaaacacggagaaatttgcatttgggacgtgcgacagcgtcagttgcgt

SEQ ID NO: 88938 - DNA, 605 bp, Heterodera glycines
caccaatttgacctctccaatttatctctgcatttattattttatttatttctccggcaaataaacttttataatttgttatcttcggactttttggttgctatttatagaaggggtatataaaggaagtgaaaggaccatttgattggtacattgcataaaaaatgcaaaaccgataatcgtaaatataattgctctcgctaatctcggtaccggaattaaactaaactctctgacgatcaccgagtgtgaatttaagtataacccagaaaattcaatgcccggttatcaaatgtgcaagccccatcaaagccacggcattattatgggaatccgggaaaatgatatgtctggggacgaaaagtctgctattaaaaaatttatagaaataattaagggctcggggtgtccgggggcttcttacatcggactaaatttcaagcagggtaaaagcatgacagcgttaattttctggaccggtaaagtcgtaattacgggaactaaaaacaattctgaaattgaggaaatgtatcatcatattctcccctatttgaaaatggctcaaaagaagttagggatacgataaaaaatttttcatttattgg

SEQ ID NO: 88939 - DNA, 788 bp, Heterodera glycines
tatatttactacataattagagcaaatacggtatacaaacaaaaaacgaatcaatacaaaaaatgcatttacatttgcacattttctatattctttggtagttggattcactcaaaattatgttgttttaatgattcatcatacacaaactttgttttcagaaattgtgttcatttacaaacttgcagcaaaaaacaaaccagcaaaaagatgaaacgcaacggaaattccatttgctcagaaaccaagccaccgcttttggaattgacgccaaagaatgcattaactttccgtggcaaactcggccacgtcggttccgtctctttggacatcaaaaattgtgagatctgctccgtttacttcaaagtcaaatcaaatgccaaccacttctattcggttcgtccaaacaccggtgtgattggggcgtacgggcgcgtgaaggtggtcatccaattgcacgacgacagtctggcaaagttggacgagattgaggaaaacaagcacaaattcctgatcatggcagcgattgtttcggatgcgtccattggaacggagaaattttggaaaggcaaaaaagaggggatggatggcatttactcgagcaaaatgaagacggaggtgcacaaagtttgtcggtgggaaggagggaagggtgtgctgagccaacagaactcggaagaaaatgtgccgaacggaaagaactcagtgtctgtggagaaagtgccgaaccaaattttggagttgtgttcggagaaggaagcgccgaaccaattctcgaacttggagga

SEQ ID NO: 88940 - DNA, 614 bp, Heterodera glycines
atcgattataataactttccacaacgaggcaaggtccacattgttgcgtacaatttggtccattttcattcgcactccatcgcatttacttaaagaaattattcttgtcgatgattactccttcgatgccactattggcagagatttatttggtattgacaaaatgcgaattatccgaaacagaaagcgagaggggcttattcgttctcgagttcatggtgccattatcgccagtgctcctgtcctcacttttttggacagtcattgtgagtgtaacgtcggatggttggaaccggtgcttcaacgtctggtcgaaaatgacaaagctgtcgttgcacctgtgattgacgttataaacatggacaacttcaattatgtctcggccagctcagatttacgcggaggatttggttggaatttggtgttcagatgggaggcattgggaagagaagaaaaattattccggcgaaaaaaacccgaaaaaaccaataaagactcctgttatggctgggggattattctcaattaacaaaaaatggttcgatgccttaggacgttacgatactaaaatggatgtttggggtggagaaaaccttgaaatgtcttttcgcatt

SEQ ID NO: 88941 - DNA, 860 bp, Heterodera glycines
attacatttttattcataaattttgagcaaaacacaaaaaaggtcaaaataggttttgttaaacttcttagggttcaaagaaaataaaaacgataaaataagtgctaataactcgaagagttgcttaacaatcaccaaaaaacatattttccatgctttagggccactggaagttcaggaaaaataagtaaaatctaaaaaacttatttctatgtagtaatattatttagcaatacacattaatatgttaattaaaaagaaatttagtaaaactgacaaacaataacttgtttttatgattactgtcgaaaagtccattattttttacctttcaggcgaaaaatccttcactgtcgaaatgtcctttgctgatttctttacaatacccagctttttggttcttccgtactctttcctctccattacccgtaccctggcttttttccctccggacaaattgatgcccttctctccaatttctgtttgatctccgtttggtaacaccgaaaaatccgcagtgagtgcgcatgctttcactactttagcatagtgctgttcgtccggcttttcttcttcggtgactgggaaaattatattctcgcggagcgtccgattcaaaatcctttgctgcaattaattaattgagggattaacattcatcactaagttttaggggctaattaggtcgcaattactgaacctgttgcggcacataggccacagtgccacgaatgcccacgtaaccgtacactttgtgcatttcaccgagaatggcattgagcagagatgacttgcccgaaccaacctttgaaagattttaagacagagagatgatgctgaagacggcacgacgacatttc

SEQ ID NO: 88942 - DNA, 477 bp, Heterodera glycines
aaccaatcaagtcccctgttgatgccacgctccacgcgcgccacaatgagttgctcgagtagggctactcgttcgggctctcgtttctgtgggagtggtggacctgcgccacgcttatacatttggtcgggaggcgttcttccaacacgcctcacctcccggttgaactccctcttcagctctacgtccatcacgacattcccgagttccatctcctcggctgcccatcccattgcccggcctaattgtttctttaccagctggacaagtgagagtgggtcaagcatcggttctggttcggattctgagggtgggtgtgtcaacacatccgtaggtgcaggcccgtccacctctggaaccaaatcttgttccttacgtgaagaggtggatggaaccctgcgtttccgaggtggaaccacatcgcgaacggcgttgcgcagccgcttacgcgtgatcctctctgtcgcccctaagtcg

SEQ ID NO: 88943 - DNA, 634 bp, Heterodera glycines
cagctgaatttcatctccatcgtcatcctccgactcttccttcagttctccatcctctttctccacctttttcttggccttctcttcctcctctttttcgacatctttgttgtccgcgcactttgacgaccacctctttgtccaattttgcctccaaaatttctgtgagcttttcgggctctttttcgctcaattcgtcaacatcaagcgcatttattcccaggtatttttcgcccacgtacgagaacatcgcggtgaccacactgctctccggctgaacacgatcggcgatttcgacgcgcaggaacaggcttttcatgggcgatttcacaatgtgatcgcagaagtgcatctcatttcgtcattaaacattcatttacattaactttttataattttatattataatacctttaatagaatctgggataggatttatatgtgctaaaacttgcagaatcctacagtcggattttgtactctgtaatcttcagacaatgatttaaattttcaattttgcgggtttttagcataaatttaacaataattattttatagtttggcaggcggtgccggtgcggttcaaagaatttggtggattttagcctggtttatgaacatttttttttttgct

SEQ ID NO: 88944 - DNA, 776 bp, Heterodera glycines
gccaacttttcttcaacttcggcgtcgctcttttcccacaccaaattctgcatctttctcctcaactgttgagcaccatttaccaagcccaaattccgctcgaggaatctacggatttgcgctttatttgggcgtttggattctgtttgtcctttacctgatttgggcgttggtccccgattatctgctgaaatctcttcacttaacctatcttccagcaaagtattgggcgttagctgtgccttcctttttagtcttttccatttttgcatacattttggtgaatttctttttcaatttggtcaactttcactcgctttatgaccaagaaacaacaaaatttcaattggtgaatgatttcctcgattgaaatgttttcttctttgtgcccttccgttgtccgtcacaaatgccttcgctgttctactcgcactttggcattttctggccataatttgtccgattatttgtccgctgctcagccgtcttctcgctctcaaaaagcacgcgaaattttgaaacgccatcagtacgcgttgaagcgaaggcccaaaaagtggaagggagcggagtttggcacatttgttggacaaatggactcaatcgcagcaaaatgctatttggggaataacattgatcagttcgccagcctcgccagggcaaagtctgaaagtgaggccaaaatgaaagcattggccgagcgaaaactgtcaaaaaagcagagcagagagagcagtgactccgcaaatgccccgctgttgccatatgatgcgaag

SEQ ID NO: 88945 - DNA, 622 bp, Heterodera glycines
ttaacacgtaagcaaaaaatgtaaaaatgtgttatcaaataacataaaaatggggttcccatgggattctgaattctttccaattgtggcagatttgtttcttaatttaaagaaggcattaatccgagtccactcacattcaacagctaaaccatcagctgcatcaatagcgcgggaagtcggcgtccacctccaacgcccatccatccattccgcccacaatgtcacgaacgatgaaccggtcgccaatgccggcctctgacaactgtttgtgcagatgacacgcagccaattgcgagtcgttgccatgatggcacacaacaaggacttttgttttcccattgtttcctgcaccgttaattgtcggacttttgcgttccatgctgttgtttatcttgtcaattatcatttccatttttgctcttctcaattcctcccagggaaaattttctgcttccggcaaatggcatatttcaaattcagtgggaggtcgaacgtctaacaaaatgaaggaaccgcctattttgttcctcaaatttaaatattccgttggcgacactcgttgttcagccgaaagtaaacataatgagcggaccttatctgatggatccgacctgcagaa

SEQ ID NO: 88946 - DNA, 1027 bp, Heterodera glycines
gtataattgcttaagttaggccggtgtttaggcctaagctttcggctaggcctacgcttaggcttgattgggtctaggcttatgattagcttaagctttattttgtaaaatatgagttgccttttgtacaagttgccattgagccattttccgattatacaaaacatgtagaagccataaaaatctcatccctacttattttatttattaagtaattaatttttctctattttcagtaaatttatgagttcaaagcgcaaattacaggtttcttatttaaaagattggccattaaaaaattgacgaaacccaactcgtacttggccaacacgtactgccccaactcgtactgtttgacaaaaaaatcgtcataactcttgcaaagtcgactaaattaaactttcttggtgccattcgataactcttaaagttctccatctacatgaagcaaaatattagaaaattttattgcttttcaaaatttatgaccaaaaatggtaaaaaaatttttgttaattttttcaaattttttattctttaattttttcacatttcaattaattggctcccccattggttcatttccaaaaggtaataagcggctaagagagagaggcgtgcgttgtcccaacggccgcgccggcggcacggcgcggggtcacgcaagaattcggcacaaattacattccctctgaattggtccaacggcagacactccgtgagacgcgcaaaagcgtggatatcggctgatttgcaccgggacaaccaaaagcaggagaatattttgctgtccgtgctgcgcaattgggctttcctgaggcgcgtcctgtattacgcggtctgtgcagttgccatgggattggacatgattcacaccatcaaaattttcggtcgaattcacataactgagacagcactgaacgcgttgaacagtgcgtgccgtgtggaagtgggcagcgggccggaacattcacggcaccttgttgagaagggaatcaagcagacatcgctggtcgtctccgaggag

SEQ ID NO: 88947 - DNA, 651 bp, Heterodera glycines
ttattcaatttgataaacaaattattaagccatcatccatccaatcgctcataaaacacactctttgttgctatcatctttatcattttcatctcaattgttttcgccatttgtccattggaatgccaacgccaagccgtgcccgggtgtatgccgatgtaaatgtaaacaaaccgcgtgaatactgggactacgagtgccatcagattcgatggggcaacattgacgactaccaattggtgcgcaaattgggccgtggcaaatactccgaagtgtttgagggtgttatggtgccatccgagcaaaaagtggtgatcaaaatactcaagccagtgaagaaaaagaaaatcaagcgagagatcaaaattctggagaatttacggggcggaaccaacgtgatcggactgctggacgtggtcaaagatccggtgtccagaacgccggcactcgtgtttgagtatgtgaacaacacggacttcaagcaattgtaccaaacactgtcggactacgagattcgctactatctgtacgagttgctcaaggcgttggagtactgccattccatgggcatcatgcaccgggacgtgaagccgcacaatgtgatgattgaccatgagaagcgccagctgcggctcattgactggggcctgg

SEQ ID NO: 88948 - DNA, 1959 bp, Heterodera glycines
ccaagtttgagtttgtttatttggcattgcattacttacaactattaatcccgctgtttctgctggtcatttatggtcaatattctcacaatccgatggaccatctgcaccaccttgaggaatggcgcatggccatgcgcgcgggtcttgatgctatggcagccgtacaggctcctcctgctgaagaggatgttggtgaaaatggagatgacaacgcagcagcaccccacaacttattggcgtgggatggcggtgttctattggaagcagaaggcggtttcgtaccgctctaacttttacaaaaaatttaaaatgccaaaccaaaaggacggagtgacaggaggcaaacgaattgagcaggaacttgccgtgtttgaccttcccttttacatcgtcgcattggcctttttcctaaaggcgttcttccgtctgtatgacttgctcgtcttcgtcccattcaaattatttgctgaccctgagctggaaaaggaacgctctcgtgagcgaaaggccatgcccatcgatgggaagccgacttcgtcctggagacacgtcgataccattggcactgctctgtacaccgaactgtttgagggctgtccgacgcttggcaaaatttgggacaaagcggcacagttacaccgtggacacaattgcatgggcacgcgcgacattctcaatgtcgtcgaagaacagcagccggacgggaaagccttccaaaaattggcacttggcaaatgcaattggatgaactacgaacatgttgatgaagtgatcgtggaagtcgcttctggactcagcaatttgggcattgtccaaggacaaaaagtggtcattttctctgagaccaggaaggagtggatgatctcggccatcgcctgcttcaaattgggccttccaattgtcaccgtttatcccacgcttggtgacgaggcaattgcttttgccttggccgagtgcgacgccgttttggcgtttacttcgcgtccccttctgtcgaaagtgttctcttccgtcaaagactgtcctcagctgaaacgcgtcgtttacttcagcgaactgcacgcacttgccgaggtcgccgagaaagcgcctgatgcgataaaggaagcgttcaaaagtatcggacgcgaactgtacagctttaacgccctcaaggcactgggccattcgcaagcaaaactcgagcggaatgtgcagccggacgacttggcgatgatcatgtacacgagtggcaccaccggaaagccgaaaggagggcttttgtcgcatcgcaacatcatcccgaccgcttcgggacagagcgctgtcatttcagtcagtaccagcgacacaatcattggctatttgccgttggcccacattctcgaagtgtgcgccgaaatcatttgcctgtccaaagggtgccgagtcggttactcttcgcccagcactttgcatgaccgtgccgtgaagattaagaggggaaccactggcgattgcgtcgaactgaagccgactttgatcgcttgtgtgccggcagttatggacaagatcttcaaagcagttttggacgaggtcaaagaaaagtcgcccattcagcgcgaaatttttcgcatctgttacgaacggaagcgcaaccgatttgaaggagggtacaaaagtttggtgatggacagtttggcttttgccaaaatcagcaaaatgctcggtggcaaccttcgctttgtgatttctggcggtgctccgctcaatccggagacgcagcggttcatgaacatttgcttctgttgccccgtcgttcagggctatgggctgacggaaacttgcggtggcgccactttggcggatgaacacgacctcagcaccggttcggtcggaccgccgcttcggagttgtgaaattcggcttagagaatgggaggaagctggttatttgcccacaaattcgcctcctcagggcgaagttctgatccacggg

SEQ ID NO: 88949 - DNA, 849 bp, Heterodera glycines
actccgaaagttgggccgtggcgtgcactttcttctcgatgctcttcggctaccctccgttccacagttccaatttggagtcgacttactcgcgcatccgtcgctgcgattactcttttcccgtgcgttatccgcccctttcaaagagtgctgttgacctcatcaaacggaccttaattcgtgagcctaaacagcgacttaccattggggaaatgttggcgcattcgtcactgaatccgcctaatttgaaccgcagttttattgatggaaacaatttgcagcaattctcaagaagtgcttcttgtcaacaatttacaacattagcgaagactgtggtactttctatttaaaaaatatttataaatgttctgattgttaattttttatcctcaacaaccgacagtctccaaaaatagtcctccgcctaagcagcccccgtccgcccacgactcgggcatgggcagtgacgaactgtcgggtggatgggtcgggagatttatgtgccaaacattggacaagtacataaacccgatgaccatgctaatgagtccattctcttctctcagcattgtgcccgttttgcctgcctctctcccggcctcttctgtctgcaaatgggtcgacttcaccaacaaacatgggttcggcgtcacttttcgtgatggcactcggtcgttgctattcaacgatcagtcgtccctttcaacgagttattgtcaacgatactttacctatcgagcacaaaaatttgttggcaattttgtcgaatggaattgtgacgacggttgtccatcggacgaacttctcaaaaaagccaccattatgcgctcttatcgtggttacatggac

SEQ ID NO: 88950 - DNA, 870 bp, Heterodera glycines
gaacggcttccgttgcgcgccttcaaaaagatcggtcgcgttggcactctgcctgccctcgcgcacacttccgccgcttcggcggccattcagtcggtgatgagcagcggagacgaagcgacgacgccggcactgaccagcggagggggcgctagcagtacacggacggcgggcggaggcagcgcattccaacgatggggaggcaatcggagaggaagtcatttggtcggttgggactccgcgcggcctcagtctgctgcgcgacagcagcagcaaatgctggagagaatgtacagcaaaagcgaactgcacgaatatcagcagctgttcaaaatgttcgacacggacggaagcggcgccatcggatgcgaagaactgaagggagcgatgctgtccattgggttgcaagcggacgacgcggaaattgaacgactgatcaaagaagtggacgacacggaaatggttcgattgatatgtgatcactctttgccttcggattgtctctttctcctcccgcccattagtgaaattgatttccccgaattctgccaatgtatgaagcgaagtcagcagtcgggcggcatcaaaggtcgtctcagcaacgaagaagtgtcacggcaatgttttgaggtgttcgaccaggacagcaacggactgatcacggagaacgaattcatttacgtggccaaagaggtgggcggcttctcccaggaattggctgagtttgttttccgcgaattgctcggcgactcggccaccggacaactcgaccaaagcctcttctccgccattgtggacgattatttgttttccgacctcgcaagtggcggaggcaatgacggaacagtgggaaacaaatctccgaaaatt

SEQ ID NO: 88951 - DNA, 891 bp, Heterodera glycines
gcggtggagaaagcggccgagcggggcggcgtttaccccgaggttttgtttcgagttgcccaccattggtacgatgacctgtacttggcccatttggagaacacccagcagcagcaggcgacaacgacggcgcttccgcccccggcccatccccagccgacccaacgcattgccccgcagcagtgcgtcgtccgtctgatgatgccctccccgctgcaccactcccaccagtcgcagcagcacttcttccccgtccattctgccgccgcttcgacttctgctgccgttgttttttccccttccgttcccccgccgccgacgcccccgcagcaatttgttgggcccaacgttgtcatccatcctcagcagcacaacctcagcaccggcaacaacttcatacagtacagccaccatctgcagcttacgcccacagccgtcccgctgttccacggccaaacggctgccgtctcaatggcaccaatttttcacaacggtcaggcgccatcggtttcatcctgttgttttctctcgcttccccctcctcaactacaagcagtacagccaccaacagttgtggatcataaacaaacatctcagcctcacctgcagcagtctgttgcccaatttggttcgaccattggctaccctcaccatcatcatgtcactgctcaccagccaccgctttccacgccacctcccccactgatgctgatggcattgcccggggcaaatgtagccgccagcgctttccccccgaggcacattttgcaaccgacaccagcacaacatcagcttccgaactacacacaacagcaacaacagacggcaaaccaacaatggacactgcaaaagggaatcggcaaacaacagcatcggattgaatggcgagca

SEQ ID NO: 88952 - DNA, 604 bp, Heterodera glycines
acggcgcgtgctgatatcgcatgcaacaacgtaattgtggctctggacagactgatcgatgtgccgcaagcacccgacaagaaggcaatttgtgtgctcgcaaacaaccgggcagactcaaaagagggtgtgggaaccgtcatgtttcagcagaaagatggagaggatgtgcgtgttacggttgtaatcggcggcctcggtcctgaccatcagcatgcgctgacgatttatcagttcggcgaccttactgtttcttcgggcaatttccattcaactggaaagcattttagtcatgctggccaaaaacatagcccaccggaggccgtcagtcgtcacgttggagatttgggaaatatcaccgctgattcgaagggagtcgccaaaaggaattggtctgacaaagtgatctcactgtttggtcagaataacattattgggcgctcagtcgctgtacatgcacgaaaggatgactttggggaggggacacaggacgtgataaggagccgcgagagcggaaatgccggtcccattttgtcgtggggtggcattggccttgcttttgatacgaacatgtcaacttgttcggaggattttcagcgcgagt

SEQ ID NO: 88953 - DNA, 739 bp, Heterodera glycines
gtgatgctcgtttccaactccgtgagcagctgatcatgtactgcataaatgatgttgccattcttcgagaatccgtgttgcgctttcgaaaactcatcggagaacacactcagggcctcgatccctttttggtgtcttcaacagctgctggtctggctttatcaacgctccgacgttgttttctaccgttcaaccgtttggttcactcacctgagggtggatacctccgtggacgacgagcttccgccgaatcccgccgatacatccggttcttcgagcttgaaaaccctggagcccaagtgcagtgcgcggattggtctgtgggagaggccaacattgaagacacaggctatcgtgtggacggcctctggcgacgagagcctccgcttcgtccactggccatcgagtggatgggttgctactatcatggtgttttatcgtcttaattttcaaataaaaatcttaaacgattaaaggatgtcccgactgttttccaaatcgaagacaaaagttggctgctgggagaactgcggaggatttatacgaaaggacgatgcggcgactctttgaactcgaacatacccatggatgtgagcttcacgtcgtatggggttgtgagtggaaagaacggctccgacgcgatttggagctcaagcagcgtttcgaagcagtatttgtcccgtgtccattggatccacgaaacgatgcactccgtggtggtcgtacggagccctttcaa

SEQ ID NO: 88954 - DNA, 564 bp, Heterodera glycines
gaatgctgtaccgtccgtcgtcgtgttgccgcactgatcgttcaaattggatgatcgcctccgtgtcggcgtcttgtgttgggtcgtcgcgaattccgatcgcttcaaccgaccaaaactgttcgattgctttgaccgatggcatttgatcccgctcgtcctccccacatggggggatcgcgaataccgacgaatcgggagtaactcccgtcgtggtctgaaactgctccccgcaaatcacagtgccgaagacggtgtcgatcagataagtcccctccgccgtcttccgaaatccttgtacgaagtcccaaaatcgccgtattccgatcagcagctgcggttgcactgtgtcggtcgccgagcagtgttgcccgggagtacctcccgggattacgaattcggtcctgattggagtgcaaatcggtggcacctcagaaagctcaatactttcccattctccgtccagccgtttgagcttcactttgtatcttcccgattgtagcttcactttctttccaccgaacacttggattgccagctggtcactcccgaccttctcggggc

SEQ ID NO: 88955 - DNA, 594 bp, Heterodera glycines
gtccagttaagcaatgtctcaaaagtgctcccaatcgcgcactttgagtgcatttgaaattgttccggtacgcggctgtaaactctccaaaagttcttcccgtcggcctgagttttgcgagtgttgtcccatccctcgcagtggccatcgcgtctttgctgactccgatttcatttacgtatttggcggatacaacccatttcactctcctgacagcacttacactgacttttggcgcttcaaccgtctcacccatttatggcaaaaatgcggcctttcctcctctgacccaacgactcagttgccgaattcgttggcttcttttgcattggcttcatcttctaggcccagcgagtgttttatttttgggggtaccggcattcccttcggtctcgccgcttcaaatgaattgcatcgaattcgaattgatttgcttgggaatgtcaatgttcggactgagccgaaacaaagctatgaacagagacaaaacacagcgaacattcggcagagggggcgcagtggcggggaggcggcggacgacgcggcggaacagcggctgatgcccccgcggatatacggacacgcaatgtgcag

SEQ ID NO: 88956 - DNA, 650 bp, Heterodera glycines
ggaattattttcctaatgtgttctggaataccggaaggcacttatgaattgaaaattggcgctagttttctctgctcaaacaaatcgcgcccacccgaatttaacacattgcgttttgacttcaaaccagcttcaatttcctccgaggcctcggaagcgtacgtcgttcagtcgcagaatcaaaatgagaacaatttccaggtcgttgtgtttggagaggcgcagaaaaagaccattttcaaaggggcgaagaaggaaatcaaaggggacaaggagtgtttgttggtgtacaacagaaagagcaaggagttgtgcttggagagagtgtcggccaacataaatgtgaagacgacgagggacaccgatttggaccaaaaggcaatcagcgaaatcgaacggctgcaaaagcgtaggaggccaaagcaatatccgccgtcgccaaaggctcccgtcgaaaatgccacggcagtcgaaccgccggcggagcagcgcaaagagcgcacattttccacttcttcggcaggggacgaaattgacgaggacgacgaagagaatgtgtcggcattggaacagctaatggcgccaacgaaagtcgaacgatcggaggcggaggaggacatctttcacccagcacaacaacggccaaaaat

SEQ ID NO: 88957 - DNA, 704 bp, Heterodera glycines
ttttgcttttccattttatttttgcattcaaaaatgtctctctcctcttacaattgaatttgcgttttatgtcgtcggtccgtcggatgttgtttttgttgggtcggaagtgctgctgttcgacagttccatgctcagcgacagctaacggattcgggtcgattcaacggagaaggctttggacttcgatggcacggctttcctcttccggtccatttatttgtatgatgccactcaaaaaacgacaaatgttcatttcagatgtgtataaacatgaccatttcctgcactttgaccatctgcacattgacaacattcactgtgccaggaagttggtcgtccatttgaggcccagcgagcgcacacttttgctgcaagcgctgaccgaattgaacgccgaggcgaagacggatggaaatggtcattcagaccatccgccttcgcctgctcagatgaagcagttgttcttcgtcaacacaatcccgttcgtcggcttcggtgtcctggacaacatgatcatgatcttggccggcgaatacattgatctttaccttggcactttgctgtgcatctccacaatggctgccgccgcgttgggcaacatcatttcggacgtggccggcgggggggtggcccattacgttgaacaattccccaggcatttgggctacaaacaccccgtgctccccccaaagcaattggag

SEQ ID NO: 88958 - DNA, 639 bp, Heterodera glycines
ctttttttcgatccattaatttttctttattaaatgttggcacggatgaagaaattgttgagctcgggcgaccatgccgatgtcaattttttgatcgggaatgaagacagcaaagagattttgttggcgcacaaagcaattctgtcggtggcgtccgatgtgttcgcggcaatgtttcgtttttgacgccacaaatgcgacgagggccaccgttggaaaaccttttttgcggcctgtcgagatcaccgacgtggagcccagcgcgttcaaagtgttgctgaacttcatttattgggacgacctaagcgaacgtaatggcgacaacgcaattgctttactttacgcagccaaaaaatacaaaatccccgagttggtcaaagcgtgtgttgaattccccgtttctgagctgcgtgacattttctctgcactcgtacgaacccgtattcttgaagaggaggaatttgctgctcgatgtttgaattacattgaccaaaatgcggactttctgttccgttccaacgctttcttacaaattgacaacaaattgttgtgcgaacttttgggccgcgatcagttgctgatcagacgagaaatcagtgtttggattgcggcacttcgttgggcggacgaacattgctg

SEQ ID NO: 88959 - DNA, 616 bp, Heterodera glycines
caacgaacgaacgacttcagtgcgcccaacaacaacacaatgacttctcactttctcgtcggcgttgcagccttcggggcgggaatgtgcttcgcgaagacgtacatggagaaaccgaagagcgaagacgacaaagaagcgcccaagaaggaagaagccacgaccggcggcgaagcggaggagaaggcaaagaagaaggacaagaaaggcgacggcgcagctgcggcggacaagaaggaggagaagcgctaggacaaacacaaatcgaaggaggggaagagcgacgacagcaaccgccgttccaagaaggacaagcacgggaagaaggacaaaaaggacaagaagaaggacgccgccgagccagccgctaacgccggagaacaaagcacagcggagacgacccaagcggacgaatagccagcgatgagaacgacgacggtgcacgacgacctcttccttcacgatcagtcccccctactgcttgctgttgtttgtgtgaagtccgttccccatattttgtacatattccatgtgatcagagcgaccttcctaatgtgatcaaaatatggatgtatgtataatatccattaatttgctgctttcatattccctattt

SEQ ID NO: 88960 - DNA, 641 bp, Heterodera glycines
gtttgagatacttaaatttaaaatttgcatttcaaatggcaacaaaaccgctcctctactgctactggcgcagctcatgctcctggcgagttcgaatcgcattgcatttgaagggcattgaatttgatcagcgcattgtcaatttgttgaacggtgatcagaacaaagatgaatttttgtccaaacttccgttcgccaaagtcccagtgtttgtccatgacaatttagtgctgtccgaaagtatggcaatcattgaatatttggacgaaaaattccccgaacccaaccctttgttcccaaaaagtgccgaagatcgtgcacacgtgcgggcacttgcgcttcaaattgtcgcaaatacgcaaccgctacaaaatttgggtgttctcaagcacctttctgaagagccggccaaacgaaatgcctgggctcgtcattggatcgagcagtcattcaatgtttttgagaaagcattggccaaaaacgcaagcaaatatgcctacggggatcagatcaggttggccgacatttgcattccgccacaagtgtataacgccaagcgctttggcgtcgatatggcgcaattcccgatcattgcacgactggacgaaacactagcggaagtgccggcgtttaaagtgccg

SEQ ID NO: 88961 - DNA, 562 bp, Heterodera glycines
atttatttaagattttaaagtaaaaaagtgctttgtttgcttcatgcctgtctttgcgcttcaaatgagtgccaatttggtcggtgtcactgaccttcgtccgtcggattacgacgaccatcggtggtaccttaagctcaaatgttccgcgtgtggcgagtcgtatccctccgagcaatacgccaacactcgggaaacgcacactttgaccaaagggaaaggcatttgtcacatttccgccaaatgttccttttgcggcagaatcaattcactcgagattctcattgattcctatgcgagttattctgctgacaaaaatcggcttttccaaacattggtaaaattcgaatgccgcggaattgagccgacttcgttcgacccccggattggttggatttgcgttggcacagaatcgggctcaattttcgatgaaattgacctcaacgaattggaatgggccgattacgatgagaagaattcttccgccgttgagattaatgacatttcatttcgatttgttagagtttaattttaaaatatgaaaaacaatcattaacagaaa

SEQ ID NO: 88962 - DNA, 890 bp, Heterodera glycines
ctcttgaatatgattttaaaaaattcatcttccataagatacaaagcgaaggatggccaatgctgaagaggtttgcccaacgtattctgaggccttttcccatgggaatgacgacggttcgttttgcactatcactgagtttaaacggaataaactcgaaaccgaagctcgcaagaattgggatcgcttctacaaaagaaattcggacaatttcttcaaggaccgaaattggacaaagcgagagattgagcaaatgtgcgcaaaagacatggaactgagtgtaatagtgaagcgaaaatgattgaggggaagaatgactcacgaggaaagggggacgaaagtgaacttcaaaaatggaatttaacccacgggactctctttctctccttttctacgccttttgcagcggaatgccctcctcacaaattcacaaatcaggcaacaaattccaattctgtggcctcgtcacttctcgggtttcggttatgatacaaaaaacgacctcacgttagtcgtggtttatatgtacgaaattcacccaactttctgcccaattcttttggttccaaagatttttctcggcctttactttttaggctcctttgactttgcttgacgccggttgcggctgtggcaacactttattcccattggccaaattcttccccaattggactttctgtggcgtcgatttttcctcaaatgccctctctttgcttcagcaaagggctgtacaaattggaactaacattcataccgaattggtggatctgtcgggcgataccctcgtcaatttctcttcgcttcctaaagctgatctgatcactctgatcttcgttctctcctccatttccttggagcatcattcaaaagttgtccagaatttgaga

SEQ ID NO: 88963 - DNA, 852 bp, Heterodera glycines
cgcagttcagtctttttcctcctctccttctgctcatttctcctaattcttctcaaacgtcaaaatgctttctgaaattccgcttccccaccaaaaaggcatcgtcgaccctcgtcttccctgcaaaattcaaattgtcggccgtgccaatgacgtcgcgaaacgtttcgaagtgaatcttttgtcacaaacaggcgaacaccttctccatttcaacccgcgcttcgatgaacattgcgtggtgcgaagcagcacaaaagacggccaatggcaagcggaagaaaggggagggaccaatcccttcgtggccgggcagcctttctcgctcgatctgctggttgagcaaggcctaattgagtgttctgtgaatggcttccaattctgtgaatttgccgcgcgggatgacttctcccaattgggcgctgtttccgttggcggtgacattcagctgaactctttggaagtgtccaccgccgagggtcccgcgattgcccatgaaggcggcgataaggggccgcgcgaagctgacgaggaaaatgcgcaagaacagccgcccattgtgatgccggcccatcccgaaccgcaaccggtgccagccgaaccgactccccagcagccgcagcctccaccggcccaggggccgctgtcggtgccttaccaagctccgctccatgcgttgcttcagactaaccgaatgcgcgtcgtcggtgtcccccgcccgggggcacagcgcttcacagtgaatttcaaaacgcacgacggagagacacttttccatttcaatgctcgctttgatcaaaactgtgtggtgcgcaacgccagcgtgaacagacaatacgcgccggaggggga

SEQ ID NO: 88964 - DNA, 638 bp, Heterodera glycines
gtttaacttcttatgtacatccgagagttagaatccccgggtgagctccctctggttttgttaaatgcgcctcgttcttgctgtcgtccgactaaacatgaacaattccgagcagttttaaatctgagaagaactgcgcaacgccttacggtcgaaaactcgaggttgaacagaatgaacgcgatgctggttgtactttttcagcgtcttacaggaggagttctgcctcatcaggccgtgcccgtcgctggtgcttttggccaaaaacaaaaccaacagccggctaatgcttttgccgttccaccggttgtacctgttgtgcctgtcaacgcgaacaataacaacagacacagctacaatgaattacagcgcgaacttgatacattgacggggactgttgatgtgttaacggagcaaaactctcgattggcacatacgaacggtgtcctctttggacatgtttttagaagtgtgccgcctaatgtccctccaccgtttgtacccgtcgctcaggctgttccacagcaccaaccgcacaacgccgcagttgctttgccgcacaatgtcaaccccaacccgccgggagttttccaaccgggtcagcaattgtttgacgacaattttgttgatgcttatct

SEQ ID NO: 88965 - DNA, 914 bp, Heterodera glycines
attaggctgaatgataatgataataataatcattagctaaaaggtcgcgtggacattgttctgtgcagcgcggcattgctttacgttgtgcccattttggagctgaacgacgcggacattcagcgatcgatggatgtaaatgcgatgggcaccattaatgtgagcactgatcaaccggttaatcagtgatgtattttgacttttaaattctcggggtagtcccggccccgctttaaattgtcctttttttcttttccaatttggcattttccattctcttcccaattgctaatggctttttgtcagacaattcgcgtctttttgcccgaaatggaagcccggggcaaagggcacattgtcgcgatgggctcaatcgcctcacattttggcgaagtgttccaaatggcgtacaggtggtcaatgggcaaagatgaaaagtatttttgtaattagatatatttttttaatattttaaaaaataattttgtgtcagtccaacaaaatttgcggtgcgtggcgccatggaatgccttcgggtggagctgaaggaacgcgggctggaggacattctctgcacgaccatttacccattttatgttcgcactcccatggtcacttcaaagggactccgtccggtggcacgttggttgccctttctgacggttgaagagtgtgccaaaagtgtcgtggacgcaattttgaaggagaaagtgaacgcgtgcattccgtggtggcttaactcttttgtggcgcttaatggcattttcggcatcaatatgaacaatgtatcgagggattttctcgacattcatttcgaaccttcgaattatgaggacgggcaaaaaagcttcggaagaattcgaaattcgggtgaaatcggacgaaaacggcgccaaaaaaggggacaatacaaa

SEQ ID NO: 88966 - DNA, 652 bp, Heterodera glycines
gtccaattaagcacaccatccacaaattttatccgagactgttttattgttttcggcaataactccgacgacaccttctccaaatacgcgaatatttgacgagatggacagacgaattaacaaaacagcgcggaacagaacgtgcagcatggtaacagtgacaacaaatggcaggcagcaaccgagaaagatagactatctgatcaagaagtttgatgcacttggatctggacgaccgccgatgccaacaagcgaaagtccgtcgaccagcgtcgattcccaattccttccggtcaccaaatctgcttcaacaaccatcgcgtcggcacttggatctggacgatcgccgatgccaacaagcgaaagtccgtcgaccagcgtcgattcccaattccttccggtcaccaaatctgcttcaacaaccatcgcgtcggcacttggatctggacgatcgccgatgccaacaagcgaaagtccgtcgaccagcgtcgaatcccaattccttccggtcaccaaatctgcttcaacaaccatcgcgtcaaatccatctgactgtgcgctaactcctcagcagaaatattgccgcaaaagagcactgatggagccatcgcaacacgaattggctatcatccgaaatgttctcagcttcgat

SEQ ID NO: 88967 - DNA, 626 bp, Heterodera glycines
aaatggtgactgttgctgccaatgataaaaacgtagatgagcccaatcggtattgtcagtcaaagggttgtaaaaaacctgtggaaggcaacctccgttgtccaacctgtgtcaagatgggacgacccgatgcattcttttgctcacaaacatgttttaaagcttcttggttggaacataagttgtgccataaagacgattcgtccaatatcaacgagtacaacccgtggcctttgtatcaattcagtggaacgcttaggcccgccccacaaagtgcgcgccgcgctgtcccggaacatattccttggcctgattatgcgttgcatccggaaggcgtttcgttggaggaacgaaacgcacgaaacagtggacaaattcgggtgttgaacgaggaggaacagttgggaatgcgtttggccgccaaattgggccgcgaggtgctcgacgaggcggcacgtgccattgagcctggcgtgaccaccgatgagattgaccgtgttgtgcaccaagcgtgcattgaacgggagtgctatccgaacccactgggctactacaaattccccaaaaattgttgtacgtccgtcaaccagggcatttgccatggcatcccggataaacaggcactt

SEQ ID NO: 88968 - DNA, 652 bp, Heterodera glycines
attcactttctagtattacgccgacttaaactttctcagaaatgacatcaaaaattgaatctactatcgccagcagttttcgaaaatttcttttttggtttcgttatgatggttcaaaattcccagccatggcaaagggttctgactctcgcaacgggccaagtgtcatgcaggtggtcgaatcgtgtcttcaaaaattatttgctacagagaattcggaccaaatcaaaacgttcgctataagcagaacggatgcgaaagtgcacgccattcgatcgccgattctcatcggattgcccgtcgcttgcgattggttcagtcagtcagaattggccaggacagaattccttctatgttttaatgaccaaattcgcaataatggatttacgaatgcgatcgaattgcttcacgttgaccccgtcgcaatgggatttcacccgtgttttcatgtttcctataggcggtatatctatcgtcttcgcgtcatttcgacagagcaaagccttaattacccaaatcgcttcttcgcccatttgtcccatgtaattccctcggacccttcgctggcgtccctctccgaattcaattacagttggaccattccgccgacttttaacatcgaaagggcccaatttgtgtgcgacctcctgaa

SEQ ID NO: 88969 - DNA, 643 bp, Heterodera glycines
ctttataaatggttaaatgattttttattgcaggattggtagttttcagattccaaccgcagcaaaacggcggcggcgactcggcggacaaaattgggccggaccaaatgcgtgagcgcacagatcgccgcctacaaaatgttggcacgcaatgcctcgtgcaccgctcagagaggttcgtacaacgcaaatcattcttcggattggcacagcgacaattttgcgggtttagaaaccacaatttttccgtttttgaagtccacttaatttttaatgggtttaaatgttaaccatgtaaagtttggcacgtacattgccggattgaattacatcatagtcttggttttcctcatgatttgtcacaaatttggctctatttttcggtccatgattcggaattgattgaagaacgtcatattaatggttggagatccaagaaccatcgcaaaactattttaaaaaatatgtacactttgccattttttgcgcaggtgagcgaccggaaacgggacgacacattgccgctgccgtatgaatatccgtacgagttgccggtcgggcgcaaattgccgtacgaattgtccaaaattttgctgatccttgagcagcggacaaacacacggacaacggacattccgacacc

SEQ ID NO: 88970 - DNA, 811 bp, Heterodera glycines
caccacttttctgtgctttttgtcctctcttttttctcttttcccttatttttcgccgtttttgtttcatcagcagcggaacaaaatgcgaatcttcaaaagcaacaacaattgttcaccattgagggcaaaacggttgtcaatgccgaattgcagcggataaagccaaattggaaggccggggaagaggatatttttggactacggaaaattcgttgggtttatcagacaggacggctctttcattgttcccgacgtgccttccggctcctacattctcgaggtggccagtggcgactttcaattcgagtccgtccgtgtggacatcacaaattcgggcaaaatccgtgcccgtcgtctcaacttggtccaaccgaatgtcgtctccacattgccttaccctgtcaaattaaccgcacggcatccgatgagatatttccgagtgcgcgaagaatggcgtgtcactgacgtgttgatgaacccgatgatgctgatgatgggcgccgcatttatcctcgttgtgttgatgcccaaattagccgctcaagacccgaacgtgcaaaaggaaatgcaaaatatgcagctgccaaaggttgacatgccagacatggccgacatgctggctaacatttggtcatctggtagcaacaagaaaggcagccgtaaacagatttcgtcgggccagagcacgaaacgtgtcacacgatgaatcatgacaaatcacaaagaccagccaatcatttccttttggaaattttattttgtagtcagtgcataaattttttaaattaaaaaaaaaaaaaaaaaaaaa

SEQ ID NO: 88971 - DNA, 462 bp, Heterodera glycines
tgacgctgctcgtgcgctaatggaccgttacccgccgactgtcatttgcgagtttcgagaagagtaccttcgcatctgcgacaggcataagcggctaattgcggtagaacggctgcaaaaacggatggagatggaacccatcagaagcggtggtgcccgtcgttcttctgcctttctcctccctttgctccaaagggacaacatttacgcgttggctggtgcgggtgccgtcgctttgctcagcgcagcaattgtccattattggacctactgattttgggacggtggagactcaacaacatacaaaacaacacatgcacacatacattccacacagaatatattacccatcacatatatataaatacatatttatttctcattttctcaattggaatgatttatgtaaaattaacaacaccatttaatgtaatatgtgaatgaacaataatgtgcttaaaa

SEQ ID NO: 88972 - DNA, 629 bp, Heterodera glycines
tggaatactatctgaacctggccaaacagcttgtgaatgcgaatgcgcacattctgtcgattaaagacatggccggtgtgctgaagcccgaagcggccaaacttctcatcactgcacttcgtgaccaacacccggatgttccgattcacgtgcacacacatgacacttctggtgcaggtgtggccagcatgatcgaatgtgcccgtgcgggtgcggacgcgatagacgcggctatcgactcgatgagcggaatgacttctcagccttcgatgggtgcaattgtggcttcgttgcagcggacaccgcactccaccggtttggaaatggactcgatttcgcgatacaacgcttattgggagacggcacgtcaattttaccaacccttcgaatgcacggtgacaatgaaaagtggcaactcggatgtgtacaaccacgccatccccgggggtcaatatacgaatctccaattccaggcattttctctggggctgggcgagaagttcgacgaggtgaagaaaatgtacgccgaagcgaatttggcacttggagacattatcaaagttactccatcttcgaaaattgtcggggacttggcccagtttatggtgcagaacaaactcacgaaagaa

SEQ ID NO: 88973 - DNA, 655 bp, Heterodera glycines
cgcattttaatttcctaaaataacaaatttctcctgctaattcctataataaatcatggattctccgccaacatccacctcaaaattaatgcaaatcccattgctttcggccaaacggcgaaaagaagtgctcaattttcaatggcctttcccgaaacatcccggcttgctttaccgacttggttcaaatgccgtaattttagctgtgttcagtttggcaaagcttgttttttgctttaataaaattctcgttcaacctgaacaaaagaagctcgttttggacttgctcaatgatcggaatcgtccgttggtcaccatcagcaatcataggtgcgtcgtcgatgaccccctcatttggtcaatgttcacatttcgcgagtttttgtccaatatttcccgatttcgttatattctcactgcccacgacatttgtttcaccaaaaaatctcacattttttttttctcacttggccggtgtgtccccgttgttcgtggtgctggcgttttccaggagggagttgatcactgtgtggatatgctcaactccaatggttgggttcacctctttccggagggacgagtgacaacggaaagtgggccgattaaggggggcattggacccattaatttccgaaatcgaacaaacccgccaatt

SEQ ID NO: 88974 - DNA, 654 bp, Heterodera glycines
accagcggcttctgccctcccccgcggcggcatttgtcccctctccgaatggcactgtctctgtgccatctttgccctcctctccaacaacaagaacaacaacaacagcgatgatcagtgtgccggccatcgcaacagtcactgcaacttctttggcttcttcaagggtcccctcttcaagcagtccttcgcccgtggcaattcatccgacaatttccaccaaagcggcgacttcgtccgccccaatcattttgctacccaacaaaaggagcaaagaggggcaccaatcgcagaagcaaacaatggccaaagaaatggcgacagattttgccgctgaaagcaaaggggggagagaaagcgaaattcgaagggcacccgcgagacaaaacgcagaggacgaatggacgaaggccaacgagttggacgagaagggcattccgccgacacagcgaacggcgccgaaattgagcacgacaacgccggcgacaacaacagctcatttttgggtgatcaaagacccgcgagaagcgcgccgagagcgactgttgcagctgcgtcggaaattggacccaaacccggaaccaccgaccaccacaacaacttcggctccgctattgcctttatcgccccaatttgaactccatcgcattcgcg

SEQ ID NO: 88975 - DNA, 1015 bp, Heterodera glycines
acttcagcgggtactgctacaaggcgttcaccaacgcggacaaagaagtcaaatattcggaagcgcagaagatttgcaagtcggacggggccgaactcgtgtcgatgcactcggagttggagcgcgagtttgtgaatgttgtggcactgactgcggcgaagaaatacgaatacaacgccaaggtgccgggattggccttctactggaccagcatgcagttggagtgggacgagaagaagctaaagaacgccagctgggccgacatgacgccgatggactacttgagcccgatggagtggggcacgaagaagcgtccggtgtacgtggacaactcgaacggcggcgagtacaacaaagaaaacgaaaactgcgtgttcattggccaatggccacgcgagggcaagcagtacctgaagttggactcggcagtagacaagtacggtctggacgtgctgtggagagacgaggtgtgcgagaagccgggcgaggactgtccgcgcggcgccgtgtgtaagaagagggctacggtgggcgaatgctacggcacgggggcgtatctcctggacgcggccgaggaggaggagatgaagaagctgctcaaattcatcactgtcggatccggcacttttgtctatgctgaaaagaacacatacatggtcctcctgctgaaggacttgtacggcaaacagatgaaggaggaggacaggaagaaggtgtgcgcttactacaaggcggagtacgtcactgtaaaggccgagccgaacaaagtgcaagaatatgtggacaaagtgttgtccaagcagaagcagatgtacgcggatgcgagcgaccacatgctgtgtaagttcagcgggacactcggcggatgcggcgactattgcaaaacgggatattgagaagggacggacggaagggaaggaacactttctcattagcatttagtcgtcctttgttttagttaaaatggtgcgctttttctctctgatttattgcataaataaaaaattttaaaaaa

SEQ ID NO: 88976 - DNA, 789 bp, Heterodera glycines
ccacaaaagccaaccgacgctgttgccgcgggcgaatttgctgcgtttctcccgcgaaatcgcggaatggaacgagcgatgcttccccggatggatcaatcggcgcctgcccgccagtgtcacggaggacttcaaccggtgccgcctctgcggtttggacgtacggcaaacatcgcggcacattgcggagtaccatcctgaacatcccgctgcaccagtgtccattgtgcgagtacggcgcggccgaggcacggcttgtgcaacgacacatgcgcaacaatcacacgctgaaggaatgcgaggcaagcgaacggacagacgaaagggtaaaaaagacaaagggacagacgaaatttaagggcatggaacccatcgccaacgtggagaagcacagagccgaattctcggagttgcacaaccaatgcttcccgggcagaccaaaacggttgtccaacattacaattgcggacgaaagcagaagggcaaagtgccgaggatgtgctcaggtgagagacagtgagggggggggggacaaattgccatttgatggggaaaaattggggcgtttccaaggaatgagaaaatggcatttccgtttccatccattcttttgagttcaaagcccccgcccgagactcattttccaaattaaacttttgcccatctcagactatcagtaagaagcgtcgtctgctgcatttgctggagaagcatctgaagaagcccatctacaagtgcaagtactgcttgttcacctccacccacgacaaagcgacggtggacacccat

SEQ ID NO: 88977 - DNA, 480 bp, Heterodera glycines
ctccccacaaattacccaattctcattgacaaacctacgaaaaaatgcattctttcaagctttttgcatcgctctttcttgtactttgtgtggtttcacttgtcatctgccaggacaagccagcagcagcatgcaaaccgcccaaaagtgtgggaagaggcaacttggcactcacgcgatggtggtgggacggccgtagttgtaagcaattcatctacaaagggcagggcggcaacacaaacaatttcccatcaaagaagctttgtgaggacgtatgcaagccctaaatgaatgaatgatgaatgtgatgagtcggacggagaaagaatgtgctgcaacccaagaagagaattcaaagaaaaaaggagatggaaatgatttaaatttgtcaaaaaataaataaattcatagcggtagaaaatttttgataaataaatcatttttaaaaaaaaaaaaaaaaaaaaaaaaaaaaaaaaaaaa

SEQ ID NO: 88978 - DNA, 1228 bp, Heterodera glycines
ggtcggccaccaaagggattcgttccgcgtcggttggtgcgaaagttgtgccgactttggtgtgccgccctttgtgtgcacgactgtcgctacaccgcgatcaccggattgtacgtggagaccgccggcttcctgggatcggcggggcctccgctcgcgcaaatgcggtacagaccgccaaccaaatggcaaagatcggcgccgggcaggcggcagaacagcagcggcgatgccgtcggccgtggattggccaatgttgcaatttttgacaacccttggccagcctggcccccactggaggcgcccgtgggcgcaaatgccggcacgccgttgcctcgggcagcaactgccgaaaactaaatatggaacaactctcagcggtacagcccgaaaataaaattgaaattgaacagccaaacgaaggagacgctgacggagaacagcaaccggcggaaccgattcaattgatcgataaggaaagagaatatttagcggtaaaagctgcgagtagggcagtgatctcacatctctcagagtggagcacgccgattgaaatgcggttcgcaatggacggcaccgtcgaaacaaaacggaaaatgcggaggcgtttttgcatcgaccgtcaacaaatgctgcatgatattgaatgtatgtatgcgccaaaaataggtataaaacagattctcaatgtggacattgtcgggtgccaagacgaaatcagccaagctactgaaaatgtataccaaatggtctacgacggaggtttcttccgcaaacaaactgggttatgcaatttcaaggttctcaagcctacaccaaccactaaaaatgttcttgacaatgttattaacgggattttgcatggctgtcttatacatgtccaggaaacgattcttaagaataaggaaatggtaaaaaaattggccaagtgtttggccgagaaggaaaacaacagaatgggcgaagctgaaatttccgatttcttctaacaatacaacgcggacaaagtcgcaaccggtcaaaaaaccgatggaagtgatgggaacagtaaagtgaccgatacaatggaagtgtagacccgatcgatttgcatggaatgcataacatttttaaaaaaatcttattttttgttaacaaatctcaccaattttcacattgaaaaatttttatgcgtcagaagtgttttttaaaaaaacttatgcttcataaatatgtattttggtaaaaa

SEQ ID NO: 88979 - DNA, 883 bp, Heterodera glycines
atttggtccgaagtcagtcagctgaagggaatgcctctgctggtcgccggaaaccgtactgcgcgtagcgcatacggtagctgccaagagtgttgctccggcggtgcccaaggccaacccggacaaaccccgcagacgccttgcgagcaagtgcacccgcctccatgcaccccgtgccctggcggtcagcccggtaacaatggcccacctggacccccgggagcgccaggagcacccggccagcccggcaccggaggaggacagccgcaacccggagagcccggcccacctggacccaatggccagcccggacaacccggacagcccggagcgcctggacagcccggacaacccgcaagcccaccgccaacggagcccgctcctgcaggcccacctggagaggctggtgcacctggacagcccggtcagcctggagcccctggacagcccggcgcggccggacagcccggcccgaagggacctcccggaggcccaggacagccaggcaatggcggagccccaggccagcccggccaacccggacagcctggaaaccccggagagcgcggaatctgtcccaaatactgtgccgtggacggcggagtgttcttcgaggacggcacacgaagacgttaagaaaagcgattctgatcagtggaagaaaaagcagaaaaacagcagcgattgccctcccctcccccggtgcccttctccgtccccatttcccactgcctttctttcccttcctttttttattttgtttagcttttccaattctcccaaattccctcccccccccccccctctgaatttcttttctttgtaatcgccgctatgccaagttgcaaaacatcagcaacaaataaagaatgaatttcaaaaa

SEQ ID NO: 88980 - DNA, 601 bp, Heterodera glycines
ctcctttgttactcgatgatcaaagcttatcagcgttttattctccgctttttttttgtttctcttttcttattgtcaattaatgctcagcgatacggtagccacagttatgggagcggaacatacggaacaaattattggagcagcagttacggtaactcaagaacacagcccagctatggatacggtgggcaacagagcagatacggtacccatgaacaaaacggtggcgaaaatggacaattcgagcgacaaaacgcatggagaggaggaggaggacaatggggacagaatcagcagaattggggacagccgcagcagcagcagggagcaacagcagctgtagaaggaggatggggacgacgacagcagcagcaattcccctcccccgcgcccccaaaaacgcaaaacaattgggacaattccgacaatttcgccccttcgaccgcacaaaatcgcggaaaattgcgcgtcgaccttccgccgggtgcacccggcacaatggaggcagcggacgccgatcagtcgagcaaataaatggagaaaaatgtggcaactttgtgccatttctgtaattttatccttttgcctttgggaggaa

SEQ ID NO: 88981 - DNA, 640 bp, Heterodera glycines
gccaaggggttgcagccttggcgcagtacgacaacaacaacgaccacgacaacaacggtgacaacgacaccgattccgcagcgaccgccggcacccgtcgtcacccctccggcggcgccgccacgtgccgttctgcccgatttgccaccacaaaccgtgccaacaaatgcgagattgcaaaactttggcccatcggcgaatgagttgcagatgaaccgacgggtggacagctccacagacaacgatggacaatcagcatcgacactcagacaggcaaacaaaggggggacgagaaggggcgggacgaaaagacaggataaagcaaatagggcacttcacatgcgattggcacggttacgccaaagtcagctggcagcaaagcgcgaatttgaacggaacatgcaaatgaaagcaaataatgccgcccaatcaccggcatcgaattgcttcgacagagctccatggtgttccggatggatccaatcctcgccgttgatctgtcgtacatcgtccatttacatgcgccaagactgtgccaagtcgtgcgggttctgcagcagcagcagctgaagcgggcacagctcgccggcggacttcaaaaatcagcagccaagcgaaaagaaagatctcatcgttacag

SEQ ID NO: 88982 - DNA, 627 bp, Heterodera glycines
gtttcgctcgacaaacaaacgccgaaactcactgagcaaatgatccgaaaatgccaagttctgcccatcgatttgccgcgtggcattgagacacagcgcgacaaagggatgattcagaacaataacccattctttcgtgctcacggtgttcgtgttgagacgaacatgatgcaagcagaggcgcaacacctttaccctccggcactcggtttctcggcacaaaatgaacaaatcgaaccgaacaatcgtggcgtgttggacttccgtttggctgaccgtggacaaccgttgccccgtcgctatttgcttccgtgtgaatttccggaggtttggactgttgtcatcgtgcaaaattctattcgcatggaccaatgcagatacttttgtgagaatttgatgcgatgtgctcaagcacgcggtgttcagatgggaaagccaagaattgatcctatggaagacacttcgcttaattatgttcgtgaaagattcgacttttattcaaaacatcgctgtcaatttggtcttttcattgcgaccggaaaggaatcaactcgtgttggcgacgtgcaccatgtgttcaaactgcaggaagtcgaacatggtgttctgactcaacatgtctcgcct

SEQ ID NO: 88983 - DNA, 626 bp, Heterodera glycines
ggagaggcaaaaccgataatttaaaaattaaatatccaaaaataatattattgtatatattctccatcatttttttagaattattgtaaagctttcttctcatcaaaacattgcatgccttcccttttttcagacttatgaccgggaaaattgcattttaacgccagccccttgcacaatttgcgcatacgccgcgacccatggccaacttccggcaaaacttttcgatttcaccaaagaagcggtcgccgtgttggagtccattcggttcatcaacaattccggcgtcgcatacttggccgaattgttcagagggcaattgggcaaaaaggcagtgaagcgaaaagtacggaagcgcaagcaatccaccgacaataaatgaccatgtctttaggtggatgacaatggacacggacgactgccaattttcgcaatgggcagagggttgagtgaacaggtggaaaattcgttttcttaccgccacaatcaaaaaaatattcaaatgcccttgaaggactgccaacgtttcatccgtaagcttgtgatcaatgggtatttggacgaacggttggtcaccacggcacaccaaactgtgatcggctacataagcgtagcgtcgaaagggc

SEQ ID NO: 88984 - DNA, 629 bp, Heterodera glycines
aattcgtgttaacaaatgatataatgaagcctctgaaaattgacgtggatttcccctcgaatagtcatcccacttcccaagaattaaaccaagattgtattcctttgtacgaaatgcttgaattcgaggaacttcaattcccaaactattacctttccgaacaattgggaaggggtgcccatgcgacagtgatgccgtgccatttccatgggaagccggcagcggccaaacttttcaatgccaacgtggacttcaaaacgatccaaaaggaggccaagctgttgcacgagtttcgccatgaaaacatcattgaattgtacgctcttttccacgggacaatgtccggattggtgctggaactgatggagggcggttctctgagtgaatgtgagtcaaattttggcatttcgaaacgcactgacaaatcactgtgccagcagtaattcaccagcgcaaaagcatcgtttatcaggtggcacaaaactatgcaaaaatgaccaattgttaacagaattgtcatgtgattaattggactttccaagtggccaaagcattggaatatttgcacaagcttagtttcatccatcgcgacgtcaaaccctccaatatgttgctgtctcttgattatg

SEQ ID NO: 88985 - DNA, 1046 bp, Heterodera glycines
gcatttttcggcgttgtaatgtcaacggttgccacggtgatttgcatactcagcgtgccgctggcctaccaaaacttccagcagattggcaccaaaatgcagaatgagctcgagttttgcaagcagcgttcagggaacatactccgtgagctaacgcgtacgcaaacgcttgcccaagtggtcggcatcattggaaacgcacgtggcaacggcgcagccaaggccagaacggcaaggcacctcgtttacggcgaagcgggcgtctcgggttccgccgcgcaagccggcctctgctgcggctgtggcgtgtccccgcccggattgcccggacctcccggcccggtcggacagcccggatttgacggagtgccgggagcacctggacaaacagggccaaatggccaagccggtgcgagtggtggcggatcctttggcgcgggctgtggtgaatgtcagcctgcccaacccggtctgcctggcccgcccggacttcccggtccttccggaaacccgggacttcctggcccgaacggaggccaagggccgctgggaccgcctggtccacctgggcctgatggtcaacctggtgagtctggccagtctggccaacccggagcccccggcagaatcacagggtacggcccgacagtcgtcggacccccgggaccacccggacccaacgggtacccaggtgctcctggccaaccaggactgcccggctcgtttggacagcccggggggccgggacagcccggcgacgcgggaaagcccggcacgcccggaaaccccggagggaacggcggtccgggagttgccggcgaaattggaaatatgggcacatgcgaccactgcccaacgccacgcaccgccccgggctattaaacggaagaaaacagaacgaacaaaggaaattcgacgcagaaaacttctattttccgtaggaccagacgaaattcgttcagaaaatgtttattttattgtgctaaagatttatttgtcccaaaaatatttttagtagatttaaataaaataattaaaagccaaaa

SEQ ID NO: 88986 - DNA, 735 bp, Heterodera glycines
aaatcaaaaaaatttgagttttcatccccaaaacgatgtcggtggtggcggctttctctcgtcgtattttttgcccactcataaaacgatcatttacaaccatttcacctgtaagaaaattcgatgctaaaatttgaatgttttctcttcaggcaattgctgtgcctgaaattgctaaaaaattgaaatgcacattaattccaggcgatggtgttggacctgagcaagcctatgccgtccaagacattgtcaaggcgaccggaataccaattgagtttgaggaagtctttctcagcgaagtgtactactcgagatcggccagcattgaagatgtggtcgactcgattgcccggaacaattgtgtcgcattgaagggggccatccagtccagccttgacgacaaaacggatgggttgaacacgcagctgcgcaaacggctggacctgttcgccaatgttgtgcacatcaaagccctggaaggcatccgaacacggcacaacaaaatgttggactttgtcatcattcgcgagcaaacggagggcgaatattcgcgcatggaacacgaattggtgccaggtgtaattgagtgcttgaaaattatgacgcgagtaaagtgcgaaagggtggccaaatttgcatttgattatgcgactaaacatggccggaaaaaggtcaccgccgttcacaaagccaatataatgaaattgggcgacggactctttttgaatgtgtgca

SEQ ID NO: 88987 - DNA, 640 bp, Heterodera glycines
agaacaaataatattttcgattcttaaatatgtttcgtcgttttatttcatccgctccaaatgttgcaaaagttttcggcggagttggactgtccacagttgtggccgctgcaattcccgacgttgaattgaagaagaagccggactggtaccaggagactgtgcaccgcctggagaaaacgctcaagaaacttagcacatatgcttacatcgagaacagtgacattttggaagacgcaaaggacattttgatgcgttgtgagaatgtgaataattgcgatatttcctggcgtctcggtcgcgctctgtcagaaaagggtgacttgttttctgttgttgactccgagaatcgaatcgaattcttcgctaaggccatcccccatttccaaaaagcgtttactctcgagccgaagaacggaagcgcaggggcacacaaatggtacgccatcactctgaagcgactgaggctgatcacttcgcagcacccttatgtgaagaacgcgaacaaagaagtgattgaacacttggaaaaggcccaccaaatcgacccgaaggacgcaatcacttgccatttactcggggtcgaatgctttgagaatggccgttacgacgaggccatgaaacttttccaggcagccga

SEQ ID NO: 88988 - DNA, 538 bp, Heterodera glycines
aaacaatggcggtgagtcatccgcagcaaaaacagaacgggcgacacagcggtggcggcacagtgccaaaacacattggcatcggtcggctgccgacggaggacaatggcaccaccagcggaggcaatccgccgcatcagttggacgacgcggacgataatcactaccaattccaattgccgctcgcttttcggtcatcgctggtccatccaacgacgacaacggcacaaaatgttcagcaccatcaattgcttcagcagccgcaactcaacgccaccattccctccatggaatgtgtttccgtcattcatcccaaaagggagcaacagttctccgcttctgttgaccaattcgtagacggcgacgacgaccaattcaagacggagccgttggatttgtcgctgtcgtcagcacgtacaaaggcaaacgaaaacggcacaatgggagggaatggcgcaacagtcgctggcggcatccagcgcagaaaacggacgacaaacaaaagacaaatggcggaggaaatgtgcgaaacgacggg

SEQ ID NO: 88989 - DNA, 1038 bp, Heterodera glycines
attgagcagcccatttcgcgtcacttgcgccgattggtcacttcgatcacccttttcttcaccatcattttgcttgtcgtctatgttccagttcgggtgatcaaatggctttgtccttcgacccttccctacgttttctcggggtctgctgacactccactggttgaatattcattcgaattggttcttttgcaggttataatgcccagcattttggagtattccaaagcattttctctgctcaaacgaactgttcgcatttggtgtcgtgtcgttggcggatggctttctttggacagttatttgcttcctgcggacaaagagaagcgaaacggcggtcagcagcacagggaacagcaaaggcagcgggcgagggaacggttgttgaggggcgaccaggaggaacagatcggactcattgaagcattggaagcgatcgaagacaattcgacggatgacgaggaaaggcaggagagtgaggaggagggggaattggtggagaatggaaatgagcgggacaatgttgtggatgacagtgaagaggacaacaccgaagccaatgggcaacggaaaaccgaagatggacacgaggaggagggggaagtacgtgttgagaaagagatggcagagaacggactaaaagcgaaaagcgcggtggaaaactgtgaagacaccgcggaagaccaaaagagggaagtgaacaacggaagacccactggggagagaccggaggaactttttttttatggcatggagcaggacaaccagctgaatggacgaccagctgtggtgggccgacaggaacaacaaattcagcaacgtcttcagagggcacagcttcatcgggagcagcgcaatttgggcgctcaacatcaggcactcctccgcttccgagactcctccgtacccgaagaatatgtccagccgaacctcttcccccttcgcatttcgcttcttctttttttcgtcgccctccccaccattgcaatttctttgctcttttttcttttaccgggcacaattggtcgctttttgctt

SEQ ID NO: 88990 - DNA, 641 bp, Heterodera glycines
  unsure (1)..(641): unsure at all n locations
tcgttacaattttgttccaattgatgaaactataaaatttcccgtctttcattgctgcaatggatctcatcaggaatctttccaccaatcgtttggtcaaaaagcgccgaatgagccattaaaaaaacgcgattcttctgtagaacttctcaatgacaataattcatttttcaaaatacgcgattcttcggcagaatttcacaatgatgtaaagctgctcggatgttggaggacagtctcatcaagggcctttccacgagtttatcgatgacgattttctattcgagaaggcggagcaacacccaccaattgtcgttgccaacccatcagcaccgaatggcccattcaaaatacgcgattcttcggcagaatttcacaatgatgtaaacctgctcggagttggaggacaaaaggatgtgttcagaaaattgaaggacgtgtttggcttttcctatttccgcttcaagcaaaagccggcggtggtcgccgctcttttggggcacgattgttttattgtgatgccaacggggtctgggaagagtttgtgctaccaactgccagctgtgctccatcccggcgttacaatcgtcgtttctccgcttctttccctgatgcangatcaaattattaaattgcagaat

SEQ ID NO: 88991 - DNA, 657 bp, Heterodera glycines
gcggtccaaatcttttacatttacatttgtgcagcaatcaccatcaaatttgtctaccaggaatcccgtcgctatttgtgtccaaatgtcaacagatgtgaacttggccccctgtgaactttcattcgctgttgaccaatttgatgacccattaacgcggcaagcaatcagcggtgcagtcgatcaagcgcggacattgtttgcacagcgacacacggctatcccgaacattgtcgacacccaccacattcttgtgtcgcgttctccgcatggctttacagaagggtcttcggtgtctgcgggttcatttgccgcctttttttcactcatgatcaaccgttgctttcgaatggacgacgtggccttttcgggacaaatcggactcgaaagacaagtgcagtatgtccagcaaaattgtggagaaagttgtaggcatgagtgacttcgggttacgcaaggtcatcgtgcctgacggtaatcgtgatggatccttcgccacatttgctgcttatttgccgcaacagatgtcttaaaaaagtgtagctggacgaattcgttttcgtcgccttccccccgtacattgccgccgaagctgtgcttttaactggccaaacaagtgccgaattttatgccgccattttttataacgcacaaaaa

SEQ ID NO: 88992 - DNA, 638 bp, Heterodera glycines
gtttgagaaatttttaaaactaaaaaattaaaaaaaaataatggaacaattggacagtacgctgaatgccgctaaaaatgagacggaacgattggctgaacagttgaaaaaaagtgcagaacaggcccaaaaagaagtgcgtgaacggacactgcaccaggacccgtatttgcgcttggtttaccaactccaaacagcccatctgatcgcattgggcattgaggtgctcactctgtacttgggatggcgcgacgtgaactttgtttggctgctgttgccgcttttgttttgcgctggcgcaatttggattgtctctcagcgatggtaccatcagatggacggacgttcggactttaacaaagtgctgagcgctgacaaaatgccagttcgtgcaaaggccgcttcatgtcttgttggcggctttgttctgtctctgcttgcccagtggaccgctccgacaatgggcagcacatcgatcggactgcttttcagtctctcgagccacgccgccgttttggtcggtgccgtctgttcggccatcgaactgtacgaaggggtgaagctgaagaatcgctgattactgactaatcgatcagaaacaggcaaaaaggacaaaaaggaagaagaagaagcttctc

SEQ ID NO: 88993 - DNA, 662 bp, Heterodera glycines
gagcttgaatatttccaccacgaatggagtgcatcggctgcttggctttccgaacttcgttctctgttttgctcagaccattcagttcggccaactttggtcagggagcacgggacattggttcccgtcacaatgtttcgtcacgtcattcggccctccttgaaaaagctttggctccctttgtaccgcgtacggcgaaggaattggccgaatatttggccaaaaatgtcctctaccattctgtcggcgatgtcctcgtggtgcacaaaccttacggcgttggctctttgggctatgttcaaaaggaatttggcatttttccgacaacgcaatacaaattcaaagatcgaatggacctatttaacggagtgaaaaaggatgattcggttactttggaggatgcaattccgcacttaaaagaaatattccacgagccaaagttacacttttgcaccggtctcaaacgttgggtgtccggccccgtggtgcttccctgctctgagaaggcttttaaaaacatcggtcacagccttttccaaggagagtccatcagtcacagcaatgagcattggacagcccagcacatgcaccgagcattggcaatttgcatttcgcgccctcccagagacgaaggtgccgtccatggctacgccacgttccaa

SEQ ID NO: 88994 - DNA, 636 bp, Heterodera glycines
ggacgatgaaaagcatgtggattaaccctaattaagccaatgtctggccattcaaaaaacgacactttttaaaattccgcattttagggggcaatcaaaaattccacattcttttacatgacaatccaagaatccgttgaaggaaaattcaactggtcaaatggcgccgaatgctcaatttattagtaaattatacaccgaactaagtcaaaccagccaaaagattgtcgaacttaataccacataaattgactttcactgaaagcattttaaatgttaaaaaatatatcaagttcatccaattcgacaatccatggcatgagaattgggacaagaatgattgccaaatgatgaggaacaacaaaaagcatcattttcaaatttcatgcatattaagcggtgcgatagtggtcaggtgattgattttattcattcacattttgtagggatgacaagtgtttattcccgtgtttgtttgtccgtcaattgtatgtgtgatggatgggtcaagaaactaataaacgaagacaaaataaatatccgtgttcaatgggagagcgagcgagaggaagagagaacaataatgatgataaagcatttttttttaaattttatcatttgaatcaatcaattaat

SEQ ID NO: 88995 - DNA, 636 bp, Heterodera glycines
aattgtgcgaggccatgggaacgaatgttcatctgcggaggaagccgactgctgggaaattggaggccggaaaaggcgttggaaatggccagagaaacggaggacggcgaagagaatcagtcgcagcagaaaacgaacagcggaagaaatcagtcgtcttcgtccgtttggcgtgcttccattgagttgggccctgaggacagtcagcgtcttctgcgctttcgctttttcctcggcttccctctccaaatcgacccttctaattgccaatcgtccctttctttgctcgtcgttcgctgggaagcgaaaatgtccccgcgttgcattttgccatcgattgagtccaattctatgggcgaatgtaacaaaggagtgaccagcgaatttggcagttacggcggccgcgatcgattgataatggacgggtggctgcacggaagggaacaacgtcaaattttcttgcggatgttcggcaccgcactgcgattcttcgaccctaaactttcggagaggcgttttctgattcgggtgactccgtgcgacgttcgaatggacaaagaattcgattttgccaattccaatggccccgtcggttggcgcactccgtccctttacgttcactctttggattcgctg

SEQ ID NO: 88996 - DNA, 644 bp, Heterodera glycines
caccggcgccgaaacgccagcgccgaaacgcgtgggtccccggtggaagcccctttttcgaaaattttttgagattttaaaaagccaaaaaataagttataaggttttaaaaatcgctctgatcatgaatttgactgttgacttaaatgataatgctctgagataacgatggggatgcggagttgctataaaagcgcgtgatggccaacacattcccatcattcgcttttacatatttttttgttgaattgccaacaacttcttctatcgtatggcttattcattgtctcttcaaccgtggccttcgtctgcttctgcttcttctgttttgtcagtgttcgtcttcgtcctgctcttcgcccgttgctgctcccaatcggcggatgccaacagcagtttttcattgcgcggctttgcctgtgcgaagaaagatgccgcagtgcacggcggcacgttcactgttgttggagagaagcggctgtgagtcgctaatcacgaatatcacattaatttcgaccaatttcgaaccccggacccgaattcgaacaaaagttgaaaattcaaatttcctttttcatttatgttttttggcatttttcagtcgtgttgatccatcgcaactgacaaccaatgaaggcaacgca

SEQ ID NO: 88997 - DNA, 753 bp, Heterodera glycines
ttttcatcttcacaaatctcagcttgtcaacaacaactcatttaaaccatggaccaccgctataaggccattattataggcaaatccgaccagcatctgtccgacatgttcctgaaactgtggctcatcggcgagtggaaatgcgtggacatcaaattcggccgatatggcgggtacaatctgctggacccggtcgatgtcggcgactttgtcgagctgtacgacggtggtggaccaattcgaaggcttcctccgggaccggcactgcccaaaacgcgaatcctcgacggaagcaatggcactcgcagctgcttgaaggtcaaagtcaacttcatgccgttggattttctgcttttcccggcctcggcgaaggagaaaaacctcagaatggcaatgagcgccgaactcggaccaatcccaatcgccaacgaaaacagtttcaaattgcattgcttctaccggggagtggcgacgctttttttcgccaaggacagcaaagaagaaatgatcgcggaagtgtacaacacaccgtggctgatcaaaagcgacggcgcgtcattagccgaatcggacttttccaccatcgtccacactttcgctttctgccaatcgcaggacgttcatcgtcagggattggtggtggacgcctcgctcaaagacgttttctttgtgcactgtgccgaacttccggagatggtcagcctgcgcaaagacatcacgggcggtcgaattgcagtcggcgattggattgaa

SEQ ID NO: 88998 - DNA, 628 bp, Heterodera glycines
gtcatcgaaaaaaaaagcgaccctttgcctatctcacgcaacacttccgtcacaattgtacttagctatgacctcatggtttccaaggccaaacaattgaaaagcaattccatttatgttgttgtttttgatgaatgtcatttgctgaaggagcagacaacgcagcggacaaaagtcgcatttgaactttcgaaaattgccaatcgcgtcattcttctcagcggcacaccggcgctgtcaaggcccagtgaattgttcacgcaagtccgaatgattgacccgaaaatatttcctagttgggtgaaatatgccgtgcgttactgcggaggaaaaaagggacgttttgggtttgaggcgaaaggaaggtgcgcactttgtctaaccccgacgaattaaaaactgtgatggataaaattatgataaggcgtttgaaaaaggatgtgctggacgatttgcccgagaagagacgtgaagttgtgtacctttctggcgatgccattgatgccaaaattcgggagttaaaaaaagctcgggatgcgtgtgaacaagcgaacagatattcagatgcgaaaacaaagaaagagacttttgcggagtattatgttcaggttgcgcctttcttccccct

SEQ ID NO: 88999 - DNA, 720 bp, Heterodera glycines
  unsure (1)..(720): unsure at all n locations
acaanggcgcgacaaaangnncaccggngagcgcanaaacnnaacggaggaccgaccagngcnacangnngcngcaaggaacacancaangacgccttttttttttaacaataatgacgttatgcccagcgtaatggccgtgctgacccagatgaagatgttttgcgacgacttgatcagtggccgatggaccggctggacaggcgaacgcatcaaggacgtggtcaacatcggaattggcggctcggatttgggcccgttgatggtgacggaagcactcaaaccgtaccaacaaggccctaatctgcatttcgtgtccaacattgacggcactcacttggcccaggtgctcaaaaaggtggagcctaaaactgtgctcttcatcatcgcatcgaagacgttcacaacccaagagaccatcaccaacgcggagtcggcccgggaatggttcttgcgcgaagctgtcgacacagcgcacgtggccaaacactttgtggcgctgtcaaccaatggccaaaaagtggaggatttcggtattgacaagaagaatatgttcgagttttgggactggattggaggtcgctactccctttggtccgccattggattgtccatcgctgtgcacattgggttcgacaacttcgagtctttgttgggtggtgctcatctcatggaccaacattttaaggaggagccgctcgagaaaaatattccggtcat

SEQ ID NO: 89000 - DNA, 643 bp, Heterodera glycines
caaaagtggaatggacgtatgggcggacattgcgaaagcggattttatggatgaacgattttcgagggttattacggctaataaggcgtacaacctcttccagaattccattgctgaacttgatgaacgttcgttccgggctcaggcggccattctcaacggactgttgacgcatcacttggatttcatccatggcaaatgtgtggatttgcgcaagattgggcttttgttggaccattttgaccgattagtcctccgttcggaatgtcttttggcccaaaatgcgaacatttcgttgctccgttgtctggtcaagtgctctttctattgtcgtttcgctgatttcttactctgttcttccatttaccaacaatccttcaacgaattccgactgcttgcgatggcaatgttttgctacggtttggcattgaaatgggcatgccataaatcggtcaaaggaagtgatggagcggatagcgcgctcctttcactctgtgccgctgagttgacgacactgctcagaacgaatttgcacgcggactctcagttggaggcggaaatgcacgaatgcgacaggaacatgctcctctccttcctccgctgttattcttcatctgtgccttataaagactgtgcccaattt

SEQ ID NO: 89001 - DNA, 748 bp, Heterodera glycines
gttcattaatgaaacggcattccccgtcccctcaagtaatggcacgataaactgcccattgctcctctcctctctttcctccttcgccacttgcacagcgactcggcaattcccgtcgcgggcggaagcaattaggccaacccatcgccgctttcattagcatcgcaccgcttaagtcagtcagtcacaaaccgacaaagaaacggcaaaattctctcgcacattattcagaaaagtcgaggtgagttgtcgaatttcgttgtttattttattcaatttattcgggaaaggctctgccaaacctccgaacagcgaaaaattcaatcggaaagtgagtctcgaggaaagggagtcgagaggggacgagcaaaaggtacggcacggcaaaacaccacggcacacgccggtcgatgagatcggatcgggatcggactatttcagcgacgaactaaacattgacggcgcctttgcgatgaacatgggcatgcccgcgggcgcgacggaagtgcccgagggggtcgtgcagctgaatgtcggcgggacttgttttctgaccacaattgacacgctgaaaagggacagcggagcactgctgtcccaattgttgacgttggaagggttggagaagaacagcaaagtggccaagcgaatgagcaacggcaccattttcatcgacagagacggcgaactgttcgcctatgtcctggattacctgcgcaccggcaaattgcttctgccggagaatttt

SEQ ID NO: 89002 - DNA, 635 bp, Heterodera glycines
taatgtttttactgttgagaataaccataataattttttctgtcttaatttcttggtttttggctccattctaattccgtagtgtggtgatttcaaatgaatttatataaataatatttagagtaatataaattttaattaaaattttaaaattaattattttaaaaatttatttaaaaatatgttttaaataattcatttgtgctctcgacattatttgatatttaattgcgaccgaatccagacctataataaaaaccgaagggccaagaatccaaagttgaacacgatagtgatttcggtcgcacgtatcaacaaaaatggttcttcaaaaataattcggatttccataatcatggacggcaaaacgatcaaattcattgccgacagtggatcagacatcaatattattgatgaaatcgcatacaaatgcatcggatccccgacgctaggaaaaagcgacgaagagggcatttttttcgatggacgccgctgccaattcatcggcaaaggattcgctaccttcaaattcaaaggaatcgaagtcaagcaaccattttatgttgccaaagcgggagcacttaatttgcttgggtcagcaacaatggataagtttggattccttgaaggaatca

SEQ ID NO: 89003 - DNA, 654 bp, Heterodera glycines
taatcgatgaatttcctaaaaaatgccctgttataaattgccaaaattttcaacaacaaaaaaaatggcatccaatttgaatactgtaatttaatcaacgcgggttaccgtaccaatgcgcggggcgcatgggtcggaactctttcgagcagcacacggtggctgggttactgtatcgtcgtcattatggttgttgaaggtgttcagttgggcaccaattcgtgaacaaatgccatctatttgcaacaattatatataatacaaagatatttttaattttgaacattttttgaataagtttgagaggtgaaaatttgtgaaaaaaaatttaattttcgaaagggcttgaaataattcccaaataaattaatccccattttcagaattatcttaaaagccaaaaatttatttttaatagttaattaatttgcatatttccgttatttgttaaaatgttgagattaattattattaaaataaaattttatttttattttttaatttacagacagattgtaaagagaacaaaacaatacaaaaccgacttggacagccaaagttgtactgctgctggtgctggtattggttgttgttgcctcttgacacaaatacgggctgaattggcaaaccgttgggcgggaattgcaacggggc

SEQ ID NO: 89004 - DNA, 1193 bp, Heterodera glycines
gccgcggtaattccagctctcaaaatgcatagaattattgctgcggttaaaaagctcgtagttggatctgtgctagccgtccggtgcacactttgtgtgttactggtttggttggcttttctgccggtctttccccggcgttggcctttaccggtcggcgtcggtgggctggcgagtttactttgaacaaatcagagtgcttcaaacaggcgtttcgcttgaatgttcgtgcatggaataatagaagaggatttcggtccgattttattggttttgctgaccgagataatggttaacagagacaaacggggccattcgtattgctacgtgagaggtgaaattcttggaccgtagcaagacggactacagcgaaagcatttggcaagaatgtcttcattaatcaagaacgaaagtcagaggttcgaaggcgatcagataccgccctagttctgaccgtaaacgatgccaactagcgatccgccggcggatttattcgccctggtggggagcttcccggaaacgaaagtcttccggttccgggggaagtatggttgcaaagctgaaacttaaaggaattgacggaagggcaccaccaggagtggagcctgcggcttaatttgactcaacacggggaaactcacccggcccggacaccgtaaggattgacagattgatagctttctcatgattcggtggatggtggtgcatggccgttcttagttcgtggagcgatttgtctggtttattccgataacgagcgagactctagcctactaaatagttggctcattgcttctgtgggcacaacttcttagagggattttcggtgttcagccgcacgaaattgagcaataacaggtctgtgatgcccttagatgtccggggctgcacgcgcgctacactggcaaaatcagcgtgcttgtccttccccgaaaggggttggtaaaccggtgaaaatttgccgtgattgggatcggacattgcaattattgtccgtgaacgaggaattccttgtaggggcgagtcatcaactcgctctgaatacgtccctgccctttgtacacaccgcccgtcgctgcccgggactgagccatttcgagaaattcggggacggttagtgttccggcttcggtcggtatgcagactggaaccgatttaatcgcagtggcttgaaccgggcaaaagtcgtaaca

SEQ ID NO: 89005 - DNA, 1005 bp, Heterodera glycines
ctgtcgacgattccaaggtgtttaaagtggatgagttggattttttggccacaaacactgacagagccatccaaagaatccgttcttttcaacaaaaacatgcgccgttgctgatgaaacatggagcaaaattggacgcaattgtcactgatttggtgctgcaaccgatggaagaaaaaatggagacggccgaagccgaagttaggcatcaaacagaagatatagctgtggcctcctccacttgtgagcccgagctttcagtccatgcccaatttcttttgactgacacattaaacggtctgaaaagaacgcttgacgacatggcccaggagcacaagcatcccatccatcatctcatctcgcgttgtgggaaggctatcgacactcgcttcttctccgatttgagccgtttgttgaaaaatgaaaaggaaattgagacggactctgacaatttgcggcatgcaaatcgtcttattctcgaacatttgatgggacttggacggaccgaagtcgccgatgtcttcctccaggagtccgcaatgtcgtctttggaagtcccagacatagacaattttgaaaccttgagaaacatcatggactccttcaaacggcaagactatttgccaacaattcaatggatgaaagcgaatcgaggcgaagacaacgaccgacacgacttgctgtttcgccttcaatgccagcatgtcatccgattgttggaaacaaatggtaaaagacaagctttgggttatgtgaaggaaatgcaagacgaagagaaggaaaagtacaaagaagaattgaaacatttgatgttcgtcgtgatgacccacccgcagaagggcccccacgactatttgttcaacgagggccgtcgctttgaattggaatggaaattggccaatgcgataacggactatcgctcttcactgtccacgatgcttaatgctggtgccaaaaccgtaccctctctcatgacaatgcgagcctttctgaatacttcccgag

SEQ ID NO: 89006 - DNA, 912 bp, Heterodera glycines
taaaactgtaaaagaatgacggagaatcgccgcgcggcacgtgaaattcagcgacaacagcagaaacagcagtcgttgctgaagaaaattgatttttgctcgtccaatgtgttcgatttgttggaccgtcccacggttggcacttcgttggcaccgatcagtgccgtgtttgatgcgattgtcgatgcccatctctttggcaaaaatcggtacattgatcatactgtcgtggcctttctgcaccgcattcttcgcctcttccgtcactcggccattgcccttaaaatggtcatttggccgcagtccgtccgcgcatggcacgtcatggcccagcaaatttggcccctggcggcgtccaatgtgtgccagctgagcgtggacagttatgtgttctcccgtctccgtgagttcgtttcgccgtccgtcctccgcgactgtgccaaccttcgccaaattgagtcggacggactgttccctgaaggcccacccgacgaccatccgcacgcgtcggatggccaagcgttggccaaatggctgcacacgccgcgcgcggacggcaggccgaaactgctaaatgtggaggcgatgacgggccaattccacgagcaaattgaacgactcaaagaaaataagcaagaggacggccgaaacaagtccaagacgccgaaaaataacttttattggtaagtttatccctcattttttgtgccattttaggcctttttgttcgcctcgtcgcccgtcagtttcgccatccgtttgtcgatgcatttgcccggtgcgtacgttccattcgccgtggacaatggccaaacgcaggaacggctgacattctgttgcattgacaaaagcgattccctttggctgttgaagagggctccgctcggcgtcgtcgctggtcaacaaatggac

SEQ ID NO: 89007 - DNA, 727 bp, Heterodera glycines
gtcaaacgcaacacgaacgcggcaccaacgcggaaaacattgaaattttgaaggaccgacggcgaacggcttccaatgccaagcgaagtgaacgccgccgcgttggttctgtttgcgatgaaactgttctttgggcttgacggggaagaagacaagcagcagtcgcgcgatggcacaaatgaagcgactcaatgcgccgacgatgacagtccgtcgccggtgttcagcttcgaccattggctgctgcaacttcagctgcgcatgcactgctggcagggcacaacggttcagaaggtgttggacaacacgttttccgcctgccaattggagcgttccaacatcgaaattccctatcgtcgtccaaccgccggcttttgccttggcggttcgcgactgttccatcgctgtcggaggcaaccgtttgctggttgtgtgccgaatgcgctccacaaccgtgttcagcctcgtctctttgagcattcctttcctcgacttcaccatttgccggttacgccttcggttttgctgccaatttccaacgaagagctttacgccccccttcagttccaaagtgtgctgaatcggccccttttggacattgtcaaccgcagccattggaacgaagccgaacaaacactcgtcgaacagctcgaccgaccgaacacaaaaatatttttccggaatttttataattccaatttgagcgcgtatttgcctcctcaccacg

SEQ ID NO: 89008 - DNA, 624 bp, Heterodera glycines
gagatttgttacacgttaaattgctgtctgtgatagcaattcaattttttccatatttgcaaatcaacaccaacatcacgacgagcgggacactgaacgaagggagtggcggtggtaccggcactgctgcccctggtcaaaataatacgaatggtgacatcaccggaggttcttctgctgccgctgctgttgccgggaacgtccatcggtgtcaatcgcccattatggaagcagaagttgccgaagacacgtccaacaaaatgttcccttctcatgagcaatcgcaacaactacagcagcaaccacaaggagtcaagaaggaaagtgttggttcttccaattcgacgacttcttccacacgggtcgcttccgttgtacatccaatagaaaccacgaaagattcgaaacccaagccatcggtcaaagacaacacaacgatcagtccacaggcgcttaattcaatgctaagcggctctcctctaataacaactccgtccattgcgcctcagcagcgtcatgcgccaggggactacacagacgcagcggtgactggcgggaaaacgcgcggaggtgtgccccatcatttgcatcagtaccagcagcagcaggtggtccctcatcagc

SEQ ID NO: 89009 - DNA, 573 bp, Heterodera glycines
atttttacctcctcccctcaattgaaaaaagttttgatcacttataaccagatcgatactgatcacttcactgaaaactcagtgctttcgcctcagggaaaattgatcaatcactttgcccattcattcttcacattcggctgatcacaacggtgaaaagcgaacatttcccagcagattgtaatcattaaaaaacagctttataagcttcaaatgcctccccttcggaagcggcggatgaggaaaagccgtggctttgatgctcttcggatttatccacctctcgggccttacctttatcctccctctttgcggcttagttagccttatcccctgtgttgtggcttaggttttatccccacttgtggcttagctttatcccgtccccctcctttatggcttacaattagctgtatcctccccgccccttcccactcatctccgtgtctaatgtccattaaacgatcaccccacccccgcccgcccctcggctgtgggctcggctcggcttttccaatccaatatttacccaccacttggggcttcttcgtcgcctcgggggaggggtggggg

SEQ ID NO: 89010 - DNA, 826 bp, Heterodera glycines
tggactctctttttaataatttattcaaataaaaatcaaagcgatggtgaccaatgctcagaataggcccaaagtgttcatcgttggggtcgggatgaccaaattctacaagcccaaatcgtcgggaaaagattaccccgagttggtgagagaggcagccaccgaggcgttggaggatgccggactcaaatacgatcaaatcgaacaggcgacggcttcgtatatgtacgggggctcgtgctgcggacaaagggcactgtacgaaatgggactgacgggcattccgattttcaatctgaacaatgcttgtgccagtggttcttccggcattttcctctgcaagcaaatcatcgaaagtggcaatgtcgatctgatgttggccgttgggtttgagaaaatgaatccgggcagtttggaggcgacgcagggaatggagggggacagggcactgccggtggacaaacacatccagctaatggccgacacttacggcttacaagcagctccgatcacttcgcaaatgtttggcaacgcgggaagagagcacatggaaaaatacgggacgcgcagggaacacttcgccaaaattgcctacaaaaaccatttgcattcggtgcacaatccaaagtcacaatttcaaaagaatttctcactggacgaagtgatcaacgcgagaaagatttacgattatatgggccttttggaatgttcgcccaccagtgatggggcggcggccgttgtgatttgcagtgaacgatttttggagaaaaacccgcgtttgaaaggacaagcggtggaaattgtgggcattgagttgggcacggat

SEQ ID NO: 89011 - DNA, 802 bp, Heterodera glycines
gacggcttcgctcaatgctaatcagctaattgttcactaattaccccaaataacaaaactgtctgcttctcccaacaatggccaccaaatgccttccgctcgaactgttgttcgaaattgtgcctttcatccctgccgaaaatgccgtcccgaatgtgctctcgtcctgtcggctgctgtacaactttttgctgccacgtgtcatcaaatggaaagagacaatgaaaaaaatgataaaagagcttcgagatgaagtgttcggaaagatcgactagcttcgagatgaagtacgggaccgcttcgcacttatcgaggaccgcttgacacttgtcgaacgggaaatacacgcaatgaaaaaccaatttgaggggcacaccatcaatcaaagcgctggtcaaatggaaggaggaggggcaccgacgggcaatgaagaatatctgccgctgccgccacagatgccgcttcagtccggccactacagtggtattgaaccgccttccgttgtgttgccaagtcgtttgcgtgtagaagttagtggccgtactcagacatcaatttccctcacttggatgtctcattccaaaattggtatgacgatcgcctcgtacgtcgtgctcaaaaaaagcgacttaggattgtggtggccgatcaaaaagcaaaaggcgattaccattcgtacatcaaaatgctcacttggatggatgacattgagcgcttttatccgcaactggcaaaaaccttcacaattggcaccacatacgagggccggtccatccgcggcataaagattgagagcccagtt

SEQ ID NO: 89012 - DNA, 779 bp, Heterodera glycines
caattcctgccttgtttatgaggaggtctcccaaccgaactgattttgttgcaaaatgcctctcattaaggccaaaagcctcagattattgtttttccaaaagattaaataccctaaaattccataaaagcaataaaaaacccttaaattcccttttcaaaaaattcttattgacaaatacattgttgaaagacatcacatcttggagctctgttaagattgccttacttctgatgatcagagggggcttctctttttatttaaattcctaatatgatttttattgccatattttagcttatctcgaatcaacgtttgcccagtttatgttgaccttggaggcattggcccatttggacacttttcattttgtcaccctccaggcatgctcatttctgggctgttttcaacaagagcaaatggcattccgattaaatgcatttgggtccatcatcggtctcgttgtgtggatgctaattgcaggtaattagctactaatcattgtgctattgtatcttagggtaatattgaatagggaataaataataatatttttgctcaacacatagcgtcactccttgcttaggccaactacttctgttcggtttcgtcccatgtgccaaacggttcgacccggtcactttgcacttcttcgacagttgcaattggccaaatccgaatgcgcgtggctctggatttgccttgctgaacatttggcttaccgtactgctctgtagcgcattttccatttacgcaattgcactgtctcatgtgcgccg

SEQ ID NO: 89013 - DNA, 599 bp, Heterodera glycines
  unsure (1)..(599): unsure at all n locations
tgagaatcaaaatgcatctgacccaaaaattgcaaaaatagccaaaccacttcagcctcgaaagtatccatttgtcgaacttgttcctttgatgggtaaaaatcatcttgacactgtctcagagagagttcgcggaatccatccatgtgttgaagaaagacataatttgtttgcatgtttgaaaaaatgggactacgacgacatgaaatgcacaaaattctccgattcattattcagttgtatggaatcaaacaaaaaaattgtcgctgcacacaatgagcaaagaattaagggagagcagcccttgcacatcgtcgatgaaggtagcagtgtgaaagcggaggcgtccaacatactccaagcagacattgaccggcttttccgcaaatggaaacagcccgaacttggcacgatccaaaccaaagttatgaagcgccgcggacacatgccgtactacgtggactacttccaccggaagaacatgaagggatggcgcgcctaagaaaaagactcaattgttttgtaaaaccttagttggatttcagctgaaacttttcaaatggcataaaattgatacgngagaagggaaaaaaaaaaaa

SEQ ID NO: 89014 - DNA, 612 bp, Heterodera glycines
ccgacctctagtaaaattcattctcacaaatcaatcaaattgttgccccattttgtcactctccatgattcacattgccatcccttcccatcgaacattggccgaccatgaagatccgtacaacaaatttacggtttacgatatccacgtgaatggcgccttccatgccagtgtgcggtacaatttgctgtactcattgcacgaaaagctgatcgacctgttcggctttcggttgaatgcgcccgattttccccccaaaaaattgtggaaattggacgcaaaagcgttgaacgagcgccgggaagggctggccaaatatttgcaaggagttgtcgcgaaccccgatgtgtcgaggcaccccgtcatggagcgtgtttttctcgattttcaagtggtatcccccacattttcaagaagtccttttctgctgcggtaagccgaatgacaaaattggaaatttttctgcccgatggacggccggtgtacgtcgaatgtggcacggacgaggcgaccaatgtcatcatggagagattttgtcacgcgattgggctgagtgaaaagaatgccaaattttttggcatttttctgtgccgaccgcgccgtggacgggga

SEQ ID NO: 89015 - DNA, 591 bp, Heterodera glycines
gtaatgaaggcgagcgaaacaatgacaaattggtcggaacagtttcaagagtacgacccgttcatcactcaacctcaccccaccaatccatgggtctcggatgatccttcattgtgggcgctaaatgcagacaacgtggaagtgccgacagaacgaagggttaagcgatggggcctaagcgtcatggaactcgtgcgcgaccctatcggacggcaggttctcgaatcctttttggattccgagttctcgtcagagaacctccgcttctggtgttgcatccaggacctcaaattctctcccaattgtcaagttaaaacaaaaggccaacacattttggacgagtttcttgctcccggtgcgccctgtcaggttaacgtcgactctagaacgcttgaagaaacattacgatgcttggaggagtcggaccaagcattgcgaaaccagaggttcgctttctcagtttcggaggaacacgtgttcacactgatgagcaaagactcgtacccacgttttctccgatccggcatttacaaggctgttttggacgctgccaaggcaaagggtggcagaaaacggatcattgacctgatc

SEQ ID NO: 89016 - DNA, 773 bp, Heterodera glycines
ctcatttcgggtgcttaaatagcggcgcgtggggaaggtcgttgtcaaccgcagatactcattcccttcccacccatccatcgacgccgcacaaaatcatcgtccgctgcttggtgacatacgcgcgtccgacgggtgagaaagcacccaagaagtggcatcgtcttcgagtgcgtcggacccgacaacacaattaatcatttcatcactgaattctgtcagaaaaacaaatgaaggcacagtggaaaatgcgacgaaaaagactgacaacaaagaattgagcaccgacgaggatgagcagcaaaatgtggcgagcacttcgacgccggaggacggagaattttcaaaaatcagtcgtattcgaaagcgccgctacagtcaggcacgaatacagccgacgagagtgaaaaaagtaatgcaaagtgacgaagacatcggcagaatggtggccagtgtgccggtggctatcggcagtgccatggaagtttttgcggagaaattgttgctcgcagcggccgaaagtgtccagcacagttcaaccaaaacgctctctccaatgcacatcaaaatggccgtttctcgcgttccgcaattttcttttttggagcctatgttgagggatgttccgatgaacccgaaaatggccccctcttttggacagcaatcgtcttcaacgtccaacggcgaatgaggcgatgctttccgtttaaatacctctcacattggacatccatttaacaaggctttactgcgattggttcagttaatctgta

SEQ ID NO: 89017 - DNA, 654 bp, Heterodera glycines
gaagtgattttggccgctgaaactgtgtacgactgcgtgcacagctgctaccagcagaactgttcacgggccgcgttcactcacttccctcgcagcgtttgtttgatgcattttggaggcgaagtgccattggaccaaaagtgcgcggaggtcgaccgactcggcacgacttgggatttctcgtcggtgcccgaagtggtggaaattaaatgcgtgaaatgtgccggaagaaaggagtccgtcgaaaaaagcactgacaatgagcaaaacatcgcaaaaagacacttttccaacgacgaaaatgcggtgggacagcaggagacgacggcacggcacattctcaacccccaggggctcactttgaaatgcgatggtcgcgtggaattcgtggcttcgcccgttgccaatttgcacccgctgaacatcaccaacgatgtgccagccgacacagcagccgattgtgcacgaaagtgttttgaggcgattcattgcactttggccgcgttcattccgacgcccggccatgagtcggccggtggcatttgtctgctgacctccgacgcgggggacgtcgcctgcgccggcacttccgtgcgacactctccgcaacacgcctccaccgttccgtttctgatcaaatgcatccgttgctcg

SEQ ID NO: 89018 - DNA, 653 bp, Heterodera glycines
gcaatgcaactcaatggataagagcggaactcgaaaactcctggccactggaaataattcggcatgtcaagatcgggataaagaatccagtcaccgacccatattcgtacaattataccgcaaatctgatcgatgacattgtttcgccacgtgggcctttcggttacgtctcccaaattttggtcacgaatgacttcgacagaatcgaaaatttctggcagaggtgccctgcgagttattgcgcggtcgtaaaaggttacaaagggatcaatttttcattgtttcggcacaaagtggggcatttgacaagggcccacaaggcagagcgatggtttgaaagaaaccgtgacaaaatgtacgacatcatccttaaaaatgacaaaacatccgatcttggcactttgatgcgagcgattgaaatggaaattggccctgtgacttcgccagatttgttccactcctatgtaattgcccacgtgagtacaatgacggcaaaagcttgcgtggtgcccgtgggactgtccttcagccaattcaccaattattccggttacagtatgattgaggcctacagtcactaccgattcccaaccacccacgacgaacgttttaaattgtttttgtttatctaagattgagcacttttgcttgat

SEQ ID NO: 89019 - DNA, 629 bp, Heterodera glycines
gctcacttccctcctaatttgtgcttccctttgtccaaatgaccctcattagcaaatgttcgcttctcctccttttcgtcgcgcccttttcccatgcgtttttctccggctttgaggtttctcccaacgcggcacgtctccgtcggcagtgcggttgcggcgggtgccctcctccgcccagcggcggtggctctgtccaactcggcatcagctgcgactcgccgcgccctccaccgccccctccgtgctgcggttgtcagtcgtcttgcggctgcggtggcggcggtggcggcggatgtggcggcggttgcggcggcggtgccattaaactgacaattggctgcgactccccacgccctccgcctccccctccgtgctgcggttgcgggtgcggctgcggcggcggatgtggtggtggcggttatggtgcaaatggcggcggcggctgcggcggttccattaagctgacaattggctgcgaaggcccaaaagccccgccaccgccccctccgtgctgcggttacgggtgcggctgcggttgcggcgggtgccctcctccccccagcggcggtggctctgtccaactcggcatcagctgcgactcccctccgccccctccgtcctgtggc

SEQ ID NO: 89020 - DNA, 634 bp, Heterodera glycines
gtctctttgtcgtgtgatgagcgggactctgagaattggtgatcagcttaatgtcctccgacattcggcgtcctccgaagatgtttggcattctgtgaaaattggcactctttttcttttgatgggccgtgaactgctccccgtagagtgtgttcctgctgggcggatttgcggcgtcgaagtatccgacgggcgttggataggcggacaaacgctttgctcgagggctctggccgtcactgaagtgccgcggatgagttggcatcaaaagttcgccgaaccactcgtccgcgtgacggtaaggccgacaaatgccggaatggccgaaatggaggaattgcgaagtgcactgcgacaattatccgtgttggactcagcagtgcgcgttatcgagcaggaagacggagatttggcgatgcttacggctggcgaagtgcatttgcagaagtgtttggaggatttgaaattactcggccaaaccgaaattgttgtctcagagccaatcgtcccatttttggagacactaatcccagacattcgtttgcccttctccagaattttaaaagatcatgaaacagaatgttttttgcgacaattttcccttcgcataactctaagggctgttcctctccat

SEQ ID NO: 89021 - DNA, 796 bp, Heterodera glycines
ctgaaacgcccggaccgcctggacccagcactgaaacacctggaccgcctggacccagcactgaaacacccggaccgcctggacccagcactgaaacgcccggaccgcctggacccagcactgaaacgcccggaccgcctggacccagcactgaaacacccggaccgccttgacccagcactgaaacacccggaccgcctggacccagcactgaaacgcccggaccgcctggacccagcactgaaacgcccggaccgcctggacccagcactgaaacgcccggaccgcctgaacccagcactgaaacacccggaccgcctggacccagcactgaaacgcccggaccgcctggacccagcactgaaacgcccggaccgcctggacccagcactgaaacgcccggaccgcctggacccagcactgaaacgcccggaccgcctggacccagcactgaaacgcccggaccgcctggacccagcactgaaacgcccggaccgcctggacccagcactgaaacgcccggaccgcctggacccagcactgccggaacttcctctacaaagacctacactgttccaacaactccaaaaccacctccgtgttgttatggctgtgactaccctgtcgactgccacacttctgggaaggattgcgactattccccgcttcagccgccttatcaaagcgacccttacccggttgggaagtgcgtcttcaaaaatgtcacttgcgccgctccaaacaccggcaaagtgctcttcatgaagctcaacaatgaccccaactccgtcgtttc

SEQ ID NO: 89022 - DNA, 646 bp, Heterodera glycines
ctgaaagcaacgaatgaagttgacttatataaaccgctgaaaagttatattgactctctttctgaattgacggaagaacttcgaatcgaagccaatgatgggcttacggagcttaacaaattacgaaatcgtgcttgttgccaacctttggacaaacatcagagttcgcttgatattgttgccaggtattatgaccaactttgcgcgatggaaacgaaactgccaataactccgacacagaatcccgtcagctttaagtggaaagatgcctttgacaaagggtcgctgttcttttcgcgcgcttcgctcactcttaacgacagttctttcgaaagggcgtgcgttctctttaactgtggcgctttgatgtcggcaattgcttccaaccaacagacgaacactgacgaagaactgaagacagtggcgcatttgttccaacagtccgctggcgttttttccaaacttaaggacactgttctcgcttcggtccaccaggaaccgacttcggatttgttgcccgacactttaactgcgctccttactctgatggttgcgcaagcgcaagaagccatttatatcaaagcggctaaagacaagctaaagtcgacttctctgcttaaaatagctgcacaatgcgcggatttct

SEQ ID NO: 89023 - DNA, 642 bp, Heterodera glycines
cctcgtgccgcgacattctgacgcgtgagactcgcttcgccgaactgttgtacgcacacgcggcacagcttgcgttggccgagccgcgtgcgctcgttgacgctttgttggcactacagcagcaacatgcgtcgttggacgtgttgcaattgttgcccgccttccaacaatgcctggacaaacgcctgccggaccggcaagcgttggcggatgcgattttcgtttttttggattatttccctctccaaaatgcgtctccaccatttgtcaacttcaccattcatttgtacgccgtttttcggccccaaaaactgctcgtccatctgcaaaagtgcgccggcgagtcttcttcccaaccaccgtccgctttgactgcgagacgcactcacaatcattgtcatttcgatgtcgcccaagcacttcgtatttgcacagaaaatggcagcattgcacgagtgttctgtgtttttgctttgcctcgagcgtctttacgaggaagcgacgcgtttggcgttgcgtcacgttggcctcgcgtgtgccaaagagtgcgcgcgacgtttggacgccgactcagccgcagcagacgcattcgccccaatcgggcatttggcgtcctttcatgggccgggggatgaggaggat

SEQ ID NO: 89024 - DNA, 664 bp, Heterodera glycines
ttccatcacataaatcaccatgcgctgcttattcgccctggtgccgctttcccgtgccgttttgcttccatttttcgccgatgcggtgccaccccccgccgctgtgcgatctgcgcgaccggccgcgcgacaagcggtggcagcgcaacggcaaccgcccgcggggatggaaaggcagtgcaaatgtgcggagattaagccgtgcaaagaccgctatcagaagacgatggagccatgcttggacacgtgccaatctcatatcacttcgctcggtggcaacttccgccaggtgaaggcgtgcttcaccccaaaagagagtctgctcaattcggcgatgcgatgcaccgaaagacagcacgacaacgcctgctcccattcttcagctgctcaatttgtgccaaagcgatacggccaaacattggaaaacgaagcgatggtggaaatcgatcggatgatcggccgaatggggctggacaagagcgggtccatgaagaagctggtcagtgtgagcaagaaactgttcggttgtctgaagcaatgcatggcgaaaagggcgggaaactgcgaaaagcagctgaagtgtggccttctgttgccctcagacagtgccatggtacaaaagaccaaaagctgtgccctgaacaacgggtttaacaccgcaacc

SEQ ID NO: 89025 - DNA, 669 bp, Heterodera glycines
gtttgaggtcaactgtcaaactaccaaagatttatttttgctgaatcattcccaacaatggtgaagcatatccgtggtcgtccattgggacaagtgcgtattggctttggtgatgccgaccccctttgggactcagagaatgaaaagtacaaagtgctgtgccgaagcattcatgtttccaaggcagctctgtacattggttacatgcggctgttggtctccttagtgtccagtctcttttttgcgtaccaatacatgatggccgtcactggccaattgtcctccgaccattggattaaccaagtgactgctcgctttatgtcacaggcaatgatgtccatctgtttgcaagtgattgtcgtcgtacttatggtccacggtgtgaaggctgagaagaagtccttgttgcttccttttattgcgtatgctgcgatcgcagttttggctggttcgatcaaggttatgagtgatttggtgtatttggacacgagcgtctacaaaaacaatgaggcggagagtcgagccgccaaagtgcaatttctcactaatctgttgcgcactgtgctccaggcctggtgtctgtctgttgtttggcgttgctatggttacctgaccgaaaaaaaggtggcacgtcagattcgtgaacaactcaactcaactgcgaccgca

SEQ ID NO: 89026 - DNA, 661 bp, Heterodera glycines
gtttgttgttgttggctgtcccattgttggtggtggacacaaagcaagaggtttccgaggcacaacagctgatccaaatttgtcgtgaatatttggtgggccttctgttggagacggcacggaaagaattgccacgcgactccgtggaggatgctaaacgcaacttggagatggccgcctatttcacccattgcgacattcagccggtgcacaagattttgacactgcgcaccgccgccaatctgagcttcaaaaacaaacaaatgcgccactgtgcttcgttctgtcgacgctgcattgaattggctcctaagccggaaattgccgcccaaatgcgcaaaatgttagcggtggcggaacgcgacaacaccaacgcgttcgagctcaactacgacgagcacaacccgttcgtgctgtgctcgcgctccttcgtgccgctgtaccggggcaagccgcagacaaagtgtcccttctgcggcgcttcgtatgcgcccacatttgccggctctgtttgcgacgtgtgcgaagtggcggaaattgggcgagagacgtcgtcgaatttgatgatttctaattttaaataattcactgttaggcttttttcatatgtcccactaatattggtgataattggcggttgtttttttccctctcccaacac

SEQ ID NO: 89027 - DNA, 574 bp, Heterodera glycines
agattgacaaaatatttcacagctttcattcacttcgacatgtccgtgtttagcagttcggatggttcatgcaaaagcatcaacagtgaggcggttttcgagactgctgaagatctcggggaagcattgaatctcgacgccggtgttgttgagtggctaaaggaagcgccgcgttcggatgaggacccgattttggtgcttgattacaccgatttgttccatgctcttccaggaactctcaattacaacaaaacctgggtggcgaatctcttggtgggccagaacgccgaaaaaatccgtgacaacgtcttcaaattcaacacctggacggacctttactctgcgcaagaaaatttgaagtcggacccgctccttcgacgtcttttctatttcccgaaccctctgattgcgcaacaactcaacattcctgcgaatcctgtgatttcgtccattgttatcacatttttctctgatgtgtctggaaaatttcaaacgaatccatttgatttcttcaagttctagagatgtcttgttgttctcttgttgtgttaaataaagatcttttaaattggtg

SEQ ID NO: 89028 - DNA, 636 bp, Heterodera glycines
gattgttgccccaacccttacccggacatttgctattacttctccatcaaacgaaacccttcctactacctgttcacgctgatcatgccgtcggcactgatcaccaccattacggtggtcggctttttcacgccccattcgaccactggagaaaatacggagaagtgatgatggtatcggacaaattgcccgccacttccaactcagtgcccgtcctcggccaatattacattggactgatttgcatccaattcacggccacttatgtcacaacttggactttgggtcttcaaatggaaactcgggacggacaattccccgccgtttgcgccgttggcttatgcgagtgaacgcacacggcaattttttcgtgcgccaccttttgggccgcgagttgcgctgcacgcagcagagcattcggaatcgaatgaacaaatttgatcagctggtggaccgggcggacgatcggccgagttttgtgtattcgccgatgggctcaacttttgacagctcggcatttgcacgaatgaccactgcctcagcagtgagtgttcagcaaccgatacagctgaggcaaagagcggaggacggcaaagtgataatggcggaaaagtgccaaaagcaaacgaacggcgc

SEQ ID NO: 89029 - DNA, 1166 bp, Heterodera glycines
  unsure (1)..(1166): unsure at all n locations
taaatattgcacatttttatcacatttaaatgtctctgtcagtgttggaccaaattaagcagcattcgaccattgtggccgacactggcgacttccacgcaatcgaagtgttcaaaccgacggatgccaccacaaatccttcattaattctcgccgctgcaaaaattgaaaaatacaaggaattgatcttaaaggcagtaaaatatgcgaaagaaagggcggcggggcaatcgaaggaggcggtgatagaattggcgagcaacaaactttttgtgcttttcggcaaggaaattctgaacattgtgccgggtcgagtgagcacagaagtcgacgcgcgactttcctttgacaaagaaggctcaatagccaaagcattgagtctgatcaaactttacgaagaggagggcattgagaaggagcgcattctgatcaaactcagctcaacttgggagggcattgaggcagcgaaggttctcgaatcccaacacggcattcattgcaacatgactttgctgttcaacttttaccaagccgtcgcttgtgctcaagctaaagtcacgcttatttcgccttttgttggtcgtattttggattggttcgttaagaattccgacaaaaaagagttcgaccgaattactgaccccggtgtgcaaagtgtgaagcgcattttcaattattacaagaaattcggacacaaaacgcaagtgatggccgcctcatttcggaacacggaggaaataaaaggactggtcggatgcgatcttatgacgataagccccgctttgttgggtgaattagccaaagattctgaggcggttggaccgatgatgaccgtggaaaatgcaaagaaatgcgaattggagcagattgaggtggacgagaaaatattccgctggcagatgaacgaagacgcaatggcggacgaaaagctcgcggatggaattcgccgctttgccgtcgatgctattaaactcgaagagttgattcgatcgaacctttgaattaaaaagtatttgttgcctcttttttacgagtgatagaccattcccagctcattcaaattgttaattatccgaatttatttgccaatttaatacaacaatttattaacatacaatagatatatttattctcggtaaanaanaaaaaaaaaaaaaaaaaaaaaa

SEQ ID NO: 89030 - DNA, 640 bp, Heterodera glycines
gaaaattgcaaaagtttcctaatcatggcatcaccatccgatttggacatgaaaatggtgccacaaaatggtgacttcaagcacgatgtttctgaagaggtgcagcagcagcaacaacaacaacatcaagagcagaaacaaccgaacgatttggtgaagaacgatgaggacggcggaggggcagaggccggccaagacggcacagcaccgacagaaacagagcaaaagccaagccctgtaaacaatacgataccactccaaaaggagttggaaagcgacaccacctatgatgacactgacacattcaaaatgttcatgggcaagagtttgtccaagccggtggccgtcatactgatgcgcatgttcgacgagctcggcctgaacacggacgagtttgatgagcgtgccgtggaaatgctggccacattcccctttgagcaggccaatttcatcctcaaagagctcaaggactcgcaactgttcggtgtgcagaacaaaccacaatatttgatgtccgtcatgcgcaacttccgtgaacgacttcgaacaatgggcgtccaacaggcgatggaattgccactgatccccggcccggacccggaaagcatcaagacattaataaccaaatccggctaccaat

SEQ ID NO: 89031 - DNA, 706 bp, Heterodera glycines
aataaattcactagtaattttttgaactcctcccatggccacccttctcgaatatccggcttctgttgtggagcaaatttcggtgaagctgtcagcgccaaacttgaacaccatcgcaatggcatacccaaaagttgaagtgccaaaatattcgcgtgccactctttcggctggcattgtccattttggggttggcaatttccatcggagccatcaggccgttttcctcagcgaactgttcaacatgggccaagacttggactgggccatcattggcgcgggtgtgatgccaacggacgagcgcattcggagttgcttaagcggacaagactttctgactacggtggtcggtcaggacgagtacagtaatacggtccagatcactggcgcaatgattgacttcctgccgattggcaatgccgaagcgattgtggcccaactttctgatccggcaatacgaattgtgtcgatgaccgtgacggagggcggctatttcatcaactcggccactggcgaatttgacccaacccatccggcaattgttgcggactcaaaagatccggccaatcctcgcactgtgttcggactgattgtcaccgcgctgagccgtcggcgagcaaacggaaccgatccattcactgtgctgtcatgtgacaacataaccaaaaatggtgaaatggcacgaaatgcgtgtgttggcatggca

SEQ ID NO: 89032 - DNA, 638 bp, Heterodera glycines
ccaagtttgagtttagtcgtcgtctttggattggtgggacgccgctactgccgcccacggttggcggagtggggcgagagcagtagacaatcagggcttagccaccatcagcagcagaggggagtagcgaacgatctgcgcgcgcaagaagtttatgcgcagtagaatgacaatcgaaacacatcgaaaacggatcaggacagcggaaattccgctgctttttggtggccaaggaatgagacgccgtcggcaatagcagaaccaagcaaagaaaggtctgcaattgaaacaaaaagcgtgcagaaactgcacagagtgtgccacgacaaaaagcagcgaaagagtggacagactttccaagagtctgctggccaaagtgccgttgtgcgatctgatctgagcgctgcgtgctgtcagccgtgttaggcggatggacaacagaacagatgtggaagccactgatttctgactttttgattatttagtgctttgcaactacccgcatcttcttcctcccttcacatcatgtatgtgttccctgataagcattcatggttgtgttgttggagatgagattatttccttcgatcgttctaatttttgttgttgttgcactccctgtactttggtcagggcac

SEQ ID NO: 89033 - DNA, 746 bp, Heterodera glycines
ttttggcgatcattgctgcggcactgatgacactggcaaaatatgtggatgtttattatttgatcaccattggacgattcattattggactgaacacggggttcaacagcggactgtccccaatgtatttgatggaaatttcaccaagcaatttgcgtggctccatcggctcacttcaccaattgtttattaccatcgcaattctcgcttcacaaattattgggcttccacaaatttttggctcttcaaatctttggccactgatatttgcgtttactctggtgcccgtgttgttccaattgtgcgcacttccattttgccctgagtcgccaaaatacagtttgattgtccaaggaaggaaagatcaggcggagaaagatctgaaatggctccggggaggcaatgatgtccatgccgagttggagcagatcaatgaagaagcggttgcaagccgtgcccatcccaaattgagcatgcgtgccatgttctgtcccccgttgttgtggcccctcgtgttggcagtgttcatgatgttgtcccagcagttgaccggaatcaacgcagctatgttctattcagctggcattttcaagagtgccggacttcaagggcaatggccaactgtggccactatcgcaatgggaaccgtgaatgtgctaatgacttttgtgtctgtcgttttggtggaacgccttggacgtcggactttgcatattactggcctcgtgggcgtgcttttgtcgagc

SEQ ID NO: 89034 - DNA, 615 bp, Heterodera glycines
gtttgagttcatattattgtatggttggtcgtgttcagcattcaacagcatttaaagttcgaaagtggttcagcgtcttcgtttggcccgtttttgttatcagttatatccttggcgacaaataccaatattggcaattgaaaaccgggagacgaaagaacctttttgacgaattcgcatttcttcaggaggcacaaattcgagagcaaaaggcactttataacagtccgtacgggccgagagcctgagcaaatacaccgttttttggatttatctgtcaatgggcaccttcacccttaaatatttcttcaaaaaggccgttcttgagcgcccgtggtactttttccccgcctttatcaccattagttggcttgaatattcctactataaacatggtcaatggaagattggaatgatgaagggacacagcaaaatgtggagagaacgccgtgaagaaatcttacgctgggacccaaatgccgacctgtggaaatattagagaggaggacgaattggacagacttttcgatcggacttttaggcgccactgatttgatttgttctttaaaaatgataaaaacaattgtttgagaaaaaaaaaaaaaaaaaaaaaaa

SEQ ID NO: 89035 - DNA, 640 bp, Heterodera glycines
gtttgagacacatttctaaacgctcaaaatgactgatattcaggcatatgctggcccatttatagtgaatgacgtcgtttcctattttttaaaggatggcgtctggtactaccgaaacgcgttcattccgatcaatttggagtgcaagcagccaccgccggcggagattgtcaaagagtggatggacaagtacggttccgcagcgccaaaatcgacaaagcaggccaaacaaaaagtggccacaccattgaaaaagtcgtcacacaaaccgaagctgtccagtgccgacaaggacagcgaaatgctcaagaggaagaggaagcatgagcagatgctttccaattcttcaacttcatcatcatccacatccaaaccgttgcctgtctctgcacaaaaagtggtgtcgtcctcggcactgccaacgccgggtgcgccgtcgccaaacattcccaagcaaaaacagccggcaaaaccctcctccgctccaacaccaaaaacggcactgtcctcaaatgctatcaacgaaactccaacaaaggtttgttcaactcaaaaaacgcagccgcaaaaagtgtcgacaactgtcactgacgaagcaccgccagcgacagaagttgccccggccccgctggtcatgatc

SEQ ID NO: 89036 - DNA, 649 bp, Heterodera glycines
agtcttttcacaatgtacagcaacataagcagcagtggatgggttagcagtgaccacccgcaacagcaaattggcaacttttattcgtatgatgcggacccgactttaagccccaacggtggtggatacaatgcttattttgactatccaaatcagcaacccgccgcttcatccaattctaattttgtcccacttggctctggtcgccctttcccgcacacaatcagtcagcacgcacaactcagtttctctgacaattcgaatgcaaattttgttccgcttggctcgggtcattttctaccagaacgagatggtgatgtcgtttgctacgaagactcattcgaaatgcaaaaaataggacgaaagcgacgtcgagggaggaaatccggtcgccgtgctcgaatggacatttatggtgctggccaaccggcaactcatgattttggggaaattgtaaattacgacgattggcaacaatgggacaacggctggggaggacagcaacaattcgaacagaacgaagcggcgtcaaattatggccaatatggcattgaaccgagccaaaactacgaggactacgaaatttattacgacaattacgagacggaccaaacgaaggaactctggcaagaggaattggaacagcaaa

SEQ ID NO: 89037 - DNA, 650 bp, Heterodera glycines
tgagaatgcaatcagccgaagagacaatggcccttgttgcagttacaaaatttcgcgattatctgcgtattaacaccgaacaacccaaccccgactatcataaatgccgtgatttcctcttcacatatgcaactgaattgggattcatgccctgggaatacgaatgtgtgcctggaaagccaatggtcgggatgacttacgctgggtcggaccaaacattgccatcccttctcctttacagccataccgatgtggtgccgacttttccggaacattggacttacccgccttatgaagcgtttaaagacatcgatgggaatatttttgggcgaggagcacaagacatgaaatgtgttggcatccaatacatggaggcgttgagagaaattttatttgaaaatggccaaaaaccatttttaaggacggttcacattctctggggtccagatgaagaaattggcagccacgacggaatggaaaagtttgttcatacggacaaatttcgttctctgaacatcggttttgcgcttgacgaaaggttggccagcgaaacggacacttactcagttttttatggggaacgatgcgcgtggtggctgcaaatcacttgtcctggcgcccctgggcatggttcgcgattccttgaaaac

SEQ ID NO: 89038 - DNA, 849 bp, Heterodera glycines
cctcgtgccggagctaaaagcctaaatttattctcgctaaacaaaatgtcgatgtcaaaatcgtcctacacctacaatcggaagacatttgaagatgcggaattccctattttgtgtgagacatgcctcggcccgaacccgtacctacgcatgagcaaagacacacatggacctcgaatgcaaaatttgtgagcgtccattcacaacatttcgttggatgccgggcagaggggcgcgatacaaaaagaccgagatttgtcagacatgtgccaagttgaagaatgtgtgccagacttgtctgttagacttggaatacggccttcccgtccaagtgcgtgacacggcactccaagtcaaggagaccgtcccaaaagtgggggccaatcgcgactatttcatccagaatgttgaccgtgctttggaacaaacggatggcacagtgccgtacggcgagttggcgaaactgaccgatgcgggcaccaacgaaatgttgcgcaagctggcccgaaatcagccatactacaaccgaaatttgccacacatttgctcattctttgtgaagggcgaatgcacccgtggtgaagagtgtccgtacagacatgaaaagcccacagaccctgatgatccattgagtctgcagaatatgcgtgatcgctactacggaatcaatgacccagttgcggacaaactgatgaacagagcgaaggccatgccgaaattgacgccgcccgaggatcagtccattaccacgctgtttctgggcaatttgggccgtgaaagtcgtcttgtggttaccgaagcggacattcgcgattacttttaccaattcggcgaaatccgtcaagtcca

SEQ ID NO: 89039 - DNA, 488 bp, Heterodera glycines
caagtttgagggcaattaaataattattttaataaaatggcacctcctccacccccgccaaaaagcaaatcgtcaattgaggaggatcaaactcagcagcacgagttggcggcatcgcccgaatgggcacaaaacgatgtggagcaccccgtagtgaaagtgttcggcttccaaccgaatcgattgggccgggaatggccaccgaacccacaacagcccgaagacacacagctggggcaggccaacaaacacaaaacgttgggggacattgactggatgacaagtcctgctgaagcaacgccagtgcgagaacaaattccactcagaggtaaacttaatgctcaatggcctccgccagaaaaagaataccgcgtcgaagtgttgttgccggagggggtcaaacagtgatccgctgctaaaagtgatcggaaaatagcacagatttataaaaaataaaatatggaataaacactcgaaactttgaaaaa

SEQ ID NO: 89040 - DNA, 1119 bp, Heterodera glycines
  unsure (1)..(1119): unsure at all n locations
agttgatgctgttaattcctcggagtgtgcgttgtttttatggcggtttgttggatgtttcgtcactaaatgtggggaatgccacgcggatggaattgttacgaatcgctttttccacgccattcgccgtttcccattgttttttgtcggtttcgtccgtccgctgccttcaaacatttgaaaagcgtcagcaaagccaaattgagagggaagcgtccgaactttccaaattcattgactccctatgcaatccgaacgcatttaagaggcgtcctgatgcactctttgctcccaaacgcattggaggaatggatgtcgcggctgtcagctttttggattcgttgaatctaaccgaggaaaacatttcgaaggaggccatctcgcgattcagcaaagaggtttacaaaatgtccgctattcaactttctcagctgttgaaagcgactagcaaccgcaaaattgagcaccccgtgttgatcaaccacatttgcaccgcactgaaagaccgtcctttgcctccgtctctccgccacatttgtcaaattgctttttacttgtccaaacattcgttcctcgataagccgcttctcaacagaatcaaagaggattttttggtttatgtccgaaatgaaatcatctcgaaaacatctttttcacacattgtgatcgccttcgctttttttcgtctgactgatcgacatttttggcaacaaataatccaaatcatcgaaacactggcgaatcgccctgaatattcaactgctctgattgaatgcgttaattcgttggctgtggtaaatgttcatccgaaattggtgtcttccgttgttgaaaagactaaaagtctggaaaaggacggactttttttgggaaaatggctgcaattggtccattctttggctatccttaactctttggattcncaaatggccgaaagtgtactcaaccggaacttttttgaacgtttgtctgaaatgcaaacggacaaagcgatcagtgaacaccttgcccaatggaattccatctgttaccgaaacatcgctgcctcagcacgtttcgaattgccaaaaggcgaagtgccgcccatcgacggtcccttcctagcggacgccgacccga

SEQ ID NO: 89041 - DNA, 725 bp, Heterodera glycines
taagaatcgggcagcaactttttaaatttgcacaaaataattttcacattaaatgacgtcagaaaaagaaatgctgtgggacaaggcgtgtcttctcacgcggttggtcgcctcgtcggtgcgactgtccgaagcggcgggcggaattattaaggacataatgaaaagtggcgacctgaaaattgtgaacaaagaccaaacaggacaaatgaaggatttgcaaaccgaggccgatcgttcagctcaaatttgcattgaacggtcactgcgtgcgaaattcggcgaaaatcttacgattattggcgaggaagacattgcgcccccatcgacgccctttcaaacgcttcaacctttgccatcttcacatcattttcacattatcttcaatgagaatgccaccacggcggtgccgtcttcggaagtgctgagcaacgacgaaagagtgcccaacgaattgcgcagcatcgaaatgaaagacgtcgtcgtttgggtcgatccgttggacggcacttccgaatttacaaagtcaaaagaaaacccggcgctcctccgccaagtcactgtgctcattggcatcactcacaaaggccgaccggtggccggcattgttcatcagccgtattatgagggacaacaaacggctgacggattggcaccgaacggtcgcaccatttggtcgattgtcggagttggtacttttggccatcagaaaacggcacaacaaa

SEQ ID NO: 89042 - DNA, 657 bp, Heterodera glycines
attggaatgactgtcttacaaaacaaacagtttcttctctgcccatcactgtttttcagggctgtccaactccgtcgaattaggggtcgtcctgtttcgcgttcgcgcatttcgccccctccgtccggcgaaggcattcaatgggcgcccgccaccaatgcttttcgcgtcagcaaagacggcgagccgaggccgttaccgtcggcattcattgacgacgacgaccaaatggacccaatttcgaaggccaaagaaaatttgcgggggcccgagaagtacaaagtgatcaacgcggtcagaaagaagcgaaagcatttgctgcagctgaacttcgaccacattccaattattgaccaagttgttctgatgtttccaagccaaggggcgcaacacttacaaatgggcaaaaaggtcattgacaatccgagcagtgcgcgactttttgaggaggcaaacgaatttctcaaattcgaccttctcagcctctgtcttaacggaccaataaacaaattagaccaaacattctatgctcagatggctctgttcgtttcttgtatggccgcttttgagaaattgaaagttgaacagcccgacttggtcgaccgactcaccgattgtgccggttttagcattggtggaatttgtgctcttgtcgca

SEQ ID NO: 89043 - DNA, 548 bp, Heterodera glycines
cttatttcgtttattgttttttttgttgttgttcatttggtccattgtttattttattctaattatttccataaagtgcatttcccccctaattgatttgttcagtgaattaaatgtcttccgccgtttcgtcttccccagcagtgctcactcggttggattggctcaaactgtacaaagcgttgcaaagggcgggttcagagttccctcaatacaattaccgtcacttcgcacgtcgtcgaatccgcgactatttcgagcagtacagcaagcagacgatgaccagggagaagctgtccgaagtttaccaggaaggtcagtccgccctcggcacaatccaaaggcaaagtcgaatctcttctctgtacccgactcgtccgcttgtcattgagacgattgatgaaaaaaaggagggcgccgtcctttgatataatgtcgtgacatattatttttgttgaccgttcttaattctatcgtgcgcctttttgaaataaaatatatgaataacaaaaaaaaaaaaaaaaaaaaaaaaaaaaaaaaaaaaaaaa

SEQ ID NO: 89044 - DNA, 650 bp, Heterodera glycines
ccggaactgatcgtttaccccagcaccgatttcgccacgaatacacacagcattgagcggttggacgcgctggtgttcgggccggggcttggccgacagaaacacacacaaaatttgctggcggacgtcgtaaacttcggcacgagcaaacaaaatctttgtttggtcattgacgcggacggtctgttcttcgtcaaagaatgttcgcaactgttcaaagggtgcacagacaaagtgatcattacgccaaaccacagagaatttgttcggctttatacccaaatgttccctaaccagcagaagggagaggacaccgacgaattgaaaattcaatgcgaaatggcggaacaattggcaaagcatttggaagtgactgtgatgagaaagggtcggtggcacagaaacgcaaccgaaaaatatgaggagagattgacataatctccaacggttcctcccaaacgcgaattgtccaagcggaaacttcgatgcgccgttgcggtggccaaggcgacattctcagcggcgcgacggcacttttcgcattttgggcaaggaaagcctcagatgccgacatttattcctccgagcatttgctggacggggcggaggccgcttcgcttttggtgcgcaacgcatcgctacggaccttt

SEQ ID NO: 89045 - DNA, 662 bp, Heterodera glycines
tgagctttgacaaaatgagtgtaaacgtaaaacaaaagaagacggcgccgaaaagagacgtttcgtcgtcgccgagccaatcgtcgacgagcgactcgagcgaagcttccaacgaatcagtggacgaagcgaaggaagaaacgacgccagccaatgacaaagtactgacgaagtattccatggcagctgaaattgtgaataccgtcctcaaagaactcatttcggaggtcaaagaaggcgtcgaagtgggccatctctgctcggttggagacaaccgattgcttgaacttaccggcaatctttttaaaaaggagaaaagtgtgcagaaaggaatttcaatgcccacgtgtatttcggttgacaattgcgtgtgccacttttcgcctctgaagagcgaacctccagtgctgctaaagcagggccaattggtcaaagtcgatttgggtgctcacgtggacggatacatcgccaccgccgctcattccgtcgtcgttggtgcctctgcggaaaataaaacgaccggcaaaaaagcaaatgccattttggctgcttacaacacgatggaaatggtgctgcggatgctcaagccaaccaagtcgttcaaaaatgctgaagtgactgatcgtattgggaagtttgcaaaaacatacggaacgacacct

SEQ ID NO: 89046 - DNA, 738 bp, Heterodera glycines
attaatttccggcatctatttctaccaatcaccgagccccagacccgaattcgaacaaaaattcgaaaagtcaaattttatgaattttgagttttatatcaattaaagattaatttccggcatttatttctaccaatcaccgaaccccagacccgaattcgaacaaaaattcgaaaagtcaaattacacacacacttattgtgctttactaattgtatgtactttgtctaatattcctttggtaatttatttaattaaaaatatattttattgaaaatatttttctattaaatttaatttctcataatttagaaattgccagtcgtggagatttgattgcattactcaaaacctaacgatacgatgtgtttttcaagagaaaaaatggcaccaagaatgccgttaacggctgtcggtggaataccaaaaagcaatgcaattggtctctgtttgatttgcaaggaactttcttttggcaaacactacggttgtataagttgccttggttgtaaaactttctttcgtcgtgctgttatgcacaaccaggacactgtgtgcaaaaagccaggcttttgtgagttcgaagtgtcggctcgtcgactttgtcgttcgtgtcgatttcggacgtgtctcgacgatgtggaatgagtcacagaagcactccaaccaaagcgtgatttgatcggccggcagagacgtcgacgctaccaagcagttgcatcttcggtcacccctccc

SEQ ID NO: 89047 - DNA, 1072 bp, Heterodera glycines
atgctataatgaagcctctgaaaattgacgtggatttcccctcgaatagtcatcccacttcccaagaattaaaccaagattgtattcctttgtacgaaatgcttgaattcgaggaacttcaattcccaaactattacctttccgaacaattgggaaggggtgcccatgcgacagtgatgccgtgccatttccatgggaagccggcagcggccaaacttttcaatgccaacgtggacttcaaaacgatccaaaaggaggccaagctgttgcacgagtttcgccatgaaaacatcatcgaattgtacgctcttttccacgggacaatgtccggattggtgctggaactgatggagggcggttctctgagtgaattaattcaccagcgcaaaagcatcgtttatcagaattgtcatgtgattaattggactttccaagtggccaaagcattggaatatttgcacaagcttagtttcatccatcgcgacgtcaaaccctccaatatgttgctgtctcttgattatgtcgtcctgaaactttgcgacttcggcacaatcgctaagcatcggacggacatgacgagcacttgtggcacggccgcatggatggcacccgaagtgttcagaggggagagttacgactttcggtgtgacgttttctctcttggaatttgtctctgggaaatgctcgcgcgaagtccgccatttgccgacgctcccgaactaaattccttggccgtgttgtgggaggtggccgagagcggactccgcccgccgccaattgaaggagtagccgagccgttgcagcagctgatggtcagatgctgggccgacgagcctaacgatcggccgccgattgacgaagtaaaagagatgttggaagcacttttaaagcaattgcctcacggcgcattgtctccgttcgtcggtcgccttttgacgggtcgtccgtcccccgtagacttttctccccaagcacggaccaatgattgaattgtgcaatcttacaatattgtttcttttttatatgtttctgcttttatattattgtttttctttttaattttcaaatttgt

SEQ ID NO: 89048 - DNA, 824 bp, Heterodera glycines
aaaaagagacttctactacactgggtgacagaaagcacaatagagatcccaatgtttctccatttgctgggactgccccattgaaaaaattcatccaaggacatctcgccaacatatcttttcgaaaactgaaatttgcaggtcgtatcggttgtattacaatggattcggaataatgtgaggaccgcgccattcatctttaggataacgcaatattcaagaagaactgcctgagtgtcacaaaagcgagtgatttaccgaagggcccaaaaacggcttcaggtgcgcaaaccgatgaagctgaaaagagttgcaaaatgctcgttactccgctcttcgatattccctatgaagaacagctcaaaatcaaattcgaccattccaaaaaagtgttggaattacttcaaaagaaattgacgcaagcgcacgcaacgaattctttaattgcgaaggaatccctccctaaaaatgttcttccctctccattaattgaacaatatcgcaacaaatgcgaattttctgtcggttattcgtccggcgacaaccgttctgcggtagttggttttatgagtggcaaaatggcgaacagacagtccaatgttttggcgccggatgagtgttcgaatctcacccgaaacactcggtcaattgtccgccattttgaggcatttgtacggaaattcggtgaagaaccattcgacgaattcgaacggaaaggcttttggaaaatgttgactgtcaaggacttctcgggcgacacaatgattatcgtgacggtccatccgcacccgaacagcgaaattaccgataatgccaaaacaaag

SEQ ID NO: 89049 - DNA, 633 bp, Heterodera glycines
caacgattggaccaacaaattcccccctcccccaaaattatctgtccaaatcaaatcacttcctcgtcaatgtacaaatgcttctgcttgtgcttctcctaattttgcttttcccttccgaatctcttcaggctgccagttttatcactttgcattgtcaaggcaatggcttatacgtttcgggacgatggaatgaaaacggacagacggcggatttgccacttccatccgaactcacaatgcaacgattagctcgtctaattaagtgcttatttatctgttacattttctttgaaggttcgtgtcgagaaaaaacaaagatggcaccgtttctttcatcagcaattccaatcgaatgtttttgacagttttgccaaatgcatttggacgcattgttttggctcagcataatcaaccgactgatgggtccaccaaattcaaattaattccctacacggacggcacttacgcaattaaggcagcttccattggcaaatacttgagctgccgcaattacgcctatcagctgttcgccaaccgggaaaaggtggaggggcccttcgaaaggttttacttggacattgtgacgacattggcggaatttgtcaccgcaagagttccgctgaaattgcg

SEQ ID NO: 89050 - DNA, 639 bp, Heterodera glycines
gtttgagacaacattattttttaaaaaaatatccatccaacttaaaatggcttctccttcacaaggccgaggtatgtcgaccatcttttacagtctggctgtgtgctatttcgggcttttgtttctcggcgctggccacgctttgatgctggggtcaaagaccaccgaatgtattgcattttgctccaggcaaacatcaccggaatcgtacagtacactgacgagacaaatgtgagccgttcatcaaatttcactgtgccaaatggcgggtctaccaaaattgcctacccgggcgcggctcaaattgcccagccattgtggccaacaccaacagcaaatgaccatcgaatttgtgccggatggcttcaaccacaccgagttggaagctgacaatacttggtatctgacgctccaattcaaccgcaccggcacaaaggaacagggcacgtttttgctggccaattacacactcgatgtccgtttcttcaacgtgcaaaatgcttcatcccattacaatggcacttatttgtacgcgaaggcgcccagctttaagccggaatggagcgcaacagtgcaaaacggacagccaaatatccttacctgctcaaagaatgggcttcatttggatgaaaagtcgtc

SEQ ID NO: 89051 - DNA, 601 bp, Heterodera glycines
gttaattatgacgggtgaaagcgcatatgaacttgttttgttggttaaaccagaagtatttatttacaaaattcctccactaacgggcaacaagggctacaaggcagccgattggaaattggacagtcccgactgggtgggaaggctcaggctaatttcaatcggcgacaagctcgagattcgacttgaggacaaaacttcaggtgaactgtttgcgaaagcgccgattggtcagctgaactctgtcgactatgaatcggtatccgactcatcccgctattttgttgtccgactgcgcaacgacaacgcccagaccgcatttgttggcatcggcttcgctgaccgagctgactcatttgacttgaatgtggcgatccaagatcatttcaaagcggtgaaaaagtgcgacgattcggcggaggataacgcagaaactgtgcccaagttggacttgagcttcaaagagggacagaccatcacggtcaacattgggaagaaaacgatcacttccaacaacaacagtagcagtgctgtgcccaaccttcggacatcgctcggcggtagcagtgccgtgccgcttttgccaccaccgcctgcctct

SEQ ID NO: 89052 - DNA, 889 bp, Heterodera glycines
  unsure (1)..(889): unsure at all n locations
ctccgaagttcaattagtgctccaacatctgccccaggagtatcagagattcgaggagaaactggaacgtgcccgtgccgaaatggcccaactccagcaaaatccacaacagccgccctatttgccacccgatgcgatgccccctccgcagcagataatgccaatgcccatccgacaggacttttacgtgagagccctcttcgacaacgacccctcccgcggggatgcggtgctgccgcaccgttccctcgcctttcggtacggggacattttgcatgtgacgagtgtgggggacgacgactggtggactgcgcgaagggtcgccgaaaatggggacaaaggccccgagggaatcattccgtccaagaaaagggaggagaagcgcgagagacagcggcgcaaacaggtgaacttcaacgcgggcagtcaaagtttgggcagaaacgcgtcaatgagtgccggcggattcggcggcggcggcggattggacggccgacgcggttctcgcagccaactttccttttctcgcaaatttcccttcgntaaatcgactgagaaactgaacgaatatccctcggacggaggcgaaacaggcggcggcactatcgcagatgagccaattcattcatacgttacggtagaactgcgaacagttaattacgttcgcccggtcgttgtgctcggggctttgaaggatcgcataaatgacgaattggtcagtcgacaccccgacagattcagcagctgtgtgccacatacttctcgcccaccgcgggaaggcgaagtgcacggacgcaattattatttcgttaccaaggccgaaatggagagggacgggaagagcaaccttttcatttgagcgggccaattgcaaaacaatttgtacggg

SEQ ID NO: 89053 - DNA, 838 bp, Heterodera glycines
gcgatatttgcaatgcatatgacgttcttttcctcgtggacaccgtcgcctccatttgtggtgcccctttccatgccgatgcgctgaaagttgattgtgtgtatgccgcaactcaaaaagtgttaaactgcccgcccgggttggctcccatttcattcagcgaaaaagcactggagaaaataacgaagcggaaaacgcgagtgccctcattttatttcgacgcgttagagttgggcaattattggggctgtttcgacgagccgagaagataccatcacacggcgcccatttcgttggtttatgcgctacgcgaaggtctttcagcagttgcccaggaaggaattgggcacatggtaaaccgacacaaaatcaatgcaaaacttttgtatgacgcgtttgaccaattgggactggaattgtttgtccaaaaagagaataatcgtttgccatgtctcaccaccgtacgcgttcccgaaggtgtcgactggaaggcggtgcaagacaaactgatggcccaaggatttgaaattgccggcggattgggaccaacggcgggtaaaatatggcgcatcggaacattcggaatcaattcgaacccggaggacattgagtcacttaaacaagcattgaaaggagcactttacgaacaagaggaaaagggacagtcggaccatttcaaggcggccatctgatgacagagggaaaaatggcaaaataaattaagacggttaattaacaatgggtagatcattaacataatatatcttttggttattttggcacatttcactatgaacatgtcaatttttaaaaaggacggacaataaagttaaacggc

SEQ ID NO: 89054 - DNA, 641 bp, Heterodera glycines
gcataacattgattttccttgatattcttccatcatttgggctgagacaatgatggaaatgacaattctcgggaatcggattagcattaccgcggacggcgccaaagtgtcgccatttggcagcaaaatggacatgggggactattatgttgaaaataacaagctgagaaaaacacggggattgggctgggtaatggccgcactttttgtggtcgccgacatggcaggcggaggcattgtggcattgccaacggcggtggtccgatgccagttcttttccggttatgctgggccaatgttgggaaatattattgcgccgtttcccggtttaccgtactcactgtcgaaaaccgtacgctgaaattggccttaaggccctcgggccaaaaattaggtgactgccatacagtttcaaaaatacagtatcaaattgtatctaaacattgtctgtatttgccaccatttccagaactatcgtatcgatttgcgtcaacgtcacccagtacggtgccaccaccgttttcctgctgctctgtgccaaaaacattcgtgacttcatccgtgcctttctagacaaggagatcagcttctgctatttgatcgtggtcattgcgcttgtgcttttgcccgtcactttgctc

SEQ ID NO: 89055 - DNA, 518 bp, Heterodera glycines
gtcagccctcctggcaattccaatcaaagcttcttcctctccgcttgcttcttcattcatactcatcagctgtttctcttctctctctgctcttaaaaatgattggctcaactgctcggtgtgttgcgcttttgctgctcggcgccacaatggcacaagcattcctcacgacatttaacgttgcaccgaacgcctttcaaaaccgacgcggatgccgaggaggaggaggcggcggatgcggcggagggtgcggtgctcctccaccaagcggtggcggtgccatcaaactgacgctcggatgcgaagggcctccgcctcaagcgcctgccccatgcggatgcggcggaggatgcggcggcggttgcggtggcggatacggcggaggatgtggtgcccctccgccaagcggtggcggtgcgatcaaactgactctcggatgtgaagggcctccgcctcaagcgcctgctccatgcggatgcggtagtggatgcggttgcggatgcggcggagggtgcggt

SEQ ID NO: 89056 - DNA, 546 bp, Heterodera glycines
gccgatcatcgattgagtgctcttagattctgtctttcctttcctaagttttcctttgcttgtttttttccatttcattagatagtctttcttttcattcaaactgcgtccattgtgaatgttttccaatggataaaagggtggatctgtcattgatgagcttatgtgtcaattgcttaatgatagtaatttataatatgaaaccctttcttaacagggccaatgctttttagtttataattgcctcggccttaattatgttcgcggtttgtctccctatgcacgaaaagtgtgccgcagtggaggcagtccgccaattggtttgcctctcctcagtgccaaattcaattggccattcggctcttggccaaactcagtctcttcctccttttggcattccgcggctccattgttttggccgatgcctttcctttggctgtttttcagctccatcttctgctgttcctctcttcgatcatctgttcgactttgagccgtggacggcggcgtgtgactcatttcagtgatcaccgattgattgctagg

SEQ ID NO: 89057 - DNA, 652 bp, Heterodera glycines
cagagacatcatcgaattctgcaacttcctgctttaagccaaacaggaaccagtcagcggatatttccaatttgccaaattatctacaacaactccaactcggtcctggcggtagttcgaccacgagaagaaccgggcgtttcgtggaggaaaggcggcttcgtcatgttaagcaacagcccagctatagctttgaggtttccggcacttggggtcagcgcttctcgagttgccaatttctggacgtgtcggaggatggacgaactttgattggatgctggacttcagagcaaaacaatcttttcgaggggcactgttctcgtgtgctatccttcggcgtcactgttgacccaaacacagccaaaaaagacactcagcgaatggcactcgccgaagatgttggggacatggcatcactgttggactccaatgggaaataccgctgcaacacctatggattgtgctttgagccaatagacaatgagatttgcttgggctcttccaaccgaattctcattgacatggtgcttgccccggctgaccgtgacgtcacttgccttctctttgccactgctcggtctttttaccaggaacaacaacattccgtcggatcttgtccaaaaattgtaaccaaatgcacggttaacttgcg

SEQ ID NO: 89058 - DNA, 431 bp, Heterodera glycines
agtctccgttgccggcagagagacgcaaacagtcggagacggaccgaaggcggcaacagtcggccaaaagttcgccgacacgcgaaatggcgccatttttttccgttttttaccggggaatcagcggaatcagcagagtgaccaaatcgcagagtcgcagcgaccttttggaaaaggacggggaaagggaaggggacaaagccaaagctgaagacgacgcaaacgcatggggagagtcggaactgtacaaccgccgataaacctccgcatcccttgaccaaggcgaagggaaattgtgccaccgatgggcacggagtttgggacaaagccaacaaaaaaagcggaatccgatcaaagtcaaccgccgatttgcatgccgcgaaggcagcagcagcagcagaaagaaagaattggagggaaagggaccaaaa

SEQ ID NO: 89059 - DNA, 651 bp, Heterodera glycines
gaagtaagaagcacttctctgtacagcttgcactcctgcaaaatgatgttcatctgcaggtccgactcaatgttccctttttggcgcagctcatagcaaagtgaaaatatccttcaaaatgttaatcatcggttttgttagcataaataatgattgaccgaccaattaattggcatccaatattttgggaattcgcttttcacattttccattaggtccaattctggtagcttaattaatttgcattcgaatcggatgattccattttgatcaatgtttgtcgttcgactgacttggatcagttcggagtcaaccagtgactccatgtttggaaaacgctttcgcacttggatggaaatgtcgcggaggacgagcacttgggtcaaacacaaataccttttaaattgcaaggagtttaaaaatatattattgttagctttattgcccctggctcacccattcatttgctgcctaattacctaattatgttcctcctaattgcccttatttgggggctgtcaccacggatataagtgccaatgaaaaatgcagggctatcgacgaagccgatattttgaaagatttgcttccatctgagaaaaggcagaaaataacgaattatttgtctgtaattaataaaaaaggttttac

SEQ ID NO: 89060 - DNA, 579 bp, Heterodera glycines
gtctgattctgtttattatgaattttgcttgttgctgtcatttttcaacagttgcacaacgttatttttcgagcagtcgtaaacaaacggaacaatatttggaacgacaggccaacgaccaatactcgaggcgggccagagaacactcataccgtgcaaggagtgcctttaaactcatgcaaatcaatgacaaaatgcacttcatcagaccgggtaccaataataattgtgagtcagcaaatgctcggctcaaacactcattgcaggactcgttgcgattgacgcgggtgcagcgcccggctcgtggtgccaagtgctcagcgagttgattttccctaacaatttcgcaccaaaaaaaagaaccaaagcggatgaaagaacggacgaatgtccgtttgatggaactgagcaacgccaaggatatattttgggcgtcgaccttcttgtccggccactccttttccttctatcgcatttcctccgttttatttcgcccctttcagacaataagtccaattgaaaatgttgatttactgtgcaaagccgacttcaccagaagagccactcagacagaaatca

SEQ ID NO: 89061 - DNA, 687 bp, Heterodera glycines
atttagctaataattctgcaaatgaagctcttttgcccttttgtgtttctcgttctgctgtccgccactgcttttgcgttctcaaatctgaacaaaacgccaaagactgtccattgggaagacgcgtgcgacgagtgccaattgatcatcaaacgcgttgtcaatgtcgccaccgacccggaaaaagttgccgagttgaagatccttctgtcggcactgtgtcaggagacctcctacgtggaggagtgtcgtctgttcgtcagcaaattggaccttttcctcggccgtctgttgccctttttgagggatgcccaccacgtgtgcaaagaattgcggatttgcaacaacggacggctccaacagttccacgtgctcggcttacactttgcacgtgtaaatgcttcgttccaacgtaaggatttgatctgcgaggagtgtcaattggctgcccgggaattggcacgtgaagtcagtgagccgaaattccagcagtacgtggaggaatggctgcaagggaatgtgtgtgtccatctcggcactttgaaatcatcgtgtgagcaaatgttggacgaattcctcccggaaatgtggcgagaaatggaggacattctctcggaccaaaaaaagttctgccaggatttggagctttgccccgcgggcatttcctcgccgagttcggcccgacgc

SEQ ID NO: 89062 - DNA, 937 bp, Heterodera glycines
cgagaataattcacctgcagcatagaagggcaaagttttattgtgagaaaattggtggactgattgattttttgtggaaaagccaccaattagtgcaacaataagcagcagcggaagataattggaaagttcgtccacaacttcaatttgttcctccgatgggctccgatcccccggccgcggtcgcttcctttccctccgccggttcggcaacctttgcatcgcttcacaatgcccgccacaattgcatctccacgtgccactacccttgtcattctgccgcagcttctctgcgatcgacgcacgaccaaatgagggcgtgtattagcattgatttgttagtcgcgtgccaaagggaagtgaactttttgcgaatgatcgacaggaaagcgccggtgctttacgaaaaagtcgttgtggagaatgccatccgacgatatgagatgtgttggttgccggcacaagctgcaaagccaaatctgcacaacattccgccgttggatgtccattggatttggcacacccacatgctttccccaacgcattaccgcgaagattgtttggccatctgtgggacagtggtcgaccacaaattgctaaatgcggacgaaatccagcagagatatgagcagtcggtgtcctcgtggagcgaattctgtccggaagaaccgtacgactttctgcaaagtaacgaccgcgtccgcgagcagtaccaacaaaaaagcaaatacgacttggcggaagcggtgcaacggcagcgcaacttcaactaccaagtgtctttgccccatttcaccgccccgcgctttctgaccgatgccatcgatcgctacatcaaattcctgcagctgaagcagacatacgccgaccattttctgacgccatgttacgacttcgacttggtgtggcacactcaccaagtgcacccgttggacta

SEQ ID NO: 89063 - DNA, 690 bp, Heterodera glycines
attcattccaccttcttccacttccatcatcatacatatcttctgcgaatcctccctccccttcttcctccgctgatggccaaccccaactccgaccactctctccccctttccccctctccctccccttcccattcttcccactccttctccctccgttctgtttttgcccaccacttttgctttttctgctcaaattctgtgctcatcgccctagtcgtgttcactttgtcactgctaatggcatttttgctggggaaacggcgctcttcgcaaaacgaattggcaaaacggcgcagagacaaatcgccagaaggcattgaattggaggagaatcccgaggtgttcaaaagttcgttgctgaaggactccaaagaacacatcatcagtacgtactttcctgatgtgcgcacacttttcgatgctttccaacgcggtctcaaagttgccgaacattcggcctgccttggctttcgtccggcaaaaggttcgccttaccaatttctcacttacgctgaggtagccgttcggtcgcagtcctttggccatgctttgatctccaaattgggccttcagcccggcaacgaaacatttgtggccatttatgcgcagaactgtcccgagtggatgatcacggcgatcggctgtacccgccactccatggtcattgtgccgttgtacgacactttg

SEQ ID NO: 89064 - DNA, 955 bp, Heterodera glycines
attttgtttttatttgctgtatattttacaaaatgtccgtctcgtggggcactcaatactccaaactgaaaacaaatcttcggctggcagcaaatcgactccgattgttgcagaagaaaaagactgagcaggcggtgaaggcgcgctgtgaaattgcggactttttaagcacggacaaagaggacagagcccgaattcgcgtggagacaatcattcgcgaggattttgtggttgaggcctacgaactgctcgaaatgtattgcgaacttttgcttgcccgattcggcatcattcagcagatgaaggaattggacgatggcatcgccgaggcagtgagcagtttgttgtgggtggcgcctcgcatcggacacgaaattgcggaattcaaggtgatcaacgacgagctgacccacaaatacggcaaacaattcgcggaggccgcccgtatgaaccaattgccggagccgagccgagtgtcgcccaaattggtgcagaaattgtccgtcagcgcaccgtccaaattgctcgtcgaaaagtatttggtcactattgcgcaatcggcgggcgtcgatttcgcgccggacgccaaagtgatgcgtgaagacgacgacgaaattgcgcgggcggaacgcaatctgatcaacttcatgaacgaggagcagtacgggtggacggtccgtcacaacgacgacccaaacagcaaaggcagtggcggagggcatttcgctgctgccgtcgctggcgccgttggccccgccgatccgttgatgaaccagggcagcaacaacaacaatggcggtggtgctactgcaatgcctatgccaccaaatggtagcggtgcgtttgccatgtccccctccacgtttgtgccgtcgcatccgtctcccctcgccacttcgtcgtctcctccgcccgaatacgcgccgccgcctccgctgccggcccatggcgctgg

SEQ ID NO: 89065 - DNA, 725 bp, Heterodera glycines
ctgagtgcctaaaataacttgttaatacaatttggtgcgtttcatagcagtttctgaaaaaatatttatgaattaattttgctaaaaaaataaaatagtgaagctttaaaaattaataaaaaattttaaattcaaaattactggagttagcatcatagcagtgcttttccttgtctttttgatgccctcgcaaaatctggttcgcttctgatcagtttataaaaataaaagttaagcctaaaatttttcgcatatttaaaaagcaattaaaaatttttagattttttattcatctccctttttgatagtgaaagcatctgagtgcctaaaataacttgtaaataaaatttggtgcgtttcagagcagtttctgaaaaaatatttatgaattaattttgctaaaaaaataaaatagtgaagctttaaaaattaataaaaaattttaaattcagaattactggagttagcatcatagcagtgcttttccttgtctttttgatgctctcgcaaaatctggttcgcttctgatcagtttataaaaaaaaaagttaagcctaaaatttttcgcatatttaaaaagcaattaaaaatttttagatttttattcatctccctttttgaaagtgtaagcatctgagtgcctaaaataacttgcaaataaaatttggtgcgtttcagagcagtttctgaaaaaatatttatgatttaattttgctaaaaaataa

SEQ ID NO: 89066 - DNA, 643 bp, Heterodera glycines
ccacaagtcaaaaaatgtttttccactcgccattaccacgaacaccggtgctccgacgttcgacgctcagtggcagcggccaagtcgaaattggggccgcacttcgtcaccaattggccgaagtgtttacgccgccatcaaacatttatcaggtagctccacaacgtgaacaatcagttgacgacagcggtggaccatctgctgcagaaacagtgccattaatagagcatcaacttttgatggcggatcaggaccagctgaacaacaacattgttcaacaacaaaatctgtatcagcagcaccagcacaattttgtggcaccgtccatcttggtgtcgtcgtcgtccatggagaaaagtgcgtcggcacaggacttggccggcacggccgcagcgctgatacgacggcaccgcagtgcgagcaaataaactaaaagatttttcctcaacacaccggaagctcagtgcgtacaattgtgctcaggaggccaaccattacaattcaggaagatggacgcattcttattgacaatatcactgcccgttgggacggattgccaatgccaaaacagcccacacttttggaaggggacgatgttggcacactgttgaccagccaactgattgaagaaggcgaggccaag

SEQ ID NO: 89067 - DNA, 1289 bp, Heterodera glycines
agagaatggccattgaagcggaagaatttggtgagcagcaggagacggacgaagttgagcagcaggaaaatggaagtggaaattcggaagaggaggaggaagaggaggaggcaccgcaaatccgacggcagcagggccaaattcggatgatgaccagcagtggcgaggaaacagtgcaagcgaccgaagcggccgtgccgccccccgccgcccaacaggcgcctccgcagtcgccagccgcgaccgctgctgccccacaatctccggcgccaacacaaactgcagcaccggcatctccgggctcggccgccgctattccgcagtctccagcagcggccggagccgctgctgcagcacaacaggcggcgctggaggaagccaaacgacgccagcaagaggccatggaaaaagcgcgggcagaggcattgcgcctgcaggaagaggcgcgggccagggcggaagcggcacgccaacagcaccaacaggccgctgaacaagcccgtctccaggcggaacaacagctaaaagcgcagcaagaggcggccaaacgacaagcggaagaacgagcgcagcaactcaaagcgcaacaacagcaacaacaacaacagtctgtacaagttcaacagcaaaaacaacaacaaccgccaattagcccttccgccacggcacaacaacaaaaagcggcgccggctcccgccgctcaaccgccggccaaagcaccgcagcagccccaagcgccaaaagcagcggttgccccggcacagcaacaacaacagcccaaagcggctgcccctccaccgccaaaggccgccgcggccccgcaacagcccaaagcgactgccgtcgctgcgccgccgaagcccaccgcccctcccgcggtggcacctcaaaagcgcgcgccttcgcccgttgtgcgcgaagtgcaactgcccgaagcgccgacccaacccatcttacgacacgcagaatacacgccgaaattggtggacgcatctgtcaacaaactgccgccagggcaagagccggatgaggaacaattggaggcgagcgcagtgccccgaaatccgatcattgaggacaatgcgtggcaagtgcagcggcgtgtgcagcccgaatatcagccggtccaacccgccaaattaaatgcgactggcgactttttggtggagagtgaggcaaagaaatcgattgtgcccgaggcggtgggctattcgaagacaaaatggaacgaattcccagaagaggaagagaaagagcgccaatcggtgccgaaagtcaagcgcaggaat

SEQ ID NO: 89068 - DNA, 677 bp, Heterodera glycines
aaaagatggaagacctttacgaaaaatgtctaaagaattcgcgtccgacccatcggaaaatggaggagaatttgtacgacatccgagttttggacgtgaaggcgaaactggcagaaaatgagctcagacaaaaaatgactcaaatggcaaacacatggaaaaagacgggcaaagacgaacgaaagcggaaatatgaggaaatcgaagaacaattcgctaaggccaatgatttgtgcaatgaaaagattcaactcgccgagagcacttatgaaatggtggactcattcatccaaaagttggacaaagagacgagcagtttcaacgcttttgtaaagcgctctaaaaggacggctcaatcaacgcccggaacatcgaaggaaaacattgccgatgagccgtccgtcgtcagaaggcgggggactgcgccttccacttcaatggcaacaaaaagaggcggcaccacgggacggacgagcgcaagggaagggacgagcagcgcaacgaaagcggagagtgtgcgcgtcgatggggcggccagcagcagcggcagcggaacgcaactcgtcggcaaaggggacatgccaattgacccgaacgagccgcgctattgcacatgccaacaggtttcctttggccatatggtcggctgtgacaacaaagaatgtcccttggaatgg

SEQ ID NO: 89069 - DNA, 643 bp, Heterodera glycines
acgagtcaaatatctggactcggacgcccccccccaccactttttcccttttttctagaaatttttaacaaaaaataaattgcattcaatttccttaaagacgatgaccaatggccggacggatggactgcggtgacaaaggatggacgtaagaaaatgaatttttattatatatattttttgcggggttacaatttttccccaaaaattcaaaatgctttcgcgttacttaatttcggataaaaatgttaaaaattttcgataaatccaaaaaaaaaaaaaaaaaaattttccccaggcgcttcggctcaatttgagcacacactgctggtcaccgagacgggctgtgatgtgttgacagaacggtcagtggctggcgctcctcggccatggttccgagaccagcttgaacaattgggttacaacagaaaaaagcggcagcagtagtgccactacgaatgcggatgttgttgttggaaactgattaattttttgtgtgtatgttttggctgataattcacaaaatttagcctttgatgattgaaagtattatctatcctttcttccattacatacgtacccccatatatttttggaaattcagcagttaaacgagaggattaaaatttgttttagggtcaaa

SEQ ID NO: 89070 - DNA, 934 bp, Heterodera glycines
aggcaaacacgtaaaattgcaatttggcaaaatatttgcgtattttgtatcagtggatgtgtcggatttccgatttctaacctttttgggctcgaaattctgttttccataattttttgagggcctcggcacttatcactgtttataattccaaaagcagtaaatgggtcataagttgctgaatactgcggaatgccttggcatttccgttttgacatttgcacaattttctaccaactcggcctttggccaatgccaatttcgcgaccagtcatcgctttgttcgtttcggctccccactcattcactaatttgtaagttcacaaatgctaagcttcaccacctttttggccaatttggcctttaactcggccaatcccagcgttattcactctttgcatgcgatgaatattaattggatttttgacaatttgccgtataaaagggagggcaaacgaaggcaaaagcacacgccgtccacaccattcaatcaaaaccaaccaaatccccactcattagctcattatgaaatttgcccctctggctttgcttgtgatccttttggtgtctttggtcgctgccgtctctgctaattccaacaacccttttgatgcggacgcggccgacaacggtggcatgaagcgcgtcaaacggcagcaacagcaatggcgttggagtccgcaacagcagcgctgggtgccaataaacattgcgaatgtgaacattgctcagaatggataagcgcactgagaaggagccgaaccgaccgaccgatggacggacggagacgaagacaaaatgccaagaatatgtgtgatcagtgacaaattcaaacccaatgccgcgccctttcgattgccaaagtgcaaaaatgccactgataaataaacaaagtgagaaaaaaaaaaaaaaaaaaaaaaaaaaaaaaaaaaaa

SEQ ID NO: 89071 - DNA, 973 bp, Heterodera glycines
cgggccaaaccaagtttaaagcgccagtgcgacggttccgttcaatgctaatcagctaattgctcactaattaccccaaataacaaaactgtgcctgcttctcccaacaatggcccccaaatgccttccgctcgaacttttgttcgaaattgtgccttttatccctgccgaaaaagccgtcccgaatgcgctctcttcctgtcggctgctgcacaaacttttgctgccacgtgtcatcaaatggaaagagcaactgctaaccgatttgatgagtttctcggcgatcgtcaacaatctctcggcgaaagtggacaatctatcgggcgtcgtcaacaatcactcggtgaaactggacaatctatcgggcgtcgtcaacaatctatcgggcgtcgtcaacaatctctcggcgaaagtggagacgattgagaaaaaaatgggagaaacgactggcaaggcgccaaacgaacaaaaagagcgaggaaatggacacaaagcggtgatgggcgcttacaacgaaaacaatggcaccatcgaagtgccattacatggttacaacgtcggaaaggcgattgttgaaaggattttgaacacggaaaacgggacggtgcatttgcacggaatgcgcgaaccaatgtcactggcaaaggccgtcgaaattggcttttttgacaacctgtcgctgactgtggttgacccgaacaccacgtcaaaggctgtttttggacgaagcattggaacggaaagtgctggactcaaatggccgattgcagcaccagcaccggcaactgacattgggcgaagcgaatcggcaaagacttgtgcgtcttgagaagggcaaaccaactagtaaaaaaaaaatcatcaaactcgaatctgacagttccaaaatgtccattcatctcgacaaaacgtccaacagcatttccaagacgaccgtcgaacccgacaaaacgtccaacaacacttccaacac

SEQ ID NO: 89072 - DNA, 3442 bp, Heterodera glycines
atagagaatgaattaacgtggtcgattggaataaatggaaaaaaaagcaaagtcaaagacaaaaccttaaagcactagccgattgaaataaatggaaaaaaaagcaaagtcaaaacacaaaaccttaaagcactagccgattgaaataaatggaaaaaaaagcaaagtcaaaacacaaaaccctaaagcactagccgattgaaataaatggaaaaaaaagcaaagtcaagaacttattctacctaatttcatggtgactgacgaggcatttgactcccttaagagagccttcccttctcatgtacttgtacctaaaatgttgttggcacaaaaagtaaagggggaaaaagaagacaaatcatccgatcaagggctaagtctcaacagatcgcagtgtaaaagctgctctactgctaacaaccccctgaccagtagtcaagtcgtatacaagtgattttgcgccccgacgttccaccatggcacacgagtgctacggctttggcaatgtgcgagcaattaagcacgcacatcgggccagatgctggggcatttgtgctgcaccgcaagcggcgcataagtagtgcctcccgacaccggggagcaagaatattgctatcttgcctaggcgggattctgacttagaggcgttcagtcataatccctcagatggtagcttcgcaccattggtctatcgaccaagcacatgaaccaaatgtctgaacctgcggttcctctcgtactaagcaggattactatcatagcaacaggtctttagtagggtaaaactaacctgtctcacgacggtctaaacccagctcacgttccctattggtgggtgaacaatccaacgcttggcgaattctgcttcgcaatgataggaagagccgacatcgaaggatcaaaaagcgacgtcgctatggacgcttggccgccacaagccagttatccctgtggtaacttttctgacacctcttgctggaaactttacacattcaaaaggatcgataagccacgctttcgcggtccgtattcgtactgaaaatcaggatcaagtaagcatttgcctttttgctctacgagaggtttccgtcctctctgagcttgccttaggacacctgcgttacgctttgacagatgtaccgccccagtcaaactccccgcctgacactgtcatcggcgcgggtcgccgggccaccgggtggcccgacttaacaccaaaatggacaccctttcgggcgcactcccgttttaccgattaagtaaggaatcgatgaaagtagtggtatttcactggcgccttgcggctcccacttatgctacacctctcatgattcttcacaaagtcagactagagtcaagctcaacagggtcttctttccccgctaaatttgccaagcccgttcccttggctgtggtttcgctagatagtagatagggacagtgggaatctcgttgatccattcgtgcgcgtcggtagttagccgacgaggcatttgggtaccttaagagagtcatagttactcccgccgtttacccgcgcttaagcaagtttccttggcttaacattcagagcactgggcagaaatcagacacggtcaacgtccacaaggaccatccgtctcctctgttttaattagacagtcggattccccgagttcgtgccagttctaaactggtcgttcagcgccaaccgaagtgcataccctgacgagcatacacgcagctgaagcgctccacaagcagctctcaccactagtccacgcaccatccccgaaagaacagcacacagccacgggcaaaagccgcctgtttcacgcaacagcccggctgacccgacctttagagccaattcttttcccgaagttacgaatctaatttgccgacttcccttacctacattattctatcgactagaggctgttcaccttggagacctgctgcggatatcggtacgatcaggcaggagattcaaatagcttccctcgcattttcaagggccgtgtggagcgcacgagacaccacaggaaccgcggtgctttacgggcgcaacatccctatctcaggctgagccacttccaggcacgcacaccctaaaccagaaaagagaactctggctcggactccacacgacgtctgcgagttcatttgcgttaccgcgcaaaacagctcttgcgaaccgtcatttccctagcctggcgtgggaatgttaacccacttccctttcggcaaccggatggaccaactgcgcaagcacagaaaagtcgtcatccgtagtgtgttacggcgttagccggtgccttaggatcggctgacccacattcaactgctgttcacgtggaacccttctccacttcagtcttcaaggatctcacttgaatatttgctactaccaccaagatctgcactggtggaagctccggccgggcccacgcccaaagccttcaacgcaaccactacgaccctcctacacgtcatggccagactacgcgacaagcacgtgtacaagccaatgacggtggagtataggtggcccgctccagcgccatccattttcagggctagttgattcggcaggtgagttgttacacactccttagcggattccgacttccatggccaccgtcctgctgtctatatcaaccaacaccttttatggggtctaatgagcgggcactttggcaccttaactccacgtttggttcatcccacatcgccagttctgcttaccaaaaatggcccacttggagctcaaacattcaacgcctgggttcagagtcaagcaaccctggcttcatacccatttagagtttgagaataggttaaggacatttcgtccccaagtcctctaatcattcgctttaccgagtataactgcttaacgagctccagctatcctgggggaaacttcggagggaaccagctactagatggttcgattagtctttcgcccctatacccaagtcagacgatcgatttgcacgtcagaatcgcttcggacttccaccagagtttcctctggcttcatcctgctcaggaatagttcaccatctttcgggtctcagcgcatacgctctgtctccgccccatcgcatgcgatcgagacgggactatgttgcgccccaacaccgcagtgccagggatcacacatcagctccgtaagaagccttcactttcattgcgcctttgggttttgaacacccaatgacttgcgcatacgctaaactccttggtccgtgtttcaagacgggtcgaacagatgaccggcttttacaccgagaacgcacaagtgagagcctgagctggaccgaactggttgctggtacgtgtcgcacgcgaccgccaccgacccccagctcgagtcaacacggacccgaaaccattgcacaattcacccagagtaaacagcactcccccgatccgggtaccagaccccaaaaggctg

SEQ ID NO: 89073 - DNA, 633 bp, Heterodera glycines
aattgattgtgacttcaactagttcaaaaaccgtattttgcttttgccccctcactatacattaatgtcctccacaattgctcccgtttcttccgccgatggcaccgctgggagtgccgccgccgtcgccagcgctgggccctcctccgtcgagccgatgccgccggtggagcagctgatggagggcattgaggagaagtgcccgccctcgttggaccagcgactgaacgccatggacgaggtggacatgcgcatcgacgacctgctcaccgtggtggccgaagtgatggccggtctggacaaggacaagccgctgtcaaaggcgaagatggaggagctgtacaagaaatacgaactgaagctggacgaaattcagcggggcatcgccgaacagctcacttacatggaacaggtgtgcgtcggcgccgagcaccagggctcaacttaccattaccatcaggtggcccaactgagtgccgcacggctgcactctctgcacgcgcatttggccatgctgagaaacaacatggacaacggtagcagagaaagcggagtagatggacaacaacagccaacaggagcagcagacgaacagagaaaaaatagtgaaaaaaagggaaaggaggagagaca

SEQ ID NO: 89074 - DNA, 656 bp, Heterodera glycines
gttaccaatctgtaatggacccctaccttcaagaattaataaacaaatggttatgctgggacaagaatgaaacgactcgaacagaaattgaacgactcgtaaaagagaataatgtgcacgaattgcgacttcggatggttgggaaattgtcttttgggacggcaggagttcgaacgcacatggaggcgggctttgccagactgaacgaattgaccatcatccaactgtcccatggaatggcacggcatttgacaagtgaaatgggcgaagatggcaaaaagaaaggcgttgtgattggcttcgatggccgacatcagagcaaacgttttgccgaattggctgccaatgttttcgtgctgaacggactgtccgcctttctcttttccgccgtcgtccccacccctgtcggttcgtttgccgtcctttctttgggttgtgctgcgggcatcatgatcaccgcttctcacaatcccaaggaggacaacggcttcaaggcttattgggccaacggcgctcaaattctgagcccacacgacacggaaatttgtccaattgtcgcggaggagtcaaagcccgaagaaacctattgggacacggtccaactcggcacaagtgcctgtctccactcggccgactcggttttggagaaatatttt

SEQ ID NO: 89075 - DNA, 573 bp, Heterodera glycines
acaaagcgagcagaatgactactgaacagggaaagaacgaacaacagcagggaaagggcatttacgagagcaccaaggaaagtctgtcgaacgtggcggaggggacgaaggaatggctgacgagtgccaaggacaaagtggccgattcgctgacttctacgaaggacactgtgaccggcaagtcggcggagatgcgcgacagggcgtccgacagttacgaggatgctaagcagggggcgcaggaccgttacgagcgtgccaaggagtacggcagtgagaagacggagcaactgaaggactatgccaccgacaagaaggaggaagcgggcgagaagatggagcagaacagggagaaggctgctgagaagtgggacgagacgaaggaggctggaggcgagcgtatgcagcgcgccggtgacaaaatcaggggcaaatagaaaggatgtccaacagaatgaagagcaaatttatctgatctgatcggactctgtgagcccaatttaactgctctttttattggaatatttgttgtccatcttctcatataaaatttttgtgaatgaaaacaattca

SEQ ID NO: 89076 - DNA, 1401 bp, Heterodera glycines
caagtttgagcaatttcttttctcttccaaattcactttccatttgccctccttccctagccaatttgtcccccttaaaaatggcactcgtctccaaatggcgttccgaccctttcgggcgttctgactggcccagcctttggcgtgatcgcttttctcgcgactgggacgattggccccgcgattggccacgcccgggagaactgatggaacgtttccgttcccgcgacttcgaccgcgaccgttggtggcgagattggcccactgattggccccggatggacgcaattgtgccaagattttcttcacatttggaccgtttcgaccgtaattggcgtgacgaccccttttggcgcgatttgtacccgcgttgggccgagcccatctttaaagatggcatcgacgtcaaaactaacatcaccaacgacagtaaccgtttcgcagtcgaaatggacacttaccaattccgcccggaggaacttcaggtgaaaacgatggacgacactttgctgattgagggacggcacgaagatgttcgagacagagacaattacaccaaaatgtatttcgtccgcaaataccaattgccggccgatgtggagtcccactcgatcagcagtcacatcgacagttctggccgtctgagcgtcgaggcccaaaagcgttggcaggccgtggaaggcgaacgttccattccaattgagagcggctcgcgtcgtcagggcgggggctacgggtcgcgctcgagctcatactcgccgcgcgatcgctactacgccgactcaggccgagggtcggccaacgattattacagggctgagagccgtctgaacggagcggcgaacggcggcggtggttacctttcgccaaacccgcgatcggacggatatcgaacggaattcgagaaacgcgagacggacgcgaacggaatgcgacacgaagcgagacgggaggaattccgcgaggagttccgtcgcagcggatcggccgctaatgttcttccaccggcctcgcctatgctgcgcaccgagtcgcgtttgagcggcgcggtcggcgccaatgcgtcatcaggcgaagaacgccgcgaatcgtcgcacttccgccgaacggcttcagccgcctcgcgcgagtatcggtcgggtggcgctttcgctggcggagaaaatcttttgcggacggcggaggaattgggcgggcgaagttcggcatttggcactcgaaacgtgccaattcaccgtggataaagacaatgtgagggggaagcgcccgcatggacgacacataagacgaacgaacagacaaaagacgaaatcactcccccccactcactcatttgccttagagtgtcaaagggcagactgactgataaataagcccgatcactttttattgcttcaaatt

SEQ ID NO: 89077 - DNA, 1178 bp, Heterodera glycines
cgccgcttaaacttcaacccgtacaaccgcccgttcaatatgcgcaacagcggcaccaaacgtcggcgagcagtacaacaacaacggcaccaccatttggtgaagcgatggaattttgcaataaatgctcgtacagatactcttgaaacatgcccagatgcctttcaacgtcgtgcaaccgatggcaatgactctgctcaatttgcctctcatcagcgtcatccaccgactcgcaaaaaagtttatctgaaatcttcgcgcctgccttttctcaaccaccgacaacaattggccaccgatgctccgcctttacaaaatggcctttcgtcaattgctgccgcggttccatcgtccattgaatctgtggcgaatgaacgcgactttatgtgcgaatggctgatgcagtcggagggggacgacgattggtcggacgaggagggcacagcagcggggccaattgagccgtgcgcgaggttttttgcttccgcctcacaaatggttttccacgtgtacaacgaacatttggtgccgcttgtccaacagcacagcgacggcgaaccgccgaggattcgctgtcgttggcccatttgcgaaaacactccgcgcactctgtgtaatccatcggtgcttccctacaaagagtacgtctatcacattcggcaacagttcgagcgcagtagggaacggacatccgcgcagaatgcttactcagactttgccgcacaggaagcgatacgacggcacgcatttgccaatttgcgcaaagagattacggaagattcggagggtccggtgacgcgaagcattcgcctcacttcagcgctcattctgcgcaacatttgtcaccattccgtcgccggacgtcgcaaactccgcacgcatgagagtttcattagttggctgtcactctcacacatggaatcagctcgtacattggcacagtgtttgagtgaaatggcgcgacacgcgaacaatgaaacggaaccacaacgaaatgtcattaaaaggaaaaccagctgttcgtctggtgatctacaacagaatcagccaagctttgcgtcagaacaaatggatgacaatgacacggcctaacacaactttcatggatcatttcgtctattgttaattgcaagcgttccttctccgtcgcgaatttgagcaattcgaatttctaatct

SEQ ID NO: 89078 - DNA, 930 bp, Heterodera glycines
agcatataaaccgttaaaaccaaatgaatagcagtgaagaaacaacggaaaatgttgggatgggcggaaataaggacgaacggcagacaacttcaaaagatgagaccgacgaaagcagcagcgaaaatcaacggaatgaacaacgccaacgacaaatggacagcgaaaaggaggactcgaggttcgaatgcaatatttgtttggacatggccaaagatgcggtcgtttcgatgtgcggccatttgttctgctggccatgccttttccaatggatggacacgcgtccctatcgccagctgtgccccgtgtgcaaatcggcgattagcaaagacaaggtgattccgctctatggtcgcggtggtggggacagcgacccgcgcgagaaaattccaccacggccgcaaggtcaacgcacagaggagacaaatcagggctttcccgggatgttccattggggcggcgacaacggcggccatggcggcggcggtgtgcaattttcgttgggcatcggtgtcttccccatttcctttttcgcctcctttttcaacacaaatttcggaggcgccgaccgaaggccggacccaccgcccgtcggaagtcgtcaaatgttggaggagcaattgctgtctaatacgttcctctacatcggtgtgctcattttgctgtggttagtgttcgtctgatgaccatcaaaaaagaaaagaattgtggcgatgtcacccatcggtagaccatttgctattccataaattgtcatttttctaaatacaatcactgaatgctctcggcattcccttctcctctctctctctctctacacaatttgtgtgtctgtccgtctcccttttcttgtcatttccttccaaatcaaattcatacctttgcccgttgttcgtcacaaacagtacatttttaaacttctgctgctgc

SEQ ID NO: 89079 - DNA, 652 bp, Heterodera glycines
aacgcaaatgtgcgaccgcaactgcaaggagtggacaacgccaaagactgtttgacaccgtcgacaacaggcaataatcaaccgacacgagaacagccaaaactgatggacattgacgaaaggattgggatggacgacgaagacaacgacgacggggacagattcggagaagcagcagaggtattgggtggaggagacaacgctaaccgagttggtggtgagagagtcgtgggtaacagactgcggaaacggcgctccgtttcctgtgagccgacagcgaacagtccggccaaaatggcaccgcatcagccagccgatgaccaatccgctggttgtctgctgcagcgcacccaaagtgtcaatgccttcgctgttccctctgctcatcaacaaaatgccgtcgtcccaattgcctcttcctcgcgtatttcgtcgagaatgccctcctccgtctccatttgctcatatgccaattctgaagtcagcgcgcggaaacgttcgccctcgggcgacggcagtctttgttcaaaggaggagcggagtttgtcgttaaccactccaaaaattagcatttccatttgcggaaaggctttgtatgcgtgcgcaagtggtcggttggacgatttggcagctcttctcaagggacatcccg

SEQ ID NO: 89080 - DNA, 632 bp, Heterodera glycines
gcttattcttctaggcaacgaattgttaaatcaaacaaacggctgaaatgctaattgcttatatccccaaacgaattcatctcaatttgaatgtggtcggtgctgcacttcgtcagcgtatgccgttttctgcggctgtgcttgaccctcacgatcagctgaaagattcagacaagccgatgtcggagcagatgaacccttcattctttaagatggtcgattactacttcgacaaaggcgctgctgtcattgagccgaaattggttgagaacttcaaagcttcgcatgggaaatcgaaagaagagagggtcagctctgtcaaagggattcttgcggcgattaaacccgttaacaaggttctttacgtgaccttcccgcttcgacgcgatgacggatcttatgagatgattgaagcatggagggctatgcactcagagcatcgtactccaacaaagggagggattcgcttttcaatggatgtgaatgaagatgaggtgaaagcgctgtctgctctgatgaccgccaaatgtgcagttgtcgacgttccattcggtggagcaaagggaggagtgaaaatcgacccgaagaaatactccgcttatgaaattgaaaaaatcactcgcaggtttacc

SEQ ID NO: 89081 - DNA, 1778 bp, Heterodera glycines
aaaggttacgttcttatgcccagagaatggccatttttataattaatgacatccgaatccaccaattttttaggccatttgaattggtgttgtcaacgtggcagcaaccaacggctgtggctgtggtccctggtgacaaccacgatggcaatggtctgctccatgccgcgtcgcttggcatttggggtgtccacgaccggcagctgaactggcgcaactttgcacgatgtgctgaaattcgggagccgaaaacatgccatctaccggcgttggcgctggcacgagtccaagaacaatttcgcatcgggcttggtgctgtcggaggaggaatggcgccgggaatggactaaagtgtacgagtcgttggagtgtgtgcatgtgtttgcgctcgcgcacattttgcaccggcccatcattgtgtgttggtggacaccattctgcgcaatgcgaaggccgaagaatgggcaccgattccgtttggcggcaacgcccgcccaaacagtgccatcgctcggagagttcagcactgagcactggtgtgcaggccagcgtccactttggagcacattcgatggtcggtgcgcaaaagtcgtgcacttctgtcgccaaactgttgtggctgctcaaaattgcctccgcctgcccttccgaaaagctgatgaatgccgtggatgagctgctgttccgctacgtggacaccattcagccggcgaattgctttttttggttgaacgaactgatcactgatgtgcaacagcggaggggcaacgcgatggccgagattctaaagcgagtcggtctcctgcagccgcaagaagtgttctgcgcattgtgcatcgaacttgggccaagccatgttggccgttacattgaacaatacataaacaaactacaactactagtacttgcttcttcgggtgcaaatgcttctgctgctgccgtttctcaccatccttgcatggcaattgcaacacaacaatcatcatcatccgctggagccctaattagcggtgaaaaccgacttttcgatgtgttggatgcctttctggagcgccatttaacgcaaatttgcgtgctgagccaaatgttggacgaacttgacaatttcagcattcgtccagccgagatcacattggacaaattccgtcactttctctccatctgccattttgatcagttcaccaaaatagccgatttgacgaacacagcatctgatcctcagctgctgaagagtctcggtgaatggctgtaatctcccgaaattgtgatggccgctaatgctaacactgacgaacggaatttgatgcgtggcgtccgtcctgcgcaaatgggtcgtccaaatcagtgcccatttgcgacaaacgttgggaaaaggcccaaaacggctagtcgattcgagtgcttttctggaccaattcaagaacaaattggcctcaatcaacatattcgatggacattttaacattgattttgccttattttaacactcaaattgcgcaattgtgccactctttgacgaggttgtgcgtgccgactcggtgtttcgtctgttccatgtccgttcattaacactgcacggagttttgtccaacacgtgctgttcaccggctccaactgtcgtcttttccgctgttgcccatcggcctttcatcgcgtcaacaaaatgccaattcggattattcggcgcacaattttgctctgttcaccgccattctgagcgacatgatcaatgccagccaggtgtagtgcggacgccgttggcactgactgtgatgaga

SEQ ID NO: 89082 - DNA, 586 bp, Heterodera glycines
tgtaaatcgcaccgaattctacagacctaatttggctataatcttgtttctggcatgtttgggtttcgtttttgggaataaaaaattgtcaaaaattggtggaactccctaaaaatttgaatccatcaaattttgtattttaaaaatttggtacaaaacttatattacatcccaagtgttattgcgaatgaattttctcaaggaatattaaatttcttttctattacgcctttaattatgtatatgccttttcttttatgactaacacagacataaaattttatttatttttttatttgtgtcttttgccgtgcgaaaatttagtttttccaattaataaattaacattttttaatgaaagcatttattgaattgaaaataataaccctttttaatttatgtgaaaaaaagtctaagaaatttttaagcgttgtggagacttttttttctctgttcaccgcggtaaattttgtgtgcggcgaagggtctgcccccaccgaaatttttgaaaatcgtgtggattttaatgtcaaaaattcaaacaatgcaatgtttctaattcctaaattttaattgaattttcggt

SEQ ID NO: 89083 - DNA, 926 bp, Heterodera glycines
atcatacctaacaagtaagagttgaaactttaaaagcttttttattgcacaaaaatcatggttgcttcttcattctctaataatggcaaaaatattttggaatcgccgttcaaactaacaggagaatgcaaattgctctattattgtacaaacgaattgggtcattttttgaaccaaacatcaaatgctttaatcggcaatcctctgagaatagttccgtttgatgggcttagctctccacaaaagcaagtctgtacaaatacatcaaattctttggaatttaattgtactgagcgatacatttcattgactaatggcactgctctttggatttacgatttacagaaagggagcacactacgagaactgcatgaccatgatgggaacatcagtggggtcgcctggcacagacaaagtccttggctcttggcaagtgtgggcgacgattgcacgttgcgcttgtgggatttaccttcgcatcctgctcaaattgcgattcgccgtgcgactaagccatacaggcgattggaattttcgcccgattgcaattacatcgcttgtgctggtgaacttgtttccatttatgatttatgcatggcccaaaatgttgtccatatgctttcgtgttcatcggtttttgatattaatcgtcttaatttgttttatattttcagtcgtcagctgtgcgtttcaacccttcagagtgccttttggctactgcggatgatgatcggacagttcgattttgggacgttgacacaggagaatgtgtcacacaaacgcccattttcaatgccaaaattggtcaaattcattttgaaccaaatggaaaatatttaattgcggtcacagagaaacaaatggcttcgattcgttgggaaccctttgaattggtttcgcagttcgacctttcgcatcagctgcat

SEQ ID NO: 89084 - DNA, 532 bp, Heterodera glycines
gtaagtacatgtaatactgctcggtacagacaaagcgctgccctaaaacaaaaatggcaaaaattggacgaaaaaaaagaaaagaaaaaataaataaaattaccatcaatgatcaaagaagcacagcgaaaatggttgctgaagcaatacgcactggtgaagaagggcgcaattggtgagtagtcgaacataaacatcaccggcacgggtttaaacgcgaacttagggcatagtttgacgacaaaaccaacgaaatttgcatggttttaccgggccatcgctgtccaatgaactgtttgcgtcgtttgaagttgaaggtgacccccaaaaggccgaagatgaattttgagaccgacgatagaacattctttttgcaggaggcgacgcaaaaatggaattttgacgatttgcatgtaatggtaatgacgagtcattttcttcgaaatcattctgttcatttttcacaaatgatggctcccaatttgaggatgacggcggcggctaaaaaaatttaaaaattaaatattatttt

SEQ ID NO: 89085 - DNA, 634 bp, Heterodera glycines
caagtttgagatttcgatggatgccccggccgatgcccccggggtgcatttgtttggcactgtcgtccccaaagaagtgttcctcgcccaactcttttaccttctctacttcgcctcctttggctctctgtttccgcttttggccgtttactttaaacaactcggactgtccgctgcccaggccggcattttgttgggctcgcgtccattggtcgaattcgtcgccagccctttttgggggagtttcgccgaccgtttccgcaagggcaaactgttgctgctgtgctccctctgttcaatggtcgttttcactttggccgttggcttcgtccaaccgctcactccttattgcgttgtgctcgaccaaaactctaccggcggcgaatgcaaatttttggtgccggccagcgaaattgtcagaggaggcgcactcggatacatcaaaaaagttgccggcattggacggcgccggaggggcaaaaccaaaaaaaagaattcgaccttaacgaattgtccgtttagacattctgtccatcatcgatttgtccaccttcgacagcaaaaattatttggtggccggcaaagcccctgaatatattaccaaagaaaaggtgtgcaattacgagaaggaggt

SEQ ID NO: 89086 - DNA, 1125 bp, Heterodera glycines
aaaatatgcaatttacgccaaaatagatcgattttaatgcgtattttgaaaaaaaaattcaactttttgttcgaattcgggtccgggggtcggaattgagcaaaaccgagtccggattcgtaataggaaccctcgaaaacccccggaaactgattttaagcctaaaataaaaaagttaaattaggtacccccattcgttacgattgcccaataagcatttccaatggcattattttcgacatttgttacgacaggattgctgataagtcagataaaaggcatgaatgaataaattttttcccctcatcacctaaacgttccattggaaaggttcgtttgtgctcgaattccctcaacaaaaatgcttcgtcgtacatttttcggttcagcgcaaacagagctggagcttctgcgcttcattttttaaagaaaatgacaaaaaaaagttacttttctaaattaaaatcacttttgaacagggaggaaacagaggacaggctcgacttttgctctaacaaataagggtcaaacccagtgttcgacaaaattggttaaaacttcaaaaaagtcattttgcgcgctaattcaaaaatatagatcagttacctttttggtagtgtttgtatcagggatgggccaaattgaaaaataaaaagcgaaaagcgaaatttgcgaaactgaaaaatgcgaaatgaaaaaaaagcgaaatgcgaaaagccaaaatatgcgaaaatgcgaaaagcgaaatttttttaaaaaattttaccaatacatgtaaataatttttttccatattcatacaaacgctttttttttgaacaaaagttacgatttttatttacatatttcggtagatatttttgaggttttgtacatatttctttcacatttcgtgattttttttaacgaagcccaaaaacgcgaagttttcgcccgtccctgggggtgaaccgctggcggacgattccctcctgcagcagaagggtgattaactttgacaatttttgaaacattatatataaataaatcattcaaatttatgcatcatttgtgatagtgtccccttctctaataatcccccaacattcgaatatcatccgatcactgatccaactgatcaatcag

SEQ ID NO: 89087 - DNA, 635 bp, Heterodera glycines
attcaaattccgccatttattcattaaatggaagaagctccaaaaaatggacgtcatcagcagaagaataaaaatgagcagcaattgaccgcttccgagcttcgtcattacgaggcggacttcgacgagtccgacccgaaatggaagtgctggcccgaaaggaagcacgtccagaaggtcgctttccacgcttcggtggcgaccgtcgtgttggctgtgctgctgctactgctcgcgcttctcctcctccgtccgctatttctccgtctgtccttcgttagcctcggcgtcgtcctttgtgccgtttccgccatggcattcttcgctaatttggcccaaaatgacttcctcttcgtgccttaccttttcgttgtgtggttgctgactattctgagcttcgccttcttctttttcttggtgccaatgttcggcgtgcccgacttttggcagaattgggtgctcgtcgcgttcggcatcgcccagggccgccattcgctgtccgtcgtccgtctgatcaccgttttgggcgcagctgtttccttcgcttcgatttgtctgctcactttgttcaatttcataatgctccgcgcaagaaacttcgcaatcgccaaaagagtggcaattaaaaaaggata

SEQ ID NO: 89088 - DNA, 803 bp, Heterodera glycines
ccgcctttcccccctcctctttttgtccgttctcacattctccgtccgctcacttcgaattctgcaaattgtgcccggtttcaccaattcccatgtgctgttcaattatcggttggcccaaacgctggcggacatgggacattcggtgactctgtggacgcaaatggaaatggcaatggtttttgctggcgacttgaaattgcccgagggggtcattgagcatcgtgtgcccatccatttccgtgaccgtctgaaggtggaggggctcaaagtgttccaggaaatgatctttgcccgtggcactccgtacgagctgtggtggaccggccgcgagtttcaggaaatgcgtctggaagcgtgtgaacaaatgctgaacgaagcggacgcattgcgccaaaaatgggccaaattcgacttggccattggccacttccacgacttatgccctgtgatgttggctgagcgagtcggcgtgaaaagggtgggcgaaagttgcgcgatcaatgattctcgagagtctcgggaaaaagttccgacttcgagaatcactgatgggttgggtcactcacggcacttcactgtacgacttcaccgctgttacgcttggcattcgcactttgccctcctttgtgccgcatccgctctcctcaaatggcgacagaatgagtttcactggtcgacttaaaaacgtcctttggcatttgtccggcattgaatttgtcaatttgcccgaagcccttctgcacgacgagaacaaaatgtatgaacaaatgtcccacggtcgtgacaatctgtgggcactg

SEQ ID NO: 89089 - DNA, 716 bp, Heterodera glycines
aaaaaattccaagccaaggccaagccactatagcagtatagtgccaaaaattaattgaaaatattaatttgtattccggttattcttccgtaaaaaatgacgccaccttagccattaggcctagaaaaaagagctctttcgaatggtaccttcaaatcaaaaaacgactgtcagggagctgagctacagaaaaaaattccaagccaaggccaagccactatagcagtatagtgacaaaaattaattgaaaatattgatttgtattccggttattcttccgtaaaaaatgacgccaccttagccattaggcctagaaaaaagagctctttcgaatggtaccttcaaatcaaaaaacgactgtcagggagctgagctacagaaaaaaattccaagccaaggccaagccactatagcagtatagtgacaaaaattaattgaaaatattaatttgtattccggttattcttccgtaaaaaatgacgccaccttagccattaggcctagaaaaaagagctctttcgaatggtaccttcaaatcaaaaaacgactgtcagggagctgagctacagaaaaaaattccaagccaaggccaagccactatagcagtatagtgccaaaaattaattgaaaatattaatttgtattccggttattcttccgtaaaaaatgacgccaccttagccattaggcctagaaaaaagagctctttcgaatgg

SEQ ID NO: 89090 - DNA, 572 bp, Heterodera glycines
attcaatacaaaataaattccaaaccaaacaccaacttttccctgctgatggctgaccaccagcacaatgacatcgaactggcggaggacgcctccgccactgaacaaggcaccaaacagaacgtgtcggttgcggtcaaatggttcttccacggaaactggcgacgttttcaatgctccgagtggacttacagcgcacttcaggctgaaattcgcaccattgagcccaacttcagtggccaatttttttatagagacgccgatggagatgcaattgttttcacaacggatgccgaaatgcgtgtgatgctcgaccactttcagaagaaaatgaacaaagacacagtgacactcgaaacgatgggaggcgaaggaactgttaagaccggagttgtcaaaacgggttgcccttacatcaacaaaatcggcaaaatgcgtgacgtcactaatggcaatggggacaagtcgttgcatccgcacattatgtgcgatctttgtgacgggggtgtggtcggcattcgttacaaatgcatggtctgtccggactttgacctgtgcgaacaatgcgagaa

SEQ ID NO: 89091 - DNA, 736 bp, Heterodera glycines
ctgcagttgtcctcacttcgactgccttccgtgcagtggctgtgcatgccaacaacgatcagtgtcagtccggccatcccggacaaactcgtggtcaacggggtcgacctggtcaaccgggaccaactgtccgtctctcaaaatcgcgagttgcagcggtacatcgatgccaatgcgcatttgctcggcttcctggacaaagacaaagagcagcagcagacggacggcggaggcgacaaacgaacgccactcacaatatcagtgacggagcaaaagttcggcccaatctctccaggacaaacctcgggaatttctgacaaactcccgccgtcttccgctgcttcgtccttctcatcgcctgcgtatggtcggcctccgtccgccttcgccgccgcttcactgaaccgcgcggggtcgccctattcaatgggcggtggttctgagtacggcggcagacggaagggcgtcagttggtcggacgtcgtggaggagccgaagccgacgactcggacccggtccgactcgcccccgccggcgtcattcattcgccattcgatgccggcattgggcaaagacagtccttcgggatatggaacggacgaaggacggcactaccgaaacggcgcatcggacgatggcactttggacgggggacatgacggacggcaaaactatgacagataccgtcattcttcacagaatccgttcgatcgtgccgatggttgggtttcgtcca

SEQ ID NO: 89092 - DNA, 642 bp, Heterodera glycines
gtccaatcaatagcttaaaacgaaaaaatgtcttcaaatttgatgggttcgccaagctgctttttccatccaacagctgagcaggcagcggcagcagaagaagtggacaaatatgaagtgttcagttggcacggagatttgagcgaccaattggcagcacaatttttggtcactgatcagcagctgttgaaggaatgccgagaaaaacttgccaactccgaattgagagagacgaaattgctgagcaaaaacggggaattgaatgcagagaataaggctcttaaagcagagttggagaagcaaaagatgatgacggaacacagtcaaattaaggccaaagtggagaaaatggagcaggaaaatcagcagcaattggacaaaaaatacgtttcattcgatgtgttcaatgcattggtggagcgaatcaaacgtttggagaaccagcagctgaagcagaacaaagaggagggcaaaaaggtgacgtcatcgggcgaccaatcgccgccggcggttgtctcagcgaaagttgcaaaggagttgccaaattcgaagaaacaaaatggttgggatgccaaagtttgccacaaagacatcgaaatcattggggaaaagcaattgacgatcaattgcaagggcaacaga

SEQ ID NO: 89093 - DNA, 624 bp, Heterodera glycines
gcggcgcgcccaagcactcatttacaaattataaaattcgttaattgcatatccatttctatttaaaattggctaattgttagttaaagagccgttaaaccgctgcagctgaaagcatttaaatttaaacttcgtttttgacaatgtcgctggtcgaattaagcaaatcccggtggttcaatgggtatcagaaaattttcgaacataacagtgcccagttaaagtgccgaatgcgatttggggtttatttaccggacaatcagccggaaagcaaattgccagtgctcttttatctttctggtttgaaatgcaccgaggaaaattttgtcgtcaaaagcgccatgcagcgattcgcatccaatcgaaaaatcattgtggtcaatcccgacacgagcccccgtggcgttgtcactggagacggcgatgaccccagttttggtgctgcagcaggattttatttggacgcgacggaaacaaaatgggcacagaattatcgaatgtattcctacattttggatgaactcgtgccactcgtgttcagcactttttcagtggagaaaaataaatgcggaatttttggacattcaatgggaggccatggtgctctgaccattgcgcttaagc

SEQ ID NO: 89094 - DNA, 679 bp, Heterodera glycines
gtaattttggaaatggctggcaatttctggaagagttcccatttcgaacaatggattttggataagggcgaccttttgcgagagcggggcgaggatttgaaggtgtacagcgaggaggagtatcagaagctgatgatctttttcaccaattttattcaggagatgggccaatgcaaagagagggaattgggcacgcaatgcaacgaaaacacgcgggacagacccatccaacggatgcaggccatcgcaaccgcttgtgtctatttcagacgtttttatgcgagttaggcgctctttcaaagacatcgatccctttctattgtcgatgacctgcacaaatttggccagcaaagtggaggagatgggccatttgacacacaccaaactgaccgcgacattccaacgggcgatgaagaaatgggcactcttcgacccgcaacaaatggccctttaccaccaaatcaaacaccaccacatcagcgagacggaattttgtctggttgaactgctcgactgctccctcatcgtctaccacccctaccgaccgctcctccaattcagaaatgacatgaaaaatgcgtccgttcaaaatgcggaacatctctaccaagacgcatggcgagtgtgcaacgacagtctgaagagtgacgtgccactgctgtacccacctcacatggtc

SEQ ID NO: 89095 - DNA, 649 bp, Heterodera glycines
ctcatatgtcatctgcaaaaaataaaaaatccattgagaatgtaatcatcagtgttcggaatgagtttggttatctgaaccagctctgggacactgtttacatggacttgccaacccgggaattccgcgtggaagaagcctgcgaatttatgttcaatctcctacaggtgatcagaaaatcagaagagaaagtggtccgtaatattgtttctgacttggaaatccgccgagaagcagtgaccaatctgtttgaattttttggggttgccttctttcgacgagtcgcttttcccgcccaagtcgatcgcattgctgaaagtgcttgattcggaaaaaaaccgattggaagcgaaaagggaggaaattgtggggagccaagcgaggctgacgggaaaatacaaagcattgtgcgatagggtgggaacaacggcgcgacaaatcgaaggagtgcacgacagaattatgtccgaagatgagttggacaaactcaaaggcgaggtggacgcgctgcagacttttgtcaacaaacggctcgagaaggcacttcagctccaagcggagagcaaacgaatctttgagaccattcgcccgtccatcaatagtttcaatgaagactacctccactttttgcgtgttgacttggacagcc

SEQ ID NO: 89096 - DNA, 639 bp, Heterodera glycines
gcacattcgatcatttttaccaattttatgtgttcagtgttaatcgcgactccatctcttcgctcgacatttaccagcgcattctccgccatcgcaattatttcgttgccttagtgcacaaatcgcttttaccgcctcaaattcggctgcccttcgttggctctgtgcattacctttcgtccggccttcgctttaacatcgaatggcttctcttctggggtccgtggtccccgtggaagtcgtcgtacgcattaaaagacgaatttaaggaaagggacaatttggaaaggattgctcgaaatatgcaaatgaatctgctggtgatgagtgtcgtcaacttggtctttcttccgtttgtcgtcgtttaccaagtgttgttcagctttttctcttactccgaacattttcaacgggatcgccacattttgggcatgcgcaaatactccaattacggacgcgagaaattgcgccatttcaatgaaatggacagcgaattggacgcccgcctaaatcgcagttacgaattcgccgttcgttacaccgaccaattcgtttcgacacagtccaaaatcattgccaaaaacattgcttttattgccgctgccgttttcgtcgtcctttgctctctcacggcttacg

SEQ ID NO: 89097 - DNA, 926 bp, Heterodera glycines
atcaatgatcgcccttaccattgtcgctattgccccaaacgatttacgcaaaagagccatttggaccagcacgagcgaattcacaccggccttaagccgttcacgtgccaatattgtgggcgtcaatttcggcaacggtctcagcaattggggcacgaggcaacgcatatgaacagggaaaggcattccatgggcagcatggcgatgagtgccgccgttttgggcggcttagtgggcgcggccggcggatacggcgacgcggcgctgtgcggcacggcgagggagcggacgacgcatttggcactgaaacaaccgcagcagcaacagcaggagatggcacaagcggccgctgcacaactaacggcggacgaacagcggcggcagcaacaacagcaacagtcctcttcgcccacccgaccgttgggtttggggaggccaaccgtcgccggaggggtcggcggcaacggcacgcgccattttcaacgatcgcaacagcagcaaatgcatcagcagcagacgaacatggaccagtgttgtgccgggggataacacttcgccaatggcacacgcgcagcagcaacaccaaatgaactccttcaacggattgctgagggcagttcagtccaacgatagtgccgcggtggacggactgctcggcctccgcggttccatggcaatgaaacaacagcagcagcagcacggccattccgggatggagctgaacgaacagctccaacttgtcagtgcacagctgatgaaccgatgatggaccacaaacactttttggaactttgagcataattaagtccaaatgattgtcggccaattgaccattttgaccagtattttgtcttcataaatcgcgtcaattccgcattttctaatcatttttctcattagacacaatctgtggttacaaatggaca

SEQ ID NO: 89098 - DNA, 629 bp, Heterodera glycines
caagtttgagtttcccaaatgcttttctccccgtccactgttctgctattgcttctgatcgtcctccctttctctctttctttcattttaatccctcaaaatgtccgccaaatttcccccgccctttcgtcgcgtcccttccgccgatttggccatttttctgtcattgccaaacgaaacccaattgttctcatccccggcgacgggggaagtcggctaaaggcgaatttgacgggcaaaccgtctttggtccattacttttgccagcgacagaccaacgatttcttcgcgctttggctcgatttgcaacaatttggcccttttgtcatcgattgttgggccgacaatatgcgcctcaacttcaacagaacgagcggaagggcgcaggatttggagggagtgaaagtgcgggtgcccggctttggacacacgcgaaccgtggaatggattgactcctccaaacggtcgccgagccgttacttcgcgcccatcgtcgcctccctcgccaaattgggctaccaacgcggcatcgatgtcatcggtgcaccgtacgactggcgaagagcgcccgaggaactccttcattattttgttaaattgcgttcactgattgagcaactttaccacgc

SEQ ID NO: 89099 - DNA, 649 bp, Heterodera glycines
attaatattttaattcaactttgacttttcattcaagaatgtcaaacattgcctttataagaattcaaaaagaatgcaaagaaatcattttatgtaaagagttacaagaaaatggtgtaacaattgaacctgtaaatgagacgctttttgaaatcattggaaagatacgaggtccaccagatagcccatacgaaaacggaatatttattttggacgttaaaattccacaagaatatcctttccaacctcctaagactggtgctatatgtttggatattctcaaggaccaatgggcggcatctatgactctccgaacagtgcttctcagtgtgcaatcgttgttactttcaccggagccaaaagatccacaggatgcaattgttgcgaaacaatgcttaagtgaccctgcattattcagatccactgcaaaatattgggcacaacattatgcaaacgctccgggggaaatagacagaaataaggcaaaatgtgtgtccacattacaggagatgggagcaagtaaggacgccagtatatccgctttaagctgctataattggaaccttgcaaaagctaccgaatttctctttacataatttattggttaataacatcattttgaataaatgacgccttacaaaaaaaaaaa

SEQ ID NO: 89100 - DNA, 692 bp, Heterodera glycines
agaaagattgtttcaatttgacaatgacatcacaaaacgaaggagccgtcccggctgaagagaccaaaaagctggtcaaggagaaggacgaagccacggatggcttttacttccaacaaacgatgtaccgtatcagagacccacgcgtgtccattcccttctactgtaacgtgctcggaatgcggctgctcaagcaattggacttccctgagggaaaattctcgctctttttcatgggctacaaagatttggacgaaatcccttcggacgatgcggcccaaaagaaattcgccctctcaacccattcgaccatcgaactcactcacaattgggaacatggtacggacttcaagggctatcacaacggaaactcggaaccgcgtggattcggtcacattggcattgctgtgcccgacgtggactcggcttgcgcgcggtttgagcaattgggcgtaaagtttgtcaaaaaaccgaacgaggggcgcatgagaggcttggcattcatcacggacccggacggctattggattgagattttcaatccaaacaacatgtgaaaaacgaacccaaaagattgagaattggattttcccattggcgaagcaatcaatttcgaaaaatcacaatagagcctagacattatttatttttatttataatcgaataaatatttatgacttgaaaagaaaaaa

SEQ ID NO: 89101 - DNA, 630 bp, Heterodera glycines
aagcggccgctgaacgccactttctccgattggcttcagttattcctctccaaacggcgccctcggcacaaatgctattttaactttgcggcagcaacgggcgccaatcggagtcggacgatgcaccaaatgcaccaaagttgctacgcgggggtcgccgggcccaacggaggaccgctccgaccgtccgtctctctctccgttgtccacgagagcagtgcgctcggctcggacggcgaaagcatcgaagtgtcgccgtgtacgagcgatcagtcggcgggtggcggagacggaaatttgggggaggggcgacagacgacgaagacggaatacattccgaaggtcaaacttcgccaaaagccgaaccgacgctggagcgaacaagacatccaaaagcgactgtcacttcctccggacattcgtctgccccaaaatgtgatcgacaaattgaatagaacgccaactctggacaatccgttgacgcggaaaagcaaaagggcgtcgctgaacgaaatcggattcggcaaattggagacgtacaaaaaaatattcgatttgggcgagggaacgtacgcgacggtttatctgggcaagagtttgttgactggcaaaaacgtggcactgaaggaa

SEQ ID NO: 89102 - DNA, 651 bp, Heterodera glycines
gagggctatttattatcaggcatttgtctaaataatggacattcgacggcattttatgtgccaaaaattgttttgtttgccccttttaatgataatcacttcattttgtacacggtcatcaaatgctgaacttagtcaaaacaacaaaaaattgtcctggattattggcaaatggaggtccgaattttctggcaaagtgttttggcccagtattccaacaatgacttttggcgaagagcttattgttgcggaagcaccgctcgcgcgaacatcgggcgttcaatttttaaactggagtgcccgtgcctggtcccattcaaccaaagaccatttccatgacgaatggggctacatcacggtggagaacaacgggaatgcaacattgatgacagccgggaataatgggttcaccacgtacgaagtgggcgaagtgaaaagcaacaaaatggtgttgacattaaaggacattggacgcatttccttttcaagagatctcccggttgaggatcttcgcagaacattcattaaacatgacgacacttacatggaacaagtgctcgaaatgcgaaccgcaacacatccaagagttggatacatggagcacacgcgcgtcatttacacaaaaattacatgaaaatttggaagatttac

SEQ ID NO: 89103 - DNA, 524 bp, Heterodera glycines
  unsure (1)..(524): unsure at all n locations
ctttattctaaaactatttacctatacgtatattcctttgttttaaaaatcaaaactttaatctattcgtcagatgactgctttcaaagagttcgtcaatgggttaataaagactaagccggttgtgatcttctcgaaggagcattgtcctttttgtgtaaaggcgaaggatgccattaattcgttcaaactgaagccgggcgcacttgaaattgtcgagttaaaccagcgcaatgactgtgaccaaatccaagactttctcaaggagctcaccggtgcccgctcggttcctcgcgtgttcatcggtggaactttctttgggggcggagatgacacagtcgtagggcttaaaaatgggatgcttgagaagcaattgaaggcggcagatgctttgcaatgaaattacaatagaatagagaaatttgaaaagtctaattgttttagtcaagtcaaatgttatctttttgctttcttttaaattattaaatggctcaattcttcaaaaaaanaaaaaaccaaaaaaa

SEQ ID NO: 89104 - DNA, 719 bp, Heterodera glycines
gagcagtccaattcaactgcatcgcctcacattaaaataacggtcaatgaaacgggcaaacaaaaaagggacaatgagcagcacaatatggaggcggttgacgatgaatttgttaatcgtttattgaaattgtcttcgcgcttagacaatttaataaatgtttttggaaagaaatcttccattaaactgaaagaagatgagaataacaacaaaaaatttcattcgaattcgccgaatgttgtgcatgctttaattgggccaacaagttgtgccgtctttcccatccatgactatggagaagcttttcgcaagaaatactttggcgagattttgcagtgtaatttgcgttcctctgacagaattctctttgacattttgaagaaaattggcgacggacgaaaggtttctttcacttgcgacagttcgcgtgtcgcagaaaacagtcgagtgatagtcagactcaatttggaatcgaacgaaataagcattcttcaaaaggaccaaagcaaaatcgaaggtgaaattccggtttggaaattcatcggctctttggttggcacttattgtgcggatgatcaatcggttaatgagttgacggaccaatggcttgcgctggcctcgtctgtccgaattgatgaactttcaagacagatgagcgttcatttgggggcacacgatttcctcagctctcaacacgccatttgcttgcccgatttggt

SEQ ID NO: 89105 - DNA, 656 bp, Heterodera glycines
caaaattctgcacattggcaatttgatatgcaaattgttgacggatgtgctcccaccaacatcattaaagaataataatggaccacgacgacggcgacggcaagcgggcaaagcggacggcacattacgcagatgcacccgcagggagtaccgtatgctcagcgatgaccaacggacccgctttcataatgcactgttgcaactgaagcgtggctatggctcatatgaatacgaccgaatcacggcactccattccaatatcaatatgatgccatccgcgcacagtgggccaacatttccattatggcacagagaatacaataaacgcttagaaattgctctccgttctatcgacagttcggtgtgtgttccatattgggattcgaccttggaccagagattaccaaatccaagtcattcaattatgtggaccgaattattcatgggctcaacagacagcaacaattttgtgaacagcggatttctagcgaattggattacttcagatggcaaccgcgtttctcgaactatgggcgcggatggagggcagcttatcaatgaaacagaggccaataatgtgatgtcaattcaagaaatcaatcacatctttgcttttgcgggaggaagacccagtcaaaattgcgcaacaaatccgg

SEQ ID NO: 89106 - DNA, 567 bp, Heterodera glycines
ccaatgagcagattgatataaaaccgaaaattgaggtgcgcaaaagccacgaagagaagaaaaagaagcgacgccattactcatcggaagaagaggaagaggggacggaagaagaagaaaagaagccggaaccgatcgatcaggaacaattgctggtgaacatgcgtgaggagcacaatttgaagttcaagaccggcattctgattggtcttcgagcggacgaacacataaaaaaaatgtcagcgatggttggaggaggagaggaaaaaacttttgaggcttttctgaaaggactggatgagaaaaaacgaagaaaattaatgaaaaaaatcatgaagactgaagtgagcgatgactccgatatcgagaaggacaaaaaacagcgaaggaagcaaaagaaggaggaaaagcgcaaggcggacaaaaaacacaaacatcgcaggtcgtcgagtcgggagaccagcagaaagcggaaggaggggaagcaccaccgccactgaaaaagggaagcggactcattcttcggattgccaccatttgtataataaaatgtaatcgctttttttc

SEQ ID NO: 89107 - DNA, 891 bp, Heterodera glycines
  unsure (1)..(891): unsure at all n locations
ataaggggttacacatttccctttctcctctttcctctctgttgttatcacaacacaattccaattcgtcaacagcttcttcactcatcgacgagatgacttcttcaagatcgcgaacgcgtcgtgcgacttccaatactgcttcaactactgctactgctggccgtagacgcagccgttcaagacgccgtacacgtgcagaacaagtacgagaagcgactcgccgcgcgttacgtcagaacaacggcggcaacgcgaccaggacgaggaagaagcgcggggcagcgatgcgtcgtccgcccaagctcaaaccgctccgtggaaggccgaggggatcgcgcaaatcgagggcggcgccgcgcactgctggacaaaagcgtggccgtggacgtccgaggaccgtgaaaaaaggccgtgcccgacgggggaggagcgctgcccagcggcagacgacgacgactgcggatgcagccaccaacacggacgcgcactgggtaactattgcggagttgagggcggcgaccaacactgaggcgaccgctgctgcgactgctccgacgacgaccgcggatggagcggcggcgactaacaatgatccaaccggagcggcgactactccgacgacgaatgcggcgaccaatactgaggcgcccgctgcgactactccagcgacaaccgcggatgtggcgttggattagcatcatggcacaacaacagaagaaggataagaaattgacatttatccgattgatcatttgaattgtacatatgtatttcgttgatgtgtgtgtatcatgtatcaatcaatatctgatcacttaaattgtatgtattggtgatatgcgtgtggatataaactaatcaaagtcnnnnnanaaaaaaaaaaaaaaa

SEQ ID NO: 89108 - DNA, 1222 bp, Heterodera glycines
cgacggcagccaacaaagaagaggaggaacagttacacgaactgagcagcatttgcaagcaagtgatctccatttttaatgagcaaaacgggtcaaaaattggaaaagcaagtggagcgattttgagacaagccaattcaaataaatacgtactggaggctacgcccggtccttcatcatcttctgcaatttcttccgcactttttgaaacaaaatattgtacagcaatgtttctacaaaaattctctgttctttcgtttgagaaaatcttcacgaaggatgcctattattatcgaattaaactcagccaggaacagacttcgggcacggcgaatatgacattgagaagaattgcacgggaaattcaatcgctgcaatcgaatctcatgttgacagcgagcacaagtgcatttgtgcgatcttgtgaggaacatttggatgcaatgaaggttttgattaccggtccggagggaacgccttatcagaacggctgtttcgaattcgactttttcttcccatccacattcccgcaaacacctccgcaagttcatttgcgtaccacgggcaacaataccgtgcgattcaatccgaatttgtacaacgaaggcaaagtttgtctctcaattcttggaacttggcatggccgtcccgaagaacaatggaatgcggagaggtcttctgtgttgcaagtgatcatctccatccaatcgcttattttcgtcaacgatccgtattacaacgagcctggttacgaacgctatcacagcacacagcagggcgatttgtcatctcgccgttacaatgcaaccattcaagtggcgactgttcgatgggccatttttggagcagttgaaaaggccgccaacggagttcgagagtgctgtccagctccatttttggttgaagagagatgagatcactgcacaaataaagcgttgggctgatgaatggagaagccaggctaagcaggacaaacgattcgcgtcatcagccaacgaattggagaaattgttgaagcaagtgagcgaagaattggagaagcttaagaaattgaacctgcccgaatgaaacgcggccttgcgattgacatcttattgttagggcagaagcgaatatattctttcttttattggtttataataatcgcggaccttcttaccatttaatgggttttaccactgatctgaaatttggcaattgttttgttcttttgctgctataa

SEQ ID NO: 89109 - DNA, 2021 bp, Heterodera glycines
caagtttgaggctctaaactttccactattcaatttctcaaaatgctcgctgccaccggaagatggccctcgtcctcctccaattcgggcttgaggattgccatggcaatttgtgccattttggcatgttgttccttaccgaactcaacagaagcggcactggccgaggttggccaacagcccaagggcaacaacccgttgctgtacagtgtcgacgacccaattgttcacttggacgccgacacgtttgaggacactgtgctgcggcccaaccgggaccgggcgtacatcgtcgagttctacaaggactggtgcggttactgtcgccgctttgcgccctatttcaaagtgctttccgaatccatcaaatcgtggccatttgtccaagtggcggccattaactgcgccgacgcatacaatgtgaaaatttgcaaggccaacgacattcctacggtgccgaaattgaagtacttcccgcgcaatgcccggtcatttgaggaaggccaagtgattgaacattcgtacgaatcggcgatggaaatgcgcgagcaagtgcacaagaagatcatggaagagttcaatgccgaaacgggcaaaggcaatgccgatttctacctgcaaaaaatggaggcacaacgccaacacaacaatgagaacagtcaaccggagccgtggagggacatgccgaacagcacacagttcctggcccaactcttcgagaaggacgccaaggatggactgccgttctccctggatttgctgctgtacaagccaagcgtggaggtccgccaagtgctggtgggcagtgccgacgaagtgccacgcaatgtgccaaagccagcgaaaggcaaagcaacggaagcggcggccttcaaattgccttatgtgagggcgatggaacgcggcaaaacggagccaattctggcggagagcctcaatgatcagacattggccaagttgcgtgaattggtgaagccaatgatggtggagttgaacaagacggaacaagccaaggcacaccataaggaaccggtgcaggtggtggactgtgcgcaatccccggaaaagtgcaagcaaatgttctttgtcagcgagacggacatgctgaaggccatccatacggcacttttggacgaagtgatttcatcgggcggggacgaaattaacggggaccgattcgccgccctccggaaatttgtggaactgctcattcagcgattcccgaagaaaacatttgaacgaaacccgcaattgagtgcacatcccaaggggacggcactttcatccatcggaaagcctctgctgcgaagtcaacgggcgtttaaagtgtttgagcaaatgaaacgctttttggacgcaaaagcgggcgacggcaaagtgtccatggacgagtggagggcggagtttgatcaggcgaagaaacaaaatggcgacccgtttccggtcacagccgaatgggagcactgcaagggaacgcgcaccattttccgcggcttcacatgcggcctgtggaccgcttttcatgcaatgactgtgcaagcgtaccttggccaggagcagcaaccgctgaagccgttgaaagcaatccaaggctgggtggccaatttcttcagctgttccggctgtcgtcgccatttcatggcgatgaccacggagaaattcccaatggaggccaaaaatgtgaacaaaccggaagacgtggtgctgtacctgtggaaggcgcacaacattgtcaacaaacgactgcatggggacgaggcaacggaggacccgcagttcatcaaggaacagttcccgccgcagtatttgtgcccgggatgccataaaactccatcgtccgccagcgatggcaatgacccgacggagttggacccggagaagacactacggttcctgctacagtactccaccaacatcaaaccgcgaccgtagccacaccgtatgccccttctgttactgctgattcgtagatgataataaggatgatgatgattatggatgaaaatgaagcttacttgcca

SEQ ID NO: 89110 - DNA, 666 bp, Heterodera glycines
cagtccctccaaacgtccattttgctggagcagcagcaaaaagcgtttctgagcaacagtggcaccacccacaacaatttgggaactttattgaacagacttccttcattgaatggcgggtcaccggttgagacggcgttgcatcggaatggagcagtagttgcagaacaaccagtgctcggaaacaatcgtcaacagcaacaacagttgacgggcatcgaacggctgctgaacgtggcggcactgatccctcaactgcacccatttcagcaactgcagcgaacacagcagacgaccacagcgacgaaacatgagggaaacggcgggggaggaggcgcaaatgtgcggaaagtcatggaagagaattccgtccttttctggtcccaaatgcgttcaatgggtctgctggacgatttactgaacacgctgagcacgacattggagagactgaagcacatttatctgaacgggggaaacgcagtcagcgaagaattcgctgcccgccgtctttccggcgtcgctttagcgctcgacctttgcacattattcagcgacaaaattcacaaccgatgcattcaggcaactctcgaaacaaatttgatcaccaaggaattgttggagttgcaccgccaaacaaggaggagcacaagcggcaaagttgaaaaa

SEQ ID NO: 89111 - DNA, 875 bp, Heterodera glycines
gagacccgcaatacgagtgcatcgaattggagaacatttctgaacgtatgcagcaactctcggaccgccgaattcagtttttgctctacatcgacaaaaaattcgtcaaatcacacgcaattttgaaactcaacgagaagaagtatggtctgctgactcaacatgtcacattcgaagtggccagcaaagctcgtgctatgactctgtcgaatgtgctgaataaaatgaacatgaagcttttcggcttcaattacatgcctatgttcccgcaagcgtctaagagcaaattcaacatggatggaggtgatgtgcttgtgattggcgttgataccagtcgtcctccaaaggcaacgccgttcgaaaagttcatgcttcgcaagaaaggggttgagggactcatttctgaggatccgctgattgttggcatttgcgcaaactacctgaaaaacccttacaaattctgcggagattattacttccagccttgcacgcaggacgttttggagccaaatatgctgtcatacaaaatgagctggattttggacaaagttaagaagaaccgttcaaaaccaccatctacgattttcatcattcgcgatggtgttagtgagggaatggttccgaacaacattcacgacgaatttccttcctatgtgagggcgtgtaagaaatatgacccgacttgggagcccaaattcgtctattgcatcgtcgacaagaatcacaacaaacgtttcttcgttaaggggcagcaacaagtcgagaatactgctccaggggcggttattgattcgaaagtggtacgcgtcgacatccacgagttttggatgcagtcacatgttccgctcaaggggacatcaaaaatgccacaatac

SEQ ID NO: 89112 - DNA, 635 bp, Heterodera glycines
tcttctacgtcactttgccttctgttgttcgctgtgttttatttgattgatgcgcgaactcaatccgtcgcggtgaaaggacgtctgctgtgtggtacggcaccggcacgaaatgttcgggttaaactgtacgatgaagacgctggtgtcgacccggatgaccaacttgatgccggatattctgacccaaatggcaactttcaactttctggccatacctcagagctgacgaacatcgacgttgtttttaaggtctaccacgactgtgacgatgggattaagcccggctcgcgcaagttgaagttcaaaattccgaattcatatgtcacggacagtgcgacgccaaagaaaacgtttgacatcggtgtgctcaacttggagactgtgttcaaggacgaggaacgcgagctgatcgtgaccatgaagaagaagcggagaagccaccgttaccaagactttttggacattttgccatgaaaaagtttcgagaaaatgacaaattgccaagaaaattattttcaatttaaaaatggaagcggtatttaaaatggaaatattgattattaaagttaaaataaattgtaaccatttaattttacaaaattaattgtgacgttataaaaaaatataaaaat

SEQ ID NO: 89113 - DNA, 538 bp, Heterodera glycines
gaaaagactcaggaagctctttcaaagggtgactttcgcaccgcaattcaactgcagccaatgctcaaattcaacgggggcggccacatcaatcacagcatcttttggacagtgttggcaaaagatggcggcgagcccagcggcgatcttttgaagaccattgaacgcgacttcgcttcggtgcagaaaatgcaagagaaagttagcacgaaagctgtcggagtgcaaggctccggttggagttggcttggctacaacaaagagctgaagcgattgcaggtggccgcctgcatgaaccaagatccgctggaggagaccactggtctcattccactgttcggaatcgatgtgtgggagcatgcttattatttgcagtataagaatgtccgaccagactacataaaggcggtgtggacggtggtgaattggaagaacgtggaagagcgctttatgaacgcactgaacgaatagaacattttcagtcgattgtttccaaaataaacagcaaattttgttgctagtaaagatgaatgacttt

SEQ ID NO: 89114 - DNA, 830 bp, Heterodera glycines
gtttgagaaaaaaacaaattattcttgacaatgtctgccttctttgtcgtcgctcttcctgttatgcttgcagttttaactgaagcacaaaattttggcggccaaggaggagcgcttaatgcaccattgccatttggagggccaataaatcccggatttgtacaggaacagttgccacacatgcttcatcacccaaatttgaaaagcggcgaagacattgaagcagcatttcaaaacggaggaggacaagtggcgggagtacagcaccagcagtccaacaataatttgccgccaccgcctccgcaaaactttggcaacaacaatttcaaccagcagaagaggccaaagttcaacaatggccaattcagcggtgttcgaagagctcagccccatctgacccaacagcagcagcgtctgaatcaggcagaaactccgtgcccacaggcaacatggcaaaaaattatggaggacaacattaaagccaacgattcaacctccactctgaatgccattcagtcgggctttggcaaggcattcaaaaaccaaattttcatggtgttgtgcactacgacggaggagaagaaacgctttggacaaaaggtccaattggacatcaagggggacggctactgtaacgtggagcgggaggggcgtctcgtgccaagcggccaagctgagtgccgaaaatggcatcacattgaacggattgggcggatttggccaaggcatttcattggatggacgcaaatgattgtctaacattttaatcagtgatatccacaaattttcttacttttttacatattgcaataaattttgcctcttcaaaa

SEQ ID NO: 89115 - DNA, 681 bp, Heterodera glycines
  unsure (1)..(681): unsure at all n locations
caagtgaccagagggcaagtgtgcaatggaggagcccaaagtcagcagaaccaatttcgaattacggaaaaacctccagcgcatcaggcgccccaatgcgcgtcccagggatgcttcaacgaaaacatttgctgccagctgtggggtttggctggcgaatgtcgccgtaatccgacatggatgaactgtttctgcaaagtcagctgtggaaaatgcataccacaagactatgtgttcggcatcatgcactgactaccatccgcgatgttgggaatgggccgaggaaggcgaatgccgcaacaatgcatggatgtcggagaattgtaaacaaagctgtggcacatgtgtcagccaatatgaactcaaacagatgtgccgtcggggaggccgtggtaagcgtcagattagcatgctgttggaaggagctgctggttctccgcccggaggacattcagaagaccagaaagattcacttggaccgcccaaaactgctgcttcgggagcgaaagaatttatttcaggacaaaaataaatgccgtaaagtaacggaatgccaacataaaaaccacttaaatttgaattctgtttcccttctgacccaataccaaaatcaaataaatcaatcatcaaatgtttctatgtgttaaatatcgtttatgaataaataatttccgcatanna

SEQ ID NO: 89116 - DNA, 643 bp, Heterodera glycines
ccaagtttgagtaacaatgataaatttccgagtttcctttgctgctgcctcttttcgttttggctccggttgtcaatcaatcgtcaatcgcttcgctcattcgttgtcttctattgcttcttctgaacctgatgcgccctcaatgctgacacaaatcccgggcccgaagtcgaaggcactgaaagaagaaatggagcaagtccatcaaacaacgtccatcaatttcttcgcggactacgagcgttcctttggcaattatttgattgacgcggatggcaacgcactactagacttgttcactcaaatttcgtcattaccgctgggctacaaccatcctgaactgatcaaattggccactgatgcacgactaattaccaccgcggtgagtcggcctgccctcggtgcttttccgcgcagcgattttgcccagttggtcgcccgttcgcttcattcggttgcaccgcgcggacttcgccatgttcagacgatgctttgcggctcatcggccaacgaaaatgccatcaaaacggcctttattcattaccaaactcgtctaaggggtggcagtccgccgacagcgcaacatttgtccagttgcatgcgcaacgaggcgcccggcacgccacaactctcttgtcttggg

SEQ ID NO: 89117 - DNA, 647 bp, Heterodera glycines
gaaaagaaaatttgcctgacaatggaactcgaaatatttaaagacgcctgtggacaaacagcacttaaattggttggccgccacccgatcaccgtcaccgcttctgctgttccggaccttccaacgttcgaaacaattcgtgttagttttttcgatggttttgtcgccgcggttttcaccgaacgaaagaagcaattgtcccgcaatcgtattgaactggccattttctctcaaccgactgatgagtcgaagaatgccttcaaatctttgtggtctcttttcaattcgcaaattggcgcaatcacttctgtttgcaatgcttctgccgctgaccgtcgtaacgccaaaaacacgagcatctacaacctggacccgaatttcgacaccgttcccgactggcttgtggctccgaccttgcgtcgtgttgatggagtttttggcttagagaccatttacaagtggattcacaatgacgaaggaggcgacgttgtcaaaactttcaccatgcatcctccggaggaaggggtcaaaatccccgcaggggattttgaaagatttctgttgagttttttccgttttcgtggtgcaaaaactcccggttacaccgcaaagttcaaacatggtgttgttgacaaatatgttcgcga

SEQ ID NO: 89118 - DNA, 582 bp, Heterodera glycines
aaatgaaccaacagaaaagtgcgaagcgggcgacgcgcggacaacgccaaatttatgaagaaaacaagcagactttgttatgctatgtgctggccagcatttgctcttccgttttggtgttctctctcaattactttctttttctgccgcaaaagggcgcgtggattggactcgcgttaagctctgccagtcaagcattttctgtgattcttatgtctatgatgatgaaaaccgtgcggaatgagcgtaatctgctggtcgatgctgggttggacctcaacgatccgaatgcgtttggagagtactgcaaagacatcgtcattctgagtgtgtctgcacagcttctgagtctgatttggaccggcttcttcttcgtcctgctgtccattccctttttcacactttacaaactttggacgaacattctcggcccttggttcttcagaccgactcttgacgacgatgagaaagaggacaagaagaagcagaaaaaacccaaatttgtacatgtgagacgatgaccaattgctgttgttgtttttgtttcataaactcccttataaacaccgagaaaaaaaaaaa

SEQ ID NO: 89119 - DNA, 824 bp, Heterodera glycines
ctaaacaaatttcgaatttattttacacataaagaatattttataatcaaatcaaaatatttaaatttgtaaagaaaaacaaaacaaaaaattccttttaaatataaacattagcttttattttcttcaaatcccttcggttttacgtttcattcattcaaatttttcgtgcaattatggcacagtgccgaccgatcgattttcgaactggaacagatgcgaactgtcagttggatgagcaaatctttgctcagcaaattcagtgccgcctgattctcctcgcaaaactcgcgcattccgacgccgttcagacttttcagaatgaaattctttagcttttccaatcggtacatttcaaaacacaaaagccgttcgatcagactgatctccacgcaattgatcagatgcgcctcgcatcgggtgcgcaacgcatcgacttggaaacggtcggccaatttgagcattcccatcacattggcaggatttggcgatgccattttgggcgagattgcgtccagaaacgcgccgaactcctccccgttggtttcctccaggctcacttcgccctgtgccttctccaacatgtcgacggagaacattttgtggaagacgggcgacacggacatcagaaagtgcttggagacagtgaactgctcggggcccaccttcagcacaacttcgtcctccgagtcgcacggggggcacggattttcaatgatttgatgctccctcttctccaacaagcggatgagaacgttgaaaaagccatcggacggtgccgcgttggcagcgccggcgttgtgctgaagctgtacttgggcacc

SEQ ID NO: 89120 - DNA, 629 bp, Heterodera glycines
ggcaaatactcactcaacaagcacagtttgaagaagcaagaaaacaatacttggaaggaacgcgtcggagtcctcatagtattgcaatttggcttctgctgattcgcttggaagattcgcgtggtcggcacattaaagcgcggtcccaattggacattgcgaagaccaaaaattccaaatgtgaccaattgtggctggaagggatccgtatggaattgcgcgccgggcaaaaggaacttgcacagtcaatgcttgcacgggctctccaggagtgcgaacattcaggtcgtttatgggctgaagccattttcatggaacagcgacacgcgagaaaaacgaaaatagtagatgctttgaagaaatgcgagcacgacccgaatgtactgctggctggttccaagcttgtctgggcagaaaggaagactaagaaggcgcggagttggttccaacgaaccgtgaaggtcgatcccgactttggcgatgcgtgggcatacttttaccgcttcgaattgatgcatgggactcaggaagagcaggaagaagtgaaaaagcgatgtttacaatcggagccaaggcacggcgaattgtggcaagaagcatcgaaggatgtgaaaaattggcggaagaaa

SEQ ID NO: 89121 - DNA, 699 bp, Heterodera glycines
gtagttcgataattccccatttctggtttaaaacacccccccccccccaccttttcctttcgctttgtctcatcttacgcattttgcgcaatttgtcccacaccgaatcaactgatttatttgtcgtcttcgaatgggtttattataccatttctcaactcagcatcagcacctaattcacccactgctgtgatggaatgtgttcgtcaccttctccatcttttgctattactgaccttctctggccaattgttggtgacattggccgacctttacgatgactacgaacagtgcaaatcttctggccattttggggcagaggacggctcgccatctttggtgtgcgactcggagggacggttgacgccgcaggcgctggcccaactgaatggaattctgacggatatggggagagacgcggggtgccaatgtgcagatggatgtgacgggaaaccattttctgtccgattgttggtgaccagcggcgaacgtgtcgaacaatcgggtggcacaacggcactgaatgaaacggccgggcgaatttgggaaagcgaagggatgggcacggagcagtgcgataacggaatgctaatgctgtacattcgggaccagaaaagaatggtcactttccaaggccatcgacggctccaaatttacagcgaccgcgacattgacaatttgcacgaattgacttctcgg

SEQ ID NO: 89122 - DNA, 671 bp, Heterodera glycines
gtctttggcactctctcccctttcgttttttctcaaaaccgctgaatttgccaatgccaaatggccaattcttcactttcgcgtccctttggcctttgcctttgttcattgcttctcttcatttgcgcatttcctccaattagtacacaacgtgtcaacgtaacgctgttcaccgagtcccaatgccccttctgcacgcgactgcttcgagaacagatttggcaattccattcccgattccccggcattatgaatctgcaggtgattcccttcggcaaaggcaactgcgaattcacgcgcgaccggcggatcatttgcaaatgtatgcacgggcccaccgaatgcgacctgaaccgactgcagaactgtgccatatcgtatttcccacgacggcatattggcttggtgacgtgcattcaaggactgaagaatttggacgaagcctaccggcggtgtctgtcgcggctttcgccccgcacgcaattccgactaaagcaatgcgcggaaacgcaaaccggggaggtgctcaattacgtcagcatgctgaacacgcacagggccggcgttcgaatttggcccaccgcttatgtaaacggacacttttttgatcggagttatccgatggagaccaaaatatgcgaacacacggcatggtgctgaccggcaacttc

SEQ ID NO: 89123 - DNA, 631 bp, Heterodera glycines
ccagcacaatgccaaagacatttggtccgaagtcagtcagctgaagggaatgcctctgctggtcgccggaaaccgtactgcgcgtagcgcatacggtagctgccaagagtgttgctccggcggtgcccaaggccaacccggccaacccggacagcctggacgacccgcctccatgcaccccgtgccctggcggtcagcccggtaacaatggcccacctggacccccgggagcgccaggagcacccggccagcccggcaccggaggaggacagccgcaacccggagagcccggcccacctggacccaatggccagcccggacaacccggacagcccggagcccctggacagcccggcgcggccggacagcccggcccgaagggacctcccggaggcccaggacagccaggcaatggcggagccccaggccagcccggccaacccggacagcctggaaaccccggagagcgcggaatctgtcccaaatactgtgccgtggacggcggagtgttcttcgaggacggcacaccaagacgttaagaaaaccgattctgatcagtggaagaagaaaaagcagaaaaacagcagcgattgccctcccctcccccggtgcccttctccgtccccatttc

SEQ ID NO: 89124 - DNA, 661 bp, Heterodera glycines
cttaaactttgcttgacaattattttggttaccatcggatacaaatcattttcgttgtctgagcatatttcagaattttccgaatgcggcatttccgactttgaacccgaatttcccattgcaccaaaagtggaaattggcacaaatcatatattcaaaggaaaaacaattgtggatgacaaatcattgccgtggatggcaagaattttaagtggagtctcttgcactgcgacaatcatcgggccccgacatgtgttgacagcggcgcattgtgttgaaggccaagcacttgaaaacttcgttgtgtcatatggaagcgccgatgcttcaaatcaacaacataaatccggcgttgaagcaattaaatatcatccaaaaacacaacattatgaaattaaggataaatttcgaaagaatacaagagcatacttatttttgaatgacattggcgtaattaaaattaaaaactcaatcaagttgtcacaaaatgcccgaccaatttgttttgcatggcttccatctaacaaattcaacaaaatctgatggaaaaagcattaaatatgatgaatattcaaaatttattaacaacactcaatgtgttgttgctggttggggtataaccaaaccgacgtgctctaatgatgatgataaaccactaagt

SEQ ID NO: 89125 - DNA, 655 bp, Heterodera glycines
gttgctcctcgtcctctgtccttttgctcgcgcgctctggcccccacactctcaaccacaccccccaccatccaccatgtcggacgaaatttctgcccttgtgattgacaacggttcgggtatgtgcaaggccggtttcgccggtgacgatgctccccgctcggtcttcccttccattgttggtcgcccccgccaccacaatgtcatggccggcatgggccaaaaggactcgtacgttggtgacgaggcccaatccaagcgtggtatcctcacgctcaagtaccccattgagcacggtatcgtcaacaactgggacgatatggagaagatctggcatcacactttctacaacgagctccgtgttgcgcccgaggagcaccccgtcctcttgaccgaggccccgctcaaccccaaggtgaaccgtgaaaagatgacgcaaatcatgttcgagacgttcaacacgcccgccttctacgtgcaaatccaggccgtgctctcgctctacgcctcgggtcgtaccacgggtattgtgctcgattccggtgacggtggcacgcacaccgtgcccatttacgaaagttatgccctgccccacgccatccagcgtttggacttggccggtcgcgacttgacgcaccacctgcaaaccattctc

SEQ ID NO: 89126 - DNA, 635 bp, Heterodera glycines
aaaatggatcatgggccagcgatgaagcaaagtaccctcacttttacgaaccgattcgaaaaacagaaagtgtacggacgtgatggcactcttttctttgccccgtcagttggcactttttaaacgaacggaaacgattgtttgtgatggcactttcaaaatggcaccgcgaggcatttatcaaatttaccgagtatttggatttattgcacaaacgcattgtgttccattggcaacagctttgttacgtggaaaatcaagagtgctttatgatcaattttggacaagattgcggcaggaattggacaaaattcccggcattttaatgatttcccaagcgaattttgactacgaatctgcgtcagtgaatgcattttgcgatgtttttccaactgtcagaccaaaaatgtgcgcgtttcatgtgaagcaagcgataaatcgccgaattcaatcaatgggatttatgcaattgtacagctcaaaagaaccaaatggacttgagtttcagcgccttcccgttcgcttcaactcacgcgccatctcatcacacgctcccccattggaaactttacaacagggcgcattgagtgaacttctcgattactgcaacaacacatggatcaacaacagaatag

SEQ ID NO: 89127 - DNA, 652 bp, Heterodera glycines
agcaaatgtccattaaaaattatgaattgcgattaagcaaaaatgcagatgagcagtcggaagcattttattgttatttgaagtcagtgattgaagaacggagcaaatgtaggcaaactgtcattatcggattttcaggtggttcgatgcctgcctttttggctcaacagctcgtccgtctctccgaccaaaccatcgcaggtcttcgcctttttccggtagacgaacggcacgtctcagtgaacagcgaggaaagcaacgcgggaacactgcttcgcctgttaccggacaaattccgagaaaatgtgctctcgattcaaccagatgacagtggccttctcactgcccagcgatttgagcaacaattgcgcgtgttgagtcctcagttagacgtgaatgggtggccggtgttcgacttgttgctgctcggccttggtcccgatggacacacatgctcactgtttcctggacacccactgcttaaggaagagtccgtttgggtcgcgcccattgacgactcaccaaaacctccgcctcgacgcatcacaattacaattcccctgttaaacgccgccgcaaatttagccttcatcgccaacggggcatcaaaggctgctgttttaaagaaaatcttgtggataatgataaaaca

SEQ ID NO: 89128 - DNA, 699 bp, Heterodera glycines
tttgagttgaactgctttactaaattttaatattaaatgcaggacgactggcggagtttgacctacgaagaggcaaatgcgacactcaaaaagtggcgggaagagcacgcgcgacgctcggaagaagtcgtggaaatttgggagtttgtgcttagtcggtacgccgctgcgcttaagggcgaattgtgggcggtgttggaacaggtgaccatcgccgcgctcgaccaggcaagacatgacttggccattgaatgcctgcagcaattgcatcgccgttttccgaagagtacccgcgtaacaaagcttcaagcaatgcgtttggaagccattggcaattacgaagacgcggaagagctttaccgtcgcctgatcgaaggggacgacacgaatccgcttttccgcaagcgttgcattgccattctgatcgcgcgcggtgatcgccagttggccatccgcgaactgaacaaatatttggagattttcgccaacgactccgaggcgtggctgcagcagggcgaactgttccttcaggaggccgactttggccgggctgcgttttgtttcgaggaattgcttctttcaaatccccaaaatcccacttatttgctcaaaatggctgaaattcgctacactttgggtgggaccgacaatgtcgaggatgcacgtgcctattacgagcggtcgctcgccctcgcgcca

SEQ ID NO: 89129 - DNA, 656 bp, Heterodera glycines
agaattcatttgaacacacacagtcatacgctagtaattacaaatggctgaagatgaggtagatgatcttcttgaagaagcattcaaaaatgttgacgaggcagagaaaaatgggacaaagatggatgatgttatcaagaaaaaggcgaaggaagttggaatcaaaatgagtgacagtgaaggcaaacgtaaacgtagcagaagcggaagcagggagagaaagcgcagacgaagtcgcagtcgcgagaagaagaagagggattcgtcgcgagagcgaaggcggcgttctccgtcagagaacagcaaaagaaaacgtcggtctagatcttgacgtctgatcatattctcctttgtttgttgatgaagacgaagaacggcgtggaacgtgcgttaaagcagaaactcattcctctcatattccacaacctttcttttctttcgttcataaattcgttcgcgccatgccttcattaccctcccataaatttattaatttgctttccaggcacacagacacattgatttaatttttaagttctcgtgatcgtcgccgctctcgttctaggtctcgcgatcggcgtcgttctccaatctcacgtcggcgctcccgttcccgatcacctcttgagaaacgtcgttcgcctgccccgcgtcgt

SEQ ID NO: 89130 - DNA, 636 bp, Heterodera glycines
gactttttgggcgggtgattttagggcgatcgaatcgatggtaagacagtcgaatgggtgacggagaagaaatttggcgggacggttaaatttgatgccgagattgaggcgggcattttcaggtttgaccagtgtgaagaccatcattgtggggttggcacgcaacaaaagcggaatctaacggacaaatggacaaaatgcacaatttgtcatccatcgcaaaagcacctgtgcccctggcattatcctttgggaacagccattttcacgaagacgcaaatccacggccgaagtccatccagcaatcctaacaaacaaagttttgaaaatggtaaatttaagaaaaaaagacggggaacaatgtaatgataaattaatggatatatgaaaagtaattatgattcagcaatgcaaaatgagtagagtcacaaatgcgattgaattaataaagttcactaaaaccgaactaatcttaacgcatttacattccttcgcatgagtttcagaatattaaagttaaaaacagaccaaactttgtcgaacagttcaacaaatgcaatgtgttctgtcagcagagtgaagctgaagaaaaggcgtcgcgaccgattgagcgcgtcacggaaaatgcgttcgtgc

SEQ ID NO: 89131 - DNA, 535 bp, Heterodera glycines
aagcaaagcgggcaatttggccaaaggggtggacagactgttgaaagccattgacaaggcacacaaaaagctttgtattcgggaaaaattatgcgacgaattcattgaaaacggacgcaaattaacgcgggaatatttgagaaaaagtgccaaagaagaaagtgccgaaatgctcgaagtgttcgaatttgtgccgattgatcatcatggcaatttcgactattctctaatggccaatttgtctttgccccgaacttcgatcgattcgtccgccggcggggcattttcaccaaataataatccttcaatatcgaacatcgccatcaactttttggccgattaccgtccctttgcctacggtgtcccaattacgcgtgattcgccgtcagccaccgtgatttcacgatgcaaatcgccattctgtaaaatgtccgctgatgatgagcgacgactttcacttcggtgccgatgtctccgcttggcttggacataattcggtctttcgtagagagccttcgaggcaaagaatggcaga

SEQ ID NO: 89132 - DNA, 638 bp, Heterodera glycines
gaaggctttgttgatgaacatcatcagcagcagcacattagcactagtgttcatgccaatatgcaggaagacggagctgaagttttgcaccacgaggacacttcgccaacccacaaaaaccacgagacagcgacgggcggagagaagggcggaggccaaggccaacaacacggggacggctcttttggggacataatggtctaccaggcgattcacaccattgaatttgcgctcggctgcatctcgcacacggcttcctatctccgtctttgggccctgtccttggcacatgcgcaattgtccgacgtcctttggtcaatggtgctccgcaatggattcgtccaaagcggttacctcggcgccgtcatcacttatctgatcttcattgtgttcggcacactcactctgtccatcctcgtgcttatggaaggactgtccgcctttttgcacgcgcttcgtctccattgggtcgagttccaaagcaaattctacggtggaatgggccaccctttcgtgccgttttcgttcgagaaaattcttgaggagtcccgtcaaagtgaagacagttgattgatgctctgacttatcaccgctttaccagtggcaatttgcttccattcccttccccctccctccta

SEQ ID NO: 89133 - DNA, 647 bp, Heterodera glycines
  unsure (1)..(647): unsure at all n locations
ccaaaatggttaaattttggttgacattatttttcgtttttaccggcaacaatttgtattcaatttttgcgcacaaaccaaacttttctcagtgtggcatttccgactttgagcccgacttggacaatgtgccaaatgtgaaaatcggcacaaaccatatatataaaggacaaccagtggaaaatgccaattcaatgccatggatggtcactttgctttcattacaaggattatgcactggaacaatcatcagccacaaatacattttaacagcttatcattgcgtttccggcataatttctgtcccaagttcaatccaaatttcttatggaacagtcaatgttgctaatgaaaagcataaaacaaatgcacgcaatattataatccatccaaatgcttctctctcggaaatgcgtgtcaaaataaatggaagcgaatttggaacagattctgtttcaaatgatttagcaataatcgaagttgaaaatgcacttaaattttcaccaaatgttgggccaatttgtttgttcggcctcgatgcatccggaaacgacaaatttggcacattttcaccattaattaattcccaatttattanttgctggttggggcttaactcagccaatgtgccaaaaatatccaactcc

SEQ ID NO: 89134 - DNA, 927 bp, Heterodera glycines
ccgttctctccgtgctgctccaccacactcgccatcacttgtccaccgtcaccattctgttcattttcaacattctcttctcaaatgtcctttttttggcctcctttttgtgtttgtattcggacattgccttggacacaaaatacactcgcccaatcgcaaattccaacgaagaagctgaggaagactcagccgacgcatcggccgaagacgaagacacaacgacgccgcaacttttcatagccgaaatactgcaaatccatctgtacaagccgtccgaattcctcaagaatctgatccaggaaacgcttctttcgttggctcagaatggctcactgctcggactcaccaatttgcttgtgcttgttttggtggtcatcaatcgttcgatgagtggcaaaggcattcgcatttcacgtgccaaagtgattgctgtgttcgccggcgtttggctgttcctcgtcgtcagtcacgtgcttttctccgcacttcagtacttcgctgtctcgcagctgcacgaactgttggagttgaccagcagcaaccccagccaatttgcatgtcgacgaagtgccactttcatggtgtacaatgaaatcggagagcgctgcgatcggttggccgtttaccaagagttgggccactttctgctcaaaggtcacactctgttcaccgttgtgctgctgtccatttctttggtcattttcgtaatcactgtgtattgccatcgccgcgtccaaaggcaacaccattttctgaatgaaaatgcgacaaatggcaaaaatgccggcggaaggagcgacggggggacggacagtgaggcgggcggaagcactgtgaggagaagacgtgactcgagcccattccgccggcgtgaaacgctcttccaaactctcgtcctttcgctcattgctttcttcctgtcgc

SEQ ID NO: 89135 - DNA, 836 bp, Heterodera glycines
cttcttttgcacgggagcagacggcgtaaattcggacaatgagcggcttctccgagggcactttccatcgcaattccacgccgaataacacattggccacgactgcggtgccggcaaattataaaatgtcgatgatcaatgatcggaatttgtttggcaacactttgctgtccatcagtccgttgcacgacgaccaaagcaagagcgggcgattggtgcctttgctgatgcgccatcaaaaggaggccaagtcgatcaaccaacagcaggcttttctcggtcgttccacgtccgtgcgcgacagggccgcccaactgcgcaagcccatcgacttggacgaggtggccatcgacgcggcgcccttccaattggtcatcggcacttcgctgtaccgagttcacacacttttcgcgttgctcggcctcaaccacgcttatgtcaccaacagaggccgtctcgtaggcgtcgtcgcattgcgcgagctccgtgccgccctcgcccacatttacacccgcggcgctttgccgaccgcccagtcgatgtcgcgacttcggctgaacagcttaaactttggcctctgttcaactgatcgaagccgcgcgaacagcggcgtagaaggaaacagcgacaatctgaacggaagttcgctgaggacagccatgtcgccaacttcgctcagcggcccattgacacaaagcacgacagtgacaggcgaagaaacatcggatgggacccttcaaaatttatttttgaccgatgaaacgcaacgcattctgtcacttgacgacactttgccaaagtttctgatcacctgccctttgcgttcttatccttct

SEQ ID NO: 89136 - DNA, 451 bp, Heterodera glycines
cacaaaccgacgagggttagcgtcaaagtgatggacgaacgatatttggcgcagaacataaaaattgcacaccaacgactcgctgccattttgttgaagcaaaaggttgacgaggcgacacgccggcacgagtcccatcgaaaattgcgggttggcacgatggaacgggcggagaaaattcggacatacaattaccgggacaatcgcataacggaccatcggctcaaagtgacagtacacggggttggacaattcttggacggtggccaaatgcttgaacaaatggtggacgcactgatcgaaatgtacgaacaggaaagtgtggagcaaacgggggaacagccgaagaatgaggaggaagaaacgggcaaaaaagtttaatgttaaattttttttttgtccaataaagcatcatatttttaaaaaaaaaaaaaaaaaaaaaaaaaaaaaa

SEQ ID NO: 89137 - DNA, 676 bp, Heterodera glycines
gtttactttttctcaaaaacccgagaaacgcccaaaaaaggatgacacaaatgagaacaatgacacatttgagcaaaatacgcaatcgaactcattcgttggggctgcaatttccgctctccaattatcagctaaagacgtggacacgacctttcagggcatcgttgagcagacggtgttcagagggtcagccgatggcaacccatttgcaattcgcgaatgcacgggctctctgcttgtactgcttggccacgctgccaccatcacaattgacaagtgcagcaattgtgtgatcatttgcggcccgtgcagaggcagcatttttatgcgcaactgtgccaattgccttcttctcgctgcttgccaccaatttcgtctgcaaaattcgcgcgacattgaggcgcacttacactgcagcacaaacccaacaattgaagactcggatttgattgtggccccgttgctgatgagatacgacggcttcaaagaggacatggaatccgccagactggacaacgcgccgaatttgtgggacaaagtgcagaatttcaccgcggaaacgggccaattccaacggatgaatttcgacccctttgccaacggtgccattaacagcgaagtggtcagtgatgaactgctggagaagctgagcacggtcatggaggagcccgaggcg

SEQ ID NO: 89138 - DNA, 603 bp, Heterodera glycines
ttctcattcaaaagtgcatttcggcagaataaaaaaccttgaaaatgttggggatgatgaactgtcaaacggagaattacgagttctacgcatcgccgccctcctcgtcggctccccaatttcgtagccatcagcaaccggatgatgagctgttcaacaaccgcaaacagaagaagccacagattacttacacagattgtcgccgtttaattgacggcaaaatgggagaaacatcgtcggcaagagccgacaaaactgtggaaccgagtcattgtggacaatttgactgcgcgacggatgagacgcgagcaaagcaataggaaagaggaggaaaaagcgacggaagaaagagacgaacggcacaaagatgaggaggagggggaggaggaagaaaagcagagggaaggagaggaaaagcagggagaggaaatggaagaagcaatgggcacgagtcggaaacaaagtgagaaaagagatatttgccaaatttattaattaatatttagcaaccaatttgtgtttgtttgttcagagcacaaacgatcattctccggcattctgtcaaaacttatgccgagaaaaaagtcctactaacaaaaaaaa

SEQ ID NO: 89139 - DNA, 650 bp, Heterodera glycines
agctctaattcgattcaaaggtttgcaaaatcctaatttacccaatctacattaatttctcattttcttacgaatgaccgaagaatctgtaatcctcagtttttcctgactaaatttgccacttgaatgttctgatggctgccgagtggtaattacagcgcgatcggataatgacgcaaattttgttgagattggccaaacacaaacacggaatggcattaacccgaaattcgaggcacgggtttcgttgcttctgcggttggacaaatgccaacagttgcgcattgttttgtactccgtcgatgttcagtctggtcttctgcggacactgctcgccgacgcgcatgttttgctgctggcattgctttgtgccggttctaagccggtcgctgtgccgctggcacttcactaactacaaaaagccccacaccaacagtcgttggtgctggccgaagccgtgcagcaggaggaggcgagcggaaccgccggcggaacgcttttccaatttgtcggccacaatttggaaacgcccggactgctcaccgccccttattttgtgttggaattggtgccaaaaagcgaaactgacgagcgaatgccaattttgctctatcgcagtgaagtggcgcaccaaaacgcaaatccccgct

SEQ ID NO: 89140 - DNA, 968 bp, Heterodera glycines
gacacaacggaaaggacggagcccccgggagggacgcgcagtccatcccagcacctcttgaagagccatgcatcatttgcccgcccgggcccgccggtccccaaggacccgccggaccgaaaggacccccgggaccgaagggaagcccaggagagccgcccaaagacggagtaccgggagagcagggaatgcagggtctgcccggtcctgtcggacgcccaggccgcgaggggccgcgtggagcccccggacagcccggacgactcattcccgtccctggaccgcaaggaccgcctgggccttctggacctcccggagaacaaggaccgaagggtcagcccgggcccgacggacaatctttcgaaggtcctcccggaccccctggagatgctggtcgacctggtcgagaagggcgtcccggaggaactggaccttccggaccccccggccaagacggcgagaagggcagctgcgaccactgtccggagccgcgcactccgccaggatatttcgtcgaggcgggcaaaagtggcggacattaccactgaggaccatctccatggagtgtctcttcttcttcccgaacttctccaatttcttctactgctttgtcttcttccccttcaccctctcccccaaggcatacaaaatcggttcagtctgtcgttctcatcgtttctcgaggccatttctctctgaccctctcgctctcattctctcttcttctctgaccccctcatgtgtctctctgttccttcctctctcacgtgtgccccccccccccccactattttgtccgtcttcgccttctctctgtgttatgctgctctctctctctcttttctttatgattgcccgtgccgttgttcgtctccatggattgtcgtgccccttttgtgcgtgttcgtccgtcgtcgtcgtcgtctctgccgtggtgtcccacaaatcgccgtcatatccttgggcca

SEQ ID NO: 89141 - DNA, 656 bp, Heterodera glycines
gtcagccttgggcagcgttcccatcgtttcgacgtgcgctccgtttgcattgcttcggattcctctttttttgtcactggttctcacgactgcgctttggtgtgggactctgagacactctctcccgtcaacaaattaacggaggacgggctttcccaaatcagtgcttcaatcgtcgttttcggtgacaaacaaattgtcttgggcactcgaactggcgcattgtttctgttcgatttgcttagttgcgaattgctcgcgatggacgacaaagcgcacgaatcggcaatttccgaaatttgtgcctttcccgaaaaagatggattcatttcttgcggtaatgataaacaagcacgcttctggcattatgaatggctttctgaactcgatggaagcaaacatttatcgatgcgttctgtgcggcggttggaacttaacgacgaggcattgtgtgcagcactttcacccaatggcaaattcgttgccttcggaatgttggacaccaccgctcgtgttttcttcagagacagtctcaaattttttgtttctctttacggccattccctgccaatttattgcattgacatttcagcggacagtaaattggtggtgaccgggtcggctgataaatcggtaaaaatttggggcctcgactt

SEQ ID NO: 89142 - DNA, 584 bp, Heterodera glycines
tcaatcagttgtacaaagggcaaagggtgctaattgcagcaaaaaatgaacagacgttggatttgtggtgacgtgtggatggacattctgccatcttttgaccgtcctcaactcggcctcaaaatggcattgctttccgaccgtttcgatgttttggtggacaaacatttcgacagaaaaagcgaattgacaatttggagacgtatcagaattgacaaggacaaaggaccaaaagcgaaactgtctgttctgatcgatgacaaatgcgtggcatttccattgccggaccattcgctgcccatcaaaattcgctttaaggagcttcagattgattacattggccattccgtgatcacatttttgagttccaaccagcaaatttgggacagaaaaggcaccaatttggatttgtttatattcgcgacagatcacaacaatattcagtcgatctgggatgttttggcccgagaaatttggcccatttttgcgacaaacattcgccatttggcctttcgcaatggcgatcatttggacaatttgcgcagttacacttcaccaaaaattctcactgatcttgatcaatt

SEQ ID NO: 89143 - DNA, 645 bp, Heterodera glycines
gtttgagccatttaattcactcaaaaataacttataaaatgatttcacgacttttcctccaaccgaacaaccttccgtctattcgatatttggcaacttctgcgttttccaaagctcgctatggtttccggccttccggtggagcaggacaatatgcatttcgctttaaagaagcttttgctgcgcgtcaggttgcgccgactcttcgtgaacgccttctcggccctaccactggcaaaccatttatcgtcggaacttacgcacttgccggggcttcagtttttggcattggaatgttgtgctactacggacttaccacgactgtcgacagcgctgctgttcgttccaatttatggcctgattatgttcgtcagagacttcagtcgacctacgcttatttggctggtagccttgccttgactgcgggtgctggagtggctgctgcccgtagtcctggaattttggctcttaccagcgctccatcacttctggtttggtttggttctctcgctgctattattggttctggtatcgttgttcaaaaaatcgactaccatggcaactcggctgccaaacatttggcttggttggctcattgtggcattcttggtgcagttttggctcccctttgttttgttggtggac

SEQ ID NO: 89144 - DNA, 651 bp, Heterodera glycines
tttcattggctgaccgaccatttccacttccatttgctgtttcggcacttccttttcactcctttttgctgcaactcaccagtaatgagcagcagccatcgcgagaccggcagaagtccaagaagtgtgctgatgcgccagtacgaaatgctgctgcaaaactcgaacgacaacagcggattccgtgcctggttcgacaataacaatctcttcaaatggcgcattctaatcgacgggccgccgggaacgccttacgcgggatgcaaactcacggcactgctccatttcccggcttcgtactcaaatgatccaccgacaatgaccttcctcaccgacattcttcatccgaacattgaccagagtggcaaagtctgcatcagcattcttcatgcgccgggcattgatccgcttggccatgagcagccgtccgagcgttggaatcccaaccgttccgtggagtccattttggtgtcgatccaagtgctgctggcagagccgaatttcaacagtcctgccaatgtggatgctgccattttgttccgcaacgatccggcacaatacaggaaggaagtgcgacggcgcgtggagagggcatcagcatcgacaccgcgagcgaggtcgtcatcaacaccaccgccggtagcgcagccg

SEQ ID NO: 89145 - DNA, 646 bp, Heterodera glycines
caagtttgaggagagtgtttggcaaattggtagtgccttccgcaccattgggccgtcgtcgttttttgcatattttgggcatcgagtcgagttgtgacgacgccgccgttgccattgtcaattgggaggaacggcgagtgttggcggacagacgaagtgcggacaatgacagtttgcttcgcttaggcggcgtttcaccttacgtttccgcaagcatcgttctatgattggtcctctcattgagaatgctttgtccgattctgacctccgttcctctgacattgacgcggtgtccgtttccaattgtcctggcctcgtttattgtctaaaagttggtgttgagcatgcgcttgcttttgccaggtgttggaaagaattaatgaccaaccgtgcccaattaatcaattggctaattagtcctaattgacttagctaattgcctctctcccccttttgccttttcgatgctttcgtcgtcccctgattcccgtccaccatttgcgtgcccactctttggtcgctcgtctgctccatccccacctctcttttccctttctcactctcattgcctccggcgcccattgcctcatttgcaccgttcacagtcctaacgaattttatgttttggctgactctgctggcggaa

SEQ ID NO: 89146 - DNA, 631 bp, Heterodera glycines
gactcgtgtttaagccaaacgcacaaatgggccgaccatttttaccattggcattttctttggttttgctgctgctggcggtggtgatcagcaccaattgcgcaaatgcttctccgatcgttggagaggaacagcccatggcaccggaacaaaaagcgacaaaaggcaccaacgacggacaaatgggcgacgacaatcggaccaatcggcgcaataacatggctgctgctcagcatcaacagcagaaccgcaacgccacatccttggtggcacttggctggttgggcttgcgtagcggcgcgagcagcgtcaacgcggtcaacgtggcgtcatgttacgacagccgactgtccagcttcataaacgacggcctccgctattattcgcataacatgggccaactgtctaaatacatcattgaccagattaagcgtgtccgatactcgggctattggtttgtgcatgcggcaatgatcggcggacaaacacagggactccaatggcagtcgcaatcgaacggggacatttttgcgcagacgagtcggcacggatgctattaccacgacacacagacatacatcataatcatccgatactgagaaagaaaagaaaggaaagtaatgttatgcga

SEQ ID NO: 89147 - DNA, 1219 bp, Heterodera glycines
caagtttgaggttcccttttctgctgctgtcgcatttccttatagaaagtggaaggatcgatgcttttcgcttattcatttcatcgattttctgctcatcccttcccatcataaacaacaattgcctttggccatttgcttgtggccattacagccaaatcgcaaggacatttcgacgaacgacagaatgccgaaaaacgatcggtccgctcatccgccccattcgcagtcggcgcccgcggaggataacacggaaattgactgtgtggaccgaggcattcacaacttcggacagctccgtttgaattttgagaacagtcgggtgacgaggttgactctcagccacaacaaattgacttcgatccctgcaaatatttctgatctggtcaatctcgaacagctcaacctgtggaacaaccacatagaggaattgccagtgacaatttccgcacttccaaacctcaaattgctcaatgtcgggatgaaccgtctttacaaactcccccgcggcttcggctccttcgcaaaattggaattgctcgacttaacgtacaacaatttacgcgagcaaagtcttcctggaaattttttcttcatgccaacgcttcgggcactttatttgggggacaatgactttgagtcgttcccggaggatattggccatttgaccaatctccaagtgttggtactgcgtgaaaatgatctcattgatttgccacgacaaatgggcacattgcaaaagctgaaagagctgcatattcagggaaatcggcttcaagtgattccgcccgaactgggccaacttgatctgattgacccgaacgacgaaaatgccaaaacacttcgagtggaaaacaacccgtggatcgtgccattgaaagatgcgctcactcgcggtgcccaaggcggcgattggcaaagcggcgttgagtctttttggaattacattcgcagtgacaattaccgtcggttgtacgaaagtcatccggtgggcgtggggtcgccaccaccgaagcgaaacaaagagaagaaagtcagccgagtgaagggaagcgccgcgggcggagcggcggagggctctcgaggacaaagtcgagaacggacggagtgaataaaagtgggagagaaagcgaccgaagggaggagaaacgaccaaacaccaaacgaaaacagcaattcatattgtgcacagtttagggacaaatacagtcattttgtt

SEQ ID NO: 89148 - DNA, 368 bp, Heterodera glycines
ccaaatttcacactgaaaatgtcttcttcgtccaccatttttgttgttctgctggtaattgccatctgctgctgttcattaacaattgccatgccagcagcggtcaatgaaattgatagtgttccacttcggcaaaagcgtggctatggctatggtggctacggctatggtggctatggctacggcggtggaatgggcggcggcggatttggcggtggaatgggcggcggaatgggcatgggcggcggaatgggcatgggcatgggcagcggaatgggcatgggatttggacgctgatccgtgaaattaattgcaccaataatcggattgtcaataaaaagataatggaataaaaataataataaaaa

SEQ ID NO: 89149 - DNA, 1707 bp, Heterodera glycines
ttgagattggtttttttttaattgaatcaacaaaatgtctaccgaccgatatgatattgtgttgtacggtgcttcaggctttactggccaacatgttcttgaatcattcgtaaagaatggtcatttggaccaatttaatttcgccgtcgcgggaagaagtgagaaaaaactcaaacaaacactcgaagacatcgaattcatcactgggaaagttttgaccaaaattccaattatcatcgccgattcgtccgatgctcagcagctcgcagaaatggccaaacaagccaaagttattgtcaatgttgttggaccataccggttgtatggtgaagcggtggtaaaagctgcggttgaaaatggtgcaagtcacgtcgacatttccggcgaaccagcctggattgaagcgatgcaaatgaaatattcggagaaggcaaaagagcagggcgttttcattgtcagtgcctgcgggtgggactctgtaccgtgcgacttgggaatgaattatttgaagcagtacttcaaaggcactctttcgcatgccgaaacatttgctcatattcaaatcggggaagcgggctattccttcaacgccggcacttaccaaacattgattttgggcctttggcaggccaaaaatgatgatcttggaaagatacgacggtcgattatgcccgagaaaatggagaagactaagtggagacctccaaaaagaggaatgttttggtggaacgattcattggacgcttattgccttcctttcatgggtgcggacaaaagcattgtgcaacgatcgcaatatttcgataacattgccgacaaaacataccctgcttcgctcgagacttacattctcgtcaagagttggttttgggctgttgcgcttatgatgtggctgactatctttaatttcgcggtcaaattcgattttacgcgcggtattctgcagaaaaacccggggatttgctcggggtatttgttcaaagagactgggccgactcgagttcaagcgcagcaggcttctttcacttattggttcttcgggtggggctgggaacagtcgtcgcctcaacctgacgaagccccgactaaacgaatggttgtccgttgcgatggccccgatgccggctacattggcaccgccggttgcattttgtcatgtgccctgactattctcaaagagcgctcggcaatgccttctgaaggaggagtgttcaccactgcagaggctttcaaaaacactaacatttatgaaacattgtcttccttcggagtcacttttcgcgtcgattcgtccgtgaaagtttagaaactgtgcgatgcacacaaacaccaatatttttaatattttctgctgttattttttatatttggtatcccatcaattggaataagtcttacaattagtctgctcatttgacacttttaattaacgatcattcaattgataatgttagtttctcattgacttaaaaaataaatttgtataaaaaatcacaaagaaaaaattaatcggacgaaatttttgaatccgtcaattgtttcctttagcccgccaactgcttttgtgaagttcaaattactgtcccctgtggggccaggccgaccaaacacattcgaattgtttgaattctttttgtcggaaactgcagacaagcagcacttgtaagcatcgttgcattcgtaattgtcgggacagcgaaagttcac

SEQ ID NO: 89150 - DNA, 621 bp, Heterodera glycines
atttgaatttccttttcctttttcttgaaatgctcttctccctttcccatttctcccccatcgttcagtcgcttttcgcctctcttttcacttgggcagtgaccgccctcggcgccgccgttgtttttgtttttccgtcctcgaacagagttttcctcgatgctagcctcggcttctcttctggtgtcatgttggccgcttctttttggtctttgctttcgccggccatcgaaatttccgaaagacaaatggccaaattggcctttgtcccagtcgccgttggatttgcgttgggtgccttttttgtatatttatccgaccgattaacacaaaatttcaatggcagcgctctctccgatcagataaatcaattagagaattggcattcggccaatcagcaaaatggaattcatagtgaaaatgctccattcgattttgaaacagaccgacagaggagcgaaaatcccgaaaacgctggcgaattggccgcttcgttacgccaacgctgcgtaaaagcgccaaattcgaaagggatggccgacaaagagacaattcgcttggatggccagcagcagcaaaacgatcaacagcagcagcaaaagcgctcacaagaacagtcgt

SEQ ID NO: 89151 - DNA, 657 bp, Heterodera glycines
gtccaataaagcgacctgttaacagcgatgggtcttccaattatccaaatttatatgatcgtcgccagacagttgtcaaagcccatcactggatattttatgggattggggaaagaacacccggcatttcggaacagagtgttaataccaatagggaaaactatcacaaattggtccacaaaattgcgaatgaaaaatttggacctcggctcaccaacttcagtggtaaatgtatcggaagagacagcgcttgaacaggcttcagaagtgatccatcaagtggccattttcggctacactgtcgtggtgttttacgcttattcctatttcacgcacaaagaggagaaggaattggcaagcgccgaggaattgagagagctgagcaaaaagacgagccaggagataatgcgactgaatgtgctggttacggaattgcaggacgaaatgcgaatgccgcggagggaccgaaattggactttcccatggtctggggaaagcaaaagtgcgttgcgtgaaagcgccgtcgttaacccaatgttgccaagtgtggtgatgaccgacagtcagccgaaagaacagaaaaaagacatgaccaaatcaatctcaaggacggaagcattgaataggctaacaaatgccaccgaaacttcatcgtaa

SEQ ID NO: 89152 - DNA, 483 bp, Heterodera glycines
gcaaaacgctcttctaataaccctaatctctgtccaacaagcaattcgatgtctgacatctacggcttcatcaacaatatctcagatcgtatatcacgacgcgtacgtcgcaagcgcccaacggagtctggggtttctggtgtcagcggcgcaccgccgcagactcggaaggacgacaaggcgaagggcggcggctgctccaaaaagtgcgcttgcatcatcgtgtgcagtcattctcacgctcattgtgctcgtcatcggtggactcgtcctggccgctgtcctgacgcctgaaacattcaaaaatgctcctctgttgagcctcttcgtgggcaaaaagaatgggggcgtggatggtgaggagaaagaaaccgaatgataagcgactctggtgtcctattgtgtggctatattgttcaataatctgtatctgatcttattgtacacaccttatgtgtgggataaagaaaccgacatttgtta

SEQ ID NO: 89153 - DNA, 718 bp, Heterodera glycines
gtttgagatatctttcacacttacaaataataaccataagatctaattaaagcggggggcgtgtggtgtaaggatgtgtcatattgagacctatattttcatggattttgagacaacgggactttttgacgacggccacaacaacccgttgaccaaccccaatcggtccaatgagacggccagagaacgtgcccagaggctggacaacctcatcaagtcagatggaaatcgctttcctaaaatcacggaaatggcttatatgtcggtgccgcgggtgttgttccttgagggaacggagcaaatgtccgcgcgccatttatcatcgatgtcgcaagacggcgaagaaagcattgagccggtgcaggtcgttacgaatgtacacgtgcgacagctgaatccgcagcttaatgacaaggagcggttcaagtacgaggaattgcaacggaaagtgccaagaatggcccggagtcgtccacctgcttcagactgttccaaaaccagcctgtctggttgcgcacaatggtctcaactttgacttccgaattctgtgccacgagttgcgcaagagcgacctgttccgtacccatccgatcccagaacaggtttatttcctcgacacgctttcctgcttttacgaactcgagaaggagtacaaccgcgagatagaattaacgatggaaaatgttgattggactctcgttttgtcccaattccaacc

SEQ ID NO: 89154 - DNA, 657 bp, Heterodera glycines
cagcaacaaaatcaccaatccctggcgtcattcgacggacttttgttcttccgtcttgtaaaggccataagcaacagcagcaggtgtccataggcgacgaaaaggacggaaagacaacgacacttttggtgccaatgtttagccaggagctcgcttcattgcttgcgcctgaacaatcgactgacttctccattcggcttcaatccaaatctaacaattgcatttcccttcgcgttcaagtttgttgtacccttccttcaaaatcagaaaatgaaggtcaaccgttggaagagcctgccgaattggtgcagcactttcccatccgttgcgttgatcctttcgaaccgaaaatcgcaattttttgtgaaaatggaggaaaggcacaatgtttggtctttgggcaaaagtttcgggtgcaattacaactcaaatgcaacggaagagtggcagtgcataatgtacattggaaattgaatgacgcatttgaacatttcgacgctattcctttggattctttgataaagcaacacttcgaaaaactcaaaatttcatctgttgactcaagcgaattcctcaacacgcattctgtttgggtgaaagtaacaaatggcgacggccaatcgccaatgagagagacgggacaaagcaatggagggg

SEQ ID NO: 89155 - DNA, 614 bp, Heterodera glycines
ccattccccggatgctttccgtctggttagacttggcgcccaaatgtgccatcgccgaggcgatcgcctcgggcaccggcacaactgttggcggtactgctcgcacttcggctagcaaaaggggaggcaaagctgcagcagcagcggcggctcccgccggtgttgcaacacaaccacacgacccgaacagagaaatgcgtgacgcgttcaaacggctggacagggcgtatttcttctcctcctactcgcaaatgatttcgcgcatcactcactcggacgccgccacatatgccctgttgaaggaaatgttgtccgaattgatcgtccactttccccaccggagtttgtggctttctcagtccatcgtccgttccacgcgggtcgccgtccgttcaaagcgttgcctggagatttttgaacttgccaagaaaaaagcgcggagcaacaatgacaacaacgctgctgttgttgacctgaatttgctgatccaacaatacgactatttgaccaccttgccgatgagtgtcggtggccaagtggcgcgactgatcgaaatcgccacggacgatgcgaagctctccgcgatgtacatcggatggtgtccattcatttga

SEQ ID NO: 89156 - DNA, 586 bp, Heterodera glycines
cagcttatcagaataactttcccataataacacatcgccaatttggacattcctcatcagcagcatcatttttgttgagaaggattgctgtgcttgttctgctactgcttccccataatgacggatccccaaggctgcccgggccgccaatcttcgaggccatttcccattatccaagcatttgttacttgcctccagaatccggcatgtgcccgccggcgacaaatcggacaacggacactgatcacatcaaagtggcggctgctacagtagacgattcgcgcgctaccgtaggcgaggggcttgcggacggtgacgacgacgcttcgcaactgcgacacgcgtcaacaccgttgctgacgcgctactattttgacgcggtcaccgctcaatgttatccgtttggtgcgcagacatgtggcggcaacgaaaatcgcttcgaaacgaaggagaaatgcttgacgaagtgtcgcattggcaccgattgatcttttcaaatttttatgtgattcaaattttgttccatcattgcctcgtttatttgacattttggcattcttcagactataaaaaccgggttggcaaa

SEQ ID NO: 89157 - DNA, 689 bp, Heterodera glycines
gaaagaaggaacgcatttctctctgttcttttgccgtcccttctccgatttttccctcctccccatttattcatttctcctcccaatttcttcctcaaaatgccctcctccgttggcccctcttcctcttccgatttgctcatccgtctttcctcctcctcgactcggccgttcactttgccctcggcgctttcctcttcttctgtccgtccacctgtgcccatttccttttgaaacgcccttcttccgatggcgtccattggcaccttttgcgctgcgtcggtggccaattgatggcctccgccactctctcgtggcgttgcgcctccccccgccgtctccccgagctgcgttcgtcctgtctgatgctccgtctcctcggcagcgttctcttcgtgttcctcttcctccacatccgtgctgttcatcccgatttgatgccatttcttgtgttgcgacaactcatctggttctgcttttccatgattgctttgtgtgttgcgctattaattgtttcgggatggccaatcggtgataagctttttgctgcgaaccgttggggcaatgtgctgtaccaaattgatacaatcgcttccattagcatcggaatggcgtgggtaatggccccgcaatggctgttgcacagacaagtgcgcgtgcccatggaccaatcgcacgaattctgtggc

SEQ ID NO: 89158 - DNA, 643 bp, Heterodera glycines
ggaaaaataaaattaatttggcctacagttgctgaagagctacaaactagtgctgaacgtcgtcgccttcagcgcgaccgcgagcagcggacaaaagcgcgcatggcgggcataaatcgaaccagcacaactcccgacgagaacagcaaaccaatggagttgacggacaaaggcaaaacacccaaactgaagcaacagacactcagccgattctttgggacaatgacaaaaaacagtgctccaactcccgttccaccgatgggtcaacaacaattgcaaaattacaccaatcctaagcagaagcagccaaggaaacgcagcagtcccggctcattgtccacttcaagctcttcgtcaatcatcgcaatcagctcaacttctcctaccgctgttcctgattcagtttcaccacctttccgtcctctggagacaactgggcctactaacagcaaagccactaaattgcataatgctgaagaaatgcttgccaaggctgacaatgagcagaggcgtgttcaacgctttgtgaacagattgaagaaatcgttcaatgaattggaccgagaatcgctggccaagaatcttgcatttacagcagtccgtctcgacagtgatggtgttgacaaaatacagaactcatttt

SEQ ID NO: 89159 - DNA, 1025 bp, Heterodera glycines
ttttcaaagaaattggaaaatgcgaaacatccgatgattgtcgtcggagcacaagcatttcaaggcgaaaactcctcgtccctccttcaaaaacttcatcaattggccgaaaaactccgttcaacttcacagacgaaacaaaacaccaagggcaacggacagccgaaagtgctcaatttgcttcatgagttcgctggccacgtggctgcgtttgaccttggcttccgtcccttcaatgaattaaattcggaagtgaagagatccatcaaattgctttatctgctcggttctgatgaaaaaccaatttcgaggaaagaattccacccggatgttttcgtcatttaccaaggtcaccacggagacaatggcgcagaagtggctgaccttgttctgccggggggagcgtacactgaaaaagaagcgacttgggtgaacatggaaggccgtgcccagaggggttaccccgctgttgtcccgccgggagatgcccgcgtcgattggaaaatcattagggctctgagcgaagtggcgggtcgcaaattgcgctacgattcgcttgatgacataagacagcgtttgtctgagatcgcgccccatttaactcgttatggcttggctgaagatgcgaacttttctcgtcaagcattaattctttctcagaaagttcccatctcagcatccaataaaaacttggagccgcgacaacgttcgttgtccgattattggctgacgaattcaattgcaagagcctctccgaccatggcccaatgcgtcaaagcttcgcgcgactacgccgttcagcctcacacggacccgctgagactggcgaacccccacgcctaaggaagggagcgaagaaggaattcgatttaattaggtcgcttgtaaatgtcttatttaaattcgttttgattctgttttccatgcgaatcaaaagttgtaaattgaaaataattctctattcgtgtcaaaatgacaataaatatttgttgtgcttaaaaaaaaaaaaaaaaaaaaaaaaaaaa

SEQ ID NO: 89160 - DNA, 887 bp, Heterodera glycines
gacaaactcaatcacaaacaaaattctcggcggcaataaaaaggctgacaacacttatcaccaccaacagcaaaacaaatcgtcgtcagcagcaccgtttggcggcggtctcttgggcaaaatctcttcgacaatcgcttccgctgtcaattcgacgaatcaacagcattatccttcaactcagccccaacaaatgtcttccggcggttacaacaatcaatcgaattatccgggaggcgcccatccgcaacagtacggcaccggaaacactggcaacgctggtggatatccgcccgctgctccgccgtccgcgggtgcgtaccctccgcaacagtacggcggcattgctccaccgtacggcaccgctggttatccaccgcaatatcagccgacaccgtatccaacttccacaggcgcaatgtccgccccctcaattcgggcaaacccaaatttcaacgcgcaaatgacagcggaattgctgcgcaaagcgatgaaaggctttggctgtgacaaaagcaaagtgatccaagcgttggtcaactgcaacaatgcacaacgccaagaggtcatccgcacgttcaagcaaatgtatggcaaggaactgatcccggagttgaaaagcgaactaacaggcgacttcgaacacttaattattgcacttatggaactgccggcagtgtacgacgccgcacaattgcgccgttcgatggagggacttggcaccaaagagcatattctgatcgagattatgacgacgcgaccaaatgcgcaaatttatgccgtcaaaatggcttatcgccaaatgtacaactcggatttggagcgtgacatcatcggcgaaacttccggctatttccagcgtctgctcatttcgctgtgttccggcg

SEQ ID NO: 89161 - DNA, 643 bp, Heterodera glycines
gtagtgacctcagcattggatgatctgcagaggaaagcgcgtcttttggaaaatgaaatcgatgctcaacttatttctctgaacaagttcaatccttcagacgctctttcgtcttactcttacaactcaaatcagacaaagggtcaaggcaaacgggcggtgttcgattcgttaacaactgacattgaaaataaactctcaaaattgagcgaaataaacgatgcgatgcgcgattgctttgagaatgatatggccgagttcagcaaaacttccgtccaacacattgtgcgacgacaccgcgacattctcagggattacagcacggaattcactcggacaacttcgaacatcggaaaccaactgcacagagaagaattaatggccatcgaatcggagtcatcggtgaataatcggtgcaaaccgacggactatttactaaaggaacacgaaagcataagcagctgtgatcggcttttgaatgaacaaataagcattgcaatgtctgtcaaagagaatctgtacacccaaagcaccgggttgggttcgattggcaagcgtttgaatcagttgacaaaaaagtacccggccatcaaccatttgatgaacaaaattcggatgaagaaacgcaaggacacactcattc

SEQ ID NO: 89162 - DNA, 729 bp, Heterodera glycines
tttttgtgtgtaaataaacactaattacctaattaatattttattaattaataatgcaacaattttcaatttgatcatcgactggctgtacatatatccttctatgtcagatcatccacgtgaagagaaacgaatttttgagaaaatttttatctgcaatgacattttgttggattcattgcccttttgtgggcacgcaaaaatcggtttggaatttgcggttgtctcctatagatttgatgtagtggcggacactcatcttaaacgaagaaaatggaagcttggaagtttgagaattgaacgttccagcacgaatgacggagcggaaattgtcaaatgtaacagtgacaagacagttaaacggttgccaattccattaaagccgcttcctcccaatttgatcggtttcaagcggattgccgtttatcacatcaaccgaaaagtgatcgcttttctccaccgcattcaacgccttttcgcaacagatatcacgttggaattggccatattttttagacaacgccaaagttgggatgttgtgacctacgggatttggcccgcgctgaatgccgcccggattgttaaaatccgtttccataacatcaacaatgtcaccgctttacaaacacacatctcgccaaccattctgcacgattgtgccaatcttcgttcaattgatgtcaatcacatttaccggcctctgactgggcaaattggggatgaatttaa

SEQ ID NO: 89163 - DNA, 643 bp, Heterodera glycines
acgggcgaacgaaaagacaccgccacttggccatggcaactgtggccgttcatgtcctgcttgactctcgagttcccgcgcaattccattccaaattcattcactcattcccctttaggtgcatttgtccactctttcggggtaatgtcgagggccatttgtgcattttgccgaacggaaagcccttaaaaagggcaattcgaaaggattttcggcagtttagccatgaagagatggctttgttcctggaagtgatgggccgttacaaatccagtggcctttacactcggctcggaatgattcaccgccgttccggcgttcactcgggcccctccttcttaacgtggcatcgcgagtttctgaagcgacttgagattatcttccgctctcttttcccccaaaataccgacccctccctcggccttccttattgggattcttcgctggacggtgaccttccatcccccgaagactcagtgatgttcagcgaatttcttcttggtgaggccgataattcgggatttgtgtttaacggacttttccccaattggacgacgatggacggcaggcattcgtaccagcgaatgttcggggaccaacaagacggggagttcctgaacgaagcgcgcatcgactgggttct

SEQ ID NO: 89164 - DNA, 653 bp, Heterodera glycines
agatggacaaagatgtcaaaccggaggacccatcggtttctttcggttttttgtccgaggaagcgcgggaagcgatgctcaaaaattgcctcagcggtgcagtcgactgcaaagcgcagcccttcggaatgattcaaaagcggacgatggttttacagcacgaaatggacttcatgagaaaagtgcgaccgtaccaatcaggcgaaatggtacaaaagagagtggaaatggtgcagaaactgaagcaaaagatgctcgaagtggcaggccttgacgaacacgttcaacccgtaaacgacggcaccttccaacacgatgtgctgcttacagagaaacaatctgaagaactgatcaaagcattaaacaacgtgccgaaaccggcgaaaaagcttcaccggtacgggtacgggcaccgcttcaagcgtgcctcgctgtttttggagcagttcgcggcacaaaaatggccaattggacagccaatcgctttcttttttgacccaaaaattgaagagttcgaaaagcagatggtgcgacaagcgcatcaaatgatcgaagcacagacttgcattcgcttccgcccgtccgattcaaagcccaactcggactttctctactacatcaaagtgtccaccccgacattttgcggcctctct

SEQ ID NO: 89165 - DNA, 729 bp, Heterodera glycines
caggaagtttttggcaaacagccaagtaaagctgtcaaccctgacgaggctgttgctatcggggccgcaattcaaggaggtgttcttgctggacatgtgacggacctgttgctgctggacgtaacgccactgtcacttggaattgaaacgcttggtggtgtgttcaccaaactgattacgcgtaatacgaccattcctacgaagaagagccaagtcttctcaacggctgctgacgggcagactcaagtggagatcaaagttttccaaggcgaacgcgacatggcattggacaacaaaatgctgggccagttttctctcgttggtattccgcctgcccctcgaggtgttccacaaattgaggtcgcttttgacattgatgccaacggaattgtgaatgtgtcggcacgagaccgtggaactggcaaagaacagcaaattattatccaatcgtccgggggactcaataaagaccaaatcgaaaacatggtacgtgaagcggaaagacacgcagcagccgacgcagaaaagaaagagacgatcgaggcaattaaccatgcggagtcggtgctgcacgacacggagtcaaagatcacggaatacgcggaacatctcaacgcagacgaagttaatgtggtcaaagagaaacttgaagagttgaagaagaagttggccaaccgtgaaggtttgaaatctgccgaagtgaaggagtcggttaatgagctgcagcag

SEQ ID NO: 89166 - DNA, 922 bp, Heterodera glycines
cagaagttgattttgaagatgaaggcgattacgagcaattaaatgccaatcagaatagaaaacagaaaaaggccggaggatggcaatctatgggtctcgaccattccgtcttcaagggcatccttcgcaagggttatcgacagccaacgcccattcagcgcaaagccatccctttgatgtgcgacgggcgtgacctcgtggcgatgtcgcgcaccggctcaggcaaaacggctgcgtttgttgtgccattgctgcaacgactgaaacaacgcgatgcacgcggcattcgtgcgcttctcttttcgcccacgcgcgaattggctctgcaaacattcaaaattgtcaaggagctcggccgtttcaccggtctttactgtgcctgtcttatcggtggcgacagtatggacgaacagttcaatgcccttcaccaacacccggacattctcatcgccacgcccggccgtctgctccatttggtggtggaaatgaatttgaaacttcaaactgttcagtttgtcgtgttcgatgaagctgatcgtctcttcgaggtgggttttgcggaccaattaaaggaaattctgaagcgaatccccgattcccgccagacccttcttttctccgccactcttccgaagatgctcgtcgattttgcaaaggccggcctttccgatcccgaattggttcgtctcgatgtcgagtcaaaactcagtgacaaattgtccatggctttcgctttgtgtcgtcaagttgaaaagttgcccgtcttattaaatttgtgtcgggtgttatgcaaacagaagaagaaaaccattattttctgtgcgacgatgaaacacgtggaacacgtggtcgctgtgttccaagaagccaatttggacccggcctatttgttcagtcagttggacccgggcgctcgcaagca

SEQ ID NO: 89167 - DNA, 614 bp, Heterodera glycines
gtttgaggttaacattaatgagcttaatttatcatggattttacggcaggaaatacgccaaatttgtttgaggtgcttctgcgaaatttttgttccgagtcgtcttcaattcaagaaaaggctgtttcctcaattccttcaattgagcaaagatttgctgaggttgaaacaaatgaatttaaagcagcgttcggtgaattgtcgggtgggacgcttcgtttggttgccgatgatcgtccatcaacttctgcagaggccaatgatcaacagtataagccgattgaaattgtaattggtgatgacgctgagattgttcaacagccctcttcaagttcttctctgatcagttcccatcccgagactgtccaagatgcgaaggtttacgcgaggatacgcgaacttagggaggcggggctgtggagcgcgacgcgactgccaaagtgcgaagacccgccgagacggaaattgcactgggattatttgttggaaaaaatgcgatggatagcgacagattttaccaatgaccgaaaaggcgaaaaaaggagtgggcccgaaagttggcagtcagagcgaaggccgaatggcaccggttgctcagttcaaccaacgaagtt

SEQ ID NO: 89168 - DNA, 668 bp, Heterodera glycines
ctcgacttgagcatcaacagcacggtcattctgcgtgacgaatggcttctgctcggtgcccaggagggactgttcgccactccgatgagtccgcaacagttgcgcgcccctttccgaattgcgggcgtcagctgcgtctattggatggagctgttgcccgagttcgacatgctcctcgccatttgtggttccgcccgccaattggccgtcatccatctccaacaaatccaccgcgcattcaaagttgcacaacagccgacggtgtcctgcacaaacattgccaacatcgaacaatgccatattgcggttgtcagcaactcggaacatcaccgcgacaaacgcaccattactgatgaccgcagtctgttcaaatgtcgcgcggcgcatcgcacgggcaacggactgaacgccggcgaattactcttcaccgtttccagcgaagaccgagtggaactgcacatttttggccacgccgacgcggcacatctccaacagccgcagcagcatcagcagagtgtcaagtcaattctcaaacggaaaatcttgatccatgcctttcgacaacttttatttattctttcgaacttaatttttgtttaacttttgggattgccacttggcgcttgccttttatgatctgattttgtgcgcataaatctgcttgctat

SEQ ID NO: 89169 - DNA, 1262 bp, Heterodera glycines
agacaatgggatttcttggcaaattgtcaattggtttgtcggtgatttttcttgggatcgctgtttggttcagcaccagcaaatttttgccaaaggaatatcacctaccaccacctccggcattgactggcctcctaacggtgaacaaaccgaaggtgttagaaaaattgttggagggacaagttcttgggcctgaatcggctgtcatcgaaaatgatgtgatttacacctgcacattggatggaatgtgtttgaaaattgtggacggcaaaattgagaaaagtgtcccagtgacggcacatgcgacaaattgtgatggaaaacgcaaaacaattccaatttgtggacgtccgcttggcattcgtcgattcaattcacaacaattcattgttgctgacgccgtgcttggcttactgctcatcaattttgaagaagagacaaaagaagtgctgttgccaagtataactgttgtggacaagaaacgcttgggcttcccagacgatttggacattgtggacaatgacacaattttgttcaccgatttgtccgcaaaatatggctacagtgattgtgatttggcattttttgagcacgtccgggacggacgtctgcttgaatacaaagtgtccactggtcaattgcgagttctgatggacggtttagcagttgcgaatggtgtccaattgcaccctgacaaaaattctgttttggtatgcgaaacggccatggctcgtatacaccgctattattttgctggccccaaaaaagggatgcagcaaatttttgtggacaatttgcccggtttccctgacaacatccgaatttcgcgcagcgcagattcattttatgtggcgttacctttccatcgaagtgaacagaagccacacatttttgacagacttggcccatggcctttggcaaggaaattcattggcgaacttttgaaaattctgcctgacaacgtcctgcagcgttttgttgtcggatcgacgcatggcattgtgttacaattggatttgaacggcatgattttgcgctcttggcacgaccccgagggatcagtgatttcacacatttcggaggttgatgatgatggaggtgattttctgtatttgtccagttttgtgaacaattacattggaagaatgtcgaaggaatgaagaatccaaaatttggaatgaaaagccgataaaactgcccaatttttcaaaatatttttttttgataaattcttgacttttaaaaaaaaaaaaaaaaaaaaa

SEQ ID NO: 89170 - DNA, 1107 bp, Heterodera glycines
ccaagcgtatgaagtgagtggacagaggggcagaaccatttatcttgttttcacattccatcggtttttcaatcattaaaatttcacagatggaacagccggacatcgaattggagctgcacttgcacgggctgggcatctccctggtcaacaacttgaaaagcgttgaagtcctttacatggtcattgattcattcactagtacatatttaattcaatatcaaaatttaggccatgtctgcatttttacagaagaaaagtgacgaagagtcgctcaaaatggccaccggtttctggtgtcaatatcgtcagaccactcatcagcagacgcttcacgtgaaattgcacaatttccaaatggacaaccaattgccagcctccaccttcccctcattactcgccatggtaccacagccgaaatatatggttaaaaatggttgtttatttaaaagtttttggcataaatgttacaagttttttatttcagatccaaagccattcctggagtgtgcatttgtgatgagtcaatcggaacatacgaacattgtccaaatcaaactgctggaggcgttggtgcaagaatttgcgattcgcattgaccgaacattgctcaacgaattgttggacataataccgaaagagaccattcagacgggatacactcgcgaatcattccaaatggacatggaattgaccgagaaagcgctgaataaaagggcaattcaaacgcgggtgacacaggccaaggcgtattaccagcgaatgcacatttcccctttgatgatccatttgagcttttcccagggccatgttgaggaggagggcacagatagggccggcatccaatgggaatttatgaatttgattctgaaaagtgttggcgttacactcaccgaaatccaggacgtcattttcaagcttgccttcttccaacgcgaggccaccttctacagtcgtgcccaattgcagtccgaaatccaagcccattacacccgccaattcattaaacagctttacgccctcgtgttgggcctcgacatccttggcaatccgtttggtcttgtccgcgacttgcgcactggcgctgtcgacttgttctaccaaccc

SEQ ID NO: 89171 - DNA, 634 bp, Heterodera glycines
gcgacctttaaaaccccggataacaacacaaaaaaattttgcaaaacaaaaggatcccccctttttaaaaaattttcaaaaacgaggcaaatggagcgtgaccgtattctcttccaacgccaacgctttcccaccgtcgcctcaattcaccatcagccggcgacttcgtccgcctccggcgttttggtgccaattccgacgacggacggcgccgccgctgtgcccggcagcgccggaggctatcagaggcgatattcgacacatcgagaacagcagctgcagcagaggaacagaagggacagcaaattcagcaggcgtttggccgtttacacttcaccgccagaagacagtgctgccggggccatttcacttcggccgctgaacactacaataatcagcagttcgcccagaacggggagcagcagtgacgccgaattggacacggacgaaattgccaatgcggcggcgacaacggagcgacgacggcgactgcagcagcgacaaaggcggcgactgtcggcggacgacggcgagtcgcaagtgatcgccgcgagtccatcacggcggcaattgcttacacaaccgctgacgaacccggacgcgggactaatcccccaaattgacaagccaatgt

SEQ ID NO: 89172 - DNA, 837 bp, Heterodera glycines
tgctctgtttcatcaactcccttcttctgtcttctcctcctcctcacaacctcttcccttcatccatccgttcaccctccgtaagtcccttttatttcctctacttttgcttctccgtccgcgctgatccacccgttctcatacattccttccttcccctccttctccatcttccgagtctgttttgtgtgttctgctgcagttccattgcaatggaacaacaaaatatcacttattatccgactgaaattgtccacggacaaacgaacggcgattcgcaagaacagtttcacagagaacatgtgtttcattcggatgcaaatgttaattttcacgcgacaaacgatacaaattttggtggtggtggccgccgagcagcttttaggccaagtcagttgcagcaacgtcaacaacacatcgtggttcaacaggggccgacttcaattccgcaacgggtcagcaccaccaacattccggcgagtactgcaggacaacagacggtgcatgtgcagttggtgccgcacaatcaacagggaaatagcccaatccccggccagcaacaacaacaacgccaacaaattgttgttcaacatgcacctacctcaatgccacaacggatcagcaccaccagcattccgacgagcactgcttctggtcaacaaacggtgcatttgcaattggtgcctcagcaagggaacagtccgattcctggccaacagcaacaacaacagcagcaacaacacattataatttcggcgcaacccgtccagaccaccaatacgaccacagaatccgcagatgggaatccgattgctgcgtttatggagtactttgtgg

SEQ ID NO: 89173 - DNA, 617 bp, Heterodera glycines
tggccaccgtttggagcaaattcgcttctcagctcagttcttggctgtcggaaatgccttcggaaaagcgaaggggtcgcgccgagacgaggccaaacggtggggacggagttgcgggggtgcgcaattcgcggtcacttagcgcactcagccgacggcacaatttggtcagaacgtcaaaaagctcggagaatttgcaccgaatcagcctattgtcgacagcgacgacaattggcaatggacaacagagacaaaagccatttttggcacaattcggactcaatgggccaaatgcccattccgaggaggggtcggtgccgtgccaaaacagccgaaagggatcggtcgaaggccaccaaagtccattaacaccggcaaggacgaagacgaggcgatttccattttttggcaaagaaaacgaaacgacggcagcgccggggggagagggcgaaagcggatattcaagcggaagttcgtcgagaaggaaaaagtccaacggtcgcttcgttccttgcgcttctttcctcggcatttttcctcaatttaaacgcgcggcacaaaagcaatgagcggcaaaggcaacaaaattcaaataaaagcacaaaggaaggaaagaa

SEQ ID NO: 89174 - DNA, 664 bp, Heterodera glycines
gtttgagggataataatttgtaaggcgtatacatacaaatatttatttaaaaaaataaatggcttcatctctctacaatttcaagaagatcacagttgtaccgtcggcatcggatcttaaagatgtcgtcctttctaaaacgcaacgtaaaactcccacggttgttcggaagagttggcaaataagtcgaattcgggctttttatgcgcgcaaaattaaattccttcaacaaacgcttcatgacaaactcacttcgataataaccgagtttccaaagttggaggatgtgcatccattttactcggatctgatgaacattctctatgatcgcgaccattacaaaattgcgatgggacaaatgaacacggcacgccatttggtcgatggaatagcgcgggaatatgtccgactgatgaaatacgccgattctttgtatcgttgcaaaatgcttaaacgggccgcgttgggtcgcatggtaaaattgctgcgtcgacagaaatcaagttttgagtatcttgaacaagtccgtcaacatttgagccgactgccaagcattgacccgaacacgagaactctcatactatgtgggtttccgaatgtcggcaagtcttcgttcatcaataaggtcactcgtgccgatgtcgaagttcagccatatgccttt

SEQ ID NO: 89175 - DNA, 1037 bp, Heterodera glycines
  unsure (1)..(1037): unsure at all n locations
cttacaagccaattcgtgtttccgacatgcccattcaattatgcgaacaccgccgtgtcatgcccggcccgtttattcggggtgaaataaaggcggtgaacacttcggctgcccgacgcctgatcagggtaattgtcgagtgattgggtattttacacaacgccttttaaggaatttaatgtgaacacgactttgtacacggggtaagtgcatatgagatgacgacataatattaaatttaaatgcccattttataaagagctaacatctgtgtcaactgctgctcaagacttcgtgatcaccaagaaactaggcgaaggggacggacagaggcgattttatactaccccgaaggcgctactttgtttatcaaattggtttctaattattctttttccctttacttttccttgatttttcagaatggggatgagaatgatgggaacacaacaaagggcaagaaaaccaccactggaccatccgcggcagtgacgcgtcgagcagcgtcaaaagggctaataaaaattcgagtgagtcggttaagaaaagacaattatatttatactggtgatattaatgttagatttgttcggatgagacgatcaatgccctgaagttgcgcatttacgagaagatcgaccagtctccagtcgaccagttgctttacatgggcggacaagtgttggatgggaatttgacgcttgagagggcgagggttcctgcaaacaatttcgacaacccgcttattctgatcgtccagcagagaaggaaaagtggtgacgacgatgacagcgaccagaaagcgggctccagtggtggtggaggatttcatgacaccgccttgtcttgataataatgttcactgagtacaaaactcacacgggcgtcgacacactcatccactttgtttattaatggcttatgccctagttcttgttcacgtccattaagtacgagtactgtttgttttgtcaggtgccgattataattaatactcgataaatacttttattnnnaanaaannaaaaaaaaaaaaa

SEQ ID NO: 89176 - DNA, 655 bp, Heterodera glycines
gtcacagagtctgcgcgttccattcaaattcctccccttttggcttttttcgccgcttaatccctccaaatcggtcgcttttccgtgaacacttttcgccagctgccgcttctttgcgcacaatgaaatcagattgaagaagctttgaacagataaaaagggctgtagcaaaaggatgaataaaatgggtccgacaagcgaaaacgacggaccgaagaagcaaaagaagggagggagacggagggacggaatgccaaagccaacgccaaagccaaaaggcatggcagcagcatcaacggcacttcgccaactgtcaccactgcacaaagtactgctcgtcgttgtcgcactgctccaatggacaacgacggggggaagggccgctctgcttcaaggttgcgactttagcgaagatttgtgcaccgatggcgaagtctgtttgccggacaggctgttcggccagtgctattcggacgatgagtcggctttggtcaggccgctggtcctcaaccggcccatcaacggcgtccagtcggagctgcttcgtgcggagctgactcagctggccgagctgggactggattggccggacgcacgtgcccagtgcgtgttggcctatttcaaattgggcgtgggttttcgcttggactacaac

SEQ ID NO: 89177 - DNA, 1294 bp, Heterodera glycines
  unsure (1)..(1294): unsure at all n locations
gcggacaatccgaaccttcgcatcaacgaacccgacccaatgctggtgcttatttatttgcccaacccaccaacgaatacattctctaaattaaacatttttcaggtgacttgtgcgcatcgtaagtttttactgtcacaaattcaataaaatgcaaaaatgaacttcaaaagtccaccaaattgtgtcccctccccatactgaagtgtccgaactcagctgtcctcgggcatgcccacccgtccctctccttataagtaatacatttgtacaatttcccttcccccaggcaacaatcgtttttatttgtttaccaatgtcgaaccgtacgcggaagaagcggatggtgtgttttgttatgcaaaaacagtcattaaaaatcgtttttgtctttttaagggtccactcatagcagagacgtgtacaacgaaaagccgctaaaggaggacatgatcaccgcaatagaagtgagttagggagacgagccaattgtgggaaataatttaatttatttttattactgcaggaagaagcaccccaatcgaagctgtgcaacaagtaattcctaattaaagtgccaaaagcgttcgctcttttagggcaattgtttacacaacatatggcgacattcacattgagtgggttttgtgcttccccatccattcatttctccatttttattttcaaattttatgtatttaagactattcccggacaaaacgccaaggacggtggaaaatttctgtacacacggtaattctcgacaggcatttctctgatagatttattaatgtaattgtttacttttggtattgtttcagcacgacggggttattataacggacacgcctttcacagagtgatcaagtcgttcatgatccaagtcagtgagacgcgagacagagcatttctgactgaattcgctttagacgggcgatccgacgggccgtggcaccggcggacagtccatttggggcggtgattttgaggacgaatttcacccggcactacgacatgacaaagcattcagagtttcgatggcaaatgccgggccaaacactaacggttcccaatttttcatcacaatttgcccggccgaatggctcgacggaaagaacacaatttttggccaagttgtggagggattcaacgtggtacaaaagatcaaccaagtgcccgtctatgaaaagagtgggagaccccgagaagagatttcaatcatttccatttctctgaagagtgtttagcttatataaattcattgctttacnnannaaaaaaaaaaaaaaaaaaa

SEQ ID NO: 89178 - DNA, 834 bp, Heterodera glycines
gtcaatgaagagaaagaggaacaagagagggaggaggaggaagaagaggagggagcagcggaaaatggcgatgaaaatagaagaagcgaagcgaacgaattggactcggcctttcccgcaatgatttccaatcttttcggcactcatccgttgcgcaccgaaataaaaaagaaaaggccgtcgcagcgtcgggggaatgccgaggaagagacatttcactttattattgactgtcacggcaaattcgacgcgaaagacacgcgaaattttaattcatcgctggtggaggaggtcagcagacacccggcactgttcgacttcacaagggacgagtacaaatcgaccgaggcacgcaatagacattgggcagaagtggcggaagaaatgcagcaaagtgtggaatttgttcgtacgcgatggaaaacgttgagagaccgtttcaaaaaagaggtgcgaagacagcaccaatgtgtggagggtccgatttggcaacattatgacaaaatgctttatctgttgccgtttattagggacaaagacgattctaccgaagtcggaacaacagtatcaaatggaagtgtcggaattcgttcgaaaaacggcgcgaggagggcggaggggccgacggacaataccgacagggggacgacgctttggcatggcgagcgggaacagaagcgacggacgaacaacgggaatttgctgcacccgtcaccaattaattcgtgcaccgccgccattttggatttggcaatgagtgccgtcacaaaactttcgccgccgccaaccgacgaaatgacttcctcggacggtcgccaatgcgcaatttcggaa

SEQ ID NO: 89179 - DNA, 819 bp, Heterodera glycines
aggatttccgagtcggaggaggaatcggaggcggagcaccagtctcgccaaaaggcggaccgctcgcgttcggaactgcaacgcgagttggaggagctcagcgagcgtttggatgaagcaggtggcgccacttcggcccaaatcgaagtgaacaaaaagcgcgaggcggaattggcaaaactgcgccgggacttggaggagaacaacctgaaccatgagacgcagctgaatgcgttgcgtaagaagcacaacgacgcggtggccgagctgaccgaccagttggagcagaaacagaagatcaaagtgaaggtggagaaggacaagcagcagatccaacgcgagttggaggacgccacgcaaacggccgactcggaactgcgagcacggcaggaagcggagaaagtgatcaagaacatcgagctgcagctcagcgaactgcagagcaagacggacgagcagtcgcgactgctcaacgactttgccgcgctgaagagccgcttgcacaacgaaaacgcggacttggaacatcaagtggaggacctggagaaccaggtgaattcgctgcatcgcctgaagagtcagttggtcagccaattggaggaggcgaaacgaaccgccgacgaggaaagccgcgagcggcaaaccctcgcgggacagctgaagaacgtgcattacgagaacgactcattgcgcgaacagctcgacgacgagcaggagggcaaagcggaatgcctgcgtcaaatcagcaaactgaacgcggagatccaacagtggaaggcgcggttcgagtcggaaggattggtcaagatggaggagatc

SEQ ID NO: 89180 - DNA, 907 bp, Heterodera glycines
aagtttgagaaaaaaaaattcttccatcaatttttcttattagcattttgccatccatacatattaaattctcaaaaaaacactaaaaacactaaaaatgtccgaccagcagtccggctcttcttcctcttccgccgtactcacttcccccaccccttttccaccacaacaacaaaaaccgccgctgctccgccgctgttccatgtcggaaccgcacttggacattgtgccacactttttgaaggaggaaaaaagcgtccacccgtttgaccgtgtgttgtccggcctgttcgacaaaggctccacattctccgtgaacagcaccgattcggtcgaccaccattattcggcaaaaagtgatcgtcacgatcacccgttctccccgaccaatcagcagttgaccaagggcaaaagtgccatcggaatgatgagtaatagtgccgccgtcgccccttcctcggcggacggtctgctgcgcaagtcggccaccagtgcgtcggcactgtacagcagttctccacaacatggcacgacggccaaccatttcccgacaattcctgaggaccagggcctgaccatgtcggctggtcgtgacaaaatgccacagacagccgcctccgccagtccgccgaaatcgggcttcatgaatttcttcggcaccggcggcttcctctcgcgacccgtcacgcacacgccggaggagaactatcgtctgatcatggcgcttgatcgttgattgattgatttgatgagttggagagagagagagtgagctgaagcgcgggcgggagagtgccgtgccgaccaattttttctgttttttttttgtgccgtggacggtcggctgtgaattttttggatttttgggatttggagggcgcgcgcgggcggccggcggcgtgtacat

SEQ ID NO: 89181 - DNA, 839 bp, Heterodera glycines
tgacgagatggtcaattccgtgtttggcgtcaagcaagaagggaatgtgcctgccctggcggacccccacggcgaattgcgaggcaaaaacattttgcacagagtcgacgaatatgaaatgtcgaaaattgcctcctaaaacaaaatgaccatcgaacaattgaaacagtgtatggaagacgcaaagcgctttttggctttggtacgttctaaacgcccgagcccgcacttggacaacaaaatactgaccgcatggaatgcccttgccatctcgggcttttgtgctgctgctcaggctgtcccaacacgcgcggccgagttccaaaaacgtgctgaaaaagcggttgcattcattcgcagccatcttttccatgggggagaattgctccgatcggcttacttggacaatttgggacaagtcgttcaaataagacatcccatcaaagcgtttgccgatgattatgcttttcttatcgaagcccttctcagcctttactcgctgaacttggatgagaatttgcttcaatgggcgcataatttgcagcttcaaatggacgaacttttttgggatagcactttcgactcgggctatttcatgtcgagggttggcgatccgtcgataatcgtccgaatgcaagacgaacaggacggggctgagccctgcaccaattcggtggccgcttccaatttgctttgccttggctttcttctcgattccgctgactttcgtcggcgtgccaacgattgttttgccggcgcagcaaaacgaattgagaaataccctttcataatgccacgtatgctaatcgcattgcatgccgcaactcatccgccgtacc

SEQ ID NO: 89182 - DNA, 889 bp, Heterodera glycines
ctttgacttagacttgtgataattgtgtcattcgtctcatgaccatccatcgttgctcccttctccgctgatgatcatcgcccccattcactgagtccgccattgccccattgatcctccctcccttcctccacatataaatagccagcccaacgaatcaacgctcttcgcttgcatcatattggacatttcatcaagcagtaaaaagtgctggattgaaaggggagagaaagatgatggagaatgaatggagggagtataaaagatgatgatgatgatgacgagttgacgacgaaagcgaccaaaacgcatcaacaaaaacaaactgtcaatacggcaccatacaacaaaaataaaaagcaaagggaaaaacaaacgacgccaaaaggcagcaaaaatagctgagccaaaagtgaagaaaataatggaattggccaaggaactcatcgccgaagtgttacgtgaccgaaccaaacagttttcttcgggagacaatgcaaagttcggcctggcgttggcaaacgccgaccgttttctggccgaaggagcggcagtttccattcatttgatgatggcacacgccaactgcaaagcatcggcgaaagaattttgtgaagcgacacaaacattggaggtttggaccttcaaattgcagagggaagtgccgtacgaagtgagtgcccggccgccaatgctgccgctgttcttgcgccaggcagtccgttcccaattgcatttctcgcctttccgttcttggcttactgcgcgacaacgcgcggggccatccgatgggtttttgcctcttttgcgtgtgtgtgctgcctctgactccgctgctccgcccttttcttccgatcgtctccaatcccaccaattcccgccttgctta

SEQ ID NO: 89183 - DNA, 718 bp, Heterodera glycines
gcgctgaggaggcaatttccaaatacaacggcgaatggcaaattgggtcgcccactgatgaaattttggccaatgattatggactcattgtacggactaaggctcgacaccacgccatttctgcgcgacttcgaaagcctttcaaattcgatgggagtccattggtcgtccaatacgaagtgaaatatgaacagggtcaagaatgtggcggtggttatttgaaactgttgcgggacgacgcctcaaaggatttgaagcagttcaacgacaaaacaccctatgtgatcatgttcggaccagacaagtgcggtatgacaagcaaagttcacctgattctgaagcacaaaaacccgaagaacggaacaatcagtgaacaccatgctaaacagccgagcaaatcgctcagtaattactttgaggacaaaaagaaccatctgtacactcttgtgatccgacccgacaacgcgttcagcgtgtctgttgaccacacggagataatgagcggcaaattgctgacggatctcgaaccatcgggtgtgccacctaagcaaatcccggacccggaagacaaaaagccggccgattgggataatcgtgaacagattgcggatccggaagcaaagaaacccgaggactgggatgaaaatcaacccaaagaagttgaggacaccgacgcggtaaagccggacgattggttggaagaggcggaggcgctcgt

SEQ ID NO: 89184 - DNA, 864 bp, Heterodera glycines
gtcacaaaccatgggaatcaattgaatgcccaattagttttgatacgccgtgctgctgagtctggagacggacaacaaagcttgttgcacgtgtctgtaaggaggtttctggacgagaaagtgttcccggcaaatttctgaagtcgctggaaacttttcaatatttgtgcaaccagtgtgcaaaaaggtggaggaacagtcggaagaaagcgcaactcacaaaaaagaaggacgacactgagaaggagggagccgaggaacagcagcaggcaacaacatcgaaacctcaagccgacacacacgcgaaggaggaaagtgacgaggcaacactggtccggaacatggtcgatgagctggcgccactttgggaggagctgagcaattgcctgtcacttctcgagaaggccgaagattcgcaacatgcggttttgtgtcttcaaaatgctgccgaggcgtttttcctctcttattcgttggtgataccgcaaactgctcaattggctcaatctgcactccctgaaactgcaccaactggcgattcttcacctcagttggcctcctcttctgcgggcggcaactccggcgaggatgagctgggccgataccagaaggaaatgttcacttttgcggaaaaacatcgatcggtgctcaatcaaattttacgtgggaacacgcagaacctggagggaagtgcctttgctattctcacacacttccccaaattgttggactttgacgtcaagacgaaatacttccacaaagaactcaagaaaatggacgagaggagcagatatcgtcacgaagacgttgcaatccgtgtgcgccggtctcatctgttccgtgacagttttcgcgagctctatc

SEQ ID NO: 89185 - DNA, 642 bp, Heterodera glycines
gtccaattaagcacactgctttcatacattaagcatgctcgtaattagatagacgttcatatacaatagttgagttggttaccttcacgcacatgctgcaatcaattgttccacctcgtttccatggagtggttctgtgtcgggtgtggcttgactttgtcggggacgctgagcaaccgaaggaaagggaccaacttccacccataaccatatgtaaaacaaaactagccactgaaggacggcgaatctcaaacgaagggggcgcaatactcacaatcaacttgtggccaacaaccgatgggatgttgaaggggaccggaataccctcgctcacttctctcataactcggaagagcatcgaatttcatttcaattttccatttcttacctaatatggttgtccattgcgagagtcgtctgcttgacttatgctggccagtctgcactcattttggaaataggtttaaggcgttttgctttgtttggtggtgaccacctgcagctcactaaaagcgtaaaattttaaaaactggaaaggtcagcttttcaagctcggctcattcgcagcacaaccgaattcttcttaatttcctataaagcttcctcaaatcattcagcgacattatttcgaaatgactgcaa

SEQ ID NO: 89186 - DNA, 850 bp, Heterodera glycines
gagaagagagcaaacagccccaactttatccttccccttcatctgctgatcttatcttctccaatcgctttcccattcctttgccgaaagtaattttaacaaataaaaaagaccggcaacagaaagagacgcctttcgtccatttgttcgcctctcactgagtctctcttcgactttactccccaaatggtcgttgctgatttggccgtcttccaattggaccttttttggacaattatattgggctttcttatcgcatttgttttggcttttgcaattggagccaatgacacggcaaattccttcggcacgagtgtcggctcccgcgtgctcaccctccaacaagcgtatttactcgcctccattttcgaaacgatgggcgctgcccttttgggctcaattggcggaatttggacatgaatttggaagaattctgaggacaatgcacgacgccaatctcatccacggggacctgaccacggccaatgtgctcgtcctgactcaacggggaccagtcgaattggcactgattgactttgggttggcccaattctcatcaaagccgggggacaaagcggtggatttgtatgtgctggagagggcaattcggagtgcgcacattggcatgggcaaaatgatggatgccattttggacgcatacaaaacagaagggggcggaggggacgaggacggaacgaatgccaaaccggtgctgctcaaattggacgaagttcggcgcaggggcgcaagagagacatgatcgggtagtggagacggcgagaaaaagagggggcgatggacttttagaaaagaagacggcgagaggaagagagggacgaaattgaccatt

SEQ ID NO: 89187 - DNA, 620 bp, Heterodera glycines
aaaaatatgtccaaaaacaggggcgaagcgcaaaaaatgccaaaacaggcacactcctgtagaaaaaagcagtaaaacataagaatctaagaatctgggtcccacaaaattatttataatcaaaaacaaattaattttatttcttttaagcataatgagcaacaaagatttttggagcaccagaattttcccctgacagcatgtgctcgaactcccgtttttaggagagtaagagaggtagttaatccgtgtttaatcaattatgaaattcaaaaataaacaaaaaaaatatttcaaaaaacagttattcacaggacctaataaattcaagacttatgtcagtttttataatcttgaacaacaatgaaaactgcatgatttaacgaaaggcaaattaataattattagggtgcaaatttttaccgacaaagaattcataaaaaggggcctaaatagggacgaaaaatgacaaaagcaacatataaataatttgtttttttgccaattatttcattttcattgttgaaaacctaagaatcctaaaaatttatgaattaaaaaaggaaaatatgatgaatggttaaatgatatttgcggtcggataattgtggcctgctgga

SEQ ID NO: 89188 - DNA, 628 bp, Heterodera glycines
gacccttctctgagtacgttcggttccaaaccctcccgggcgcccctccgcctcctaccgatttgcgagaggagcaacaattggcccacgccttggaaatttcttttctgccgccgtatccgcccaacggcattctcgaccaataccgtatccggtggactgtgcacggcaagttcaactaccgagagcagcgagtgcccgcctttgagttggagtgttccgactcgcgaatgcgtggccgcctctgctaccgaatcagcggattggagccggagcaggagtatgagattcaggcggcggcacacaccgaacgcggcgattggtcggattggtcggagccacttgtgaccaagacgacggagcaagacattccggtgctggaacacccgctggagttggaatttgccaagtcaacgagcattggcgtcagatggcgcgggttggaggaaaacctggccgagcacatcaccgggtacgcgttggaatacaagtcggagacggacaccgactggaaggaatggaacggcgtggtacggcaccgggcgcggcagcccgactaccgagcgcatgtcaaaggattgaccgagtccacggaatacttcttccgcctgagggtggtcggcaaagg

SEQ ID NO: 89189 - DNA, 629 bp, Heterodera glycines
aaaggcgtcactgctcactatcattgccatcgacaaccgcactttgccagcacataacagccatcaaaaaattccattgccaattgaatgtattgacaaaattgaactgcattacacgcttatcattgtggttgaaggatcaaataatattattcataagctttcctaaatatcattattatttatacagttgtgggtttttgggtaggaaaagcagtttttcattttttacgagatttgttaaattaatgtgcaacacccccaaagtgtatgatgaccaagacgtacgttggagttcagtgagaatgagtgtgtggtggtgtctctgttcgttatggtctccgtccccatttatgtgcatcaaagaactcgcaagtttttgttcaaaaaaataccgaaatacaacaacgggaaaggaatcaaaatttcaaatttttctcacctaccgcgcgttatttgcgcaaaatacgaaattttcagccccaaatgaatggtcaacaccaaaaatggtcatggtatctctcatatggtagtgttcttctgtttggtgctcaccattggttgttggccttcaaatggtggatggacaccatttggatttgtacatttggggggtcttgggctcaaaa

SEQ ID NO: 89190 - DNA, 650 bp, Heterodera glycines
gcacgtcggccataatttataagggtcgagggtcgataaaatttggtatattttaaggtatgaacttggaatttcgaaacaaaaatttattgtttcactgaggcaaacgaaaaaaaaggcaaaaaaaaaaatcggtttgtaaatataaaaatgaaatattgtgtgtgaaaagatagaatcaacaaatgacggatcgaaaatttcttttataaagattttgacaaaaatgaccatggtcatgaccatagctatgagagtgggaagagaagcaaaaaaaagaatcgacatgccaattcaaagcaaaatttaaaaatttactttttaaaatgtaaattgttatcgcccaccccatattagagaaatcctgaaagaatgaaacaattcatttattgaccattttctttgcattcccaggaaattcacttttatgttcgtagctgtatagaatgatcattctttgatattccaatggtttgtgaccaaatttagcatgttttaatcaatttaggaactaaagtgagaattttttaaattttgagttttagactttttattcgaattcgggtccggtattcgaaattggtccaatgaaggtcatattcgtgatcagcgaccctgaaaccccccataaacatgtttccaagactttt

SEQ ID NO: 89191 - DNA, 1051 bp, Heterodera glycines
gaatcgatggaacaacaccttggccatcatcaacagctccattcaaaccaacttgaaaaaacaaattttggcaatggccccgccggattgctttcgccgttgcacttggaagggacgaggagaggagacccagaaggctcactcggacttttgagtagtgtttccgtttcgcatttgcatcgtccaaatggcggaagtcgaacgagcgatttactcaatggtattagacgcagcagcaacaatgttgcgtacattaaagaagaaattaatccatcgaacgaacttggagggtatcactcggcagcatctgtttcccatcatcatgaggcctacggggatgccggaccttataccctccaggggcctactgcccaggaattggaacggatggcaaatgctgagacgccaccagcacttagcaatgtcgagatcacttcatccattcttgcgtcactttcacgcgaatcgccttcacccaacatacagcagcaaagtcctcaccaaccaacccatttcattgtccaccaaatgtctcgtcaacctcagcaacttgaacatcaaatagttcagcgccacccaatcacatccactccctcaacaacggcacgtcgttcaaaggttaagcaacaatctctcagccaaaaccttggtcaaaactcgcagaattcggatcagcaaattattttagcttcgaatggtagtggaacacagtctggatacgggccgatgggacctggagctggaattcctcgtaccacttactcaacgacagacacaacagacccattgaatgccgaaattgatgacgaaatttacattgacacaaaggacttgtgcaaacgtgttgcgtatgaactaaagcaacattccatcccacaagctatttttgctgagcggatcttatgccgtagccaggggacattgtcggacttgttacgtaaccctaagccctggaatcgccttaaatccggccgtgaaacatttcgccggatgttcaattggctgcaacaaccattgcacatccgtctgagcatattggatatgtacaaag

SEQ ID NO: 89192 - DNA, 650 bp, Heterodera glycines
gtgcaaggggtgaacggacgaatccgtcaacaaagaatgtccgatacaatcaacagcttaggcgctatctgcaaatgagaagggagctgacagatagaccaaccaaagtggagttgaccaagggattgagtgttttgttgaagcgagatgggggtgctgatgaggacgacgaactcgtcaacactcacccacggactcccgctccaccaccacctccaccagccacctcatcactcatctcaactatattaccgtcgccctcccagccttcccgatcagcaatcttcctcatctgacgatagacatccgcctcgtccaccacgtcctcagagaacaaagaaaaaccatcaatcttctctgaaacatggtcgtttgaaccaatggcagcaaaggcgtcgtgacttacaacaacaacaaccggtagtacgtgatctcctcgctgaagcagcagctgctccgttacctgaaagtgacgatgacgatgaacaaatgctggaaggtgggtatctgctgccagcaccatcacaaaattatggagacataccagtattgcctgactatgcagatgaaattgaggaaatggacaccgcccaacaaagacttgcaagcagaagaaaattaaaagaggagcagagactagataaaaataa

SEQ ID NO: 89193 - DNA, 483 bp, Heterodera glycines
cgagcttcagctcgaatctgaagaccgatataaccgatttccattctcccaaaaggaattcattgaagattgtccggcagaacgactttacgtccgaatccttcccgaaatgactgaatatgtaattgccctgctcaaagtcattctcgcttcggtgccttcctccaaagagaaaatcgatgctgtcacaattctatccgatgtgctgacacccgaaactgacacaaatgagtaaataaagagccatttattcccttttgggacccttactccgattccctaattatttagagacctttctaattcgatcagtttggaccttgccagtttttcacacacaaatgtattggaagaaactgtccgagtcgcaattgacataaatcgacacaaagaactgatcatcaaatcggcttcgtctcttctcattcttttgctgaaacacttacgtttgaaccacacactccaatttgaaaacttggcccg

SEQ ID NO: 89194 - DNA, 1771 bp, Heterodera glycines
  unsure (1)..(1771): unsure at all n locations
ttacccaagtgattcctattcaccacctacctgctgtcctgttgggctagcgttggcaccaccaaatgcccccgtccgctgacgggcacaggtcgttcgagctgacttgtggacgctgcccaacattacggggcagctgcctcacgagccatgcttttggggtgcttccatacgttggagctgtggtataccgctcagtgctgcacatgttaaagcctgtgtatggctgctgcgtggcaatgtgtcggtggcgggctgcctcgcttggttggttcgctgcgccaatgtgggatgcacgctcgtggggcgacctaacggctgtgctggcgtctgtgcgtcgttgagcggttgttgtggcaggcacataacacactgactggggatggtggtttcgttcccggtcttacgtgccgtaactagcggtgtgtttgtgcttgctgctacgtccgtggccgtgatgagacgacgtggtagggcccgtgcttggcctagcacgtggcttaagactcaatgagtgtcagctcgggcaccgccagctttttctttttttttcattatttttttttacacttctgttgaagaatgaattctagtcttatcggtggatcactcggctcgtggatcgatgaagaacgcagccaactgcgataattagtgcgaactgcagaaaccttgaacacaaaacattcgaatgcacattgcgccattggagttacatccattggcacgcctggttcagggtcgttaccataaaatgcactgcttgtgcgttgcttcgtgggatcatgtacttgtacgtgttcttacgttacttgctcagctcggctgtggggttttggtgtgctggcgcgaacttgtggttctaattcgcgttttacggaccgtaactcgggcgcaccaatgctttgcatgctgtggcggagtgcctggattactggcattcctgctttgatttttcgacctgaactcagacgtgaacacccgctgaacttaagcatatcagtaagcggaggaaaagaaactaacgaggattcccgtagtaacggcgagtgaactgggaagagtccagcgttgaatcgcagctcctctggggttgcgaggtgtagcgtatagaccgtgagcttgggttggcccgcttgttcaagtttcccttgaccggggctccagagaaggtgcaagacctgtccaactggcggtgcctacccatctttacgtgtcttggagtcgggttgtttgggatcgcagcccaaatcaggtggtaaacttcatctaagactaaatacggccacgagtccgatagcgaacaagtaccgtgagggaaagttgcaaagcactttgaagagagagttaaagaggacgtgaaaccgatgaggtggaaacggacagagctggcgtatctggtctgcattcacccgtttgttgctgtacgttgggctgctagcctccagactggggtttgctgtccttctgttcagtggcgaatggggcatttgcaggcggagtgcgctgagatgctcggagtagctgcgtgagctcggtcttgaggccagcctttcggggtctggtaccccgccccgcccctctccccactttccggtgtccttattgttcttattttttgtagtttccccaattcatccaaatttcgtccccaaaaaactgccatttgttccctccttcgatgagaagcgatcagtgatcactatccgaaattgcaaaagatcagcaaataaaaaaggatagcncgaaaaaaaaaaaaaaaaaaaaaaaa

SEQ ID NO: 89195 - DNA, 638 bp, Heterodera glycines
ccaagtttgagatttataaattttcctgccctaaaaatggtagttgaaatgtcttccggtgctgcaacaactgcttctgccgctgctgttgctggaactgctccgtccgctggccctgtgccctcatgcatttgctcgtccacctcgcagctgttgacagcggccggcatggacggcattccgccggccaaaacgcccgcaaattcgggcccggacgcaaattttcttgccgattcggtgggcgtctcaccgctataccgccaagaagatactaaacgatggcaaaccgccgccaaagtgtaccagtcaagccgaagtcaaatgcacagtccaacctccggcacttgtgcaccgcaccactttcattttggcgaatcgctgacggcggagggacatttgacgcaaaaaattcgccaatgccgaagcagcggttcccccatttcgttggaggacattgccgcggagaaccgacaattccatcggcaaatggacagcggacagcaccggcgggtgaacggcccggcgctgaacggctcgctggagttggaggcaattgcggcggtgcatgaactcgcttcacaggtcaaacaaatctctgtctctgaaattctgccccgcacttccgacctgatcttcct

SEQ ID NO: 89196 - DNA, 800 bp, Heterodera glycines
cgagcttcagctctcatctgattaccgatataaccgatttccattctctcaaaaggaattcattgaaaattggccggtagaacgactctacgccccaatccttcccaatatgactgaacatgcaatcgccctgctcgaagacgatctcgcttctttgccttcctacgaagcgaaaatcgatgctgccacaatatctatccgatgtgctgacacccgaaactgacacaaatgaggaaataaagagccgtttattcccttttgggacccttactccgattcccgaattatttaaagtcctttctaattcgatcaccttggaccttgccagtttttcacacacaaatgtattggaagaaactgtccgagtcgcaattgacataaatcgacacaaagaactgatcatcaaatcggcttcgtctcttctcattcttttgctgaaacacttacgtttgaaccacacactccaatttgaaaacttggcccgttatctcgtcttggccaattgtcttccgctggtgcttaagtttcttgaccagaatatttgtcgatacttccaagcaaagcacgagttggccccgttcaactatcctcagtgtgcactgttttttgtgaggaatggatatgtttgtcctccattaactgcggaaaatgtcgacggttgcggtggttccagcgactcgccttcatattttctgtggcgcaatggcttttcctccatcaatttgcttcgtgtgattaacaaactcacaaagggaaaacagtcccgtacccaaatgttggtcgtttacaagtgggccccg

SEQ ID NO: 89197 - DNA, 874 bp, Heterodera glycines
gtttgaggcgcagcactttccaagctccactaaatttgtttttttgtgaataacagtcagcaaaaacaaagcaaaaatggacgccatcaagaagaagatgcaggcgatgaagatcgagaaggacaatgccatcgaccgggcggacgccgcggaggaaaagtgccgtcaaacgcaggaacggttggagcgtgttgaggaggaattgcgggacacgcagaagaaaatgatggcgacggagaacgaattggacaaggcgcaggaggacctgacggctgccaacaatttgttggaggagaaggagaagaaagtgcaggaggctgaagccgaagtggcgtcactgaaccgtcgcatggttctgttggaagaggagttggacaagcttgaggagcgccttaaacttgccaccgaaaaaatggaagaagcgacggccaattgcgacgaatcggaacgtgtgcgtaaagtgatggaaaaccgttctctgcaagacgaggagcgtgccaatgccatcgaagaacagctgaaggaggcccaatcgctggcggaagaagcggaccgaaaatacgacgaggtcgctcgtaaattggcaatggttgaagccgacttggaacgtgccgaggagcgcgcagaggccggggagaacaaaattgtggagttggaggaggaattgcgcgttgtgggcaacaacttgaagtcgttggagctcagcgaagaaaaggcgttgcaacgcgaggaagcgtacgaagagcaagtgcgtcagatggaagtgcgtctgaaggaggctgagactcgcgcggaattcgctgaacgttcgggacaaaagctgcaaaagggagtggacagactggaggacgaattggtccacgagaaggagcgg

SEQ ID NO: 89198 - DNA, 797 bp, Heterodera glycines
aaaccctaaaattgtccctgaaattcaattgctatgaaaaatttgccgcccgaacttttgagtgaaatgaccctttacatattgtacccaaacaaaaattttccgaacattttttcttcttcctggttactcagggaatttctgattccccatgtcactaaacgcaaggaaatatttaaaaaacgccggaatgaactcgaacgattgtataatggtgcaagacaagagccaatttggctctgtatcgtgtcatcaactgggccagaaaaacaaaaacagactatcgacaacttccttttttatcttgaagaatacctcaattaccccatttcaaatcgaccaaccgtggaagaagagaaggaattgtccgaccgattcctattactggtcaagttcttctaccattgtgaagaaacaattgcctggaagtatctcaaaaccaccacttctcgcaccgttcagcaatttcttgatgagctcagctcattcttcgctttggtcttggatttgtcacccgaacattcgcaacaccagcagcaaagtgaccacgaggcggtgccaactgatcagaccagttcggccgattcggaccttcgtcctctgcccgttgtcaccgagtcggtgccggaagaatcgacttacgatccgccctgggacgaccgctctctgcgtttcatcgaaaccatggctgctttgcaatcgcaccgatcaacaaatgtgctgcccactgttccctcaacatcggccgattcggaccctcgtcctctgcccgttgtcaccgagtcggtgccgacatc

SEQ ID NO: 89199 - DNA, 640 bp, Heterodera glycines
acagcatcattgttgacctgctccatggacagcacaaatcgacgctcacctgcaatgtgtgcagcaaaatcagcatcaagttcgagccgttctgcttcctgtccgtgccggtgccgaccaaggagcacaaggcccaatcgacgatcgtttttatgcgggccgagaaatgggcaaagtttcacgtcacacacaccagcaaaacgacggctggccagctgaagcaaatgctgcgtgaagaagtgcaattgccttccaacacacagatgatcatttattcgacttacagtaaccgaatattgaaggacgacagcacattgtcctccacctacatgtacaattacagtatgaaactgtatgcctacgctgtggagccgggccccgtcattttggtggaaaatctgttcatggccacctctccgccgttgttctttccacgtcccaccaaactgacgcgtcgtgcgctgcttgccgaactggtgccacgggtgcgcgagctgtgcctgtccttgtcgccgacgacgacgactgcagttgaagactgtggtgacgcgggcacttcttccgccgcgccctcctcctcctactgcaccgctttgatcccggcactgcccgcctccttctcgtcgccctcctcttccct

SEQ ID NO: 89200 - DNA, 677 bp, Heterodera glycines
gtttgagaagtgcttggctttgcttgccatcattcctgtcatctccccatgcttttcccctctttcggcatgctcagcagtgccatccaccaaaatcagcaccgccgttccgtccattctgttcgctatcattcgccgctgctttcatggccgaagcttttcctcatttccatcgcaacaattccccttctccttttgtcgtgcattgacttcgtaagtgccgtttcggacgacggcgcgccttttctgtccgaccaacagaaacgtggcggtgcgcgcgccttcaatctctttgcttctgctgctttcccaccgccgaatgagaagagaagcggcggacgtgcctttggaggtggcattcagacaattaacgacgatttcgatgctaatttggctggagaactgaagcgtgccggtgcccggttatttcggatgagtgacctttcatctgacggggacagtttcgtgccggaagggacaaaacgcggtggtgccaggcccttttacggcggcggatacattgacggagcgtggaaaagagcgggtggacgatatttcttgcgtcaatttgacgatgtgccgtttggcggcggatggatggccaaacgtggcggcggtcgctcatttttcgaaagcaccaaaggcccttttaattctgcaaattattgggctccaca

SEQ ID NO: 89201 - DNA, 649 bp, Heterodera glycines
  unsure (1)..(649): unsure at all n locations
attttgatttagatttgttaaaaagtccaattatcactgcattcttatgattctcgcttcttcgtcaaagcgattagcttgtcaattcctcatccgaaaagtgcctcattttgctgtgacttcctcgagaaaagagtccaattggtctgaagttcttgatgaagcggtccccgccagaaaatcataccgcgattttcagacactcaacggaaaccaacgcgatgctttggccgcatcactcttttttttattagtcaatggtcaccgcctatgggctcaccgggttcttgaaaacacctggtggcgagggaagaggtgcattcgaggggcgctcgacaacacgagaggaggaaaaaagaggcgcgggagaggatgatgcaaccaccaagcgacgacaatcccgaagcgggaaggcggaccagaacgcctcacgaaacagagtacaaaaaaggaggacaagagaagacgccccaaaacaaagacagccgcaccccagccgcggacaacgaagaatcgatcagcgggcgggccaacacgatcggaggcaagaccagaatcaacgccagcaaagtaanaagggcacaacacaccagaagacatgaggcccgggcgacagcgctaaagagggacttagagaaagcgaccgacg

SEQ ID NO: 89202 - DNA, 655 bp, Heterodera glycines
agcatttctcttacttgttcatccaaatagcccaatttggagttcatttccgattcggtgacccaactttcaagtgatctcgtttttctgcttctctttgaggattcgttgctatcatcggaaggcaagtcttgtacagcaaatccttcctccgattttatcaaattcagaccacatgagttgactttctttgtgttgttcaaaaatgtcaaaagaaaactgacctcatccgaaatccaaatattgtcaagttgtagtcctttacatgtgccaattttcgaaaattcacaggcacgggtagtgttggtgtcccacataagcaatgtcttgtcttccatctcacattggcctgccttgaattggcaattgttcactgacccgaggggactttgcataactgtgctcccatgttgtgacataattttagtcttaaaaagataacaattttcagttgagacaatcgaccaactaaatgagccaattagccacattcggggtgacaaatccaatttcttgtcagtatgcgagagtcccgagtcattagttagcaagcctaagctgcactttccattttcggccatttgcttacattcactctgagtaatttgcaacataagtggctcaaaagtctcttggatcggaacattagtgattg

SEQ ID NO: 89203 - DNA, 830 bp, Heterodera glycines
gtattcgtaatctttctaatagaaattatttcacaaaataaataaatatgggagcatttttggataaaccaaagacagaaaaaacgaatgatgcaggtgttggacgagactacaaatatgttgttgcctcaatgcaaggctggcgcattgacatggaagatgctcaccatgttcaaattaccataagaaaggaatctccgttcgaagaatggtcattttttgctgttttcgatggacacgctggcaacaaagtcgcctttcactccgcacagaatctgctccaaacactgctaaacacagcagaatttcaagcagtgaaggaagaacttaagaccaatggccctaaaatcacggaaaaggccaagtcgcttatccaagacggaattcgcatgggcttcttggagttggactcctcacttggcgagttgcagggaggcggagagagggagagaaacggcacaacggcaatatgtgccattctgaccccggattacatcttctttgctaatttgggcgattcgcgtggattgttaagccgaagaagcaacaccatctttagcacggaagaccacaagccttaccttgaaaaggaacgcgaaagaatcattaaggccggcggttcggtgatgattcagcgagtgaatggcagcctcgccgtttcgagggcattgggcgacttcgagtacaaatcagtccctggcctttgtgtcactgaacaacttgtttctcctgagcctgacatttacatcgttccgcgagacaaagaagatgatgagtttttggtcctcgcctgtgatggcatttacgacgttcttgccaacgaagacctt

SEQ ID NO: 89204 - DNA, 952 bp, Heterodera glycines
agaagataaaaaagcggctaacaacacttgcagcagcaacaacaataatagtctatcggatgtcaaacagaatgatgacgtctcatcgcttgactcacttggcgtttttctaaaccgttttcgtcaaatggacacaaaaaagttgcaacaattggcttcaaatccgacggtggtggcgcaacccaacagaccaaacgaaggcaccgcaaaagacacaaacaatgataacacttcgatcacatcaactcgggagaaaatgctcgaagtcgtttatgggaataagctaatgggaaaggagaagcagccgaaatttatgtgttttgttgtggatgcgcaggaaagaaaaattaggataatgagcagagaggagcagaaaaaacaggagagttccgccatcattttggaagaccttacggatgaccaattttctcggtttggcaaatccgtcaaggacaaagaggctgataactccgacgcattcgtccattgtgaaaaatgttctctgttctacgaattctgttgccttgatcatccgctttatcagtgcaaagatcgggtgccttcgtcttctcccacagaaattgaggacagagcggcggccactcttcctgcctttctttttattcagaattcttcaattccctccgctgggaaaggagtgttcaccaaagttgatattccaattggaattgtgtttggtccctacgagggcattctcacacaaaatttgtcggaaatggaattcggtgcttacacatgggaattacgtgtaggatatggaaaaccttcctattacattgatgccaaagaccctcgttatttcaattggatgcgctacatcaattctccgaggaatgagtcggaacagaatctgatcgccttccaataccagggcagggtgtattaccgcgtctttagcccattgaccgatcttcggaactattggtacgga

SEQ ID NO: 89205 - DNA, 648 bp, Heterodera glycines
gtgcaaaatccacctccttatatacaaaattcgggtgcaaaaattcatgcagcaaaaaaaagtgtataaaaggcgacggttttcttcacttttcaccagtgccagccagccttcaactcaacgcaacatcaacaccagtgcgcgccaagctcgtctacacatttcgtcgcgacaactcatcacttcatcatgagcgacatgagcgcctacatgggatccggccccgccgagcctgcaccgtcgtccggcgccgcggaagcctcttcatcgtcaggagtcgcgagcgcctacatgggatccggccccgccgagcctgcaccgtcgtccggcgccgcggaagcctctccatcgtcaggagtcgcgagcgcctacatgggagcctcgcccgcgtacgagccgccagcgcaggagaagtccccggatcagagcgcctacatgtgagaagatgcaacaacgaccggcggatggatggacgaaacctgaagagcgagcgacctgtcagaagatgcaaagataaagaagatgtcccataatcgtgatctgtatttattgatgtattgtacatttgtatgcatatatcatttgctgtgtattatcactttatttccatctgtgttccgaaataaattgaattgatggtcaaaaaaa

SEQ ID NO: 89206 - DNA, 990 bp, Heterodera glycines
attatgagccacccaatttggcaaatcggtcttttaaaacgcattaaagaagattcagtcgattgcttggagtgtaagcaaaaaaacgttattaatttttcatcttcatcattttttggtttaaaaatatatttgtatacttttttatactttgaaagacttttttattaatacagaatttttgaaaattcctaaaatccgcactcctgcgcaggatcctgcagattttaaatgcatgatttgcaggattaatcctgccggatcctgtcctgtaaaaaattttgaattccaatcctgcaacgggatccgcaaatttgaaatttccggtctctaactattaccccatttttttaatctttttgaaaaaaataagcgaattttttttaaatgactaataaataataaagagcttcaaatggccctatttgctaatgtttttaccacaaaatatcttccaaaagaagtgacacttttggtttttcgccggtcaaactctgaatttttttgcgttcgtcgttcgccaacgatttttgagcagacccgccagcaacactcgaactcttcgccacggaatgaccaaatccaacaaatcttagaccaatttgacaagatgcaattgccctctcaaaatgagcctttggcgacttcgcaacagcaaattgtgcaattgtcggagagactcatccaattggcactgacggcgacaaatttggtgtgcaatttgttgcaaaaaaacggagcagcagcgacggatcaatttaaaggacaaacaaaaatgccgacggtggcgactattgagccgaaaaatacgaaaagagacggaagagcggcagaaaatgagaagggatggacttggatttgtgagaagtgtcgcaagcgcaactcaatcctccgttatgagtgccaaagctgcgaaaagggacacccaacggaagtccagcgcgaggcaatcggtcgagcattgacgggagtttggctgtgtttcaattg

SEQ ID NO: 89207 - DNA, 889 bp, Heterodera glycines
gaacacgctctacgtgcactcactcgacgggcgtgagctttacaaactgccgttgccgatcgggtcggtgggcggtgtttttgcggaaaagtcacagtccaaaatatgcgtcggcttcgaggcgatcctcgacccgttcatctttttctttggcgatttctcaaaatgtccgtcccgcgagtcgcctctccaactgactgagacgcgtcgcgtgaatgtgcccgggatggactgtgatgcattccactcgaagcaggttttgtacccacgcgatgacggcacaaaaattccgatgttcattggccaccgaaaaggcgtgaaattggatggcagtaacccggcaattctcaacggctatggcggcttcaacattgctcagcctccatatttctccattactcgcctgatgctcgctaaacactttggcattgtatcagtaattgcaaatattcggggtggaagcgagtatggggaaaaatggcacgaggcggggatgctcagccgtaagctgaacgtttttgacgacttcattgcggcggccgaatttctcatcagcgaaaaatacacgaacaacaagaagttggccatccatggcgggtccaacgggggattactgacggcagtctgctctcaacaacggccggacctattcggcgccgtcgtcacccgcgttggcgtccttgacatgctccgtttcaacaagttcaccatcggcgctgcttgggctaccgaatatggcgaccccgacaaaccgggcgacttctccttcatttacaggtactcgccccttcattgtctccgcctcacgaacggcgtgaattggccggcaacactgctgatgagtgccgatcacgatgaccgcgttgtgcctcttcacaccttgaagtac

SEQ ID NO: 89208 - DNA, 797 bp, Heterodera glycines
gtgaagatgagcacaatgaagcaattagtccaataataagccgtgaaattcaggctgacattaaaaaatatattaagtattggggcagttgtccccctaagatcactaaaagtgcaattatttcaaagcctaaaaggtgtccttttccttttgggctcccatttcaaataaaattttacttttcgaaatcaaaacgccaaaattaaactctctctctctctctctctttcccctttatctttctctctccatcatctctttctctttgctctccgactcccactctctcccttctcactcctctctgtctcttagctctctgactctctctttgccacctgcactggacctggaccaaaacactgccacactcgaagagcaagaacgccaacgcaccctggtcttcattggcctcccggaaagcaatgccatccgcccatcggagcgtgttcaggaagacagggaagccatcacaaaaatactggaccatcttgaagttgaggcccaaccaacggccgtctttcgactcggacgatacgacccgcagcgaacaacaccacgcccgctcaaggtggtcatgccaacgcccacacaccaacatgtggcacttggaggatggaagcgcgagcgtgttcggctccgttcccaacagaacctgaaccgtctgttcgtccgtccggcgctgtccaaagaacaactcaaagaggaatacgaagcgcgtctccgaaaacgccaacaaaacccagctccgatggcaccggcaactcagctcccacagacaaatgccccgactcccg

SEQ ID NO: 89209 - DNA, 568 bp, Heterodera glycines
tctttactcgacaggtcggtgatccgtttccacggattaatcccatcgaagcaaagaaatcccttctctgcagagagtgcgctgacttcatttgttcagcgctccgccagtgtctctaatcgtcagtccccaatccaaaagaaaagacgccccatcaaaagctgtgcaggagtgtcgtgcccacccacacagcccaatggaaccccaaaagcagccgataatggcatttgacgccaacttttagtcggaggagcaccgtcagctccgccgggtcgcctttttctcgattgtgatctccaccgcggcggttatcgcctccatcgtcacgctgcctatgctgtacagctacgtggcctccttccaaagccacttggtccaggagacggacttctgcaaaacacgctcgcgtgacatgtggactgagatgagcatcttgcaccaggatcagggaggcgcacacggcgtgggcaagcgacagtacgggacagccagcggccggcctccagccgggtaatctccgctgctgcgccgggacataagctaccattgccagccaggagccgcgggg

SEQ ID NO: 89210 - DNA, 572 bp, Heterodera glycines
gtgcatcgatgcaaaaaatttacgaaagaccggaaaaatacaatggtggaggacgcgtcgcgacaattccattttctaacggagctttgccaacaaatcacagtttgtattctttgcctggtcggtatccgaagggcctttgcggcttggccaatttgggcaacacctgcttcatgaacagtgccttacaatgcctaagcaatattccggaattggctacttttttcatcaacggagaatattccgaacaaataaatacccaaaatcctctgggcacccaaggcaaattggcacaagaattcgctgaacttctcaagaatatgtggtcaggcagatattgcacctttagaccgtttcgactcaaatgcgttgtcggaatgttcgcgacccgtttcaacggatttgcccagcaggattcacacgaatttattgcatttcttttggatggccttcacgaggacttaaatcggcggattaatcacagacaaatttctaacaataggatggatgaaactgaaaaaagggaggacaacgaggaagagggacaatgtgccgaagatgggaaaagtgaa

SEQ ID NO: 89211 - DNA, 657 bp, Heterodera glycines
gtcagaccaccctttttctgtttatgcatggcatccgccgaccaaaaaaacacttcctccgccaccgcttcgtccgccgcttttgccagcgaccccccaaaaatgggggcggaaacaatagcaaagccaacggcaccaccgcaaaaaatgaacacgcattttttgaacagcagtaccacgccacagcaaacgcaccaccgcaacaacagcaagcagccgccgcaaccgcaacaacaaccgcagacggcgcgccgcaactccgctgctcgacggcacacgacaccggacatggcggcttcggccgcatacggaatggtgttgtgcggcagtgatgagatggagcagcggtacagaggacgcattgagaaagtcaaatttggcgttcccgtcaacgaggccttttgtccggacattccggcgacacttttggtgcttttgctcaaagtgaacaaagagggcccgttgaagaaggacatttggcgagcgccgggcaaccaggcgcaagtgcgcaaactgtcccatattatgcaacatggccgcctcgtcaacatttcaaacatcagcgtgtacacagccgcttcggtgatcaagcgttttcttgccaaattgcctggcggcattttcggcgtggaaaatgaacggcaactgttcgaggtg

SEQ ID NO: 89212 - DNA, 600 bp, Heterodera glycines
aatcgagcccgaactcgaagtgctcggctgtcggtggtcacccagaccaaccgaagcagcgacgtgaactgccgaccgaattgtccgaattttcaatttttgatcacccgagaagtctgactgagtgaaaagccaggccttcagtgctcgcacgccagcgtccttcattagtccgtcggaagtcactctcatattgtcaaaggagttgccgaatcggaaaagttcgtgaattgatcgcccttttttcgtcacccagacgggaatgaaggggtttaggctcatcattggtccaagacgtgcgaccagttcttcgtattcgtcgtgcttgtcatggacataaggcgggcatgtccagaagaacttcacgtgtgcaaaacgacggcacagattcgcgatcatttcgtactgttccatcatcatttcgacagtctctcctctcagaagagagtcgcgtccggcaatgatcagagctgccttcactttgctcgacagtaccactggcttcagagtgcgcactgtttctgccaatgttccgtttttgggcccaatcactgccgtttggtccaggatttccaacaattggtgagctgactgatcacc

SEQ ID NO: 89213 - DNA, 648 bp, Heterodera glycines
acttccttctgcctcttccttctcccataatcattttccttcttcctcttcctcaacttccatgccaaaatttcctgttccatttcttgccaattctctcaaaatttcttcacccgtttgtgctgatgtgactccaaccgaaaagaaagcaacgacaatcagagaagttcggacacaaaagcagcaaatcaaaaaggaagaaaaaagcgaagcacaaatagcgcaggaaaaggaaagagaaagggtcaaaagagagaaggagagggagaagaggaggacaaagctgtccgacgcattttctgctctccgttcatccattccgactttggactacaaaacgcccttttccgataaaatggactgtgtaaaacggcttcttccttttggactttattccgagactgaactgtccgatgatttcctacaaaaatttgatggtgaaatgcaaaggcattccgaatttttgtgcgaacggatggattcgttgaaagaacgtttccaatccattttcctcacagaatcattgtgcgaaatgaaagagcagaggaaccttttgctccgtttggatgttgaatttgaaaaggcccaactccaaaaagccaccgaagcaaagggagcatcttttccatttccaattaactcgtcaag

SEQ ID NO: 89214 - DNA, 661 bp, Heterodera glycines
aaaacctcacctcatttgaaaacgcctcatttttctccatgtttaaaattgttttattgtatcatatttattctgcttttatttattgtaaaccattgaagaataattgtgacggaatacatcattacaattttttgttgttgttgtttgctgtattaggatatattccttacaattcgttaattaatgcattttttaaattttgggttttaatttgtcaaatattcgattatttgttgtgcattttattcctatgggctgaaatgagttggctgcccaatgagaatcttttggatgtgttcgcttttttgtccgatgttcgcctcctccgttcggtttccttcgtttgccaccgcttttggcgtttgtctgagttggcacttttcaaatttcacccaatggtggccaaaagtgttcgcatcggttgggacccaaagaatgcttcgcactatttctttgttcaaagtgtaaaatgtgccgtggctctttcgaatttggcactttccgttggcccatcggacaattcgtcgtccaattggcccccctctctgccgcccccaaatattgttggaatccgacgcattcgaatggaaggtcatcagtttaattccgttgaattatttaaaatttgtaaacattttttggtggcattttttgttaa

SEQ ID NO: 89215 - DNA, 824 bp, Heterodera glycines
tgtgcttttaacagataaaaatgttttcaacatttttatgcctaaaaatttcgaccccccaaaaattgaattggcaaattctcatatttctcgggctccaaaccgagacaaatattctcaaaactaagttcgagtcttgactattcccttcgtgttttggccaaaatttggtcccgaatttttgggccaaaatttcaattctcgaattttctgggtttgggccaatcgcatctctcgctgctcaagaaccgggccttaattcttgaggcccccgagtttctgccatagtgaattgccaaattaaattctaaattcctggaccatgcccatggcggtatgtgactgcgtgacggcaccgtcggcccatcggcataactgtgccggtgccgcgcgtgcggtgtggacacaaaggaggacggtgccgtgccaacgcccgctgaaaattctgccggtgccaacgctccaaacacttcggcgtccatgcgcagcaacatttcgttgagcactttgaagagagggcgtgcgtcgtgttggagttgcgcattagcatcaaacaaaatgtgccgaagcgcgtggccggcaaagtcggggtgaagccgactagtgatcagtgggccaagcgagaggaaaagcatcggaaatgggccgttgggctgcgagtgcgcggacgactgaggcccatcggtgggctgcatttgtggcggtgtttggacaatcaaaatcagaatgtcttcgccacattcgcccaaatgccatcgttcgcgcaacacttgcgcataattatccgcaaaagcggtgaatgagtcgaacagattacttaattg

SEQ ID NO: 89216 - DNA, 592 bp, Heterodera glycines
ggcgcctctcggcaccgccggacccccttctttcccaagagttttttggaataaacacgccgcaaaaaagtgatgtgaaaagtaaatctgaattcaaataatattcgatcatttagtccaaaatgattaattctttgaaataagtgaagaaaatttgtttgaaaattttcattaatttaatttagctctaacttttggattttattaaataaaaaacaaaataaaatttaattttgtataattttctcttggaataaattaaatttgaattttttgaatttttaaaatttcccggttggtcccggtcccgaacaaaaatcgaggtcccggtcccggcttctcaggtcccggcaagtcccggtcccggttttgcccaaaattcccggtcccgcttcactctagtaaaaacctaagaatcctctccctactcatgattcagctccaatttgcgaatcttttaaatgtttttgctattgtcaatgtccgggcgctatactgtgcttttggttcgcacctttaaaatacgtccatttttcagttcttacgggttttctagcaaggaaatacggaaaagcttttttgacttttttgt

SEQ ID NO: 89217 - DNA, 596 bp, Heterodera glycines
aatattcagaaggcgaactacacagtgccacgcaagattcagtcgcttacctttccgttgatcaaagctggtaggtcataacattattcgacggatgcgaattgaaacaaatttaggacacgacttgaagggtcatgcagagacggggagtggcaaaagtgcagccttcctgcttccgatcatcgatgccgtcatgaaacttaaaaaaggtggccattacaaatcgcggcgctgctgtccgtttgcccttatcgtggaaccaactcgtgagctgaccgttcaggtgtacgaccaggcgaggaaattggcagaaggttagtgctcatttcatgaattaaaccaggcaggctttactgttttctttgaagagtgtgatgtgtctgtgtctcgcgcctacggaatgtttctgcgtcatgttaaccttcgtcaaatttctacggatggttgtgatattttggttggcactccgggacgtctttgtgactttttccaatcaaaaaatgtaaaaaaaaactatattattgtctatctcataattttagcttttgtgcgaccaaatcaaagttcttgtctttgacgaggctgaccaattgctg

SEQ ID NO: 89218 - DNA, 647 bp, Heterodera glycines
ctttggcagcacattccagggtggtcgcggacccatttttgcatactttgaccatccgacacgaggatggaaacacttacgaagttaatttgttggaagaacaagcagctgatcctgaagccgcggcctacatttcgtttgtcagggatggggaatttccagctgatttggatgagaaagaaaaataattatttgctgtaggcactgccaattacaaattaatttcgggaattctttattttgaggacaagggttccccccccaagaatttatgtaccaatttcattacgtgggctcattttcgaatcgtttcactcctctctattgggagacggtcatttaaattacagaaaaacaattgccaaatgcaaaaaatatttttgcggaaccaagaaagtatgaacttagaaaaaggaacagaacttggaaagatttagtaaattattgaaacttattcgactactttcaatttttattttttcactttggtttttcctctcttcccgccactcaatcaaaatcaatgtcatccaaattaataatggtatccttttcttttgttttcttttgtggcacatgcccctttttcttttgtctcgctctttgttcccgcttccgtgccgcgagctctgcgagacggttggcat

SEQ ID NO: 89219 - DNA, 984 bp, Heterodera glycines
aatataatgaaagccaagcaaattggacgcacaaacactacacggatttatcttcaccgattgttcattatccttcttctaccaattcgccatccatttcgccttttctcccccaatttcgttctctttcgtccgctcccaaccgtccccaacaattgtcctcctcatcttcggcttcttccgattcgtctttgacttcttcgaccgcctcgtccactttgaattccacgaataacacaaccgaaagcgaggaaccttttcacggccaaagccgcaagggaacgtcgcaggaagagagccgaaatgagacacatgcttctcgcctggacgattccatcctcaaccgtttgttgcacatcgaaccgccaaatgggaacaagcaaaagtcgttgaacaacacatgccatacatttgtgacgaacagccgaaacgaaagcccaagcgatttccgttggattgaaacggccgatggacttggagaaaacaatggaagaaaaagctgtgaccataacattggcaaagagttggacaaattgcgcgacgattttcactctttgcaatttttgcatgctcaaaatggtcgtcagactaaagaccgattggaaactctggagaatcgcatgaccgaattgaatgttaagctgagaaggttggacatacaaacggagacaaatgtgggcgaacaaaaagcgcagatgacaagtttaatggttaaaaacggacgattgtgcgaaaagcttggcgaacaccaaatgggactgaaagcagttcaaaatcggattgaattgctggagcagtgccatctgcgcgagttcgttgcgggtcttccgcccgttcatgaggacggctcattggttttgtctcaatttgaaaatggcaattatttcgcagagatgaaaatactgttccagtcgggttctcgcttttgttcgggctttgccatcaaaagctcggcacactttcgcaattatccgtcgaatttat

SEQ ID NO: 89220 - DNA, 638 bp, Heterodera glycines
ctatgacagtgcggccaatcaggatgcagctgtaagttcatctgttgtttaatctgtcaaatttatcaattattttgtttcaaggcagcatttcatcagaacagtgccgactacgaagcaatggtccgagagcatgttcttcaaaatgcgatgccgcaatgagcgtttcgaggacgaagaaacgaaagcgaacgcaacaaaagaccaaaatgacttagacttttcagcagagacacttaattatgctaattaattgtttgtttgtttgtaattagtcgtcagccctccgtcgctttcaatgctttgagccaatctttcgcgagatttcccaagccctgacttttcttttgttgagaccgtttttctcccaatcactgcccaaataaatgaaaaccatccgccgatcgttttgagcttctttcttttctcgcacaatcccatttctgacagcgcgccgtcgagtggattcatagagtgtgcatgtctctcacatttccttctgtctgtgcctccccctcaaaaaggtgcgtcagccgtcgtcgttctcccaaagccttccgccggccaatcgatttgtgaccattaaattttgtctggttctttagccccttgcccacttctcatcctttaatctaaac

SEQ ID NO: 89221 - DNA, 605 bp, Heterodera glycines
ctcttcaacttcggcatgatcagtccctgttcttcttcctccattcactggccattgaattggcgtcccttcgctttgtttgtcgtcctttttggctttttcactgcaaatagtcaaatgtttgtgtccgcttctgatgacaaacgaaacagcttcggcagagatttccttcccttcggcaaaagaattgccaactccgaagaaaactttcaacgcgattttatggcatttggaaaacgttcgccaaatgaggccttccaacgcgaatttatggccttcggaaagcgaggggcaccgtctgatcacttccaaagggattttatggcattcgggaaaagagtcccggacggatttcagagggaattcatgacatttggaaaaaggagcagtgacattggcaggggaggatcattcgacagggaattcatggcatttgggagaagaaagtgaagccgaaagggagagacggcgcgagagaaaaggacggcacgcactgatctaaggatgggattgatctgatcgacagaaaacagcaaaataaacagattcaaatcaaaatattttctgagacgaaaagcggatgacagtgaggatgttgataaaag

SEQ ID NO: 89222 - DNA, 626 bp, Heterodera glycines
ctaaaacagaaaacatctgcgaatacaattttcataacattttgtcaggtcactgatggattttgaaaatgttggcacttccgtcgctgctccatttttggcaccattgagcggaatcgttgtcacatttaccggattgagcaaagaaaaacggcaagagttaattggtttgctgcacgaaatgggagcgcaaagtatggcggcgatgaattgcaaagtcactcatttgatcgctgagagatgcgaccccgaatctgagaaatacaaggcaacttttccagaaacaaacggcgccgttttgagttgccttgcaaccacagctatttagttcgctttaaggaagctcggcgcaggaaattgccggtgttgttgccttcatgggtttttgctgccaattccatggaccgccgtttaaaggacactttaaatgtcatcacttcagagaaacaccttgacactcataaaactccactttttgctggatgtgtatgtttaataatcttccttaataaattcggtgcagccttcgtaaattgggtttcacgtcttttacttatttctattgacttgtactctctctcacttcagggtcattcaataggtatattatctttttatttgcataa

SEQ ID NO: 89223 - DNA, 1176 bp, Heterodera glycines
ccaattcattcgttttcccttcttttttcttttcctccatttctgtcaatttgattttgatttctcttggaaattctctgaaaatgccttcctccgattttccgatgccgtacacttcacggctcagtgagccttgcttggcaccaggccaatctttggtcttccaagggtccgttgattcggatgctcgtcattttgaactgtctctgatcagtggggtgcctaactcaggccaagagcgcatcgcccttcagatttgcttccacttcgaagtcggcatcaccattttgaactcgatgttggaaaacggcgaatggggcgaggaggagtttcattcgaatcccttcttccatgggaaaccatttgatgtgcgaattcgagtccacgagaaaagattcgacttttttgtcaaccaagtgccgtgggctgtgttcgaacaccgcacggatttccgaaaaatcgaccacatccaagcgtcgggcgacgtttcgctgtccgccgtccattggggcggccgatacttcgaaatgccgtacgaaatgactttccacgaccacgcgctcgaaagtgggcagcgactgttcgtttatggcattccccgcggcgatttcgccgtttcactgatcagcgacagtttggaggagctgttcagaatgagtgcactgttcgacaagcaaattgtggtccgaaatgcccaaacggacaaagaatggggcgccgaagaaagtgaaggaggccctttcccgttcagaaagggcgaggggttcgacttggtcattctgaacgagccattggcactccaaatttccatcaatggcactcccttctgttcatttttccaccgcaccatcgatgcccacaaagactacaaaaaggtacgcattagcggtgaggtggaattgaccgggatggaagtgagtctgtgctgggaaagtgttggaggagtgtccaattgctgcaaatatccggagggaagggcccagcggacgaacgcggccggggagaacgtgcagcagccgattggactgagccgttgaaaaagcgcgcggggaaaggctaatgaatggacggctaatgtcgttcggtccagcggaaacgccgtttgatcttccgctaatcattcgaaattacattaatttgatcagtgatcactcatttattcccatcaattttgtg

SEQ ID NO: 89224 - DNA, 653 bp, Heterodera glycines
gtccaatgtatcccaagcaatcattcaattccggactgctcgacagcttcgtcttccgttccgttttcactctccacaaataggggctgctcaatgagtgaaaataattttcggtcatttgccgtacaatgtgccaaaaattcgtcgcaatgccgtccttcgtccaccatcacttaacgcttctgtgcctcttcctcggcgccctttgcgccttcggtgccgtcccttcgctgtgccaacttttgggcgcccctggcggatgttccccaatcgccgttctcagcgcggcgcaacagccaaacggcggcggcgccgcggcacagtttcagcagccctttgggccggcttttggctgcccgctgaatccgctgggtgcttttgggcgcccatttcccccaccgccgccgcccccaccgccgggcatcggaggccaatttccatcgatgcaaggccagaccgtgaatcttagcccaaatttcatgggcggaggccaacagcagcagcaaaatgggggggaatgccttcggcacaatgggcggcggcggcaattgcaattgtggcacgtgttgtcagcagcagcaggagacgaacggcaacagcaacaacaacaattttattggcatgccaacagccaacgaatttaccggcttcaa

SEQ ID NO: 89225 - DNA, 800 bp, Heterodera glycines
ggtaatcacttaattaatatttgctcgtgtgtctggcgatgtttgatcaacaacagaatctgacccttccgggcccttcttccgtttatttgccccccaacgacagcgaaatgttcggccgaggccaaaacgaatcggcgattgtttctgtcgtctgtgaggagcattatgactattatcagccaacagaaaaatggcttctcggcgtcgtggcattgcctttcattctgtgcggcctttgtgccaatggaatgtccgtcgccattttttcccaccgccaaatgcgccaacagtccgtcaattggtaccttctcgttttgggcttcagtgatttgatcgttttgctcggcgccttcttcgttctcactttgccgaggctaagcgaaattttgcactggtggagagggacggcgataagttattattcgacccctttgatgtattcgctgatgacaatggcgcaaacgaccagtgtttggatgaccgtggccatgtctttgcatcggttcgtcggcgtgtgctttccctaccaatccggcaccgttttggccacacgaaatgtcaaatcactgattgttggcattctttttgtggccatttttttcaatggatgccgattttttgaggtcagcttccaagtgtgtcggatgaagccaataaatgtcgaattgcccgtcctccgaatgaccgcactcagacaaaacgaattgtaccgcaaagtgttctatgaatgggcgtacactttgattatgttcgccattccgttcactattctgattgttgtgaattcgatggtgatt

SEQ ID NO: 89226 - DNA, 944 bp, Heterodera glycines
aaaagaagaaaaggggggaggaggagaaaaagcggacaatggacgctgaaaagagcgcattaaacgaaacagtcccaaccgaaagtaccgccaatttgactacaatggaacaaacggtccctaaagtaaaggaagtgaaaccgaggaggtcgctgttggcccaggcatcccaacaacggcctccgttgccacgcgcatctgcgcaaagttcggccagtgcccctacgcaggttgctctcccacggagccattctcgctcccgaatcactccgtctgctcgtccggtgctcagttctcgcgaaaacacttccattgcactgaaaggaaccgcaccaatgtctgggatgacccgtcgttcaatgaccacgaaaagtcagtcggttgaacacgtcgcagtcgcacaaaaacatttgtccggcattggccgaaacatcgcaaacggaaggacgaaagagtcgaaaagtgcgaatgcatccgacagacagcgaaaggaagtcgaagacgaactgaacaggacgaagcaaatgctgaaacagaccacaaaaacattggatgtgttcgctgtggtggcatcacattttgacagaaaattggacaatgccaacaccgaatcggctgttctgatggctcaaaagggcgacgaggcggcgcaacaccaaagggccatcgccgagctggactgcaactggaaaaagcgacttcagcgggcgaaggaggaccatcgagtggaattcgatgaattacgcgcaaaaatttcttctgaacaagcggaaaacatcacgaagatccaactacagcatcaaaaaaccgtgaacgaattggaaaaacatgtacagaaactcggcaaaaaactggcggaacaagaagaaaaacaccgaagggaattggccgaatcggcgagtcaatcgacaaatagacttcacaaagaattggagagtcggaat

SEQ ID NO: 89227 - DNA, 633 bp, Heterodera glycines
atttgaaatcactccgccgatcattcacaaaagctcaaaaataatcccccgtaaagcgaacacaaaatgagaatgacccaagacgcaaatttgagcactttttgtgcccttttcactttccttctgattgttgaaggaactttcggcatttttggcattggcagcagtgacaatgacacaacgacgacgacgacacagggagggggagggacatcgacgacgacggcaaaaccaaagggaggagggacggcacacgacgaaaaccattccgatgactcatcaattcgcggcaaagcgcgcgagaagcgacagcaaacgaaccaacagcaacagcagccgaacttggagtctttgcccgtatgtgctaccggacagtcgcccattgcgccaattccgcccgccggccccgtccttccgatcggcgccattccgcccaccgtcgtttgtctgaagtgccgcccgcccaacggcccattgtccgggaacaatggcgcaaatggcaacaacggcacttaaaagcatttgccattggacgctttgtgaatggcaaccggtgaagaaaaaagagaactaataaatgccatggaaaaagcatttggacgaacgctgactaatcattgcttcttgttttct

SEQ ID NO: 89228 - DNA, 913 bp, Heterodera glycines
ggcaggacaagaaaagaatgaagttgatgcctcatgaaactcggaattggttatgttttgtcgaaaatatccttacataatactcataaaaaatacaaataattcaacccacctattctatgaccacattctgaaaaaaatcccagaaatacgaggaaagatatgcttggtcacaataaaataaaaaatggctagtatgtaaaaatttgcggccacaaataaaataaaaaatggctaatatgtaaaattggcgtccagaaatttttagactaatccgaagcaaagcacgaatgaattaaagaggcgaaagaattcacagtatcgtttctaatagggaaatattgacagaatattcggctaaaaacgggtttgatcatttttagcgcatttttaggtatacatttgagacaattgggcaggacaagaaaagaatgaagttgatgcctcatgaaactcggaattggttatgttttgtcgaaaatatccttacataatactcataaaaaatacaaataattcaacccacctattctatgaccacattctgaaaaaaatcccagaaatacgaggaaagatatgcttggtcacaataaaataaaaaatggctagtatgtaaaaatttgcggtcacaaataaaataaaaaatggctaatatgtaaaattggcgtccagaaatttttagactaatccgaagcaaagcacgaatgaattaaagaggcgaaagaattcacagtatcgtttctaatagggaaatattgacaggatattcggctaaaaacgggtttgatcatttttagcgcatttttaggtatacatttgagacaattgggcaggacaagaaaaaaatgaagttgatgcctcatgaaactcggaattggttatgtttagtcgaaaatatccttacataatactc

SEQ ID NO: 89229 - DNA, 596 bp, Heterodera glycines
ccctcaaataaatgggccttttccgtgtgctcatctacggcattattctcggcgtttacgccagtgcgttgttttacgatgtccgctttatgccgcggctgggcgtcgtctggtgggtggagaagctggtgatgttgtccatgctgaatttgtctctccaatcgttttacgctttgctttgttttgtctgtgcgctgttcgattggaacgaagaatttgtgcacggcgaacagcacaaaaaggtgaaggcgacccacgtgcccagctattggcggcgcagtcggctccaccgcatttgcgactttgtgtacgccaccgccgcatttcccgtcggaatggcaagttctctgatgttttgggctctttatgtggccgaccctgagttggtgatgcccgcctgggtggccaagctggtgcctgattggcttaatcacgtgtctcacacggcccccgtcgcttttgtattggtggacactttgctgacttgtcaccatgcacccgatcggaagattggctccactgttgtcgtcgcacttttccttttctacgttggaataattatatccgtccgtctgatcagcggtcattggctgtac

SEQ ID NO: 89230 - DNA, 576 bp, Heterodera glycines
ctctatagccttttttgggtccaagaattcgaatatcttttcggcaccttatcccgaccctgatcccaacccttttttccttgcatccatagcattttttggacccggaattcagtatttcgaaaattgacatcccgaccgtggtccaccaatctcccttttccccaacaaacattcttaacgcaacaaaatttggggctggctctccattgttcaactctcatcaaaaccaatgaattttgcttgggcctgacttgtcccgtcccaactgagtacacaagagagccaaaaaataaaacatttttcgtttgcccattttggcggattgaaaatgttcagtctccccgttctccgttcacaaacacagctccccccccccaatctcaaatttcgcgcatcaaccaatttcactctcggttagtttcacaaataaacaattctttgccaaccccgcgcctccggggacggcggacggggcggggatcgggcgagatgagtaataaataccccaacccaacccccgcccccccctctctttttaatgtcatataattcacacaatgttcttcacttcct

SEQ ID NO: 89231 - DNA, 1220 bp, Heterodera glycines
gtccgtccttcgactttacccaaccgatgaagtcgaatacggcgaacagacaaaaacggagcctttgagtgccacaatgttcgaagctctgagccgacactttctcggcattgattttcgcgagagaaatgccggacatcgaattgacgaacacatgcgcgacgaagggttcaatgtgaaggcgtacatcgacggacattccggactgatctttgggggcaatcgatggaattgcggcacgtggatggacaaaatgggcagctcagaacgcgcgggcaatcgcggagagccggcgactccgcgggacggcgcggccgtggaactgcagggactcgccctttgtgtcgcccggggactcgaccgcctctgtcgcgacagggcattcccttacaacggaatgaaaggagaatcgtcgtcctttttgtcgtggtctgattgggctgcaaaaatccaacattcattcgaacaacactttttcgtcgaccacaattgccagtcggagttcgttcatcgccgtcccatcgtcaaagattctttcggcgcttccctcgccttcgctgactttcaacttcgtcccaatttttgcattgctttgaatgcctctccggacattctcccccctgaaaaagcatgggccgctttggaaattgcaggcgaagttttggcgaaaaatgctccgtacggaatttgtactttggacccaaaagattgggcttacaacggcaattacgacaacgacgatgatgggacgaacagaatcagtgccaagggatggaattaccaccagggaccggaatggctttgggttgccgcgtgttacatgagtgccaagttgaaagtggcctcgctgctgttgcacaagagtggtgactcatccgcttggctgtccgccgtgggcgaaattcgacagcgattattcgccctcgagcaatgcttgaaccgaagcgactgggcctcgcttcccgagctgactaatcgcgcgggggcattctgcgcccattcgtgccctgcccaggcgtggtcggtcgggtgtgtgatggaaacgctggacactttggaagcaatggaaaaagaaggaatgaatttggaaggacgaaaaagcgatcgaagggcaaatgacaaacagaagaagcactgatctgacagatcacttcactttcaacacttacttaggcattgttagcactgtgaacttattgcgagccgttaatcttcggcta

SEQ ID NO: 89232 - DNA, 1729 bp, Heterodera glycines
cattcatcaagcgaatatggaacgagtgagagaggacgaatatgaaaaaattggtctgatggacattaaacgggaaataaaagccgaactcaatgaagcgattggtcgccaaacggaagatggcgaaacggagccaaaggcggagagagagcgcgagaggaaaagcgacagagagagggagcgcaagaagaagagcaagcggacttcgcgagaccgaagccggtcgaagtcgcgggaacgcaaacgatcacgcgaacgccgacgaagtcgctcgcggtcgaaggaacgccaccgcgagagagagcgaagccgagaaaaggaaaggggcgaaaagaggtcgaaagtgaagagcaacaaatattgggatgtgccacccgctggctacgaacacatgagcccgaaggagtacaaagaactccaagtagtggtcgtccattagaattgcgcaagggtgctgaatcgatggattttttagcatttaggtcttctgtacggtgctttccgaagcattttggcggaattttaacttttagcactcaatttggtcgtctcgtcgtttttcagatttaagatactccgccaaatgttaatcgatatgaaagtcttttaggttttaggggaaaacggtgtcctgctgcatttttggattcatcccaacccaatagcttatagggtgaccgagcacaatcacctcgcaacaaacgcagaatagcattcccactttcttgaattcaccacttttattttagctaccggcgccatccctcgggccaccctccaatcgtctgttccggtggtgggcccttcggtcacttgtcaggcgcgacggctttacgtcgggaacattccattcggttcaaatgaagacgcaatgctggacttttttaaccaacagatgcatttgtgtggtttggcacaggctccaggaaatccggtcattgcgtgtcagataaatttggacaaaaacttcgcgttcattgaattccgttctattgacgagacaactgctgggatggcatttgacggtataaattttatgggtcagcaattgaaaatacgacgacctcgcgactatgtggctccaaccactaattacgaactgcttggcagaatgccagtctctaacattgttgtggacagtcctttcaaattatacattgggggactccctaaccatttgaactcggaacaagtcaaagagctgctgagtgcgtttggacagctgaaggccttcaatttggtgatggacacgaccaccggaatgtcaaagggttacgccttttgcgaatatttggaccagtcgctcactgaccaagcagttgttggtctgaatggaatgcaactcggcgacagtcgtctattggttcagttagccgctgctggagcacgtcaatcggtcacccatccgagcactgcggttcaaatcgcggggattgacttgtccagaggagccggacccccaacggaagtgctttgtctgatgaatatggtaactgaggaggaattgcaacaggacgaagtttacgaagacataacggaagacattcgcgttgaatgcaacaaattcggaaatgttgtgagcatggaaatcccgaggcctgggtacgacgagcgtggtgttggaaaagtattcgttgaattccaatctaaagaagaatgccagaaagctcaggccgcattgactggacgcaaatttgatagccgagtagtggtcacgagttacttcgac

SEQ ID NO: 89233 - DNA, 969 bp, Heterodera glycines
cgttcgttctctttggcccattgaaagtgtctgcgatgtccgccgcctttgaacgtttctttgtcgcgtgtgatattcctgccacaatggtgcccaaatatgcgagtcgattcgtcaaggaacgcattcatcccgcactgatgaaagacctcggcaaagacgatttgcgtgagttgggcgtcacagcgttgggggaccaattggcgataatgcgctacataaagcaatgcgaagggaatccgccggagtttaattcggtcgaacaatcaaagcgaaagtcggagtcgcgcggaagggaaactgccgattttgaaagtgacgaagatgaaccgatgctggtcgactcaaactcatcgagcagtttcaaggcccccgaccgagaagacatttaccacataaaaatgccaattggaacattgccgaaaacgcgtaaaattttggaaaagaatcgctctcttcgcgacagaggtgtgcttaagcgtggcgtttctggggttcgacggtccggcattgaactgaacaaacctctgaacacaatttcgactcggtccaaagtcatcggtcggaaggcaatcacgcttcaagacaccgacatcacttcctcgacggcatttgtccctttggggtcaatgcgaagcgattcgatctctacgaaaacgaccgttgtggccgacaacactggcaactcgagacctgtgagtttggcaaatcgttttgcctctctctccggtgctgcgccaaacattctctttcaattggggaaagtcgtcagtccctccgtacaactcatcccatcgcgtcgccccctcgtccgatacagcagtgacattgacgacttctccacaaccgccgagccattcagcgaacttacaacagaaatggtcagaaaagtgcgcaagaataacagcgtaacatttcaaccgccggcgttccgtgctccaatcgccgaacgtattcaaattggtggac

SEQ ID NO: 89234 - DNA, 674 bp, Heterodera glycines
aattcgattttatctttgggttcatatttctcggctatctaaatgccaatgctgaatgcgtccttcgataaattcaatatttctaattcggataaaatccgaacccagcggctcatatcaatgagtgaaagttgcgaagagtggaaaacatgcaccaagcgagaaacatatgcacttctcgaccaggagctgaacaaactgttgaccacgtcaccccccgagaaaatggagtattggaaaaatttactcgatggatttatggatctttttgctcgtttcttgcgcgccaaaaccaccgtcgaatggtccaaaattgagccgttgcccgaaggggcaataacgccgtattcgaagcttgaacaaacaccgcgggaccgtgtccgtgaactactcaatgggttggttgtggtgaagctgaacggcggactcggcacttcaatgggctgcaaagggcccaagtcgatcatttccgttcgcaatgagctgaccttcttggacttgaccctgcagcagattcagagtttgaatcgtgaattcgaagtcaacgtgcccttgggactgatgaattcatttcaacaccgaccgacgacactaagaagctgcctcaagacagaccccacatgtttaaggtagagggggcacttctttttgcccaagtcgagataccccctgta

SEQ ID NO: 89235 - DNA, 875 bp, Heterodera glycines
ccaacgtcaaaaaggcagaaatgcgacttggacagctaaacaaaacgttgtcgaaaaagcggagtgaactgcagcaaacttcgcggcattccctttctcaaaacgacaccaaaagggagttggaagttggcatcgaacagcttgaacaaaagttacgcgccctatactttgatccgcagttggaccaccagcttgagcaggagcgtgttcaattggccagagaaagagggcaatgtgcgcaagaattggaccggtttgaggccagaaatttcaaactgcgctttgactatacaatgccttacaacggattcgaccggaacaaagtgaagggcgtcgttgctaaactgtttaaaatgaacgaacaaagatatgccacggcattggaagtcgttgcgggtggtcggttgtttcacgttgtgatcgacaaagtgaagaccggcgaggatttgcttaaggcggggctgccccgtcgggggacaatgcttccgctggacaaaatcagtgcaaatgttctcgaccagcggctaattgggcaggcaaaacgaatggtgggcgaggagaacgtgttcttccccggagagctgatcgaatacgaacgggaaattgagctggccattctcagcgtttttggcaattgcctgatttgcggggacatggaccaggccaagcagctgacattcgaccgggccataaactgtcgtacagtgacattgtccggtgaggatttcaagccgaccggtgtgctgactggcggattccggaagccggacgcgtcaattttgactgcgctcaacgaaatcagtggacaatatgaacggatccgagagcttgaccaccgaattggcgcaattgaaagggaactcgcaagactgagg

SEQ ID NO: 89236 - DNA, 1611 bp, Heterodera glycines
gatttgtgttgttcgttttaatatttttcgtgtccactgattttactgtgcatcgaaaggacagaaaagaaggaaaaggcgggcaaaggaccgaccgaccgaagacgccaccgccgcaatgcccggcggatccttcccgccccttcccccgacgacgtcagccaccgccaaacccaccaaacagcgtcaccaaaagtcctcttcttcctccgcttcgcattcgcctcattccgactccgtcctcttcctgcacacctccgtcaacagcaccaaacagcagcaacaggaacaacaccggcaacggcccgtctctgtcccaccgtcaattggccctggcgtttttgcagaatttgacagcaccgaaggcggagcagcaacagccgctgatacgatgaattttctcactgagaagagttcgacaacccccgcaatgtccgctttgctcggccgacagccgacgatcaccgaagacgaagagaatgagcgggaggaagacgaggagcccatttcaatgcctgattttggtgctgcggtgacgcgcattgtttccgatttcggcgctggtcgtgtcaaaagtgaggcgcacgaggaagtgattatgatggaggacgatgtccgccaccaacaacagcagcaaatgccgcgttttgctggcaaattaattggcgacggtggcgaatgtcgcgatggaagtgccgaaggcgccgcccattcgatacatttgaaacgggaggaggaggacgccgcgggagccgaacaacagcggcagagggaagaagcggaagacgcggcggatttgggcgcggacgcactcaaagcacggcgagcagcgcggcagcggaaacgcgagccggtggtggtcgggtgccgcacattggagaaggcaatgcgaacgacggccgaagacagtgacatgtctccgctggagcaattccttctcggctccacgctgctctcccgtctctgttccttcttcgaaatggcatttgccgaagcacagcgccaacagcgcgggaaattcaaattgccaatcaaagactacggagttggcactgacggagtgatgagcgcgacatttccgagttaccccatgcccccgtccctcgcttcttcctcgctgcccaatgcgctcggttcgcccggcgaccattctgtccaccagcagtttcacccctccacccattgtatggttcgtctccaactgttcgtctgtccgcagcagttccgtttggtctccatgttggactatgccaccggcccccaatgtccggctgagtcggacgtgcgcattttcgagcgatatttcgcccgcgaagtcgtccgtatgaacaacgaattggccgtgttcgctttcgtcactctgtgccgtttttgtcacccgccaattttcgcctcctttgcccaactgatgatggcccaaatggagtcccaaccccggtggccatggcgtgtcgaattggaattggtacacaatgccgaggaatcggcccaacccacgggagcgaactctcatcagcagcagcagaagacgcaaaagatcgtcaaaaacagcattcaggtgcccgacatgtgcaaacgctttgtgtttgtgatttggttgaggccgcaatg

SEQ ID NO: 89237 - DNA, 662 bp, Heterodera glycines
gcgtattaaaaaaaatttgctccttccaaaagtgttttcttaatcgtttttaaagcatgtttctgatgaattttaagaaaaataatttttaaaaaatggcatttttaatttcataaaaaaaattatgaatccgtgtacaattggcagcatttttcacatgttcttcaaaatgttaacaattcgtcaaaatatagccaattttttcaccgcaaatcattttttaaatttaattttccatttaaacaaaaattattatcatgaattgaccacaaaacacagtccacttgtccatatagatcggaatttttggatgataaatgagctaacaaaaaagggttgataattttctaataaattttgacatttttttatatataattaattaaatttgttcgttaattattttaaagcaattcagatttatcatattttgcaattgctctatgcgcattaactgtgttttgccctttctctggtacccactttctcgtttcttcgtggccatttcgcaatttttttttgtggatacttttgccggattctgaatttgttcaagaattcaaaaaaaattgtgatggtcaattttttgtaatgagtcggaataatttttgccataattactcatgctttaatttaaatggattttaaccaattttatttgt

SEQ ID NO: 89238 - DNA, 486 bp, Heterodera glycines
  unsure (1)..(486): unsure at all n locations
aattaaatacaggtctgataaagccttttttgatcatttctttctttgatctttttgggcctgatcatttttgtttcaaaaattattttccataaatttatcgccaatcacttaaaaaattcataaaaaccaaatcctgtacgaaagaccgaaaaatcgccaattttaaaacaccacggcaaatttcaaccaaaaactgcnccataacttttgtcaaagtcaaataaattagacattcttggtatcattcgatagccctaacatttctctattagctaagctaaatttcaaaaaatttggtcaagattgagcaaagttatggccaaagcacaatgtaacaggttttcacacatttttggccataacttttttaaaaccttttaaaattttgcatgctaatagaggacacataaggctatcgatagtatcaagaaaataaaaaataaacattatttatgaaagaaattttttaattaaaaatgaaat

SEQ ID NO: 89239 - DNA, 1606 bp, Heterodera glycines
gtgctttgcgttggttaattggcgtgggtgagtgtggtggttgggccgtttttgcgatattgtggctggaaaaaagaagcgatttcgctgtggggagcgcggccgtctgggtttaagtgcttgcttgcgcttgtgctcggcattgaacggtgatggctgctgctggggtgccacctttgtcgtggcctcagtttctccagcgattggcagctgtcgaaatgaataaaacatgcagctcgtctgtgtgttaaagaaatttggcgagttaattgacttgtgtaaatgttgcctaaggcacaaatgctgtggggaactcagcactggggatgctgaacctaaagttggtggtggtgttggtatacgagtgagtggcgtattgccatggttgacaagccctatgagttcgtggatcggaactccttgcctggggaccagtgtgcttgcattcgaaaaaacacgagacataagcgcccgaaggcctttggcctgaggaagtgtcctaaccgggaaatccggagtgctcgtgtgagtgcctgtgcactgccctcggagctgtgtccagcggcgagatggttcttcccaagtccgggaagctcggatgcctggccagcgctgtgtcattaccacttgctcggtcgccttcgccgcccatgcgcacgcttgcgctgaacggagttgtttctgctgaaactatccgtctttacaagacggctgtaatagcggcgcttggcaacgctcgctagcagctatctggttgatcctgcctgaactgatgtgttcatttcaaagattaagccatgcatgtgtaagtttaacctgccagacagggaaactgcgtacggctcattacaccagctataatttacttgaccttgacttcttacttggataactgtggtaattctagagctaatacatgcaccaaagctccaatctccccagagcggagcgcatttgttcgccacaaaaccaagcgccctccgggcgtccagtgttgactcagaacaactaagctgatcgcacggtcttgtaccggcgacgtgtctttcaagtgtctgccttatcaactttcgatggtagtgtatctgactaccatggtgatgacgggtaacggaggataagggttcgactccggagaaggggcctgagaaatggccactacgtctaaggatggcagcaggcgcgcaaattacccactctcaacgcgaggaggtagtgacgagaaataacgagaccgatctcttatgaggccggtcatcggaatgggtacaatttaaaccctttaacgagtatctatgagagggcaagtctggtgccagcagccgcggtaattccagctctcaaaatgcatagaattattgctgcggttaaaaagctcgtagttggatctgtgctagccgtccggtgcacactttgtgtgttactggtttggttggcttttctgccggtctttccccggcgttggcctttaccggtcggcgtcggtgggctggcgagtttactttgaacaaatcaaagtgcttcaaacaggcgttttcgcttgaatgctcgtgcatggaataatacaagaggatttcgctcccattttattggttttgcttgacga

SEQ ID NO: 89240 - DNA, 751 bp, Heterodera glycines
caagtttgagatttattcgtttcgtttttgacctgtatttccatcacaatcaactgaaaaacggcaatggatgattcggttggttttcttagcataataaatcttgcatttgggtggtcttccaccccttacgacagtaaaattagtctgttccgttcgtttacagttatcctctcgacggctcccttccgacttctccttctaaaaatttcatccaatcttctgtataattttttctatttccgtatgcttaacagctgtaaattcccaaaaatcatcctccaagtttgtgggaggggaattcaaaaattgatatggatgttgaaactgaaacacagggtagaacattttggccgacgaccaaatgggaaggaaactcccagccgaacttttgttcgaaattgttctctgtgttcgaagagaacatgcccacgcgagcatttgcctctcgtcccttgttttatgcaaattaatgctacctcgtgcttcattatggcggaaaatttgggtttcagtatgattttggatgtttccgctttttttttttaattttcgttgttgctgtttggacttgtctttttatttttgcactaacaccattttctgagctcgtgagctttcttcaattctattattttatttttggtatttatttaaatgtttttgtctaaatgtggtgattaactcttctttcttccttttctcatttccattagttttttattggtttttttgtgcgtttccttttgtg

SEQ ID NO: 89241 - DNA, 676 bp, Heterodera glycines
ggcacatgcgccaatttcctttttggcattggggcgtcaaagacgacggcgccaatgacaccgacgacgacggcactgacgacgagcgcgggcagtcctttcgcctttggctcgtccgcctcgaccaccgcttcccccggcgccaccacaaccaccgcctcggccactctcccgcttctctttggcactcagcagaaaacgacggcacccgccgctgtgccttcctccgtccccgccttctctttcggcaccgccaaattcccttcttttggctcctccgccgccggtggcactctcttcggttcgaccaccgccaacaccctcacgacaagctcacaaccacacgttaacggtggatctcgtaagcgatcggctgcacaatcagtcgatgacatttcgccgtatggaaagagaactgcgtccagttcattgacggagacaagttcaatcgccaacgcccctctgtttgggggagcactaacgatgacgacgaaaccaaacacagcaattgatgctccgtttctggctaattcaactgctttttcatccactacaattaccgccactgcaattccttcggatgcgggcacaggcgccaatttcctttttggcattggggcgtcaaagacgactgcgacaatgacaccgacgacgacggcactgacgacgagcgcgg

SEQ ID NO: 89242 - DNA, 663 bp, Heterodera glycines
gagaagcccgacctgaacaacgtggactatgctggactccgctcggacaacagcgaagttcggcgcaaacagttggacaacatcgcagtggccgcgttggaatttcagccgaagggcaacacactcgagaccacggaagtaaaaactgaagttccctttctgattcgaggcgacctccgcgagtatcagctcgtcggactcgattggctagtcactctgtacgagaaaaatctgaacggaattttggcggacgaaatgggccttgggaagacaattcaaaccattgctctgctcgcccatttggcttgtgaccgtgccgtctggggtcctcatctgatcatcgtgccaacctctgtcattttgaattgggaaatggagctgaaaaagtggtgccccgcattgaaagtgctgacatatttcggtacagcaaaggaaagagccgagaaacgaaagggctggtccaaaagcaatgctttccacgtttgcatcacttcttataaattggctacccaagacattcgcgcgttcaaaaagaaggcctggcaatatttgattttggacgaggcgcagaacatcaaaaatttcaaaagtcagcgctggcaaacgctgctcagaattcagtcgcgtcgaaggttactgctgacgggaactcccttgcagaat

SEQ ID NO: 89243 - DNA, 640 bp, Heterodera glycines
aacgtaggcatcaagaataaatatgtgttgatggacgtacgcatttctggagcattgaatatcgtgagtatgtggatgcgtacgcacgcatctaccgtataaaattaatctaccatagtcatgtagacaacgtacgcatcaagaataaatatgtgttgatggacgtacgcatttctggagcgttgaatatcgtgagtatgtggatgcgtacgcacgcatctaccgaaaaaccttaatctaccatagtcatgtagacaacgtaggcatcaagaataaatatgtgttgatggacgtacgcatttctggagcattgaatatcgtgagtatgtggatgcgtacgcacgcatctaccgtataacattaatctaccatagtcatgtagacaacgtacgcatcaagaataaatatgtgttgatggacgtacgcatttctggagcgttgaatatcgtgagtatgtggatacgtacgcacgcatctaccgtatacattaatctaccgtagacatgtagtcaacgtacgtatcaagaatacgtatgcgaagatggacgtacgcatttatggagtgttgaatatcgattggatgcttacgcacgcatctaccgtagaccacgtacgcattaagaatacgtatgcgttgatg

SEQ ID NO: 89244 - DNA, 680 bp, Heterodera glycines
atttatccaaaaaattctacaaaaatagctcctgatcaatcattgttgccagaaaaaaaagttaaaaaaatatgggctcaactgatcaaacgaaggcattgttttccacgctcatccaacggccaactctcactgatcagctgttgcagcgaccacccttcaaattcatccacgacattgtgcatgagacattacgtgtgaccggctttttggacggtctgttcacgagtgatgagcttgactcaacaaaagccggctcgtcgcgcgacaataaaatggcctttctacaaaagttaattgacgcgctgaacatggacggtcaccttgacgacgtgaagccagcaaaaattgtggccggcaaggaagcagaaatgaccaatttgttgctgcagtcatttgcctctgaggccacaatgtacgcgaagcaagacaacaacaagcagcagcagggggatgtagcggtgaagaaaagtgcttcccattcctccgcttcatcaaagtccaaatcgactactgttgaagcggcttcttcttctccatccgcatcaaagagtaaaaatgatgatgacgagaaaaggaaaagcaaaaaagagagcagcagcaggagggacaaggagaaaaaggaggaagagcatcgtcgttcatcattaacaaagcatcgatcaaaggacaaagggagc

SEQ ID NO: 89245 - DNA, 372 bp, Heterodera glycines
aaaaaaatcatcgccaagttagaggaacggatccgagccttggagcaggaattggatggcgagcagcgccgtcaccaagaaacagacaaaaactaccgcaaggctgagcggcgtgtcaaagagcttgatttccaggtggaagaagacaaaaagaacacggaacgtctgacggatctgatcgacaaattgcagggcaaattgaaggtgtacaaacgccaagtggatgaggcggaagaggtggcggccaccaatttgggcaagtaccgccagctgcaggcacagttggacgaggcggaagagcgtgccgatatggcggagaactcattgagcaaattgcgagccaagaaccgctcttcggcgtcaattgcgccg

SEQ ID NO: 89246 - DNA, 857 bp, Heterodera glycines
aaaagacactgtgataattagcaggtaaaacattaattggctttttccttcctcaaatgataatccttttcttttctcctttcgtcttgcacaaattttgcgttttccgttggaattcgaaaggcactcattggagaagggagatcatcccgaaatccgagagggaattgcccacgcgcgacaatggttcgatcgtcgattacaacaaattcgaattgtggagacgggagtacgaggaaggggttgcccaactcgagcaggaacatgtcaagaagctgaaagagttggaggaatcgttcttcaaagagttggatgaacagaatcggtctctcgacagtgaagtcaatgcgttggacattgccattccgccgcttggcaatggcgaggaatccctggcgaattgtgccacgcaattgggacagtgccaacaccacccgaacccactcagtgccaatcacggcataacaaccgcaattagcggcaaaaaattcctcagaagtcgacagaacgacgtgattccctcgtcgagtgttggtgccgagtcggcgctgcatttgggtgccattggactgacagatgcagcaggcacagcgaagagacgtactcagacgaagaaaagcggctcccctttcggattccttggcttcggcagaaccgaaagcgctgtcggtggttttgctggtgccatcggtggagggccgaccatcggaggaacgtccacttcttcgctgatgctcccttatcttttgtcggaatcggccatttcggaggacgtccattcgttgggcagcgactcggccaaccattgccatttggcggaacgttcgtcagcagggtgcggcggactgagtcaagac

SEQ ID NO: 89247 - DNA, 765 bp, Heterodera glycines
ggcaaatgcaacaaaaccaacagcatcagcagggcaataccatggaggatggaaatgacaatacggtagtggtggtgatgggacagcagggcgggactacggtagactgggacagcagggaggagcagcaacagcacttggacatggagacggcacgcacatcgcgcaccgaggacattatccattatccctcaatggacacgctaattgaccaaattctgttggcggacagcagcgaggagatgagacggaacgacgacgacgacgacgacgagttcaagcagtacaccaaccgcacatcggcagcagcagcagacggaagtgccgacgagtggacaaccgcgcggaatgggaacagcgacagatgcgaattggaagcggtcgtctcttgccatccgtccccgtgttcgtcgtcctccgcctcctcctccacttccggctgttccccaacgcgtaacattccgccgaccgctaccgtcttctccgccaccgtgcctctgccgcccgctgtgctgccgttcggtgccgccaccgcgccctccacctttccgccagccgtgttcttcactggggccgccagtgatttgttcatgtcgtcgcaggactatgcacacgaatgcggcacagctgctgcggcgggtggcggcagcgattccgcggtcgccgctcgtcgtcagactgcgctggcggtgcccgcctggccgcgtccgctgggcgcactgcccgcgctcacccaatcgctgtttgatgcgtttgtggtcactt

SEQ ID NO: 89248 - DNA, 1216 bp, Heterodera glycines
ctccgtttcctttccaatgggccatttctttcccggcaccgtttccttcccaattcctctctatatgctcgggtccgctcgttgctggtggcattttggtgccaaacagcctcgggtgttcgcctcttcccatgcccaattgaccccgcccgaagggatcgaatcggccgacctccgaatgcccggagtcagtcctcaaatgaatgagtcgtatttgtgcagtgcgttccctttggactccgagagggaccattttatcgtgggtttcgagccggtgctctcttcacggcacattcaccacgtcattgtctacggatgcgaaatgcccggcagcgaagacaaagcgtgggattgcggggagatggcctcgccccggggcagctacagccattcgcccgtctgtgcctcccaaccggacattgtctacgcttgggcccacaatgcccccgagttgcttctccccgatggggtcgcttttcgcgttggcggttcttccgcggttcaattcctcgtccttcaagttcattatatgcgcgcggaggaggatgacacttccggcattcgaatcattcacacggatcggccacagccgcggcaggcggcgacgcttcttttggccactgacggacgaattgggccgaaaaggaaagaacaattggaagtcgcatgcgtcgtcgatgagtcggtggtgctccatccgttcgcctttcgcgtgcacacccatcgccacgggcgaaaagtcggcggatgggcggtgcgcgaagaaccaaagagtgggacggacaaatggacacttttgggacagagggacccgcagctgccccaaatgctccaactggtagccaaccaatcggtgaccatcacccaaggcgacgtattggcggcacgatgttcgatggaaaacgaagagaagcgggaaataaaaatcggaccgacgggggaagacgaaatgtgcaacttttatttgatgtattggaccaaaaatggacagactctcgagcagaatatgtgtttctcacccggcccacccatttaccgatggacgaaaagtgccggactgaaccacaccccaaaaaggaaatgaaagaatcaatgggagcgcactgcgcagatggggaggacgaacccattaaattatgcatcatcatcggttgatatatgtacaacaaagaaattcacatgttggactgaaaaagcaagccaaaccgaccaaaaa

SEQ ID NO: 89249 - DNA, 919 bp, Heterodera glycines
gtttgagttaaggattttgactgctttctttattctgttcttccaaaaaacatggcgcgtggacccaaaaagcatttgaagcggttggccgcaccaaaaaaatggatgctggacaagctgggcggcgtttttgcgcctcgtccaatgtgcggtccgcacaaattgcgcgagtcgttgccgctcattctcttcctgcgcaaccgtctcaaatacgcccagtcgtacaacgaggcgcgcatgatttgcaaacaacggctgatcaaggtggacggcaaagtgcgcactgaaatgcgcttcccatgcggaatcatggatgttatctcaattgaaaagaccaacgaaacttttcgtttgttgtacgatgtgaagggacgatttgtcatccaccgaatccaaagtcgtgaaggccagtacaaactgtgcaaggtgaagaagcaggcggtcggtgacaagcaagtgccgtacattgtcacgcacgacgcacgcaccattcgctacccggacccgcacatcaaggcggatgataccgtggtgattgacattggcactggcaaagtgacggactacgtgaagtttgatgctggcaacatttgcatgatcactggtggacacaacattggccgtgtgggcattgtcggacatcgcgagcgtcacccgggctcctttgacattgtgcacatcaaagacgccgctggccactcattcgctacacggatgaccaacgttttcatcattggcaagggtgcaactccgttgatcagtttgcccgcttccaagggcatccgtttgtccattgcggaggagcgtgaccgccgtcttgcgcagaagcagaaagtttgagcctgatcccgaagaacccatttttctgtcatggatgttattgttttgtttgttggcataaagaaaaagagtgttaaaa

SEQ ID NO: 89250 - DNA, 1148 bp, Heterodera glycines
gccttatacaaacatcaaattcttaaaaaatgtcaacaatcggagtccatgaaatattcaaactgtcgcaaaaagaccatcagcctcccgaaaaaaggagcaaactcagcgatggatcgacacaaattgtgccgtcggttgcgacagcaaaaaatggaggcgacattttggaagcattagaaaagtcggaagacacttcagaactcaacgaaattgacgaagcgtcggtgaagcggatttgttttctgttggagcgaaaacaggggaaaaatgcggaattgcgcataaaatacgcggaagagcctccgaaatttatggagtcggaaattgaattgaacaacgcaattcaggaaatgcacgtaattgcagcggagccccaattttacgatgtgctcgtggaacaggggtcggtccaactccttctgcaactgttgtcccacgaaaacaccgacataatagctgcagtttgcaatttgctgcaggaactgactgacgtggaaattctgcacgaaagtgaggatggtgcgaagctgttggtggacgaactgatcaaaggccatgttgtggaaacactggtgcagcagccgctggtgaaactgaacgagcaaaaccaagacgaagcggacgccgtttacaacgcgatgaatgtgggggaaaatgcgagtgattcgtttttggcatttaaacggggaaaacgattttcaaaaaggacatggactaatatttccccaatttaaaatttccccctctttttatttgccttttgtttcagttgctcgacttccatccccaggccaatgatttgtgcgtctcccagggcctcttcgattggctgatggtccgcgcgacaaagcgaaaagtgttcgacgccaacaaattgttcgccagccaattgttcgccatgctccttcagtcgtgcgagtcggcacggaaaaggctgacggagaaaagggatggcattgacatgacattgcgagtgggtaataccaacggaatgccatagtttaatttgtataggcacttgccgtgtacaaacgacacaacccgggcagtccggacgaacacgagcacatggaaaatttgttcgacgctctctgtgccgcgcttatgtacgtgccgaaccggcaggtgttcctcgacggggaagg

SEQ ID NO: 89251 - DNA, 687 bp, Heterodera glycines
aaataaaacaaataacaattttttctcagactctttcaccggtaccgggtccgccatcattgagaccacgcgcacgagggactaccgagaggtccgcaagaggaggaggacggagcaggacaaccgacaagcaacattccatcgacctccaaacaacagaaggacaaagagacgagcggagattccaaaatcgcattgccacccccaaaattggccataatcgttgaggccaccgaatcagcaccccgcggagtgatttgcccgacacttcctcccatttgttgcgcaatgacactggactggcgtcagtgtgagcagcatcgaatcggtgaaggtggtgtttacgtgccattccccggcggtgaacaatcgacgtgttcagaccgccaaaatcagtccgtcttcaccaactgttttgggaaccggaggacgggaaaattttgaattgagagccgttctgcgacagtccttcagcacatggttgacgtgcgcaagaagctggagttggaggtcaaaattgaccctgccatttttgtcgtttgctccggcggtgcctttgacccaacaaaaacgacattaatcgccgaacttggtcaattgaaactgaacacttaggacgagccgtccacaaaagcatacgaacatataaccgatcagagattgcgttcattggtggcaaggcatacg

SEQ ID NO: 89252 - DNA, 664 bp, Heterodera glycines
gaatcattggccgacgatgggacaaagtcagggaatccctcagtctccgccggaggggccctcccaggaaaacaatggccgaactgcgcagccgaatggagccacggacgagggcattttccgtgtcaaagtgtccaattgcccaaacacttcgccacgcaatttgcgccagactttccaaatgcaacacaaccggcgccagtcgagaagcaaaagtttggaaccaaatgcggcactggacattcgaacaattggacacagaaaatcatcgcggttcgggacaaaaacggagttaaaaaagcggggtcaaaatcaaaacttatggaatccggaaaaagcggcaacacaaataattggacagcaattacagaatccacatactcagcctccaaccattcaattgcaaactgtttcaattcatctgaaacaattccgtaaccaaaatggcaaaaccgatctgctggaagacaacaaaaaagatgggatcacgggcctatccgcccatcagattcaaatcctacagaagatttgggaacgctctccggaagtggagatctctgactgtgcccgcaatattatggcccacctcctccgctcaaatgcccaaatgtaccaattcttcgatttgctcggcctcagtgatcgcgaaatttcgagcagtcca

SEQ ID NO: 89253 - DNA, 580 bp, Heterodera glycines
gcgcatggtaaaagaaattaaattttaataaatcttaattaaaaatctaaatgtttaatttttaaaacaggaattccacccatcatctacttggcgttcaacaaaactgttcgtcgtgatgtttacattatgcttgtccgtccgcttgccatggtgttaccgtgcattaccgtaccgcccgagctttccgcaacacaaaactttggctcaaattcacgcgtagccggggccggcacacgaattgtgtctatttctttaaccgtccaataactacaatgtggtggagccagaatttcgaagacaaaaaaattcacaaataattaatgcatttattaattggataattaatttgttgtaattgtctaatgtccagccgccgctataccaccacaaacatcattattacttttgtttatctatgtattataataacaaatgaatgttgacagcatatttgagtagaacaaggtcggaattttcgaaaagttcaaatcagaccatgaaaaactatcattaaatccgccattttgcgttttctcattaatttttaaaaactaaactattaaattaaagcaagaat

SEQ ID NO: 89254 - DNA, 1169 bp, Heterodera glycines
caatgtttgagctgatgcttcactgtctgtcaagtgcagtcgtcgatcgtcagcaaatggccgtccgatgtttgtccgaacttgtcaagaaaatgggcgagcgaattctggaaattgttttgcctttgctggaagaccggctgagacaaggcggcgtcaacgaccggcgtggtgttgcactcgcactgaacgaaatcatcggaaatgtccaccgggaaatcgtggagaaccacgcctcctccttcatcggctccattcgcatttgtctgtccgactccgacagttccgtccgcgacgcggcggggcaagcgtttgccgcttaccactctgctaccagctatctcgcggtcgagcaaattgtggccccaatgctggacacttacaacaaaactggcgagccgtttatactggacggactttgctctgtgatggctggacctaatgggcgtcagctgttccaaagtctgttgccaaaattggcacggtcgcctgtcaattcggcggcactttgtcggttggctctgagcaccgacgctatgaagagaaatttgaacaaagtcatggaggcaatgcttaacggggacatcaacacttcagttgatgagcatatccaaaattgcattccggtgcttctcactttggacgacgaggacgacatgcgggcgatgttttccttgctgttgaagttcgcatcgaagaaggaaagtgcggaggtggcgtcgctgttgctcaggacgtacattgacgagtgtgacggaatggaatattccgagtctcaactggacacgcttttctgtggtttggtcggcctttacaactcggacaaccccaacgttctgcaaaatgccatcgaatcgcttgtcgctttggtcaagcaaatcgacccatcttcttacatccaattgtccttgctgctgaagagggcaatcaaaggattggcgaatgacacgcgcgaattgtcgtcggacggttgttcccgcgggttatgcgtttccaccgggtggcagccgtttttggccattctgagagaggctcttctgatgggtggggtcgaaatcaaagaagtcgctgctaattgcctctcgcaactcatccctctgagcagtgaggcgggacttagaccccacgttgtgaacatggccggtccattattcagaattttgggggac

SEQ ID NO: 89255 - DNA, 741 bp, Heterodera glycines
gcatactttttacaacttcgattcaacatggagaatgaagatgaaacgccaaaagaaccgccctatggagcagaatatgcaaaaagtaatcgtgcttcttgtaaaggatgcaagcagttgatttcgcaaggcgagttgcgtatggcggttcgtttcccttcaagatttttcgatggaatgcaggaaaattggcatcactttgagtgtttctggaaaaaagctcgtaaaaatgatatcaatgaagcttctcaattcgtggaatggaatggcttaaatgggaggaccaagagaaaattcgggcgcgaattacggagctcaaagagtccgatgattctgcttacacacccaaagccgccgtaatgacaattgagcacgcgaaatcagggtcatcgaagtgttacaaatgcaaaaacagcattgcaaaaggggaccttcgtgtttcaagcaaagcgtccttctaccacctcgaatgttttcattcacttggaatttttcaaaaaagtgcggaagactcaaatggatacaatgacttaaacgcggatgagcaaaagcggttggatgagttatttccaaaagcaacacaaacgcccgctgaggaaggaattaaacgaaagaatgaaatcagtgagacggagacaccgacgagcaaaaggatgaaaagtgatggagaaaataaggaacaaacagaggcactaaagaaacaatccgaactgttatggaatactcgaattgcattacgag

SEQ ID NO: 89256 - DNA, 765 bp, Heterodera glycines
agaaattccgaattccctttcaaaaaatgctttctctgctttccattttgccaattgttctcgccgcgttcgttgcgccttttgcaaatgccgtcttttcaacgcccagcgttacgctgagcttgaaccccaaagagattgaactgctgatggacacggcacaaaattgcaagaatctgtcggacgaccagcaagtggccgccttccaagtgttggcagaggagcagggtggcgatttgaaggcaagcattgacaacgtgctgatgaaagtgaatgtgtcggacgaccagttcaagcagaacattgaggaggcgaagcagaagctgagttcgtctaaggctaaggagaccgctgatcagctcgaagacctctttttggacggctccctcccattcattgacaaagtgaagaagtccgtcgaacttgttcaagaattgcccgaagaaatccgaacggaatgtgaacccgtgctgatggtgatcaattcgatcacgcgatgtcccttcaaagaacagtgcacaccgtcagaagaaattgggggcggaaacattggcaatgttggccagggaggaggaggaggaattgggctgcaacaggggcagaacaagcagggacagcaacaactgcagcagaaccaacaggaacagccgtgcttccacatcaaactgctcaaagtgtgcaccatttcgaagaaccaaaaagaatgatgagagggagggaagaggaggaaaatgccacggcacggaatgtgaccaacggacgaca

SEQ ID NO: 89257 - DNA, 1226 bp, Heterodera glycines
gttggcacatattcttgaagtgtgtgccgaaatcgtttgcctgtccaaagggtgccgagtcggttactcatcgcccagcactttgcacgaccgtgccgtgaagattaagaggggaaccactggcgattgcgttgaactgaagccgactttgattgcttgcgtgccggcaattatggacaaaatcttcaaggctgtttcggatgaggtgaaagagaagtcgccaattcagcgtgaacttttccgcatttgttacgaaagaaagcgcaatcgtttcgaggaggggtacaccagtttggtgatgaacagcttggcatttaacaaaatccggaacattctcggaggcaaccttcgtttcttgctttctggcggtgcacctctcaatcctgagactcagcgcttcatgaacatttgcttctgttgccccgtcgttcagggctatggcctgacggaaacttgcggtggtgccactttggctgatgaacatgaccttagcaccggttcggtcggaccgccgcttaggagctgtgaaattcgtcttcgagaatggactgaagctggttatttgccttcaaactcgcctcctcagggcgaagttctgattcacggggccaatgtcgcgttgggttacttcaaaaatgaggaaaagaccaaagaggacttcgtcgagttggacggaaagcgttggttcgccaccggggatattggagaattccgcgaggatggcagtctctgcattattgaccggaagaaagatctgatcaaattggcccacggcgagtacatcgctttggggaaggtggagacggcgctgctgaccaatccgaacgtggacaacatttgcgtttatggcgaatcgcacaaggactatctgattgcacttgtggttccaaatctcaaaaacctgcaagtccttgctgaaaagaatgacgtcaatgagccgagtattgagagaatttgagccaacaaagaaatgcccaagattctgcagaaggaactccacagctttgtttcgggcaaattgcgtagggaggaaatccccagaaaagtcatcatttgtgcggagccgtggactgccgattcgggaatgctgaccgaagcattgaaactgaagcgcaagaacatcgagaagaagttcgaggaggaaatcaggcagctttatgaagagaactgaattgacttaattgctcctcaagacatatgatatcaattattaaaatggtattgat

SEQ ID NO: 89258 - DNA, 600 bp, Heterodera glycines
gaagaggaagagagaatgagcagttcgcgcgccaacaaatttgccgttgcatttctcgatgatgagcaaactgacgagacgacagaagcaaatagtgaaacggaaaatgaggaaaatttgacgaatgaaagtaaacaaacgaaggcgaaaaatgagggaaaaaacaaaaatcgaaaaggcacgaaaaaacagaaacgaacaaaggcggagaaagcgaaggaatttgggacatcagaacaaatgccaatggcgacgaaaaagacaatgccaccaaacgaaacagcacagaaatctaatttggtggatgatccgttggaaaggcttttgaaggtcgacttgcgcagtttgaacccggacgatgaattgcgacgacttttgggccgaacatttggcgctgagcagcgccgacggggcggacaacaacagcagcagagacgaattggggcggcacaattgggcggaagtcgactgacgaagccgcggttggattggccaccgccaagacaaattggattgcaaatgatattggatgatgaaaaagtgatgtcgacggcgacttccgccgacactctctcgaatgaagcagaaatgccacttttg

SEQ ID NO: 89259 - DNA, 644 bp, Heterodera glycines
gtttgagagatttatttcccgcgaatatgcaaatgcgtgtcgaatggaatgaacagcaacggcgtcgactctaccgaattgcgctcaacttttttaacaaaacgccggaccttggcgttcagctgctgatcagttggggctttgtacggaacagtccccgggagttggcactgttgttcatggaacggcgcgggatcagcaaacaaatgatcggcgagtacctcggcacattgcgctcacaattccataccgccgtgctaaattgtttcatcgaacaaatttcaatgtacgacatggaaattgacattgcacttcggcaattgctcaaacacattcgacttccattggaagcgcaaaaaattgaccacattattcaggcctttgcacaacattacgttgcgtgcaaccggaacagactgtgcgcattggacacgccggactcgatgtacattttggcatttgctgtcatcatgctgaacacggatttgcacacgccgtcacttaaggactcgagacggatgaaattggacgaatttgtgcagaatttgtaccgacttgaggaggcacgacatatggacagaggcaaaacaataaatttttacaattgtcggtatttacactaacaaattttccagtaattcaaa

SEQ ID NO: 89260 - DNA, 687 bp, Heterodera glycines
gatattgttgccgactgttcagacaatgttgccactcgatatttgatcaatgatgcttgtgtgttgagtggaaaaccgttggtatatggaagtgcgcttggttgggagggccaatttactgtctacaacaatggaacggtttgaagcgaggaagcaccaaaatgttgagggcggggtggaaggcggatttaaaatatagtttctggcactttttttaaaaagattttctttaaaatttttctaaatcaaagaaaaatatataactaaaaaaaattaactgggttttcttaaaggttttatgagccattaattaagacaaataaggcgaagccctttgtctgtttttttaaattgctttctttttaagaattgtccttgcttccgctgcatttttcctgatcccccaagtcctgaacatgtgatgagttgctcagaggccttagaaatcatcaaaattgctgtcagcggaaaatgttttcaaaatttgatgatttttgacgacaacttttgtttccattttagcatcatttgccggaaatttgtggatgtttgaccggtttgaaggcatatcaaaaagaatttctttgagagagaaaatgtcgaattgtgcgatttgcagtgaaaatccaaggattacagaattacaagactatcaaaagttctgcaggtcggatccatcagataagg

SEQ ID NO: 89261 - DNA, 675 bp, Heterodera glycines
gaggaattcaaacctggaagatgggaataatgatttaatacataaatcaccggatcattaaactgaaatgcttctcgacaacgcattaaaagcttcggctgtcaacagcggcggcgaaatgccaaaacggatgagttactcgtcggtggtgatggcacgttcttcctcttcatcctccgcttcttcttccatctcttcttcttcctccaccgctcctcctcctcctcctccccttccgaaatcctcttctgcttcttcttctttctcctcatattcgtcctgttcatcttcatcatcattagcagcgaatcgggaattcgtgccgaaaaacaaaggggaaccgaaaaaaatgccgaaacgacaccagcagcggtggaagcgttggcgaaccgtaacgtccgagtccgcgttcttctaccggtcgtccagctcctcactgctgtcgctggactcggccacttccaccaccaccagcagcagcaattcgtccggcattggcaccagcgacgcggaaacaccgccgttggcatttgagggagagcagcggcaacaacaaaagcccaacaccagcagcagaagtgggacgagcaaaacccaaaatttgggcggaggcccggcactcaaatgggcggaaacggaaaaaaacagcaaaaagtgggcacaaacagcacccac

SEQ ID NO: 89262 - DNA, 698 bp, Heterodera glycines
  unsure (1)..(698): unsure at all n locations
agatgtcagacagaaaggacagtgtgacaggagggaaacgaatagagcaggaacttgctgaggacggccgtcctgtttacatcgtcgtattgaccattttcttaaaagggtttttctttttgtatgacttgctcgtctttattccgttcaaattatttgctgatcctgaactgaaaaaggagcgctctcgtgaacaaaaggccgttccgattgatgggaatccggcttcaccatggcgacacgtcgacaccattggcactgctctgtacaccgaactttttgaggactgtccgacgctcggcaaaatttgggacaaagcggcagagttgcaccgtgggcacaattgcatgggaacgcgcgacattcttgaggtcatccaagaacgacagtcggacgggaaaaccttccagaaattggcacttggcaaatatagctggatggattacgaacatgttgatgaagtgatcgtggaaagcgcttctggactccacaatttgggcattgagcaaggacaaaaagtaatcatttacgccgagaacaggaaaggaagggatgatctccgccatcccctggcttcaaattgggcccttccaattgtcaccgtttatcccacgcttggtgacgaggcaattgcttttgccttggncgagtgtgacgccgttttggcgtttacttcacgtccccttctgtcgaaagtt

SEQ ID NO: 89263 - DNA, 950 bp, Heterodera glycines
gcgataagaaagatttattttgatcggcaatggcggcgacatcaaagctgcaaaaaagtggacgaaagcggttgagatacgattcagaggagtcatctgatgatgatggcattggaggagatggggccactgttgcaatcattccgacgccgagcatcgatttggtcctgcaaaatttggcaacaaatgcactcgcttttacagcggcgcccgaaatggaggagaatgaagagcagggcgatgccattcaattggattgcagtggttccagtgcagcggaagaggaacaccaccaccaccaacaacaaccaaatgggcaaaccgttagcagcggttgctcctccagcagtcgtccgtccactgataaggagggggaacaaaagttgcggagaatgcaagcgcaagcgcgtcgtcagcgtgtgagcaagtggaaaatcagtgagacggcgcaaaggaagaagcaaatgcagaaaagcaaaggcaacaaaggagtagggggaggaggagcacttgtatactctgtccgcagcagcagcactacagccaacaacaatagcatcagcaaaaaacccccgaacaaaaagaagcaaaatgtcgctgatcgaactgctcgcaaaaacaacatcggcggcgcgggcggtgaagaagcgccagcggttacaaaaacggccaaaaccttggctgaactgcttcaatactcaaacgtcgttgcagcaaatctggaaaataaactcacttcaccgacgacttccaagaatgatggtcctccgacggcggatggtttcacatttacagcagcagctcaggaagaatgtccgtcctcgtcatcgtccaaatcaattgccacgctcatcaccgaccggttcacgccaaacagaggcactttttaccgttatacaccagcgccagtggttacaccggcggtcgtgcacaaactcttactcaacgct

SEQ ID NO: 89264 - DNA, 694 bp, Heterodera glycines
gtttctctagctccattccctagcatgaaaatggcaattcggagctttcttggccccgcttgctgttcaccaactggcgccgctgtattgctgctgatttctggcttggctaataccgtatcattggcctccattgccacgggcaacggggcacgccttggcatttttcgtccgacacgcagcatttcatatgacggacaacaggaggagacggaatatgaagtggagcccggctttgaaaagcgttcaatgacgcttggccgtctgtcatttcggcctggaaaacgttggtcctttcccgtctccggtgcttatgcacacgatcggcaaaacagacgctatgatttgttgctgctcagtgaaaaacagccgtcatatggtttggcaccgtctgaagtggaatacaatgtgccaattcaagccaagcccagtgtcgtccgtcacatcaattttcgtcttctgcccgagactggaaatgagcaggaaaatgatcttgccgagattggccttcgagaatctgcaatgggcaaacgaacagccgcattaggccgagttggttttcgacccggaaagcgaagcatggctgttggtcggacaggctttcgtccaggaaaacgcagcattgcaactggccgcgttggatttcgtccgggcaaacgcagcaattcaccaggtggctactacgtgacacttg

SEQ ID NO: 89265 - DNA, 674 bp, Heterodera glycines
gtgactcggtgccgaacgccggagggtattggtcaacgcctgcagcaaaagaagtgcggaaactcgtgccataattatgccggatttcaattttcctcccccactaattttggcacaaaaattactaaacgccgctccgagtgagtgctgcgcattgtggtgctggtcgatgctggacgggtgccgaaagtccgccaaatgtgccaaggacggagtcatgggcctgagttggtgcagcggtgagccgtccgacggacgcggcgacgaggagacactgttccgcgcgaaggaagggcgcgagcggcgccggaagtcgtccagcgttttctgagaacggaccgatcgaatgaaaatgagggcaatcattgtgagctgatcaaaagaagcgattgtcctacgtaaactgttcatgatcagaatacggaagcattctcgaatatatcaattggtctttgaattattatcaaaatgttgaacattatcagttgctcaactgatatctgagtttgaaacattgggccacaggccgtagccagaaaaatttcggaggaggaatttttctctcttttttttgctcttcggtcaaaagttttttttctcctatgttatttttaaaaggctccgtcgggttaagaaaagcgcttagatcttccaaaaaaaaattgcccgttttt

SEQ ID NO: 89266 - DNA, 686 bp, Heterodera glycines
gtaagaataacaattcgtccaaaaatgatgccacgaaatcagatgatcgaaatggtaagcagtcaaagacattcgccgatttcaaggatttcgactttgatgatcgtttgctactggctatttccgagatgggttgggaacgtccaacaccagtccagtcgtccatgattccgttagctttggatgggaaaaacattttggcgcgggcacgaacggggagtgggaagacagcggcatttctgcttccgctcatccaaaaaagtatccaacttagccagaattccattattcgcaagagcaatgggcctttttcgctggtcattgctccgactaaagaattggcctctcaaatttttgctttgctcgaacgactgagtgaatcgttggtgttcatccattcgcttaatttggcacaatatgcagaagcaaatgatgaaatgttggagaatgaatcgttggacgttttggtgtcaacgcctggtcggcttttggctgctgttaaaaaagtgccaaaattgctgataaacgttgcccacgttgtgctggatgaggcagatttgctcttttcatacggttaccgcgatgaaattggtcgtcttaaaagtgcgttgccgccccactttcaaactgtgatgacatcggcgacactcaacgaagacatgaccgaactgaagcgcacctttgtt

SEQ ID NO: 89267 - DNA, 723 bp, Heterodera glycines
  unsure (1)..(723): unsure at all n locations
ctttttaaacttgacagacttgaaacccgtagaaaagttattgatcttaccactgcttttaaaataatcaactgtcatactcatttagaccctcaaaaactttacactttctcaaaaagattaagatttaattgtattagattaatatctaaacacaaaaccaacaaaaccgaaaactcatttattaatagaacaataaaacaatggaacaatcttgattctaaaattacggcatcatcttccatatgtagttttaaaaacaaagtcataaaatgggttaaagcccctaaatacaataaaaatatttacattgcatgagaaaaatatttttatttatatatttatttatcactatgtcgttgttgtgatctgactttattttcatgtgtgatctccatatattctccatttttgtattcaccgatcttcagagtaagaggctaatgcccttctgtagatattttattgactgaataaataaaaataaatggtgtacggacatttcgcctactaagccaagaagccctaggcaggcaccagcagcaggtgtagcagaacaactgcggacatgtgtgaagaatgatttagaatagatgaatgttgatgaaaaattcggtgattgttttttagaaagaacaaaggcattggaaattttttgggttttgcggaagtaaagaattcattcnannnnnaaaaaaananaaaaaaaanaaaaaaaaaaaa

SEQ ID NO: 89268 - DNA, 607 bp, Heterodera glycines; identical to SEQ ID NO: 55360

SEQ ID NO: 89269 - DNA, 1438 bp, Heterodera glycines
gagatatctttcacacttacaaataataaccataataccgaattaaagcggggggcgtgtggtgtaaggatgtgtcatattgagacctatattttcatggattttgagacaacgggactttttgacgacggccacaacaacccgttgaccaaccccaatcggtccaatgagacggccagagaacgtgcccagaggctggacaacctcatcaagtcagatggaaatcgctttcctaaaatcacggaaatggcttatatgtcggtgccgcgggtgttgttccttgagggaacggagcaaatgtccgcgcgccatttgtcatcgatgtcgcaagacggcgaagaaagcattgagccggtgcaggtcgttacgaatgtacacgtgcgacagctgaatccgcagcttaatgacaaggagcggttcaagtacgaggaattgcaacggaaagtgccaagcgtgcttctcaaacaatccgatttgacatgcaaatgcactttcgctcaggaatggcccgccattcgaccacctgcttcagactgttccaaaaccagcctgtctggttgcgcacaatggtctcaactttgacttccgaattctgtgccacgagttgcgcaagagcgacctgttccgtacccatccgatcccagaacaggtttatttcctcgacacgctttcctgcttttacgaactcgagaaggagtacaaccgtgagatagaattaacgatggaaaatgttgattggactctcgttttgtcccaattccaaccgaacagcgaaactgtcgttgcaactgccgagatagaggaaactgtacaacaaaatggcactgcttctgagggaacacaaaattccaatggtcacaaaagcaccaccgttcttcatcgattgttcgatcagaaatgttctcttacatcaaatgccaacggattgccaaattctcataagaaaataaatccaatcctacgtcattggagcttggctttgccgctgatcatgttcatgcgcaaaacgcattggtcgccggccaaacgccgctgcattgacgccaaattttttgagagcaacaatcgcggtgaatggaatttcaatggtaaccatgccaggcggttgttgtgcggacgtggcaatttcaaactggagaacatgttcaagaggtttttctccattgccccgcaatttcatcgggcacaatcggactgtgaggctctgttgcaagtttgcctctcctacggcatggattttgtgaaatttgttgaccgaaattgttcatatttccccgactgcttttacacctcctccaaaaagactcagactttaaactcacttaacactgacctttgatgactaactctttttttcttgtattttcgtatgattttatttttactcttttcttttgtaaaaaaaaaaaaaaaaaaaaaaaaaaaaaaaactcaagac

SEQ ID NO: 89270 - DNA, 875 bp, Heterodera glycines
gagaaacaccccttaaattattctaaaattacaattatttcttggtctaaactccaacaaaaatggaccggtccatcctcgtcccctacacttctcggttgatgtccgaaatttcgcccggtcaaacactgaacattcatggcaatgtgaacgcggatgcgcaccgtttcgaggtcaatttgttgagcaattgcgtcgaaattgatgcccacatgggctccgcgccgctgcacttcagcgtccgatttgacgaaggcaaagtcgtgctcaactcatttgctgccggagaatgggggaaggaagagcgccactcgaaccctttcaccaagggacagcccttcgacctgcgattccgcgtccacgaagatcgaatcgaaatattcgccaatcaaaaacaaatcaccgaattcaaacatcgaatcctttacaccaacgttgaccacattcaggtccgtggcgacgtcacattgagtggcgttcactggggcggtcgctacttcgaacttccattccaagcgaatttccacggcacttctctcaaaagcggccaacgtctttttgtctatggcattccgaagggcaatttcagcatcaatttgatcggtgccaacggggacacacttttccatttgaatccgcgttttagcgagaaaaagattgtccgcggctcccaaaaagacggcgtgtggggcgaggaagagcgcgagggcgccttcccactgaagaaggaacaggcggcggacatcgccgtgttcaacgagccgtactccctgcagattttcatccacggccaccattactgcgcatttgcacaccgggtggaggcgccgaacaccgactacaatttggtgcccgtcgaaggagaccatggactg

SEQ ID NO: 89271 - DNA, 886 bp, Heterodera glycines
gtcaattgttgacgaaattcttttaattttgggaaagccaaatgcacatgaccaattgaagggtgctctttacgtgctgaccaatggcaaagagcagtcgcttctgctaagacaagattgggccgttctgttgcagctttggcccgcattgtgtttggttgacaattccgagaacaaacaaagcatcattcaactcactgatttggcccgtgatctcattgtttccaacttttcatcttttcaaattgaatattatcttcccgactccgttatgcctttggctgaacaactgttgtccgattaccccggcatttgtcataaaccggcgtggccattgcccgacaaacaaaaattgggagaatttcgggaaagggaagcggagatatgcggacgaaatcgcgaaaattttcttgccttggccgagaagctgctgacaatcgcaaaagacgagaatttgcactggcggcaggtcgactttgccgaaacgcttctctcattgctgcttcggaaggactgcgacctgccggacggtgttgtactgcacttcttcaagcgactcactgctgacaccataaacactcgcaaaattgcaattgacttttgtagttcatggttgaaaatacacaggcaaaaggcggttaaggaggacgtcgttattccggattgccctccgggaagggggccgggagcgcaatggccaattactttcggcatccgtagcgacaacaaattccttctcttcgacgcagcaaatgcaccctccaatgccgacaaatgggacagtgccaatttccactcgaaggtctatccgggcttttacacttggccaagcaaattccgtgtgtatgcgccaccgagtgaacaaaaatgggcaaatcgtgaattc

SEQ ID NO: 89272 - DNA, 1221 bp, Heterodera glycines
gtgcaaaatgagtttggaagacggcctttgctcggctatttggccagcctaagcgacgaattggtgcagcaattgttcgagtcgcgtccgtgcgtcgtcgccattttccgtcttttgcccgcctttgcccaacaatctgtgcttcagctgatgttccacaaatccagcgattggcgttcgtggactcggagtcgcttccatttggccatgtccagcgccgttcagctccttttccgactgcgcattttggaaggcaattcgaacggcgactttcaaattaatcttgatttccgcatgaattacgtctccagccttttggccaaccctttggaattgtccaacctcaaaatgcaccatttggacgaggaaaaagcgcgcaaagcgaccaaagacttaatgggcaaaagtgtggagcgatgggagagcattctgtgctatttggcactgccgagcgaagcggcggagaaaagcgtttcggagacgacgaaggaccttttccaattcatcggattggtgcgcggaagagccaaagagcccgaaatctcttcgattggcttccaatttttgcttttgagccgctccgaacaaatttgggcctatctgatccattacatgcgcttcatcgcttcaaagggcgaagaagtgtttcccgttttggactttctgctacggctcacgctttgcatcaatggcgacgatgcgcttgcccaaccgctgaggctcgacccgaattggcccgaaattgtgcaggcattcgttgtgactctgcgcgaattgggactgattttcatacgcaaacggaaggacggttggtttctgctcactcctctgatgactcagctttccgttgccgcctcagctgaacccttagaggaaaatgccggccaaaatggcgtcgctttgcgcaattctccacttacaaattcacacgcaacaaatgggacaaaaggcggacgaaatggcgacggttttttaattgtggagacaaattacagagtgtacgcgtacacaaattcgaccctccaattggccattctgtccacattcaccgaacttctttaccgtttccaagacattgccattggcgttctctcccgcgacgcggtcagacgcgcttttcagaccggaatcaccgcccgacaaattacccaatatttgtcgacaaatattcgacagccgccgtcagctcggaacaattcgcaattgtccgattcttctgtg

SEQ ID NO: 89273 - DNA, 635 bp, Heterodera glycines
gaatgacaacggtcggcattttgggcggctcccatcaatggttccccgcggaccaaccggcggaattgatctgtgccgcctctgtttcttcgctggttgaacgcgtcgagtggaagagggccggcggggacgcgttgccttcggatgccagcgacgaggaacaccgcggggtgctccgattcgacccgttcaaacctgctgatcacgcgggtgagtacgagtgcaacgcgtaccgtaacgaggaagtgatcgccaccagcaaagtggaagtgcaccccgagggcgacacgcggcccgaccttttgcacgtggacatttcaccgccgcaagtgcgcatggtgaacgcgggcgactcaattgtgttggactgtgtggtgcacggccgttctgcggatgagttcacttattcctggtcactcgcgcgtggcggagcactgatccgtgagttgggcaggcaaagtcagctgctggtcaagtcggcggatccgagcaacgattacggcatttaccggtgcgaagtggagagcgaggaccgcgagacggtcggacaggcacaggcggcagtttctgtcggatttgactcggaaaacaatgcagttgaagcaaagttcgacggtgattcgcaagcggtgctg

SEQ ID NO: 89274 - DNA, 678 bp, Heterodera glycines
tggccatacaccgggattatgaaagcccgttttccggctacatagaaatgcacgaacacacgtctgcgttttgttttaccatggttgagcgagatatgcgaattttttatgactcaggggcgggtactcctatgggtagatacacgttggtactacacggcatcgtacaggggaactatttgggaaatgattcgggattgggactccctatttttttcttctggttttactgggagggaaggagccagacaaaccgcaacggtttttttaggagtcgtctttttctggcaaaggtccaaatgctaaaggtcatggcattagcttggggaaaagaactgttgacttccccaattgaagtactactaaatgttttctttaatcgtatggacaggtctttaacgattaaaaatctatatgtcattattattacagagaattgcttggctcttggtcgttgctctatcgggtccctccaagtctctttgatatttctcgccgaattgttgcagaaaaaatgatggaagaatttttaaaactgccatcacactttcgaattgctttttataataaatattaattgtgtaattttttttttgccttagttatagtcgaaatttatttttaattgtagaattttctaaaatttattttagtctcgaaaaatgcccagaaagacgc

SEQ ID NO: 89275 - DNA, 873 bp, Heterodera glycines
gaattgattcgtgagccaatgttcggaaattactatcagtttgatggcacttttctggaaagtgatgttcttgagccaacttctgtcacggctttggctaatgacagcaaagcgttgttggacgcccgggccaaactttgggatgaaaaattcggaaatgacaaatgcacattgcagaaaatcaaggaaatgggcatcgattcgttagtgaaaaaaatttttgattcgtctgtgagcgaagaagcgatggaagagaatgaaacggagcaaaaggcaaatggaaatgttaagttgcacgtcgaagtaaagcgaagcggcataaaaaacaaaaacggggcggagatttattgctcggacaattttccattggttatcgacagcagtggcctcttgaacagattcttggaggatgagccaatcataagacacgcgccggaccgaaaattcggtgtttggtgcgcgccgcgaaaatattcgatcgacggaattcaatggaaaattgtgcggattgatccggagagcaaaccaaagaaatcggtcccgaacggagttagcaaaatgaatgggcgcagcaaagaatgtgtcagcaatggagggcagactgacgaatgcatttcgagttctccatcgaccgttccttcgcttccatcgacgactgttcgaaactccccgaaattggaggaggaggaggagaaagtggatgagaatgaactctttgagggactcatctgctcgcaaaatgaaacccatttcctcgtcttttcccctgggcgtcgttggttgggccgtttggacaaggcaaagtgtggcaaggacagtgcgtctattctcgggatgtggatccaattcaaaatcaagaataaagccggtatg

SEQ ID NO: 89276 - DNA, 641 bp, Heterodera glycines
aaattacacaattcctaaattgcttatttgaaaatgcattccaaaacagcacttaattgcttgctcatttgggcattggcatttatcgttgttggctttgtccaagtgactgtgcagcagccgccgaacgaacagcagcgggaggaggacaaaggcatcttcgagaaaagcaaggacactctgtcgaacgcggcggaaggcacgaaggattggctggtgggggcgaaggactcggttgccgatacgttttcttctgcgaaggaaacggcgactgacaaagccacggaaactaaggacaaagcgtccgattacgccgaatcagcgcgcgaaaaagcgtcggaagggtacgaaggcgcgaagcagggggcacaagagcgatatgagagcgcaaaggaatacggaaaagagaagacggaacagttgaaggagggcgggagaaaagtggcgggagaggccgaccgaaagactgagatctaaataaaaagaaggcgcaaaaactgttgatggaatggaatgggggagtgatgcccgaagatggtgttaattggatgaaccaatgagaaattggactctatgagccctttctttgctcgtttctctcattcctgccatagtattttttatacggataaaatttcaat

SEQ ID NO: 89277 - DNA, 683 bp, Heterodera glycines
tgtttgcggtacgggcctggttatccatgccaaactgaacaggtagatggatgccaaaaaaaaaaaacaatttgtgtaaaaaaaaaatattaagctaccaaatggtggaagtagtgctcgaaagtgcgctgattgccagttcgtcttcccaaacgatggctgctacaacttccatttggccaacaatcctccagctccaatggatgggcgtggacagcgccaacgtcagccaatctggcaatggcgccgggtgtgtcgtgcgtgtggacgtatcgcctacgtggccacacatcagtgcccacgtgaccaaccagccgacgatggaatctgtcggcgctgcaatgggccccacaccgtcgatgagccttgctacatccagcccattgacgacggctcagttcgacaacgtgcatcgattgctgttgacaacgacgattctgacgacgacgacgacgacgatgaagaattgccgcttcgtctctgcttcttcgatgccgagacgtcccaggacacgccattacagctgaacaaccgcaccgtccagaagcacgtgccgctgctcatcgtcgccgaagtcatctgcgaacgttgtctgcaggctggcatcagcgtgagcgatggccttggaagacgggctcctggctgcgtctgcatgacaggaatggtgaggggtcaactgtttc

SEQ ID NO: 89278 - DNA, 654 bp, Heterodera glycines
attgatcagaccactccttcatagtttctccttctcttgctctctctcttcctttctccttctctttctctctctcttcctttctccctctctctctttctctccctctctttctctccctctgactttgcctttcactctctctcttttcctttatctactatcagtaagtctctctccctctccctttcttcctctctattacgctttaccattgcattctctctctctctcttactctctctccgacttctctttcgctctctgatttcctttcgcactcactttcttctcactctctgttaatctcccttttctctccatctctcttccttttttccttttactctctctctctctctttgtctctaattttactatttctgttttactttctctctttacctctctcctctctgtcagtctctatctatcactttgacttctcttttctccttctcttgtttttttttctagtatatgtagattaaaaagttgctttttaaaatgtatgaaatatgtacaaaaatccccaaatatatattaaaatatgtaaattaaatttttaatggttatttattggaaaaattcttcgtaaaaagtaaagtaggaacaaaattccataaaaatgacaaaataagcttaaaatcaaat

SEQ ID NO: 89279 - DNA, 1116 bp, Heterodera glycines
aaaaaggaaatatttggccggcaaaagaggatttgagcgaccaccatttgaattgccggagtttattaagaggacggggataatggagatgcgtgagacaatgtgggaaaaggaggagcaccaatcgctgaaaaacaaaatgcgcgaacgaacccggccaaaactgggcagaatcgacattgactatcagaaacttcacgacgccttcttcaaatggcagacaaaaccacagatgacgaagatgggcgaactttactacgaggggaaggaattggaagcgcaaatgcgagaaaagaagccgggcactttgtcggatgaacttcgaattgcactgggaatgccagttggaccgaactccaacaaatttccgcctccgtggctcattgcgatgcagcgttatgggccgcctccttcgtacccgaatttgaagattcaaggcctcaactgtccgatcccagaagggtgtgccttcggatatcacgctgggggctggggaaaaccaccggttgacgaatacggaaagcctttgtatggagacgtttttggactgactgttcctcaagtggctgacgacgttgacgagtcgaggattgaacgtcgccattggggggaaattggaagtgacgaggaagagagtgaggaggaaagcgaagccgaagaggacgacgaggagggcaccggcgcagtgccaccgcctcccccggagggcggatacgtaacacctgcgccgacagaaggtttcgtgactccgagtggcatcacgacggtgccaggcgtggaaactccgagttcaacaattgaactgcgaaagaagcgaacgatggacgaaagcagtctctctggccccgaaactcccgcaccgccgctttacacgatattagcagagaaaaaggtggacagagtgggcactcagttgatggccaccagtcatgtgtacgacatcgccgcccagcgcaaaattccggtgcctaacgaaggcgtggaagtgtcacttaaccccgaggaactcgaagaccaaggaggactcgagcgaaaatacgaggaacaacttcgaaagcaggcgaagatacgaatggaaaatgaggaggacttctcggacatggtggcggaacattc

SEQ ID NO: 89280 - DNA, 661 bp, Heterodera glycines
ttgagagttaccacattggtaggatggaagaagaagtgattttggatgatgagcggggcaccaaagcggcggcattttctccacactcaaacggcacaatttccttcggcttccaaatgttggcaatcggcgcgggtttctgcatgttcataatgcttctggcgttgttcgccgccgttcagcaccgcaagcgtcgccgcagcagcggctcggtgggctccttccgctcgccgcttattcacaagcgctcctacggcgggcacagcaccggcgggcggctgagtcaggcgattccaccgccgcccgccccgcagtacttgcgctgctccaaccaatcgctgcgcaagtgctcgtcgcccggcggctccgactactcgctgtcctcctcctactcgtcgtcggccgcatcggcacattccttgtcgcccatgtcgccttatgggcacggaaccgtcgccgcggggtatcaacagcagcagcagcaacaacagagtccgttcgccgcgctcaatttcatcccttacggtgccgcaccgcccgagggcatcgaagaacggcataatgccaaccacaacaacaaaatgatgatgatgatgaacagcaacgagcgtaaacgacacagcatcaacacgactgcagcagcagaggccgcactgatggg

SEQ ID NO: 89281 - DNA, 700 bp, Heterodera glycines
agtagccaggcaggttatcagcacgatccaggccttatgtgccgcggtggttggaccggtcacgattctcgtcattgtagggcccaagtagtcaatgccgacatgctcaaagggtgcagatcgcacaacacggtcggtgggcagggatggcatggctggcagagcaaatgccgggccttggattcgtcggcaacgaaggcattttttgacctctctggtgactgtgcccctggctttagggcaccagaatttctccaggaatgaggtgagcgtggcttctactcctgagtgtcgcatcttttcgtgacggtctcgaattatcagcctagtgattggtgactggtccggaagcagaattgggttcttccagtcatcacttgctgcacagttgccgagtctggtttcaagacggatcagtccctgttcgtcagtgcgaaggcgtacttcgggcctttgcttggccaaattggtacagtcacgttgggcaagttcgatcagaaaacgctcggcgaattgaaaatcgcttgcttgaattggtccacaggcggaaacacgggagcacaatccgagaatgggcttgctagacattgtgagccatcgacgaagggcacggaggacaagcaccaccacgttccgaaggcaagtccagtcgctgaatctgtcggcgcaaatccatgcttcgtctttttggacaatgggt

SEQ ID NO: 89282 - DNA, 1139 bp, Heterodera glycines
ccgcctctccccccacctccgtgtctccccattcgctgccaatggccaaacgcgccaaatcgtcgtcccccgccctctctctgtcccattgtcagttgtactgctcgctgcttctgttcctcctctccatcctcctctccgtcctcatcacctttcttctcacccggaatgccattcgatctcaaatagaaagggtcaaccaaaatgaagcggtgacggcaaaactcgtagccccccacggggccattgcttcgctgaacgcgggtcacgacataacacggctacgcatgccgggaaagtcactgttggccaacgcacggccgcgcggaaacgaaacggcggacgaagcgaaggaagagcggccggaaaagcggaaggagccgggcgcggaggagctgagattgtccggagagcttttccccatttggtacaatttgtctctgaaagttttcgtccccggctttggtcccgaaatttcgccccaactcaatttgacctttaacggagatttgcttctgaattttgccgttaatcggacaacccgaacaattgaattgaacgcgttaaaactgcgttttgatccgaataatttgatggcgtacgaattgaaaaggacggacaatttggcaactggggacgaggtggacagaacgccgaaagtgatcggaattcgggtggatgaagcgcgagaaaaggtgttcttcgacttggacggcgatttaaccctgggaaatcattacgccctgcggattccttattcgggcccaatcgcctccaaattgtccggcctttacctgaccacgtacacaacgctttccggagagcacaaatgtgcggcagtcactcaaatggagccgacggatgcacgcagaatggtgccctccttcgatgagcccgaattcaaagcgatctttcggctgagtgtcactcatccgaaagggtcgcgggcggtgagcaacgcgaaggaattgcgggagcagcagcaaacggaagagacggaatggattcggacggacttcgaggagactttgccgatgtcctcttatcttttggcgttggtcgtttccgacttcgaattcgtcgagggaaacacttcccgtgggcaccgctttcgcatttgggctcgtaaagatgactta

SEQ ID NO: 89283 - DNA, 913 bp, Heterodera glycines
ataaaataaatttggatgcatgagcgggtaaacacaaacattctttgtcaacagtaactcgtgaaaaatgggtaccactgcgtcctcccaacttgagaaagaactcagtgcggaccacgtattttcgaacgagcatttctatggtctcataaatttcggcaacacttgttatgcaaattcagtgatccaagctctgtatttttgcaaacagttcagagaaaaaattttggcgtacaaacaaacacacaaaaaatcagggatgcaacgcgataatttgctcacttgccttgccgatttgttctcaaacatttcgagtcagaagagaagggttggaacaattgctcccaaaagattcgtcacaaaattaaagcgagaaaatgaattgttcgacaactttatgcagcaagacgcacatgaattttttaattatttgttgaacgcaatttctgaagttttaatggaggagaaaaagaaggagcaattgggcggaagcctaaggaaagccaacagcgcaatggcaccaaacaaacggtcgttttccgcgaatgcaaaaggccaacccaacgatttgtccgcaaagcaattgaccagcacttctgacatcactggtcaacaggagttgacgtggattcaagaagttttccaaggaacgcttacgaacgaaacgaaatgtctgaactgtgagacaatcagcagcaaagacgaggactttttggatttgagtgtggacattgagcagaatgtttccattagccattgtctgcgcaatttttccaacatggaaacactgtcgggtgaccagaaatatttgtgcgaaacatgcggcagtaagcatgaagcccagaaaaggatgcgcattcgcaaattgccccaactgctcgccccccatctgaaaaggttcaaatacgttgag

SEQ ID NO: 89284 - DNA, 943 bp, Heterodera glycines
gttcaaatggaggtcgacaagttccattcatcgcaaactttgatcgggaaagggacgcacaaattcacactttgggccgacaaatacgcgccgaacacctttctggatttgttgaccgaagatgagacaaatcgaatcgttgtggctccgtctttgggatgaatatgtttttgagaaaagaggaggcaaaaaatgggaggggagccaccgacgcatttcccagcggaacaatgccaatgcgacgtctctgtgggacactttggaggagagagatcgaacactcttcgaaatggaacggccaaaaggcactgacagccgaatgccaaaacaaaaaattttggcactttttgggccctccggagttggcaaaacgtcgttggcccgcgtggcggcggagcaggccggctaccggccggtgatcataccgatcagtgaactgcaaaacatggcggagctgaagtcgcgtcttgaaaatgccaccgattgcacgtccattgacgcgctcttccacaatttgtccgtctccgccgcttcgacaggcgaagcaccgccaccacacgtcggcactcggccgtgctgtttcattgtggacgcggtggaacaagcgtcgccggaaatggttcaattcctttgttcatgggtccgtcgttcccgcgcttcctccgtcgtctgtcggtgtcccgtcatttgcacttgcgcctccctttggcgtgcgcccgcgctgcgcgagttgcgcgccaactgcttgcccgtgcgcgtgcagcggtgcaatcgccagcggatgcagcgacggcttgaatttgccattacgaaggcgtgcgaattggccgtgatcagctggacgaactgttcctttcccacggcagtgacattcgcctctgtctgaacaccctccaattcagcacgctgaaaacgcacacttccgaccgaatccaagccaaca

SEQ ID NO: 89285 - DNA, 1481 bp, Heterodera glycines
  unsure (1)..(1481): unsure at all n locations
ataaaaatgaaaaatttgaatacttttttcctgtgctaagcaacacacaatgagctatgatccttacctatctggaacaagttccaatgctcgtcgattgttgggcgcacccccatctctgtcacgtgatgttataacgaagtcattcgtaaaaatggactgcagtcatgaagcgtcacttggcacggaatgcagcggcgaagaaagcgaagcagcaaaaacagcggatgaaactgaaggagaattgaagccgtcacaacgcgacgaagaagaggaaaatgggacaacggggaaaaggcagcaaaagagacgaaagcgacgaattcgactcacagatattggaccgaaggcaaagaaaaaggccgaacgaagggaaaaaccaatggcggagaagaagaatgaagtgcaagatgagaccaatccaaccgaaactcattgtcagtcatctaaaatgtcgcctcctttacttgaaatcgaaaatgaactcggacaaaacccaccaaataaagtgaagccttctcctcactttttcacgccatttcaattactttgtgacaatttgatacggaaattcatggccaaagatcccgagaaatattttgcgcagccagtgacagagttggaagcgcctggatatcattcaatcgttgattatccgatgtcattttcaacaatcaatgacaaaatagataataatatgtacttgaatttggatcaattcaaatctgacatttgtctggtttctgacaacgcaatgctttacaataacacaggaagtgtttattttttggcagcgcaaaaattgaaagttttggcaaaatattattntttccgagaagtatcttttgttcctcgtctattcgttgccctttggaaaagccttaactgaggagcaacttggaatacgcttacggaggaaagaggagcaaacgccgagacaactcaaagagaaaagtggcagggaaaggccgttgccttttctgagtgacagtcaaaaaactgaggaaatactaaatacagctccagtcaaaataaaggatcgattgacgggacgacgaccatgtcaaattgcttacttggacaacagagagggagcgtttgccctcaacgttctaactgaaactgcaacgaccaaactgacacttggcgaccacgttaagccattgggcaaaggcaaccctggaatttgtgcgccatttgagcctcggatttgctcggattatttggtctcctacacaaaccccggtccttttgcatcgttcgctccccactttgatttgacttgggcgacaatgtcaaagcgtgacagcgacttgctcctttcttgctacggtgacagagataatgtaactgatgcgactgcactccgacaaatggactcaaatgtcggaacaccaacttcagatgtgggcgagtccatggtaaatgacctcactgaccatgaacacttaggaactattacgtcgctaggaaacacgagt

SEQ ID NO: 89286 - DNA, 1038 bp, Heterodera glycines
cgcacttttgacgaattccaaatggcctctcaaaagcaattacgtgagaaaaagtgttccgaagtcgaggacaaaacaaacgacggcacagaacgggaaatgacaaattccaccagcaatttttacaaattgaccaaaaccgattcgcaaagctctgtagaacagaatgttgcgaatttggagcgtaatttgtcatcgaatttggtggtcccttcgacgagtggccgatgtgccaatcggagagacgaggaggaaacttccaaccctaaaaatgcccaactttcggagcaaacaaagtgtacaccggaacagcacgaggaaaagacggacgaatgcccgccgaaagagtccaacgttcgactgaccaataaaatctgcaaaaggcgcatgaacaaagttgagaatgttgcccatttgaatggccgtgggggcattggggcgctcggttggcaggcgacgcttccgtcggcccgggaaaggctcactttcatgctgatgaacgacactttggccgacattttcttcattttccgtgggtcggatgggtccgtccagagaatccccgcccacaaatttgtgctttcgggtggctcggcggtgttcgaggcgatgttccgtttcggtgactcttccgactgtgccaattgcattctcgaattggaactcgtcgacgtcgagcgcgaggcgttcgaggcattgctcacttttttatacaccgacgacattcagagcatcaccaaggaatccgtgatgagcattttgtacaccgccaaaaaatacgccgtcccaactttggaaagtgcgtgtgtgaatttcctggagaattgtctgaacggcgacaatgcgttcatgttgttgtccaaggcgcgcttttatgacgaacagcgattagcgaaccaatgtttggaaataatcgacgaagagacccaagaggcgatgaaatcggatgactttctgagcattgaccacgagacgctttgcgttgttctcggcagggacactcttcgggtcaaagagttgactctgttcaaggcgtct

SEQ ID NO: 89287 - DNA, 669 bp, Heterodera glycines
gtttgagaaattgccgatgaagaggaaggcatttgcactgacacagtgcagcaaaatcctctccattgtctgcgatgcttttcccctatcaaatgccccgtccgtttgccttgtcagcactatttttgtcgtttgtgcatcgccgatgagaagtgttgtgtgatttgtggtcatccgattggctgttccgagttagtagaggacaaagtgctgaattacgtgttggaaagttcgagtgaggtcactgagacatgtgcaaattgcgaccagatttcgcaaccgatgttcttctgcgacacgtgccatcagcccctttgcagcgggtgtcgcgagacgacccacaaagccaaaatattctcgactcatcacatttttgagttggaggagcgcgggaggttgagaagtcgccccatctgtccacagcacaatgagccgttcattttattctgtctcgactcgaaatcgctgatgtgcatcgaatgcttcaattcgtcttcgttggaacgacgcggacatttcgtcaacatcgaactggcgcacaaaatttgctgtgataaattggagaaaaatgcgttgaatttgcgcatttttcaggaggaacttcgtgagcaaattgagttgaggaaacgattgacggacgaactttcgaagaacagcgagaatttgaga

SEQ ID NO: 89288 - DNA, 1677 bp, Heterodera glycines
gtttgagcaggtcattccgaagaaggttaatccaccgtcggcagctgaagtgaaaaatggcggacgaagcgtcggaatacactgacgaagaatacacatacgaatacgaggatgaggaagaaccggaagccaacgagaacgctgctcccgcgccagttgaagagctcccaaaggacgaaccgaaaaaagcgggcgaagacgcagcagcgaagaaaaaggaaacatcaccaccaaagtcgctgaagaaggaggggtcgccgccaaagtcgcctaagaaagaggcgagtccgaagaaagaagcgagtccaaagaaagaggcgagtccggacaaatcgccggtgggcaagcgaaagggacgaacgccacgccaatcgatggaggagaaaccgaaggtggagaaggcaaaagcgaagacggaggaaaagccaattgaggagggcgaagcggcggacggattggcaccgccagcagtcgaccgaactgagacaaagagtccggagccggggtaccaaccgatgaccaagtcggtacagaagaaaatggcactttacgcaggtggaaagccgagcaaacacgacaaagccaagctaatgaagtccgagggcatcatccccatccaggccggcaccaacaaatacgcctcccaacgcggaatgaccggcttcggacggccacgtgacgtggtggacaaagtgaaaagtgagaatttggcagaaatcacagacgaagagaagttggcatcgctgaagggcagtacttggcttcagtccggcaccaacaagttcgcctcccaaaagggaatgaccggaattggaacaccgcgggacgttaattaccgcacgaaagggacgggaggggcgggcgaagtgccggaggacaaagcacgcttaacggacgggattgtgccgcttcagtcgggcaccaacaaattggcgtcgcaggccggcatgacggggatgggaatgccacggatcatcgacgtgcgaaagacggtggaccaggacagggaaagtcagggcttcattcacctccaaatgggcaccaatcgattcgccagtcagcagggaatgaccatgtttgggatgccgcgtcgcgaggtgacccaatacaaagacgaagtgaggggccaaatgccgcacgacgaggggaccatctcacgacagaccacgggatggaaggaaggcgcttctcagcagggaatgaccggcttcggcgcgttccgcaataatacgcaagtgcaactgcaagcgcaagaccagcgttcccagggaatgattccctaccaaatgggcgtcaatttcctcgactcccaagcgggcaaaacggcgttcggaatgcctcgtcgaacgtacacaccctacgtggacgattcgcacgaagaactgccagctgacatcacgcgaaggcccgaagtgccattttggaccggcatggaagtcgactttgccaatcagcaaggaatgttggcatttggcactccgcgcgatgtccgcggggaatacgtccgtcgaatgtggtaaacgcagtgcaaatggaggccaaagagaagcggcaaagaacaaagagaaattccttcgatcagtgcgatcattcggttaaataaatgtttagtctaattaatccttcgtccacaattagccccccccccccaattgttagcaatttacccacgaaaag

SEQ ID NO: 89289 - DNA, 731 bp, Heterodera glycines
atttgtttgcggaaattcacttgtctgtgaaacgcctgaccacgctcgtcagcttgcttatggaaccgatggtcgttcagagcgatttcgagcagttgctttagacgggactcaatttcagccaaatggcgttataagcggcggaggtgccgacttaaaggcaaaagcgaaaaaatgggatgaaaatgcaatcagaaagttgaaagaccgtcgaacggcgttgcaggaagagttgcaaaaactgcaccgaaccgggaaaagggagttggatgttgagatgaaacgggaacagatcacttccctggaggcacgtctacgcttcacacagcaagaattgaagaagagcgaaaacgaaacgctgcggcggttggagcaggacgcggaggtcgaaagtgcggagccggagacaatcgaagtaattaaagccgaacttacaatttagacgaaaaagcaacaacaataaacattcatttattataaaaatttaaacatttatttaaaattttgcacgaattgaaagccgtcgaattgaaattgaggagcgcaaaatcgaaatagaacgcttggaacaaaataaaattgtcgcgttccgattccaataaacggatttgttcttcttcacgttcgcgaagtgcctctaaaacaaaaaaatcgttaattaattttttagtaaattaaacatttttggtttcattcaatagcccttaaggttttctacttactgcattttc

SEQ ID NO: 89290 - DNA, 182 bp, Heterodera glycines
aaagtcgggaccgggacaaagtttttcgaccgggaccgcgaaaaaacccgggaccgggatttctgtttttccaaaaaccgggatcgggaccgggacctgaaaaacccgggatttcccgccccggtcccggtcccgctccactctactacttttttttttttttaaattaaatgtcaaaaata

SEQ ID NO: 89291 - DNA, 1122 bp, Heterodera glycines
attttaaaagcattatcgacagtttgtcacagaagggacttctcgaagcgaatcgtcaaccgcccatcagtcactcgacactcagttttttgatggaaaggaaaaaggacccaatgtcaatggtcaacatttactgctcggcttcggctcgaatgtgtcaatttgtccggttttttaagtgaggaaaatgccgccaaagccaattccgacaaaagcagcgaatgtcgaacaaagtcaacagcaggaaaacatgcacttgtcattctctgatgacatcgacttggatgccattcggaaggacttcgaacgccttaatccgctcccatcggccgctaatgaaagtgaagtttttgctcgactgcgctcaaccgccttcagactgcacactcagaacgctttttggtgccaatttgatcttagcgaggaaacaaaggcgaagatggagcagtgccggatgggcaacaacccaatggcatttgtcaagcgatgcattgtgctgcaggaattaaaaaagtccaccgaagcaatggagcagaacaatgaacagatgccatcgcaaatacaactcgatttccatgtcttcacacttccctatgtcctaccacattacgcctgtttatcgttattcgacggagaaattcatcacggcgcaattgcaacctcaaaacaaagggcgaagatcagttgtgcagcagtgttatgtgaagtgttggtgaagatgggctgggcggatgtgaaaagggccaaaaagagaaaaaactccgacggagagaaggcattgaaaaagaaaaaacggaagggagaaaacggacagacggaagacgttgaggagggaaatgtccgtttgtctcatcagttccttttgacattgcatccaaatgaatcgcttgacccaacaacgcattttttccttgcttcgtctgctaaaagcccaattcaattgctcaaagaagtggcggatcgtgaaagctttgaagtttcgtatacgaaaggaatggacgagtacttcaacaagcacattgtccacgtcaacacaattgagggcactgctgaaggacgctccgaagtgagcatcagcgaagcaaaatgttcagccgcgcggaagggaattgacgcattggt

SEQ ID NO: 89292 - DNA, 646 bp, Heterodera glycines
agcgaccgacggacagagagaaatgccctcccccgccacctttttgaactgttccgtggaaccgtcaatggcaaatgtcaatttgtggagaatgtttccgttcgaagttgccgtgctgatccgtccatatcgccgactgttcgccatttcgcgaagccattccatcgccgttttggccctttgcattacaaccgccgctttggaaccctcggggatcagcaactcgcgcgacaaaagggtcgaactccggcggaatgggggcgccgagcgcgagacagttcagctcatcgatcactaggggggagagtgggagatgatgggacaggcaatggcatccctttttcgttagataatcccgttccattccatcgcttcttaccaatggtcgggactaaaacagtgaattggtcggattggacgagccgctgaatatggcccaaatggtcgatgaaagtgtttgtgtcgggaactgagaaaaggggtgggaagtccgagacaagctgaatttgaaaacgggttgaaaagctcatttaggtaattactagtattaaggacaatacccaaatatttgggtcgaatttcgataatccaatggtgcgtaaatgaactttgctcgtccatgagaagtttctgcaaaaagaaatgg

SEQ ID NO: 89293 - DNA, 648 bp, Heterodera glycines
gtggcaaattggctgttgttggtgttttttctccgcttttccaattgcttttcatttttcacttcccccctttcttttcttagggtccgttcaaatgttcactgacctttcttcgccaaagaagacaatgcaaagacatttatttgaagtgatcgtcaaattcctttccgatggctttgaattgaatcaaatcgatgacgccgaaccgaacatttcggatttccacccaattcccgacaatttgcaactttcgaaccagccaaaaatgtgcctgcaggaaagtgaaatagagcaaacattcactggtgacatcatcaaactgttcggcacttctctcagctcaattagtctcgagcattggcctgaagccatacgcgcggaaaatgaattgatttgtacattcgcgaggcgggagagattttggacattagcaaaacacttttgcgcagtgagcgacagacggagggaaaaataacggacaaaaaagtgatggaatacgtaattctgcacattgtcgagtggaagaagtcaaccggcggaatgaatttgttttgatatttttggcaatgggcaaggacaagcaaggtggttatgacccggacatccacggaaattggcaaaatgaggagaagccatgtgcctgccctt

SEQ ID NO: 89294 - DNA, 1534 bp, Heterodera glycines
aatggatgaggcgaagaatatggcgctgttgttctttgttgaccacctaatgcaaaaggggggccagcggaccatccacgacttgagctgccaatttggtgcacgcggattcaccgatgaaatgcgtcaggcggtcggcaccacccaagagggcctctacgagttcctcagccagtacccgtccctgttcaccctccaagacggggacaaggtccagctgaagggctacggagatggcgacgagggccgcacgcatttgtcgcacattcctccgtccggccgccaacgcgactacgtcgcggaggcagtgcaattttttgtggccaaattggagaagttcggccccgaaatgcaggtaaaatcgctgctcggccatcgttctcaagctgcccccgaagtccggctcgttcacggacgccatctgaaggaatttgccgactttttggccaaccaaactaaccatttcacggtggagggcgaccgggtgaagttgaagcacatgccggaaccgaatgggacggatgccaaacaatttttggacgaggagggccgcccattagtcggccatcgggcgaaattggcggccgtggactttatgagaggggtgcttgaacagaacgaagaaatgcccatccctttggacattttctaccgccgtttctgcgaccgtttcccgcacagtattcgccaggaagtggccaccaaccccaaggagttgctgctgttcctcaagctgaaccggcacgtgttcttcatccgctccaacaaggtacaactcgtccgtaatcggcctggcgatgaacatggttccgagagtggtcgttcgaccggcgaagacggcgggtcgtccgatcgaagtgccacaagcccagcggagaacggaggcggctgtgcgccgccgagggcaccgacggacggaatgtctcccgagacgaacgctcttttcccgctgaaccgcgacaatttgcaccgcgtacaaattgtacaaacgctgcagcaggcacaggaagcggtgcgttgcctgcgcgtcgacctcgactccgtcccgtcttccgccttcctcgccctcgacttcaaattgctctctttcggctccgttccgtccgctgaccttccgctcgtcgttctcgccgttgtcgcgtcgccgctgcgtctcgtcgtttttgacctcgcccaatcggataaggttctgtcggagagcggactgcgcacccttttggaggacgacagcgtgctgaaagttacgcacgacgttcagcgaattgcgccccttttggccaaccgatgggacattcgaattggccgactgtttgacactcagatcgcccattcggtcattcagcacgacaaattcagtaaacccctcggcgacttgcgtgccatttcctttgtcaacttgcagcgcgtctatttcccccagtcgcttgtgctaagcgatgttccgcctcggaaactctcccaaacgcccaattggtcggaccgccctctgtccaccgatttgcttttggccgcgtgtgaagagtgccattgcctc

SEQ ID NO: 89295 - DNA, 677 bp, Heterodera glycines
gaggaagtgaaaagcagttctttttgccatttcaagaacacatggtcaaagtcgaaaaacaaatttcctccgggacttcggatgacccattgagtttggttgattcgatcataaaggaccattttctcaacgatttgaagcacaaacagctcacccccgttcaggcatgtactctccgccacatgttggccaacttcgattgcgtcgtgcagtcgcccaccggcacaggcaaaactttagcttttatgcttccaacgctgcaaattttggtgcaaaagaaactgaccggcgcaggagagggaaaagaacagccgacgtctgtctccgattcgtgtcgcattttggcacttgtggtggcgccgggccgtgatttgattgtccaacttttccatcttttttcaccattgtgcaaaaagcttggccttagcactttgaaattgcacggggctggcggaaaacaaaagaaaaagagcccaaagaagcacatgaagggcaaatgcattttgatctgcactccgggaagctttgagcactttttggagaaggaggccgagttgaagcagtacctgaagcacttggaagtgctcatcattgacgaggccgaccgctactcggacagagagtcaatgagcagtttgaccactttgcttgccgctttgccaaaacagcgtcggact

SEQ ID NO: 89296 - DNA, 699 bp, Heterodera glycines
aaacaacgttccgattcattgctgttgcccaacgatccgaattcttatttagccgtccttaaccaagtcacttggagcgattttattgaacgcattgtgcctactggaactgtgtcaaatgttcatttgaaagtttctcgtgggcctgaaagaagaatttccaaaaaagcactggtcacagttatgccgggtgcgcggtggccggatggaaaaatgttgccaaggatgttttttgtaaatgtgcccgacattggtcgagtggaacaagaaatcaggaaagcggaagtggatgctgggcttgcccctgaacattggagcaacatccaatggatgcaaccggggccaatgtcattgattataccttctctggtcatttttgctttatttgtccttccattggttttccttggtcgaatgatgactggctcaaaaatgggcaacttctccgaatcgatctcttccatgatggggcatcgtcttcgaatttatgacccggcattaaaggatggtaaattgaagatcaaatttcgtgacgtggcaggccttcacgaagcgaaagtggaaattagcgaatttgtggattatcttcgtcgacccaacaaatacacgcgattgggcgcgagactgccaaaaggtgcccttctgactgggccgccaggctgcggaaagactcttttggccaaagcactcggcgcggaa

SEQ ID NO: 89297 - DNA, 636 bp, Heterodera glycines
gtttgagagaaaatgccaaacattcgacagcagaagaagcatgaaatggtggacagtgatgacgaaaggaacgaatacggcagcactaaggctgaaccatcgccattgactgatcaatcggcgacgtcgatgatgactcataatagcagcaatgcggcggagggaggacacatcattagcagcaacggcggggcccaaatttgtggtggcaatggcacagtgccaatgccattgatttcctgctggtccccgtgctctgcgagttcagcgggggacccgctgctgtggtacgagacggacaaatgccagtactgcaaccaaaagtgcagaaagccccgtcgcctgttggactgtctgcactatgtgtgcgaagagtgtgtgcctgaacaatgcctgctgctggacaatttggagcccgacgaaatccgatgcccaaattgcagccaagttgaaatgtcttcaatttcgggtcaatccactgaaagttcgcgtgtggaaatctgtatcaaacacaaggagaaatttacccgtgtctgtctgtcatgtgcgcgtctcctttgtgtgaattgcgagcagcagctgtccttgcccaccgcgcaagtcaacaatatcactaacgttgttgctgttccgcaa

SEQ ID NO: 89298 - DNA, 688 bp, Heterodera glycines
atacataattctttaaaaaaatacgacagttggttccatcgtattacaatttttttagaatggctgaggccagaaatattgctgccttaagcttcaccgtaacacacgatggcatttccgtctcttatgaccaggaagttctgcgggacatttggcacgcgttttcacgcagttataaaaaacgcatcgcaaaattcgagaatgatttcttcgctgggattttcccagccaatatccgttcgttggccattgtcattttccttgtggccgcattgaatgtttcattcggaaatgacaaaactccgttcaatcttgccgataagctcaattactacgtcttttccaatatcaccacgctcgacgttttgtcccgcactctctcaattgcctttgcgggttgcattttatggtttttgctcgtccaattctttcgtcttttgctcaaatggtttctcatgtacaaaggttggatgtacgaagcgcctcattctggccaaatttcacaaacgaccaaactttggttttacgttcttcacaaaattgccgcttatgagccgatgacgcactctttccaaggcgctttgcctcatctcccactgccgtcgttggcctccacgatggaaaggcacctccgttcgatgcggccaatcctttcggacagagactacgacgaactcgtagaactgag

SEQ ID NO: 89299 - DNA, 1160 bp, Heterodera glycines
gtttgagaaaatagttaaactatttgaatttatttctcttgcatatggcgacacccgcaacaatcaaaaaacttgaagaaaaaaagctgttggcacagcaacgtaagcaaatgcagcaaaaggacggcagcaacggaaacgcgggggcccaacttttgtcgctgagtgagcagtcggacgcgccttcctcccaccttttggtgcgcaccgaaccggtggagggagcaccgccacggcacatcgatttgcgaccattaagcggcaattattcgaatttccgtgagcgcagaggggaggatttctctaccgatgtgagtgctgaacgcccgtacggtttgtcgaattacaccaacttcgacgccaacagcggtcccacggcgtacgcatggccgccacagaattatcagccggcgtttgggcctccgccgccgctgcttacacagcaacaaaatatccttcagccactctctcgtccgtcaacattcaacacttatcgccgtccacgcaccgctgctaatttttcgggaaaactcaaaaaacaggagtacacgccgcttccggaggatgggaatgggtgggggatgggaggtcactatccgtgccgataaactcgtctgctttcatggaaaaggcaattttctgtcccaattattccctctttctcttgtcgtagatgggaatgaatacggttcattggagcattactatcaagcgtgcaaactattctccttagtcagcgctcaggctgcccaagagttgcgttccatcaaagacccattgaagacgaagacacgcactcgcgacttgctgttttctatgggcgttagcaaagcgaggatcgatgcttggaaaaattcccacggtgtgcaggtcattttgcatgcgatgcgtcacaaattcagcgaccaacatcaggagttatgtgaccaattgctggcgactgaagacgctttgttggtgcaggcatatgacaaagactcgttctttgctgccggaatggtcgagaaacgagtgcgcgaatgggccaaggaaaacgaaggcaaagtgctcaagtttccatccgagctgagcgacgaaacattcaaacacattccattggttggcatttctatggaaggcatctccctacattctcttcgtcactttcgctttgatttgct

SEQ ID NO: 89300 - DNA, 460 bp, Heterodera glycines
gtttcaaatatcgtaagattgtttgatagggccagacaagagaaggcaactgttggtaccaagtttgcggtaaaaaaatgagaaaaaagagataaccatttttggtcaagaaattttttgtttgcgtttcaaatatcgtaagattgtttgatagggccagacaagagaaggcaactgttggtaccaagtttgcggtaaaaaaatgagaaaaaagagataaccatttttggtcaagaattttttttgtttgcgtttcaaatatcgtaagattgtttgatagggccagacaagagaaggcaactgttggtaccaattttgcggtaaaaaatgagaaaaaagagataaccatttttggtcaagaattttttttgtttgcgtttcaaatatcgtaagattgtttgatagggccagacaagagaaggcaactgttggtaccaattttgcggtaaaaaaaaaaaaa

SEQ ID NO: 89301 - DNA, 816 bp, Heterodera glycines
gtttattgaacaacaaatcgcaaaatgcgatctgaacattcgctttataagctcaacttggggcggtgtgccaacaatttcttcctccacaaaatttcctccctcggcgactgttctttgcttcacacttcgcctgtcagggaaaatggccacacaaaactgacggtcaatgggttccattgcccgccaaaggaaacgaaaaattgggaggaaaaaaaagataaaacatcgcaggaaaaggaagacggagagaaggggaaagcgaacggacaacggaagaaagagcaaattgagccgaaagcgtgggaagaggaggaagaattcgaaaagtgccattccctcgtcgctttctccgtctatttcacttggttcgtcctcactgtccatgcgtattttcgcgagtttctgcgccgttacggaatcgagtcgaacaaagcggccgttgagcgcactgagctgagaggatttgcgccactcgtcgattctttcgaagcgatttacgcccgaaattgttacatgcgtgtccgcgatgtttttgagcggccaattggcggtgtgccaggggcgaaagtcaaattggtcgaccgacaaacagatgacttctgctggacgttcaaatttcccggctctcaaacggaagtgataaatgtgagcagttacaattatttgggcttcgctcaaagcgacggcccatgcgcggaaatggcggcaaaagcagtggaaaaagggggactatcgacgtgtggcagtgcgcttgaagggggtcagtgctcaattcagtccgacttggagaaattggtggccaaatttcttggg

SEQ ID NO: 89302 - DNA, 625 bp, Heterodera glycines
gcagcccatttgccttccgaacattcgtctctttttggtgcagcttttacgcggactcgcctattgccatgccaaacgcattctgcaccgcgacctgaagccacagaatttgctcatttcgaagaatggggagctgaagttggccgacttcggcttggcacgggcgcagtcagttccgaccaaaagttacacggccgaagtggtcactctgtggtacagaccaccggatgttctgcttggttccacagactacagtacccacattgacatgtggggcgtgggttgcattctctttgaaatgttggcccggaagccaatgttcccgggaaacaaagtcgaggatcagctcgacctgatttacagaaaactcggcacccccacgccacaattgcacccgcggctttgcgctttgcccgccttcaattgccacccgcgccatttgcggcggcactcgcccagggcattggtttgcctggcgagccgtataacgcacgaacgggcggatctgctgcagagactgctcgcctacgaggacaaaaatcggttgtccgccgtcgaagcgatgcgtcacccttttcttaagtgtttccctgaggcgatttttggacttccggatacggagtcc

SEQ ID NO: 89303 - DNA, 1043 bp, Heterodera glycines
aaagggcttaactgctaaaactaggcaattctagggaatttaaaatcgaacaaaaaaagttttggtgcattaatttgtcaacttttatggtcgtcttttttatggtcgtgtaaactgaaatagatcaaccctggaaagttactttatcaaaattaaaaccccccattatttagggttggcacatactttcaatttaggaatacaaatttttaagcgaggattcggtagttttttaacttaaggttgctgaggcaagatctctggattccgtttgcgtttctctaaaaaatcttgcacaaaatgcggaagatgaaagcgaggttggtatcaataattttgtactatttgtgctacagttttgatttcctattttatcccattcaaaaaaaaatcctccaaaaaggaattaaaaaattttacgtattcattcatttaaattttcttatttttttgcaccatttcccttgaatttttaattcacattgattcttttaacaaagcacatattattttgtcagacagcggccgaacttttttacaaaggggctatggaaatagatgatttcataaagaaattcacggaaaaacgcgttattggccatacgaggtaaacatttttccgaaaggagtttgcttttcccgtgaggtctgctcatctatgttttatttttataaaattaagttaataaatatatgattaaaaataaaataagctatagaaaaataaaaaaaacaaattataaagaggtaaatattttcagaaggctaaaggccgaaaagcttgccgaattgcttcgccaacaatgccaataccaaccgcagcacccgtctccttctgcacttggaatgaccactcaaactcagtattcgtctcaaggggtggcagcctcaatgtatcctgtccttggccaggcttatacgagcccagccaattttcggcattcttatatgagttaggagaacggttcaaccggagattacttggacacgcacttattattttctatcaactttttgccccgacaaataaacgttttataatg

SEQ ID NO: 89304 - DNA, 815 bp, Heterodera glycines
atcttgagagcgttgtttgaaaccaaatattaaatatgtcatctctttccgaggaggtcaagaaagttaagcaggccgctaacattcctcctccggcagtttgtaacagatttgtcgaagggttttcaagcgaagatgtgttcgaaactcgaccatcttcacatggcggtgcttttgcattccgttacgatgttgaaatggtccagctcactagaaacaaaagtttgacttcgggcggtggcgacgatgggaaaaatggattgctccgcggcgtttgttttgaattgatcaagttcgtgcacgactcgacgcagggatttggacaagcggcacaatttgtttacgacaaccgtaaaatcttattcacgaacaagcgaatcgaacaatttgtattggaaattgacacggaaaaagtccaaggaatcgttcgcgatttcctgcgtgggtcttcggtcaaaattgagatcaaaccctgtcagactgataaacatgagctggatctcaacgacgtcttttcttccatctcgcgccgtcctgatgagcagtctgacagatctttgcgcactttccttgaaatgctgacttcccagccatttctcaatgctgggacccatgacatcattggtgctggtcgtctttttaagcgtcagatctgcaaagagctcgaagatggaattgtcacacgcgagggcattgctaagggagttcgcgtcattgacaacaatggtgaaccaaaggcggctttggttgctgacgtgaagacttgtgcattcttcgcaagtcgtaaccttgaggaaatcgtcatggagatggtg

SEQ ID NO: 89305 - DNA, 656 bp, Heterodera glycines
ctttctttcccttccgatgcctttctccgcctttttctccgccttttccctttggtgcccttccgttctctgttccgcccaattcggcttcgctttgcttctccctctttcctatttgctctaccgtttaactcgcacttctttggcccttttccaagcaattttcgtctatcgtttggcgccgttcgtttacgcgccaaaactcagtacatttcggcaccgatggactgtggtcaccggcggaacggacggaattggcaaagcgtacactttcgaattggcaagaaggggcttgcgcaagttcatgctaattggacgcaacgagcagaaactggagagagtgaaggaggaaatcgagtccgaatttcccggctcctccgtgcttcttttccaattcgactttttcgacgcggtgaatgccgaagacgcggacagattgaggcgcgagttggccaaattggacattggcattgcagtaaacagtgttggagtcggccgtgaactgatggaacggtttggggagcggccggaagcggacagacaactcttccgagtcaatgccatcggcgcggcggagttcatttcggctgttttgcctctgatggagcggtgcgggggtggtcatttggtggttttgtcctcaagccagggcttcc

SEQ ID NO: 89306 - DNA, 656 bp, Heterodera glycines
gtttgacatttcatcgttaaattaacagtaattttactttggaatttgagcgtaacaatttctcgtcaaaatgtttggtggcggaggagaccccttcagaaacccatttgatcaaatgcaccaacaaatgagacagatggacaacatgatgaattcgatgttgggcgatgcgtgggacatgctgaacggcttcggaatgatgggccccccgttccccaaccatcctatgctcaccgatggtctgaatcgtcaaaaccaagctcttcgtcgtcagcagcctccacagcatcactttggtcctgatacgatgatgagtccgtttggaggatttggccttttcggcggaatgatgcagcaaatgcaaaatatgcataaccatgcaattagtgatccgaattctgttgttttctccgaatcaacaatggtttcttacgatggaaatggacaaccgaaggtcgtccaacattcgacccgtaaagccggcgatgttaaggagaccaggaatgctctccgtgacggcgtacgtgaggagatgacagttggccattcgatcggcgaccgttcgcatgtgatagaaaagaagcgggacaaagacgggaaggttcgccaacaacagaagtttttcaacctcgccgaagatgaagccgaagatttca

SEQ ID NO: 89307 - DNA, 664 bp, Heterodera glycines
tgagggtttagatttattgttaatattgttgtaaatattccctttttgggaattaataaaaataaataaataattcaaaatgtccgctagcaacagtcgaaaagcattcgtgcccttttcaaatgcactccgacgacgaaagctgctctttggctttggggttggcactgtcatcggcgccggcttttactacatggacaaaaacaacgaaaggcgcttcaaacgggacaaagacgtttatttcgtgtccaatgcgcatgcggccaccgttgacaccaaagcggcgctgaacaaacgcccgtccggctcacttccgacccgcgcggagctgttgaaaggaatgcgtgacgaggaattcgacatccttgtgattggtggcggagcgacgggcgcgggggtggcattggacgcgcaaacgcgaggtctgaaaaccgcgctggtcgagttggacgacttctcttcgggcacaagttcgcgctccaccaaactcatccacggcggagtgcgctatttacaggcggccattatgaagtttgaccgtgagcagtacaaaatggtcaaagaggcgctgttcgaaagggccaatttgttggaaattgcgccccatctgagctatccgctgccgaatatgctccctatttacaaactttggcaagggccttac

SEQ ID NO: 89308 - DNA, 663 bp, Heterodera glycines
ccccatttcaaaagcctaacaaagtcctcccctttcacttcacttccctttattttgcctttcgctgcgatggcaaattccttctaaatatgaaaagaatctgttcgagtttaatccgctaattgtcagaagtgattcgttgggcttaaaaatttcttatgcctccgcttgggcgttgcgaatggaatgtgaatcagcgggcgcgactgatccaattggtgaggcaattcgaaatcatttggttgccggtaggcgcaacggacaaaagcaaaatttcggcctgtcgtcgggctgcattcgaacaaattcgacagcactttttggaggacggatttacggtcgacgatttggcttcacaatggcgaaatttgaaggatatattctacaagaggctcaaggaaatgaaccgacgcattcaaatgggcgaagtcaacgtaaaaccgccgtggcgtttttttgacgcgctgagttttttggccggtagcaaagcgatggatgagaatcggagggaagcgttcggtgaaagcgcaaatgaagtgtttgctgatgaggacggagtcattgaggacaatttgagcaattttggactgatggacgagctgaaccaaccgagcgctgaagaaggcctactcaatttggtgaaggcggtgaaagaggagcaag

SEQ ID NO: 89309 - DNA, 650 bp, Heterodera glycines
gttttaggtgtttggagtgccaattttacattttaccgatcagtctatgcccaatttgtcacttttggacaaacttatttttacttcatcctgtttttccaacctcatttgtgcaccaaattgacaacatttgagcaatgaatgttcagcaacagcagccggtcacctcggcataccctcagcagggcaattttgcggaggagaagcagctgcatcccaatcacaatgtgtataggaaaatggaacgactgatcagtctgatgctgaatgttgatgatggcgtgccgatcaagacggtcaaatcgtttctttcaaaattgccaaggattccgtcggtgttcacgggccaagacttggtcggttggctgctccaaaatgtggacattgccgaccttggcgacgcgttgcatttggcccatttgctcgcctcccatggctatgtgtttcagattgacgaccacgtgttgacggtgaaaaatgacaacacttactaccgtttccagaccccctatttttggccttccaattgttgggagccggaaaacacggactacgcggtttatttgtgcaaacggacaatgcagaacaatgcacacttggagctggaggattttgaagcggagaatctggccaagctgcaaaaaatgttc

SEQ ID NO: 89310 - DNA, 1286 bp, Heterodera glycines
ctcacgtattatttggggacgttcgctatttatctaatgaattcggatttacaaattcacattcagtccaacaataatgtcaatgcttttgttttgttgattgaattgtataaaaataatagaggattttcagtaaataaacggcagttcgatttggatccaaaagtcatgaatcaattccataaattttttttattaactacagaaaataccgttgaataggatttaaacatattgttgtcaaatatactcttaggtattataagtaaataatcaattttttagcttattaatactaaaaaagcctggatcattctggacctgggttttcctagatttttatttagaaagtacagtttctctaactataaattgaaaattttttggcgttttatcttaattaaggatgactaatcgtaccagaccggcccttatgttttcaccaacctgtgtctacactaattaacattactaattgatccgcacagcataaatacccgttttttgttcactattattaaattgtcgtttttaaccaattatttaatttgtaacatcaattcgaatgactttcctggatcacgtcgacaaagatttcttcaaggcttggccttttggagtgttgaaaacgattcattggttcgctcccctcgccattctcattacacttggaaatagtcgttacatttatgactccctcggttttgtccttttcacagcatggaatgcattcatcgtttcgctgatcacttggctttgttatatcttccgattaaaccgaaaggccttccaatttggtgccggttatctcttcgtccctttcgcactgattgatttcattgtgtctctgttggctgtgctttgtttcggcatcagttcgttgatttgcgccattgcgctgcttgactcattggaatacagcttaggccacatcatctcataccttctcgccacggttttctgtcttatttctggctcggccttcggctattttgccattcttgtctaccgtctgattccgaatggccaattccgccatctgatgacgatggtaatcgaaggtcatcagaccactacgttggatggccaaggcggtgtgggcccagtaaatgccggccccccaccggggagaccgcccgtgtgaaaattcgcaatattttaatttatcattttttgcttatttgctcacttcccaaaatgcttatcagcccttcctcactttattcttcatatatgcaaccgatcctctccaaattatcatttttgcgagctccggtctccccctt

SEQ ID NO: 89311 - DNA, 756 bp, Heterodera glycines
gtccaacggctcacccattcacaataaaaatgccgttttgtccgttggtccccatggtccgatgctaatgcaagacgtcgtttatttggacgaaattgcgcacttcgatcgcgagcgcattccggaacgcgttgttcatgccaaaggcgccggagcacacggctacttcgaggtgacaagcaaagacatggccgagcactgcaaggccgccatgttcagcgagatcggaaaacggacgccgcttttcatccgtttttcgcgtgtccgtcggtggagataaaggtggagaatcggggagcgcggacaccgcgcgcgacccacgcggttttgccatcaaattttacacggaggagggcaattgggaatttggttgcaaacaacacaccggcaagtcaaaattttcttcatccgcgacccttttctctttccaaatttcattcattcgcaaaagcggaaccccgccacccatctcaaagacccggaaatgatgtgggacttttggactcttcgacccgaatcactacaccaagtgatgtttctgttttcggatcgtggaattccggacggatttcgctttatgaatgggtacggtagtcacacatttaaacttgtaaacaaaaccggcgaagcagtctattgcaaatttcacattaaaacgcggcagggcattaagaatttgtcccctcaaaaggctctccaattgtcggccgaagaccccgattacgccattcgcgacctttaccatgcgatcgccgg

SEQ ID NO: 89312 - DNA, 1114 bp, Heterodera glycines
aaaagataaaaaatattaattaaattaattttattttattaaagtggccaataaaatggcattggcaaaacttaaaacatcagtttttgccatttttgttgtgctttttgtttcaattgacaagtgccgatgtacaaacattctgttcacctttttccatgacacgggaagccatttccaatcggtgtttccattgatgcaaaagctggcgagtcggggcaataatgtgtccgttttggacacagtttatgagcaggaccatagccttgaaatccatcactttcgggcgcttttgcccaaacaccataacgatgaaacatctaaacgtcactttgccaatgacatttggtcacgccgtctttccgccactgatttggccctttattttgggacatgtgacaaggaactcggaattttgatgcaaaatcacagccaaaaaattgttcagctgttcgacaccaattgggatgtcattgtgctggacgaccttttctggtccttcggtttcgccttcgccactttaagccaccgccggtggcatttggcgccgaatgagcgcaaagagccgcacattgtggcatatgcaacggcacagagcgggctcaattcgcacaattccatcagagcaacgagccaattttgggtcggtcggcccacactctgtccgctgtatccgaccgattccaacgacgttttttcgcccgaccgttttgtccaccgaatttacgcccttctggacataatccaagaagctgttgcggtcaatatttttgcccttcactttttgatgccaaacattgccaaattcggagtgccgaatttcagcttcaccgaattttattcgcgtagccaattgttcttgcacgacagcatcgacaggctcgggttgccggtgacaactgctgctgacattttcggagtcggcgcccattgcaaaacgccaaaagattcttccgccctttccgccaaaattaaacagtttttggaggacccgagctcaaaaggcacaatttatatcgccttcggttctcacatcgattggaaatttgcgccacggaaatttttggacgattttgtcaccgtttttcgaaaactgccccaatatcgtttcatt

SEQ ID NO: 89313 - DNA, 881 bp, Heterodera glycines
tctccgactccccgccaaacatcgatcctgaaaagggctttcaattatccgcaggcgtgggccactcaaaacattcctcaacccccaatggaagagttcgggacgtcgatgaattggccgaggaggtgcccggtgaatccgatgtgagtgacgaggaggacgcagaatcgcctcttccttctgtccatgctcaaatgggcttattctgtcacacaaatccggaagtggcgcccgcttcgatgtggacctcgaagaatgtgcaggaatttaaagacaacatcaagaaagagggcaccgagggagttctgaaaattggtcatggcgaaactgtcacagttcgtgtcccgacgcacccagagggcaattctttagtctgggattttgcaaccgattattatgacctcggttttggcgtttatttcgaatggacaattgcggagacgaaccaagtgacagtgcaagtggaagagagtgaggacgaattggaggacgaccaagcggcggggggcgagggacgcaccggcggacagacggcgggcgacgatgtggaagcggacgcagcgaagcgacagaaagacgcgaacaaaccgcgcgtagacgaaatcattccgaccttccgaagggactgtcacgaggaggtgttttccggatctcatgtttatcccggacagggcatttaccttctcaaatttgacaattcgtattctctgtggcggtcaaaaacgttatattacagagttttctacagcaagtgatatcatccagattgattgttgaaatgtgaaccatgaatggaaatgattgaataaatattacccagaagaaaatgtctataatcaataggattgtcaatttcacgtaaatacatatttttcctggaa

SEQ ID NO: 89314 - DNA, 633 bp, Heterodera glycines
aggcatgcaagaactttccaacattcgattggccactcctccgccacaaccgccgccggtgcttcgcaatgttccgttgcctcccgtgacgtcgaatgtcagcgaaatgatggtggaccgcaattacattgcaaagggagtctcgccgccgaagttcaaaccgattggcgaactgtcggattaccagcaacaaatcaacggatcacaagaagtttcaaacattcgattcgccactcctccgccacaaccgccgccggtgcttcgcaatgttccgttgcctcccgtgacgtcgaataacaacgaaatgatggtggaccgcacttgtcgaaacaacacagcaaagccgtccgcttcggattttgggctcgctgcttcatcatcatcgacatcgacaggagaggaggacgatgcgcaactgttcggacggcgagtggtcaaatttctgcgcagtttaaacaacggacgccgcaggcgccgcgcatgcattggcattgagcaagtgatgatcgaatttgaaacggaggaggaagaggagcaaaagcgatgatcacctaattatttgttttgatcggaatcacctctgctggatatttttgtggattctttgatccgttaataaaccaaagtttaaaa

SEQ ID NO: 89315 - DNA, 572 bp, Heterodera glycines
gccacatataatccgaccccttattactgtatttacctaaatctgtattaatgtttaactttttattacctatcctactttaataagtttgttaacggacaatgcaatgtgcctacaggttcaatgtggcaacgttaaattgctggcttttaccacacccttggccaatcggaagcaaacacaaacaattccgtttgcaaaaattaatcgacgaactgaaaaattcgcgttttgacgtcattgctttgcaagaagtatggagcgaaaagatttttcttcaaatcgcccatgaactcaatggattttttccccattcacattatttccacagcggatttacgggtagcggcacatgtgttatcagcaagcatcccatagtttcaactttactccataggtattccctgaatggctttcctcatcacgtccaccggggtgactggtttggcggaaaaattgttggaatggttgaaataatggtggagcagtatcgcgttgcattttatacgacacaccttcatgccgaatacaatcgaaagaaccatctcttccttccgcaccgcatctcacag

SEQ ID NO: 89316 - DNA, 651 bp, Heterodera glycines
gccaacggaacttcaatttttggacgaatcggttgccgatgaagaggcggttcttggcagtgaaattacgctacaccaacacaaaatggagaaggaagaggaaaccacttttgaagagcacgacgacatgacagctccgaaatcggtttttggttcttcttcatttggctgcaacaaaagggagcactgcaaaagtgatgacgaggattattgtcacagcgcttgtgaagaggggccgacagaggagacaaagaatcattccccgccagaagaaagcagcaaagagaaggagggtgaacaggcggaagacacgggaactgggatgaccgacattgttgaagcagaagcgcttactgaacctggcactccccttcggcagatggacgagacgactaattcccagagaaatgaggaagaaacgtgcccaattcgagaggaggaacagcagacaaagacagaagagaattcgacggaagcgacagaagaaggaagaaggagctaaacgaagtgttaattgtgaaggtcggattttattaatgatattttagttttatcacattaataatggtgtctaaatgtttgaaaacccaccagaattactcgcctgattgacaaatactcccagcccccaacattcaagtatttctacat

SEQ ID NO: 89317 - DNA, 595 bp, Heterodera glycines
gttccatccccaagtccgcgtttcgtttcggcactttcgaatttctgaagggtcacgcggtggatgaacgcggcaatctctccccgttcatgcgattggcttgtggccttggtgcgggaatttccgaggcgatttttgctgttactcctatggaaactgtcaaagtcaaattcatccatgaccaaacgctggaaaagccgcgtttccgtggttttatgcacggaatgggcgtcattatgaaggcggacggtccgcggggtttctatcaagggcttaccgcgacaatggcaaaacaagggagcaaccaggcaatccgtttcttcgtcatggaaacactgaaggattggtaccgggacggtgacccgaatgttccggtcagcaaacccgtggtcggattgttcggagcaattgctggggcggcgagtgtgtacgttgcatttgctattgtcacaattctttttttttacttccgtcccttccattttcgtttttatttctctttaccctaatttagctatggaaacactcccattgatgtggtgaagacgcgaatgcagggcctggaggcgagcaaatacaaaacactttcgactgc

SEQ ID NO: 89318 - DNA, 724 bp, Heterodera glycines
gagatttcattttaaaaaatgtgttgtgatagcagctctaacaaatggatgtgctggttcggctttcacgtgacaaatggctctctcgtcgcggcgtggatttttttattggccggcatttttgccttttcaagtgtcctccaaatgcttgtttttcgtcacttttatattgaacacattttcaatttgatttcgcccattttgcttttgtgtggaagtgtgccgataattgttggagaaatgcgcgggcaaagaaccagcaaaatgtatcgaccatttctgatcactaccgtatgtttttggcaataaattctgatcactaccgtatgtttttggcaataatcactaccgccatttcttttgcaataacggcgtttcccgaacttgttggtaaagtgctacgttttatacgagccggctttgatactcattactttcttgatttgtggccttacactctggcccttatctcaatttggctttacccaattgtgtatcgggcgtacaaatttgttcaacaaaatgaggaacacaaaaacggtggaccgtatggacagaatgccaaagtgatcaatcaacagtatgccaaagtggtgccaatgccattgccaaatgccgaaatgattggataattgcattcttttatatggaatatggataaattagggcgatcacaagctgttttttatgcaactatggaacaaatcatggctcacaagttgtt

SEQ ID NO: 89319 - DNA, 825 bp, Heterodera glycines
  unsure (1)..(825): unsure at all n locations
gtccaattaagagttttgatacctccttaaaagcaaggagcataaatatatttttgtgtatttttccttcatttattttgctttgctttcaaagttagtgctgaaatgacaacggaagaacccatcagcggcggacagccgaacacgccgccaatccccgccatcgaattgtcttaccccgtctccgtcatttactgtggcgaatgttcgatgcccgtcgaatactgcgagtacagtggcaaatttgagaggtgtcagcagtggttggaacgcaatttgcccgatttggcggagaaacaaatgaaaattggggcaggagatggaaaagcggcggaggaagggaatggggaagagacggaggcaaaaaagcaccaaaagcgaggcggaaagggattgccgaaggcgagtgggggcgggaagggctcgaaagagcagtccgctgcggtgccgcggattacgctgaagacggaagtgcggagcaaaaacaaagcggtgaccgtcgttaaaggcctcaccacttgcggtgtcgacttgaaaaccgcctccaaattcttcgcaaatcgtttcgcctgcggctgttccgtcaccgttggctcagccgacgaattggtcattcagggcgactttaaggacaaactcttcgtagaaatcccgaagaaatggggcgtcaatgaggaagtcattgaggatttggacgaccaaaagaagtgaccactcccctttcacactgcttgtttttactttaatttatatactaattcattgctttgttgtcgtgccgaaaagataaattttaattcatttaaaanaaaaaaaaaaaaaaaa

SEQ ID NO: 89320 - DNA, 851 bp, Heterodera glycines
actctccggtgaactcagctgaaagactgcacatttcgctgttagaatatatcaacgaaaccttcaaaaatgaggatttctaccattttctttctgtccaatatcggtcaaatgaactaattcaaaaatggtccaacaaaatattctacgacaacaaattggtcacttatcagttgacgaaaaacattcacttgcgccaaataataaaccaacaaaatgatctctcctctggtcctttgtcctcaaaacaaaaatttctgatcgatggtccgcttgtgctcatcgatacggacaaaggcatttctgacagtaaatggcagaaagtctacagcttgttcaagttgtggtatcccctctctttccgcgagggtcagaatgagcacacgcactccttccacaacattggcgaggctttctgtgccgtccttcacctccacgcgttgaatttattcggcggtttggatttgtcgaaaatcggttgtattacgccgtactcggcacaggcggaaaagattcaaaagttaatggccatgggaagggacgagggaccacgcttcgaagtcagctctgtcgacgccttccaagggcagcagcgagaagccattgtgatgtcattggtgcgcaacaacaaaatgcgcgacatcggtttcctgagagaacaccgtcggacaaatgtggcaattactcgcgccaaacgccaattccttttgatcgcctcttcacgaatgttgaatgtggaccggcttcttagagaactgtacggtgtaatcagaacggatggcctggtgggggggcccgacgctttgctgccaattgctcatgaaatttggcagtgtcatttggaaaggaag

SEQ ID NO: 89321 - DNA, 658 bp, Heterodera glycines
aagagactcacattgtcttgggcattggcacggtatgctctctgctggcgattatcgccaccgtagtcacactgccatcactgtactcggagatgaaccaactaagcaacaaagtgcgcgatggcgttgaagccttccgcgtgaacaccgactcggcctggactgatctgatggacgtgcaagtcgtcgtggcaccgccgtcaaaggcccgtgacaaccccttcagctccatcttccgtgccaagcgtcaattgcccggccattgccattgcggtcccccacaacggccaaactgccctcctggcccacctggtcctgccggaccgcctggccaacccgggcagccgggaagcgcaggactgcaaggacagccgggagcacctggccaacctgctcctccgtgcccgccccagaacatcccgtgcccactctgtccggctggcccacccggcagccccggaacacagggaccgcccggacagcaaggagcccctggccaacctggtgcgcccgctccgggcggaggacaaggaccgcctggcgcgtccggaccccaaggacagcctgggcagccaggacgcagcggaacacccggccaacccggacagcctggaaataacgctgttatttataacaccattcctgggcccgaggggag

SEQ ID NO: 89322 - DNA, 951 bp, Heterodera glycines
gtccaattaagctaaaatgaaacgtaaacgtacttctaatacttcgagtcgcccaattaagcaacagtccgttgcccgttcttcgggttccttttttacgccttgggggcagaggaaaagtgcgcgctttttgaagatgggcaggcgaatttacctctgcaatgatgttttgtacgacattttcgccgacattgacattgttcggcttggccttggcattgcccccgtctccgctcacttcgatgctttggtggacagttgtttcaagaccaaaaagcgcaaattgcgacgcctttggatccgtcaggccattctcaccatgcgaaggtcgatccagcgcaaaactgacaaggccgaattggtcaattatgagggcaaacaattgccatttgccaaggcgccgcctccgaatggaattgtcggcttcaaatccatcagcataagttacctcgatgctgatgccatggcatttttggagcacagtcggcccctcttcgaccgcgtgggcatcgttttcaaatgcgacggagccatcaaagggcgtgggaaggaatttgtccaaatttggccccttttccgtgccaacatcgtcaaaatggctctcagccaacgtttgttggttcgcctgcgccgtctctgtggcccgaccgttctctgcgcctgtgccaaccttcgcttcgtcaacgtcgatgatgaaaactttgccatgaaatctccggcggacgacgccgccggcgcttcgccgggccaagcgctgctcaaatggctgtacacaccacgggaggacgggcagccgaaagtgttgacgatgaaggagaagccgaaaaagatgatggatgacattgcaaaggaattctccactgccaccactcccgtcagtttcattgtccgctttcgcaaatcgtcctgggatgcctacgatgacgcggccctcaagccgtttgagctgtc

SEQ ID NO: 89323 - DNA, 896 bp, Heterodera glycines
gtgcaattaagttttgttatattttattcgagaagactttaattaccattctccgatttgttttgactttttgcaattggacaatgtcttcggaacaagcattaaaagcaaaacaacttggcaacgaggcgtacaaacggaaggaatttgccactgctcacaaatattatgacgaagccatcaaatatgaaccaacgaacatcgtattttacagcaacaaagccgcagtttttttcgaggaaggaaaatacgacgaatgcatcgaaatgtgtggaaaagcggtggaagttggacgagagaatcgggcggactatgcgctggtggcaaaggcttacgctcgaatggcaaacagttacaaaatgaaggacgaccccaagaaggcactgcacttctacgaaaaggcattgtcggaacatcgcgacccggacattgtgaagaagcacaaggaattagcgaaggaagtcaaagagatggagcagaaggcatacattgacccggaattgtcggataaagaaaagaacttgggcaaccaattgttcaagaaaggcgattaccccggggctatgagacattacaacgaggcgattaaacggaatccggacaacgctgtgctctactcgaaccgtgccgcgtgcttcaccaaacttatggaattccaaagggccgtcgacgactgcgacctttgcctgaagaaggacccttctttcgttaaggcgtacatcagaaagggcgctgctttgtccgcaatgcgcgagttcggccgagcccaaaaggcttatgaggacgcattgcaaatggacccgagcaatcatgaagcgatggagggactgcgcacgtgcatgcagtcgaacgaggagaacccggagagggcgcgggagaggggccttgcaggaccc

SEQ ID NO: 89324 - DNA, 1850 bp, Heterodera glycines
ccggcacttccgatgaagaaatggttcgacaccaactatcatttcattgttcccgaactgagcactgatcagtccttttctgttggcctcaacaaaccgttgaatgactttttgttggccaaaaatgcgctgaatttggtgacaaagcccgtcctggtgggcccggtcactttcttacatttgagccgagtcggagaacggaaggaattggcgacggaggagcagcaaaaagtgcacaatttgaagctgctcccgtcgctgttgcctcattatgtgaaggtcgtccaatcgctggtcgacgccggcgccaaatggattcaaattgacgagccaatctttgcactgacttttgcggagaatgaggcgcccgcgtattacgacgcattccgacagaccgcgcgggcactgcagcaagtgacggcgaagaaggcgcacttgctgttcgccacgtacttcagctccatcgcgaagaatgtgcaaattgtcaaagaccttcccgagggcactggcattcacattgacttagtccgtgcccccgagcagttggacccagtgttgtccgcgttgccagccaattgctttgtctctctgggtcttgtcgatgggcgaaatgtttggctgagtccgctgcgtcagtcatgccaatgcgttgcgcgttgtgcaaaaattggcaccgggacgcgtgttggtcagcagctcatgcagtctgttgcacgtgccatattcgaccaaaacggaaaagcgcagcgcagaaatgccaaaaacggtggccactggaatggcctcgtcgaagataatccattggctatcatttggcattgaaaagtgcgaacaattggtgaccgtcgccaaaatgataaacggcggagactgcgccaaagaattggcagagaacgacgcccttctcaaagaccattccgtatccccgttgatacacaacggaacagtgaaggaaagggtcaccgccattgaggcttctggcgttgagtcatacttccgtaagtcgccctatgagcagcgcattgtgcagcagaaggcgtgcctgcagctgccgcccctgcccaccaccaccatcggctcgttcccgcaaagtgcgacggtgcgcgcgatgcgtgccaaattcaaagcgcacaaaatggcggacgcggattattgggcatttatcaacgcggagacggagcggtgcattcgcatgcaggaggacattggtttggatgtgcttgtccacggcgaattcgagcgcaatgacatggtcgaatatttcgctgaacatttgcacggcttttgcgtcacttccaacggatgggttcagtcctatgggtcgcgctgtgttaagccccccgtcctttacggcgacgtgcaaagggcgggcccaatgaccgtggcaatgaccaaatttgcgcaatcgttgaccaaaaagccggtgaagggaatgctgacggggccaatgaccattttgaagtggagctttgtgcgcaacgaccaaccgcagaaggacacccttttccaggttgcgttggcattgcgcgacgatgtggccgaattggagaaggagggcatcaattgcatccaaatggacgagccggcattccgcgagggattgccgttggacccggcacagcacaacgaataccttaagatcaccgtacaggcattcaaaatttccactggttgtgttgcggactccactcagatttattcccacatgtgctactccgactttggcgacattttcacgcacatcgccgagttggacgcggacgtcctttgcattgagtgctctcgctcggatttgagtctgctctcctgctttgaccgctttggctatccgttgatggtcggccccggca

SEQ ID NO: 89325 - DNA, 653 bp, Heterodera glycines
cggtgtttcaaacggtgctcgaggcattggaataccctcagataaaagcgattgccatcatcgccgaaggagttcctgaaaatcagacgcgaaaactgataaaagtggctcgacaaaagggggttactgtcattgggccagcaactgtcggggggataaaacccggatgtttcaaaattggcaacactggcggaatgatggataatattctcgcgtcgaaactctacagatcaggaagcgtcgcttatgtctcgcgttccggaggaatgtccaacgagctgaacaacatcatttcccacaacaccgacggagtgtttgagggtgttgccatcggtggggatcgctaccccggctccacttacactgaccacattcttcgttatcaagatgagccgaaaagcaaaatgatgggtcttcttggcgaacacggaggcgaagaagagtacaaaatcgtccaggcgttaaaagaaaaacgcataaataagcccctaatctcctggtgcattggcacttgtgccgatcacatcacttccgaggtccaatttggccatgccggggcctcggccaacgccgtcaaagaaactgcggcacataaaaacgctgctttgaagtctgctggtgctcacgtgcccgactctttcgatgactttggt

SEQ ID NO: 89326 - DNA, 660 bp, Heterodera glycines
cctcgtgccgattcggcacgaggcaagtttgagccgtaagcaatgagttcttttccgaaagcggtaaacatcaagattgagcacaacaattctttttcggaccacgattactgttacaaagaatctgcagttgaagaaatggacgaagaaaatcgttccttttttgtcgacgtggagaacgatgacgaatatgacgatgagtataatgcccgtggtcggaaacggaggagcgtcaaacagccggatttttttatgatcaacaacaaagccaacaattcgaataagaaaacgtcaaaggcgaggccgaggaaaagcgaaagcaaaagaggaaagagtggggagaaaaaagtcaaatacgaagtggaatacatatggggcaaacgcacggacaaattgcgtcctgataaggtggaatatcgcgtttattggaaggggtatccgattgagaagagcacttgggagcccgaagataatttgcgtttatgccaagaatccatcgaccgttacgaacaacgcgaaatgtatttcaacgacaaaggcgaaaaggaaatgcactcaaagggtctaaaaaaggacaacacagcgggaaatggggtgaaggtggtggtggtgaacggggcaaagccgttgaagcagattttgcccacaatgcaagctcct

SEQ ID NO: 89327 - DNA, 841 bp, Heterodera glycines
ccaagtttgagcacttaattaattatgccttgccaattgcctaatgaaattgcgacggtcactgacgacgtgttttcgtatatgtgcaatttggcaatggaaaagtgttcgaaaaaggccgataaaaagaaggcctcgtgtggtggggcagcaatgcggaagagacttttgatcaaaaacttcgtggcacaaatgctcgcgcaggatcgccactcgcgagagctgtcttcaccaacttctgactgttcctcccacttgaatcagaccttcgacgagtcgttcgactttccgtcgtgtcaaagcggtgcgaatgcagtggaccaatttggagacgacatggaaatggacgccatcggagaggaagttccatccaatgcgacaaacgatgcctttctgtgcctggaccagccgtcgtcattgttgaccgacttggacgacgtttcgtgcgaccctcagcagcagtgccattcatcgcgcaatcggaagcggccctggtcgttggtgttctccgccgatgccaccgccactgctgactctatgccgatgccgtcgctgtgttcgatgggtgtcgtcgtcgaccagtacaaccaccaccacctgagcaacaccaacaacagtgttgtcgacatgttcacggctgcaacttctgctcagcaccaccacttcatcaactccaccgcaaacaacatcaacaacaacggcgttctccactcgtcggctcctccgctgttgtcgccgctgtgctgcggcatgctgcagatgagtccgttcgggtcggccactgctgctggcgaggccatgctgttcaatggtgctggtggcggtgccggtggtgttggca

SEQ ID NO: 89328 - DNA, 678 bp, Heterodera glycines
agtttgagatgttacgcaaactatctgacgcgtaccaaaaggcacttttgacgcctatttggaacttagttcaacaaatacttgatgaaaattgtcgtgtgttttttggaacacttaacggagtttttcgtcaattggaagacagagaaattgctgccaattgtttgatcagtggtcgcggcggcatcaaagggcaaattcggctcgcacagggcgcggagaaagtactttctgtcagtgggcaaattcacagcccttccatcgagcctgacagaatggaagtacatgacctggggaacgtcaccgctggtagttcttctaccggtcggtctttacacacgttgtgtacttttgcctcggttggtgctgccaatgattacgttcccgctggtgttgtcacggctccgttggctctcagcggttcaaaaatcaattgcatcggtcgttctcttgtcgtttttcaagaagggcgttccgcattgggaagtggcgtaatcggttacgcgaaggacacgcgcattttctcggacgagtttgacgaaatctttcgtaatttgattacacagtacagaaatgtgaacgtctcagattgttggcttgttctcagagacggcacaagttcaaatccagattgtcgcgcgttcttcgacatgttggatgagattttggcgacggaag

SEQ ID NO: 89329 - DNA, 564 bp, Heterodera glycines
aaaaaaagcatggccaaattcctttctggcattatgttttgcgcattgttggcactgctggacaccaccagtgcatggaagcgcgagtttttgcgcatgccgaaaagcaatgaaatcggcacggcggacgacagcagcgaaagtggcaaaaatttgaaaagccaatcggaactgatcgcttcaatgctgccaaaaagaaaaactttgcaatgctactacggcgttgacatgttccgcaccaacaacggcactgaaggtggtgcctttgaggaggtcaaatgcgatgacgaagactatgaccgctgtttaattggcaaatgcaagggacaaaattttgtcgaggtccgcaaattctgtgccaccaaagatggatgtgccgcgtttggatgtgccgttgaggaggaacttgaatgcaaaacgtgctttggcgaactgtgcaacttgtaaaaatggatcgagaaattattttcggattttcaaagatttcatgacatttttcggaccaatttgttcatggacatacaattaattttgtatatttaataaattaatttattttcaaaa

SEQ ID NO: 89330 - DNA, 844 bp, Heterodera glycines
  unsure (1)..(844): unsure at all n locations
gtccaattaagattaaatggactcaaaatcaaatgatttcgaggcacgacgaacagtttgggacagcaaagttcctgtagagtttacgttggacaactcagagtccgtcttggcttctcatcagtcctgttttatgatgctttcccgtgtttcatatttcccggtttatctcgacaaagcattgaaagttttaaccagcggtgacgcaagcgaagaacaattactaaatgtatggcttcaatttgacggacaaattctcagatggcattatccgattggcgtcctttacgacatttaccatgggaatgctggcgatggccaaacaactccatggccaattactgttcatttaaaaaattttcccgatgaactcattcgatgtcggacgaaagaaacgctaaaattttgctttttgcaatctctgaaagaggcgtgccaactcaaacttggttctaacattgctgcgtcgatgactaaggatgagcatggtcgactatttgacggcttatgcaacgacagatttaacgacttttggatggtcaacgacaaactgatgggactccgttcatcatcaggcgaagaacagtttagcactattcccgcccgattttatgagtcatcatattcatttcgtcaattgcttttacattccaaaaaacaacttgacgatggcaatatgggtgaagtgttgttgattgacgcgctgcacaaagtgtttcccgattatgccattgaaacagactttgaagcggtgacccatggcattctgttgcccctcaacactccgctcatttggctggctagaaaccttgtgtaccctgacaattntgctcacattgtaata

SEQ ID NO: 89331 - DNA, 656 bp, Heterodera glycines
cattaattaattatgagtgatcagcaacagtccaaaattgtgggtacggcaggcgctgtgtgcgcgctgggtacggtagcggtccttttgctgctgcttgtacagcggaagaagaagcaaagacaatgcaacacagaagaatatgtacgagctggacatgttgaacagctttacatctacccaatgaagtcatgtcgagggaacaaagttgactggcttgattgtggcgagcgaggttgtgcccatggagaacagcgcgatcggcactttttggtggtcgattcggcacggcaaaatcaaatgctgaccggccgcatttacccaaaaatgttgctgatcagtgtccatgtcgagcagggcgtactccgtgttgatttcccgaaccgaagcagccctgtggaggtaaatctgaaggaagtggaagagcgaaacgttgtcctacgagcaaaactgttttctgacctccaaacggatgggttggactgtggggatgaagtggccacggctttggacgagtttttgttggagggcaaagcggcggcgacgacgacagaggacggtagtggtggtggtacggtagggagaaagctgcgcctgatttactacggtggcgactggctgtacacggaacgcgacccgaagccggacaagagctg

SEQ ID NO: 89332 - DNA, 934 bp, Heterodera glycines
aagtttgagcgtgaatttgtctactcaaaatgtcgccaaacacactttgtagcattgtttgcctgcttttggtctgcaacttcatctgggctgatgatgaacacagaagcttcgcagaggaattagtgagacgcctgcgacgttcccatggttactcagttggttatggaggcaattgtgcatgttcttcctccgcctacccggcgaccgcttcacacacttcatacacggcacctaaacaaaccagttactcatcttactcttgctccggttccggctgtggtcatcaagcctaccagccaccccaaaaaaccagctaccattggtgcactgggactgcctgcaacaaagcgcaggctgttgctcatccagttccggtgagcagcaacagttacaagtcttcctgcacaacttgtggctcaagtagtcaccagcagcattactcaaccgtcacagaaacgaaaacagtgtaccctgtgaagacgtactcatggtgcacgggtactgcttgcggtgctcaggctcaacccgttgccccggcagcaagcggtggtggcaccagtattagcaccggcagttcgtgcagcagcggaacatgcggacaacaaaaacaacaggttcaacctgttgcccctgtccaaccggctgccccggctagcaccagctcgtgcagtggtggcagttcatgcggtgccgcggcacaagaggttcagcccgctgctgaaagcagcagcggtagctcaagcagtggtggctacgacacacaggagactcaaccgagcggcagcgatagcagcagcggtgcgtgcagtggagcttcttgcggagaagcggctcagcctggcgccagcagcagctcctcatgcagtggtgcatcatgcggacaagcggctcagcctgccgccagcagcagctcctcatgcagcggcggcgc

SEQ ID NO: 89333 - DNA, 602 bp, Heterodera glycines
attaattaatgtccgtttggtgccgttttcccttccgaaaagcgtttctttcctccgccttttttcctaagtgtgtctctgcttctgactttgcctttgttcccacttcttccgcgcttcgttctttccgcctttttgtcgacggtccgatgtcttcggatgctctctctgctgaccgagtcgccgctgttttgcgttcaaaatttcctgcgaccgatgggtcggcggtgcacgtggaggacacttcgggcggttgcggcgcaatgtttcacgtgcgggtggagtcgcctcaattcagcggagtgtcccgcgtcaaccaacacaaaatgatcaacgaagtgttgcgaagtgaaatcagagatatgcacgggataaccatcgaaacgaaagccgtggacagagggagagacagcggacagtgattagcgaagggaaagggagagactgatcggagtgaagggagagactgatcggagcgaagggagggactgattggcgcttgttttgtttttttgaactgttaaagttatgggagttttaaattctttcgcatcgtcagtacttgtcccattgtttgtatgtaacaaaagtctaaaaaccaa

SEQ ID NO: 89334 - DNA, 627 bp, Heterodera glycines
caacggtggtgctgtctgaaccactgctatcttcctctacggttggacgacggtccacaacggtgatgacgacagttgtggatccatcgcttggcagcacgagccaccagcaacacagtccgagcacggctgaaacaaagcagcacgcaccgactgctggggacaacaaaaagggcggaggaggtgcaaaggcgaacccattccggaaccatccgagcctgctgaacagcattacgactgattccgacgctcaccacttaatggaaaattgcaatacagtgaccaatgagtcatgtgctgatgttgctgaaacggaaccaaacgacgaagtctttgccatacttaatgaaacgacctcaaccacagcagagaatgaattgggcgagggattaagcgccaacaatggggcaagttcggttgtgactttgggagaagaagcagcgtcggcatccacaacaaatgcttcgacttttgccacggcgccgttgatgagcaaaagcggaatttggttgggtgcgagagacacggacggggcactgtatttttaccacagagacacacgggaggctcgttgggacttgcctgagggtgaggagttgctgataattgacaagtcgaatgttggcg

SEQ ID NO: 89335 - DNA, 868 bp, Heterodera glycines
attctccggcacaatttggccgccattcgcgacattgtttacaccgtcgaattcgcattgggcgaattggtcgagtcgttgggacgcatctctctggacgtgagagaggttcgccaacagaaccaactccgtcagctcgcccgtcccgtcaaaacgacgttggccatgctgaaaagagttcgccactctttggactccacgggttggtccctgtccactttgtcccggtcggctggcacttacgcgggccaagacgcgttggaccaattcgttgccatgttgccccagctgcccaaagactgctacaagttggtccaatgggtgtattcgctgtccgtgtggcgtgacttgccccgcggcggtgccacttccgtgtttctgcccccgtcgtccggcaccgtccctttccatgccaaaatgcatcctccgccgccccctccggcgccgttcccccaacaacgaccctcctccccaagctcttctctgctcaactattattcatccgagtccatcgaagatgaacaaaataacaacaacgaagacagcttcagaaattgggcaactgtgccaatgaatggctcattgacggatcggcacggagggcaggcaaagggtggcagaatgtttgtcgaacaacaacaatggcatccacaaaatggtggagcattggcaaacgatgtgatggacggcggggagtcgaccagctcgaccagttcaattttgacggcagaagaacggacgggtggaggggggaggaggaagaagcagtggtgacgaaattcgacgccattcgccggacaaaaggcaatcgccgccgatggtcgagaagcaaaaggtggtcgacttggacggggacatggtgatggag

SEQ ID NO: 89336 - DNA, 487 bp, Heterodera glycines
cgggaaaagggggcgaagtgtttctgagcagagagagacacgtccactgcttggaaagagcagtgactcatttggaggagtcggaatctgcgcttgccctgtggaatgacccggcgatggccgccctctccttgcgtctctgtttgagtgcggtcggagagattgcgggccgagtggtgcatgagcaagtgctggacagtatcttcagtcagttttgcattgggaagtgagccaactcaaaacggactcaccgatcgctgcctttttttatttgttacgacgcgccgcaatcattcgcttttcctttcctcgcattgttttctcattgtcagctcatttttccccaaattgtccccggttaaacttttgcttcgacaatcgacggacgctttcttctcacaatcagataagacgttgccattttcttccgactcatccattttaaaggcctacggtcatttccagcggaggaataaatgtgcaaaac

SEQ ID NO: 89337 - DNA, 654 bp, Heterodera glycines
caaaagaaagaattattttaacacaacaaaaccactaacaattttgtgctgcttcttctcgcccttttctcagtgcccaacttaaacttcttccatccgcaaatggcaccgctttgtttccaagtgaacgaatattacgcgcagatttcggagttggtgcccggcctgtacatttgcggggtgaccggactgacgccggccaacatgaaggccttccgcatcgagttgatcgtgaatgccaccagggaggtgccgaacctgaagagtcttggccatatccagcggatgaagctgtgggtggaggacacgacggatgaggaccttttcccgcactttgacatcgtggcagatcagatccatgccgtcatccaagaccgtggtgccgttctggtgcactgcgtcgccggagtttcccgatccgccgccatctgcttggcctatctgctcaagtatcggactcggtctctgagagccgcctaccatttgatgtgctcaaagcgtccgatggtccgtcccaatcttagcttttggcgccagctcatccactacaagcagcagggcaagggcaatgtcggctcggttcgcatcgtgcgggacgaagcacagcccgacaaattgctccccgacgtctatctgaagatcgtgatccccgac

SEQ ID NO: 89338 - DNA, 659 bp, Heterodera glycines
gtatccccccccccattcattcattgctcatttcctttgaaccgtttgcccattttccattggccaaccatcaaaaaatgaaactgtctttgttcctgttggcactgttcggaattgtgctcgtttttgttgcggcaggagactacggttacggtggatacggcaagaaaaagtacggttctggaagccacgaatacggctacggtaaaaagaagcattacaagaagaagcactacgacagcggatcctacgaatacggaaagggcagctatgggaaaaagaaatacggcgactacggtggcaagaaatatgacgactatggtggatacggaaaggactatggatacggcggctatggcaaaaagtacagctacggcagcggctcgcatgagtacggaaagagctacggtggctacggaaagagttacggtggttacggaaagagttacagtgcctacggaaaggcatacgatgactattacaaaaaatactgaggggagacggacaaatgaacggacgacgagcagacggcggacgaaaagggaccaaagattgttttatttgattcataattttcaattttattatgcaatggaaaaactgtgaacgatgaaaaactttgtcaaaaaaattttctaataaaaattaattttttaaaa

SEQ ID NO: 89339 - DNA, 482 bp, Heterodera glycines
gtttgagagaaagcgaagagttaattgccaattaaattcaaatggcataattggcattgacggcgcgtgaacagtaaaatgaattggtatcagacggaagaaatggtggcacggcccatccctggtggccacctccttgaaaatattgacccaaccaaagtccgcttgttcgttaaaatctttgcaacgcaattgcgtcggcagcccatcttttctcggaatgtgcaaccatttggacagaacttggccagccgttgcatttggcccatcaaaatcaccaaacgcatcgggcaacagaccaaatgaatcgattgaactcaactgattgacatcagtagaattgtcggtgaaatgagacgaagtccactcttatagtagttttgttcacggtgttcagaatttgcttcgttttcactgttgttgttgcacataaacccgcgtttctcaaatagagggagggcaattacaacaaacacaaaaat

SEQ ID NO: 89340 - DNA, 713 bp, Heterodera glycines
tgcttttgctctgcctgtcactcattcgacttcttttttgtctgatgtcgaccgttctttcatccccccttcgccatccaccacacattttgacgctgttccaatggttgttccggacaatgtttttccaaatgatccaacaaatgagcaacaattcaacacaatcaaaatgtgggggagtgaccggacaattgtgactttgcttcatcactacgcagaatggtccatcaaatacccgagaagaaccggcggtttaaagttattggtcgaagcagttcagagaagggctcaagaaatcggagcctctgttccgacagaccacacaataaaaaaatcgaacttgcgcgatccgtaagaaaatgcgcaacaaacagaagaaagatgaggaggaggcgcaacagaaattacaaagtgaacaaattgtgcccatcccgcaacacgaacaaatccaacaacagccgtcaactttccaaacaccaacggactggagaaattcgccaacggatgacgaagatgaaatcgaaattttgggttgttatgagatcgaaagaacgaatatcagcacagaagttgaaggaaataacgagcaaaacagcgacaacaacaacattattactaccaattgtgaattggtgcattcgacgaataacgagaacaatcaggaagatgccgagaaggaaagccacgaagaaaacactgttgtggatgttgca

SEQ ID NO: 89341 - DNA, 650 bp, Heterodera glycines
ttaagtccaattctttctctttgtctcgtccaatcatctttgccaatgtttgtccgttgtttcattttgcctttcatttctttgacattttttgtgtccttttgcacggcaatgagaagaaatccatcggattatgatcagtcacgggtgccgtccaatctgaggataatttcatggcttctcggcgtttggcgttcagagcatgacggcaaagcgatgtttcccaccatcccaaaattcacttacggcgaagaaatttcaattgcactttcggacacgcgaatgaacggactgccggcatttaattactctgcatttgcctggtcagcacatgaccaagacgagttgcacagtgaaaacggttacattaccgtatcaggcggaaaagtgatgctcactaccgtaatgaacaacggatttgtcaccgtcgaagagggccccgccggtggctcacgaatccgcttcaaactcgtggacattggccgtatcagtttcagccgggatttgcccgtccatgacttggtccgcgaatggactcagttggaccacaaccatttcgaggcccgtctcgacatggaaacgctaacccatggaatgcaagaacacacagtgattgtctacacaaaagtgatgtgagaagtgatcaaagc

SEQ ID NO: 89342 - DNA, 655 bp, Heterodera glycines
aagcgatgaaacaaacggcgccgatcacaaagacgggcctggcaaaacgcagtctccgctcgggctacgccttctcccactgcagtggctttggagaactgatcgccaagggcacgatgttcaagaacatcgaacacttgcgcatcccatcatttcagtttgcccttcatcatgattcccactccaaccatcgctctcgtcgccactctctttcccgggtccatcctgcactttcctcggcaaattcttcaacgggtcacagttccgatcagcaaattcttaacccgatcgtcctcaactctgataacgacgatggcgaaggtgccgcagtttcttcaatgactcatttttcgccgacttcgtccaatatgaccaccaccacgacattgggaggtggcaacgccaaaagccaacaaaagattcggccaattttgccccctcctccggcggtgccaaactcttctcgactccatcagtcccaacaccattctcatcagtatcggcaccataagcatcatcaaccgacttcaactcggcggagtaccattgaatcattagtcattgagcaaccgccgtcagcggacgatgagaaggacgacggaatgacaccaatgatcacacaaatcgtagtagtcaaagaagaggatgaggaggg

SEQ ID NO: 89343 - DNA, 819 bp, Heterodera glycines
tttcctttctatccttaattttgaaaatttgaattgattgaaaataatcgtgtccattcattcccgcttttcccattaaaatgtcccaatttggcccggcattcgctgtcaatgccaacaatccgtacgctcacttcaaatgctgctgtgcaacatttaatatcaaagaccatgcccagttttgcggtgtgctcagtttcgcgctgttcctctgcctcgtgctcatttccatgatgcttttcgggtcgctttctctgttttacattttcgttggtgtcgtcgtttacattcttttgatgaaaactctctttggcgtcgtcaacaaattgtcccttctcttttacatctttttcgaggccattcaaattggcttttacttggctttgatgctttacataattgtaccgttgctttttcttgaaattccccgtcgcaactgtcggaatgttgagatcaacagtgaaatttgcgacgaacccagaaatcgctccgaagattacgtggaattgcttttgtttgtctctctcttggcctcaatcaaactgcactttgccagagtgtttgcccatttctacagatatttgacttggaatgagcagtgttcggtgcatcgagctcaatacataaacggacgaggcattcacatcaccatggatcagccccaattcgctgcttcgttttccccttattacggatgggacactcacaccgtaaagggatgcgacagaaggggacgacagaatgagacaaacaatcctaatcaattgcccataacggaactgccgccgacatacgcacaagtgatcggacaaaacgcag

SEQ ID NO: 89344 - DNA, 636 bp, Heterodera glycines
gtttgaggtgaatatcgcacaatacataatatgtttcgagttgccaaaacacccgcccattatcaacaatctgttcgctcattcgccaccctaaaggacatttccatccgtctcaagtcgatcaaaaacatccaaaaaatcaccaaatccatgaaaatggtgtcggcggcaaagtatgcgaaggccgaacgcgagttgaagggcgcgcggacatacggcgaaggggcgcaattcttcgtcagcaatatcaccgcgggggaccaaacggagccggtgaaagttgccgaaagtgttgtcgaatcggcgggccgaaaacggcttctcattctgatgagcagcgaccgtggactgtgcggatcggtgcacacttcggttgccaagaccgcaaaaaacattatggccaacaaaccggccgacgtcgactacaaaattgtgtgcattggggacaaggcgaagatgctgatgcagcgactctacgccaaagaatttctgttcaccgtcaacgacattggccgctctccgccgaccttccaagacgcatcaattgcagcaaatgccattctctcctccggctacgaattcgatggcggtgaaattctgttcaaccgattcaaaacggtcgtttcgtttgagaca

SEQ ID NO: 89345 - DNA, 720 bp, Heterodera glycines
cttaaaatgcttcacggatggcgagtttttgcctcatgtagcaaatcggttttgaaatcgccttccttacaatcgggtggctatggtttgtcgcgaagactcaagagcgatgaagttcgtggtccagttatcggaattgacctgggtacaacgaattcgtgtgttgctgttatggaggggaaacaggctaaggttatcgaaaatgcagagggctctcgtaccactccatcaattgttgcgtttaccaaagataatgaacgactcgttggtgcaccagcgcgaagacaggcagttacaaacagtgagaacactttgtacgcgacgaaacgactcattggccgccgctttgatgaccctgaagtgcagaaggacataaaagttgtgccgtacaaaattgtgaaggcgtctaatggcgatgcttggcttgaagctcaaggaaagttgtattcgccttctcagatcggcgcttttgttttgatgaagatgaaggagacggctgaaagttttttgggcacttccgttgcgaattctgtcgtcacagtcccggcgtatttcaatgactcacaaagacaggcaacgaaagatgctggaaaaattgctggactgcatgttcttcgcgtgataaatgaacccaatgcagctgccttggcttatggtcttgataagggggaagacaaagtcattgtcgtttatgacctccgaggcgggacgttcgatatt

SEQ ID NO: 89346 - DNA, 715 bp, Heterodera glycines
gggagacggactcctccgcatcgtctatgtccagtcacaccgaaacgatgaaaagcagcagcaacggctccgattggcctttctgctccgatcggatgaaaatgatgcagaagccggccaaactgaacctgaacgaggcgggccccgcccctccgagcccgtgctcagtgaagacaccgcttgagggcgtatcgacggaggacactttgcaaagactgaggccgaaggaggaccaagcggaacaaagccccacggggacactcgcgacacggacaccgaaggactttttcttcataaaagtgctcggcgaggggtcattttcgacggtgtattttgcgaaagaagtgaccacgggggacgaatatgcgataaaagtgctgctgaaaagcgaaatccgacgggaggcaaaagtgcgctatgttctccgcgagaaggacattatggccgcgctcacttacgtccacgggggtcacccttttgtcattcgcctttattgcacctttcaagacaacgaccgactttactttgccttggcatatgccaaacatggcgagctgttggattggctgcgccggctcggctcattcgacgaagctggcacccttttctacgcttccgaaaccctttgtgctttggaatttctgcaccggtgcaaagggatccatcgcgatttgaagccggaagacattttggtgggcgccgattggcacattat

SEQ ID NO: 89347 - DNA, 934 bp, Heterodera glycines
cttacacattttttgccttctctctctgttgcgctatcacaacacaattccgattcgtctacagcttcttcttccctcatcgacgagatgacttcttcaagatcgcgaactcgtcgtacgaccaccaatgctgcttcaaccgctgctgctggccgtagtcggagccgttcaacacatacgggtcgtcgttccgcgagcagaagagcaatcggcaacagggcaacgggtcgttcatcgtccgtcaggaacgcgtctcgccgagtgtcgcgccgtgtgtcgtccgccaggaaatcatctcgccgacgtcgccggattgtggcgcgcagagcaacgccaaagaagcggtccaagtcggccaagaagcgtggacgtggacgtccgagaaagccacagcgtggacggagtgcgcgtgcgcagcggagaattaccatcacgcaaggagtgttggatgtgcccggtcatggccaaatgacggaagccgagctgagagaaatcttcatggcgggcacgacggcgaatgaaccgacgaacagaccgttgggcggcgcggaagtgattacgacgacgaatgccaacaacagaacgaccggtgggaatgcgaccagcagcagctcctcaagcccctcactcagcgacagtgtctgaacgacgtgacgcgtggtacaacaacaataacaacggcatggagaaaagaggcgatcggaatggatgagaatttttgcagaggatactaattaaatcacggataattgtgcccatcatagagagtgtggctcccctttatgtgttgtataatgaaattgatcccccgtcaaatccatccgatttgtatgtatataatttcacccaaaatgccatcatcatgatgttgttaccaatgcctaaatatatgccatctgtgtattgtgaatgtactaataacatatattctgtt

SEQ ID NO: 89348 - DNA, 646 bp, Heterodera glycines
cttcccactagtcttttaattacgggttctccaaaatggtaaaaacattgtggattgtcagacacgccgaaagagaagacaacataaactcgaattggcaaaaaaatgcgaaccctcaaaaattgaaatcggataacagtccattatcgtcgagaggcataaaacaggccacagaattggcagaaaggttttcgaatgtccaaatcgatcatatttttgcgtctccttttgagcggactgtgcaaacagcgacttttcttatctcacagaggaaaattccgatcaaagttgagcccggacttgcagaggctctttacctttgcgaaagtccgcctggctttgaggaatcggctgaactccgtaggcggtttcctctcgtcgactccgaatatcgctcaatttacgaaaaaccaatgcccagggaaggctttggagatgagtcatgcattcaacgaatacgccaaactcttgaagagattctgaggagatacaacgaagcaacctccatcgtttttgtctcgcatggctcgcccattggtgctcttcacgaagtgttggtcggtgattggaattatgtcggccaagcgacagtcagcaaattcgtcgagacgggggatggcaccggaaaatttagacaggaatttac

SEQ ID NO: 89349 - DNA, 633 bp, Heterodera glycines
ctttgatctcgggagaacagagtccaagatggacacgagaagatttgttacggtattcggaaccaaaacttgggtgagaactgaccacagtcacacgattccaataataacccattcttcaacagttacactcgcgactcagtcggttttctgaacttcgtcgaagtgctcatgggtttcaattcggcggagcgtaaggccttccttcagtttacgaccgggtctttttctctttccttttttcttatttttgggtgtttttaggtgctcttctttgcctcccggtggcctcgccaacctccaccctcggtcggtcttttcacttccctttgtaaatgcggaaatctgtttttcagtctaactgtcgtacgcaaagtcggttctggagatgggtcttatccggtacgatttttcgctctcatagtcagtgtaaatttcacattcagtccgtcaacacgtgtgtgcattacttgaaactgcccgagtacagcagtgccggaatactcagagatcgtcttttggcggcaacagcagaaaagggattccatttgaattgaacgaattggcggggaaaagcggggacgagtcagaagccattcattttcatcaatattttccattattatgtgacca

SEQ ID NO: 89350 - DNA, 960 bp, Heterodera glycines
tgcgtaaatgaaataatcgcccaattaattgttgcacaaaaagagggaagagatgtcaatctgaacaagctaaaatgcgaaattgcatccaaatacggaataaaaacgcagccgaaattagtcgacataattggggcggtgcctcctcagttcaaggagttgctgctgcccaaactcaaagcaaagccggtccgaacagcttcaggaattgtgattgttgcggttatgtgcaaacctcacagatgtcctcacataaatttcaccgggaacatttgcgtttattgtcctggtggtccagattcagatttcgagtattcgacccagtcttacacggggtatgaaccgacttcgatgcgtgcaatccgtgcccgttacaacccgtatttgcaagcggtcggaaggatcagtcagctgcaatcactcggacacagcatcgacaaggttgaatttatcgtcatgggtggcacttttatgtctttgccggaggattaccgcgactatttcatacgaaatttgcacgacgcactgagcggacatcgaagttgcaatgtgaaggaagcagttgcttatggagagcacagcagaacaaaatgcatcggaatcaccatcgaaactcggcccgattattgcctgcctcggcatctcgacgacatgttgtcctacggatgcactcgccttgagattggcgttcagtcgacctatgaagacgtggcacgggacacaaacagaggacacacggtaaaagccgtttgcgaatgttttcacatgtccaaggacacgggctacaaagttgttattcatatgatgccgaatttaccaaacgttgacattgaacgagacattgaacagtttattgaactgtttgaaaaccccgagttccgaccggacggcctcaaaatttacccgacactcgtcattcgggggaccggcctctatgaactttggtcagcaaacaaatac

SEQ ID NO: 89351 - DNA, 642 bp, Heterodera glycines
acgacgaccgttgcaaattgttggtgaacacgttgcaggacacactgaaaggcattgaggcgcagtcttacaatggtggcggtgccggtctgtcccgtaaacaccgcgttcgcgaccgttctcgctcgccaattcgctcaagcaagcgtcaccgccggtcgcgttcgcgcagtcgttcgcgcgactattcgccgatgcgttactcgtcggccgtgtcgtcgcgacgcttttgagtggcaaaaggggaatgagtagaatatgttgacggattatgggatggttgaacagataaaagctgggccgataatttatgtaagcgcattaccttggcttgtcctctgacttcgcgtgaattgtcacaccatttgtaactttctttgactcataaatcagctgttatctaaagtgtttcctggcacaataaaattcgtttgtggtgggtccttcccatttttcattcgttgtcgtttgttttattttcagcatccctttgttcttctcccctaacttggttactgttatgtaattcttattattgactcactttttgcgttttctctcaacattttcatttttaagcccccccccccccctccctcttaaccaatttttgagttccaaccaaaataataacattacaaa

SEQ ID NO: 89352 - DNA, 633 bp, Heterodera glycines
aaactgcttccagggaaacctggtatgccgctcacggtggacgtttcgtttcttcaaagcggcggctacccgagaacatttacactgagcttggcgatgaaggtcactgacgacgagcgaaaggcgaagcgccgttttctcaacctcatgcgcggattcgacaccgaagacttggatgtgctgcgaaaggcaattgagtcgggcggcatcaacatcaaacagtgcgcgccgggaccaccgatggaccttgttgaggaacgcgaggaaagcatcagcagcggagaagaggcggagcaggagccggagatgatgccgggctgttcggcgactattgtcagcacgcgaccacggcattcgatcaagcaaatggagcgtgaccgtattctcttccaacgccaacgctttcccaccgtcgcctcaattcaccatcagccggcgacttcgtccgcctccggcgttttggtgccaattccgacgacggacggcgccgccgctgtgcccggcagcgccggaggctatcagaggcgatattcgacacatcgagaacagcagctgcagcagaggaacagaagggacagcaaattcagcaggcgtttggccgtttacacttcaccaccagaagacagtgccgcc

SEQ ID NO: 89353 - DNA, 1140 bp, Heterodera glycines
gttttaatttggtctaaatgccggacggaaaggcgcctcatttcccccaacagcccgtggccaggcaaaatgacgacggctcgcttgagcttgaatgttttctggaggccaacccggtcccggaaatcaaatggttttatgaaaacaatgaactgaaaccaactaaacgattttcattccgactggacaacagagggtccgaggccttttcggccattctgcaaataaaagatttggcggacagtgacaccggtgcctatcgctgtgccattgtgaatccgttcggcaagggcaatgccaacttcaatttgaaacttactgggttcagttcgccaacattcattgaaaaaccgcagatttcttcacgtgacgacggccgggtgatgatcatggagttcaaggctaaatccattctgaaaccgacttttgtgtggcaaaaaggggacgaaattgtggccgagtcggaccgctacaaaatcattctgaaggagacgggaaaccacgaatattacgcggcattggaaattgtggagccaaaaaaggaaaaggacgcgggacaatttgtgtgtacggctaaaaatgagtcgggaaaactgacagcaacattctcagtgaaatttgaagtcccacaaggtgctcccactttcacacgcaagccgcagattttgcaaaaaacatcagactctggcgacccggccattgtgttcgacatcggatttcaggctgaccaaaacccggaagtgatttggctgaacccgaagggcaagaaaatgaaggagtccagcagaatcaagttcgggctgacgccggacggcggcgccaacacttacaccgctcaattggagttgaagaattataaggcaaaggacagcgggacgtacacgtgcaacatcaaaaatgacgcaggagaggcgaatgtggagctgacactgaacatcgaggacgacgaggtcaagcaataagccagaacagaggagcgcaaactctaagcagtgtttaaaatgggccattggacgatgctggcgacgacgaaagtcaagcctaaggagtaaatgggaaaatggagaattttgttgaacgatgccgagaaaaaatttcttgaaaaaatctgtttttatcatgaatccaacctaaggcatt

SEQ ID NO: 89354 - DNA, 639 bp, Heterodera glycines
cgcgaatatcttcctaaagtgttgggctcgtccttcgccgccacaattggcccttaccgcggctatgacccgaacatcgatccgacggtggccaatgaattcacttcgcaggcgtatcgttttggacatggaatgattcaggagttttacccgcgcttggacagtgccgggcgcaccattccctcgggcggatttgccttcgtcgacggcactctccactcggaccacttcattttccagggcggtccggacccgatcattcgtggaatgatgtctcaacagttgaaaaggccacaacgattgacgcggacgatcaccgaacaaatgtttggcaccaccgacttgggcacaattaacatccaacgagggcgcgaccacggggtgccgtcgtacatgcgctttcggcaattgtgcgggctttccaccgcgacgacatttgaccaactgagtcgtgagataatgagtgtcgaggcacgacagaatttgcagaggatatacggcacgccagaccgaattgatctgttcgtcggcggaatgctcgaagacccggtggtgcgcggtttggtcggtccgacagttgcctgcattattggtcctcaatttgcacggactcgcgacggggacaggttttattttgaa

SEQ ID NO: 89355 - DNA, 509 bp, Heterodera glycines
gcatttggttcccaagacggcgtcgtgtcctttgttgacattcgtcaggtcaatcggcagttacccgtcgccttcaaagtctctcaacatccgatcagtcggatcaaattccatcccatcttcgccaataatttcttctcttcctccgattctggcctaatccattgggatgccagtgctttggcccaaggagcgaatttaaatccgccaacaaacggaagagaaatgactggccacgaatctgctgcggacatgcggacgaccggagaaaatgaacacaccaacatttggttgtctccccatgcttcgacgagcgttaatttgcgagtgcttattgacgaggaccctcttctgctgagctctttcgacgttgtgaacggtgcgatcgtcgccgcttctcatacggctgaattggtgtttatgagcaatgataaatttacaaattgaaaaataatcagctgactggaaatctcattattattttgttacaataataaaaacacttgagc

SEQ ID NO: 89356 - DNA, 791 bp, Heterodera glycines
  unsure (1)..(791): unsure at all n locations
gacaaaagtggttcgtcgttttgtttcacttagcacattcattgatgagtgtttttctgaactccgtcagaaggctgtccgtcatcagttcagccatgaaatttcttagacaacaagaagcgattgacatcgaccgggagctgttcacctcgtgcggtttcagcgtggaccaactgatggaattggctgggttggcctgtgcccaggcaatcggtgaaacgttcgaaaaggggaacgttctcattttgtcagggcctgggaataatggcggcgatggactcgtttgtgcgagacacttgaagcattttggattttcgccttcgattctctgtccaaaaccatcacaaaatgatctgatgcaacgattgatgcttcaattggaatgcctcggcattcccttcgtcgaatcattccctgaccccaattctattgagaagttcaacttcctcgttgacgcaatcttcggttttagctttcgtcccccaattcgggagccattcaacaaaattttgaagcaaatggaaagtgtccaaaatcgtgtcccaattgtgtcaattgatattccttcgggttgggacgtggagaaagggcccccggatgaaaagagcggtttgcccattctgagccctttggcactcatttcactgactgccccgaaacaatgcgcacaattttttaaaggagaatatcattttttgggaggccggtttgtgccacctgccttggtacagaaattcggacttgaaaatatgccaccatatgaaggatcttcncaatttatgcgtcttaat

SEQ ID NO: 89357 - DNA, 644 bp, Heterodera glycines
gcttcgccttgtttcctcccatttgccaactttttgccgtccgattccgagtttggcgaagacacctctttcggaatgcgtccggttttgcccggctctggccaagaatttgcattggctttgggcggcaacagaccccgggagcaattcaccagttttaattggggactcctttcatttgcagttttattatctttgcctttttacagtaatcattctcgcctacaatcgagaacaagtgttgttggtcagtgatacgatcgatacacttattaacaatttattgactgtttagtcatggttgttcaaagcatgacatttccttgggtaaaatttgtttttcactcatctaactttgaaacaagctgttccccaatttctgattcgcgattgactatcccattttcactgaagtcgtgccttttcaattgttttattatgtcaattaggggttcttccaacaaatgtggcaaaatgccattctgtcaaatgactattcaccaaattaaatttttaacctgatcccatttgattaattcaataatcagaccatccatcgctcagaacactttggaacggctgaacaacttgccctacctgaaccgagtgctcgtcatttggaacgacgtccaccggttgccctc

SEQ ID NO: 89358 - DNA, 1008 bp, Heterodera glycines
attaagtatgaatttgctacacaaagaatggtatacggaattctcgcctgacgatgcccaacgaattgctggcactggggacgggtgttccaaaatgatgaagttggatggtgccgaactgtcaggggcctggactgggcaagcattttctttgaatgtggacaaaattcttttctccgaacgttcgaaatttcaggacgttcttgttttcaagagtaaaacatttggtaatgttttggtgttggacggagcgattcaaacgacagacagagacgaatttgcataccaagaaatgttagcacatttaccaatgtgttctcatcccgacccgaagcaggttctgatcattgggggcggcgatggcggaattttgcgtgaagtgcttaaacatccctcggtggagagagtggtcatgtgcgaaattgatgaaatggttgtccaagtggccaagaaatttttgcacggattggccacttcttttgactcgccgaaactccaacttcacattggagatggtttcgagtttctaaaaggacatgaagcggaattcgatgtaattatcactgattcttcggacccaattggcccagccgagtcgcttttcggcaagtcttattatcaattggtcagaaacgcgttgaaagaagacggagtgttggcgagtcaggcggagagcatttggctccatttgccactgatttccaaattgatgaattgcgcgcgcgatttgttcccttcggtggcttatgcttctgcgactgttcccacttatccttcgggcactatcggatatttgctcgcctcaaaacggcagatgcatgttctgagtgttccgcttcgtcccctcaatgattccgaatgccaatcgatgggtctgaaattttacaatcgccttttacactcggcttcttttgtgctccctaactttgccgaagaggcgctcaatcagcagcaaaacagtggaagagaccagtgaaatgaaaagggacgacggaagcgcattaattt

SEQ ID NO: 89359 - DNA, 980 bp, Heterodera glycines
gtttgagaatccttcgggccatgtgactttaataaattttgccggtgtgaaatttgccattgcaccctcgatttatcttcttccttttctcactttcgttttgccatgcttttcctccctctctcccttttgcttttcctcctccatcgtccctttgccaatgccctcggctgtatgtccgccgtttgtgccgccggcggtccctccccctcttcccatgccgtcaatcgcatcattcgttgcgcttccgactctttttgtggccattttcgcgctttgcggcgaaatgaccaatttgtcgaggcggtcgacctcagttgtcccgaattcgccgtggtgcgcgctcctttcgatggcgaaatttcggcttatcgtccgatgggagggagccgagcgcaggaggggacaaagggcgaatgtgtgccggatcagggagttcggatcgacggccgaggccaatggcagggctatcacgcgctgatcagttccgtccagctgtttcgttttggtggcgaagtgaatgcgggccaaagaattggcgtggcacgagatttggaatgtgccgggacgcggcccaagccgaggggcgacgaaaatttcgtgcgcatggaactcttccgagaggacaaacccatcgacccaacccatcatctgatcgactgcatgtgcaccggccaaatttgcgagacaaatcgcgcaaatgccctcgagggactcccatttaaatttgacagccgtttcaacggagtgcgcgggtgggaaatcgtttgtccgaatgttcggcccgaagagccgaattcgtcgggcgaatcgcctgaacaaagtgacaacagacaaacaatgagtcccaaaatttacagtcccatcgaaggcgaagtgatcggtcgcgtgcggctgagtgcgtcgagcaactcgcaaagctattcgggctgtgccaacgaaggaatatttgtagttggcacgggaaaatggacggacta

SEQ ID NO: 89360 - DNA, 750 bp, Heterodera glycines
  unsure (1)..(750): unsure at all n locations
aacagatccctataaaattcaattcttgatcaattcccctcattcatcgcggcggtcatcaaaaaagaggaagcaaaaaaaacaaaaatgattggcatgatgaacaacgccggcatggacggacccgcggagtttttcgcgggccgtcgcgatttgtgcgaattgcttgtgccggcctcgtcgttagcagcggtggacggccaagcgcagccccacgcgccaccgccgaaggtttttgagccgacgcagcagaaaaaactgagctacacgggcagtggccgacggttggtggacggaaagccagaagtgaacgaaacgccagaggaaatgtggcgaaaagcgatgctcagggcaacctgcacaagagcagtgaaagaaatgcttggtgagaaacgccgcaaaagctccaaactgagacaattgatcagcagccaaagcggatcaattcgaaacttttttggcacagccaaaaaccttcgccatcggaccaccggcgccaatcaaccgcagcaacaggttgaggccggtggcaaagtgatcagcagcagaacggaggggccgggaaagcccgatcggatgatcatctgatcagagtaaggagaggaggagaaagacagcgcaactgaaagccaatcagtgatcagtggagaaccaatcgccttcaccgaacaaccaaataacctcacatttctttcgcctttccctcaataataaactgaatacattctcaaanaaaaaaaaaaaaaaaaa

SEQ ID NO: 89361 - DNA, 638 bp, Heterodera glycines
gtttgagtatcaaaagaatatccttaaaatttctactgaagattttaatggaagctgaggcggatttcgattccggattgctcagtacggaagtgagtcatcgacggcgatccgcttcagtgtctgaggattattcggtgcaaaaaacgaacgacgacgccacggaatgcaaattcgttgctgcgcagttgggttactactccgatagatttatcccggctttcatccacgcgtgcaattcggagaagccccaccacagagacccggagatcactcgtggctattgggcccggacaaacgcaatcacttcgatggtcgttcaatttgttcagcttgccggtccgtcaactcaaattttgaatttgggcgcgggatttgacacactttattggcgactcaaagatgctgggcttagtttttataagtttgtggaactcgacttcagcagcgtaacagccaaaaagatttgtcagatcaaacgcaacaaaaatgtgaatttaacggaatttttcagcaaaacagtggaagagaaacagcacagcgatttgcatgccggcgattaccacctcatcggcactgacctaaggcaaatccgcgaatttgacgggaaattggcaactgccgatttggacttttct

SEQ ID NO: 89362 - DNA, 577 bp, Heterodera glycines
gttcggtgtctcctccccctcctccgtcttcaaatgaatgccctcctccgcttgtgccatgtcagtatgaatatttggaccacacagccgacgttcagctccacgcgtggggccaatcgctgggcgaagcgttggagcaactgacaattgcgctttacggggatatgaccatcgaaattgaccgagttgagcccatttacacgatggacttctccgcttccggccacgacctttccgcattggtttataatttgttggacaattgcctctacagtttttgtgctgagccttttttcattggacggttcgccaaatttctgaatttgaaaaaaccatcgggaaacactggcgaagaattgtcggtgcaaattcgaatttggggcgaatcgttcgacccgcaaaagcatccgcagggcactgaaataaaagctattacttattcgaatatgcaaataatacggaaagaggaggaggaggacgaaggggggaaagtgcccatcggacggacagacatttttgtgatagtggacatttaatcaacgctttgttgggggctttatcattgttacccggcgga

SEQ ID NO: 89363 - DNA, 756 bp, Heterodera glycines
gtttgagtgactctgatggaccatacgccgtggcgagtcgtcctttacgtcatcgacgactttcggattcatttaaatcgtcgttttgatcatttggaacagtggcaaattgtcctttacactctgtcgttcgtcctttttgttcaatgggttcgcaaagtgttgaaattcgaagagttcgtctcatttcgccaattgtggaatgattcgttgctcagtttttccacgtacaaacacaaatgggaagagaacaaagaaaacgcgtacaaagaattggaggatcggatgcatcgcgccgatcggctgaaggaattttacaaatatttgcccgaccgtggactgccccccgacgacatcattcgcgaggcgaccgcctacaaaacgatgagcgacattctcttcgagaggggccgactgtgcgggtcgctgtacgcggtggaggacgaagacagcaattaccagcggatgatcaaacaggttttcgagctgtactctcatacaaatgccgctttccccgaagcgtgcccttccattaggaaaatggaggccgaatgtatccggattttgtgcagtctttttcacggaggtgccaaaagttgtggagtggttaccaccagcgggtccgagtcgatcattttggcatgcctcgcttatcggaactccgcccacaaaaatggcattcgaagaccggaaattatcgtgcccctcaacgcccatgtcgggattttttaagcagcgaaactattgggaatgcgt

SEQ ID NO: 89364 - DNA, 1169 bp, Heterodera glycines
ccaagtttgaggtagaaaacttagcaaaaaatggccgacttcgaagggcgtgtcaaagcttaccgcttcgtggcttacacgaccgtttctttctccatcatctcacttttgtcggtgtgcttgacactgccaatgctgaagagttacgtgtcgaacgtgggcatgaaaatggactctgagctcagctcatgccagcacaatgccaaagacatttggtccgaagtcagtcagctgaaggggctgcctctgctggtctccggaaaccgtacggcgcgtagcgcatacggtagctgccaagagtgttgctccggcggtgcccaaggccagcccggccaacccggacagcctggacgacccggaaacccgggagcacccggctcacccggacagcccggacaaaccccgcagacgccttgtgagcaagtgcacccgcctccatgcaccccgtgccctggcggtcagcccggaaacaatggcccaccgggacccccgggagcgcctggatcaccaggccaacccggtaccggaggaggacagccgcaaccgggagagcccggtccacctgggcccaatggccagcctggccaacccggacagcctggagcgcctggacagcccggacaacctgccagcccaccgcagacggagccccctcctccaggcccacctggagaggctggtgcacccggacagcccggtcagcctggagcccctggacagcccggcgcgtccggacagcccggcccgaagggaccgcctggaggcccaggacagccaggcaacggcggagcaccgggccagcccggccaacccggacagcctggcaaccccggagagcgcggaatctgtcccaaatactgtgccgtggacggcggagtgttcttcgaggacggcacccgaagacgttgaaaaaagctattctgatcaggggaagaaaaagcagaaaatcagtaacgattgccctcccctcccccgtgcccttctcctccccattttccactggctttcttttccttcctttttttattttgtttagcttttccaattcgcccaaattcccccccccccttaattgcttctctttgtaatcgccgctatgccaagttgccaaacatcagcaacaaataaagaataaatttcacatgaaaaaaaaaaaaaaaaaaaaaaaa

SEQ ID NO: 89365 - DNA, 624 bp, Heterodera glycines
  unsure (1)..(624): unsure at all n locations
cttgtctctttccaattcctcatttgacaaagtcaaagatcagatgggcaagatgaattcgaaattgataaaaatggaatcggaagttcgcaaatggaagaaccaagcggaggataacgcgagacgcgtgtcggcactgagcgatgaaaaagtcgaaatcgaacggaatctttcgttgaaggaccgtcagctcgtccaactgcaggaattatgccgagtgctgaaaagagagggagacaaaccgaaccgacagaacgaaaacggagaagtgacggaaagggacggggaattggaagcaggggcaattgactgatgaaggacagaaacggacgaatctttggaaatgttcggatggtgtcgttgattttggacggacaaatgggctaattcaaagtggcactaatcgacgctagctttaacttttttaaatttttctactctattgcttaattttgtgtatataaatgctttttagtaaaaaaaaaaaaagaagaaaaaaaaaaaggaggatttatgataaataaanaaagggaacgcttcatggaacgctacgccccggtggcgaaggacctcgcctctcgggacgtcgtctcccggtcgatgacctttcggggggggggggcg

SEQ ID NO: 89366 - DNA, 843 bp, Heterodera glycines
cctcgtgccgaatcaagtttgagcgctaaaatgcaagagactcacattgttctcgggattgcctcggtgtgctctctgttggctatcatcgccacagtcgtcactctgccatctctgtactcggagatgagccaaatgaacagcaaagtgcgcgacggagttgaggccttccgcgtcaacaccgactcggcctggactgacttgatggacgtgcaagtggtcgtgacgccgccgtcgaagccccgtgataaccccttcaactccatcttccgtgccaaacgtcaactgcccggacactgccagtgcgctggcctccaacagccaagctgtccccctggtccgcccggcccgtccggaccgcctggacagcccggacagcctggaggcgcaggacagcccggacagcctggacagcctggccaacccgctcctccttgcccgccccagaacatcccctgcccacgctgccctgctggcccgcccggccgccccggaggacagggaccgcccggacagcaaggagcccctggacaacctggtacgcccgctcaaggtggaggacctggaacgcctggcgcgcccggaccccaaggacagcctggacagcccggacgccccggagccgctggccaacccggacagcctggagcgaacggagttgtctcacgcccaattcctggcccgaagggaccgcccggagcgcctggccagaacggaaaccccggaagccaaggtcagccaggacagccaggaggccaaggaccgcccggacctcctggcgcgcccggtcagcccggccagcctggaaactctggccagcctggacagcccggagcaccggga

SEQ ID NO: 89367 - DNA, 636 bp, Heterodera glycines
ttaccgtataaactacactattacccttatttttcttttaatttatcaatttctacaaacactcagccaaactgtcggccatcttcaatttacaatcgctgataaccgtcgtactattgctcatctgtacctgtgcttttcttcgtgctcttctgccgcgactgatcgaccggaacaagcaaggaatttccggcgtgttttggaagtgcgcgcggattggcgagcgtctctctttgtgggtttctgccggctgtttttgcatggcaatttatctgctcttctgaacccaaatggaaaagggacttgattttggtgctcgtagtggacgattggacccggtcgaatggaaaatttgtcggcaaattcccccgcgttttcttccggaaaagaacgatgtttatattacaaagaagacaaaagtggccgctcagttctttcgctgcaaaaaattattggacacgaaatttgatgaggtacgaatccatgcgcttggccatgccatcggtcgtgcgctgagtttggcactttcgctgcgcgacgccatggccggctcagtcaaattggacgttcaaaccagcactgtacaggtctctgatgaagttcagtctctgtctgattgcgatttggccgatgttc

SEQ ID NO: 89368 - DNA, 427 bp, Heterodera glycines
caagtttgagacaaaaatatttctgatttgctgttacaatggtgaatgttccgaaggcacgtcgaaccttttgtccaggaaagaaatgccgtaaacacacgaaccacaaggtcacccaatacaaaaagggcaaggagtccacgtttgcgcaaggaagacgtcgttatgaccgaaaacagaaaggttatggtggacagacgaagccaattttccgcaaaaaagctaagacgacgaagaaaattgtcctccgcatggaatgtgttgagtgcaaacatcgtgttcaaaaagcgatcaagcgttgcaagcacttcgagttgggaggtcagaagaagtcaagaggtcaggtgatccaattctgagtttgtgatctcacctcttttgttgtttggtcgctgttgataaaccgataaatttttttgttgaaaaa

SEQ ID NO: 89369 - DNA, 654 bp, Heterodera glycines
tgaggtcaattcgctttcttttcctggatgattcctctttttcccctccggggtcctttctcttcttttccccgcactttccactcaaaatctccgcttcatcagacaaaaacttcgcttttggttggaccggctgttcgccttctgctcggtcattacgacatcaaaacgagcgtgctcagagcatcggggccaaagaaaaacattctcaaaagcgatgtgctgagtcacataaatgacaaaaaactgtctccgattaaagcattttcggctaagccaccatcaaaaatgtctcttgaaaacgaagtgatctccgcgtcatcacatccgatcattccgctaaaatcatcgggtcggtccgagccgactcatcgccatgtccatgtggacattcaattgtcggaaatgcgtcagaatcaaacaaaacaatttgtgcagtcaaggaattcaattccccatgcttatgcgtcggcccaaatttctgccaacaaaatattggaattgctcaataggctttctgaaagggtcgattttaagctgtcgttaaatgattttatcataaaagcgtgctccttgtccctgcggtctgtccccgagttaaacgtccattggcatggtaattccatccatcacctttcttccgtgggaatttcc

SEQ ID NO: 89370 - DNA, 645 bp, Heterodera glycines
aaatgtcaaatcaatcaacttcttctgctgctgctgctgccggatcgacggcgccgccatcgccttcgaacgaagcttcttctccttcggccgctcaagcgtcaagtcagtcatcgtctgctgctggtgattcgtcagcctctcccaatggaccgcgtcttaagccgcgtaaagtgcccgtcaaccgcttcagggatgttcgtccggcactgcagctgcgactcagtcagttgaagcatccgttaatcaggaaactggagcaggacaccggcattgaccgtgagaggctcttttacatggctatggcatatttcgtgttcctgctcctgttcactcagtgtaagcttctgctctccactctcatcggctcagtctatcccgcctatcagagcattgtgactgtccatactcaggccaaaagcgaagagattcagtggctcacttattggtgtttgttctctctgttttctctgtgtgacatttccttttccgtcgcccttccgttctatgcccttgtgaagacaatcattttgttgtatttggctcttccccaaacttatggtgcgcacaatttctacgtcatttacgttgacccgctggtggaacaatggatgctgatggtcaacgaaattgctggctgatgca

SEQ ID NO: 89371 - DNA, 649 bp, Heterodera glycines
aatattgtaaaatatggcttctccgttgcgtctccctcaacggatcggtgcccaccatttttggcacaatttcgacaattttctttttgacgccgacggcgtgttgtggcgggaacaacagcccctccagggggcggtggaactcatcggaacgctgctcaaagcgggcaaaaaggtggtggtggtgacgaacaactccactcaaagttgtgccgaatacgtcaaaaagtgccaacgaattggcttcacagaccttgacgagcagaacattgtcagctcgggcatggtgttggcacatcagttgaacaaaatgaagcgcagtgccgagtttgggtcgacggcgcatttgccggtttatttgttcggctcggtcggactgcaaagactgctgaaggagagcggcatcgacagctttggcacggcgcccgacccaattccggcggacactgccactttcgtctccgacttgccaaaccttgacttgggcgtcccgcggccgttcgccgtcgtcgccggttacgacattcacttgagctatgccaaagtgatgcgggcggccaattggctgaaggagaaagcggtgcccttcttggtgaccaacgaagacgcgacattccccagaacgaaccctgagatagtcattccgggc

SEQ ID NO: 89372 - DNA, 669 bp, Heterodera glycines
agtttgagaggaaaaccgtctcaaaaaatggacttcgaagccaggatcaaagcttaccgcttcgtggcctactccacggtgtccttctccatcatttcgctgctgtccgtttgcttcactttgcctatgcttcaaaattacgtgtccaatgtcgctcagaatatggacagggaattgagtgcttgtcagggttctgcaaaggacatttgcctcggaagtgaaccaactgaagagcatccccgtggtgggaggaaatcgtacggcgcgtcaagcggacggatacggacgaggaggcggcgcagtgtccggcggaggaggaggaggtggctcgtgcagtgaatgctgctcaggcggaggcccgggcccagcaggtcccccgggaccgcccggcaatcccggaaaccccggagcacccggatcaccaggacaacccgggaaatctgtttccgctccatgcgaacaagctaccccgcctccgtgcaaaccgtgccctggcggccaacccggccagcccggccctcccggaccgcccggccagcccggctcaccagggcagcccggaagtggtggcggaaaccccgagccaggacctcctggacctcccggaccacctggaaaccccggagggcccggccaacctggaggccccggtcaacccggacagcctgc

SEQ ID NO: 89373 - DNA, 656 bp, Heterodera glycines
catttaaccaatggctgagaagcttaaacgagctaaagttcgactcgagttttctgagaaaatgttctatgaaagagcactcaccgaatggagagacaaaatattaaaggacagtggtaataaaaatcacgcttttgttcttcggaaagcattatgcaatctcaaattgttttcgctcgacgtcaatggcttttcagacctaagaaaaatccgaggaattggcgttgacattgcgacccgattgtcttcggcttggaaattcacatgcgctactcacttttgcacagaatcccctacaattggccaaataaagtctctgaaaagtggcgaggcttttgtgttaatcgagcaatcgtcaactgaaaacggtggacgagttcccttagtggcgggcgccaaacagcgaaaggcaattccaagtcaaattggccaacagcaaaagagtcaaacgaacggaaaacaaaaaggacaccattttgaaacggctcccttagtacggtcaaattcgcaagaatgcgtagtcatgcataagtcggagtcattggaagtgatggactttgatcatttgctgaatgtttctgtttcaaaccagccatttcttcttttgcttttgagaattgtcggccaattgtcgcaatgtctcctccgcccacttc

SEQ ID NO: 89374 - DNA, 635 bp, Heterodera glycines
ggaaggacgacgtgttggcatttggggacagtgccggccgagttggagtttgggacttggccaggagtcaatgtcgtcagacgggccttggtcagtccacacggggcccagtccaacgggtggtgttctcacggcttacgggtgactacacacttgcggcccagcatccaacctctgttgtagtgtgggacactgaacggttgcagtcgctgttttcactgcaaaaaccgggccacagcatcatcgacattgacatgtgcggactgaatccggtgtacatagcctctgatgggatgtttcgttttgcattttcggacacggatgagaaaagtcgcaccaacaacaccaacctgaacacatcgccgccactcatcaaatccgacattcccctgttgttgcgcccgtcgtactgtcaagcattgctgtcgttgttgtcaactgacacaccaccggcggcggtggcggaacagaacaacaacgacgacgacacaaccaccaagtccaaccaagaaaatttcgtcccatttggtggtgaccatgatggccaccaattgcacacatttgacgaccccgacattgaccatttgatcaatcgtttgtccgcaaaatgctgccgaacaccgttagaccgtgcc

SEQ ID NO: 89375 - DNA, 638 bp, Heterodera glycines
cgctcctccacaacagcgtccaccggtcgacctcattccgaaggctccgtattatgagctgcccgctggcatgatggtccccctgatcggaatcgaagacatcacatatgaatcgttgcgcgagaaagacctccgtctcccgcctcccgaagcacccagtgatcagttgatgcgcgaaattgaccgcttttacatcgctttgcaaccgccaccaccagtggattgtgtccgcgacgcggacggatgggaagttaacggactgttggagcattacataaagaagagagagcagaaagtgaagttggaagcggaactgaaggagaaggggaagacatttgaagacgcgatcaccaacaaatatgtgccaccacagacaacgaaaaagagtgagtcaaaaaagtcgaaatcgagaagtccgccctcatcttcgtcctcagcatcatcctccggttccacatctggtgagagcagcagcgaaagttcaagtcggtcacggagtcgatcgaggtcaagatcatcgtccaggtcgaggtccacgtcaccgttgaatcaaaaatcacagagcccaacattcaaacgcctacgccgttctcggacacgaagtccaacgccgggaggaccgaccaagttttggcgga

SEQ ID NO: 89376 - DNA, 634 bp, Heterodera glycines
gccgagagtaccggctacatcatcggtgattcagaattggaactcgcccgagcctttcgcactccgtgccctttgtgcctcatcacaatctcagttcctgcgagtttgtatgcagtgttcagagatgaggcaaaatcgaattcacgcaactttgtttcgcacacaactcccccagcccagctccgttcatgctcaattttcgacgacgcccaaatgtttgtgccgattcatttgaccgatggccgagtcatttcactgccaatcgactcgcaatcgaccccctttgaattgtgcgaaatgttgtgccaacaaatttgtctcaaagatgcgtttggcttcggcctttttcttgccgttggtcgccgttttatccgttctttgggcgttggctccgaatgcgtgattgacgcaattgcatcgcttgagacgaaaagcgaaaaaaattggcgaattttctttaagaaagaattgtttagagcccaccaaagtgaatccgacgaccctttggccattgaattggcttttcggcaaattttgggcggcattcactcaaaggaataccaatgcgaaaaggaagatgacctcgtcactttggcggcgcaacaacatttcattgacattaacggccaagacg

SEQ ID NO: 89377 - DNA, 648 bp, Heterodera glycines
attttaaaaaaacttccaaccaattctcttttcgtcaaaatgctttctcccttctcctacgacccgttctatcgccgttcgttgtggcctatgaccaccgttggcaacgtcctttcgcccttccgccagttggagcgcgaactcgaccacttctttgacgggatgcagcccatgcttcgtgaccacgccgctcaactgaacgtcacggacaagggcgaactcacttacaaagtcgatgtcagcggcttccgccccgaggagatcaacgtggaggtgattggtaatgaaatcatcgtcaatggggaacatcgcgagcagaacgacagcgaatcggtccaccgtcagttctcgcgccgtgtgctcatcccggagggcatccaaaaggagagcatcaagtgcgagctggacggcggtcgcttgtgcatctgcggaatgaaaacggctggcgaaggcggacgaaccatcccaattgagatgaaaaagaaagcggccgtggaacagcagccgcaagcggagaagaaatagagggggacaaatggagacgacggaccgatcgatccattaatatgggtctcctcctttggacattttaaattattttcaacaataaagcgttttttctaaaaaaaaaaaaaaaaaaaaaaaaaa

SEQ ID NO: 89378 - DNA, 621 bp, Heterodera glycines
tggactccgaaaatgcgttgcaatcattcaaagaattcaccggctgcactgacgatgacagcgcacgtcggctgttgtccaaatgcgcatggaatttggagagagccattgactttttcttctcgggacgaagggaagagggggatggggaagtgatgtgggacgagcagcagccgatgacgagccaaggaacacgacgacgaatttcgcactttgctaacagtttatggacaacgccagcgattggagggaacgcggcgaatggaaaccgacggacggacgaaacttctcacaaccaattccgaaccgcccgaatggacgatgattcggtgcaaaccctcgacgacagtgacgtacaaatggtcgaagaatctgacagaaaagcggcgccaccaccaaaagcagtgaatgggtccgcttcttctgacggcgttcgcgcgccaattgcgcctgtccaaggcgttctaattgagcagtcattccgcgagacatatcaaaatcgagaacgcctttggaacccggtgttcgagcagtatcgccaagaccatcaacagccctcctcgtcatctgcggcggcttcattcttatcacgcagagcaaacggtgcaaataatcgcattg

SEQ ID NO: 89379 - DNA, 869 bp, Heterodera glycines
caagtttgagaatttattccgatacaatgaataagaccacgctgaaggctcgtttcgggtcggatattaggaagaattggatccatcacagtaacgacattagcctgaatgacttggtaacgaagatgcagcgttatttcgatattaaggatgcgaatgccatcaaactcaaataccgcgaccaagagagcgactgggttaccctcgccgacgacgacgatttggcttatgcactcgcctctatggaacttctttacgtggacgtgatcgtcgagaaatatcaattcaagcaagatgaggaaacagttgagaagacagcgccgcctgctgaagttgtgaaggcagtggcgccgccgagggacgcaactcccgtggacaatggtgacgtggcacagctgcaaaagcagcagcgttcttctacgactccagtttcatcgatcggagagctcacagaaattcctctgaatgggccggtcactccgccggtcaacatgggtggaatgtatggacagccgcagcaattgccacaacaggcaccggtgccgcaacagacgccgattccgccgccgccggttagcgggggagggatgttctatggacaaccgcaacaacagcaacctccgcaacatcagcaacaaacgccgtttccattgccgccggttagcgttggagggatgttctatggacagcagcaacagcctcaggcaccgatgccgcaacagcagcaaccgccacacgcaccgatgcagcaacaacagacgactgtgccaccggtcactggaggaggggcattctacggacagccgcaacagcaaccgccactgcaccaacagacgccgatgccgcctccgccggtcagcgcgggagca

SEQ ID NO: 89380 - DNA, 858 bp, Heterodera glycines
cgggtgtccacctcccatcagttgcccgtgggccaatctcgtccatgtcgacagtcgatttcttcgtcaaactcaaataaacgggcggaaaacaatactttcaggtgcattctttttaaataagggttttttcaccagtcgaattagactaatttcactaacaaattaaaaaatgatattggacagacccaaaccaattggcggagttgcgagtcgctgtcggagtgagccgtaagctcaaaaataattcggtttttgttttgttccgtcagtgttgtccatgtttacaattagctgttgcttattattcgactttgcatttaaattcgcaatttcagccgaagcgacggaggacgcttttccatgagagggactcacaatcagccgaccaaaggacaaccgaaggcgagcgcagcgaaagccgtcgttcagcagcaaagccctgaaatggtggcatggctcagacggaaagagtacgacccgcggaaggcggcggcagaccaaagccaaagggaagcgcagcagagacagcagcagaactctttcatggcttgtcggtttttctccacctcggccaatgccaaaacgcccttcgcccgatggcgtcaaaatcgcaagagtcagcagacgatggccgaccaacgaagcaaccgttcccacgacgacttgagccgtctaggggaaagtatggacgacgagtcgcttcatggcgtggctgtcgatccctgctcgaattcgctccaacggacggtggacgaattgacgcaaaagtgccacaagtcgattgaacttttgaaattgtgcaaccaatccggcctttcttcgtccgtagagcaactgctcgaaaaggtcgtcgaa

SEQ ID NO: 89381 - DNA, 996 bp, Heterodera glycines
cccccattttccattttcttcctattgagtggtgggaacacccaaacacacattcctcaccttttcttcatcatttgctcgtcgtttttgcattcacttttcacaaaaccttattcgcccaattcattatatgaatattggaaaatgacaatttctgtcgagatttttgacgccaagtcgccctcacgaccgggtttcaccatcgctgaggttgagcctgaggacactgtgcgtcaattaaaacgcaaaatttcgcaaaaaacgcacctttccgtggaccgaattgcgcttcgtcttgagccgaaagggaagagtttggtggatgaacaacttgtgtcccaactgaatttgccggcaacaaatgctcagctttactatcgcgacttgggcccacaaatcccatggaaaacggtgtttctgatggaatatgccggacccttcttcatttatccgctgttctacttgcgcccagcgcttatctacggcacgggcgcttccatggcaccggttgcaactgccgtgacaattgcctgcatttgccacaccattcactatgccaagcgattgtacgagacacaatttgtgcatcggttcagcaacggcacaatgccattccaaaacttgttcaagaactgcacgtactactggggcttctccgcgttcatcgcctattttgtcaaccatccgttgtacacgtcgcccagcttcacccaagtgatgattggccttgtcggcttcacaatcagtgaacttggcaatttgtccatccatcttctgctgcgtgaccttcgccccccgggctcccgtgagcgcaaagttccctaccccaactccaacccgttgacgctgatgtacaactttgtcagctgtcccaactacacttatgaggtgtattcctgggttttcttctgcgtcatgactcaatcgcttcccgccgttttcttcactttggccggctttgcgcagatgaaaatttgggcggacggcaaacaccgg

SEQ ID NO: 89382 - DNA, 867 bp, Heterodera glycines
  unsure (1)..(867): unsure at all n locations
actttctcttccgttggcactgctgggcagcgctgtacgagcacacggcgactgattatccatgaaaaagtgtacgacgtggtgttggaacgggtggtcaacgcgtacaaacagctgatggacacgcgcatcggagacccgttggatgagcgcactttgatcggtcctttgcacagtcgcgagtcggtgctcaaatacaaaacggcgattgccgaggccattgccactggcggtcgaattctgtgcggtggcaaagtgttggaggagtcgaagggcaattacgtgctgcccaaggtgatcactgggcttgcgcacgacgcaccggtggtgctcagagagacatttgcgcccattgtttacgcagtgaaagtggccgattttgaggaggccgttgcggtgaacaacgaggccagccagggcttgtccagcagtttgttcacccaaaatgtgtcgcttctgtccgaatggattgggcctaagggaagtgactgtggcattgtgaatgtgaacattggcacttccggggcggaaattggcggcgcattcggcggtgaaaaggaaaccggcgggggacgcgaaagcgggtcggactcngtggaagaattacatgcgtcgctcgacatgcacaattaatttcggcaaggaattgccattggcgcaaggagtcaaatttgagtgattaatttcgaaggaatttatatggtttttgtaatttaaaagtttctttgtgataattcttttgaagtcaaaaaagtgtcttgccattcattcgttcttttgcatttttcttttgattttgttgtgctgtttcattattatactttgataaaaaatgccattttaaaaaaaaaaaaaaaaaaaaaaaaa

SEQ ID NO: 89383 - DNA, 673 bp, Heterodera glycines
agacattttactcaaactaaattcaaataagacagttgtccttcggcggcccattgtcagcaaaaaagaagaaggaaaggaaaaatgaggacgaaaatgcacgtggttgtccttggaccgaagaaagtggggaagacttcacttttgaaaagtctgatcaatcagcacgacccaaagccaagcacttcctcgtccgatggccaactttacgttcccaccgtcgaagacactttccatgtccaattcggcgactttcgttccgttgaccaaatgccgcagcgctcacttctcattcttttccatgacactgctggcataacggactttggcagcattgagttgagaaaaccgtaccttcaggttgccgatgcctttctgctcgtttattccgttttggaccctttggctttaagtcaaatggaagcgttgaaaaaatatttggagagggaaaagaacggcacgagcaaagaacggaaggaagttgccctttctgtgccaatgccttcaaaaaaatatcccttcccttttcaggtaccaattgccgtggtcggaacaaattgcgaaatgtcgggcaaaaaagtgaacacggaaagtgcacttctctgggcgagtcgtgaaaaagtcaaactgttcgaagtgtccgcgaatgaccgaaaatcagtcgccgaaattg

SEQ ID NO: 89384 - DNA, 517 bp, Heterodera glycines
cttttaataggtaaatacaatgaaatattctttgctccgaccgtttgtgaatcgaatttttacgcccggcaaagagcagcagcaattggtgcaacgaaaccaaaatgaatttggaatggtcaaaacaaacgccgggcaatcggccattttattgcgatttgtcagttggataagcggcagggaacaaattgagcagcacttcagccgattcgggaagataaaggagacgctaatgttttatgacagagtgacgggaatgcaccgcggcttcgctgtcgtccatttcatctcaccacaaagtgcagctcaggccattcaacacaaaccgcatataattgacaacaaattgttggcggtcacttaccacacgccgcccgaaatccgacggaagacgaattagtgggaccgaataaacgaaacatttaaattgaaaattaataacggattaccaagcgagaagcacatgtgctacagacgttgttttatttaaacgaataaagaacaaacggcggaaaaa

SEQ ID NO: 89385 - DNA, 679 bp, Heterodera glycines
gtccaattaagatttttattctcgccttttcattttcataatgtctggccaaataaagactccgactaatcagaaattgctcacaaatgttgcaattgtgcggatgaaaaagtgtggcaaacgctttgaaattgcatgttacaaaaacaaagttttgaattggcgcaacaaaactgagaaggacattgacgaagtgctgcagacgcaaacagtttttgtcaatgtttcaaagggacaattggcaaaaagggacgacctccaagcatcatttggcactgaagaccaattggaaatttgtaaattgatactcgaaaagggcgatttgcaaatttcagacaaagagagacaagtgacctcggagagctcttttaaggaggttgccaatctgatcacggatatgtgcgtcaattccgagacacagagacccttttcacttgctacaattgagaaggcattgcatgatgcgcacttctcattgaaaagcaatcggtccacgaaacaacaggccctagaaatgataccgaaattgcgcgagtcgttgaaaattgaccgtgcgaaaatgcgaattcgagtgtctgtgcctgccaaaaatgcgaaaatgttgcacccaaagctaaaggcattttttgacaccacccaagtcgaaaattgggacaaaggcgaactcgaaatggtgggg

SEQ ID NO: 89386 - DNA, 714 bp, Heterodera glycines
ggcagcagagaaccccacaaaatggagagggacggacgggaaaatggagatgaaaaatgcaaatcaaatggccaattttgacagttaatgaagagacccccggcggtgttcgacagacgccgcgtgagaaattggcaactgatcagacgacttaagctataatggaaggatttgacataataataatggagggaacgacgtcgccgccttattttttgcgtagtcggacgaggaaggaaggaccggccgtgctggaactcattgagaagcttcaacaagccaacgacaaagttgaccaacaaatcgcagaggaacaccaattgcgaaatgaagtccttcagatggcaccgcgcgcgatgaagaaatacctcggcacacgctttgaacgactgatgaatgccaaattggaattcccccaaatggcggacagtgaacgcaaatccgaggccgagttggccaaggcgaaagaagaacttcgccagttgaaactccaagcagtcaaagaggcggaggaacagaaaagggagttggaggaggcgcagcgaatggagagggaattgaaagagcgagtgaatcggaaattggccaagctgagggcattggaagaaatgtgatggcaaatgtcagtcgttcttcagtttgtgcgggttttctctgttgtgttagtcatgtaattatttgaccgtatgtttaacaataaataggatttatttt

SEQ ID NO: 89387 - DNA, 638 bp, Heterodera glycines
attggaagctgagaagaccgactgctgtctgtcaattgaggggacatgacgaacatgtgatcacgtgtctgaagctgcgaggcgacctcattgtcactgggtctgacgactgcactttgcgcgtttggtctgctgcgacgggaacgtgtgtccacgtccttaacggacacattggcggtgtttgggcacttcagctctcacaggatggcaaaattgctgtcagtggttccatcaaagcttgggacattgttgcgggtcaatgcattcgaactcttttcgggcacgtggctgcggttcattgtgttaaatttgacggatcactgattgtgtcgggtgcgtatgacaacaatatccacgtgtggaatgctgcggacggatcgttaatgcacgttttggaagggcacaccaacagagtctattcgatacattttgtgagtgagacgaaattgctcatttccggaagtctcaacacaacaattcgggtgtggaacgtggacaccggcgaatgcttacaaacgcttgtcgggcaccaatcactcacttctggcatgaaattacgagacaacattttagtgtctgcgaacgacgattcgactatcaaagtgtggaacatcaccgacggaacttgcgtccatact

SEQ ID NO: 89388 - DNA, 459 bp, Heterodera glycines
  unsure (1)..(459): unsure at all n locations
attaccattgcctaattagttaataattgtccatcaattaaccctccgatgccttcccccatccgccttttctttcttttcctgtttctgcttcttctcctcccatttttgtccttcgccgctttgtccccccgagagaagcgccaattcagcttcaccgatggcttctcaagcggcacaattttgcagccgggcggcggcggacttttgagttggtggcggagatgagccaacggcggaagtgaagcaaaacaatgggaaagattttgggttgtgatttgatttatgacgaatgaatgacccaccgatcaaccgacttaccagaccataattcattcattcattcattcattcattatgccgtgccaatatccccccaacccatccttttattgtaaataaaaaatttaattcnnaanaaaaaaaaaaaaaaaaaaaaaaaaaaaaaaaaaaaaaaaa

SEQ ID NO: 89389 - DNA, 647 bp, Heterodera glycines
gtcttgtcctgctcgactgttgcttcattgcactcgcctccacctccccaccgctccaccaccatggccccgaccgctacctcgtcgcaagagtaccgtcaacagacgtacaacctgccgcgcgccatccgcatggtgatcatgggcccgcccggtgcgggcaagggaacgcaagcccccgccatccggtcgcttttcggagcgtgccatttggccacgggcgacatgctgcgtgcggccgtgtctgctggtacccccttgggcaaggaagccaagaaggtcatggacgccggcggcctcgtctccgacgaaatcgttgtcggcctgatccgcgaaaacctcgacaccaacccggattgccgcaacggcttcattctggacgggttcccgcgcaccgtgacgcaagccgagaagctcgacgacatgcttgccgccaagcaccaggcgctgtcgcacgccgtcgaactcaagattgacgacgccctgctcgttgcacgcatcacgggccgcctcatccacccggcgtcgggccggtcgtaccacgttgagttcagcccgcccaaggtccccggcaaggacgatctcacgggcgagcccctcattcagcggtccgacgacaacgttgacgcgctcaagaagcggttggt

SEQ ID NO: 89390 - DNA, 656 bp, Heterodera glycines
gtttgagttttagcaactataaatatacgccctgctgatgacaacgcccaatttgccttacggtgcaagagaggggagcggccagttcagtacgggcaccaatttcagtcccccaccaccgccgtatgacgccggcgccagtagtccatttgaacaaccacaccaacagcatcagtcaccatcgccctacggaatgatgtacagcggtggcaatgtgccgtcgccaccaccgccgtcctctccttaccaccaataccaacagcaggcgccgccgcaaatgtccccgccgttccaaccaccaattggggacccacaacagcagttcatgtacgacccgttgttgaacactgcgcgtcatttgggtggtcaatttgcggagcaacaaaagcaaaagttcacccaatacctttcgtccacgtcgttcaacctgaagtattattttgcggtggacaccaattatgtgcggcgaaagttgggcatcattctgttccccttctttcatcgggattgggccaacaaatgtgagggcgatgcgcccgtgttgccctgtcaggatgtgaatgcgcccgacctgtacattccgttgatggcgttcatcacctatgtgctggtgtctggttttgtcttcggagttcagaaaaggttcagccccgaaa

SEQ ID NO: 89391 - DNA, 491 bp, Heterodera glycines
gtcaaagggcccgagctgactgagttcgaactctctctgtgcccccatcagcgtctgctcgacgccgagggcgtctcaattttgcagcgttcggtcctcgaacacaacattttggccgcctcgcgactgtacgccaacatttcattcgacggattgggacaacttttgggcattcctgcggcaaaagcggagaaagtggccactcaaatgatttccggggagaaagtccaaggggcgattgaccaattggagcggacggtttcattcgaagtgcccgattcgtccaacggtggcgccgattcgcaaattgcttctatctgtgagttggttgcttcgatcaacgagaaattggctactcgcttctcggagtggcacaccgaacgattcaacgagtacaaaagagcacaccaacagcccaatgatcccatgcaatagtgattattatttattacggtgccatttgttttgttcggcttatttatccaataaaa

SEQ ID NO: 89392 - DNA, 702 bp, Heterodera glycines
gccaaacacccattcagttgcatcaatgaacaactttatatggacatggccgatcggctggcagaggacggattccgcgaggtcggctaccaatttgtgcacatcgacgactgttgggcggaaaaggcgcgggactcacagggccgaattgtggcagatccgactcggttcccatccggaattcgcaatttgtccgactatatgcacaaccgtggactgaaattgggcatttacggggacattggcacggagacgtgcgaaaattacccgggcagttaccagcactatgacatcgacgcgcaaacttttgcggattggaaggtggactatttgaagctggacgggtgctacatgaattcgtcgatgatgccggacgaatacccaaaaatgggcgtcgcactgaaccgcacgggacggcaaattgtctattcgtgctcatggcctgattatttcgatcacaattttgaagaaaagatcaattacaccgccgttgcctattggtgcaatttgtggcgcaactttgacgatattgcgcgatcgtgggcaagcgtgataaagatcatcaatttcttcaccaagcaccaggatcagtttcgcaaagttcaggcgccaggccgttggaatgacccggacatgttgatcgtcggcaacaccgaattgaccgttgaccaggccaaagtgcaaatgtccatctgggccatt

SEQ ID NO: 89393 - DNA, 747 bp, Heterodera glycines
  unsure (1)..(747): unsure at all n locations
tgagtgtccaatgggacaaagttccctatttctatcccatccaaataatccaatttgggctgggacaatacaatttggacagaaaaggggcggaagtgattgtccgaccattggccaacagagcgacaaatgccatgggcacggaaaatgccaacggaacgatggcattgggcgacggcgcgacagtccgtgtcaaactattccgtcgactgccacttttgcttttttctttgaaaacgcatcgaatggacagcgaatttgtgttggaattggaaaaacgccggagggaaggcggaacgatggaaatggcactgttttttaagcattcggaagcaaagggatgcgtgtggagtgatgagagcattaaggccccacgtctctccgctgtgtttaatatcggcccaaaaccaacaatgcgttgggtggattttgttattgacaacgatatttatgtgacaaaggcgttgaaaatgttatgtgcccgaaaaaaacggactcaaaataaatgcgacgccaaaaagggcgcgttttgactatcatttgttgcacgtgtcacaacttcagtggatgttttcaataacaggggacccctttttcnangaaacagccaaaccatgggagaaatatgcnaagggatgacaggaccgacagacattttcaaccaattgacaaaatatttaatagttctgctcaattccacagaaaaagaagtggtcaaaattggaaaaaaaaaaaaaaaaaaaaaaa

SEQ ID NO: 89394 - DNA, 616 bp, Heterodera glycines
ttgagagaataaaatctcgtttttggcatccgttggaaatgaaattttcgcttctgttggctttcgcattcgctgtgccattggccgatgccgcgctcactttcccctccattggttatgtccaatcggcggctgtcaatggcactttgacatgcaatggaaagccaacgcatgccaaagtgaaactgtacgacgaggatgacacggacatggacgacctaatggacgaaggagtgaccgacgaggagggatttttccatctgagcggaaaagagagcgaaatcactccgatagagccaaaagtgaacatttatcacaattgcaacgacgacgaaagtcttaacccgctgaagaaagtgtgctacaaaaaaatttccatcgaccttcccgccagttatatcactgatggacccgtggccgaaaaagtgtttccgctgggcacccttaatttggccgggtcgttcaaaggcgaaacgcgcgactgtctcaactgatctgccgaggcggttgatgtaaagagaatggcacaaagaaaggctgaaaggcatttttggccacacaattcttttttcaattttcactcagtcgaataattaatgattctgtcgttggtaaa

SEQ ID NO: 89395 - DNA, 652 bp, Heterodera glycines
attaagaattaaaaaataaatgtttgctaaatgtttattgtttctcgcaattatcatttctgttgtaccaacagaaaataaaggatatgaaaatggatatcgccagtgcagttgtggtgagcagacggaatgctttgaagaaataaaaagcaaaacagcacaatgctttgaacaagaaacaggaaaattgggcaatgctctgacaaaaaatcttgtggatccaaccaagacaaagccttgcttcgacaaattcagtgcttatgtcaaagattggctgtcatgtgttgatgcaaaactggtcaaggaatcgagttgtttgaccacaaaatcggacataaaaattcaatctggcgattttctgacaatttactcaaaaattgtgcgcgaaaatgtcgacaaacggatgaactatctctatggtcttgcaaaacacccacttgtccaattggaagaaaattggcatgaatcggccaagcaatgtgcctttgagaaagtggctgagataaactgttttaagaaatataactgcgtgttaaaagcttccgaaaaagaggtgcagaaagtggcgaagcaatgctacaaggagtttgatgttgtcaaggtgcaacacaatatgtgtgaatgcatggcaaaaaatgtacccggctatggt

SEQ ID NO: 89396 - DNA, 643 bp, Heterodera glycines
gtcaatcggtgctgtacctggacggtgtaaaattttctgatatacaggcaacaatacaaggcatttttctcgccgcttgtttcctgtttatctccagatcaaagcccctaaaaacactcgcgaaacaacgaccgatgaccaacattttcaatgtgtacactctgtccaccatcacaatacaatttgccgtccattttgcctgtttgattcacattgtcagacttgctcatgccttagaggagagaccaggaaaaactgagttggaaaaggagttcaaaccgaacttgttgaataccgccgtttatttgatgtccgcttctctgcaaattgcaacttttgccgtcaattaccgtggcagacctttcatggagagtttagttgaaaacaagcccctcttctactcaatcatttgctcttttggtgcaatggtcgcctttgcttcaaatacctttccggatctcaacaataaatttgagcttgtccacatccccgtcgaattgcgtgatacattgatttgttgtattttgggagatttggtctgctgtttgcttttggatcggatgttgaattatctttttggtgatcagcgagttcgaaaaatgttgatgtattaattctatttgtattcaaattttgatttatc

SEQ ID NO: 89397 - DNA, 646 bp, Heterodera glycines
tggctaatgattctcgcagttcttcgagcgcttcctcccgttctcgctcgcctagtcacaggcgttcgccacgccgtcgcgagcagcgtcggcgccgctcgcgttccaccttttcacgttctccatcacctggccaaaaacgactgcacatcggcaatttggacgagtcggtccgtcgtcgggacattgaagacgtttttggaaagtatggacggatcagcgactgttggatggccagttaccctcccttctacgctttcgtcgtgttcgaaaacaacaaagatgcgtccgcctgcatgaaagacttgggcaacacggcgtacatcaaagggtgtcgtgcgcgtgttacggtggctcttccaaggaatggtgcgacttatcgtcgcggaccgccgcctccgccgcgacgttattacgacgaggaggacagtcaccgacgccgtcgtcgttcgcgtactcgctcgccccgtcgtaggcgctcgcccagtcgctcgcgcagtcgcacaccgccgcgccgcagtcgttcgcctcgtcgttcggcgcgtcgccagcgctcgccgtcgccgaagagagaacgcagagacagggaggagaaggacacaaagccccgagaagcagcagatgagcatgagcagcaacctatcgc

SEQ ID NO: 89398 - DNA, 632 bp, Heterodera glycines
gtttgagcttctgatcagtcgctacataaatcaacaaacgacaacataaaacagtcgactccaattccgctgatccattcaaaatcttttgctgaacaccaaaagcacaccacttggccacacttctgcgccacttcaattctttggccatttgttaaggccgagcacaatacgcaatcctgacacgatgaagcaccaatatcagaatgagctgaatacacagtccagcagagctgtgacatcaccactcgcagatgatgacgaaacgctggacgagtcgcgcgagcgtgcctacaaattggtggcgtacacggcggtcggcttctcgctggtcgccatcctggcggtggccatctgcttgccggtggtgttcaactttgtggaccacatccaacgccagaccaaacgggagctcgacttttgcaagagttcggccagggacatcatgttcgaggtgggggacaagcagcgtcgcattgccaccgcgtttgaagcggtgcgcaaccggacgggcggcgccgacgcatcctttgcctccatgccattcccgtcgctgatcgcccacctgcagaaccgacgtgccaagcgccagaccgaggcttgcgagtcgtgctgcattccgggccatcccg

SEQ ID NO: 89399 - DNA, 788 bp, Heterodera glycines
ccccgagcgggacaccaagatggacaccaccaatgccgaggtgatggacaccaagaaggaagccaacgcggcagctgcagcgccggtggcggcgtcggacaacacggcaccagccccaatgacatggatgatggacggcattgtgccacgcgatgtcaatgtgatggtggaccgtaccacgaaggagttgcgcaaaaccacggagacggacggcttctacgacatgagccagcgggcacaggaacgtgtgatgttggagacagccggcaaacagggcgaaattgtcaagacaaagctgaaggaagcaattgaggaggcccgaaaaatgatcgaacgtgctcttggcacagtgatttcctactcggaagcgccaatggagtccaaaatgcaattggaacaggtgttcatgacgctgacggacgagaccaagacgcccaaagagaagatggagcggatcaaggacatccagcagaaatggacaccggaaatccgcgcggcgttgaagccatccactgacgacaaggaaattgccgaggcaatccgcttcttcaccgacttgccggctcagattgagcttggcaaaaagtgatcggagctgtggcacaattgtgccgatctgatcaatggccggacatcgcacaatgtcccaaaaaattcatagaaaaacaaaaacagtaacgatcattcggattttcttttaaatgatcaatgtcaaacaaggattgtttttttttgtggttaaataaattttcattttttttaaaaaaaaaaaaaaaaaaaaaaaaaaa

SEQ ID NO: 89400 - DNA, 659 bp, Heterodera glycines
aagcttccttcctccccggcggcaacggaacacaaacaatcggaagacccttccgtccctcactcactcacttcccccgtccttccaatccctttgccctctcatcttctcgacctaattatacgagcaaaaaaaacagtaatttgtttgttttatcactcaccaattttctaaaataagaaatgaacacacaacaacaaacttaagcagacaaattattgtttattcacttattaatttgttttgtctgctattttccacaattcccttgacaaatggccgaattgccgtcgctcgataccaaatttatgtggcagcacacgtggccaagtgcggatgtcctctgttcgtttcgtacaatctcatctttgggaatgtgatttttcaattgtattttcggtgaatttattgcgagcaattcggagctttggcgcggtgctttcattttggaactcggtgccggaatcgcggcacttccgtcaatgacggcacttcgatacgacgcagcaaaagtggtgataactgagcaaaaccaagaggttgttgaacaaattcagtgcaatttggagcgcaattttgacaaaaaatttactcgagagaaagtgcgattaatgagtttggattggcttcagcccgacgattccctggcacgggttgtt

SEQ ID NO: 89401 - DNA, 1012 bp, Heterodera glycines
gtttgagataaatgattttcaaccatttctacacccaattttacattctgcttaacgtgttagcttcaactggctttgttttctgtacaacagaatggttcggagacctcagagcccatatgaatcctccgaaatttcctccgttttatgacatcgtatacgacgaaccagattgtccatttgggcttgaaagtgtggccatccccgagtttgtgtactttggggaaatgattgcaactaaatttgttcaagagcattcacaatgtctgcagttttgcttggaaacctcaaagtgcaaagctgtgaatttctttgaatcgatcgaaggaaaaaatcccgaagtcggtttctgtgaactgttggtcgaaggccagtatgacaacccacgactgatgcgacctttcaaaaaagcaacttaccatgaaaaaattcactgccgagctgaaaacgaagaggaaaaacagccattcatttttgatgagaaggagggcaagcaattgctaattggaaacgaaagtaacgaacgcaaaaacacgtcgtcgacagcgaaacaaaccgaaaaagggacaaatgaaaacggacaaaagacaaccgcggaaaatcggcaaagtgaaggaagaatgaacgagcaacggagccaaaaaacaacggaaaaacagccgagaagagaagaacaaagtgaaggtcgaggaaacggaggtcgaaaaacggagacaaaggaagaaacggcacaaaaatcggaaacgcaggaaaaggcaacggaaccaccgacagcacaattaaattcactgattctcaaaagacttgcggaaagaattcaagaactcaaaaagcggttcagaaattgacaaatgaggaaccaaattgatttgatgaggaaatactagtatttattaatgatactaatcatgctgccaattcatttgtattattttttggccagtagttttgacccattttagagataatttcgcaaaaaccttatttgtgtcatttgaattagttttactta

SEQ ID NO: 89402 - DNA, 641 bp, Heterodera glycines
gtccaataaagcttattatgtttcgaaattgtctcctggatttaactcctctccgttgtgcatttattgcaaataaactggctcattattcttccaaaacaccaacattttcgaattgcattccttcaccaattttatcgggaaatcaattgtttcgaattattcgtgacaaaattcgcacctcaggcccaattacggttgctgaatacatgcaaatttgtgccacttctcaacttggttattatgctggtcaaaatgaaatttttggagagcgtggtgactttgtaacttcgccggagctgactcagatattcggagaattaattgggagttgggttgttcatgagttggaaatgacctcttggaaggaccggtggcaattggtcgaactcgggccgggctcgggcgaattgatggccgatgtgcttaatgtgctgcgccaatttgatgtattacaaaatgttgaagtttatttggttgaaagttccgagcgtttagtggagcgccaacgagaaactttgaaaaagaaatttggcgaagatttacttagaaacattcgatgggacgattcattggatgatgtgccacaaaggttctcccgggttctggccaatgaattcctcgacgctttgcccgttcat

SEQ ID NO: 89403 - DNA, 724 bp, Heterodera glycines
cactccgatttattacgtttacatgtgcttccgctacctcaattatcgcaatttgatttgcatttgctgtgcccccaaatttcggcgtcttctctttcccgattgtttatgcttttgtgccagaaataaacggtgccaaaaccaaaatgaagaaaaggcggacaatgacgaaaaattgagcgtcgtgagggaacagccgctgccaaacaattcctttgaacaacggcgcagtctcggcaccactgggcaggtgtcgaggagtgtcaaggagggatttgcacttttcgacttttcactgaagttgtttctgtccactgaacaagtgcagaagctgcatgactttgagggggagtgtatggtcgatttggcccgagaaaaggaggacaaacgaaatcggacatccgaagaacgactcaacagaacatgtgaaagaacggaactgattctgttgcgcgttaatgacatcgtctcgcgggaagccacgttcaaagggaacatccacgacttggaaacgaggctgggaatcgtggaaaatagacaggccgaagtcctggactatcttcgccaatttggtgctgttttaccgtcattggttcagtcagtccaaactcttcaacaacagcagcagcaactgttgcagagactttcatccattcccgaataacaaattttattaacttacttttattttttgttgttttggctgcatattttattatcattt

SEQ ID NO: 89404 - DNA, 830 bp, Heterodera glycines
taaaaaaaatgatgcccaaaaatttttgcggcaaaacatcaaaattttcttcgtgccttctccctgctcttctgctgatcataatattgtcaatactaaattctgtgagctcttctcgtcgccaccattctcctgcttctggtcataatcggcggctgtcatcaatttcatcgcccgccgttgcaaatggtggcagcctctttgaacatcgaacaaagcatcaaagtgttgccgcggctgatgagtcggccgggggttgtgccgttgttccaccatcgctttggtgcggctgtgacaagctgcagacacagtgtggcaccggacgattgtgcggccgatacaccggcgccatgcgaaatgagccgcttcacatcacactgctctatgaaagcctgtgccccgactgtcaaagtttcatcaccgaaactctgttcgatgtgtaccaaaaattcaagacgcacttgcgaattgaatttgtcccatttggcaatgcgaaagtgttggagaatggcacaatcaaatgccaacatgggcctgaagagtgtcggatcaacaaatttcattcgtgtgccattcacttcatgcacgacccaatgccattcatttactgccttgaaaagctgatcagttcaggcattccgctggagaaagcatccaaaaaatgctatgtcaaattgcatccaatcccgcacatttacgaccagattactcactgtttcaatgggccgaccggcgatcgacttcaaagggaagccggtcgtctgacggcacagatttggcctgatcagcatgaatatgtgccatggattttggagaacaatgccagtctg

SEQ ID NO: 89405 - DNA, 638 bp, Heterodera glycines
ataacgcctcagggaatttccgacggcataatgcaccaaggcataccaaatgtgccaacagtgtcgaacaacggaacatcgtttgggcgagtggcacctccgggaatttcggatacgatttctacaactacccaatttactataacagcgacaaatttaccaataacttcttttgtcacgacacaagatcctaacgttagaagcgaattcgaaaaagcggatgctcccgaaattttgaaaatttttattccacctaaacctccagcggtgccacaagaagcaaaaaagatttttgaggatttatgtgccggagggaaatgtttggtgcaaaaacctgaatttatacagcaaaaagcggcggtagagaaagaatcagagcaaatcgaactgaaattaaaccctgggaaaagtgcggagcaagtgaaaagggaagtgaaagtgcgcatggccaaaacgcagcagctgaagaaggcactcgtgcaaaatgccggccttgagggacaggtggaaccggcggacaacggagtgtttggacatgaccaattgttaacggagacgcaagcgaacgatttgctcaacgaattgacgcgtcacaaagcgaacagagccaaaagggcgggaaacgcaatgtttttgga

SEQ ID NO: 89406 - DNA, 841 bp, Heterodera glycines
ctgtcaccgcggtgacgaggctgaagaaggactaccagaagctggtcagggacccagtcccttacgcaattgcagcaccgcttccgtccaacattttggagtggcattatgtcgtcaccggtgctcccgacacgccttacgaaggtggttactaccatggcaagcttattttcccgcaggactttccctttcgcccgccggcaatttacatgatcaccccgagcggtcgcttccaaactaacaccagactgtgcctttccatctcagactttcacccggacacgtggaatccgtcctggtccgtttccaccattattatgggtctgatctcattcatgaacgagaactcaccaacacttggcgcattggtcagcactgacgaggagaagcgcgtttttgccttgcgttcccgtgagctcaaccttaaaaatgcccagttttgcgagctgttcgtcggcctggccgaccaaattcgggccgaattggaggcggaaagggccgccgcatcggacaacgccgaggggcaaactgcttccggagagtcgacgaccaaaaagaactctcgacacgactcttcctcactgactgccaatttgttaatggtcgcgggtgttgtcatccttttcttcgccgttcgctacgttattctcaacgcgacgactgtctgatcgaaaaatgtaaaactgatccgactttcccactgcttttttgccctattttttgctgctgctattttccctttctctgtgtttcaccgacgcattttaggcctattcaactgacagaacatttgcctattttaagggtcgtttatgtcgccaattgaaatgcgatttttatg

SEQ ID NO: 89407 - DNA, 520 bp, Heterodera glycines
gaacccactcgtccattatgagggaactgccgaagaaatcatttgggcatgcgatggcaaattggatgccatggtggtcggcgccggcaccggcggaacaatgactggaatagcgaacaagatgcgacaaaagcttccgaattgcaaaatcattgccattgatcccgagggttccattttggccaatccgacaaatcgccaaaagcacgcctacgaaattgagggcatcggataccactttgtgccgtacaccactgatcgcaatttggtggacgaatggatcaaaacgaatgatgcgaatgcctttcgcaccgcgcggcgactgatcagcgaggagggattgctgtgcgggggttcttccggcgccaatgtttgggcggcgatggaagtggcaaaaacgatgggcagagggaaacgcgtggtcacaattctgccggacggaattccaaattacatgagcaaattcatcgacgacgaatggatgagagttaagggatttgaaggaatttgaaaaagggga

SEQ ID NO: 89408 - DNA, 730 bp, Heterodera glycines
caagaaactcacattgtcctcggcattgcctcgctgtgctctctgctggcaattatcgccaccgtagtcactttgccatcgctgtactcggagatgagccaactgaacaacaaagtgcgcgacggcgttcaagccttccgtgtcaacaccgactcggcctggactgacctgatggatgtgcaagtcgtcgtggcaccgccgtcaaaggcccgtgacaaccccttcagctccatcttccgtgccaagcgtcaattgcctggccactgcaattgcggtcccccacaacggccaaactgccctcctggcccacctggtccggccggaccgcctggccaacccggacagccgggaggcgcaggactgcaaggacagccgggagcacctggccaacctgctcctccgtgcccgccccagaacatcccttgtccacgctgcccggctggcccacccggcagccccggagggcagggaccgcccggacagcaaggagcccccggccagcctggtgcgcccgctccgggcggaggacagggaccgcctggcccatccggaccccaaggacagcctggacagcccggacgcagcggaacacccggccaacccggacagcctggaaataatgctgttattttcaacaccattcctggcccgagaggagctcccggagcgcctggccaacccggaagccccggcagcccaggccaacctggccagtccggaggccaaggac

SEQ ID NO: 89409 - DNA, 687 bp, Heterodera glycines
  unsure (1)..(687): unsure at all n locations
gtccaattaagcgattcgtattgcctttaaaattcttgtcaccactcaacatcaagtttatgggtgcaatgagttcttcgtcttctgccgccccatcggacccgcagcaaaaaagcatttatgaattttcggccaaagacattgacggcaatgagaccagctttggcaaataccgtggcaaagtgctgttggtggtcaacgtagcgtcgaactgcggcttcaccgactccaactacagtcagctgaagcagttgctggacaaatacaagtcgaagggactcgaaatcgcggccttcccgtgcaaccaattcaacaaccaggaatcgggctgcgccattgacatcaaagactttgtgaccaaaaagtacaacttcgagccggatctctacgacaaaattgacgtcaacgggcccaatgagcatccgatctacgcctatctgaagagcgtccaaggcggcatcctcggctttgatgcgatcaaatggaactttaccaagtttttgatcgataaaaacggcaaagtggtggagcgttatgcgccgaccaaagaaccgaagaacattgagaaggaaattgagaaattgctggaggcctgatttgatgaaaaaaacttgagcttttcagacttatatgcccatagaataatttgtaatctaaataaaattcttatgcttaaaaaaaanaaaa

SEQ ID NO: 89410 - DNA, 957 bp, Heterodera glycines
caagtttgaggtaatgtattaaccaaagcttaaaaatgaaaagcaattctaaaactgctgacattggtgatttttacgagatattgggcgttcctcgtaatgcaagtgagcaggaaatcaaaaacgcttaccgaaaattggcactaacttatcatccagacagaaaccctgggaatgagcaagcgcaagaacagttcaaaaaagttagcatagactattctgttctctccgacccaaataaaaggcggcaatacgatgtgtccggaccatcgatggcaatgaatgattttgaaggactcgacatatccgaacttggcggagttggtcgcttttttggcgcaatgtttaccaaattgggaataccaattcctacccaaattggaccgaaagtgcttgctcaagctcgtgatctctctcgtggcaatgtcacaaacggcctctcgagccaggtctggtgctgtccgaaacagtgaacaatcaagaggcaaatttctacgcgtttcagatgactcccgaattccaacaacacggagtgatcattcgatgcaaatcattggcaatgagcaaattcaaattggtccttttcgatcaggaaggcgcagtccgtcacattcgcgagagtcagaagaaaaagaaatacacttccgctgaacttttctttgtgccgttccaacgaataaacatttccgaattcattccaattcgtttttacatggaggacaaagacactccgctgccatttcactttctggacactttagaaacccatggtgctaatgtgatggagcttcagccaggaaagcacatcctttgtgtatacggcgacaatttcttgagaatggtcagttacgaaatcactttcctcccgctgaatcattacgccagcgcagcaattaacaaaatcaacgcattggagcccgtgttggcatcgaagaaatcggaaatgcaagaattcca

SEQ ID NO: 89411 - DNA, 548 bp, Heterodera glycines
  unsure (1)..(548): unsure at all n locations
tgagtattacgctaccaggtagagaagataatgatatgctaatccataacttagcgattcatggcatagccgctgccgaggggagtgcttgtagtagtggtagtgcgattgcttcacccgttatagccgcattacagggggaacacaatcaggcaatacgcttttccttcagcaagtatacgacccatgaagagattgcaaagaccgttgaagtattgcggcaccttgccttgtaaaaaggtgctaaaaaaagaaaagacaaaacgacgagacccgagaaagcaaaagaaccaaaggaagaaagcagaactgaggggaaccacgaaaaaacactagaagttcaaggaggatagggaagcgacataaacaaaatggttagagtagaacacacaatcaataggagagagaaaatcaaagagaagaaacaggactagctaagatcacaagcaaaataatagatagccaaaatnaaaaaaaaaaaaaaaaaaaaaaggacctaagaacaaaaaaaaaaaaaaaaaattttaaaaaaaaaaaaaaaaaaaaaa

SEQ ID NO: 89412 - DNA, 540 bp, Heterodera glycines
atttgctaaaaaaatttagttacctaaaatgcctgtgcgacaaattctctcgggtacccgcagaattgcgaccaaaagtttgtcgtttggaattggttcggcgaggttggccgattacggtgtctttaaggccctcctcgagcccttagtggtttccaagtttgaagagctatcgcgcattagagtcgaaaaaattacgatcttttttgggatcctcgttttcgtctcattggctgacgttgctatgaccctgcggaccaacgaacatgttggcgacgttgagcgccgtcttgaaagccgtcttgaagaccgttttgctgaccttcgagcgcttcttgagcgccgccttgacagcattgaccgccatctcggaacttctgacaaagcgacggatgccaagttgcccggccagtgatcccagtggaactctgacgaaggatctcgggtgttacctttaccgggtattgaattgaccaattgctttgttgttctcatcttttcactaaagtcgtaaaaataaagttttaatgtaaatgaaag

SEQ ID NO: 89413 - DNA, 630 bp, Heterodera glycines
tgacaaattgcctcccctccgaattctttgcaaattactccttttctccccaaaatatggactttaacctgaaaacattggccagggaggcgtccgggatgctcagccgagccaaacaactaaccgaagaaaagctattgaacgcggagaagacggaacttgaccctcattgcgagcaattgctcgccaaggcggataaaacggaggaacagtcgaagaaactgttgtccgccatggaggcgtatctgcagccgaacccagccctccgaatgggcgacctgttctatgaaaagatggaaatcacttcgccagcccccaatcgctcaaacactttggaataccttagcgaggcgatgcaggaggctgcccaatcctttggcaccgaaacgccattcggaggtgctttgcaaaaaattgcgcagacggaagccaaattgggcgctgccgaaagggaaatggtccaaacgacggccgggcaaacgctggtgccaatcaaacgcttttttggagggcgaaatgcgaaacattcagaaaaaacgccccgttttgcaaaagaaacgcttggatttggacgcgcccaaaagtcggctgaaaagggcgcggactttggagggacaagcgaccgtaaac

SEQ ID NO: 89414 - DNA, 1005 bp, Heterodera glycines
caagtttgagttcgttccttttccatgcgtttttcttcattttcctccccttttctccccctctttttcctttctttgccaattgcgtttgttttgtccggccgaactttgccgttcaccggttcgcaattggccaatgaagtggccagggcattttttaattccgtcaacacttgggacatgtcaattttcggagccgggactaagcagggcgaggaccgttacaagatcagcttggacggcctggacagaatgaagaacagattcagagtgccgttgccggcggggcaggggttggaaaagctgctcagatcgtacagagtggagcctctcagagaggattaccttggggtgaacaaagccagagaaagagtgttggcaccgagtaaactgatggaactgatggaaaagctgggcaatgtgctggttacggacccaaaaatgcgccaaaagatcgacaaatacgacaaaaaaagagcggatgaggcggcgcgaagggcggcgatgatgccaccaaggcaagacccacaagcgattgcaaaacgcaggacgtggccgaaggaggacggattggcattggaaaggggccatttgcctcagggcaacaaccagagtccgacgcgactccagtcgacgcccaggatttggattcaagaagatgaccggtggcgccaaccgatgactttctcccgaaaagacgtgcgggaaagaagttggctcgagtcggacaccgactcggacttggtatcttaacttcggtgttgcgctcgcggcgaaggagtcgagtgaacattttggacgacgaccaaccgacaagaagaacggcctggggaaggtcgccgacgccgtcgccaaatggacgtgctgttgtacaacgaacaacgaccacaacgacgacgacaactgaggaggaggaaggggggcgaagaacggtcagatttggcgaagtggtggtcgttgagccggaggagagaacagtgaacagacgcacggaagtgcggacac

SEQ ID NO: 89415 - DNA, 827 bp, Heterodera glycines
  unsure (1)..(827): unsure at all n locations
ccaagtttgagcctaatttgatataacgaatatcaatggaacatggaagcttgccgcttcaactcattattttattcgttttaacgttgcaaatttcaactcagtcgccagaaatttcagtgccttctgatgttcaaattttgtcagcagtccggaacgtagatttgaccactcaaattgtcaaggttaaaactgactttgagttgaaaaatggaagaaacgaggaattgagcagttttgtacatgccatgtcggctgaggaggctgcaagactttcttggatgtccgcttatgagagcggcaaagaatcgggcaaattacggatttctcgtgttagagtcaaaggggtctcatcggacatggttttccacaaaattgagtttctcgatttgttaatgtccggttccaatatcaaactttcggtggattatgctcttacggaatatttggtgccctctcctaaggacattttgcagtcagaaaaccagctggtcatcttttccggtactgctaatgttctcagcgcctacccagtgatgaaagaaaattgtgtctataaaatcggttcctcaaagcccatttcattcacggagatagcaccgagcaaacattcacaggaaaaaatttcctacggaccatatgagaacaccaaagcgtattccaagaaaccaattaccattcattacgaaaacaatgcaccatttttggtcgcttcatccgtggagcgcatcattgaagtgtctcattggggcggaaacatcgctgtggaagaaaacgtcgaaattttgcacaaaggagccaaactanagggttcattttctcgactt

SEQ ID NO: 89416 - DNA, 729 bp, Heterodera glycines
  unsure (1)..(729): unsure at all n locations
agacagcaggacggatgacgacttttctgtgcttgcgcagttggtccatccggttgccgaaagggaagtgggttaacattcccacgccaggctagggaaatgacggttcgcaagagctgttttgcgcggtaacgcaaatgaactcgcagacgtcgtgtggagtccgagccagagttctcttttctggtttagggtgtgcgcttttgcacaaacaaatagtttaactaataaatgtccgctccgccgccgtacaacccgaacatgcaacagtacccgcagcagccacagccaaactacggtcagccgggctacggtggtggcggcggtggatacggttacccatcgcaaccgtacccacaacagccgaactcatatggtggtggtggctatcctcagcaacaacaaccgcagccacaagtcgtctatgtcgagcgcgaccgtccgcaacagcaagggagcaacaactgttgtctgtgggcattgttggcatgctgctgcggttgctgtttggcggagtgttgtgactgatcaaaaaaaagataaagcgcgaagaatcgaagtcggcggcgatggccaaccaaagcaaaaaggcacttgaaatcgaaaaatatcatttattttcttttctttgtgatcattctcaacaaccatttgtcatctgcgtgagaacatttttttttttttgaaattttgtaaattctgacaattaaaaaataataaaaagtnaaa

SEQ ID NO: 89417 - DNA, 632 bp, Heterodera glycines
acggtttatcactcaaaatgagcgaatctgccagtgatgatgaaaatgcccatctaatcgaaatcaaattcaaaacgatacaggaaacttacaatgtgaaggtcaatgaaaactcaaccataaagcagcttaaaaagacaatggcgaagaaactcaatcagcctgaagagaaaatttgcctcattttttctgggaaaatactgaaagaccatgagaatctctcacaacatcatattggtgatgggatggtccttcacatggtcatccgaaatcagccctcaacttcgacggcttccgccgcaacaacttcctcagtttcgactgcgccgacgggtggcgctgcgccgaacttagctggaactccgccgtcgttaggcggaattggcgatcttttcaacaaccctgaacttgttcaaggcattctgaattcacctttcatggagagtatgctggccaacccggacataattcgaacgatgctgagccaaaacccccagtttcagcaaattatccaaaacaatcccgagctgggccacattatgaatgaccccggcactatgcgacaagccatggaaatgattcgcaatccaacggctcttaatgagttgatgcgtaaccacgaccaagcaatc

SEQ ID NO: 89418 - DNA, 958 bp, Heterodera glycines
ttgaggcgcactttcaaaagtttaaatgcttttccaacgacaaaaattgccaaaaatttgtgccactcttttcccaaaatgccaaattcggcgatcgtccaactttgtcgagttggcaggcttcaccgcctccactgactccaagcagtacgcggctaaaaaactgttgttgctcaaaaacggcagctcccgaagttacaacgacgtgaacgtggcagccggacgttttgcggcattgctcaacaaaaagtacggcattcagaagggtgacactgtgttatgtcgaacttcaaaaaatgttgacgcgttggcactttatttggctgtccttcggcttggtgccatttacgtgccgcttaatcccacttacacaaaacgggaaacagagcattttgtgaacgacgctaaacccaaagtgatggtttcgcttaacgcatcggaggacgcctcatttactcagtccggctttgatgttaagcatgtgctgtgtgagaagcgattggcagaggaggcactgaagcaagagcccagctgtgaggttgaacccgcagaaaaggacgacgtggcatgcattttgtacacaagcggaaccacgggaagaccaaaaggtgccatggtcactcacggcggtttggtggccaatgccgagacgtgcactgacatttggcacttcagcgaaaatgatattaatttgcacgttttgcccttctaccacatccacggcctgttcatcagcttcaactgcacgctaatgtccaagtcgagtcgcattttcttgcccaaattcgacgtggacgaaacaattgcgtatttgcccaaatcgaccgcgatgatgggcgtgccgacattttacgctcggatggtcgaacacgcgggactgaatcgggccgcggggaaaaacatgcgcgtgttcatcagcggctccgcgcaactaacgccccaagtggttgagaaattc

SEQ ID NO: 89419 - DNA, 832 bp, Heterodera glycines
gtttgagggagagaatttccgttccatttaataatttaataaacccaaaatgtcttcatcaactgctgaactgaatccggaagatggtggtcatccgccacagaacaccgccgtggccatcgagcagtcgcaacaggccatccatccgccggcacaaagcggaagcggcaaaattgccgcgtgggcatcgccgaacgcggacgacacggagccgtacggaatttgcgcaaagattctgatcgttctgtcctacatcatcacaatcatcacttttccgatctccgtgttcatgtgtattaaaattgtccaacaatatgaacgagcggtgattttccgtcttggccaactgaagaagggtggagccaaggggcctggccttttcttcatcatcccttgcattgatgagtatcgtaaaatcgacctgcgcgtggtgtccttccaagtgccgccccaggaaattttgtccaaagactcagtcactgtcgaagtggacgcggtggtctatttccgcgtgttcaatgccaccatttccattgtgaacattgagaattcgaccggctccaccaaattgttggcacagacaacgctgcgcaatgttttgggcaccaaaacgctgagcgaaatgctcagcgaacgcgaaaacattagccaccaaatgcaggaagtgcttgacgaggccaccgagcattggggcgtcaaagtcgaacgtgtggaggtgaaggacgtgcgcttgccgcgcgaaatgcaacgcgcaatggccgcggaagcggaggcgacacgcgaagccaaagccaaggtgatcgctgcccagggtgagcagcaggcgtcgcgc

SEQ ID NO: 89420 - DNA, 865 bp, Heterodera glycines
gtgctttttcgttctgccaatgtgcccttctgagtttgtgcctttggcatgacttcgacgcttcgcggtttctgcctttcccccgctgatcagcagacgaatcttttctcattttgcagtgaaatggcgacgaacgcatcacagaaaaggaaggagatctatcggtacaaagcgtcgttcaatgtttatgcgatgggatggtcaaccaaattggacaatcacctcaaatttcgcttggccatcggcagtttcatcgaggaatacaacaacaaagtgtccattgtgcagctgcacgaggaccaaggcgaatttggccatctcggcactttcgaccatccttacccctcgacaaaggtgctgtggatccccgatccaaagtcggcttttcctgatttattagcgaccaccggcgattatttgcgcatttggcgaatcggcggtcacaacggcgcttcgttggaagttcggctggacaataaccgttcgtctgagtattgcgcgcctctcacttcggccgattggaacgaagtggacgtgtcactgattggaacgtcgagcattgacacgacgtgcaccatttggcagatagagacagggcaagcagtggcgaacacggaaccgtaatcggagggaatgtgaagacccaactcatcgcacatgacaaggaagtgtacgacatcgaattctctaaactgtcctcgggacgcgacattttcgcatcagccggcgctgacggaagcattcgaatgttcgatctccgccacatggaatactcaacaattgttttcgaagaaccctccaaaaagcctttgctcagattagcatggaacaagcaggaccacaattacttggcaacattcgccca

SEQ ID NO: 89421 - DNA, 661 bp, Heterodera glycines
  unsure (1)..(661): unsure at all n locations
aggcgcgaaggaagcgaatcggacactttggagtgcgagatagtcgacgacagtcgagaaagcgaaagaaattcgaatcaccgcaagccgtaccgcctgccgcgaacaccgacttcattcagacagcccggggcgcaattcggcgtcagtcattacgcgatcggagtgggatgacacttgcacggcttgattcacaacgtgaagggtccgacctgattaggagttggagcaaggaggatgtgtccaatgaggaaatgtctgcgcatcatttcggcaacgggggaccgtccacctctcaccagccgacagcaaatcagcaaagacgcgactcgccgcctaaaagaatgcagaaacaatcgcagcaaaagcagaagcaaatgtcgccagacgagtggttgaagaagttggaggccgaatcaggcggccttcgagacgaagaggaggagcaggcggagaaaaacgtgctngaaagggagcgccggggagagcatgcggaagggagcgaaagcacagaaaggcaacggggtgattaggagagatcagcaacagcagcagcaacacgatatgaacggaatgaatctgaagggatcactcggtgggacagaatcggaggcggaagaagagctgttgctgcattatttgatcacgccttcgccttctc

SEQ ID NO: 89422 - DNA, 640 bp, Heterodera glycines
cttgacagtgcggatgcggagaacctggccttgatcaatcgtcccgatttgggggtgaccttcaccaaattgcattgctggcgactcactcaatactcaaagtgtgtgttccttgacgccgacacttttgtggtcaaaaattgcgacgaactctttgaacgacccgaattctctgcggcaccagacgttggatggcccgacattttcaacacaggcgtctttgtctttgttccctcggagcaaacatatcgcaatttgcttgattttgcactcgtttatgggtccttcgacggcggtgaccagggacttctgaacgcatatttcagcacatggcgtgaatcagatgctacccaccgtctcccgttcacttacaatgtcacgaccgttgccatttatggctatgccgccgctttgaagcgtttcgcgccgaacatcaaaataatccattttcttggcaagcaaaagccttgggctctgctctacggggacggcgctgcggggatggcattcgtttcggactatcacaagcaatggtaccaactctacgcaaacattgtccagcaacttctgcctccgtcctcttcggtaatttcttcttccaccccttcttctcttccgtcctcttccttctctattattc

SEQ ID NO: 89423 - DNA, 820 bp, Heterodera glycines
  unsure (1)..(820): unsure at all n locations
tggagggcaacccggcaccgacaattgtgtggaaaaagggcggccgaaaaatgccattgaccgacgaccgagtgcggtgccaaacggacggtgacacgggacatgtttctctgatcatttccaaatgtcggccacaagatggggacgagtacacattgatggtgaagaacgcgcatggcaagcacaaagttggcgccaagctgcttgtcacgccagcggccgaatcaaatttggacatccgggccaagcagaaaaaacgtggcacgggctttagcaattcggaacaggaaaaacagcgccaacggagtgatgccgagcccaaaagcaaggctgaacgacgcaaacgccaagtgtatgtggtggaggagccccgtgacacatttgttgtgccgttgaactcgcagcatgccaacgaaaaggaaaatgccacttttgaatgcgaagtgaacgacaaggagatcgatgtgaaatggttccatgacggtgccgagatcgggatggacgggcggcactttaaggaacgggctggatgccgtcgtcgcctgctgatcatcaatgtactcattgaagaccacggggagtacaaatgcacagccaaagacgacgaaacaatggcccaactcattgtgcaccccaaattcgtcaaaaaagcggagcgcaagccggtgaccttctagttcgacgatgagttgtattaaatttttttgtttttcactgttcctgttttatttgtgcccatctcttttttaaactctgtgaattgaagataaaattttattttccnaaaaaaaaaaaaaaaaaaaaaaaaaaaaaaaaaaaa

SEQ ID NO: 89424 - DNA, 547 bp, Heterodera glycines
cgtttctccaaggttttatcttttatcagtgccatttgataacataattcgcgcacattatgcttcggccgccacatttcccattgcttttgactgcgattgttgtcgtcatttgtttactctccggcactgcaaatggcgacaaaaacctgttggacgagctgcgcgatttggacattttccagctaaagagcggcgtttcggcgtgtccattgctcgtcggcgagcgatgccccgagtcgagtccgctttactacttcaaatgttgcggtgatctctactcgagctgttgcgttcggttgcaggattgggctgtcggcgtcatcgctcttctgatcgtgctgattttggtcgctgccttcataaatctgatccgctgcatcttttgtgcctgatccgtttgagtacgtcggatgaaacaattgaggacaaagcagtgaaattgttgtaaattaaatttccaattgcaacaaattctgggatctttttttccatggcacttaattttgtttttctttgagtgattccatcaatacattttttcatt

SEQ ID NO: 89425 - DNA, 655 bp, Heterodera glycines
caattgccaattgtcccttccttttcgaccgttttttctatttccgtcgcttttcctcccctcccaaaatgggcgaagttcgctttcactccgattacgtttcctccaaccgcggaatcaccaaaatcatccaaattgtgctcggttttgtcgtctgttcggtgctttgttcgaattggtatggcgggtacagctgtttcggggagggccgcctcggttatgtgagcggattgaactttgtctgtttgatgattaacatcatccttttcctgctcaatctgttcaacattcgtccactgaaacttgaacaattgtacaatgtcgccgccgcccttcttctgctcgtcggcatcgtccttctgttatggtacataatacagtactcttactggaacatttggatgataatcgcagcggtctgtgtgctgatcatctttttgctctttcaatgggacttcaaagggaaccgcacaatgtccgaagggcacttgccaatctgacgagggacggaaaacaaacggaagacataacgccgaactcaccgcattttcaaataatgccaaatgcttttctttttgaaatgctttttgaacatgaaaatgcctttccatttctttatttttcccgttcgaatgctttttctttgccgtccttt

SEQ ID NO: 89426 - DNA, 1113 bp, Heterodera glycines
gtttgagctcattgttcggccacttgtgctgtttcggctccaatggcgcttctcccgttgttcctcctccttttgcctttcttttgcccttccctttgctcctccgatttgccggaatgtccgtgggttaacccggagaaagagttgcagaaatgggcaaatttgccggtgtttccctccaaatgcaatgtgaccaaagacacgccagcggaggaaagcggagacgaaaaggaatattgggagaggggacagcacaggtattacttcaaccaatgggtgagcgacaaaatcggaccgacgagaaagttggacaaaatggcacatccgaagtgcgctgagattgacttctccaaagtgcactcaaaggtcactgtggtggtcatttaccacaatgaaatgctgtcagtgctcgtcagaatgatcaactcaatcttcaacgaatcgccggcacatcttttgactgaagtgattctctacgacgacttcacagagtccaatttggacattggcgactcactgaaggaatatgcgaaaattgcgaagggcaattgggaaagcaaaatccgcttcataaaggcctcggaacgacagggactgatcagggcaaaggttttggcatcgcgagaagcaaagggtgacgtgctcatcttcttggacagtcattgtgaagtgacgccgggctggctggagccattgttggcacccattgaagagaacccaaaaagggttattctgccggtgatcgatctgatcaatgccaacactttcaattatgaaaaggcgatggtggcaaagggaacgttcgactggggattgtactacaaatgggactatttcgactggtcgtacttcgacgtggaggaaaacaatgtgaagccgtacaaaacgccagcaatgagtggaggccttttggcggtgtctcgcgattatttccgtgagattggcgagtacgacatgggcatggaaatatggggcgcggagaatatcgagttctcaatccgcgtttggctgtgcggtggcgaggtgctggtcgcgccgtgttcccgcgtcggccacgtgtttcgcatgcgccgcccgtaccgcggcaagccgggcgtcgactcgagcctgtac

SEQ ID NO: 89427 - DNA, 821 bp, Heterodera glycines
ttgagaacgatttatggagaattgtttgtcgaatggaaatgatttatgccgttctggttcctttctactcgagatgaagccgtccactgatttggcttcgcttttcgttagccttcctgggcccgtgtcaaacgagggaaaagcggtggatgaaccactgggcattatgagggtggacaaccaatcgttggaaattgcttttgatgttcaggacattgctgaacaaacaggatgtcaatccgccgatttctcctcgtcaatgttttttcaaaaattcggtgctaaatttgtggacattatgctcgaaccgaccaccctttgttctccctcttgggccgatgctcaacaacggctgattatgtgcaaagtgcgggcggaggcggactgtgtgacgtttgcaccgaaaacaatcggacgattggaggaggaattggcccagcgctgtctcttgcgagaatacgtcgaacgcatcgaacacaaccgaactttccacgtgaactgtcgccgatgcggtcatttgattcactcgcacagcaaaggtgactttgtgtttggtgtgtttcccaacgacgattggctggagacggcaccccaaatggattatttctgtgccctttcttccgattgttgcggtgctcatttggaaatgtcgtcggtgcagcctcggaattctggcgagggtattttgggcttttcgcccgttttgtcggccgattcttcgcgccattggctgccgggcgagcggaaaattgtgttcagcaattcgttcattctcttccaaacactgataaattggcaaaggaagtgaccgaagtggcgac

SEQ ID NO: 89428 - DNA, 619 bp, Heterodera glycines
ctctcctcgaaagtcgcccggccgaaattggccggccttggcgcgagggatgtgttgcgaactgaagcacgactttgtttattcggcaatgaaatcgatgagcggacgacaccagtggaagcggggattgcctttgtgatcgcaaagagacgacgacaaacactcggattccctggggcggaaagaataattcggcagttggaaaagaaagacttcgtcaagaaaagggttggattggcatcaaccaaagcggggagggcagcgagaaataaaatgccaattgccaacccaacagatggttcttccgttggctttgtcaccagcggatgtccttcgccaactttagggaaaaacattggaatgggttatgtggacaaggcgtatgctaaagttgggaacattttgacggtcgaagctgggcgagacagaatgattgaggtcgaagtggtcaaaatgccatttgtgaaaagcgcctattatctgaagccgacttctgtgaacgaagacaaaaagaaatgattaacattaattattgtatttgcattttacattaaattatatatttccatttttaacattcacttattatatttgcatttctaattaatgtacaaataaa

SEQ ID NO: 89429 - DNA, 556 bp, Heterodera glycines
ggcaataattccgtgtttaatcgttctttgaaagtcacaaaatgtccttccaacaaattttctccacctccgccggtcttttcggcttagtttttattacgtcgacgctttcggccccagcaccaaaaccgcgaaaaccaacaacaacacccagcagaaaagcagccattcaatgcttatctaaatcccggctttgacaagcgatctttcgattccttcactggccccggcttcactgggctggacaagcgggccgctttcgacaccggcttcaccaattacgacaaacgcgcgttcgactcgttcactgggcctggcttcaccggacttgacaagcgatttgaaccgtttgatggctatggcttcaacggatttgagaagcgatcgttcgattcgttcacggggcccggcttcaccggaatggacagaaaatgaacataaaatggacggatggccaaattcaatcaaatcgttaaaatttgaaatttctatgtgaccccagctgttttctttgctgaattgcaccagttcgatattctcaatttatgcgccatta

SEQ ID NO: 89430 - DNA, 670 bp, Heterodera glycines
aaataacttcctgtttcccactttttgttaatttttcctttctgcactaatcactaataatcaaatgcattcccgagtccaccaatattcaacccgagaccaagttcgagtgcccaatgtgattgccttagtcggtttgcctgcgcgtggaaagacttatatttcacacaaactttgccgttatctgaattggattggcatcaaaacgagggcattcaatgtgggggagtaccgtcgccaggcatgcgatttcttccagcaaggagcatctgaattctttagcccaaataatcaaattgggacacagatcagagaccattgcgcaaaattggccatggaggacatgggcctttacctggagaaaaaggagggcgaagtggccgtttttgacgcgacgaacaccacacgccagcgacgcaaatggctggtcgactactgccagagggagcgcatcaacccaaagtttcgcatattttttgtggaaagtgtgtgcgatgacccggacataatcgcagcgaacatttcggaggtaaaagtcaattcgcccgattatcgcggaaaaatgacggaggaagaggcgaaggccgactttttgcgccgcatcgaaaattacaaattgcaatacgaaccgttggacaacgaaaaggacgaccacctttcgtacatcaaa

SEQ ID NO: 89431 - DNA, 659 bp, Heterodera glycines
cggcacgaggctcaatttatttgtttgtttgtgtttttattttctaaaaattacttagcaaattctcaccaacttccttcgtttcctggacaacaagaaccgttacagggacatcatcagcaacacgcacaacaacagcagcaacaacaacaagtaaatgctggagcggaacatcagcagcagcacgctcagtttggtggcgaacaagtcaaagacgaaggacacataaaggaacatctcgaggggaaagtcgaccctacggcacacatgacgccagaacaattgcaattccactatttcaatgcatgacttggacaaaaatggaaaattggatgggatcgaactaattaaggcgatcacccactttcaccaagaaaatgcaagtcctgggcatcaaggtgccagcattccgccgcctttacccaatgaaaatgaactggagaatatgatcgactcgattttgcgcgaagatgactttaacggggacggatacattgattacggagagtttttaaaggctcaaaagctgcgagaagaccaagccaagagccaacaacagcagcagcaaacgccgccgccgccgcagtaaaacgacggaaccattttaaagccggcaaaggggatgttgttgttcctcataatctcagtgctttctcacc

SEQ ID NO: 89432 - DNA, 679 bp, Heterodera glycines
  unsure (1)..(679): unsure at all n locations
tggaccccgacattttctctgtgcctcctaaattccctttgtccattgagcaaacaattgcccatcctttgcgtgtttctgctgctcatttgcaacccacaaaggacaaaatgatgacacgaagggcattccgtatgttccgagtgtgccacgatgctttacagggaccaattgtcgcccaatgatgtgaagccactacttcaaagctttgcgcttgaccatttccccgaaattcacatttcgaggcccgtaaaactcggccctggacaaaactctgccatttttctaactcttacaaataattcgtctggccctattgacatttcactgacggggaaaaggctcgaagaggaagaaaactgcgtaaataattctgatttctccctgcaaattgtcctctctaatcgcgactcgaccgacgaacagccaaaaatggcccatcagcaaagcgacagccgcatcattaacatcagtcagcacagagtgggcatttgcgcagaatgcgtcccttccgcggactcaattgaccactacgctctgttcagcctctcattcagccacacttcgtctgaccttccagagaagaagttgaaatccgacgtcaaagtttcgttgaaacagtcataattctaccgtttattgtgctattaataatttatataaaatatcgnttgaaaaa

SEQ ID NO: 89433 - DNA, 659 bp, Heterodera glycines
cacgggtacactgccggactgctcactttgccacttcctgcgcttgtctttctttgggggacgttggccagcccgcgcccctccaaattgttttggattgtcatgataatttacaccgaattcgaaatcgtggccaaattcgcttttcaattcggattttggccttggaatggggacacagtcggcaataacaaagtgtacaagacggagtatgtgttcggagttcagcgcattcagggctttgccggcaaggacgtcgccctgctcatcgcactctttttccaccgttatatgttgaggaaatttggactttggagagacgcaagttccgacagattgattaacgaaatgcccaaaaaacggatggacaatgggtcatcttcatcatcatctgctgaaaaaagtccacagaaatcgactcaatcgacggttgttccatcgtcgagtggagaaaactttgaatcggtggccaaggcacaacgggaacagaactccgacgacatcgaaaagggcataaagcgacaaaggccgtcttatccgcgggttcgtctcctcacagccattggacgtgatcatcaacgaaattccgaaccccgactatttgctcaaaatttgtttggacatttatttggtgcgcgaggcgggcgactttttgctgg

SEQ ID NO: 89434 - DNA, 631 bp, Heterodera glycines
cccactttgggtacaagccaagtgaaaagcgtgcgaaaagaactgaaaatgcacctcctaagaatgctcaaacatcccggcactttcactttgcacaacctccacccgaggatgaagcaattgctcatcgaattgggcgcttctcagtccgaaattcaacgagcgatgcccgccatcaacgaaattgatgaggcactgaaaaagcgtttggccgctgcgacggcggtggccgctggcacggcacggcaaacgacgacggaaccgaaacggcacaggaaagagccgcaacagcacgaacaggaggatttggacttgagggacatcaagcggattaagttggatgaggacgaatacgacgatggcatcatcgacctttacaaacagttggacaaccccgactccgccaacgctgccactcagaaggcaattgacatcaccaccaattttgtattggaacggctctctattcacgtggtcactaagttggtgatgatcagtctctacactttgcccgataaaatgcctgcggcttttgcctcgagttacactccaatcgacgaagcgggcagtgaggctcaaaaacgtcatttatcacgcatgatggcaatacaaatgactcgagaaggcgaag

SEQ ID NO: 89435 - DNA, 883 bp, Heterodera glycines
  unsure (1)..(883): unsure at all n locations
gggcttggctgttttcatcaatgatgaaaagttcatgactaaacttggccttacgactggcttcaagggaaagacattcatcgtccaaggattcggtaacgtcggcttgcactcccaccgttatttgcacagagatggtgcaatttgcatcggagtacaggaatatgactgcgcaatttacaatccgaatggaatccatcccaaagagcttgaggattggaaaatcgcaaatggttcaattcgcggctttcctggagccaaggctttcgagccattcaccgacttgattttcgagaagtgcgacatccttgtcccggccgcttgcgagaaagctattcacttggggaatgcacatcgtattcaagcaaaggtcattgctgaggcggccaacggaccgacaactccggctgctgatgcagttttgatgaacagaggcgactgtcttattgtgcccgacatgtttatcaacagcggaggtgttactgtgtcgtacttcgagtggcttaagaatctcaaccatgtctcttttgggcgtctgacttttaaatatgagcgtgactccaactaccatcttttggcgtcggtgcagaagtcactcgagcgcaccttcgaccgtgccgttccggtggatcccagcgaggagttccaattgcgcattgccggtgccagcgagaaggacattgtccattctggccttgagtacacgatgaaccgttcggccaagcaaatcattgccaccacgaacaaatacaacttgggcttagacttgcgtactgctgcctatgccaacgccatcgaaaagatttaccaaacctatgagacgtctggctttaccttcgcttaatcgattnttcgacgcattcgtaatgtagttaattctcgg

SEQ ID NO: 89436 - DNA, 663 bp, Heterodera glycines
ggagtgtttcttcgctttcgtgtcttcaaatattttttgttaaaaatgatgaacattcggtccaacggcaaaattcggtttgctgtcagttgctcgtcaaacatgaaccgcagcatggaggcacactttttcttgcaaaaacgtggcttcaacgtgcaaagctttggctccggcaattacgtgaaattgcccggcccaagtgtggacaagccgaacatttacgagttcgactccaccacatatgagcacattttgcaggacctgaagcagaaagacagcaaactctatacccaaaacggtctgctgaacatgttggacaggaatcgacggataaaaaaatgtccacaaaaattccaaaattacaaggagaaattttgtgtcatcatttgtctggaggaacgggtgtatgaccagattgtcgactttttgcagacgcgcgagtcgaccaccggcgaaagtgtgcacgtgatcaacttcgacatccaggacaaccacgaggaggccaccatcggcgcgctgcacgtggtggaactgtgcaaaaagttggaagactgcgaagatttggacaacgaaattgacgaggcgctgtccgagttcgaggcgaataatccggagcgcaatttgctgcacacaatttgcttctattgaccccccaccccccaa

SEQ ID NO: 89437 - DNA, 1011 bp, Heterodera glycines
tagagcacatttgcacaaaaacgggtgccacacaaattatttggtcaataaattgggaccagtctcacatgcgacgctgtttgatcaatgttcagtcgatgatggtcgaccaggaggccaaggagggcgttattcacgcattgaatgggcggaaactgattttcggaaggggttcccacatttgttgcgacgggtccctccagtttggcgccgatgacgccgcgggcgcttggcaaaaagtttgcattgagtcgggcgttcgtcgtttcgatgtgcgtaatttggaaacattgacggagagagtgcgcgaattgcttgggggagttcaattggttcgaagaccccacgaaaatgtgctcaataccattcagcaaattcaaattttcatcggaaaaatttgttcgcagcccaaaaacgaaagagaaatgctaagggcacttttgtcgccggaaatcttcgtggaaattgtgaattgttaccaggaactgatggtggtcgaaggctgtcttcagattccctgctgcgtggagtttccaccgctcagaaaatttgtggctgccaatgcgattcgttctcggcaacttcggcaggaaaatttggaacggaagtggcatttggagttggcccgtgatgcatgtgtctcaaaattggcactgtccgaattgtcttgggacgcgagcctttccttcaaaactgtgagggtttgcatggaaaaactacgacggattggcccggaaaagtctgcccaatttgctcgtcttagcattcacctttcgaacagtccgaaattatttgtgatgttcaacggtcgcctctcagtgcctatcgattgggtcaaagaactttaaatgcaactgataattagttaattagccaataatacacttctaaattttccactcttttccattcgcctttatttgactcaatttgcaaaaatattacgcaaactgtgaaattaaaacaaattaccaaaattaatgcatttcaatggccatgccggtgattctc

SEQ ID NO: 89438 - DNA, 632 bp, Heterodera glycines
aaataaggcatataattcccctcccttttaattagtcttattattcatccgtttgtgatttatttcttggttatgtcggtccatagtgaattggctcggtccaaaattttgacctgcagaaatcgtttggcggtgcgtcggttggctctgctcgaacaatacttcgagctgaacaaatccgttcaatgtcttcttgacgattatcggctcaacataatgaaagcaaaaagcacttcccccggcttcgtcgttgggtcagtgaccgcccttttgtcctctcagagggaactgagcccgacaatttgggttgaaactgcgaaaagcgattgcggttctttcctcgcattgaattggccttcaaaatatgcgggggaaaaaggaaatgatttgcgaaggaggggaggagaaacattcgatggaaaaggggcggaagaagcggaagggaacggagggcactcaacggatttccacccctttggcgttttggagagtcaaagcgtaaaagcggcgaggaaaaacattcaaaaactgcttctgattctttgcgacttggcgaacattcaaagacaaatcctttcgctggggaaagaggcggacgaaacgaaattggccgagttttagcgagcttttat

SEQ ID NO: 89439 - DNA, 624 bp, Heterodera glycines
ggaaaatgccaaatttgctccaagttctgttcggaccggttgtttaccgcccatatcaacccaacctattggaatcgggcggtaacaagctgttcagcatcggtgctggtgcctacaacacttgtgttgtgctgtcgcccattctcgtgccgtacattgccttttcttggacccactcccatcacttttcttttttgcgcttcgttttggtgttttatgccattgccttttccttccgtacgattggtcggctgacaaatgttgactacgtccgttttatcaaattgctcggaaccgtgcgcaaatctccgcagaatgtcactttgctcgacacactcaaagactacgattttcaagtgtacgctgcgcccgctgattttaaagcatcgccaggccgaacggccaaatggcaccctccgcgtgaacgccttccggacttgaatcctccgcttaattttctgcgtcaggctatcgcgtggacggccgctaacacttttggacgtcgaatgcttttccctggttcgatggcacttttcaattcaatgttgaacagccaactggtcgatggacggcgcaaattgttgacagaaatgggtgggaaacggaaagtcattgagacggagg

SEQ ID NO: 89440 - DNA, 635 bp, Heterodera glycines
caattaagcaaaacattcactttccatcctcccaaatttcccaaaaatttctcaaattctaaatttgaccctttctttctttttctttgaatcggccgaatgtcgtcgcttgagcaattggcttcacctcacaacgatttttacgagagtctcttcagacagctgaatccctccggaagtgccgaagtcgatgccgcgtctatcgctgcttttttgaaaacggcacacggcgttagcgtcgcacaactctctcagatttgggaaattgcgagcgaattgagcggatacaaaaatcgaagcgcactgaacaaaattggcgtgtatatatgtttaaagttggtcgcgggcattcagcatggtaattaggcctaattaggataggggcgtggggcgaagagaggttccaaatttgtctttcattccccgtgtgtccaattgcttttccccactctgatcggtactgtctttctttcaccgtgaaggcttccctctcgcgccctccgatctcgacgtgccgttgtccgccgtgccccaatttgagtgtctgtccttccccacgccgcctcctctgccccccgtgccgcctccgccctccgcggactcaaaaagtccgtcagtctctgccgaattgggca

SEQ ID NO: 89441 - DNA, 701 bp, Heterodera glycines
ccaagtttgagcattaagattttttgattcaatgttggtcttacgcccacccgatggcgaacagtcagtgcgtcaacttatgttgctcaacatctcctgtcttccaatcaattatgggaccaatccgcgctcgactcattacaaaagggtgacacgaaatcgactagcggaaaaaggccctgacaatggggacgaatgcgacacgagcttttggaccatgatggcctatcgtcaccatttcaatgatcaaaatggcactgattgtgaggaagacgcccccatgcttgtgggtgccatcaccgtgtccaaccgaaacagcaactgttcctgttgcagttccaataaaaccgatggggtcgtccagccacaaaaacaaatgttttctgtccaaattcagacattggctgttttgcccacttttcgtcgtcatggcgttgccactcgtctgttgaattcgctgataaaccaatgtgaaaaatgggctaacgtcgaaaatatctttttgcactgtcagacgacaaatgaagcggcactttgtctatatcgggcccatggttttgaggtcgttcagcaaattcatggccattatcagtgcagggcaattgacggcgaatcggcggatgcttttctactcgagcgacggtttaccaatgaaaatgatgaggagagaaaagttcgacaaaatgcggcatttcactaga

SEQ ID NO: 89442 - DNA, 622 bp, Heterodera glycines
aataaagcgcgtttaaatggctgaaactttttctcttttatctccgactcatctgctgaatgaaacaagcctgaaccttagatgcccatattgcccaaagaaattcctaaagaatactgaagccatttctcacatggatccgtgtctgaagagtcggccttacccttgtacgaactgttctaggcggtttaaatctgcgcaaaatttgagccaacatgagaggattcacacaaatgttcgaccttataattgccagtattgtgagaagaattttactcagaagtcacatttacaacagcacgaacgcatacacacagcaattgtaaaacgtctcataaattattgtcctgcttcgactacgttttgggtgaaccggccttctcatgccgttactgtggcgagacgttcaatatttattcatccaaaatacagcacgaaaaaagtatttgtggccttcacgaggccttggacaaacagaaagaaaattcgagtgaaaagaacggtttcgcaaagattgcaccacttcctcaaccgagcaaaacgacgccgaccgaacaatcatcgtcacggggaccagcagtaagaccgactgtgagaacagcacacaacggcactattcacg

SEQ ID NO: 89443 - DNA, 577 bp, Heterodera glycines
atttttaaaagacgcacaaaatgaacgccaatctgttgagttcgaccgcccttttgctgctcttttccgtcccgttcatttgcgcctccataattccacaacagcacaccggcattcagtcatatcgggtgaaggggcgtttgctgtgcggcgatttggcggcggaaaatgtccgagtgaaattgattgacgacgacttcggcccggacccggacgacgacttggacacggggtacaccgacacgcagggcaatttcgacctgtccggcgacaccaccgaactgacaacgattgacccgcacctgaaaatctaccacgactgcaacgacgcgctcattccgtgccagcgtcgttggaaatttgagctgcccaaccattacatcacgagcggaaagcagccgaacaaagcgttggacatcggcacgtggaatttggaggcaaaaatgccgggcgaaagccacgattgtattcactgagagagtggggagaaagagagggaggagagaaagaaagagagggaagagagagtgccggaaaagcatcgaataacggacaaagaagcatatgcaaataaaat

SEQ ID NO: 89444 - DNA, 663 bp, Heterodera glycines
gtttgagacaggcaaacacaaagtaaataaatgacggccacaaccattgcccaggatccgactccctcccctcggcgtgtttttctccgtgacctttgttccctcttttgttgcccgccgctcccttcggctattgttgccaaattggcttttatgccaccggaaccgagttaccgaattttgaccaacgactcgggacggacgacgttggagctgatcgacggcaggacagagtggccacatgggcatgatgagctgaacaatgtcgaggtgttcttcacccgtactcaacgtcgcaataaaatcgcctgtatgttcgtccgacccttcgaactttcgcatttcacccttttgttttctcacggaaatgcggtggatattggccaaatgtgtaacttttaccttgggctcggctgtcgactgcggtgcaatgtgttcagctacgattactcgggttatggtcagtctacaggtcgtccttcggaaaaaaatctctacgcggatatcgctgcggcacttaaatctctcgaaagccgttatcaaattccaccggagcaggtcattttgtacggtcagagcattggaactgtgccttccatcgacttggccagttgtaatccgcgcatcgctggcctcgtcctccattctccacttctttccggc

SEQ ID NO: 89445 - DNA, 1203 bp, Heterodera glycines
gtttgagctctcatccgacacaatcatccttcttttgccaataattccaccactttcctaatggtttccacgtccccatccccaccaattgccatggcccaacatgcgccactttctcatcgccaacatcgcgccccgttggccaaagtgttggcctcggaaaaaagtctctatctatcgatgaacgcgataaaaacaccaaaaaaggcgaaaatgcagaaagttgccccaattcgagcccaaatcggcgaccattccgaatggattccgttgcgcgcctcgaaacattcgcgccaaacggtgaatccgatccgtcgcttcaccgattcgctgtccgttgaaccaaatccgaacaaaactccaatccaactgaaccttggcgaccccactctgaccggttgcttgccgccctcggagtccgtcgtggccgctcttcgggaggcgatcgattcgcatcgcttcgacggctatggcccggcgattggaacgcaaagtgccagagaagcaatcgcagagcatttttcttgctccgaggcgccgatttcggccaatgacgttgtgttggccagcggatgctcgcatgcgcttgaaatggccattgtggcgatcgccgacccgggccacaatattttggtgccccgtcccggcttcccactttactccacgctatgccagcccaatggcatcaagacaagacagtaccggctcaagatggaggaggacgggctgatcgacctgcaacaccttgaaagtctgatcgatgaccgcacccgtgccatcgtcgtcaacaatccgtccaatccgaccggcatcgttttccctcgcgaacatttggaacagattctgaagctggcccaaaaatacaaactgccgatcattgccgacgaaatttacggcgatttgacctacgcggaaggggccaaattccacccattggccacgctgtccccgcgagtacctatcattacctgcgacggcattggcaagcgctatttggtgcccggctggcgactcggctggctcatcatgcacaatcgcttcggcgtgctttccgacgtcaaagccggcattgtgtcactgagtcagaagattgtcgggccatgtgcactgatccaaggggcgttgccacgaatactgcgcgacacgccgcagtcgttcttcgacaacaccaaagcattgctagcaaaaaattctgaaattgtc

SEQ ID NO: 89446 - DNA, 641 bp, Heterodera glycines
tagacgggaaagttgaaagagacgcggatgggaaggaagttcgataccccgttattctaagtgctaaagagaagacaattgcgcgaagagttgtgttggcatttgggcaaagtgtctgcggattcgatttgctaagagccaacggctgttcgtatgtgtgcgatgttaatggattttcgtttgtaaaaacgtcgaccaaatattacgaagataccgctaaaatactcggcaataccattttgaggcgtttagcctcttcgctgagcattccttggcacattcctttccaagatgacgacccgccattagtgtcgacgcccagtggcaaaataatggaacttcgctgtgtgttggctgttattcggcatggagacagaacccccaaacagaaaatgaaagttgcggtgaaggatgagcggttttggaacatgttcaaaaagtatgatggaccgagaaagcgcgaattgaagctaaaaaagccgacgcaactgatggaaattctcgaaattgtgagacatttgcttcaagaaagtctggagaaacggcaaacactgctcacaattagcagcaaaaatatggcgcgttttcttaaagacaaacgcgacgatttggccccagcagaggaaacttcggtgatgaac

SEQ ID NO: 89447 - DNA, 450 bp, Heterodera glycines
  unsure (1)..(450): unsure at all n locations
ctttttcttcttttcccttcctttaaccaggccaacaatgccgatgagtccaccgccgcctgttgccacaaatgctacgtcgcgttcagagattgtttccgcgagtgtttggacaatcggtcggagaatttggtgtgcgtgccgaactgcaaaattgccttgggaaattgctcgaccgacaaatgcggattgatctgtccccgacccaaaaatccccaattcagcccaccggaaaagtacgacagattctattgaaatcgccaaaagagcagaaagagagagaaaaaggaaggagagagcgagagagagaggacgaaagaatgagagagaaaagaagagacagacagacaaagggaaaagacattatgccacaaaaaatataatttgaatgataaatgggatatgtggttanaaaaaaaaaaaaaaaaaaaaaaaaaaaaaaaaaaaaaa

SEQ ID NO: 89448 - DNA, 764 bp, Heterodera glycines
gtttgagaaaaatttgtcaaaaaatggcacgaatgcacaaaattccgctggaccctgactcggcaaatgtgccaatgtttgttgctaaatgcgagcaatggttggccaatttgccaacacactttgaacaggtcgaaatgcagcaaaacttcgatcaaaattttaatggctcttctttgtctgagcagttaactgagctaattaaagcattggaaacttctgaatcaccgttggtggtgtttgcgcacaacgatttgctgctctttaacatcctttttgacgaggaaggcactggcgatgtccatttcattgactacgaatatgcgggccaaaactaccaactgttcgacattgcaaatcacttttgcgagtacgcaggtgttgatgagtgtcccgattatggaatgaattcggccagtgaagacgaacgtcggcactttctgcgccgttatttcgtctattttggccaaccaattgaggaagagtgtgaaatggacaaaatgttgtgcaaaattcggcactttgaagcggcagcccatttttctggactctgtgggccatccatcaggcagcaaaatccgcgattcaatttgattacatgcgttacgcgatcacccgccatcgttactgcacccggcttatgacctcatcaggcattgctaaaaataattagccacaaaagcacaacattattgatttttggttttcgttatctgtactttatcaactctcttaataaaaggtgacgatcaacgcgaaaaaaa

SEQ ID NO: 89449 - DNA, 628 bp, Heterodera glycines
ccgcgcctcaggcttctcctcatgtggcgttcgattatggggcgacaaagcttgctgcagccgcaccgtccagctacggctcggcctccgaggcccagcctgccccagcaggcgacgaaaatggcactaaagaggtgtcgcaacgaaaaaatgcaacacccgcgcaaacggcacagcacaataatgcaccaccacaacaaccggcacggcaaaccactgcagcacaaaatgtgctggagcaacggcgtgcaaaacggcgttgtcccagggaagccgggtttgtgcaagctgatgcagctagcggaggaggcatgcatagcccagcagcagcagcacgcatttcgcacagggttattggtcatactgcaccaagcactgaatatgcgtccggtccacggccagcgggaactgatgcaccacgagtgtatgcagcgcaaccctacgctgcaccgacgcgatcaatttcatctgtcagcaaatcgaggggctcaattggtcccgaatatgagcaaacggcggccgaacaatcgccgccatcagtgaaaccgccgagtacacgcacaaaagcgcagcctgccggatcggcaccgtgcaacacgcagcggtgcaacggaagaggcggaccagg

SEQ ID NO: 89450 - DNA, 675 bp, Heterodera glycines
ggataaaatgccaatttaaaaaaaaaatagattatggatgattctcatcaggataatggacgaaagcagcaaaacacttttttgactccaaaattctccattttgctgccgacgtacaacgaagctgaaaaccttcccatttgtctctggctgataatcaaatatttaaaggggctgagttatgaagtgattatcatcgatgacaacagtccagacggaacacaggaagtcgcaaaaagtttgcagaaagaatttggagcgggaagaattaaattgttgacgagggaaggcaaactcggattgggaagtgcctatgtttttgggcttaaacaagcacagggcgaatttgtcattttgatggacgccgatttgtcccaccatccgaggcatattccggagatggtcactcttcaggagaagcatggctatgacattgtcacgggaacgcgttatgcgatgggcggcggagtgtccgggtgggactttagacggaaaatgatcagccgaggagccaactttttggcacaattccttcttcagccgggcgtctccgacttgactggttcgttccgtctctatcgaaagtccgttttgtcaaaactcgtcgtcgaatcagtgtcaaagggatacgtttttcagatggaaatgatgtttcgggcaaaaaagggcggcttt

SEQ ID NO: 89451 - DNA, 866 bp, Heterodera glycines
atttcaattttgccttcgctttaaaaataaaaacaaaaaaaaaccttttctcttttggctttacattaaatttctccgcgtttttggcccctgatcatttctggggcatttctcaaccgcttcatcgagcgtttcttccacccctctgctcattatcacacaaagggcagcggaccaagttgaaaatccattgcttaaataatcgtgacttttttttgacgaattgggatgagattttcttgctttctttgtgtgtcctggttgatactttgctcggaaatttaacggcctttaaattttgaacaaatttactcaggccatcagatttgaaaattctttttgaaagagacagtgccttaccaaacattaaaaaaagaaaccaaaaagtttctatttcataacccatttcatttttattttcattttagctccgtcgcatcgccgccccgggtgagcatttgcgcatttgtgtcgactcgggcggctgttccggtttcgagtacaaattgacgctcgacaagcgattggacgaggcggaggacgaagtgattaaagcgtcggagggagccatcgttgttgtggacaagttatcgcttcaatttttgcggggctcaaagcttgattttgctgaggatttgatgcggtccgcgttcagaataacggacaatcccctggccactttgggctgctcatgtggtgcaagttttgcaccgaaaaatcaaatcgaataagcaaaggacggaaacggggcttcgtttttatggtcattgcttttttacttttattattattttatttgtttcaatgtttttgtgtgcatttcactgccggtgtatttgtagggaataaaattcggatttaaaaaa

SEQ ID NO: 89452 - DNA, 653 bp, Heterodera glycines
gcacggcggtggcaaaaagtgccgcggaaatggtgttggcggatgacaatttctcaacaattgtggcggtggaggaaggccgtgccatttacaacaacatgaaacaattcattcgctatctcatctcgtcaaacattggtgaagtcgtctccattttccttgtcgctgcgcttggcattcccgaagctctgatccccgtccaattgctttgggtcaatttggtcaccgatggtcttcccgccactgcgctcggcttcaatccgcccgacttggacattatggaccgactgccgcgttccgcctccgaatcgctcatttccaaatggcttttcttcagatacatggcaatcggaacttacgtcggcgtcgccactgttgccgcttcgatgtggtggtttttgatttacgaggacggcccgcaagtgtcttattaccagctgacccattggatgcgctgtgaaattgagccggagaactttgaggatttggactgtgccgtttttgttgacaaccatccaaacgcaatggcattgtcagtgctcgtcacaatcgaaatgctgaatgcgatcaacagtttgtccgagaatcagtccattctgaagatgcccccgtggacaaacatttggctttgcgcgggcatcgctctgttcatg

SEQ ID NO: 89453 - DNA, 608 bp, Heterodera glycines
caattagtcctctcaacgtgtttcgtcatttatccttgttcccccaaaatgcggcttcgtcttcggctttccccgtggtcctttcgcggtgccgtccccggagtcgtttgggtcggtgccgacgaggttttctccgtgtccgatgaccacagtctctgccgctggaccgtctccaaaacggaggccaattttctgtctaatgcgttgaaagactccattttccccacttctctcagtgccgcgtttcccttcgccgccgggcgttctccattttccggaggactgtcaattcgctcgggcaaaaagcaacagcgtacttccgccattcactcgtctcagtcagcagggaatgagctcattctgatgactgcctctgatggcaaaatccatctgatcactccggcggggaaaattgaacgaacaatcgaagcccaccaaggggcggccattttggcccggtggagcacttccgagcccggaggggcgggcggatttgtgagctgcggagaggacggactgttgaagatgtggtcgcgaaacggaatgttacggtcgatgttggcacaacttgggaagccaatttatgcgatggattggaatgggaacgg

SEQ ID NO: 89454 - DNA, 961 bp, Heterodera glycines
ttgagttcctattttggtacatttactgatcaaaaggcaatgtctgaggaaaaatttgaagatgttgatggctctattattgcacagaagcgacaaaatactgaaaacggcggcccggcctcgaagaaggcgaatgtgattgagtccgacaacctccaaatcaaagttttgatcccttcggcggcggtcggcgcactgatcggaaaaggcggcgaaacgatgcgaaatttaaagaacgactcgggctgccgtgtgcaaatgtcaaagaacttggaagtgtaccatgggacatcggagcgcatttgtttggtcaaggggaaacttgctgcgacaatgattgtaatgggcgcaattttggaaaaaatccaggaaaaaattgacgccaaccacgcttctgaccatttcgacctgaagggattggaccggaccaaagagatgaaatttgttgtgccaaacacttccgccggaatggtcataggaaagaacggcacgagcatcaaagagattcgggacacaacaacggcaaacatccaaatctaccccaaggcgggctctgaggaggccaaaatttcggccgagagagtgattacggttggccacgaatcgaacgaagttttactgagcgcagtgcaacgcgttctggaaaaagtggtggctgatccgatgcatgcgcagccagtcccagcggagagtcagttggcttcgggctttgaattcggcggatcgcggctcagtgccgggagcaatcagtttgggggaatttcaaacatgggcaacaattcggaagcaatgcatgggaaatcatttggagggccttccttcaaattcaatcccctccaggggacgggaaacaacgagctgttggcttttctcgacaatttgcagtccactttgcgctcttccggattcaacgaccaatcggtgtcagaggtgatgcaggcgatgcaagtgctggccaaat

SEQ ID NO: 89455 - DNA, 601 bp, Heterodera glycines
agagaacaatatatttttacacaaaaatgttttcattcggtaaccaaaatggcatatgtttaaaccgatttaaaactcggtttaactgaattcttccaaaagccgaaataagtcaactgagatttcggttaaggtattttttgataccattatcgttaagattgaccgtcatttgacaaagttacggaataaaatggggatgtcaatttctagattaaaaaggtaaaaaatcggtcggggtcgttttcgcgtggccattttcgcgcggttgcatataagcgaattttttactttttttatagtttggaaaattttttcactcccgttttacttcgggtgcttaattcaatatatatttaagtgaattttataaactaaattaagctgacaaattattatacagtctaataattttttcacggtctaatgctctgctggtattagtgtaaactcaccatcccaaattcccatcctccgttcttcaagtctatccgagtatatataaagccgaccaaatccctttccagtcatattcttcatcccattaattccatccacatttttttgataattttttttcagttcacttcttcaattttct

SEQ ID NO: 89456 - DNA, 683 bp, Heterodera glycines
aggttttggtgtctgtgacccttcgccaactttgtacgatgtcacggtcacattatgacaagattatgttcccgccaatttctgcccatggaatgcttacattggacaggagtaagttcaccaagtctatccaaattcccttcgtctccgtccctgtcaaatgcatcgacagagtccgtttgctctccgccgttcgtgcggtttgtcttgagagaatgccccgcctaaaaccatggcatacaccgccaaattgcgacggatcagtcgaaaggcttttgctgtttgaccccgacaaattcggagaagaagcgacgaacgacttggctcagcaactttcccaaacgatggattcgtcgccagaattcggcaaaatggcatatacgatggaatacgaagattgggacttgagacggtgcattcagtcggttctgccggatggcttcgaattcagcggattcgaacagtgcggacacatcatccacttgaacctcagagaacacgtgctgccgtttcgctttacaattggccacattctcttggataagattccatctgccagaacggtgcttaacaaagtcgacacacttacgcacgaattccgagtgatggacgccgaattggtcgcccgggaagcggagtttatgaccgaagtggtggagcacggactgcgttaccgattggat

SEQ ID NO: 89457 - DNA, 629 bp, Heterodera glycines
aaggcgtcaaatcctctgaactcgcggcatatttatttgaccaattgcgaaacttatcaaagttggaaacgccgatcactgatcagacagtggacgtaattgtcaaaacactcaagcttgttggccgttttctcgagaatgatcgtgggcctcaagcaatggctgagtttcttgctttgtttgaccggtccattcaggaaacgacgactgaccaattgagcgagccggcgagggaaaaagtgcgatgtttgttcaatttgcgcgagaacaaatggggcgttgtcgcggaaccaaatgtcggcgatggtccgctgaccactgcttcgacttcggtgggtatcattggcccggacgatgttccgttaacggaggacgaatgcgcctttatggaagaaaacttggacaattttgtcgacaattctcccggcgaatctcaatgcttgaatgcatttgacgaggacaacgttgaggacgacttcgagaagttcctacaggcaacggccattcgtgctgctgagaaggcgttggaaaaggtgtccattgacgaggatgacgacgcctcttccattgtgtcatcgcacaaattctcgacaagcaaatgacgaaaagtggagaaagacatcggaaca

SEQ ID NO: 89458 - DNA, 668 bp, Heterodera glycines
cttgggcaagcaaatgttgaattgttttctggacaatgactcaccatttaaattttgatcaatttctccaagttcatgagccccaattgttggcttctggtttgcctgaactgttctggaaatccttatacaaaaagatatccaatcagattttcgatgcaggaaaatattttgaggttatcatcgaagaaagcgaaccgaatgaaacaatttcatcgcaagtcaaagctatgagcgaattgaaaatggacgacccggaaaatgtttttctcattgaccatgcgtggactttccgtccgaatacagcacgttttgcacttcaacaagttgacggactgaggaagagattattggacatgttcaatatcaaagcttggtatgccaacaaagaatgtttaaaggacccttttgctgatgatagcgcagaccaacagcaaaagtgtgctgatgccgtagccactcattccgctgattgtgaggactcggaagtcgcatcgccatgcggccaaaatgtcgaagaaatatgggaaaagcattgcgaaatggacgacctaataattgacgaaatgtggaaatatgcaatgacatattcaattcgaatgctcaatttggaaatggacgaacaccaaattcctgtttggtatgtcatggacgaattcggtgttcga

SEQ ID NO: 89459 - DNA, 643 bp, Heterodera glycines
caactgaatgcacttgtttccaaattgtcactaacgccgaataagatgaacgaaagggcagaatttactcagcaacttaaaacattcgttcaaccttatttcgtttctcctctccaaattcgagtgttcggctcgtcttccactggccttggctttgtcaattcggacttggatcttaatttggtatttgatgaggatttaattaattgcggcgattttgccagaattccctccgtttcatcacccgaaaatggcccgacattggatgacatcgaccaacaactgactcctgaaaagctcaaacgaagcccgattgacagagatactttcaaccgacttcccaaaatagatcgtgttcgtctgcttaatcgtcttattaacgagtttcgcaaggagaaagggtcggtcactgcgcatgttcccattcccgacgcgcgtactcccgtcgttcgttttttgactcgcctctcatcggcacgcgtttcttgtgaactctctgtgcagaatttgttaggagaatgcaaagccaatctgattcgtgatttggtccgagctgaaaccactggtaccctttggcgtctcattttctttttcaaactttgggccctctgcaacggacttttctcgcctgaccctcaattgg

SEQ ID NO: 89460 - DNA, 804 bp, Heterodera glycines
atttactatcaccatgaatcctgctgatggataaagaaaataaaaagccaaaaggtacaaaaagatccaaaaatcccgaagaaacttcgaaacaaagagaggaaaaccaaaacaaggaaaatgacgatgaatttattcatcccccaaggagacgttcagcgaggttaattgcaatttcaaaacctgctttatcgagtgatttatcggcttcggctgaagattttgttcatggaaaagggacgaaaaccgcaaaatcggaggtgtttggaacggatgctcttttcggtgtctcttcggcttctttcacttcgcctttcaattcttatttgacttcatcagttgaacccatcaaattgtcttcagatgaagcgactgtttcttctaatcggtcccttacaaagagacttaacgcaacaaatattcaaaatgcccaatcgctcggtgaaggaacttcgaaggcgactttacctctttcttcggatgacgatggcgaggaggacgaatggggggcaatggaattattacacacggacaaaacggagaaaaaagtaattgaggtcgaacttgatgaaaaacactcagatttgttcaaactgcagataaatccgttgaaagagagagacgcaaaagaagcggaggaaagggcaaaatgggagcacgaaattgagctggaaatcatgcggaagcgccgtgaatttcaggaaggtcttcatcgctttcatttcctcactttcgttgcccatcttcgctttatggcccattcccttctccgcaattcttccactcttttgacgccattcactg

SEQ ID NO: 89461 - DNA, 665 bp, Heterodera glycines
gagcaattcattttcgattgatgacaaatcttaataaaaaaattttagaatttaagtttaaaataattgtataaaaaccgtttttcatttctgtttctccgcttcctttgtctccaaattccaataatttgatattataaatttgaaagaataaaaataaatgacttacaaggagaagcccgtgatcaatgccgagacgaccgaaaaccttgaacaggaacgggggcacatcacccgtatcctgtcaaggtatggaggtcgagctggacgcgtgggctgccatcatgaacggactgcaaggcccagcgagagaggcggaggaagcgcttttcactgcctttattcgagatgaccggcacttgacggaatggttggaagatgcgcgagaaatgctggctcacatagcagcagaactcgcagatgagcccaaccagccaatcgcggcgggaggacagcaaccagctgttgctgtgaatccacccgtgccagccgtgccattcgtcaacaatgccgcatttctcggcggtgccaatgttcaacagccagctgctgttgccaaccatgccaatcagccaccattggtgccaaataatgcccaaatcgtgccaaacccgcgttttggcagagtttcgagagtgccgtcgaccgtgccgcccttgagcccg

SEQ ID NO: 89462 - DNA, 648 bp, Heterodera glycines
ctctgatcaactcatctgcctctctagccctttgatcagcccatttatccctcttccatgccaatttcggctctgatcagctcatttttaggcctttgatcagcccatttagccccattcggagtcaatttggccctgatcggttattggcattaccctatttcctttgcaatttcacccttggatcaatacgattcgtcactttcgtgctaattccaggtctgattacttcatttgctttcttcatttccgttccaatttcaccctttgatcagtccaatcaaccttccatgccgatttcggctctgattaaatcattttgttagccctttgatcagcccattccgatttcggttcagaacagctctttttcatcccctttcccaacccatttcgcccttttcgcgccaatttttcgggaccgatttcattaacttccgcttcccgcatcttaggaaatggcaatcgtgtatactgaattcactcgggaaggtatagatacgtggttgttttatgctaaattttgaaattcaagaaattgacgaagctattgaggaagcagttttgaaagtgaaaggaggaactgagagagatggcatgcgcgccgccttggaaacgattgtgagcagcccccatctgctgttgaac

SEQ ID NO: 89463 - DNA, 650 bp, Heterodera glycines
agaatgcccaccggcagcagagtgccgttaattgtggaaagacgaagtgatgagacggaggaggacacgtggacagtttatccgacggcgggcatttgcatcaaattcaaagaggcccatttctccgccgcttcgtccgtctccggcccctccacctccaaattcttcatcaatttggcccattgcactgagctgccgccgccccatcggcacgccgaattggacgaggacaaagtggcacaaatggtggaagaggacccggatgcttttcgcattccaatttgtgtgggcgaattggaccgatcggcggaggaccgcagcggcgaagcggtggcaaaagtcgatgtgctggtcaattcggagttcttccacaaacgcatcagtcaatccgagtttttccgtcagctgacacttcgaatcgtttgccaggcaattgagattaaacattcgcttcgtgtggacattggcaagcaggtcattttgcgcaacaaaaaatgcattggcgaactgtgcgcccaaagaattcggaagagaccgatgacgacgaaagaagcaaacggagaagggaaagtgaaagaaacaacagacacaaaagaggaggaggacgaagaggaaaggacagaagtcgatcaaatgttggacattgagga

SEQ ID NO: 89464 - DNA, 644 bp, Heterodera glycines
catcgagtcttcgtctaggaagtcaacgaagtcatgccgtaaatgcagtccatccaaaacgagaaaagccgaactatgagagaccaaaaagccaacaaagcacaaagacggagcaacaaaaatgctggaggtgcggtcaaacgaaccatcaccacgcagcttgcccgcagaaaggctacaaatgccgaaagtgctcacaaaacggacacatcgagttgcgttgtgaagcagtgcaggaatggcgcaaaaagaacgccaaaagttggctcaagaaaaatgttggcaatgtccacatagtgacagtcaacattggcaccacagcaaaaccgacaacaaagtcaacattgctaagggtcaaggtctcctttcaaggcaaagtcatcgaatttgtcctcgacagcggtgcagaagttaatgtcataaacgaaatgacatacaaattgatcggtagccctaaaatcaaagcctgtaaagaacaagcagtgctttacgatggaagcacaagaagcttcatcggaaaagggaccggcacattcgaattcaacggagtgaatgttgaacaagaattttatgtggccggcaaagattccctaaatttgctgtctattcaaacaatggacgcatttgggctgctcgacgaattg

SEQ ID NO: 89465 - DNA, 629 bp, Heterodera glycines
tttttcaaaatcggccaaaaaaaaatttttaaaaattgggccttgtaaatttttttttttgtaaagaaaagaattgctggcgaaaatttagcggtcaaggcacctccaaaaagttcagaaaagacctttattttgttgatagagagattcattcgatatgtatattcctgatcttgacagttttgaaaaaaccctggcatcgagactcccgatacatcactgattggctcaaaaatcataatcacatctgactaagaaaatccccaatcttcgttttgtaccaaaattagtaagcaaaaaatgaccaaacccattcaaaaaaaaaaattttttttttggctctattccagttttatgctccaatcaatgccattctcagtttcttaggcatggccatcagtttttttatttgttcagtgcctacattcttggtatcaagccagcaaaacttggtattaagaaaaaaatattagaaacatgaaataagaataattttgtctattgccgttagcccaaaattaaattacaaaaaaacttctatagaattcaatctttcatttgatatcaaaatataggcattgattggccaaataagaaaaaagtatggcctaagaaactgaagatagtca

SEQ ID NO: 89466 - DNA, 990 bp, Heterodera glycines
tgagatttcgttaatttatttctgtcactttccgtttcttattctctcgaattgaaaatggttctgttgggtgccattgaccaggggacttccagcagtcgttttctcgtcttcgattccgaaaatggcaatttggtcgccggccaccaattggaagtgcagcagcaattcccgaatcccggctttgtggagatgtgtcccgagcaaatatttaagacgacagtccgatgcatcaaaagcacttgcgaggaactgaacagacgcggcattgacccgaagaaagaaatcaaagccatcggcataaccaatcaaagggaaacaacaatcgtttgggaccgagagacggggtgccatctgagtaatgccatcgtttggttggactgccgaacgcatgagctttgtgacgaatacattcagaggacgtcgacacgggacaaaaaccatttcaaagcgaagaccggcctgccaattcacccgtacttttgtgccctcaaacttcgttggcttctcaacaatgtgccagaagtaaagaaatcgctacaaaatgggactttgatgttcggtacggtcgactcgtggcttatgtggaaattaattgggatccatgccaccgacgtgaccaacgcgagtcgcactttgttgatggatttgcagaaccgcaaatggtctacagaaatgtgcaccttttttgacattccaatggaaattctgccggaaattcgaagttccgcagagatttacgggcaccttcagaaaggacctttggaaggcattcctttggccggctgtctcggagatcagcaaagtgctctgcttggtcacggctgtttgcaggcgggcgaagcgaaaaacacttacggcaccggcacttttatgctttgcaacacaggacaaagggcgtacatctccaagaacggacttttgaccacaatctcttaccaattcggccaagcgtcgcccgtttgctacgccctcgaagggtcggggtcc

SEQ ID NO: 89467 - DNA, 1114 bp, Heterodera glycines
ctaatttgtcatattgtacttttccgtaactgagcttctttaatgaccgccgcagcggattcccaagcttttctgagagacttaactaatttctgcttgacattgtcaacttcactggtgttttcgggttcagtgttgggattcagaatttgctcaatgcaaaatattgggtctcgcccaaagaccaaaaagaaaggtgtctcctttgtggaagagtgaattgatgtgttatagcagaagttggcacattcaagaaattcatcaaaatctggttcttcacttgaaatatatttcgcaagtatattgtgaaatgtcctaaaagatcgctcaactactgcattgccttggctccaatggggaatagcataacatttattaatatagagaagcgaacagaaggacttaaaaaaatcagaggtgaatgccgtggcattatcagttaaaagactcgtacagcctccaaactttaaataacagtgtttaaaggttttgctggttatccattgccttttaagcgccccctcgggatgggaggagccctatcggagagataaaatggggggggggaagggtaaaggccatttccggtcccggccttacacctccggccctccaaaagaccgtccctggtcgttaaaatttaaataatttccaaatttgaatgaagtcctcagactttttctttcttttgatttgttttacgatgagaaatttgttttgattttaagccaaaactgaaaataaaataatttaaatatttatttaattactcaaaataaaaatggaaaatgccgagcctctaatgggaatgaacccattcctccaaccaatccacagaagctctgtcattgagctactaaaagaaatccgccctttttaaattaattttcttgaaattctgattcaattggatttgaattaaattggcattgcttttcaaattatgagacaagagaaaatctgatgaaatttaaaacttttaaaattatataaatttaataattgttttaatttccaatcgactaaaatttggatttttgatataatttggtgtgactgtatgactatacctccccttcatatctgaggatcgtccctgatccaagaacttaaa

SEQ ID NO: 89468 - DNA, 658 bp, Heterodera glycines
gttaaatgcaaaactgttgtgaaaaattgttataactccattcagagaagagatagaaaaaaaataaaaataggtttagagagcccgtgaacagctgcatcggatgcaagtgccgccgttgctgtacgcctaacagttggtgagcaatgacggaaaattgcttaaaaaagaaaccaaacaaactcatcaattgttagctcccgttgacaaaccgaagggtacattggggcaatggatgttgggctaccgtatcagttattaaaattgttgtttttcaaaaaggatactaaaactgggataacccattcagagactagtcaaaaaaaataataataggcttggactaccatactaattagaaattttagaatgtgtctgttaaatgcaaaactgttgtgaaaaattgttataactccattcagagaagagatagaaaaaaaataaaaataggtttagagagcccgtgaacagctgcatcggatgcaagtgccgccgttgctgtacgcctaacagttggtgagcaatgacggaaaattgcttaaaaaagaaaccaaacaaactcatcaattgttagctcccgttgacaaaccgaagggtacattggggcaatggatgttgggctaccgtatcagttattaaaattgttgtttttcaaaaa

SEQ ID NO: 89469 - DNA, 878 bp, Heterodera glycines
ctagtctcgagtttttttttgctcaccttctctttcttaaaaaaacatcaagaaatcgacaaaaaaattcgttctctgtgtacaaaacgcatacgtctctttatttcaattaatttgcttataagcaaagtttcctaaaatctgataactgaattgtcgttgctccgcatttgacaaaaaagaaaatgactctccagtggaccgtggttgcgttcatcctttacgcagaaatagccacaattattgtgcttcttttgccatgggttcggccgacaatgtggaaaaaagtgtttaacagtcgcgttgtgcacaaactcaaacagttttccaatgtttacgcctacgctttcatttttgtgctcattcttttgttcgttgatgccacccgtgaggtgcgtaagtacagccacgtggacacgactagagagatggtgggacgagtggccgaggcggacgccgtcgttcacatgcgtctcttcagagctcagcgaaacctttatttgagtggtttttctctgcttatggcactgattatcagtcgcatcgtcactttgctcgcccgttgtgcccacctcgaattggctgctgaggcggcgatgaaacaggcggaaggggcgggcaaagcggcgcaaactctgctcggaaaagagggcgatgtgaatagtctgtccggcgaagaagcgaaaaaattgcgaaaccgaagtggaaagaaatgggagcgaagttgaagaaagcggagacggacagagacgcaatgaaagcgcaggcggagaatttgcaggaggaatacgaacgcgtgtcgcaacagttacggaccgcagaggcttcgcacaatggtaacaaaaagagtgattgaagacgaacgatcgcacaaagaa

SEQ ID NO: 89470 - DNA, 551 bp, Heterodera glycines
tgccaatattgtccggcaaaaaagtctcctgggacatggccaccgcctcgtgcaccgacactgatgaccaaccgcagcgcaaaaactccaaaggctcgtatgactacatcgatgcggacgaatgccatgatgtcgtgactcatcattcttcgactccattttactccattcgtaactcgaactcgacccgcccttcctcgtcccatcatgcacaaatgtcgtcatcatcgtcgccccagtcgcgctacgactacctggactttgctggcaaaccggaccaaccgcagcagcatcagttgcgacgacaacagcagcgagcagcgccgcaacaacgcgtcgctgtgccgccaccggcgctgcgacgtgctgctgcgtcagcagatgaaccgctctatgcgactgcgtcttcacaaatttactcgttgggcggcagcgaagacccgtacagttccattgtgagtattggtggtggttacggcagtggttcggccacctatgaccagcacggctattcacggatcatcaactccaacaaaaacggcaccaccggc

SEQ ID NO: 89471 - DNA, 585 bp, Heterodera glycines
attttctgatggattttgggccgcgcgacgacgagggaaagccgtgcaaggcgtgcttcagcttcgaggacatgctgcggatgatgggcaaaaagaagacagccgatcggcggaacggcgaagcgcaaaacaaaacggcgggggacgaaccgtcgacttcgagcagtccttcggcggataggaggaggacggactgtccgttggacaaagacgaattgggaaggtcgacttggaatttgatgcattcgatgtccgtttattacccaaaagagcccaccgaacagcaaaagacggcgatgggacaaaccatcgacggaatttcaaagacttatccgtgcgaccattgcgccgccgactttcgcgccgatctccgtgcccatccgccccttttgaattctcgcgacgcattcgcccgttggatgtgcgaggcgcacaaccgcgtcaatgtcaagctgggcaaagagcgcttcgactgctcgcgcgtgatggagcggtggcgcgacggatggcgggacggatcatgcgaaaagaattaggggggaggaaacagtagcaaatgttggcatcaaatcattacttttagcc

SEQ ID NO: 89472 - DNA, 609 bp, Heterodera glycines
caagttctcccccaatttgtcccaccttttttgctgcttattttgctctcctccgcctgccccttttcgctcgctttttcctctgatatattgccatctgtcaccaattccaccggcatcggcaatggcactgatgccaccactgatcctactgataccactggtaacagcgatttgatgacgagtgcaacgctcccagaagaaacgactgccaaggaggaggagggcacgaagccgggcacggacggcaccgcgagggatggccaagggacaggcgaaccgcaaaaagatggggaggggatgaagcaggacacgggcgtttccgcggcggatggcaatgggacagccgaaccgccgaaagagggggatgagagccctcaagagtcattcgcctgttcagtgctctgttggactctgatcattgtcggcggtgtcttcatttgtgccgtcggattgactgccttcgttttattgactgtgcactaccaaaatgcccgtgccgacccgaacaatccgtccgctgctgttcaaatgagtgccattccgcgggggatgacagcccattgaacggcgaaaggacatacatcggaaaagattcgagagaatcga

SEQ ID NO: 89473 - DNA, 599 bp, Heterodera glycines
gtaaaatatgcaagagactcacattgtcctgggcattggcacggtgtgctctctgttggcgatcatcgccaccgtcgtcactttgccatcgctgtactcggagatgaacgaaatgagcaccaaagtgcacgctggagttgaggctttccgcgtcaacaccgactcggcctggactgatctgatggacgtgcaagtggccgtgtcaccgccgtcgaagccccgtgccaaccccttcagctccatcttccgtgccaagcgtcaactgcccggccattgccaatgcggtccgctgcaacagccaagctgccccccgggcccacctggtccggccggagcgccaggtcaacccggtcagcccggaggcgcaggacagcccggacagccgggagcacctggacaacctgctgctccatgcgcgccccagcacatcccatgcccgcgctgcccggctggcccgcctggccgtcccggaggacagggaccgcccggacaacaaggagcccccggccaacctggttcacccgctccaggcggaggacagggaccgcctggcgcgcccggaccccaaggaccttctggacagcccggacgttctggag

SEQ ID NO: 89474 - DNA, 471 bp, Heterodera glycines
atttgtccgtccgtccgtttgagtgcaaatgaaaaaaaaacaattaaaaaggcggggagggggaaaagaattaatgaattgaccaaacactgatcattttttattttcacattcgttgctgttctgcttttgctgctgtccgatcacgctaacggtgcacagagataaataaaaagaaaggcatcgtcactcatatgaccaaagatgggacgagacatggagggtgagggtaattgaggggttaattggggtggggtaattagagggtgcaaagggcgatgggtaaagggcggagacgctaatcaacgtcaattaccccaaaaaggaaaactttgcaaagacaaaattagcaaattttttgagacgagaatctaaaaaaaattcaaaagcaggataagaattcgggaacccgatctgtgccggattcccagatgaaatcctaattttccaggttgatcccgatgcgctttt

SEQ ID NO: 89475 - DNA, 972 bp, Heterodera glycines
aacctttacatcgcaaccggtggagaggatgacctgctcaccgtctattccctagctgaaaatagggtcgtatgtcgtgggcaggcgcataagtcatggatttctgaagtcgccttcgattgttatgcacccgaatttatgttggaacaaactcaaattttcgacgaaaaacgctgttgtccgcctttgaagggtgagggcacctgttcatcgtttgcaactaatgaaggaaacgcctttcaaaatgggcaccatttcccttctggccatgaagaaagtgtttcttctgccccgcaaattggccatttgccttttgctaattgcgacgacctccgcacgaccaacacaaattcgcttcaattgcttcccaacggaaaagtaacgcacagaaacggctcatcggatgatgcaaatgacgtttctcactgtcagcctcagcttctctatagggttggcactgttggccacgactgtcagttgtgcctttgggacctttccgaagacattttggcttctccgcccctttcccaacatcacttcgacgaaatcaccgtttctccttcaccctcaaactttgcaaatgtttcccctcgaaataccacggtcattcccattggcttcgcaaatgcattgtccacaaccgaaactgatgtgagaacagctgacaaaccttctgacgcaaatagcaaaagcagcggacgcttcagaaaatttcataagcgtggcttcagtttcgggtcccgtttgacgggaaatgaacgaaaacagcacgggaattcttcgaacggggcaaattccaatgaaagtacattgaaaagaggcgaaaattatgcacaatttctcggaactgtgcaatgtccacgactcgaagacgtgccaatgattgaacctttgatgtgcaaaaagattgcacacgaaagactcggcgctttgctccttcgcgaagattgcatcgtgacctgcttgtcagga

SEQ ID NO: 89476 - DNA, 586 bp, Heterodera glycines
tgagtatcaaattggccaactgttttccgtggccgaggcatcgcgacaggagacgggcggcggagaaggtgttcaggtgttgcgcaacgaaccttttgaaggggagagtctgttcaatggccagttctcttccggacaatatacgcataaaatttaccatttcgattcaaaagtgccgtctcttctgagagcgattatgccaaagggttcgatgtcggtccatgaacacgcgtggaatgcgtatccgtactgcaaaaccgagctgaccaacccggacttcatgaaggacagctttttcattcggattgaaactattcatctgaacgaccgcggcaccactgaaaacgcgctctgtctgacgacggatatgctaagtaaacgccaagtcgtgcgcattgacatcgcgaacgacaaagagtttataaatgcagccgacattcgtgaagacacaaaaccctcgacgttccactcggagaggacaggccgaggtccgttgttgcagtcgtggcagaccaactgcgagccggtgatgtgcgcttacaaactggtcactatcaactttcagtggttcggcttccaaaactgg

SEQ ID NO: 89477 - DNA, 1141 bp, Heterodera glycines
tattaaaataattttgctaaaaaatgggtaggaagaagaagaagccgcaaaagccatggtgttggtattgcaaccgcgaatttgaggacgaaaaaatactcatccaacatcaaaaggccaaacacttcaaatgtcacatttgcaacaaaaagctgttcaccggcccgggcttggccatccattgcatgcaggttcacaaggaaagcattgataagattcccggcgcgttgcccggccgtgacaatgtgaacatcgaagtgtacggaatggagggcttgccgccagaatccactcgtggccatgtcgaggacgactcggacatgcaaccctccaaaattccgcgccccgcctttccgcctggaatgtcgatgtccggcatggtgccaccaattgcggcgtacaatcaatacacaccgcgcacaccgtttggtatgccgtcctatgggatgccgcgtcccggcactgttccgcttcctcaccaccaacaacaacagcagcaacaaatggccgcaatgatggcagcagctgccgcagcaggggcgggcgggcggatgccggcgacgtccacagccgcctcaattggcgcgattccgacaccaccggcgggcattgtgccaccgcctccgctccccgccggaataccgtcgcctgcgtcgggaggtgccattccgatgccaccgcaagcggcattcgccgcttaccaggataaaagcatctccggtggaaagtatggcaccagggacgagccctctacttctgccgcgtcgtcgtcaacaatggtcaaaacattgggtgccaagacgcgcattgtgtgccaagatgaacagacatcgctggaagagatgatggcccaacgcattgtgccgacctacacacgtgggctgatgccatttgtgcgttagcggagccgaagggtcgcaacaacgaaggcggaaaatgtctgtctgtctgtcactgagtgtttccccacgggggcttttcgtgccattcatttatcggcatcgttgttgttgaatcaaaaattgtggtcggttgagtccaaaatgtgaaggttggctcacttacaacacaataattgctttttcactctattcattatgatgtttctttcttttttacaggaaaatgaaatttggtgaaa

SEQ ID NO: 89478 - DNA, 665 bp, Heterodera glycines
cgtgaattcgttttgtcgttattcttcgggtccattcatcctcgaattacgcaattcatacaagttccaaaacgactattgtcctctgatttgtctttctatatccctcgacattcgccactcacatttcgcttaatggacgaagcgtattttttgcgcaaatttgatgagtacgaacgcaacgacagttgggatcaggtttttcataagattaatgtggagtcggaaaatcaggcgaaaaagctgagtttgtgctgtgatctgtccaacacttttcatgagaaaaaccgatatcggaatgtgttgccatatgaccagaacagaataatgctgaggtgcggtgtttcttccgagagtgactcgtacattaatgcttccccgttgcatttgccttttgcgcatcgcaattacattctgacccagggacctctgcccaacaccacctgtgacttttggcagatgatctttgagcaagaagtttcaatctgcattatgctcagcaaagtcatggaaaaaagctttgtcaagtgtcactcttatttcccttcaaaagatgagaaaaaaattgcatttaacaattggggaatgcgaacttgagcatgaggaatcaaagccgaattacatcattcgccgtgttcgactcactcggctggaaaatcaggggg

SEQ ID NO: 89479 - DNA, 551 bp, Heterodera glycines
tgagaaatggcttcggttactgatcgttttctgatgaattggaaggggattccgctgggttttggcctcgtcacttcgacaacatgttcatatctttctaacaaatcgcggtggctctcgaaaattcgctcttcaatagctcaacgtcttcttgaatcaaaagaaacaaaaattgcagaacaaatgttacaacaacggcgccgtaatgaactgatgctgcactttaaaatggcttcttacggtgcgcccgtggcattgggcactttggctgccggcggaattttgtcttctttgccaaaaatccttcgtcttcccaattcgattggcttcactgtttgcgggtttggcctttccattggtgcatttattgtcggtgctcttcttttggacggaccgatgtacgcgtacaccgaatgggttcagcaacggacagacaaaggaacagaaaaacaaaaagtggaatgaacaaatgcaaagtccaaccaaccgactatgatttttttgttttgttttctttaaacggatttataaaatatgaaagaaaacaaaaa

SEQ ID NO: 89480 - DNA, 1118 bp, Heterodera glycines
caatgccattgcctattcgcttttttgttcttaaaatatgccagcagaatggacggaatggcaaattcgtttcgctgctcactgccgcccttcacaaggaattgtcgccgccgcatttccgacgcttttttgcctcgaccacttccgcttcttccgatgatggttttgttgttgaaaaggtggagaatggaaacgcaaaaaattacgaatccattgacggcgcatggaaatgcacaaactgtgctcatctgaattggccccagcagcgcatttgcaaacattgcactattggcatacccaccgaagcgcaaatggcgattctgaaacaattgctttgggtgtgtccaaattgcactgctcgcaacaccggcgaccattgcggaaactgtgccttggcccggtgctcagtgtacaaaggcttttgggtgtgctcacggtgcacgtggcgaaacattcccgtcaatttctcatgtcgaaaatgcaaaaaaggcaaacagacggaggagcaacgccaactcatccagcaacagcgatgggtgtgcggagagtgcaaacaccacaatttcaaggaggaatgcttcagttgcggtgcccctgagtccaaacggttgcccgatggcgtcggtggcgagtcattgcccgacgggtcgtggtattgtgtcggttgcggctttctcaacttccccaactattcgaagtgtcgccactgtcgcagagaagaaccgacggatgagcaacttggcgtcattcacagttcgcgttggcaatgcgctgagtgtcattttgacaattacgagtccaatttgacgtgccaccattgcgacgcgccacggcccacggaagggcaactccctgcaacttctgattgtcagtattgggtgtgctcaagctgtttgtggcgtaactttcccacccatttgtcgtgccaaaaatgtatcaaagggagggcaccggaagagaatcgccaacaaattcaacaattgcgatgggtttgcggaatatgccgacaccacaatttcaaagaggactgcttcaaatgcggcgccccaaagtccaaaggcttttcctgcggaatcggtggcgagtcgttggacgacgggtcgtggtattgtgtcagt

SEQ ID NO: 89481 - DNA, 778 bp, Heterodera glycines
ggaacaccaggcggtgaacagaccattgacggagttgcggtgcattggtattctccgggggactacgataagctgacaaaagtgcacaatttgcggcccaacaaattcatttttgcctcggaagcgtgcacgggctatgaagtttttgagcacaaagttttgctgggcgattggtcccggggccgagcttatgcccgcgacattctcaacgatttgcgcaattgggtggtcggatggactgactggaatatgtgtttggatttggagggcgggcccaatttggcacggaattttgttgactctccgatcattgtgaatgccagtgctggcgagttctacaagcagccaatgttttatgcgatggcacattttagtcgctttgtcccgcgcgattcatcagtcattggctcctcactttttgtcgccaatggtggcgtgaacaaattgggcgagaaaaaagtggacaaatcagtggtgccaaatgcaagcactgccgcttccgttgacaatagcacacaatccaccgccgtggagcatatcgcttttcaaacaccaaatggcctccatgtgctggtgctgatcaacagtgatcgggatgcgcacaatgtgtccatttttgatcagacggaaggccgccggtggacagtgccattgggcggtgacgcaattgtgacggcaatttggaagccaaaaaatgatggaggaaaagcagccaaaaatgcgcaataattaattattgcaatttaatatttttatttattatgatgggccggccctc

SEQ ID NO: 89482 - DNA, 1016 bp, Heterodera glycines
aattttaaatctattcttaaaatggtgaatttttttgttatttttgtgccgtttttgttgttgattgtgtcaaatcagttgaaagccgaagaaacggaagaaaatcgacataaaacggaggaaacatggaattatgaggagcccgaagaatggggaggaaagtgccaaaagggcgacagacaatcgccaattgacattcacaaacaatggttcattgattataaaattccggcaatttcatttgcaaattacgaaaaaaatggaactgtgacaatgaaaaacaacggtcatacggtggtcgtaagcggatttgacacttgggaaaagcagccgaacatcgccgacggaggctttgggagcaaatacatgttgagccaattccattttcattggtctcaaaacgagaacggaagtgaacatacggtggacggagaacattatgacgcggagcttcacttggtccatgtcaaagaagggctttctttgtcagaagctctcgctctttctgatggtgtcgctgtgttgggcattttcttcaaaagggcgtacgttggaagcgcacttttggcacttcaaaacggactaagccaagtgacgaataaagatgactccgtcacaattgaacattatgagcccaacgatcttttgcccaccgcttcggaggtgtttttccgctacaacggctctctgaccacgcccgactgtaacgaagcggtcatttggacagtctttgccgtgccgaagtccatcagcagagagcagatacaattgttacgagcaattaacgggcacgacggaaaaccgatcagttcaaatattcggccggtgcaaaagctcagcagaaaagtgcagaaattccgctacaacaaagtgtcgattttgccataaacatccactggcccttctaatggacttttaattaattaataattaattactaaatagattttatttaacaaaataatatttgtcattgcaatgtttttgttcaataaaagttacgataattaaaaaaa

SEQ ID NO: 89483 - DNA, 882 bp, Heterodera glycines
gtccatttaagggcactgaagaggccgaattgcatgtagaagaagcaaaccccgagttttaattggcaaaacattcagcggacggtggtgcaaatggtcagaatggcggacgtttcgcaggacgacattttggtggtggagggtgccattgacaacgaccaaaccctgaaaaatttggtcgaacggacgtacaataaatttggccaaatcgatgttttggtgaacaacgccggcagcattcttcagcaccaacgatcgcggcagaacagcaacagcaataacagcaccagcagcaataattacggctacgactacacaaatgggcaaaacggagccgaggaggaggacggaggacgcgggaggtaccacggcttccgcggctttcgaaggacttcttcctcagcaacggcaatgaccagtcgccgcacttgctcaatttttggagctttggacaacgattttgactttttgtttaacataaatttgaagagtatcgccaaattgacccgtttgtgcgcgccttatctcgaagaaacaaagggtgccgtagtgaacatcagcagtttcggcacacagcgttccctgtccgactacacttattacagcaccataaaaaatgctttagacaattattgccgctcaatcgctgttaaatttgcaaagcgcgacattcgagtgaacaacattaaccccggttttatcatcggcgaaactttggacgaagacgacaacagagcgaacaaattcgagttgaattggatcaaaaatcacgtgccgatgggtcgcggagggacggcggaggaaattggcaaagtcgtggcatttttggccagcgacgacgcctcttacatcaccggggcaacgataactgtggacggtgcc

SEQ ID NO: 89484 - DNA, 844 bp, Heterodera glycines
  unsure (1)..(844): unsure at all n locations
ctcaaaacgaaggatcactaaagagaattcttttttaatcattctcgaaaatgccaccgacttgggccttagtgccgcttttgcttctgttctttgtccatttcattgatgtcggattcgctcgtcgctacaaagcgtcaacaaaatacaatccgccggcggaagaaacgacgacagaaacgacagaattgacaaccccaacggaatgccctgcgccggtgtgcccatgcgaatgtcccaccgaagaaacgtctgaaacgcctccttcgacgggcgggggagggggcactgacgacatcgtgacctcgccggaaggagaggagacgaccacgcccgtctccggttgtgttccgggcccgccggggcctcccggcccaccgggcccagcggggcaaaaggggccccagggaaaatgcggcgacaatgcgagcaaacgcaaaagggaagcagcagcagtgccgaaagagtttatgacgaatttggaaccgaatgtgccagtcaaacgtgcaaaagaaggagaagccgttgcaaagacgcattttgcacgtggccatgtcaaggggggctgtccaccgggtcccccgggggagcctggcactcccgggcctccgggccctcccggagacccggcgccatgcccgaagcacatgaaaagcgaagcgcaaagcgtcgatggcaaacaactggctaacagaaacaaacgtggggagacggtgctgaatgctgcaaaggaggggaccgaagtganacgcccaattgtgcgccatggcattggaccgcccggccccgccggacccccgggaaaagcgggcgaaaaaggagagcccgggccttgcgaatggta

SEQ ID NO: 89485 - DNA, 628 bp, Heterodera glycines
tttttttgtacatttccttcgctttttctctgtcatcagcttatatttcaacgttcttcttgtactgcttgttctgctcgtccatttattcagaaggtactccgggcgtcttgtggccgcggtgttgcagcgactgttacacgcgcgcgccgcgcacatttacgggctcggctggttcgcgttgcgccatggcgagctgttgctggccaacggactgcacttggaggtgcgcgagttgcgcgtccattcgctgttcaattggtggtggacaacgacggcaccgacggtggacagcgcggccaacgacggcggtggtcaacgcatggcactgaacgtgcgtgtgtccgtcggcacaattcgtgttggcaaacagttggcggacgaagaaggcagcagaaatgctacgagtagcatttgtgatggtcaaaatccgctgattgaaaactgcggtgtgctcgactcggtgtccatccatttgtccaggcccgggccgggccaactccatctccaggttcagctgcagcaaccggtcgagttggtctggtcaccggtcctgcatttgatggtcaacgacgtggtcagagcgagtcgtctcccaaatgtcccaattggtcaactttttcgactc

SEQ ID NO: 89486 - DNA, 678 bp, Heterodera glycines
atttttttttaaattttgcctataattaattctctttttgacgaattgagtttgcaatgtctatggatgaactgaagaaacgcgccaaagccattggtacatttgaggaactaagaaaaatcatagatatccgtggtgtgaatcggtacaacccaaacaatgcgccggttttggaacgggcggtggatttgatgatcaaagagacgaaatacgacaaggacattctgatgacactgttgaagctgtaccagttgaacccatttctttacaacgaaaagtacgtgtgccttgtgctattgaaaacgatgaccaattttccacgcaacgattttgctttggcaaaatatttggtggacgctgccaaagtgaacgctccggagttgcgacgcgtctgtcagattggctctcttcttgagtcttgcaatttcgcgctcttttggcgtctcgtcgacggacggtacaaaccccgcgacagtctcgacgaaccattcaaaaaacctgacgaaattcgccaattggtcgagtccgtcacaagtttcaaagaggcgacacggaattatgcatgtcaagtgatcaatgtgacattccaacgcattcacaagcaacagttggtcaatctgttgggtggcattgatgatgcccaattgactgcctatacaaatttgccatcaaacaaat

SEQ ID NO: 89487 - DNA, 443 bp, Heterodera glycines
caggaatggatgatatcaaggctcaattgcatgtagctctttcaaaaaacggttatggccagcccgagtacagatacttttgcgagactgatggccgacaatattttcgttgcgagtgctcagtcaaacgatatgaagatatttatgtggccaatgaaattgctcagaaaaaacgcgatgctcaaacaaaggctgcaacgtcgatgggcaaatggatggtgaagaacggctttttgacggacgaagaattgccgcaacttatgcagaaaagcgaccatgcgagcgaaaaggatgaatcagcttgatgatggacacacactttcaaacattctcatttttgcaacatagtttttgacttaattcccatttttgagaaatttattttcacatattggctaaaatttaagtaatttataaaaagtagtaataaaaaaagtgagagc

SEQ ID NO: 89488 - DNA, 461 bp, Heterodera glycines
gagacaacgcatcaaaaaagtccacctctgactacccatacaccgctcttagtgaccaacttgcggcaatttcccaacaaatggacaacaacagtgtcgaccccatcactaaacaacttttgaaaatttgtgtcgaacttttacagcaggtccagcaacaacagaccgtcatctccgaacaagaccttcaactccaacatttcaaacaacagaaaatgatggaagaagccattcaagaccatgagcgtcggcgaagcgtcgtcgtaatgggtctccctgaatcgcagaaacaaaagccgtccgagcgagtcgctgaggaccgaactgccatctcaggcgttctcgatgagcttggcatcgagagcccaatcactgtgtacagaatgggttccccagaccaagcaaacacaggtcaaaaccgcccgaggttgatgaaagtaattttcgggtgctccaaatat

SEQ ID NO: 89489 - DNA, 849 bp, Heterodera glycines
  unsure (1)..(849): unsure at all n locations
cgcggatgttcgtgccgaaaagtctgtggccatccatccaaaaaggacttgccgaactcgcctctcaaaccaaaatgggcgatgtccgcgacccttccattttcatgtcggctgtcatcgatgcgaaggcgttcaaacgaatcaacgactacatcgcttacgcaaagggagccggagtcaaaaaggacggcactcggctggtatttggcggaaaatgcgacgactctcgtggatggttcatcgagccgacttgtgtggaggtggacaacatttcatcccttcttctcaagcaggaaatatttggaccttttatcgctgtttacgtgtacaatgatgtggatgctggtcagctcgttcgttccctgaaggaccaaactccgttcggactgactggcgcagttttcagccaggacaaggactttctttatgaagcaaaagacattctccgtgatgcagtcggcaatttgtatttgaatgacaaatgtaccggttccgttgttggtcagcagccttttggtggagcgcgtcaatccggcactaatgacaaggccggaggcccccattacgtcctccgatggacttctgcccaagtgatcaaagagagttttgggccgcttaccgaatggcgctacccgcacatggattagatgggagacctttattgtcttttgaaaccaacgtggttttcatgtagcgagatttccctccattcaatccaataatttcctttgaatttctcccataattctctccctatcgccccatctttttttgatgttttgtttttccctattctattgaattgtcgcataataaatggaatanntannaaaaaaaaaaaaaaaaaaa

SEQ ID NO: 89490 - DNA, 700 bp, Heterodera glycines
tgacattgcaattaaaaactacgtgaataaaattttgttttatcttcttgggggagccttcaattagtaaaggtggatgattccgaatcatgatttaaaaatataccagctagtgccagtctctgggcattggggtcaaaaggcgtcagctgacacatttctcctgtgtctatctcattttcatgcgtcagctgtctagcatttgtccttaatttattagagaaaaagaggcattgagtatcgtaaaaagagaggtattgagtatcgaaacgattcattcataattttatggaaattactgctagtacggggtataaattcaaacatcctcaaaagtggaagcaacaacaacaacaacaatggcaaaagacgcaattttcggcactatgtacgcgcgctggacaccgacgtagcgttcaacaaaaaattcagactaatgaatgctaaaagtacattcatgatccagactctaccatcaaatcctgagtcgcttttgcgagtcatttttggacattgcatacaatcgtcattagatgaagctcagagacgtggaattgaaccgagtcgacttactgcaacaattacttcacagttattggaccctgacatttggattccgatccgtcagataactccaaacacagtggacacaattttgaatcgcttcttagatgtggcacaatcaaagtcgcgggaaggt

SEQ ID NO: 89491 - DNA, 640 bp, Heterodera glycines
aaaggttcaaatattttgtaattggtcgccattttaataagctgagtcattaatattcaaaatgttttttaaatgccattttaatgaaaaatggaatggttttcttgcgaaaaaaagtccaaacaaatgcattcatataattaaatcagtctttacaaaagcaaaaagctttaaattcaacaaaaactgaataaaatttgaaaaaattctacattttcttatgaaatgataggagcattttttcgataaaataattctcgcgagatcggacggccggctgaatcaataaattgcgcacaaatttattgcatgaatggggtgcgagttgaggagcattttggggatgggtgaatttggtgctgatgttaagtgaataaatacggaaaattgaacgatgaattattttattggtgaagtgtagggagaagaagtgcagcagctgtcggcggacggacttttttggaagttgtaacaattataaaaaaataaatatattataataaaaatttttttaaaaatatttaaattaaaaaatgcttcctttattagtcaaatatttttattttaaaattttaatgttaaattgtcactattattctttttacgacaatatttcaaacatttatccataaaaaatgat

SEQ ID NO: 89492 - DNA, 1019 bp, Heterodera glycines
aagatttcttttagtacctaatttttttaaattttacggggaaatcgatgcagcgtggtgcacccggtaagattaagttagtttatcgcagaattaaatttttcactgcatgaactttcacctttcttagctgaattcattccaaagtcaatggcgccaattggttgcccaatcgtcttcacctctgcagttccaattggaaatgtccaacctgaactactcgcccattaagttcaacgctcgttttctcgttataaattcgtctgctaacaataagcgacaaacaaatgaaaaatttgcttttgacgaagaaatagccgacgggtttcaaattgcaactgccgatgactctcttctgatagaagttgtgctgtataatatttccaatgttccattgcgctttgaatattgttcattgactctggatgaaattttaaattcatccggtgccaaaaagtcgaaaacactgtccgaatggtctacggcgggaaattcgtcaaaaaattctacgttggtattggttcccaaaagaccaagccgcgttttctttatctacaaaactacatttgcaacatctcttaaacaattgatgcaattgccagcctcaaaggcaccgactagcagatgccaaagtccgttgatggatgaacagaatgccaaggaaattttaataacggtccgacacttttcattgcgtacattgtccggatcactcagctgggacatcgatcaccgatcgacgagtaatagacatcaccaaaattcaattgaggagatggacaagaacaactatgcagtgaagtgcgaccacaacggtgcaatgtgttactgacctgtccaattttggctgatagcaccgaattggaattatttgttgacgaatgcgttcaattgactttaaccctttgtaatgcggagcgcaacggaacactgctgaagaacatttggtgagcctgggtaatctgccacaaagtctgccgtgaggatgaagagttcgccaaccagcagcagaattcgca

SEQ ID NO: 89493 - DNA, 866 bp, Heterodera glycines
caccgagcgaaacgacgcccgaaatgcacgagacatttttcaaacaattggccaagacgcaccacccccacttggcagacgaccgtccccagtacaccatccaatatcagaccgattctccgatcaacatccgtgcactggtttatgtgcccacaaagcgcgtctcccacttggaatttgcagcagattcacagcgggacatcgccatttcgctgtacaatcaacgcgttttgattaagccaaatgccaaagagttggtgccgcactatttacgcttcctaattggggtcgtcgattctgaagatgtgccgttgaatttaagccgagaaatgctacagactgacctaattctcgaaaaaatcagaaaaacccttaccgaacgatgcgtgcgcttctttctctcacaattgtccaaagaccgagtcaaatacaacgacttttacatgggctattcaatgttcttcaaggaaggcgttgtcacggaacagtccaacaccaccaaggaagaaattgctcagcttctgttgttcgaatcgtccagttttcggtctggcactttgaccactctgtcggaatatgtcgaacgaatgcaatcggaccaaaagaacatttattacatttacgcaccaagccgtcaactcgccgaaacgtcgccttactttgaactgttcaaagacaaatacgaagtgttgtttttgtcggacccagcggatgaactcgtctttttgtcaatgccccaatttcgcatgaaatctttgcagtcgctggagaaatggacgaaggaggagggactgagcattgactctgacaaagaatcatcagctgaattgatgagggacagctccaaaaaggaatttctttggctg

SEQ ID NO: 89494 - DNA, 593 bp, Heterodera glycines
aaggggtaaacatcccccgtggcccttcttttgtttgatgggcacaaatttttgtccaaatcggagttgttgatgaatggaaaggccgtcttttgttgttggccggtcgtttttggaccaacaatttttgaataaattagtgaagtgaaaaaatgtgaaaattttggcgaaaatgttggccgaagtgaggaaatggtggggtgaattgacgaaatgtccgaatttgtgatgagacgggaattaaaacccgttccgactgcttctccttttccgatcagtgccacaaatgcgagagctgccagtgatcggtagagccgaaagtgggggttgaatttgatgaagacgaaaagcgcggccaaggcgatgatttccgaggccacggcgataagcagccattgtcccgtcgagagcaatcgaagaagtggaaaggggtcaaatccccaatttggcattgtcagggtgaacgtgctgcccggctcgatgtgaccgctcgctgagtctcgctggctaaagccgaattgctgctgtttggggatgaaagcaagcccccctttaagtttaaattttgttgtccccgccgggcatttcacttg

SEQ ID NO: 89495 - DNA, 1122 bp, Heterodera glycines
gtcattttccgggagggcgacccgggccaaagttggtttgtggtcttacgcggcactttggaagtgaagtcgtcaggcaaaaggcattcgtttctccacgagggcgacgactttggcaaattggcgttgctgaacagctgcgaaatgaacggaaacagccaaaagcagcagcaaaacaacggcaacagaacacaacggcagtcgacggttatcacagcggaggacggctgccaacttttgagagtctacgcaacgaaattcagcagattgctgagtgagatggagacgaacaccgtccggctgaaggagtatatggaatgcgacaatggcaccactgaaaggccattggatgtgttggtgttgcagagggatgccggtggaggacgccattcgctcatcgccggattgcctagccaaattttggagtacactttggagacacggatggaccatttggtcacaatggtggatgagtcgttcgtcgttctgtcccggctcggcacccgttcttcctccaccaatgccctccaacccgcggccgattcgcttctcctcgacgttctcttctctcttcccttttggatgccctccaacgaattgtgcaacatgctcaagctgtactacagctttggcttttcaaactccatcgaacaaaacgtgcaaacaattggtggtgatccaagtgaatggagccgaacggcgaacacagcgacgaaacgacggactgtcgcttttgtcagtgcgtggcaaatggcaattggtcatcgctttttcctcgactccgtggccaatgcttttgtggaagaacttttcagcagtttgttggaagacgtgagaacagccgaagagacaacagaagcgatggaatttgaggaaatgatgcgccaaatggaaacactgatggaattccgagagggattcatgcgaaaattaagccgacacccacgcgttgtcctggacaaaggaaaatacggcgacggggcatcggcacccgacccaattttgccaagagatctctgcattcaacccattcatttgatgaatgcgtccgatcactccaaacggtcgatcattttacaattgcgaatggacaaaagtgcggcagaaattgcacaaatggcg

SEQ ID NO: 89496 - DNA, 793 bp, Heterodera glycines
caataatccaggaaaaaaatatggatttccatataattacacgccctaaacatttcaatgatttttaaatatgtacatagatgctaatgcctcaacggcagctgcgtttggttagcaaaagtttgctgtttgtccatggggcgggtgccaaacaatttttgcaaggattgacaaccaaagacatggactccctcaacaatgttccgttggtttattcctttctgctcaatgttaggggacgcattttggcggattttttcatttatcgtggcaacaacggcggaaatgccgaggcttttgtccttgaaactgaaaagtcacaggccgaactgcttgaaaaaacactgaagctgtatcggctacgcaaacagatcggaattgagccactattggacaaaactgtgcttttccgtttcgatgctgaaggggaaacgacgcaaaaacaaaaggcaactatccctgaaaattcgtccaattggatggtcgacccgcgagtgcccggctttggcttcagagctattcgaaagattgaaaatgagacagcacatgatgacgaggcgtcttcctctgcgtatttgcgtcatcgattggcttggggattggccgaaggaacagaaatggtcgaccaaattccgctgaatatgaacggggacattaccgggggaatcagcttcgagaagggttgttacattggccaggagctcgttgcccgcacgcatttcactggcattgtcagaaggcggctgatgcccttccgaccaatcgatgacaaaaatggacgcgacggtttccg

SEQ ID NO: 89497 - DNA, 738 bp, Heterodera glycines
ggtccttcaatttcttgtttgaaagtttaaattttttcaaattgatgcaatttcggaattttaggtctctccaacttaagaacataaaatatttgcctttcagtaaaatctttcccggaatgtctgcggataaaacgggcgcactttttgtgggcgatatcattttagccgtaagatttcgcaacaaaagggaagaagcgcgacatcattttagacgtcaatggcgagtcattagtcaatgcgcggcatgacgaggctgtccgtgcacttaaacaagccgggaaaatggtcaatttgcaagtgcaatatcgacgcgatttgcacctccgtcgggagaatatgctgcaccggctgagttgggaggagagtcgggtcggtgcgtcgtcggctgggccgacggtgaacggacaaagtgcgggagaagcgttgcgaagtttcggactcaaattggcatttgtcacgcgaaacccactcgaggaggaggacccggagaatcggaccatcgaaatacgctcgcacagcgctcgacacattctgacgttgaggtgttcgtctgccactgaagcggacgcttggttcgaggccatccattcgtgtgccgacactctgctcactcaggcgttggcacaagtcaatttgatcctcggacaaagtccgcaagtgctccgcatgggttggatggcggagcaggacgccgccattggttggaaggccgtttttgtggcattgactgtcaac

SEQ ID NO: 89498 - DNA, 1111 bp, Heterodera glycines
ataagctggccgcgcgaaagtcgaaattttcagagacccaaaatttatgtgccattttcatcaaatttgtgggccctcggttttttttttaatttcaaaaattttcaattttagttagggtttattcccgaccctggtcatctgtggcatatcaaaatcagatgagagtgccaattaaatgaatgagtttctatttctatgatttttttttaattctattgtctttttctctttcctgacgagcgtatttctcgccgacattttttaaatcggagtaggacaaaacgtcgtcagccgaaacgtcgtcgaacgaatttttcgaccataacttttttctttctcaaccaaattaaacattcttggtattattcgaaagcattcgaaaaatgctattagcctgcaaattttcaaaaatttttatttatacacaaaaaaatcagagcaaaaaaaagttcgaattactgggtttttgagttccttctggccataacttttttgaaacttaaccaaaatttttgagattttgcaaattaataataaacacatagagctatcgaacaacaccaacaattcttaatttgattgacagtgaacaaagttatggttcaaaaagtcttccgacgacgtttcggccgacgacgttttggggtgcaccgtttttaaatttctccagccattcccgacaaaattttggtcggggaatttcctttccgattcccgactcttctccatccatggggccggcacggcgaccaaccctaattttaattccttttaattggacaacaacaccaaacaaggggagacctttctcaagtggaggagtcgagactctcgaatagactgtacttcttcccccgccccacccgactgacccgccacttccgatggacgaacagttgcagggcaacagtttcagcagcatttggcccaccgatttgtgctgctgctgttggtgttgtattgcggccgtgggttgctccgtttgttgcacttcggctgctgttgttgttgttgttgttgctgttactgcttgtgacggttgtgcggttgctgtcgccgctggttgttctacagctactgcttgcgcttgggctgccgctccgtttgc

SEQ ID NO: 89499 - DNA, 630 bp, Heterodera glycines
atttactcctctcaaaaatccaaattgtttcttccatttttcaattacggtacggccaaccccaattttcttacaaattttggcataatttttcttccattcttttcccaaatattttcttcctttttacttaattcatttttcattacatataaattttagaacaatttcacttttttgttcatccgtttttgatttgtggcttttatttattttttttttcttcttccaaattttcttcccatttttctccaagtttcacttttttcttttttgctccaattccaatttgtccaattaaaagtaaaaaaccaaacaattaatatatactcaaacgaaaaaaataaatatgaggagcaattatcagagaaacttgctttcataatgatcaatcacttgtcacttcttaataattcatttacttctcattttcagacgaattttttgtgttcatttgacccgccttttgtggagacaatggcttaaataaagttataatttaaatatgacgaggttaattaaagccagggtgaccaagtgtcctgattttttagatttgtcctgtattgtggagggtacctatttgaaaaatcaaaaatgtcctgaattctcagactgtcctgaattttt

SEQ ID NO: 89500 - DNA, 391 bp, Heterodera glycines
gtgaggctggagtctccatggccattccccttcgggctcgttatgacagcttcgacgtggtgcagcggggtaacacacggatgcccccgagctcactccgaagtgagtctgtccgtgccattcggcccgaccatttttaggtttcacgaaataccgccctgtaatctttcgccatatccgggaagaactgtcaagctcaacagaaatactggacccgcagctaagaaggcccagacgtttttggccgatgggaaggtaacccagcgccctcggattagcgcaacccgtgcagcacctagggactttcgcgacctgtaggccaactcctaccaggctccccggaggttccgagtatcgccacactcgtgcgcgtcggtagttagccgacgtt

SEQ ID NO: 89501 - DNA, 972 bp, Heterodera glycines
aatatgcccaaaagcaaaatccaatcagcgagcattctggcagaacagcaaaaaagtgtcttttcctgtcagccgacaatccccgccgccgatgagtcggatgatctgtccaactcctcccatttgaattgttgtcagccgatcagcgaaattgaacaacatcagataaacgacttacgccaaattttggaaacacagcttctgaagcaagaggtggacgaagcttatcttctcagatggctgaggtcaaaggaaggcaaatttgacgaggcggccgatggcattcggaaggatttggtgttccgaaaagcatggggactggacaaaattgtaaattgggaagcgccggaaattttggaaaaatactgcggctacggcttcctctctgaccacgacggcaatcccattctgatgtctctgctcggaaatactgacgtagaagggatgttgcgatctgtccaatcgaaggattacatcaaattttcgctcgcggcaattgagaaaggcatcacattgtgcagggaacgcgccctgcagacgggccgacccttcgagcagatgatgctcgtgttcgacttggaccacatttcttcggcccactactcctccaagcaggtcgcctcctccttcaccaccctcgtcctcctcttccaggagcattttcccctcgttctgcgaaaaatcctcgtaattcgagcacccgaaatggggagaattgcgttcaattcgatgacgccctttctgtcaaatgccatcaaatcgatgatcgaaatgccttctgaggaggggtggcagtccgccttaagcaaatacgtgaatttggatgcttggcctgtccattggggcggtcggatgatggaccctaacggagacccaaagtgcccctccaaaatccgctacggcctcggccccgtccccgactcgtttttcgtcgacccttcccaagcaatgcccgactatgacccgttgacc

SEQ ID NO: 89502 - DNA, 633 bp, Heterodera glycines
catcaccatcaccacaaatacgcgccgttggagcatctgctgaaccgcccggtgccaatgttcaagcagttgaacgaggcggaggtggcacgggcgatgatcagccgctactggcgcgacctgtacgagcgagcggaatgcgacgtggtcattgtcggggccggcagtgcggggctgagctgcgcgtactgcttggcaacgcggcatccgcacctgagcatcgcgatcattgaggccaacgtggcgcccggtggtggcgcatggcttggcggacagctgatgagtgccatggttgtggacaaggagatggagccgttcctggacgagctggcggtgccatatgaggagggtggccccaattttgtggttgttcctcatgccgcactgttcacagccacactgttggcaaaagtgcttgcgcagccaaatgtaaaactgttcaatgcaacggcggtggaagatttgattataaaacggcaacaacaatcagaaacaggcgaaggccctggcaaaagcgtacaacaacagcaacacgttgtcggcgtggtcaccaattggactctggtggcactgaatcatcacagtcaaagttgtatggacccaagcacagtgatggccaaagttgtgatcagt

SEQ ID NO: 89503 - DNA, 644 bp, Heterodera glycines
atttacaaaatgttcttctgtattgtctgttggtccacttatttgttaggaggttttttcggcaatcattaagaattggtgtcccgacgaaaaatttttttctaaatttgtcgagtttccttcacttactgtgttgtatgtctacatttattttgaaattttgcacttacaaatgtcaaatcctcaaacgtacgtccattctttgattcccccctcttcctgttgatgctgctgctgttgtgtttgctcctctccgtctttttcatagcgttttatcgacccttccccgtcctctcccccccccccggcgtccctttcctccccaaacaccacagccacaccaattcattctcttctaactttccaaaatgtcccaaacaccacagccaaccaattcattctcttctaactttccaaaatgtcccaaacaccacagccacaccaattcattctcttctaactttccaaaatgtgacggcgtgcaatgaatttccctctcttccttttccttcatctttccgcgtgcggaagcagagcacaaactgtcgctggcgaacaccgaaatttcacaatggaagaacaaatttgacgctgaaatggcactgcaccacgaggaggtggaggacttgcacaacaacatgatg

SEQ ID NO: 89504 - DNA, 716 bp, Heterodera glycines
atgacacattcggacaatctttggctgatgatggcaaaagtccgacgatgaatagcgattttatttttgttggtgtgttaagtgcgcaggtaaattgatttaaaaaaacaattcctgttgagttaatccatcgattataccctttttttacgtttttttgataaagcatttgcttctccccgtccccacagcgttttctcgacacgcgtgcatttcaaatttggcgcagttgggcgcgccgagtgcctggccgcgtgctgttctttgtcgccgacggcactgtgctcagtgcgcgagtgcgtgcggcgcgcatgccagtggttgtgttgcgtggcgtcgatgacgcgtaccctccgcagaaaaaagcgtttgcaatgctccgctggatgttcgacaatcagctctccaacttccattggtttctgcgcgccgatgacgacctttacatacgcaccgatcagttaaagcaatttttgatcggcatggaccctgacagagcacatttcatcggccaggccgggctcggcaattccctggagtatggccaactgtcgttgggtgcccaggacaattactgcatgggcggcccgggtgttttgttgtcacgtgaaacattacggcaacttggcccccacttggaaaactgtttacgccacttggtcacgagccaccaggacctcgaattgggccgttgtgttaggtcggacgtcacgtgg

SEQ ID NO: 89505 - DNA, 936 bp, Heterodera glycines
agttcttctaccttcgaatttggagtgccaagctttgtttagttgaacatgtcatccgtttctgctggtggcgatggaaaaacacctgctggccatacaattccaccaccaaaaacatcgggagcagcgacgggcggtcagcagctgagcgcaagtgcgaatcaattcgtcgataaaatcgacccattctcaaaacgaggaaattcacgccgcagacgacgcttgatcggcagcagtcgttaccacgcggacaatgagccggacttgacacaattaccgctgatcaaggatgccggtcaggctgaccagacttatctcgcaattcaaaaactccagcaatgtcagaaaatcttcgatttttatgatcccgtatcgcaactgaagagtaaagagataaagcgggcggcgcttaacgagctgattgactacatcacggcaaccaaaggagctgtgtgtgagccgctttacccagaaataatcaaaatggtgtcgaaaaacattttccgtgttcttcccccaagtgacaattcggaatttgacccagaggaggacgaacccacgcttgaagtgtcatggcctcacttacagctcgtttacgaattgtttttgcgttttctcgagtcaacagattttcaagcatctattggcaagaaatatattgaccagcgatttgttcttcaactgctcgaacttttcgattcggaagatccccgtgaaagggattttctaaagacaattttgcaccgtatttacggaaaatttttggggcttcgtgcgttcattcgaaagcagatcaactacatgtttttgtctttcgtatttgagactgagtcattcaacggagtgggagaacttctggaaatccttggaagcatcatcaatggatttgcgcttcctttgaagcaagagcacaaagtttttctcgtaaaagtattg

SEQ ID NO: 89506 - DNA, 801 bp, Heterodera glycines
gtgatctccgcctcttccgacaccaccgtcaaagtgtggcacacgcgcagaaatggcgcgtgtttgtccaccctcaaaacacacaaagattgcgtccgctgcttggcttatgcccggtggcccaccgaattggtggcgagtgccgggctcgacaaatgcatttacctttgggacgtgaacacactgaccaaagtgacggccaccaacaacacggtgaccacttcgtctttacgcggcaccaaaaattccatttactctttggcaatgaatgagtgcggaactgtgatcattgccgggtccactgaaaatttgctgagagtgtgggacccgcgcacgtgtcaaaaggtggccaaactgcgcggacacaacgaaaacattagggcaatttcggtgaacagagacggcactttgtgtctgtccggcagcagcgatggcactgtcaaattgtggagcatcggccagcagcggtgcattggcaccattcgttgccattcggacagcgtttgggcactgcaaacggactctgtttttgccaccgttttttcgggcggacgcgaccatcgcgtgtttcgaactccgctgcgcaacctcaacgactcggaattgctgttcaccgaagggaaacccgtgcagaaattactgatggtcgacactgaccaacccaaacatttgtggacagcgacttgggactcgtccatcagacggtggccaatcgacggcaaagagacggaacggacggaggaggggccgcgggtcaacatgacactgcaaggtgctccaagcatccgaaaatacgccgta

SEQ ID NO: 89507 - DNA, 806 bp, Heterodera glycines
tggatatttcttcgtcccaattaaaaatcttttcggtatttctgctctttatcgacttcgtatttcccaacaaccatgaaaattttgtcactttggcacaatttagagccggtggtgaaaaattcagttttgcggaacggcgttttttgctctacgatgtgaaccccggcgagggcttcaatttgcgaagggatgtctatttgagagtggccaacacagtacggcagctcagagagaaaggcttcgactttgttcttgtgctgccgccttggggaaactgttggcattggcgcacaaagccgcggcagacgaaaatccgttggtctgaactgttcgacttggacagtctgtcggactttgtgccggtcatagagttcgacgagttcctcgaagctcagggcacttccgtcagcactgttttgtatttgcagcattacgcggagggatgggccgaaggcggcgaatacactctcaaatacgacattcgcccgtgcattgaggcggacaaatattacgctaaaaggggcgacaaatggaacggccatttcttcgattacgctgaccatttccatgcgaaggatttgcaatgtctgtccatccagggacagtcgagcacactcgcagaagcaatcgcacaattattccccgagggtcgttctttgatggtcgaccgtgccgaaacgattctgcacgaccaattcggcgaccatttcttttggaaggcgcggaaatcaatgcgatacgccaaaagacttcgttcgattggcgacactttccgcgccgaccaattggccaatacgtccgac

SEQ ID NO: 89508 - DNA, 617 bp, Heterodera glycines
gtttgaggtagtctataagtgataatttatcactgttaattattatcattaacaatggtagccgcgccagatgaagcgcaatttcatatttcgttttacactgacgaagaagagtgtaagaatttgttgcctgccgagtccatcaatgtgcccgcgtcttcgcactcggaccaactcaatgtgttgatcaaccaaatcgggtcgatgaacgatgacagttggaagcccgtccaattcgactttctgctccattccgtgctgttgcgctgctctctgctcgagttggtcgagcagcaacagttgtccctggagaatgtgctgcgcatcgaatgcattcgccagtcgcccgccccgcggccgaccgccgaactgaacgaagcgcaatgggtggccgatcttagaacattgagccacaattgtgttttgtccgtgaattttgccggtctgctgaatgtgtgggaattggccggtgaatggaccagagccgtcgtcaaacaattggacgacgaaccgttgaaatgcgtggacacattcactcaggacgacggaacaactttcgctttgagtggaggccaaaaccaaactttgactttggtgcgactgcgggcgcagaatag

SEQ ID NO: 89509 - DNA, 648 bp, Heterodera glycines
cattggaaagtgccatcttttgtccctccattaaaatgccgatgatttcaccggcagacaaatgcgtctccgattctgcctctgttcatttcactaatgacattgcccccgacgctctttgcctttgaccaaatgccaactttggacccggcaattccgactcaaagtccccacttggctccctcttccgattcgtgtgttggccaatgcgctttgattttcactgatcaaatgcgctcccaattgggctcggaacattcgacgggactgctgaatttgaattacaacgaattcttggctgccttttccaattcatctttcttcgattccttttgcaatatttatcatcaattcaatttttgctacacaaaatgcccacaaggatttatgcaagaattgttgagcagaagtgccgaaatagtggaccatttttgtgtgtggaattacaaagaaataaagacaaaattcggttgtttggtcgctttggaccgcgaaatgtccaaaaagtgtcttcattcctgcgctgggcatcacaaagctgtcacttctctgatgcaaaacttcaaacatttggcgatgaacagcgacccgacggaggccgaaaaatatttgggagaaagttgcgaatacgtcgggtgcactttgcac

SEQ ID NO: 89510 - DNA, 1328 bp, Heterodera glycines
cacggcacaaactgatgggcgacttggacgacgcccaagtggacgtggaacgcgccgctgcctacgcgggcgcgttggagaagaagcagaagggcttcgacaagatcatcgatgagtggcgcaaaaaatgcgacgacctcgcggctgagctggacgcatcgcaacgcgacgcgcgcaatttagccacggatctcttcaaggcaaaaacggtgcaggacgaactggcggaggcgctggagggcacgcgacgcgaaaacaaatcgctggcccaagagatcaaagacctgaccgatcagctcagcgagggaggccgatcagtgcacgagctgcagaagatcgtacgccgactagaggtggagaaagaagagattcagcacgcgctggacgaggcggaggcggcgttggaagcggaggagagcaaagtgttgcgagcccaagtcgaggtgtcccaaatccgatcggagatcgaaaagcgcatccaagagaaggaggaggagttcgagaacacgcgcaaaaaccaccaacgggcgttggaaagcatgcaggcgacgctggaggcggaaagcccgggcaagcaagaagcactgcgcatcaagaagaagttggagagcgacatcaacgaggtggagatcgcattggaccacgcgaacaaagcgtacgcggacgcacagaagacgatcaagaagcaccaggaacagatccgcgagttgcagctgcaagtggaggacgaatgacgccagcgggacgagctgagagagcagttcctgaacagcgaaaagcgcaaccagattctccagagcgagaaggaggagttgatgcaccaggccgaacaggcggagagggcacgccgtgcggcggaggccgatttgatcgaactgcgcgaagcagtcaacgacctgtcgaaccaagtgaacagtctgaacggatacaagcgcacattggagggcgaacttcgagcattgcacgcggaattggacgaaacgctgacggaactgaagaacgctgacgaactgagcaaaacgcatccgcggacgcggcacgacttgccggaggacttcgccaaagaactgcacactcgcaacacgtggacagactacggaaggaggctgggactcccaaatcatgagatgcattccgccttggaaccagccgaaggcgcggccatcaaggcgggtaaaaatcatcgcccagctaaaggaacggatccgaaccttggacagggattggatggcatgccaagccgtcccccagaaaccggccaaaacttccgctaggcttaaccgcctgttcaaaaacttgatttccgggggggaagaaaacaaaagaac

SEQ ID NO: 89511 - DNA, 742 bp, Heterodera glycines
gaaacactttgtgtaaaatgctttcccattctgcgcttccattcacacggcggaagcgttttctcgtccaaccattttttcattttcttcggtgattggcaaaatgctttccacctatgccctcttttatccgaccatcatctgctacattttctgcttccgcatttgggttgctactgcttcgacagcttcctaccgtacggcgggaccgaaaacgaaagtgccagacaaaaacgaatggatgaagcgatgtgcggcggaatacgagcgaaagtactgcgttgagacggacaccaaactgaaacagcagacgacgaagaacaaggagaagaagaagcagcagcaacagcaagacgaatcgccggaggagtattacccgaccaattacgagcccgccttcaattatgacaaattgcatgtgtccgatataacccttccactgacaattcatcaaaaggataaatatcaagcccaaaatggaccgactaaatacgaaccgaaggcggaaggacagcacgtgacgagttcagtaacaaccgcagaagcaggaaagtactcgagttcaagcggacacgcgagttcgtctgaaagtgaggaagaagaccgctgggaggagccaagaaagcggtcgcgaaaccgggaaagagatgagcgaaacggacgccacggggaaggtgaagacaaagcagcgaaacggtggtacaaaagcgacgagtcgaaggaagagaaaagagatggaaaa

SEQ ID NO: 89512 - DNA, 2486 bp, Heterodera glycines
  unsure (1)..(2486): unsure at all n locations
gttcaaccaaacacttcaaagcttcattcgcgagttgtctccctgtttatcgcattcttcgagtccgtaatcgcttccgggatagggcgtttatggacgtgtcatttgacgcgactaccctcaaaaccaatccaaaattacaccggaagagcctttagaacatctattgcccttcacacttccttcgtttgtcgtccttcgcttggcactgctgaaaagtcactgcaccgaaccgcggccccgaacccgagcctcacaacacttggacgtgaacgcggagcctccttgggaccctgatccgaacgcaattacctgacattcgttcccgtacattggtgaaattgtcctccattattgttagtgtcccatccattgtctcgtccctttgtttctgccgacttcgtctttgaagcggcgttcttattcaacacgccaaaattcgtctcttttccaaccccaaaggccttttcctactccgtctttcgtcctcttccttcgtcactgtgcgtcctcatcagttgaaggtcaaccaggagcgtctctcccactttcggttccggaagttggccgccttcgtccgtcgtctgaagcgaccgccctaatttgtttgtcctttcattcattggcattggcaactcggcattatttgaattccaccaactacaacgatcagcgctcttttcttcggcagaacatgacaaacttcggcttccccccttcgcccacttttcacaccgttcgattgcgcgagggtggcaccatcacagtgtttcgagacgtcgccaacgacgagtttcgccggcgtcgtccctcggaatttgctgcacaaattgcggaaagcaaaagtgcaaaggatgactgtcgtccttttttcgtcatgaacattgactgcgccgttgcactgcttgaactttgggcccagtttctcccacgcgtgcagcccttttatgcgctcaattgcaacgcggacccaatgctgcttcgcttgatggcctctcatcagtctgttgggttcagctgctcatccggcgcagaaatgctcaatgctctccattatgtgtcggctgaccgtgtgtttggcgcctttccctgttggactcggtcggcactgcgccaggcggaaacgtgtggcgtgtacacgctgtgtttcgacagtgagcgcgacttggaccgcatcttggccaaccactcaaacgccagattgcttttgcgtatctgcgtggacccctgcgcgactgatgcgaatgcgttgttcggagccccgcttgacgaggcagtcgaactgttgaagctgtgcgttcagttgggcctcaattgcattggaatttccctctcaactggcccttccactgatgataattgcaatttgtcatcatcgtctcttttccatttctcttccgtctatgcgtttgccattgaatgcagtgcgcgtctgtttcgcattgccattgacttgggcctacggatggacgtgctgaacattggcgatgcttttgcttgtccttggtcatcancatcgactgaaacggacgagtcactggcgcatttcgcggagttttgtaccgaatttaaccggtccttcgatgtccatttcccgtctgatggcattggccatgggcttcgcattatggcaacccctggccaattctttgcgcgttccccattttcatgggtcaccaatgtgattggaaagcgaagcactgacgcaagtgcagtgaccaacaacgattttgatgctggcaaaaccgcttttcattaccagactaatgagagttattacggcacatttggctgtcgaatgatggtcaacaccgaaccgcgttgtgcaccgctttttaatgacttcgacatggacacggaacagaaccaatgcttttattatggaacagtgtttggtcagtcgggctttgacgacggctcggacacggacattgtccaatcggtttgccactttcgccagttgaacattggcgattggcttatttggtccaacatgggagcgtattcatttggcaattgcgggtcactggatgacgaaatcaacgacgacgatgacagtgatggaaacgaatttgacacactcaaaacgccaccgattttttatttcgcttcgcaagggaattgggagtccgtctgtcacaagtttgatttcgcctttcttgatgagcatcaacagcagcgtcgtgctggtccgttgtttgcgtcttccgccgatgagtacctttcggattcggacagtgacggaagtgtgggggaagcgatggtacacagtgacacggaagagacggacggaggcggaacggagaagtacgaattttggccggtcggatggccgacaaaatttaacgactaaccattaaattcgcctatccccctattttaaacagttatttttctgtttgccccatttaacatttctcatcctttcctgatattttcactcaattatcataaattagctttgcaaaaaanaaaaaaaaaaaaac

SEQ ID NO: 89513 - DNA, 609 bp, Heterodera glycines
caatatcgcaaaaacggctcaaccaccacactcacccacgccaaccaaccaacgcaaagcacatacgactaggaactttatacaaattttaaaaaagtaatattttgtatatgcatttaatcaaatttctactttctttataaatgttagtttgactcccttaagagagccttcccttctcatgtacttgtacctaaaatgttgttggcacaaaaagtaaagggggaaaaagaagacaaatcatccgatcaagggctaagtctcaacagatcgcagtgtaaaagctgctctactgctaacaaccccctgaccagtagtcaagtcgtatacaagtgattttgcgccccgacgttccaccatggcacacgagtgctacggctttggcaatgtgcgagcaattaagcacgcacatcgggccagatgctggggcatttgtgctgcaccgcaagcggcgcataagtagtacctcccgacaccggggagcaagaatattgctatcttgcctaggcgggattctgacttagaggcgttcagtcataatccctcagatggtagcttcgcaccattggtctatcgaccaagcacatgaaccaaatgtctgaacctgcg

SEQ ID NO: 89514 - DNA, 659 bp, Heterodera glycines
gagtacccgccacagatgggcgaagacgtgacccaagtggtgtacagtacgccgctctacaaattcttcaaatatgccgaaaaccgcgatgtggccaagcgcgtgatgaaggaccgcgagctgaagaagatccggcttggcatcgaaggctacccgacgcacaaggagaaaatcaagcggcgcttcaaccgttccgaagttgtttacaactatgtgcagcgtccattcctccactgctcctgggagaaggaggaggcgcgttcccgccacgtggactttgcctgcccaattgtgaagagcaagtccaacccgagtttggcttccgccgcctccgaccctttgccgcagcctgcgccgttgcaaaacaacatcaacaatgggtgggcggcggagaatggtgccggcgaacattcggccaatttccagcaacggccgacgaatgacaacgacgggagcagcggaaatgagaatgagcgtcaaccattgcgctctccgcccgcaaacgtgcagaattcggcagcggatgattgaggcttaatggtttctgatgatatttttcaatttccactctcttctgtctcattgtgttcctttgacgcatttattttctatgcattcgtaaattgaaacttgtcaaaaaaaaaaaaaaaaaaaaaaaa

SEQ ID NO: 89515 - DNA, 222 bp, Heterodera glycines
agacgcattttctccattgaacgctttatccgcaatttgagtgagtgatggatggaatgtgattttcgatggaataggatgggaggacggaattttaagtcaatttctaattttaagattttttttggtggggaggattacgttttcaaccccaaaagtttgccatatttttgaacagggctgcaaactcgaactttttttttaaaacaaaaactttttgta

SEQ ID NO: 89516 - DNA, 840 bp, Heterodera glycines
atttctgtttttcaaataatccaacgaaaatccgcgtaaaatgtctaataagcaacaaaagaacgcaaactttggacagagatggcaacttgaatcgaatacgtccggaagtgattcgaagacctttctttgggggcagccacctgattttggatttactgccaagactcggaatgatttggtcgggcctcttccgccctcacaaggcgtcagtccgtcgaaaaaaaagccgagttcaaagagtcgtgtagacgcattccgtcccccgtgggaggacagttcggaggaagaaaaggagggcaccgcgacagagggaaagggcacggaggaaaagcgctgggacatggaagagagtgggtgggggcagcgcacgacggaacaggtcggaagttcgtccgttccgaatgctgaagtcacaaatgtcgcaagtacttccgtcgatgttgaccaaaacaaagacaaaaaccgagtggcccagcagcctttcttcggtcggcggcgacgtgtcgtcagcgcttttgagaagatcgttttccgctcggctaattccggcctcaccattctcatgcccagggaccaccccgatttggcggcggcctttcgaattgcttccgagacgtactcccacgggtacaacactgccaacgcgtcaaaggcgttggaccgattcgtcaagcgcaaattgctttgcgtcgagcaaatgcaatgtttggcgaaggaggcgcctacggcttggaattcgacggtgcaaatttgcagaaaattcatcacagtgccgtcaatcggcgtacaaaacaccaaattcgaagggcacggggcgacgctcaaagaagcggtgga

SEQ ID NO: 89517 - DNA, 667 bp, Heterodera glycines
gctttcaaattttccgtcccaccaccacctccacttccgcttccgctgctgtctgtctatctgtgccggttgaccaccgtacccttccgcgatgagcaattcactgtaccgtagtccaagcactgccggaggtgctctctacaaatcgccctcaatgagtgccttcgccggcggcgctccgttcggcgccatgtccgtggctgacctgggcagtctgacccgtctggaggacaaaattcgcctgctgcaagaggacttggagtcggagcgcgagctgcgcaaccggattgagcgtgaacgtgccgacctcagcgtgcagctgatcgcgctcactgaccgtcttgatgatgccgagggcacaaccgaccaacaaatcgaagccaaccgcaagcgtgaagcggagctgcaaaagttgcgcaaactgttggaagagtcccagttggaggccgaagacgcgctgaacgtgctgcgcaagaagcacaacgatgcttgccttgactacaacgagcaaattgagggattgcaaaagaaaaatgcgaagattgatcgcgagcgtcagcgcctgcagcacgaagtgatcgaactgaccgccaccattgatcaggtgcagaaggaaaagcatgcagcggaaaaagctgcagaacgcttcgagggccaggccattgac

SEQ ID NO: 89518 - DNA, 910 bp, Heterodera glycines
cattgcgtttccgcaaaatgtcaaatttgaattttgaagacaatttgcaacgcgtacaagtggaaattcaatggaagcaatgcctttataatccgatcgtcgctccgtttgccgacgtcggctcttacccaattttcactgacgaattcaaagggacgcgcaagtgcactttggatgtgtacgttcagggaaacttagagcatttggacgacaaagttgtgagttatggcagttctcatggcacttttcgtgccatcaattcatttgtctcgagaatcactcaattgagactcattgcttccatctcgtcccccacccaaaggttttcctcaccgttcatgacgttggcaagacgtatttgtcttgcgtggaccttgccaacagtccgacgctctctccgctggtcggtcagcgtgccgttttcctccacgtttctgtgccagggcaagcgcccggcgctgaaaattttgtcggagacttcccctccatggaacaattgggggacggactttcacaagtgatggagcagttcaatctgagcaaatgcattgccattggggagggcgcgggtgccgacatcgtttgtcgttttgcgatgagcttcccccaactcgtcgtcggtgccgttttggtccattgcatttcgacaacccacggaatcattgccagcatcaaagagcttttcaccaatttgctccttaatgatggtgaaatgactcacagcgcgtggaattggcttttggtccacaaatttggaaatcatgaaatggacaaagaaaagcgcaattacgtcgatgcgatcaaagcgggcggaatgaatgaatacaatcttagcagatatttgtacgcattcagtcaccgcgacgaactcacagatcggctgaaggatcaactgggcaaagtcgacgtc

SEQ ID NO: 89519 - DNA, 917 bp, Heterodera glycines
ttttaatccacaatttatgaaatatttgtattattcgagctgtccgaattgaaatgcccttcaaactaatcgcataattcgaacgggacgatgacagaaaacgaagacaaaaaagcaggaacaagggtatttaaaaaaacttctcccaatggaaagattacaacttatcttggaaagcgcgattttttggatcgtggtgaaactgtcgatttaatagatggaatggttctaattgacgatgactatataaagtcaagcaaaaaagtgactgtccaactccttgcggcatttcgctatgggcgagaggatttggatgttttaggcttgactttccgcaaagatttaatctcgcaattatatcaggtttacccagcaacacaaaacgagtccctaaggccgatgacgcgactgcaggaaagactgaagaaaaaactcggtgaaaatgcctttcccttttggttcgaaatccctccgaattcggcgtcttctgtcactttgcagccagcccaaggcgacacgggcaaaccttgcggagttgactatgaaattaaaacaatggtcggaggcgattcgacgcaagagaagcccaagaaacacaactccgtccgtcttgccattcgaaaactcacttactgtcctcaattggagcgaatccaaccgatggttgacgtgaccaaaaattttatcatcagccccggtggccttcatctcgaagcgtcactcgacaaagaaatgtattaccacggcgaatcaattgcagtgaatgtgcacatccaaaataacagcaacaaaactgtgaagaagataaaagttactgttcaacaaatggcagacatttgcattttcacaaccgctcggtatacttgcgatgtggataaaattgattcttgcgaaggttttcccgtcgggccgggttc

SEQ ID NO: 89520 - DNA, 1035 bp, Heterodera glycines
gtttgaggttaattattttgtccgtcctttttgtcccactcaaaaatgctcagtcgaatgttgtcctcggctgttgccgtccctcggatgtgtgaatcaaacaaaaaattgttgaggaaaggcgcgactttcgttggtcttctctgtgggcgaatggccaactcaactttcactgccacagttacccctcctcatcggctcttacgtccgttgcatatcaacgaaaaaaaattgttcggacctggtcccagtaacatgccaccactcgtccaggagggactcgttcaaccgttgcttggacatatgcatcccgagttcttcgaaattatggatgatgtgaaagccggcatcaaatacattttccaaactgagaatgcgctgaccttcgctgtttcgggcactggccatgccgggatggaatgtgccattttgaatctgctggagcctggccagaccattttggtggtgcaaaacggagtgtggggcttgcgggcagcgaatttggcggagagacttggcattaaagtgcatcgattggtcgtaccggagggagaagtgattaatttggacgattttgccgaggctgtggataactaccgtccccaagtggcattcgtttgtcatggtgaaagttcgaccggagtcgtccatcccttggagcgttttggcgatatttgcaatgcatatgacgttcttttcctcgtggacaccgtcgcctccatttgtggtgcccctttccatgccgatgcgctgaaagttgattgtgtgtatgccgcaactcaaaaagtgttaaactgcccgcccgggttggctcccatttcattcagcgaaaaagcactggagaaaataacgaagcggaaaacgcgagtgccctcattttatttcgacgcgttagagttgggcaattataggggctgtttcgacgaggcgagaagataccatgccgcggcggccatttcgggggtttgtgcgcgacgcgaaggtcttactgtaggtgcccaataaggaattggacacattggggaggcgcaccga

SEQ ID NO: 89521 - DNA, 641 bp, Heterodera glycines
gggtccgggcagaggccatcatcgcagatcgattaagaaaattgggaccccatcgttcatgggccatttgttgtcgatggactcgcacattcgatggcccgaatgcaagacgcctggcccacatttgcgaagtcaagaaatgaaattgcctagcaacattggacagaagaaattgtccaacattggactggttgtgacaactcgaaaaattgcctcaattggtcttgaatatccgcacgcttacgaagaaattgtgaagcagtacaacgactttcgttcccacattgttctcctgcaagatctgaagacggcactgcacaacactgagcttgaacttgaccaacttgccgcccaaatgccagccgataaagaatgtccaatcattgagccacgctttcgtgtgagcagcacattctacgaggaattggaacggagtccggtgagggtgctgaacacgccaatgactgagggaggcaaaggaaaagggaagggcaaacagcaactgaagccggcaccggtgaccggccgagcgatcaccaaaatgattgaagtgaacacagcgccaacaacagttactcgtaagagacggatgcactaccccgagggaacgccgccaacccggtctcaaacggccattcacc

SEQ ID NO: 89522 - DNA, 623 bp, Heterodera glycines
gttgtgcaaaatttttttgtaataaaaactatgaaaattttttatccggggttttagaggttgctgatcacgaatttgacatctaactcgaggtcatggactccaagaaccccagggaattctttttaattgggaaatcgacaataaggaattcccggaaacttttccgttctcgaaaatcgcatttgtcttcaattaattccttgcagaaagtgccactaccagaaaacaggacactgcacaattggagagcgccgacttagcatttgccaatttaatgcaggcggaagagcgcgttcacgagcgggagcaggaacaacggttgaggaacagccaaagtgttcaaatggaggtcgacaagttccaatcgtcgcaaagtttgaccgggaaaaggacgcacaaattcacactttgggtcgacaaatacgcgccgagcacctttctggatttgttgaccaaagattgctgttatggctccgtctttgggatgaatgtgtttttgagaaaagaggaggcaaaaaatgggaggggaaccaccgacgcatttcccagcggaacaatgccaatgcgacgtctctgtgggacaatttggaggagagggaccgaacacttcgaaatgtaac

SEQ ID NO: 89523 - DNA, 758 bp, Heterodera glycines
attcgatgccatccaacgcacagaaagcggacaaaacaatggcaaacggaaaacaacaaacgatcggtgaaaagcaacccgaacacaaacggcgtgtgatgcgacatcggcacattcgcctcaaaccgaatattcttaactcttcggctgcagcgaacgcttccatgaaaagacacccgcagccaaacttcgacacaatcgaagtgctcgaggaggagcacgagttcgaggttccaatcaacgaggaggaaatgatgcgctttcccgggatggaggaaggctcacaaaagtcggacaaaatcagcgtccacaggaggttttggcagctgaattggaagggcgtccacttctccggccttcccacttggctacaagacaatgaattcctccacttcggacatcgacccccacttccgagttttggttcttgctttaacagcattttttcacttcataccgaaactgggaacattttgacacatatgtacggtgcaatagcattcattggcattttcatttggtttttggtccaagccgaagatgtcgtcagttggcccgacaaattgatattctcttctttctttgttggagccattctctgcatgggaatgtcttttgcctttcacacagtccaatatcatttcgaagatatcaacaaattagttacaaattagactattccacatgtgcctactatcattaactcatttatcccttaactctattacgcatacttctaccaatgtctcccgagacca

SEQ ID NO: 89524 - DNA, 685 bp, Heterodera glycines
aaaacaaaatgaaaaacgcgtagaaaatggacaacaaaaatgtgttgagaacaccaccgggaacagcagcaattgggtgttcaccaccaccaccgtcaacaatcggaaattgctgatgatgcggaggaggaggagaagccgacgatttggagcagggcggaggagggacaccaccaatgccaatgccaacaaaacaacactcacagaggcgcgactgctcctgggacatggcggcgaccacctcggtgacgagtcgcgggtgctccttgaccatctcggcccagccgtcggtctaaaaattttaaagaaatccatgggaaattggaaaggtgctaggtcgttatttaaaaaaccatcattatgatttttgggccccggggtcgtttgggccccaacccaaaaatagaaaaatgtacttttttaaaaattaagattctaaaaactaagcctgagggatccctcgccacttggcataagctaggtttaattaacattcgctcattttttacaattttacttattccaaatcctattattttttaatagttaaccaatttgatgtgcattctgatttggacatttttcagaaatggctaacccaattgcaaccaaaaaacaaaaagtaaaattgtcttacgaaggccttctaaagaccttcgctaaaatgagttctgatgggatgaca

SEQ ID NO: 89525 - DNA, 1924 bp, Heterodera glycines
acaaccaagagcccgtgaccaagcgaggcttctgccaatttgtgttggacccgatcttcaaagtgttcgacgctgtgatgaacatcaaaaaggacgaagtggcgaagttggtggagaagctgaacatcaaactgaccttggaggagaaggaacaggagggcaagcccttgctgaaaacgatgatgcgcaaatggttgccagccggtgacactatgcttcagatgattgtcatgcatttgccatcgccagtcactgcgcagagataccgcatggaaatgctgtacgaagggccgcatgacgacgaggcggcggttgcaatgaaaaactgcgaccccaacggaccactgatgatgtacatctcgaagatggtgccaacctctgacaaagggcgcttctacgctttcggtcgcgtgtttgctggcagagtcgccactgggatgaaagcgcgtatccaagggccgaattatgtggtcggcaagaaggaggacctctacgagaagaccatccaacgcacaattttgatgatgggccgttacattgaaccgattgaggacattccggccggaaacattgcgggactggtcggcgttgatcagtacctggtcaagggtgggaccatcaccacctacaaagacgcacacaacatgcgcgtgatgaaattctccgtgtcgcccgttgtccgtgtggcggtcgagccaaagaatgcgggcgatttgcccaaactggtcgaaggattgaagcgtttggccaagtcggacccgatggtccaatgcattttcgaggagtccggtgagcacatcattgccggcgcaggcgaactgcacttggagatctgcttgaaggacttggaggaggaccacgcttgcattccgctcaagaagtctgacccagttgtgtcctaccgtgagacggtcaccgaagaatccgaaattgtgtgcctctccaaatcgcccaacaaacacaaccgtttgttctgcaaagctaggccgttgcctgatggactgccggaagccattgaacgcggcgacgtcaatccgaccgacgacccgaaaaatcgtgccaaaatactcaccgagaaattcgaaatggacgcgaccgactcgcgtaaaatttggtgcttcggaccagagggcactggtgccaatttgctgattgacgtgacaaagggtgttcagtacttgaacgaaattaaggattcggtggtggccggtttccaatgggcaaccaaggagggtgtgctctgcgatgagaacatgcgcggcgtccgttttgacatccacgacgtcacgctgcacgccgatgccattcaccgtggcggtggccaaatcattccgacggcgcgtcgtgttttctacgcttcggtgttgacggcaaaacctcgtctgcttgagcctgtctatctcgtggagatccaatgtcccgaagcggctgttggtggcatttacggagttctgaaccgtcgccgtggtgtcgtctttgaggaaagtcaaattgccggcacaccgatgttcatcgtcaaggcacatttgcccgtcaacgaatcattcggattcactgctgatttgcgctccaacactggtggtcaagcgtttccgcagtgtgtgttcgaccattggcaagtccttcccggcgacccgtttgatggcacttctcgtcctggtcaagtggtcactgagacgtgaaaacgaaagggattgaaggagggcattccatcgcttgacaatttttatgacaaattgtaatacatggatttaaattatggcggtgtttttgtttgttggctgacacaatacacttgttgtccttttattatgaaatcattgtggtcgtatgtaattttatcttgttaaaaaatttaatgttaaaaaaaaaaaaaaaaaaaaaaaaaaaaaaatcgagactagttctctctctctctctctct

SEQ ID NO: 89526 - DNA, 647 bp, Heterodera glycines
ggtggggacgcagtgccccttccgagtgcagttgctgactccccttttctcgaggtcgatttgaataggacattaactccgcaatctcaatggacaaatgagtcgactggcactatgcatcctatcgttgacactgagccgaatccgatccgagacgcacatgagccaaatcacattttccactattcaccctcatcacactctcccgacgacgacgaaagcagtcaaaacggacagagttcgtcctctcagtcagcgcccatcagctcagctttagacgcttccttgactaatttatacaaggaaaaggaaaacgacgaatgtgatgatgaacggagcatgccgagaagggcgtcggagagaacgctggacagatttgaggacgtgagaacgattgcctccagtgacattgaagttattcgccaaatggacgattggtcggtcacgagcagttatccgaacagctcccaccagcagagcaacacacagaaaattggacaaattcggtcaataggagaacttcagcaaagccaaacaccgccagagttaactaccaaattggacacttcagaacaatctcagcgagaaatggacgagaaaattgccgtattaatggccaaattggcgcatagggaccaaaagataga

SEQ ID NO: 89527 - DNA, 972 bp, Heterodera glycines
tctcctcctccccctcttcgtcggattcttccacttcctcctctttctccgcctcttcctcttcttcgtccgcttccgcttcgtcctcttcgtccggcttgaactcatcggcatctccttcttcggacctgttccccaccgtccgctggggtcgtgccaacgcactcaccgctctgtctgccagtctgccgatttgtgcccccgcggctgtgccctcttcctcctcatctctctgctcggtctcctctccctcgtcctcctcttcctcgtactgcaactcctccttcaatttcttgcgcatattcaccgccgcctttcgcaggggccgccccgtctccgtccgctcgacttccctctccactaatgtctcctcgtcttcgtcgtcttcctcttctaaagaactcgcttttggcccccattttctgtggtgcgtttggcttttgggtgcctttgacttttttctgctcgaaggcccagcttcgcagtcagtgtcactcagttgcaactcattttcatcatcgctactgctcgacatttgtctaattttcatttttggccggttattaggcgggaaaagtaacctcttccgtttttttgctcgtccgattcgctttccgacaatccctttcttttttgctgaaggcgtgtaatcgctgtccgaatcgtcgttgataaattcgtcgtcacttcttcggcgtccctggaagccaatgccccttaaaaatgttttggtacttttttgtggctctttgccaaatcacctcgcagatcgcctttccgagggaagatactcgtcctccgatggttctgggtcctcttcattttcatctgcactgctcgccttccattcgtcctaatttgctatgtctccggaatggcatttctcactaaccgtgtccgactcggacgcattgccaatgtccaagtcggtcagtcttttgccctttcgtccgcctttcttcgtcgttctgc

SEQ ID NO: 89528 - DNA, 682 bp, Heterodera glycines
gaacgtttatttttgaaaatgggccgacggaggaaaacggcgcctgcccttttgcgcaacaaacggacgcgaattgacgaggacgaaatggacgaagaagaagaaggggcatggaatgggcatggccaccaaaatatgggacttcgaccgagaaagcagatccaacggacaatcagtgcccagtgggccccgcgtctgcgcgaaaggcaccaaaatggacagaacacaacggaggaccaattggcggacatggaattggaggacgtggacatggatgaggacgaaatcgtcaaaacattgaatatggtgttcaccaacctcgacctctcccaattgcccgctttgtctcccggcgccggactttatgcaatggccaattatgcaattgaagagaaatccatcccgaaaagaaaggcggcggagaagaaggttcccgaggatgtgttggagcccactttcctctccctggagcaagccatgcaaagagatcagaatttcaaggggaagctgttggacgcgttcttggaggacttccgggagtattttcagacgtatttctcccgtccgaattcgcaaacatttgacaaggatttgtgtgtccgtttccttcttcaacacttccctttctgccgtgttccgctcattgaacgactcgccgacgaattcgccggtcgttacgccg

SEQ ID NO: 89529 - DNA, 655 bp, Heterodera glycines
attctttaaaaaacagcctgaagatgttccaaatgcttttcaaacgactcgctagccaccaatatatcgtcgatgtaaatgaagacaaaatcgttaagaattccatcaaacagccgagtcatgaatcgctggaacgtggctactgcattcgacataccaaatggcatgaccaaatattcgtaaagcccaaactctgtggtgaacgcggatttgctgactgagtcagggtgcatttttatttgccaatacccactcatgaaatccatcgtactgaatacttttttattgcccaacatcatcaaagtgttgtcaatatttggcaaaggaaatgcgtcttttactgtaattgcgtttaggcctcggtaatcaacgcagaaacggattgttccgtcttttttcgggactaaaacgatagggcttgcgtaaggtgaccaggaaggccgtatgaggcctctgtccaaatagtcttgtagcatcgttgccactttttctcggaatgcataagggacgggccttacacgcattttcacaggaggagctgtcccagtttcgacgtgatgcattacgaggtcagtttgtgtcaattcctggtcctcaaatgcaaatatttcctcaaaatcacaaatcagttgacaaattggccgttgttcatctt

SEQ ID NO: 89530 - DNA, 579 bp, Heterodera glycines
aaatttacattttggacgcaaacggagacaaacagccgatccatgttttcgaatcactccaccaacacccggtcattctcatgcagtacacagcggcatttgatgtagcaatttcctttgacgaaattggaatggttgaatattggtcaggcagcagaaatgagttttcatttcccaagacggtcaatttcgaatttaaaacggacacggatttatacgaattttgcaaaataaaacaaatgcccaaagcattggccatcagtccggacggacggacattcgccgtttgggtgttccaattcgtacatttacatttttgacttgagaagcggcaaaataatcaaaaaactcgacgaaactcttcaacgatacatcgaaatgggaaaggagactaagggcaacggactgccggcgatcgaatggaatcgccgtgttgcgctcgaaaaggaaatgagccgtgacccgaacgcactgcgattcatcagcatcacttacgacgcctccagcaactttctcatcttcccaactccgctcggcataaccgtgtacaatttggtcagcgaccaagtggcaaggcgt

SEQ ID NO: 89531 - DNA, 648 bp, Heterodera glycines
gtgaagcaacaggaacgcatatcttttcccttctcagttgactcaaagcgttttttacttttgcccaccgattttgtggatgaaaaaagcaaatttttcaaccgtcagtttctcaccatttatcgggcacggattaattgtcttaaagacttaattaaaaaaaatgcgcgaaatattcttgcttctacctccaataattctgttcaaatcgatgatttatcaaatttttctgccggcaatgatattttgctgatcggtgttgttttcaagaaaatgaaattccgtcaaagcattctttacgagttttcggatgattcgaatgttcccattaaaatggggagaaaagcgggcgacaacctttgcgatgacgaggacatactccaattggaggacgaccagcagactgttaaattgcttggaaacattgacaaacattgttttgtcactggcgatgtcattggagtgatcggctgtcaggaggatgtatcagacaattttgaagtgcgaaggattatttacccggaaatgagccctcaattggaatggcctttggttgagcatgattgttatattgtttttatgtccggcatttcattagttggcaattttgacaacgatgttcaaacgttttcggcactgatgcagttt

SEQ ID NO: 89532 - DNA, 640 bp, Heterodera glycines
tttaaacgaaagcacttcgcccattggtggctccaccagcagcaaaatgagcagcagcttcaaccagagctcctcctataatcgcactttcgaacgcaaagtgatcgaagagagtacgccgacaatgaccacgcggatgttcacctcatcaccactgaacacaatcaagaccactcttggctccggcttcccctccgacttgggcggactcggcacgggcaccggcaccaccttcgtccagccccacaactaccaattcggcaccgccacctcgggctcgttccactcgtctgacgacagtctgtcggtcagcatggactgtgccatgtttgcacccgaagaactgaaggtgtctgttgtgggcaaccaaattgttgtggagggaaagcacggcgaaaagcaggactcacttgggtcgattgagcgccaatttgtgcgcaaatttgccatgccgcgcaacgccaccgccgactcagtgaacagcaatttgaccagcgacggaatgctgacggtgaccgccagcgcaccgaaagcaaaggataattcgccgattcgcacaattccggtgaaaattgtcacaacctccgcgggcggacaaacgccacaggaatgggggaggccaatttcaacaaaatggcag

SEQ ID NO: 89533 - DNA, 836 bp, Heterodera glycines
ataaatgttagctaattagtcagcgtctatttattttctgtaaaaatttgcctctttatttaaaattaaattaatataatttcatgaaataagacactaaatgtatagagaatgaattaacgtggtcgattggaataaatggaaaaaaaagcaaagtcaaaacacaaaaccttaaagcactagccgattgaaataaatggaaaaaaaagcaaagtcaaagacaaaaccttaaagcactagccgattgaaataaatggaaaaaaaagcaaagtcaaagacaaaaccttaaagcactagccgattgaaataaatggaaaaaaaagcaaagtcaaagacaaaaccttaaagcactagccgattgaaataaatggaaaaaaaagcaaagtcaaagacaaaataggaactttatacaaatttaaaaaagtaatattttgtatattgtatatgcatttaatcaaatttctactttctttataaatgttagctaattagtcagcgtctatttattttctgtaaaaatttgcctctttatttaaaattaaattaatataatttcatgaaataagacactaaatgtatagagaatgaattaacgtggtcgattggaataaatggaaaaaaaagcaaagtcaaaacacaaaaccttaaagcactagccgattgaaataaatggaaaaaaaagcaaagtcaaagacaaaaccttaaagcactagccgattgaaataaatggaaaaaaaagcaaagtcaaagacaaaaccttaaagcactagccgattgaaataaatggaaaaaaaagcaaagtcaaagacaaaaccttaaagcactagccgattgaa

SEQ ID NO: 89534 - DNA, 699 bp, Heterodera glycines
ccaagtttgaggtcgacacaataaacatactcttattaaaattgtgcccaacttggtctatttgcctggacgaaaaccggcacgactcatcgctctccgatcggtcccgaccccctacattcccccgaacggctactctgcgcgcctcgcccatttcatccccttcccgtccccttcaccccgcagagttcgacgcaaatttcttgtcgccacgacattttttgcctatcaaatattcgcaataaatgcccatctatttaaaaaatattctattctattaaaatgttctgtattttgctatatattaagaatagccgtacatctaaaggagtcagtaattgaacaaatttctcaaatttcaagaaaggttcaggcagtcgccgtaaaaattgtctatataaaaacaatggcgatacgcatttctgcactaggtcctttttcaaaattgatgtgcttttattgaaaaacatgtttaacgggccacaaattaatagacaaattcaggcacattcttaaaaaattctgcttttaattagttcatttaatagattatgcttttgctttgtttttttaaattctacgcccgcgattatctgataggacaatgatatcaataaattttcttctgaagaagcgaagagttagcccaaacgttttccttcctttctatttaatgatctatcatttcagatataacag

SEQ ID NO: 89535 - DNA, 869 bp, Heterodera glycines
caagtttgagctcagatattatgccatttttattcccttccattgttactacgaataatacggcgtttaatcggattaacgacaaatcagcaaatgttcgccaaaaattggatatgatggaaacagcgcttgtgcacctaacgactaacaaatgtcagcttaatttcagtgccgaaaagacaagatccgatattcgtcgggccactgacaagcacatttctatgttgcgtgaacgcgaattaaaactgtttgaagaggttgaccacattcatcagcgagaacaacagcttatagaggaacaaatggaacaactcaaccaagccattggcacttctaaatttgtggtggagaaaatggccgcatttgctgatgaaaagaatttagaagaactcatttctgtggaattggaccaaaaaatcaatttgcttgataaattggcaaattcgtccaaaggtaccaacatcgtattcagtgccgcttttcaacagaacatcccgcttggtcaaatttatgttggatttgccggtggttcggcttctcctcaggcgaatgccaacgacggcgtttcgtccgttgcttcagatcagcgactacactttgagaatggcagcgagatcagtttcgatcaatttgtcaacagtgcgctcagaggagagacatcggtcaaaggtggcactgatcaggccaataatcacttggccaattgtgcagcaaatggagtaaaaagagaaatgttggtgccggacgcgacatttatggacaaacttcgggttgcgatacgaaacatcatacaagaatcgccgcccaatagcaaatggaatacattctcgagaatcaggcagaatttgtacttcgatataatttgtcag

SEQ ID NO: 89536 - DNA, 1105 bp, Heterodera glycines
caagtttgaggctaaagttttcatttgacttccccacataaatactgacaaaaacaaaacgcccccgcattctttgtctaaccgactcaacgttgagacatggcctctgttgatgagaatgagcagcttgtgcaggaaattgtcgggaatgttctgtcggaatcagcaaaagaccaccagcaagaggagggaacggaacaccaattgatggacgaagtcgtcaagatggacagcaccgatgccgaggcggaggaccatggagggattggacatgaagtggcaatttcggtcagtgacgtcaagcaggaagggtacgcagtggaaagtccggtgggagaggaagaggagaaagaaacggagggacaaaacgacggcgcaatgcgacagattgccgacaaagttgggggaactttcactggacgaagacaaaacagcgaacaccgacgccgtcgtggaaccgccgatggccacggaagagaaggcggcggacgttggcaacgacaaaccgtcgggagagaatttgaatgaggaaaacaacgaaagcaaaggctatcaatcgccagtgtcggaggaggagcaccccattcagcacgtcgacgcaaaacaaccgactgttgacgaaggacagacccatgctgctgctgctgactctctgccgccgtctgaaccgaccaccgattcttcagcggaaaacgatggcaacaacgaaattgtctctcccactgcgctcgagccacaattggtgcccacttctgatgaggaggagcagaagccaaagaatgccgtcgaagctggggacgatggtgccgccaaagacaacactttgagcagcggcggcgccacggcttccgacgaaacggccgctgtcgcggcgttcagtgccggcactcctccgccggttccggcggttggccagcagcctcaacagcaaacggagcaccaacttagccaacatcagcagcaggcggaactgtgcggagcgaagacggcggtggcggcggagtccaccgcccgcgacagtgccgaggacgaaacggatgcttcttcgtctgctcgtcaatctgtcccggccaaaggcggcactgacggaaaggcgcacggcggt

SEQ ID NO: 89537 - DNA, 656 bp, Heterodera glycines
gagtaaacctaagtaataaatagtcaaactaaatcttcttgctcgtcctcattgctcaatgcatacaacggcagcaccgccacctcatcagccttctgttgtcatgtcggcaattgatgacaacaattcggtgcgctttccgatcattcaagtggaagtgaaaattcgagtgcctgaccatcttgtcggtcgactgatcggcaaaagtggcatctgtgtgaagaaaataatggaggacacccagtcgcacatttccatcagcgaatcacgaagtcaacaggaggtgaatcagtaccaaactccggagctgctcgaccgaatcatcaccattcggggcactgcttttggctctgtgatggcggccgagaagcaggtgcagcagaagttgcgccacattcaggaacaggacatgaacatcagcgggggaggcggtggagtaagcgcagcaagcggacggcagttctgccccacgcctgtgcctgctccgcccggtggcattttgcagtctatggacggcggtggaggcgctgccattggttcgtacattgctccgtcggcggtcactgtgacgggtgcgccaatgctttcccgtggtccgccggacaatgccttccatcaccatcctcccacagccgccgccatgtacagtgcgcaat

SEQ ID NO: 89538 - DNA, 633 bp, Heterodera glycines
cttctaaaaacgttcgatccattgcaaattagcgcaaaaatgttgcacagttttcgcggtgttcgcctttcttcccataccaacaacacatttgagttctcctcctccttctcgtcgtccacttcaacaacaacaaaacgtacaaaaagcagcaacagcaacgaggatggcagaacgccaacaaacggcaaaaatttgtcaccaaaaaaacgcaaccattcacaacagcgtcagcaacagaacgacagcaaaaaaagcgcattgtccacagatttgggcctcaaatcagtggtggtacagagaaagctgaacatccagacgaattattcactgcgtgcagtgcgcaagaaaatcacggcctccaacgaattggtggtggagcaggacgaaggggtcgcaaaggccaaaccgccgaacgaacaccgctacaaaagagccgccaaagacgaaaatgaaaatgacgcttttggcgaggacgacggggatgaaaatgattacgatggtggtgaagatgagcatggcatttggctaaattggcgcgccaagaaacgggacaaccaaagcaacaaattgggcggtggccaaaattcgcaaattggcacggaacgggggtcggcacaggcccgactgatg

SEQ ID NO: 89539 - DNA, 349 bp, Heterodera glycines
caagattataataattataatgttcaagaacattttcttcttctttttaattgttgcgccatttattgctgcttataaaccaagttgcaaatgtcccgaaaatgaacagccaggccaattgagttgtaacggatgtgagccgagttgtgacaatcggaaaccggaggtgtgcaccaaaatggcatgtgaatgctcatgcgactgtgtgccgggattgctgcgagacaaaaagacgaaaaaatgcgtgccgaaagagaaatgcccttattaaagaggacaattgagtgataaaaaatgataattaatgcatttggagataattagtgaggaataaattaatgttgaaaaa

SEQ ID NO: 89540 - DNA, 749 bp, Heterodera glycines
tgccatttgccgtttcgccctctttcaactttttgcgtcgtccgttccctttgttggtctttcgtcgttccctttttaaaccgccattggactcaccgttctgtggcatttacaggacaaaaatggctactaaaaatgggagaattccttatgaattgcttttcgaactcatttccgctcttccgtttcacattcgatgggccgtcacccgtgtttccaaggcttttgatggttttgtgtggcagaagcaattttcatgggttagagctgagctgatccgcaaggaagcacaaaggcaaaaagaaggcggcgcattcctccaaatggttgattctctttcgacggctgtcaattcgctttcggaggcttctcactcgctttcgcaagcttctcactcgctttcaaactcggcggcgcaggaaatgcacaaaaaaaacaaatcatggttcaacttttttacaaagcaggtgtattcaatgcgagacgaaattaatacaatgaccgctgaggcccaaaatgcggacaaagaggacggaggaaatgcgggcgaaggaggagacgccgccggaggaaacggggccgacaaaaagggggccagaaagaggcaccacggtgaacgttgaggaatcttttgcggaatggctttgtcctgtttcaaccacggacttggtttattacgatttccttgaatttttttgtgtaatttctcttctcctaatcagacaacgcattagagacggataaattat

SEQ ID NO: 89541 - DNA, 655 bp, Heterodera glycines
acgccatgaattgatgctgttacggatgagcgatgtaatttcgaatggattgggaaatcaccgtcccgataatgcatttgtcttcccaacgattgcacaacatcccaacgaaatcaaacccacaaatgcgatgagaagttcaaacccattggttggtctcgcttcgtcacgttcatctactactgcatgttcatcattgtccgggaaagatgacgacgaacaacagctacagaagtgttcgattgatgcagcaacactttgtcgtaatctgatcagattcgcctaccaattgtcagctgctaaacgacgaacactcgaagacccggagctgtatcggatgcgcactcactcaaaaacggaggagagactgagacggaaggttgtcagagacatgattatggagtgagttactcgaaaagagggcctgacccacttctgaccgcgaacttatttattcctttcttaagaatgcccggaaagttggaccatgcctcagtggtcgcttacaaagttggaaaatggcctcgccacgcagagagtcattcactgagaaggagagtaacggaatgggaaggagggatggaattggacggagttttcatggaaaggcacggataccgtgaaccaaacgatgaagacgatggtggggcgagaa

SEQ ID NO: 89542 - DNA, 1374 bp, Heterodera glycines
tttatctttaaaatgattccggactcggcgtacatcgaaatcatgaaaaactgctcaaaatggaatagccgaacaatgggtggtagaactcggtcacaaacggctgttttcgatcaacaaaccggaattgtgcacagaccgaccgagcatttgtttcgccatccctccgaacgctgtcgggctcaaaatccgatgcaggtcttcacttatccgcctgtccgatgggttaaacccaaaaataatccctcggccggcatcgaaatgaattattttatgcgtgcgaatccttcactgaaaagcgcaatatcatcaagtgttgaacagccgcaaaatgcctcaagcggagagcaacaaatcgcagaggcacaacaacaaatcggcaccaatgttccgtcagttcgaagtgccaccggcggaagtggcacaaagtcttacattgagaatgaattggacttggctgaatacgacctcgatgagttggaaaccaacgatcagtcggacgaggaagattggggagccagtcgaaaaaaacgcaagaagacgggaccaggttttggtggaaatgtaccgggccgaactgcgcgaaaagtaccgtcaaacatttcgtctgcgaccgccaaaaaggagcagccgactgacaatgggtcaaatgggggaacgcctactgcagcaaatgtcatcggcggcggcgcgggggtcgcaacgacagccacggaaacgcgcccttacgtttgccagttgtgcggcgccaaatacaaatcgaggcccgggctcgcctaccacaaattgcacgttcatcaatcggactcgaacaatgagacgccgaaaagtccgataatctcgccgaaggtgcaagtgtctgaatattgtgacttttgcctgggtacgaatttgcaaaatgcggagggcgaggcggagccgctcatttcgtgccatgattgtggtcgttctggacatccgacctgtctcaaattcactaaaaatatgctcgtctccacaaaacgttacggttggcagtgcatcgaatgcaaaagttgtgcaatttgcggaacatccgaaaatgatgaccaacttttattctgtgacgactgcgaccgtggcttccatttgtactgcttgaagcccccgctgaaagaagcacccgagacggattggagttgccatctgtgcgtgaaggaattcggcgccgaagcgtccattgcgaaggcgacaaaaagcacggaagacggcacatcatcaccagccaaatgaccaaaacataatggaaacggggagaattgacaccgtaagacatttcgaattttcaattttgttgcccatccaacaaactaaccataatttgtttgtaatttcggatgaatgaagagatggagt

SEQ ID NO: 89543 - DNA, 575 bp, Heterodera glycines
ctttcaacgaagtcggctcccgagacgcgctttttttactgtccgttcttcagcttcatctgaccatttcagtgaacattgctacgatcataacaccaaaatttatgatttcttccgactcgcaccgacgcgcgttgggagacatcgccggaatgggcgtcagcggaagagcgcacccatcgctggccaaaatgcgcgagaatttgatcaatggaaccatcgactttcaggaagtgccgatcatcgacatgaaccccgaggacattcgggctgagctgaagagagtctacacgcagttgaggatgtacaagctgaagaacgcataccaggacaacccgcacatcagcaaacggaaaggcggcggtgccgtaaagaaaagcgccgcgggcgatgcgactgtaagcggaagactgtcaagcggcgcgggccttagcggtgcgggactaccgaagggcgtccgcggaacggagggctattgtgccgtaaaacgcaattccatcccccgtgaggcgacaccgaatgctgttacatcgccaaagcaattgcatggcgctgatcgcccgcctccgctcgtt

SEQ ID NO: 89544 - DNA, 132 bp, Heterodera glycines
tacacacatattcgcttgcccctgatgagtttgactaattgtaagatgggtctctctgcttgctgtttactgttgggcaatttgaatttttgcattcattcaaattcaaatgccacccgtaaatgggtcatt

SEQ ID NO: 89545 - DNA, 614 bp, Heterodera glycines
gtgagttccgctgctcattttttgtttatgctcaagtcggctgttctgttccttttgaatttgttctacccttttgctaatttctgcttggatttgttgcccaattcgtcccccatgggctccaagtcgacccctgcaaccgccgacgtcgcttatgccaattatcggctgtttgacgaactgaacaggaaagtgcgggaaagtctgagaaaggccatcgaagctgacgagacgaggattgccaaatcgcgagtgatcggactgtacgagaatgtgttgaagcaaataaacaaagcattggagatacggcacacttcgtgcccttcacacaagcagacggaaatgcaggaacagcagaaaaaattaaaagcctttgttggacagacgaaggatcggctggaaaagttggcatccattgagccgatggcgcttagagcgacgcctcttccactggcaacggtcgaaaccggcaacaacagagcaaggagaatgccgtgcacttccacggaccaaaggctcgtctcaaatcgtcaaaatttgtccaaaatgtctctgctgaaaagcgtcgactccaaactcggcgatgaaattctcgccaccatcgtggaaacgac

SEQ ID NO: 89546 - DNA, 1138 bp, Heterodera glycines
ctgaaggtgtccgttgtcggtttggaacgcgcgttggagcagtacacaagtgctgctcattttgatgctccatttgacctgaagcaagtgcctttgtccactgagccgttgaccgcttcaaccgatgaggtgaaaaagaaagcggcgatggtggacgatgcatcggctgccatgaaaaagcagaaggaggagaagaaaagcggtacttcccgacaggagcaatttgcacttcaattcgcgtccatgccggaatttgccgcctgcggtgccctgttcaagtcgtgtgccgcggttgagctcaccgaaaccatcactgaatacaatgtgtcatgtgtgaagcacattttcaacgacgactttgttcttctgcagtttgactgtcgcaacactttgaatgaccaactgttggaggaagtttttgtcgaaattgagccgcaggatgagggcgaagattgcccttggcatgtgcaaagtgttcacccgttggcccagttgcccttcggccagccttgcaccacttatgtgctgctcaaaatgccggaggacggacgcattgccggcacattcggcgccaaactgaagttcaaaatttgcgacgtcgacccggcaaccggcgagccggaaagcaacgatttgtacgacgaagtgtacacgttggagcccatcgaagttggcctcgccgactttctgttggccaccgcgccgaagggcgcctcatttaccaccgcgtgggacgcgctcaaggaggaggggcacgagacggaggagtcgtacgcgctgtccaatgtgcacacattggaagatgccgtctccaaactgctcaaatgcaccgcccttttcccttgtgagcattcgaatcgggtgccggagggcaagtcgtcccaccagctgttgctgtgcggcattttccgtggcggcatcgatgtgctgtgccgtgtccgcctggtcatggacccatccgaccagacggtgtccatgaacatggttgtcagatcaatggacgaaacagtcagtcaaatgatcgcaaacattgtcagctgaggaacggcaaaaaacattcattcatctgttgttacatcaatgataatatttctaaatttacactatttgattgatggctggattttatttatttact

SEQ ID NO: 89547 - DNA, 586 bp, Heterodera glycines
tccggccaagagtgcaccaccggacagtgttgtcgtcgttgtcgctgctgttgaacatcaacaacaacaacagcagcagcagccgccgctgtcgtcgtcgtcgcactgtcctcctccgccttctgttccttgtacgagtgcctccccttccatcgctacgtcttccattgttcttacgtcaacatcttcagcagttccaccagcagcagttgaacaacagcaacaacaaccaccgccaccagcgcagcagaataataacagtaacaatcagccccagcagcagcagcagcaggaatcagccgctgagaagcttgtcacttcattcatgcgatacattggtcaacgtcccggtcaagatgggcatgccttggtgcaagagtttgtccaacagtctgctattcctgtccaattccgttcattggttgctgaacagcttaatcatattgtggcagctgcgcgcgcgaatgtgtaaatttggagagagagagagacccacagagaaagagtgcctcgctgatctttttttgcgttattttattcattgattatcatttgaattaaataaaaaaaaaaatttaaaaaaaaa

SEQ ID NO: 89548 - DNA, 570 bp, Heterodera glycines
agatgaatcaatttctccttaacttgtcctcttcctactctcaatggatttctaaggcttttgcttctactggaaagggaagatggtatgcacagccattagatgaaatgagtcgacatcggagtcgtccgccctgttacggcatggcgaggaggtcgaaggtgctctgcgtggacaattcagagattgccaaggaagcaaatatgagtgggaagctggcctatgtcatttgggtgtacaaagacgggtaccgcaaaaggcacatgccgaaggcagaactcggcgacagggtgttgctctcaattagaggggagatgaaacgtgctgtcgtcgtcgggtgcaagcagcacctcgccatccgaaagcacgggttaccctccaccgacaccaacaacgtcgtcctgctgaacaacgacgggaaccctcttggcaatcgcattttggcacctgtccctgcctattttatgcggtatcgcaaatggctacacgcttcaaaagtgtcggcgttagtcaagaaatttgtttagaaaactttttttgaattgataaaaaggttggcgtgctcaaaaa

SEQ ID NO: 89549 - DNA, 748 bp, Heterodera glycines
tacatatttgttgactaaaagcatgtttctttaaatataaaaagtcccatcatgtcgaattccggcgaattaactttttccgacaaggatgatgtcaaaggtaaaactgaagacgacaaatcccgtggcactaaaaggaagaagcgaaaggactcgcctagcagcagttcgtcgacatcttccagctcatcttcctcctcttcgttttcatcttcttcagagtctgacgacacttcgctttccgaaagtgaaggccctcccgcaccgagcaaagtcaagaaaagtaaacttacgcacgtcatcaacccacgtaaaatttttattcacgaatatttgatgagcaaattgcacgtttccgatgtgaagagacttccagcggaaataagtcaaaagtatcaaatggtgcaaaaagagctcattgggaaattcgcatcgggagactatgccaagaaaccaataagtttccgaatcgacgaaattacgcttgcgggggcggcagcacagaaggctttcaatcatggtccaacagtcgctgagtactttttgaagaaaaatggtattacacttaaacatccgcaattgccttgtttggtgcaaagcggcggtggaaagcataaaagcttttatcccatggaactgttgttctttgcccaataatttgaagatgtccatttctttttcattttttatttgtttatttttctataagtaaaaatttcgattaaaaaaaaaaaaaaaaaaaaaaaaa

SEQ ID NO: 89550 - DNA, 630 bp, Heterodera glycines
gccttctttcacgcggaagttgagaagcggcggcaatgcgttcgcgaaaggccgacgccgcgcaagacggccagctcatgggttcagacgcagtcgctgctgaagcggtcgctgattgacaattggcgaaaccccggcctcacccgagccaaactcttccagaagctcatcatgggcgtgttcatcggactgttgtacatgaacacacagttgaacggtgtcggcgttggcaatttgaacggggccatgttttatatcatcgctgaactgacctactccacgctgttcggtgtgctcacctttttccccgccgactttccgctgctcgcccgggagtaccacgacggattgtactgctcgggcgcctattttgtcgctcggtccgcctcctatttgccgctgttcaccatcgacggcattctgatggtgaccattgcctattggctgatcggactggtgcccaccgtgggccgctttctgatcactttaggcatttccttcctcgtcgagcagtcggccgttgcgtttggcgttatgttgtccgccgtgtgcccttcttaccccgtcgccgtctccgtggccggcccaattctcaccattctgtcgctgaccggcggactgtacgccaac

SEQ ID NO: 89551 - DNA, 849 bp, Heterodera glycines
gagttccatgtccattcattgcttaaccgcattctcaagaaccgcctcaagactgtccaagacggcgagggtctcgattggtccacggccgaagctctcgctttcgggtccttgttgacggagcgtcatcacgtccgtctttcgggccaggatgttgagcgcggtaccttctcgcagcgccatgccgttctgcatgatcagaagaacgagaccacctacactgccttgaacaacttgtcacccgatcaagccgctttcaccgtgaccaactctcacttgtcggaatacggtgtcctgggtttcgagctgggctactcccttgtgaacccgaactcgctcgtcatttgggaagcacaatttggtgattttgcgaacactgcggaagtgattattgatcagttcatcgcctctggcgagaagaagtggttgcaacggaccggccttgttctcaacctcccgcacggctacgacgggcaaggaccagaacactcgtcgtcgcgcattgagcgtttcttgcagctttctgacgaggacccgtatcgcatgccgactgctgatgaacttgctcgccaacatcaagattgcaaccttcagctcgtgtacccatcgacacccgccaactacttccatgttctccgccgccaaatccaccgtgacttccggaaacccttgttccttcctttctccgaggcactccttcgccaccctcttgcccggtcatcgctcgccgacatggctcccggcactcgcttccaacggttcttgcccgaggcgacgccagatgctctcgttgcacccgaccaaatcacgcgcgtgatctttggcttctgcccagtgtactattcattg

SEQ ID NO: 89552 - DNA, 540 bp, Heterodera glycines
attaagacgaccatttcgaaatttctcttgtccattacttgcctattcttattattttcttattcactataaatacacagataacctttcatgggcgggaattcgagtgtgccggaatcgatggcgaagaaagttgacgaaaaccaaatcaggaaggaaatcagtgagtgtcccgtggttgtttatacaaagtcgggttgcggctactgcaaattggctaaggaactgttggaacaggagagaattcgcttctgtgagcacgatttagagacgaaggaacagcaagagccggacaaagcacagagttatgtgaacggcttggtctatgtgtccaggcacagattggtgccgcaagtattcatttgtggcaaattcatcggcggttatacggaattgacaatgcttaaggagtccaatttgctcagagaagagatttcacgatgttcggacgaatgatagcaattggaaggaaaaaaactcacgttcatcaaaattagatcaattttttttttgagaagaaaatgtatctgatcagaaaaa

SEQ ID NO: 89553 - DNA, 828 bp, Heterodera glycines
gacaaacttctcgtctgctacttggaggatgttaagaacgcgctctacgtgcactcactcgatgacgggcgtgagctttacaaactgccgttgccgatcgggtcggtgggcggtgtttttgcggaaaagtcaaagtccaaaatattcgtcggcttcgagtcgttcctcgtcccgttcatccttttccatggcgatttctcaaaatgtccgtcccgcgagtcgcctctccaactgactgagacccgtcgcgtgaatgtgcccgggttggactgtgatgcattcgactcgaagcaggttttctacccacgcgatgacggcacaaaaattccgatgttcattgtccaccgaaaaggcgtgaaattggatggcagtaacccggcaattctcaacggctatggcggcttcaacattgctcagactccatatttctccgttactcgcctgatgctcgctaaacattttggcattgtatcagtaattgcaaatattcggggtggaagcgaatatggggaaaaatggcacgaggcggggatgctcggccgtaagcagaacgttttcgacgacttcattgccgcggccgaatttctcatcagcgaaaaatacacgaacaacaagaagttggccatccatggcgggtccaacgggggattactgaacgcaggctgctctcaacaacggccggacctcttcggggccgtcgtcacccgtgttggcgtccttgacatgttccgtttcaacaagttcaccgtcggcgctgcttggactaccgaatatggcgaccccgacaaaccggacgacttctccttcattcgcatgtactcgcccctt

SEQ ID NO: 89554 - DNA, 854 bp, Heterodera glycines
ggcaaacacatgctgcttttgggtgaacagttcccggactttggtgccgacacttcccatggcaaaattgacagtttttacgaatggatgggcgaagaaagttgggccattctcttctcccaccccgccgattttacgcccgtttgcaccaccgaattggcacgtgccgcgcaactcaccgccgaattcgcgcggcgccatgtcaaagtgatcgcactcagttgcgattcgtccgaatcgcatcgcaattggactgaagacatagccgcgtatggcaattcgaaagggaacggaagtgagaagatttcgtcggcagccgattttccctttccaatcattgctgatcagcagcgtcttttggcaattaaattcggcatgattgacccactaaattccgatttgtccggtgtgcctttaacggtcagagcagtttttatcgtcgacaccaaaaagcgtcttcgtctgtcattgctttatccggcaagcaccggacgaaattttgacgaaattttgcgagtgcttgactctcttcagctttctgacaaatttatggtggcaacgccggagggatggaagccgggctccgcttgtatggtcgaaccacgggtgacggatgcgaaggccaaggaaatgttcgccggcgttgggggcggagtccgaccggtggaattgccctcgggcaaacggtacttacgcgaagtgaacgacccatcggccgggcaaagcgaagtgccacggagtgactgaatgaattactaaatgaatacggcacattcacttcccattcatttgttcattaaataatcggtcaaataagaattatttcccaaaaaaaaaaaaaaaaaaaaaaaaaa

SEQ ID NO: 89555 - DNA, 651 bp, Heterodera glycines
cttaagctgaaagatgtttttcccatcgcatacaatgaattctaatgggacgatggcccaatctaacaatcagcagcagaagatgccactgagcagtgcgcctccgcctccaccgcctccgccggacttcaaaaacttattggctggcaaacaacaacaggcaacctttgccgacaaacttcgggatgtcaaactccgaaagtgttctgcaggaaacggtgtccagaaacgtaccgtctcgccatcaaatagtgttggctcttctaacgggagtgggtctgtctcgtctaaattccaaagccaagatttgatcagcgaactgtccgatcgactaagcaagcggaaaatgactgtggaagcttcgtcaaatgcaaatggcaccccaaatcaaccgaattcacagactcttcccgtgaacaatgcgaaaggctctcaatcagcgattcctcctttcggaaaaatcggcttcgttgttgcatcgtacggagggacaccgtcgacagcgggcgcagcctccgctgctcaagactcacaattaacttgcgaaccggtggtgaaaggcccaacacaattaacttgcgaaccgatggtgaaaggcccaacttcatcagctcataatgacattgccaattccgaggctcgaccaaaggc

SEQ ID NO: 89556 - DNA, 636 bp, Heterodera glycines
aaaagaccaaaaatgttttatcgacgaatattcgctttattcttgtgcattttcgtcattctcttcacattacaatttctccccgtcatcgatggcatgcaatttgatgtggtccaatgtggccattcaaaacggtgcgaattcggcggttgtgcgccaggcaaagcgcaaaacgcggcatcatgtgcctatttgttctcaatggagccggaggggccggacagtgttcgaatggaaatgtacacgcgacgcaacgtgccggacgtcaaatatgtggcagttgcattctccgatgacacacaaatgggtgacgatgcggtaacatactgtgttttgactggcaacggacgggtggaggcgcgcctttcggtgaacccggccaacacaaaaaacaatgtgccggcgcctgcgggggcggagaatggctttctcgagctgttggaaggaaaagcggatgacaacggcatttactgtaaatttcggcaacactcaaacaatgggccgggcaaagatttggcacggccgaacctgcacaaggcgtactatctgttcttggccaagggaccggcagaagaaccacacacgatcggaattcactcgttggacagcgatgatcacgcggtgttcccacacatt

SEQ ID NO: 89557 - DNA, 1507 bp, Heterodera glycines
gtccttaagtacccatttcgtacctacatttgacgaaaatggatggtgctgaatcagtcattttgcagtgcgcaactgagaaaggaaatggcgttggtccatcagtcgcggccgattgtgaggcgaacaaattggccgaagtcaccgagggattggcgagaatcaccgcgacggcggagggcggcgagactttctacaaccgagtgcaggagttcaaccgagacttgacgagtttagggtcgtcgttttgagggcattcgctgccgaaatacccaacgaaaaagagccgaaaacggaagaggagggcccaaaagccaaacagaggaaaatggacgagggaaaagcacccgaagcaaatgcagcgcaatcccagccccgtgccttttctgtgctcgatgccttgtccgcttctggtctgcgcgccattcgcttcgcgttggaagtgccaaatgtgacgcgagtggtggccaatgacttctccgagaaagcattcgaagcaatccgtcggaatgtgcaactgaacggcgtccagcacaaagtcgaggcggtcttttccgacgcaatcgatttgatgatggcacatcgcaaattcggcaaaaggttccacgccgtcgacttggacccctacgggtcggcgtccgcctttttggacgcggcggtgcaagcggtgatggacggaggcttactgatggtcacttgcacggacacggccattctctgcggcaacactcccgaggcgtgcttcaacaagtacggctcggtcccgctgcggcacaaatcgtgccatgaattggcccttcgcattttgctccgtgccatcgacgcccatgcgaaccgtcacaagcgttacattgtgccgctcctttcggtcagcgtcgacttttacgtccgatgtttcgtccgaattcggtcgggcgctgcgatggccaaagacagcgtgacaaaactcgccaatgtgaactgctgcgccacctgccaaagtttggactttcagcctctgctcaaaaagagtgtcagtgggcccagcgtgcgcttctccaccgcccatttccagtccgaattggttcgtctctttttgggacagtccgacgcgtcgatggacggacgaatggtggccaaatgcgcgcattgtggggggacggccattcacacgggcggccccatttgggtggcgccgacgtgggacaccgaattcgtcgggaaactgctcgcaatattgaaaggcccgaatgcggggcagctgagacttggcactcgtgaacgcctggagggccttctgacggttctgtcggaggaactgcccgacgtgcccctcttctacgaacacgaccagctgatggtcgtcatgaagtgcccctcgcccaaaatgaacgtcttccggtccgccctgctcaacgcgggcttccgctgctccatctcccactgcaatccgcgggcagtcaaaacggacgcgccgacctcttttctgtgggacgtgtgccgtgaatgggcaaaacgaaacggaatc

SEQ ID NO: 89558 - DNA, 910 bp, Heterodera glycines
gttctctgtgaatgtgtcgaacaaagaattggctggtctgaaggacaggctgaccaaatgtcgaattggacatgaacagctggaggatgtgcatgactttgagtatggttttcccatcggagaattgatggaatggagggaccggtggctgaatgagtacgactggagagaagcggagaaaaagctgaacgcaatgggagaccatttccgggcgcaaatcgaaggcttacaaatccatttcatccgaagccgtcctgcggacccatcggtctacaaaagaagggtgccaattttgctgtgccatggttggcccggcaatgtgttcgagttccataaactggtcccccttctgactaatccccgctccaactacatccgcaacatttcctcgtcagaaatcgcgttcgaagtgattgtcccttcaattcccgggtacggctggtccgaacagccccacaaaggaggctttaaccaaatggctaccgcacgcattttccataaattgatggtcgaacggctcggcttccgtcggtacatcgcccaggggggcgactggggttcggtggtcaccagcaacatggcccgaatgttccctgaaagtgttgccggtctccatctgaatgttgtcttccccgacttcaaaagtccaagccaacttctgatttcgttgttcggttctttggtcccccgttggatattctccgggccagaaggcccaactttcagcttggccggcattttctcgttcatttttcgcgagagtggatatatgcacattcaggccactaaacctgacaccgtcggcgtcgctttgaatgattctccgttgggtctgttggcttatattttagagaaattcgtatgttggacaaacccttcatttttgaaattggcagacggaggactcgaa

SEQ ID NO: 89559 - DNA, 964 bp, Heterodera glycines
ccattcaattcaaacgctctccgcttggcttcttcaccatgcaaaaaaacacgcggattgcattttggactgttggcttaaggaagtgcgcaataattcggagaacgaacgactgatcagtctgattaatttggcaaacgatgtgatacaaaacagtcgaaagaaagtgccctcctttatggcagccttttttgaagtgttacagccggcatttgtccatgcctccgagtgtttggacgaatcgcaccggaaaatggtggcgcgaatcgttgcggtttggcgcgaacgtcaaatttactcagctaagaatttggatgatttgtcaaagtgtttaaccgcggacgaaccatcaactttttccgtctctccgaatttgaattccgaaacggaaagcccttcgaagagttcgccagtggacgggggacaatcgcccgttgcttcggaggaggacacaaagaaaatcaaggaggaattccacgcattctccacactcagttccaacatgatcgcccttctgcgcaagttggaggaccctgcttctacggacgttaaaatcaggcaactcatcgccgcttacccggaaagcattgccaatccgacgcttctcaaacaattcaaatcggcggacgaatttggcgaactgtcgaaaaaaatcgcagaagcgatgccagtggtcgacgtttactgtggccgactgcgcgaagagctaaaagatcgccagaattttcaatttttactcgaagattatatcaaagcattaaacgaagccaatgaacgaaacaaacaattggtggtgtccgtgaaaagacgcattggaagactggatgaggagaagcaagagttggccaggcatatcgaaagtttgcccgacctgacggaaatgttcgggtccgaacccgcaactacgaaccttccatcgctaggggaattgttcactccaacttcatgaatcgttgccaaagaa

SEQ ID NO: 89560 - DNA, 662 bp, Heterodera glycines
gcgtcgtcttccccttgtgccgagaattgcaccattttcccccatccaacgttttgaaaaacaattcccgaagatttattatgctccggaatggcgacttgacgaatcggggaagagaatgacgaggggtgtggaggagaaatactcgccgatgaataattacggagttacgccggacaagtgggagtacatgaacaaggtcgtgtggccccctaattacgtggtgccggagacgggcaaaccgaagccgagggaagtgttccattgcattgagaatatccacacggcaccgaaaaaaatgcacactgttcaccaatttgcgttgaatatggtggtggacgaggccattcagcagcttcgaaaccaccagaaaaagcctacttttttactggccgatttaatcgaagaggcaaaagagcgtgcaaggaaggagtttttcattgaaaatcctggaaaaatgtttgttgccgagacatttcacatccaatcgaaaattgtgaaaggggcgagacgacacgcgcacgagaaatggcacccgatgagataccgttacatcaatttgttcgttaggctgcaagaaggcgaatccgcccaagtccaaaaaacgcgaacccgacgcccacggatgggataaaatggaaaattattatgcttttttgcaa

SEQ ID NO: 89561 - DNA, 477 bp, Heterodera glycines
  unsure (1)..(477): unsure at all n locations
gtcttcctcattctgattgttacttgttctgaagcaacaattcttttagcttacttccatctttgcgccgaggattaccattggtggttccgttcctttatgacttccggatttactgctgtctatttgttcatctactgcattcactacttcaactcaaaactcaccatcactggtgtcgtatctaccatcctctacttcagctatacttcgatttttgtctttttgttcttcttaatgaccgggaccatgggatttttcgcaacttattggttcatctacaaaatctacagttcagtgaaagtcgattaaagatgtaaatttgatttgtgattagaatacatgttaatttttttttggtcattggtttttgagcaatgatgggcttctttcaatgtttaatatatttttgtttcccttgtcttaatgtttttttttataaatgtgattagaagtcgaanaanannaaaaaaaaaa

SEQ ID NO: 89562 - DNA, 576 bp, Heterodera glycines
atttgtttcagcaaaaagcaacaacaacacccttgttacgtaatgctcatcaagctcgtcaaggcgacggtgggcgtcccgtcgccggtggcactgcgcgcggtgtcggcacgcggcgtgggcagcggcacgcattggattggcaacgattttgaggactttgacaagcactacaagaccggactgcgtgacgccgtgccgattgccgccttctggaagaagttctccgctttcgtcatgatgccactgttggtattcgcgggctattgcggatggaaggaccatcagaatgtgcaccattctccacgccctgagtacgtcgcatacgaatatttggccacgcgtcgaaagcctttcccctggggcgacggcaaccattctttattgcacaacccggccactaattgggtgcctggcgttggctacgaagccccgtggcccggcgatgcgcacaaaaaggagggggacagcggcggcgaggggaagaagcactgagcggcgcccactgaccgatggatgatgaaatgaatggcgcttccccccccacgacgatgtagaaaattatggtggagcgac

SEQ ID NO: 89563 - DNA, 833 bp, Heterodera glycines
gtcaagtggccagcccggcggtggtggccctgttgtggtccacggtggcaatgcggtcaactttgctgctgccgctgctcatcagcagcagcaacagcaggctgctggtgacccatcgcaacatgttgcggctgttcatcatcaccaccagcagcaacagcagttgcctccgcaacaaaacaaaacgcttttcacaccggcagcaaacccagcgatggtaagcgcaacgccggccatgcaacaacatttgcaacagcaagctcagacaatcttccaccagacctcagccactgcagtgcctcagttccccagctacaacatgccgtacatgtattcgccggtggccaccgcgcaaacgttgcaaggaccaaatgcggagattgaccgtttcctcatccaacagtatgggacgccgtattcgcagctggacttgcagatgggcgcaatgtcaattggaccaccgacgtctttggcaccaaaccatcatcgtgccacattggaatcgtacatggagaacaaatttgggcagcagcaacaaaacgtcaatcaagcggccaacaatggacactatcaacaaacgcagcaaagtcagcaacaacagcgcggacttgcccaatcggagcaggcaactttgctggggggaccgccaagccatgtgggaccgcctcccggctttggtatgcccaccgcaccgacgcagccatcgtatgtgcagccggccaacatccattcgctttttcagatgcccacttatccgcatccgtaccagcacccgcagtacatgatgtccaatgccaatcgtttccaagctgcacagcgtcctgcacagactt

SEQ ID NO: 89564 - DNA, 631 bp, Heterodera glycines
gagacatttaatttaattttaaaaaaatgttccgctttttgttcgcctccggccaaattcgtgcgagtgcccgatcagtggcttcctacgaccggatgggccagaacaatttcgccgcgcacatttccaagccgttctcagtgtgggcggcccgcgagaacgcggacaacctgggcgttgtggacgccggaaaaacgctccaggtcactctgtccacggacctcaacactgccgagcccggcaagtcggtgcggttccgcctcagtgcagtgcccgattcatttgtcggactgctcgcggtggaccaaatgccgttgtcagtggggatggcccgcgagaacgcggacaacccgggcgtggtggacgccggaaagacgctgttctccactgccgagcccggcgagtcggtgcggttccgtctcagtgcagcgcccaattcgttcgttggactgctcgcgggtgatcatggaatgcggcgaggaatgatcggcggagggcgcgaatcgtttgtgcctccccgcgtgatgcagtcgcgtgcagtgagcacggaggcacgcgatcagattcgcgcggaagtttgcgaaaagtattctgagatgttggaaaaatttatgtcgaaagacacagcgca

SEQ ID NO: 89565 - DNA, 783 bp, Heterodera glycines
cgtagtctttctcaaactttcccctcccctcccctccgactctcgccgatttcttcatttgatggacgtgttcaatcggttgctccctcggccgggcaatggcaatgttcagttcaaaaaactcagacatacgtcaaattccgccagcattttcgcatctgacgaagcgacgggtgacaaacagcacaacgacgaaacaacgaacaacggaatgatgccggcgacgaattcgccacgggttgaactcggattgatgctgagcaacatcagtgctgaaatgcgacacgggcaaaacagcgcaactgaaggaaacggaaaagcgaatgggacggggaagcagaataaaagctttgtggaagaaaaggccaatggaaacggaccgtcgtcagaagtgaccgctttaagcaaagggaaaagcaacggaacggccaaaggcggcggaaaacgctttctctctgcgcttttgccgggaaagagaaagggacgacttggcctttcagtttcggagcctcgactaaattttgacatcgaaccgtccaaaaatgactttgaacccacggaaatcgaagggggagaaaatgcgaaaggaggacaaattgcggaccatcaacagaattttggggagaggaaccgattatgcgatggcatttcggacggaagtcgcaaaagtcggccgaattttgcaggggcacttcaaaaggtccgtgaaaaattgaacgttcgtccgtcgtccaattcccaccgctcctccgccttttctcctccgatgaatcgttccaatac

SEQ ID NO: 89566 - DNA, 667 bp, Heterodera glycines
gttaagaagcattgattgaatcagaggaatcgcactgccaaaataacaatttgagaacagtaaaaaaaggccgtcccgaaattccgcccaaaaatgtctcgcgtcggattgttcggccaaatctccgagatcaacgaccacctcttcctcagcggggcgggcgtgttgaggccggaaaagctgaagcagaagggcatcacatgcgtggtcaacgccacggtggaggaaccgacggcgaatttgccgggcattgacagcgtccgaattcgcatcgaagactcgccattcgcccgattggaccattactttgaccaaacggcggacaaaatcaaatcagtcaaggaacgcggtggcaatacgctcgtccattgcgtcgccggtgtttcccgctccgccaccctttgcatcgcttatctgatgaaacacgagcgaatgtcccttcgtcaggcttaccattacgtgaagtccgcccgtccaatcattcggccaaacctcggcttctggcagcagctggtggaatacgagcggaaattgagagggcacaacaccgtgaccatggtgccggcagaagggtcggcgctgcccttccccgacgtttactcgtccgacttgcgcgggcacattctgtccaacccgggcccaccgcagcacgacccgcagattgtgg

SEQ ID NO: 89567 - DNA, 583 bp, Heterodera glycines
gtttgagggatggccgtcactttgcacacaacggtgggcgacataaagttggaattgttttgtgaacgttgtcccaagtcttgcgaaaacttcttggcccattgcgcttccggttattacgacaattgcattttccaccgcaatatcaaaacgtttattgtccagactggcgacccgacaaatcgcggcaccggcggacaaagcatttgggacgcaccgtttgaagacgaattgcatgaggacctcaaatacgatgcccgaggaatgatcggaatggcgagcaacggaccgaacacaaatcgttcccaatttttcatcacttacgaaaagcagccgacattggacctaaagcacactctgttcggcaaggtcattgacggatttgatgagcttgaagagttagagaacaccaaagtggacgcgaggtatcgcccggtggtggagcaacgaattcgaagcgtcacaatccatgcgaatccaatcgcggacggagcggcagaacaatgaccaaccaaccgatggcgcattccttttgaagacattggcactttccatttatttatttaaaaatattttgataaaa

SEQ ID NO: 89568 - DNA, 540 bp, Heterodera glycines
  unsure (1)..(540): unsure at all n locations
gttaaattcgtcagctacaaaaaatttcgcaaaataaaatgaattcatcaatgacagtatctcttctgctaatgttaatcattggcactgctcttttggcattgacaaatgccatgccaaacgcagatgcttcattgacgcgcgaaaagcgtggcagttacggtagtggcagttatggtggtagcagttacggtggtggacccagcggtggtggtgacgcatttggaagcggaggggccgcaggtttcggaagcggaattggcaacggtttcggaagcggaggcggcagcggttttggaagcggaggcggaaacggtttcggaactgggggtggcagctacggtggtggcagttacggtggtggtagttacggtaaaaggcgatgatggaaaaacattggtccatttgtgacgaggaaattgcaatgtgatcatcctttcttcccgatcactgcttttccaaatttatttgttgtattatttatacaaaattttaatgaaaatgaattgctgctaaaaacnaaaaaaaaaaaaaaaaaaa

SEQ ID NO: 89569 - DNA, 482 bp, Heterodera glycines
atttacaaattaaacgacaatcaactaaactcctcaattagcaaatccttaattaacttcccaaatgactcatcgccaacaaaacgaaggagggggtggagcagtgacgccgaacgcaacaacgacgggccatttgcaggagcaaatggccaacgccatggaacgcgtgggggaggcggcgcacaacgtgggccaacgggtgaccgatttcttccagggggacccttttgggacgctaatcggacgcaaaatcgaattggccaccgatgctacgaaaatggccactgaaaattggggactgaacatggaaatatgcgacttcatcaacggcaccaacgacggaccacgagacgccgttagagcgatcaaaaagcgactgcaaacgcaaatgggaaaaaacaacgcaattgtcatgtacactttgactgtgttggaaacgtgcgtaaaaaattgcgaccaccgttttgctgtgctcgtcacaa

SEQ ID NO: 89570 - DNA, 624 bp, Heterodera glycines
ggaaaggaaagttgtcagatgaccatgtcaaatcacaacagaatgatgaattttaacaacgtaaatattagaaaatacgacaataaaaatgagagaaatggtgctgggtttggagcaaattctgacactgcggcgtttgagagctgggcttgcgagtctttcaacctttttgagtttttgggagaagacacatcgccacttgacgaagttgttcccgagaaaatggacgaagatgagatcgaaaaacaaaaggaggatgccatgtattcgcagtttcaatacagtgacatgcttattggggggcaacacccgacaaactctcaccatgattttggcgtaaacgatttcgcaaatgtgccctctgacggccgttccgattttgacgttcccactgctttccatgaaggagttcccttcccaatgccgcccgctacacaccaaatctattcacagaatttggatgcaattcctcacgtgccaagcacttcgaaatcatcgatgccgttaatgaagcaggaacccatctctgagcaagaacagatcaacctgcaattgggcttagacgcgccgaagtcgtctcgcgagtcgagtgttgccagcggatcgatccattttaagtatcac

SEQ ID NO: 89571 - DNA, 982 bp, Heterodera glycines
gtccaattaagtcgcagctacaaaatgtttctcttaccggggaaatgtcgcaagaattggcgttggaattgttcgaaaacggcgatcttcaaggacttccctaagggttgtgagttcggcatggattatcgctcgtggattgtcggcccaaatttcctcgggatgaaaatgatacctcctggcattcatttcatttactttagtgtaccgggtgcgcctcgcattgctttctttcacaattttcggcaaaaggaagtgattttgaggaggtgggacacgaaaaaggaagacttggtgactgacgaaaagtcggacgaagttgaattggatcgacttcgcgagaatctcagaaacattgatcgctttttgggagtttatccattcgcagactatcgcaattggctttccctttcgtcgtacattacgccaaactccgtccgtcgtctttccccctcaaattcactcggacgcatttcgtcccaaaatgaaatggtcacgcaggaggcgaaattggagaagaaattgggtgatccctttggtctttcgattgtggacagagaacaccgcgggcgcattcgcttcacggacgaaagcggacttccgctgatgagcgaaagggaggaagcgaagctgaacttcactcggatatcgcagatcacattggctgacacaaatttaaggagggcgggcattgacagttccgacagacttttccaatgtttcgaagcaatgggcggtgattatcgcgaagtccttgcagaattccaatttgcttttgtcgtttttctcgtggggcaggtttacgaaggcttcgaccagtggaaacggcttgtccatttgttctgcagttgtacttccgctcttcaatcgcatccgcaattcttcaacgaattgtttgcagtgtttcacttccaaatgaagatggtcccagacgatttttttgaagatgtattggccagcagcaattttttggcatccacac

SEQ ID NO: 89572 - DNA, 367 bp, Heterodera glycines
agcactatggcattatgccacatttcctcttatttccgtctttgtcaacagaattactaaatttggcatagctaaatgtcacatgacaaaattcacgctgcacgctgattaagataaacaaagtcattaataaccggatattcacaggaaatggtacctcattattgagaaagatccccgacatttttgcgctccctgactctgcttcccgacctgtcatccccgagaatttcttcactgacaaatgaggggccacaactacagaacagacaaactgattaatcactaacaatttttgttgtatatggtagttaatttttttattattatcaggattttttaaaaaaatagcactaagtgttaaaaa

SEQ ID NO: 89573 - DNA, 152 bp, Heterodera glycines
gccaaacatattctgttgcctttcaaacgtaactaccattgcaatcacatgatttactttcacagcctctgcgcaactctttcatacaaatcacgaggccaattcctccttaaattgtttgcaatgaaacttgcaatctgaaaaaaaaaaaa

SEQ ID NO: 89574 - DNA, 579 bp, Heterodera glycines
gtttgaggaaataataaatgtgatcggattttgttctgaactgcttctgaccatggcagccgacggcaagaaaattgaggactctgagcggccatttgtggtttggcagcggttggacccatcggacaagttgggagcgccgaaaccggcaccagtgccatctaaggtcaaaccaagcagcggacagtcgccgtctccgagtggcattgagaggcgcgtttggcgcggcgttgcgccgcccattccggatgacattttggcgctagccgattcttcgttcgaggacatcacaccggcgcaaatggccgtgcggaggatggcccatagtccaatcgcaccaattggaatggttgccactgtttccgcgctcgtgatgatgattgtctcgatgagaaggcgcgactcgttggccttccaacggtacgcgcgctaccgtatcgcggcccaaggccttaccatttgttcgctggtgggcggcgcgtggtactatttgaagaaggacggatttatgtgaattcgattctttttgtgttttgtgatatttttgtttttaggaaaaactaaataaaactgaaacac

SEQ ID NO: 89575 - DNA, 624 bp, Heterodera glycines
gtccaattaagcataaaaaatttgctttttattttcatgaacgcccattttaatggtgccttcggttttaattttgggtttatgcacggggctctctcatgcgcccgtacaatttctgcttgtcttggctcccatgtccatttgattctgccgccaattctgtccgtattggacgaccgcaaaacggaggagaaagtgcgtacgtcggcactggacactttgcttgagttggcccgtcgacattccatcgaggattacgctttgcccgtcatgcaaacatggcttcgttgcattggcatcaagtctcaacagccgcgactgatggagttactcggcatcatcgtcagaaaatggactcagttttctgtgtacaaagagaatgtaaatgccgccttggtgcggtgtcgtgtcgaaccaatgctgtgccatgagtaccaggaacagttggcacttctccaggcgccttcatacgcacgccaacagcagcagcaacaacagaatgccgttggcagtggtggaggcgtttaccaacaacaacagggcacattcagtgccagcacttcatcaccattattcgcgcgtcaagtgtcttttttaccgccgacgcaaaacggcggggcgaca

SEQ ID NO: 89576 - DNA, 234 bp, Heterodera glycines
cggcaaaggaggggaccgaagtgaaacgccaaattgtgcgccatggcattggaccgcccggccccgccggaccgccgggagaagcgggcgaagacggagagccgggcccttgcgaatgttacaaagaccaaaaaagtcaatgaacgaacgcaatttatgcgaatagcacacgaaataaaactagcaaatttaatgttttttaaatttattttggtgaaaaaattttttattgct

SEQ ID NO: 89577 - DNA, 620 bp, Heterodera glycines
ctctgccatgcaccaccgctcactctaagcacaagcacaagcacaagcacaagcgccccaaccaaccatgtcctcaaccctcccgacctcgtcatccaccggcaccaccacctcggccgcgccgcttcccgcggccctgctagccgacctgacctcggccatcccgcactcgccgccgccacccgtgacccccgcgaccttactcgcgacccgcatctcccagcccttttacgcatccgtcagcacgacccgccggtcgggcaccactgccgcgcacgcgctggccctgtcgcacgtctcggaaacggcccagtttgtcgtcggatacacgtcgcgcaatgcgcccattctcaacgacctcaagggatctaacgcggccgaggtgctgctgtcctcgccgccgcccggcacgtcgctggcacgcggccaagtcccgaaagtcatccgcatcgaagctaaatgctacctggcgtgctcgccgcagttgctcatgcggtttccgccaccaagggtcgcgggcgacgaggagccgcggttgacgtgggagcgcgcgcggctcagcgtcttcgcacggcttacgcccgcacagcgcgcaaccctgttgattggtgaacccaatg

SEQ ID NO: 89578 - DNA, 666 bp, Heterodera glycines
tgacaaaaaacgaggatcaattagtgtatttatttttcgttatttcctttccatgtcaatttcttaatgggaaaccaacaaagtcagcacaacaattctggccatgcgcaccatggcaaaaaacaacttgatccacggatagtgagtgccttcaattcgttgagcaacggaaaagataccatcggattggaacaaattaagccatcaatcggcgctaaattggccctgtccatttggccttcacttcaagacacccagcaaaggattacgttggaacagttcgttgaacgtgccgagacaattctgaattttacgccggacatagccgtcagaatgctaatgccagcacaaaaattggtgaccgcttgccttgaggcggacggaatcgaagttcaaactgaggaggaaaaggcctttttgaattcgctggtggaacatatggaatcgaatgcaaaaacggccgatgctttggttgattggaagaacacgaattgtgctcggatgtgccatccgttggtcgaacgggtgcaatcgcttctcactgccattccgtttaaacaaggcccaaaaatccattcggccattttgaacgacgtgcaaatgttcatccttcgccacgctcttcccaccactgtgttcttcccagacccatcgcgccatttgtcc

SEQ ID NO: 89579 - DNA, 650 bp, Heterodera glycines
gtttgagccaaatgtttcccgctaaatacaaagcctttcgactggaaaataaagtcgcggtgatcacagcagcgacaaatgggattggattggcaattgctgaacgattaggccacgagggagcacgtctggtggtcagcagcagagacgaagacaatgtgaagcgggcgatcgatcggctcgtctcttcgggactgaagcgttcggaccttgccggttgcacttgccatgtgtccaattcggaggaccgaagtcgcctgctgaaactgaccatccaacggttcggaagtgtgcacattttggtgaacaatgctggcatcaacccaattttcggcgatttgttggacgtggacgagtcagcctgggacaaactgttcgacgtgaatgtcaaggcgggcttcatgatggccaagctgttcgcgccagaaattgaacagagcggtggagggtccatcgttttcaactcgtccatcggcgcctatcggtccccccagggaatcgctgcttacggcatcacaaaaacggcactgctaggtcttaccagagctctggcagaatcacttgcacccaaagggattcgcgtgaatgcaattgcgccagggattatcaaaacaaaaatgagcaaagcgctttgggaaggcattgacgaa

SEQ ID NO: 89580 - DNA, 532 bp, Heterodera glycines
gtttgaggcgcttttgcaaaaatggtcaaaatcatgaagccgggacgtgtggtgattgtgctcagtggacgctatgcggggcgtaaggctgtcgtcgttaagagctatgacgagggctcatcagagaggccgtatggacatgcattgattgcgggaatcgacaagtatcctctgaaagtgaccaagaagatggggaagaagcaagtggagaagcgaattcgcatcaaaccattcctcaaggtcaccagcctccagcatttgttgccaactcgttgcatattcgaggccgatttggacaagagtttggtgaacaaagagtggatcaaagagccgcgaaagaagaagaatgccatcattagcgtcaaaaaagaatttgagaccagctacaaagccggaaagagcaaatggttattcacaaaacttcgtttctgagcggttacagaggggaaacaaagcgatttccttatttgcattgttgttgtttttgtgttatgagtaaagatttaaagaaaaaaaaaaaaaaaaaaaaaaa

SEQ ID NO: 89581 - DNA, 615 bp, Heterodera glycines
cacaattacctaatttctcatttccccggtttctttctcttagtaattccctttgatacgccgccttttctccgtccgatggatgtttccctcttccgtttgccttctcttccccattttttcccttctcttccgctgtgtcccttccttctcctttttcttttgtccaatcctccgattttcgcctccgattcggctgcttttccgacgtcttcatgccgtaacatccaacaagcttgtgccgctcaacttttcttcttccctccgttgccttccgtacaggagacggtgccggacgtgccgttggcacagcgactggaggaggaggaggaggaggaggggtccggtgaaggcgcgggtgctgtagacgccggcggatggcattttgtgccaatgtccggccctttgtcttttcctctatacgacgaatttgtgccgacaacgccatcctatgattacaacgcggaaccgctggagatgagacaagtcgacatttgtacatgtccggagaatgatcagtgcagcttcgacactgaaaggaccgtcaaattcagtcctcaaattcgagtcgctttctgcaggccgttggccgaggtgttcaagtcgaagtgcaaa

SEQ ID NO: 89582 - DNA, 554 bp, Heterodera glycines
cttaagaccggctcaaaaattgttgaaaaactaataactaattcgaatgtcaaccatcccaatgccaccaccaccaacacaagacgaaaaggaccaacaaaagaaatcccaatggaaaccgctggagataggaaatcggatgcgcacgacctcagaagattcggccgagtcttttgacgcctatggaccggattcgccaaatatgaccagttcggggagacgaatgagcatcacagaacgcttatttggacgtccagtgccccaagaacgaagaaactcattgggagaggaacaaatggggcaggaaaagccgaaaagcatcgcggagaacaaagacttcaaagaattaatgaagcgtcagcgaaaaattttgggcgatgatgagtggcaataaagaaaggcaaaagaaaagaagccattagaggaaaacaaagtcggaatggatcaaagggtagaaaagggaatgacaatttatttatttgtttattttatttaacacttcttctgatttttcaataatgaaataaagacaaacccaccaaaaaaaaaaaaaa

SEQ ID NO: 89583 - DNA, 578 bp, Heterodera glycines
gtcggtgcaattgcagccacatcaattggtgaaccctccactcagatgacgctgaaaacctttcactttgctggcgttgcgtccatgaacatcacccaaggcgtgcccaggataaaagaaatcatcaacgcggtccgctccatttcaacgcctatcatcaccgtggcattggccgatgagcgggacgaaaagttggcacgacgggtgaaggcacggactgagaagaccacattgggcgatatcattgattatgtggagcaggtgtttttgccggatggcctttacgtactcgtcaaattgaacacccggcggatcagagaaatggaactggaggtgaccatggacaccatcatcgactcaatttgcgcctccaaattgcccgtgtcgcgcattctgtgcgaccagatccgctcggtgggcaagtccatgctgctggtcaggccggtcgagtcgtccaaatcgcggacaaagttcaacaattcattggtgattgccgaagtgttgggcattgaggcggcacggggctcaatcatttccgaaattttggccataatgggaaaacacggcattgagttgga

SEQ ID NO: 89584 - DNA, 870 bp, Heterodera glycines
gtccatttaagtaaaatgggcgaattcttcttcaaccttgatcacggctatctcgaagctttaatccgaggatttaaatcgggccttttgacaagcacagactattcaaacctcgttcagtgcgaaacgttggaagatctcaaattgcatatacaatcaacagactatgggaactttcttgccaatgagcctgggaatatcactgtgcaggtcattgatgaacggctaaaagagaagctcgtaacggagttcactcacttgcgcaacaattctctggagcctcttgcgacttttcttgactatataacttattcatacatgatcgacaacatcattctgctgatcactggcactctccatcaacggccaatcaacgagctgatctccaagtgccatcccctcggctcatttgagcaaatggaggccattcacattgcatcaaacccggctgaactgtacaacgctgtgctcgtcgacactcccctcgccccatatttcgtggattgcataagtgagcaagaccttgacgaactcaatgtggagattatccggaacacactgtacaaggcgtacattgaggacttttataatttatgcaaaaagatgggcgggaaaactgctgaggtgatgtgcgaaattttagctttcgaggctgatcgacgagcatttatcatcacaatcaacagttttgacacggagttaaataaagaggaccgcgctaatttgtaccctcggtgtggaaaactgttcccagagggattggctgggctagccaaggccgatgattatgagcaagtgaagcaagtttgcgagtactactccgactataagcaactcttcgagaacagtggcctcaatccaggcgaaaaa

SEQ ID NO: 89585 - DNA, 374 bp, Heterodera glycines
gatgacacagcagcaaggcgcaacagacactgaccttcgaacgttccgcgactttttattccaatataacgcagtcaccgagcagtgtttcgacgcgtgcatccgcgatttcaccagcagagacataagcgagaaggaggaacggtgctcaaaaaattgcatggacaagtttttgaaggccggccaacgcctgtccatgcgttttcaagaacatcagttactaaatatggaagcacaaggagcaccggtcatggcaacgaatacaaaagtgcagattggaaagtgatacggcggaaacaccattttttgttgtattgtttgaatattttgagtttaatacattttgaaagataaaaaaaaaaaaaaaaaaaaaa

SEQ ID NO: 89586 - DNA, 1068 bp, Heterodera glycines
ctttgttcaccaaaattgaaccggcgaaggtggccgagtggaaagaactctttggcagtgggaaacagcagcaaaatcagccgaagaacaacggaccaacggcgatgagcagtagcagcagcaaaaaggcaccaaactcgacggagaagcagcagcagaaacagaagaagaaaaaggaaaacatggcggaagagcggggcgaagtgggccaaatttacgcggaagtgatggccaaattcgaaaaagcgaaagcacttttcgtcacaaatgaatctgaaaaattagacaccgaaattgccgcattgaaagaacaaataacggagcagaaggcgcgcctgggcttcaccggcgcattgttctcaccgccgatgccaaaagcaacgccggcaatcgttgtgccaccagcagtttcttccccgcaaacaccgcccaaattgacagcagcgtcaaatgcgagcaaagaacaaacgcaacagaaacagcagccgaaacagaagaagccgcagcaacagcaagcgactgccccggccgatgacaccgtcgacgtcggttgcctcgacctccgtgtcgggcgtatcattgaggcacagaaacacccggacgcggacgcactgtacgtggaacagattgacctcggggaggagaagccgcggacggtggtgtccggcctggtccgatttgtcccacttgagcagctcaaaaaccgtcttgttgtctgtctgtgcaatttgaagccggccaaaatgcgtggcgttgagtcccaggcgatggtaatgtgtgcgtcgacgcctgaaaaggtggaagtgttggaagtgagcccggaaagtgtgcccggtgatctcgtcgtctgtgaaccgttcgtacgccgtccgcctcagcaattaaatccgaagaagaaaatttgggagacagttgcaccggatttgagcgtctctgaaacgggcgaatgcatttacaaaggacagattctccgagtggaacgtttgaacagttcccttagtgcttcgacacttcgaaatgtgcccgtcaaatgaatttgattgattcttgtcttttttgtatgctctg

SEQ ID NO: 89587 - DNA, 1149 bp, Heterodera glycines
gtttgagcgatggtagatgctcattttgctgggtgtgcacatatcaagtcggagtacgtcgtattacgaagtgaaacgcaacagcaagaaggaggcaacaaaccaccaaatgaatccaatccattggaagggaactcgcacgagggaattctgccaagaaatgtgagggcacgcggaatggaccgccaaagagagcaaaaaatggccaaggcccgagcggaaaaccgtcaaaaaatcgtaagaatttgtccatcggttctttttgagagcgaaggaaggaagtgcaaatatggagagaaatgcgacgcggagcactcgctgacaaaatattgggcgaagaaaccgccggacattggtccgtcctgctttttgttcgaccaaatgggcaagtgctctttctcattgagctgctgtttcgcccgagcccatacgaatgagtcggatttgagccagaagagcaaagcggggcactcggaatggcagtccgttctcaacacgcacactttgcccattcagcaacagctcagaaaacgcacttacgacttttctcgttctgaacgtgctctgcatgaatcaccatcgggttgtatggaacgcgaagcaccgaagtgggacatgcgcactctccgcggcaaaaaatacttggcccctctgacgacggtgggcaacttgcccttccgccgtttgtgcgttgaattgggcgcggaagtcacttgtggtgaaatggcaattgccacgcatttgttgcagggtcttccttcagaactttctctgatgaaaagacatccgtcggaaaaaatctttggcgttcaattggcaggaggctaccccgattcacttggtaaagcagtccaactgatcaccgacaatttcaatgttgatttcatcgatttaaatttgggttgtccgctggacagtgtcaatgaaaagggtgcaggctgttcgttggcgaataaatccaacaaattggtttccgttttgcagtgcatgcaaaagagtgccacgggagtgcctgtgtccgtcaaaatgcgttacggagtgaaggaaggagaacggactgcgcattacaccatggggacaattgccgaacggagtccccctcagctgctgaccctccaccctcggtcacggggacagcgctacacaagg

SEQ ID NO: 89588 - DNA, 548 bp, Heterodera glycines
ctgcaaccaacgaaccacttcaatggccgaagaatattttttaatcgctgcggctgccttcggagcaggaatttactgttggaagacgtacctcggcccgttgctcgaacaaccgaagagcgacgatgaggagaagcccaagccggaaggaggcgaagaagcgacgaccgccggcgacaaggaggagaagaaggctggcagcaagggcgacaagcacaagaagtctggcagcaagggcgacaagcacaagaaggacaagaagtctggcagcaagagcgacaaggacaacggccccgctgacgaaaacaaacagccgcaaacgagtgcttatgcaactcccacctaagaacttcaccaatgacgcattcgactgaatagaagacaacagatgaaaacaaattcagtaaccacaacaacagccaaaagcaaaccaacggaggaaaaagaaaaggaagcgacggaaacggattcgaaatgatatttaatgccacaaaatatttgtatgtgtattatacataggtatatccggtcaataaatacctatctaa

SEQ ID NO: 89589 - DNA, 657 bp, Heterodera glycines
ccaagtttgagatcagctactgctgcgcttcctttcatcaaaagcatttgccgtaactccgttcgcacaatgcgcgtggttccaattccggccaacaccgacaattacatgtatttgatcatcgacgatgacgacaaataccaaaaaggacatcgaccggcggcactcgttgacccggtgaatgtggaaaagtgttttgaagttgtcaaaacggagggcacactgttggaggcggccctggtgacccaccaccattgggaccacgcgggtggcacctaccaattggcaattaagtcacggagcgggttcagcgacctcttgatgaagcagccgctgtgcattatcagcggtgacgcggagcgagtggaacgcactgagaaagtgatagcggacggggagagcgtgcagctgggcaccaatttgagcgttacggcgatgtacacgccgtgccacaccagcacacacgtctgctattatgtggttgaccagcgcacaaatgaacgtgccgtgttcaccggtgacacgctgttcatcggcggttgtggtcgcttttttgagggcaccgccgagcaaatgcatcacgcgctcaacgaacgccttgccgctttgcccgacgaaacgttggtttactgcggtcacgagtacacggtggcgaat

SEQ ID NO: 89590 - DNA, 764 bp, Heterodera glycines
aactgatccaacccaccgactcaacccaccgactcaacccaccagcaacaaccatgtcgtcgtccgccccgacccaagccctttgcatcggcatgacctaccccggatccgacagcccgctgcccgggtgcgaggtcgacgcttacaagatgacgcagctcgcggccaacatgggcattcccgaagaatccatctctgccatgtcggacgttgccggcactgaggtgaccaaggcggatgttttggcgagtttgcgcgagatggtggacaacgccaaaccgggagacaaccttatgtttacgtggtctgggcatggcggccagcgtccgtcgaccgaattgggcgaaaccgacggccaagacgagctcatctttgcctcggacggtcccatctccgacaacgaaatctatgacatcctgcgcgaccttcccgagggctgcaacatgaacatggtcttcgactcttgccggtccggcacaatggtcgacctggactttgccgacctcgacgccaacatcgtgtgcgtttcggcggcgctcgaggaccaaaactcgctcggcaactcggacggcggcgtgttcaccaaccagctgtgcgaggtgttgcaggagaacccggggattgcgttagcggatgccattgagacggtgaatacactgaatgctgcgaatgacgtgccgcacgtggctatggtgacgaccacgacgggcgccgagcatttgctccaagaacccgcatttggcctcacggatcccgtcgaattc

SEQ ID NO: 89591 - DNA, 413 bp, Heterodera glycines
ccacaaaacgaggaatgactgcctttctcggctgctgatttcttcgattgacatctgcaacttggttcaattgaaatggattgttttgacaatgatgatgcgtttggcgagctggtttatgaggaagaggaatttgaacaggaattggaggacaaacggaagcagggccaaaaatgcacgagcactcagcgggaagaagaggaagaacttcgtgagacagaaaatgagattctgccggaattgaggtcggaaagagtgttcattaatattcctgcgatcaaattttccttagttgtccaattaagaggatttacttggtctaaagtaaagcttcgtccaactgttacataaaatttgttcacaataacgagggtcttcaaaaaaaaaaaaaaaaaaaaaaaaaaaaaaaaaaa

SEQ ID NO: 89592 - DNA, 574 bp, Heterodera glycines
caagtttgagctatacacccgcccccgccgcctccggcgcggcgccaccggtgcctggggatgatgatgaagtggaagaggaatgagcccgcatttgagcggccgctcgaagaatggcgggagcgccgcaaccaacacgcgcaaaacaatattcacccgcctccggcgccaccgcaggaggaggaggaggagcactgggcccaggcatggcctgaggaggaggaggcggcgccggaggcggcgttgccccgagagggtttctacctaatcggaggtgtccatgacccgatcagtcttcgttttgaggctgcgatttgcgcgagatgatgcggaacgtgtggcgccgcattgacccttcgaaacgtgccatgttcggcggtggccgctcggccggggtgccttcgcacggcggaggagcgcgtggcgggcgcggcggtggaaacttggccgaaaaatgaccaacgggaaaggacggtttaatttatctgatacatggcatttatattgagcctgcaattgtttcgttgctttatcctttttgaattgattgtctgtttttgatttttaaaaactc

SEQ ID NO: 89593 - DNA, 376 bp, Heterodera glycines
tacctcaaagaacgaggattatgacccggacatttggcactctaaggagcagcagcgccaactgatgcataatgccaaacagtcgcgcattttgaaggaattgggatgccctgctatgggtgacggttgttgttcgaatgcccttttagaggcatcagttaaagcgcgtgtgcgcgacgtagcgcggtaccaactcagacgcgcgttggcctccaacttattgttcaaatcacgcggccgcaatgatcagctgtgatcagaagcagataaatgcttgaccaagaaaacattctattctattttgttgatgtattaggagaattaattatttacacatttcccaaaatattggagaaaaaaatgtaatcaaaacgaa

SEQ ID NO: 89594 - DNA, 467 bp, Heterodera glycines
aagttttctaaaaatggaatttgttctaattgttcgtttgcctaacgacctgaagtacataaccgtccggccatcgagtaccattgcgtttgttaggggaatgacagcatcactgatgggtactgcaacggaaaatgtgcgtctccttcttgatgggatgcctatgcatgatgggcgaactgttgagcactacggattgacttcagacagccgagtcttcgccgagctgatcaacaagggaacggacggagcaggcagctcagcagggaagaccggaaagccaccggccggacgatgatgtgcgcccgtcaaattcgaaattgtcgcatgaggcgttatggggggcaaacgaatggacgagcacagaaaaccaaccgacaaattcttttttcatttgttatttttaatttgttgatccgtttcgtgttaaagaaaaattagttgacaatgcgtaaagtgaacagatt

SEQ ID NO: 89595 - DNA, 895 bp, Heterodera glycines
ggaaaacaaggacggctcattcttgaacaaaagggacattagcgacccgtactgcgaaatccaagtcggctcgcaagtgttccacacccgagtgatcaacaacaatttgaaccccgttttcaatgagtgcttcgaggcggtggtggaccaggccagtgggcagaagttgcgcatcgaactgttcgacaaggacaccgccggggcggacgaagagttgggacggctgagcattccgttggaaagtgttcggcaggcgggcgaaatggagcggtggcatcatctcgagggctgtaagcatggcgagttgcggctcaaagtgtgttggatggacttgagcacggaatccacgggcgtgggtcgtgacgagtgggagcaggagtggctgggcgcggacaaacccatgcaccccgcccttctgatggtgttcatcgactctgtcgccaatctgccgtatccaaagtccaatttggagccgtctccgtttgtggaggtttcgctgggccgaatcactcagcggacgccggtgaagccgaagactgtcaacccgttgttccagagcaaattcaacttcttcgtcaaacagcccgaggggcaggaactgaaaatccgagcggtggacgaagggacgaaacgcgacattggcgaattgtccattccgttggctgccgttatgagagagccgatgatggagatgagccagcagagcttttacctgacgcatggcgtccattccagcccaattgtgctgaccgcacgtcttcgattcttcactccgccccgtaaagtgctcgaggcccgggatttgtcctcgacatacggaaatgcggtgcatatcgaacggggcgaccgaacgaattcgtcgctgtcggaggaagacggccagtcgaatcacaat

SEQ ID NO: 89596 - DNA, 645 bp, Heterodera glycines
agaattgtaaatttaaatggcaacgcaaagtaactttggaaaatttcaacagcgttcaagtcgacaatccagtcggatcatttctcaacaacccacgaaatgctttgatgaagcggctaaacgacggcgcattcagcaacaattggagtcacttgagaaagataatttccaagaggatccccacgcgaatatcacatggcacaaagcggcaccaaaatttgacgatgaaatggtttttggagacaaagaaaagaaaaggcgaaaacggaaaatcgcgtcaccctcaaaagtcagcggagcggagcaagcaacgaaaaagggaaagaaaattgtggccgctttgacaaagacgcgatttaggaagacatttgctcaacttttggaagaagcgcagcgaaagcgcgaggaagaaactcaacagaggcggaaagaggccagcccagaactccttttgcccacctattacgaagtcgcttcatctcccagcaaagtgccctcgcgaaagttttgcgctgtgtgtggtctttttgccggttacacttgcgttcgctgttccgcccgcttttgctccattccctgcaaggacatgcatttggacacgcggtgtttgaaatggactgtatgacattgcgcatccaatttaat

SEQ ID NO: 89597 - DNA, 503 bp, Heterodera glycines
acactatttactgttggtcctctgctggggtcatcaaagtgggaacatgctcgggaacagccgagtggactcgtccaaattgacttgggcctcaacatttgcggacgctctgtacctggcaacttggtcatatgctttgctgtacaacgaggcaccgttgaatattttggtgaccaacagcataaaccatgcaaaaacttaaaaaaaaacaaaaaattattaagtgaaaaaatggaagcagttcgccccccccgccgaaaaattcaagaaaaaattttataaactttccatcgtttttggaaaattttttagaagaaatgcctagtagttcgtcataaaatttcgaaaattgctagaaaacgttttaaagaaatttttttaataaaatttttttttgaaaaactttgccgggaactgtgcacccacaaaaaccccattgactgacccaatgcggcaactgaaaaaggattctcaaagtcgaccgattgacaaatgaccctaat

SEQ ID NO: 89598 - DNA, 615 bp, Heterodera glycines
ggagaaaagcacagatccaattccgctgacaaatgtcagatttcttcctcgacaattccgacatggacgacaacgagctggagctgaagctgaacaatttgcaaatgttgaaaaatcggcgtgccaacaaatctctgaaaatgccacccactgacattggcactaccaaattgccagtgaacggcaaaggcattggctaccgaccgctgccagaaaatgcacaattgaagcgggacattgaaacaaaaatgggcaccactgacagcgaagagaaggaaaaggagccgaaggaggagaacagagtgccaccaaacgaaaatggcaatggcaatcgaccgctgtcagacaatgccaaggaaaaaaatgcccaattgaagcgcgaaatcaaagaaatattgggcataattgacagcgaagagaaggaaactgagccaaaggagacaaaattctgcgaaatgttttcatgggttcagctgttctttggcttggctttcctgctcctttcattcgctgtgttctgctggtgtgcctcaaataaaactcaaacctcaaacactccgactcattccaacagttcttccgtgccttccaatgtccctgtgccaccctttttgg

SEQ ID NO: 89599 - DNA, 724 bp, Heterodera glycines
agatgtcaagacctttgcctaacgtaacacaaactgcaaatattttgcgtagtaatgcgccatcgccgcataatcaacagcaggctctctatcaacaacagcaaatgttaccccaccagcaacagcagttacaccctccgccacggctcaattcgcaaccgccgtacacaattgtctaccaaaatcaacaacgcacgcctcaaccgacagttttggttggcactgccaattcgccgctccaatcgcagtccatcagttcgtcatgcgcctcttcaccccaattgtccatgaccagcagcagcggtggcggcgccggcgatggaggcacggcagcgccggtggcatcggcaaatccgcacgacccaaagcggttgcttctcaaatgtgcgcacttcttcaaatcgctgtcacgttttaaaccaaactcttctcaggaacaacaccaacaagtgctgcaactgttgagagagggcgtcacaagtgaaatgagtgcagaggaattcagtgccaaactgcgcgaagtcactggctcacaggacaaaggcactctgttgccctttttgaaattgtcacttccgttgctgcgcgtctcccttcgcaaaggcgaacagaatgaattacagcaaatgcttcgtttggacggtgccggaagcgcctcgcccgaagaaactgcgttgctttctccgcaacaacaacaactgtcagacaacggcgtcgatgaggc

SEQ ID NO: 89600 - DNA, 601 bp, Heterodera glycines
  unsure (1)..(601): unsure at all n locations
aaataatgctcgggttgccctacgattttggaatcgacctttggtctgtggctgtgactttgtatgaagtttatacggngaaaaataatgttcccgggcaagtcaaataaccaaatgctcaagttcatgatggatttgcgcgggaagttcccgaacaaggtgattcgaaaggcggtcttcaaggaccaacacttcgactacaactgcaattttttgtaccatgagacggacaaagtcaccggcaaagacaaagttacagtgctcaccaacatcaaattgttgcgcaatcttccggctgaactctccggtgatcaggaacttgacagagatgggtttgccaaggttgaccatttccggtctttgctcgaacagatgacagctttggacccctccaaacgaatttcgtgttcggatgctttgaaacaccctttcattgtagaaaagtgatgtgaactttaagcgcagaacatatttgaacttaattccacttcctttataatttgttttcattaaacaatcgaaaagagtacggaaaataatgacaaaagttttaaatgtcgccgaaaagaaaaaatgaagaactaaaaaaaaaaaaaaaaaa

SEQ ID NO: 89601 - DNA, 318 bp, Heterodera glycines
cagcaggcggacggcccgggggacagtcagagtgatttcaatttcaatgctttcttgggcaagccggacgagttcagcaaggaagtgacggaaggcgctcttttcgatttcaacttttgagctttttctgttttcatttggctttggttgtgctgtaactgttaattctattttaatctgcttatcattatatttggccattttttctttgtttagcattgttttgttctggtcatttcatttgtgtaagtaactctgtatttctgttatttttcccaataaaatcattttttcaaaaaaaaaaaaaaaaaaaaaaaa

SEQ ID NO: 89602 - DNA, 429 bp, Heterodera glycines
ttaagatgggcacgaaaataaaaatattcaataaggtaatttggatcccaaaaagaatttggggtgaatcgttggcatttgctggaattttaattgggctgcactttgtttactactcaatgcaaaacaacccaaatttaataccattgaatgatcgtcgggaactgatttatgtgaaatggatcaaagaaaaattcccgtcattgggttgggttggcattgacgacagcgaagcaatgaaaagaagggaacggatcatgggacagaaagagcaatagacagaagaagaacagaaaaagaatggccaatcggagggaccgatttattatatttatttgtgtttccgttccattatatgtaattgaaagctgtttacatgtagaaagtagaaacaaatgaaatagaaacagcaaaaaaaaaaaaaaaaaa

SEQ ID NO: 89603 - DNA, 705 bp, Heterodera glycines
ccaagtttgagacctttattgaaattgagtacgctgtgccaattgtgcggcgctaaatgcgacaaaattggcgcaatctttggcaaattcctggcaaatttttcaatgtgagattttggcggaaaaagccttttcaaagtgctcgccgacagtgcctttgagaagccttcgttggtcgacatctttttctcgtctaaattattccaagcttctctgaatgacgcatgtgaagcattgatcagaacgcaatcgcaacaatttaagctgcttaagaagcgcaacttcgacgtgatcatttccgagcagctcaacttttgcggcgcgggcattggccatttgctggacatttccgtgaacattgtgctcagcagctgttccctccaagagcaccttgcttcgctgattggccttccgtttccctccagtttcgtgccttcattgatggattcaaattggtccgacaaaatgtcgcttttacaacggttccaaaatttgctacacaaattcgccggctacaattatctcagttgtggcatcgacccattgacacaaattttccgaaaacattttggaaatgcttttcccgaccttcgttcaattgtcagcaaatcgccgctcattttcgttgcttctgatgaatttgtggactttcctcgtccccttttttccaatgtcatttatatcggtggtcttggaatggagaaa

SEQ ID NO: 89604 - DNA, 546 bp, Heterodera glycines
acttcctctttttgccgtcacttaactaaggttgcacatcgttttttttcgagcagtgtccgacagacggaactgtctttggagcgacacgagtggcaaacggtgatgtgttccaatggagtgatcgcgtgttggcacccgcccaaacaattcccatttgagcactcgcgcacctttaacatggaaaaggcaatgtcagaaaaagagaaatttcttaatcgtaaacccgatcaaactctttttacaacggcgcccgatgataatgcgctttgcgaaattttccacaccgaaaagcaggaatggaggccgatatatcgagagaagcggctttacaatgcgaaagttgaagatcaattgaagccgattctttccaatccgctggaaactccgactgcccctgtcatcacaaaaaatgtcgaaaacgaagcccatcgaattgaacagggagtcaatgaagggaacaacccaaatattttgtcggaatgatatctcattctacggttaaatttcttcgaaaaaaaaaaaaaaaaaaaaaaaaaaaaaaaa

SEQ ID NO: 89605 - DNA, 864 bp, Heterodera glycines
  unsure (1)..(864): unsure at all n locations
tgagaatgccatctcttcggatttgccccttcaatttccccaccaattcccttctaatttccgtccttttgcttcttttctgtctccaattctttcctctcaatgcccttcatcattcggtttttgttcgacgtgacttgagccgacccgcgccggatgatggcgtcgcgtccgcctccatcaacacggaggaggatttgggaggactgaacaccgaatggctaactgacgatcagctgagcgaattggcctctgccgggagtaacgaagaacgaatgataaaaatgaggaccttttatgacaatttggaaggcgaagcgaagaaaggcgcaacgaagaaaatagtggaggaatgctacggatgggtggacgaagtggcgacggaggacgagcgaaacgcactgaagcaaatgcaccaccaaagccatgacgaatgcaaggccaaagtcagggaactgatgggacggctaagtgaggagagaagcgaacaagtggagaatcggatgggtttctgcgaacacgtctattacgggaagatggacggggaaggcgacggaggagcaggaacagctggagacgaacaccaccaccaccatcatcaccacaccaaaagacgggctcacaggcaacgcagagaccaccaccaccaccaccatggcgaacatggacttgaggattatttcaaaacgcatttggcatggttaacggatgagcaaaaagcggaaataagcaggatgaaggagtcagggaaaagccgacaggaaataaagcagaaagtgatcgaattgtacgacgcaaccactggagaagcgcgagaaaaggcaaccgaactgctgaagggcgggtgccgagagctgattaana

SEQ ID NO: 89606 - DNA, 668 bp, Heterodera glycines
gtttgagacatctctttcgcgcctcattaaatgcatattcaaacggtcccgtaattgcagaaaacattataaattcgttgaaaagaaatcgagaaatggggaaggagcaacagaaacaacaaaacaaagaaaaaaaggttgccgcacaacagcagcaaaacaccggagatgaagcggggactaagaaacagacaaggctcgggttggatgtgacaaagacggagaactattccgaatggtattcccaggtgatcgtcaaggcagaactaattgagtattacgacgtgtccggctgctacgtcatccgtccctgggcgtattccgtgtgggaacacatccaagcattcttcgacgctgaaatcaaaaagctgggcgtcaagaactgttactttcccatgttcgtctccgctgctgcgctcgaacgcgaaaaaacgcacgtggccgactttgccccggaggttgcttgggtgaccaaggccggaaacaacgacttggccgttccaattgccattcggccgaccagtgaaacggtgatgtacccaacctttgccaaatggtgcaaatcacacagggatttgcctatcaaaatcaaccaatggtgcaatgttgtgcgatgggaattcaaacatccgactccctttttgcggacccgggaatttttgtggcag

SEQ ID NO: 89607 - DNA, 616 bp, Heterodera glycines
gtccaattaaggtcacaatgagtaacagtaatgacagtgacgacctaattatttatgacgacaatgaagacattaaagacgtttcatccgattcgggtgacgaagtagcgatggaggaagtcaccaatgcaggcacttctacagctggggccttatctaacgaagaaatcagggactaccaagtgctttctcagacggagttggtcgacgaactgaataagctttcatctgaaacttcagcagtgttgcgtttcaatggctcaatttgcaaggtacttcttcatcacttcaaatggaacaaagtcacactaattgagagattcttcgaatttcctgagacttcaaacaccgattcattcttccgcaatgcaaatcttctcgatcctacaaagcataacaaaatcgaaggaaagggtgattactgcaagaattgctaccatttaagacaactgactggaatgctgtgcaaccatttgttttgccgtcagtgctggtccaattacttgtcgtgcaagtttctcggcgagggtcgaccttatgtcacttgtcctgaacttcgatgtactattgttgcggatgatgaatttgtgctcaaaaatgtcgacaataaacaagc

SEQ ID NO: 89608 - DNA, 829 bp, Heterodera glycines
gtttgaggtggttataatcttttaattaaaacaattacgcaaaatggtcacccaaaacgaccatttgatggcaaatttgtccgaccaactcacaaatctgcaaaaggaattggacacactgaaaaaggacatgacggcgaacaacgacgcatttttcaattgtgccatggcactgatcatttttctgatgcaatgcgggttcgcctttctcgaagctggagcagtgagaagcaaaaactgcacgaatattatcatcaaaaatgtgcttgattcgcttctcggcataattgcttatgcggcggttgggtgggcactcgccttcggctctaaccctttgcccgtgttggagccctatttcggcttttcccaatttggaatggtcggcaccacggaattctcaaagttcttcttccaatttgtgttctgtgccactgcctccaccatcatttcgggtgccgtggcagagcgtgccgagatcgcctgtttcatcacttattccttggccatcaccgccttcgtttaccccgtgcttacccactggggatggacgaaacagggttggatggcagccagcggatttgtagtcgacgacgctcaccaaatcacttacgtggactttgccggctccggaatggtccatgtgtgcggcggcactatctctttgatcgccgccgcactgatggggccaccgatcggacgcttcccggagaggacagtcagcgtgccggtggggggaccgaggcggaagcagaacgagcccaaaagtgtggagatcaaacgacattcagtgccgctcgcctctatgtggggcttcattctgatagccgga

SEQ ID NO: 89609 - DNA, 568 bp, Heterodera glycines
gtttgagttattccagcgttatgaaattctctcatgtactcgcgaagggcaaggttaatttgaacgcgcacacttggttccgacgcgtctgggagaagggctattctggaccgccactgccaaaaattaaacgtactggaaaacctcccgtgccggtgacaaatgaggcggtcaacgaagtgcggacggcactgatgcgggaatggaatgtcatgcagtggctggccaacccgtacctcaacgcggaaaaggaggcgccatatttggagcgtttcggggacatcaatgacgaatggacacagcgaacggtcgaggcgaaacatcgcaaaatgcccaacaaaccgaaaatccggcaaattgcatctggcgaagtggagaagagacgtgccaatgttggcaatttgttacacgctcatcggacggtggaggacgaactgaagaatttggagcgcagaaaccgatgggactgaacaatcgatcacttcaatttccttgtcatttcaacaaatcattgttttagttctacttatatttgctggccacataaaatggggttgttcgttaaaaa

SEQ ID NO: 89610 - DNA, 689 bp, Heterodera glycines
agattttcgtcctcaaacgtcggttgtttttccgccgttaaaatgaccgcagcggcaaaactcagccgtttcttccgccgtttggtgcacgtccgacagatggactttgaattcgctgcttggcaaatgctttacctgctggtcaatccgcaaaaggtgtacaggaatttcatgtacagaaaaagtttgttgtccctctcaattaattcattaatttctaatttcgttcagaagccaaagatcaatgggcccgcgatgaccccgcctttctcctccttttggcactttctctgctcggctcgagtgttctgtttgcattagcgctcaatttgtccttttcttcgttctgcgcctttttcctttgggttgtgttcatcgattgcatcggaattggcattgccattgcaaccgcactttggttcatttcaaatcgctttttgcgtcggacgagggattgcgacgtggtcgagtgggcctattgcttcgatgtccatttgaatgcttttttcccgttgctcattcttctccacgtcattttacctttgcttttctacggattggttgattaccaaaattttctcgcccgcttttttggcaattccatttggtgcattgccaccatttattataattacattactttcctcggctataccgcacttcccacgctggaaaacacgcaattcttc

SEQ ID NO: 89611 - DNA, 600 bp, Heterodera glycines
gtttgagaaaaacgttcaaatgtttcgcttttcgctgcttctgctgcttgtccctctcgtccgctgtgtccccaacccaaagcctttgttcggaattggcatcggtcgcaagcaaagcgcgggagcggaggggaagctgacctgcgctggagagccgttggcggatgtgaaggtgaaactgtatgatgacgaccgcggggtggacacggatgatctgatgggtgagacgagaacggactcagagggacgcttcagattggaggagtacacgaacgaaatcaccaccatcgaccccaaaattaacatttaccacgactgcaacgacgggctgaagccatgccagcgcaaaatctcaattatgatcccggacaaatacatcgcctcgggcgaacatcccaatacatattacgacgcgggcacaatcgaattggagggcaaattcagtggcgagacaagggactgtctgcactaattgcattggaactgatcatttggcactttctgatcagttgggactgaccaattggaactgtctgcactgatcactttcccatttttgtttctgttttgtcaccgattttccccaaagtgttacaccac

SEQ ID NO: 89612 - DNA, 629 bp, Heterodera glycines
tcatcgtttccttgtgcctcttaatttcggtcaaaattttacgtctgacaaatctcgacattttgtttcgtattcgggacgggcttagaagtgggaagccatttattacggcactttttcgggttgacattgaatctcagaggcatggcggtgaacttgtggccgaagttttgaaggcccatggagttcgcgagcttttcaccctgtgtggtggtcacatttcgccaattttggtcgcctgtgaacaaattggcattcgtgtgttggacacgcgccacgaggccactgccgtgtttgccgcagacgcggccgctcgcctgcgccaggacattggggtggccgcggtcaccgccgggccgggcatcaccaacacagtgaccgcgttgaaaaatgcccaaatggccgagtcgccggtgcttttgttgggcggcgcgtcgccttcccttttgaaggggcgtggggctttgcaagacattgatcaacagacgctggtccgttcgttgtgcaaattctctgcccgagtcacctgtgtccggaacattgtgccgaccattcgaaatgccattgccaccgccgaatcgggcacgcctggtcccgtgtttgttgaactgccaattgacgttctgtac

SEQ ID NO: 89613 - DNA, 617 bp, Heterodera glycines
gagtcgaccatattccaatatattaaaatttcttaactatgtcgacctcttcaaagttgacagtgatcaacaccattgcgacaatgcgacaattcgtgcgcaaacatcgtaaacagaacgccaatctttgcgtggcattagtgccgacaatgggtgcccttcaccaaggccatctccgactggcacaccaggcacgccaatggcataatgacaaaaaagaacaaaatggcaccactgatcagtgcgcctctccgcccctggtgatcgtctccatttttgtgaatccgcttcaatttggcccaaacgaggactttgaacgctatccgcgcacattggaagcggacttggccaaattggagggcgtcgtggattgtgcatttgtgccaaatgccgtggaaatgttcggggaggaaaagcaaccgctgaatcacaaggatgaggaggatgggatcggcattaaatccggacgcattggacgtattttggagggtgtcacacgtccacagtaccatgacggaatgttgctgcatgtagccaaacttttcaacattgtgcaaccaaatttggcattttttgggaaaaaagatgctcaacagctgttcgccatccaccaattg

SEQ ID NO: 89614 - DNA, 628 bp, Heterodera glycines
aataattccagtccatgatgagaccgtttttgggggttcgtcgaattatctctgtttaccgcacaatttccggtttacgacccttcgattgcgttcaacggacattgacagttcccatcgaagggaaagcgccgaaacgatgcaccgccgaggaagcagttcgggacatcgaatcagatgaacacatttacttgcatcatgccatgtcgtgtcccaccgatttactgagggctttcggcaaacacatcgaaaagaacgatttgagaggaatccgtgcaagccatgccttaacttgcggcgaagtcccatggactgatgagaagctccatgaccgagttcggagtacgaccattttcatttgttcgaattttcggaaattggtgaaccagggaaaagccgactatttgcccgtctttctgtcccaatccgcgcgtctttacgatgaaaaagttcttcgagttgatactgcacttttgaacgtttctccgccggataagcatggttactgctcacttggcgttagtgtcgacatgtccagtgccgccgctcgaaacgcgaaaagagtcattgcttccatcaacaaaacgcagccgcgcaccttcggagacgccgaaattcacatttccca

SEQ ID NO: 89615 - DNA, 347 bp, Heterodera glycines
gtttgagccataatcgtttcacaatgttgattttcccgcacatcaaattttcgacactccttaaacgcgcgactgtcaacagctcctattatgtctcatacgctgcctatggtgcctctgcttttcttgtgttggtttacgttacggaatggaagcgtttcgcccgttatattcccggactccgttcgcagatcaaatcggacgaatgaatgaatgtctcgtggggtgtgcggaacggtcgactaattaggcaatgatgatgacaatgctgctgttgttgtgtttaagcatagaattctgacaaaagcacgtgtataaaaaaaaaaaaaaaaaaaaaaaaaaaaaaa

SEQ ID NO: 89616 - DNA, 328 bp, Heterodera glycines
ttcattcttgattatgtctatgctcgatgggagcggggatagttgttttggggcgggagctcttgtcggatttggtattcggtattttggcgcaggacccacagcagccacagcggacgaaactgatgaatttccggagaacgaagttatcgatgaggggccgaacaacaacgggcagccgccgaatcctcaccatccgctgccttttaacgaggagagtgattaagaaaaacattgtgacatttaattagcgtattataaaatttgatttatgttgttttttgaataaattattgagtttaaaaaaaaaaaaaaaaaaaaaaaaaaa

SEQ ID NO: 89617 - DNA, 621 bp, Heterodera glycines
tgagaatgttttaaatgttcgctggtattgatgggcagcaaaatcttctcctttccgctcaattacagcgtttactttgccaccacggagaaacggcgaatgcattcgttttctgtcaccaaatgcaaccggagctgcaaaaggggccgacttgcggattcgccgttcttttgatggcgttgcgctgttccgtcggcgatggtacgttggaccgattggtggaaatgggcaaacatttcgggatcacttacaacggcgaactcttttccgctgattggatgtgtgaatttgtccaaaaacattggccaaacgcttgcgaattgcgagtggcccaatttccatctccaaattccatcgtgcggcatttgatttctgggaaaaaagctcatcatcaatgtacaacgacagttttggtgccgtacgattgtgacaaaaatttcgagccatgcaatcggcagggcgttgctgcacattgggcaatcattattggatttgttatttttgatgtcaccgctcaaaatgggccagaaaatcatgcgaaagttattgcatttgacgaaaatgacttccgctgtgatggctttgacaacgaacaccttttgtatcttatagcgcttcagg

SEQ ID NO: 89618 - DNA, 643 bp, Heterodera glycines
gtccaattaagtgtttttttaaatttatatttctttgctctgcatataacaatcaacgagagaaatggggaattgtaagcccgcggatgccactgagtcggagaacgcgtcttctgtcgagacggttgaagttgaagtacctccggaccctctcgttaacccattctggaagatgcaaaaagccttcgagaagaaactgcgtaatctgttgaagcgtgagaagaagcttttgcaactgaaggaagaacgcgattccgacaagccgatcactaccgaccaacacgaggctctcagcaaattggacgaagttaaaaccctcattgggttcgttgatgagatgatgaagttgaaccagcagcagttcagccagtataagaaagccatcaaaaatcgtgaacgccaactgaaaatgcagaaggcgcgttctcaaatcggtactccacaattgtcggatgagctgaaaaagtcgacggaggtacagacgaacggagtcgccgaggaagtgcaggcggcggtgggcgtcgtgggaccttccagtgaggtttagaacgtgtgcatttgggacgaaagagacggacaaattattgatgtttatcaatcagatgcttttgttggtaaataaatgtgaattgtcaaaaaaaaa

SEQ ID NO: 89619 - DNA, 1070 bp, Heterodera glycines
gtccaattaagatcattctgcacacatcgcatcattcatttattgttttcttatgacaacggaaccaaatggtgccgttgaccagcagcagcagttgctgtttgcctcaactgcttgcgcatgtcgtccgaacaccatggaatggtgcaaaacaacttcatttattgcgtttgcttctcagaggaccatctgcatcgtctctgatcagctgccataccaccgaatcatcgaaactgtggagagagcgcacggggctggcgagataacctcattgactctgttgagaggaggcaccgttggcaattgcaaaatacgttcactgttctgtaccgccgcttcatctggggaattggcaatttggaaaatgtttaaaacaccaacgacgacaacaattgctgatggtgatcgtcgtcatgtaatgtgcatcaaaagactcagcaaaaaggcgagcattgaactgtccaaaatggctgcgtatgcaggcgacactgacgatgtactgcttgcaattcttcaatttgaccacattgatgtccaatttctgaacttggatggcgatgatgatcaaattggtgccgccgtttcgtccctcaaatttggcagtgccattccatccacttttgaactttcgcacatttgtggtgccgttgtcatggctgttggcttgtcttatggactcattgacatttttgtctcggaaacgaattcttactccatccagaagaaattgtcccttgacttatgcggtagcaacaaatcatggacccgcgccttggcatttaatgttagcgaagatggacagtgccacaatttgtcgcttgccgcagcaaccgatgggctaatcaaaatttggcaatttgtcggcgatggtgacaaaatcactgtgacaccactcgcaaatgatgatgatgaggaccaacagctcaagatgaaccaacaaacattttgcatccaaaatggcgtcgctcatccgatctctgtcactttggaatccgtcctacacgcgcagaccggcccaatttatgcacttgcatggcatccaaagcgtttggagttgctttcgtctggcg

SEQ ID NO: 89620 - DNA, 624 bp, Heterodera glycines
gtgtacaattatttaaagaaaacagcgctttctgttcttttctcgcttcaaaatgtctctttttcttcttcgtgctttgcctcttttcttccttttctctctgtgcttcgctgcctctcccttcaattttcgcgcaaatcattcgcttggtgccgaaaccactcaacagattgtgcccaccgtggcgactgaaacgaccgacggaccgaagcctacggaaaatgttccccttatgttggagaatgacaatgtcaccgaagttgccaaagttgaaggacggaatgccaatgacagcgaaattgaaacgagggaggaccaagcctttgccaacatcactgctcattcctccgacaatgcttcgcttactgagagttgtggcttcttttgccgaaacgtgcctttattcgtcggcttcatcttgaccctcgtctgcgtttctctgctcctcattctttccattcttttgtaccgttattttacgcggcgcacttacgccgacgagtgaaaagacagcgaatggacgcaaagaaacgatgattcttcttaaaatgtcatttcatttttgctgatgccatcaatcaatttgttgcttttcccttttgttggcctcctttttgaggcctt

SEQ ID NO: 89621 - DNA, 626 bp, Heterodera glycines
gatatcttgaatttattttgtttcctcatccgatggcctcgagaacgttttctcgttttgcgagcaattttcgtcttttcggttcagttatggcgacaaatttgtcaggaaggagtcactgtttcgttgccaagaagtccttaagcacgtcccctttggtctatgctactgcagcagccgcttcgcagccgaccactccaaaggcgaccgttaagggaaagaaagggcgtgtcgttgctgtcattggtgctgttgtggacgtgcaattcgatgagggacttcctccaattttgaatgcgttggaagtgcagaaccgcgcttctcgcctcattctcgaagttgcacagcacttgggtgacaatgttgtgcgaacaatcgccatggatggtactgaaggtttgattcgtggtcaggaggttgttgacactggtgacccgatcaaaattcctgtcggacctgagactcttggtcggattatcaatgtcatcggcgagccaattgacgagcgagggccaattggtgcgaaaaactatgcaccaattcatgcggatgcaccagaattcgtggaaatgaatgtcgagcaagaaatcttggttacgggaatcaaagttgttgacttgttggca

SEQ ID NO: 89622 - DNA, 646 bp, Heterodera glycines
aaacaactcatcggacagaacaatttgcaaataaatttctgatgtcaaaacatcaaaaaagtgctgttacgccaccaacgacgacgacaacggcggcagagagtggcggcgaaagagacggacgcactgagacgacaagcggacagcggaaacgacacagcgcaaaccaaacggactcggcgaacggcgccgctgggggacaagggtcgaataacgccgttgttttgtcctcttctgagtcggctgcaaaggaagcaaaggtcagaaagatgtcgacaacatcgcagaacaagggccacaaatcgaacaccatggcggaggacagcggcggtggcacgggcacgtcggctgcctcttcgggcaacggggcggagcagaacgacaacagccgagcgaccagacggccagcggaactgcagcatttgattgactacttcccggaccagcagagcacggacggaaatcggatgacgcgttcgaaggcgagagcgatgcaggacaaaagcagcaacagtgcttctggttcgtctggtgttcagcagcagggctcaagtggaaatgggagtggtggcaatggtcctggcgggtcgtcatcggcaaaaagtgttgggaatggcgtcgccgccacaccgaacacacaccatgg

SEQ ID NO: 89623 - DNA, 812 bp, Heterodera glycines
gacccatcttacacacaagttcgattagtacaaaaattttatcatccaaaactacgtgatgcgacatgctgcagctccaattcgtgactatgaccatttgttcaagttgctcataattggcgatagtggagtgggcaaaagcagtttgctccttcgcttttcggacaacactttctccaccagttacatcacaacaattggtgtggatttcaaaatacggacgattaccgtgatgggcaaaaagattaaacttcagatttgggacacagccggtcaaaagcgattccgaacaatcacttccacttattaccggggcactcatggtgttatcgttgtgttcgacgtgaccagcattgagtcgttcaacaacgtaaagcgttggcttcacgaaattgacaccaattgcgaaaacgtgcaaaaaatactcgttgggaacaaagtggacgagccgagcagacgtgccattcccgaagctgaggctcgacgttttgcagagtcaatgagaataaattatttcgaaacttcggccaaagaaaatctcaacgtggagcagatgttccaatgcataaccgaaattgtgctcgagtcgtgcgtggaccgggagaagaacaatccgagacaggcgacggatgtgctcaaattgcgacagagaccggagaagaaaaggaaatgctgcggctgacgcccccccccctcccttgggaccgctgtttaaataacttttgtttatatttggactgtatgcattacatccttaaattttatcattaatttatatgatcatatttcatcatttgaagcttttacttttg

SEQ ID NO: 89624 - DNA, 955 bp, Heterodera glycines
aaaatataaaagacgagcgatcattaagccaaatcatttgttaaacaaattcaaaattgacttttgaactgccaatctccaaaatggtgcttctttgctgttcccaacataaaatggaccgctcattgcccaattgcctcagggggtgccgttgtggcattttggtcggcagaaaagggaagaaaaatgtgccgaaaagcagcggagaggagggaaaagcggagcaatcgcagcagaggaacgaacggaaacagaacaacgaaaattattattgttcagtggaagagatggcttacgatgcgatgtacgacgaaaaaatgccggcggatgaacgggacaaaacgggcacagtgcttcaacgagttgcgatggcacttcagggaaaggccggccccgaacaataccaacagttcaaatgaaaagcggtggaagagaagaggaaaagccgttttgggtggaaaatacaccaaaaaatcaaacaaattggaatttttttcaattttttgttccagacaaaataagcatcacaaaagtaacagattaaattaattggaaaatgtttttgctttgctttgtattgctaataaataacaattacaatttgctatttacaactccgcttcatcagagatatgctcaaagtaaagagctaataaaacttgaaaatgaaaagggaccaaaaataaaacagaagaaaaaataaacgaaagataaaaaaggataaataacgaaggatatggcaaggaaaatattgtcggatggactaaccaacggagaaaggcccgcaaaagggagaaaacctaacggataattgagttaatggtataattaaaatttaaaatgaaaaaacggacggaatggaaaataatttacaaaacgaatgaatgggcgaacgatcgtccgtttttggctatgtacaaacaaataattgcgtgattcatacaatgcgtcgtct

SEQ ID NO: 89625 - DNA, 1268 bp, Heterodera glycines
ccgccgtttcgcttccacaccgacaccgacacgcacacttgacttgacttgacgacttgacttcaccaccaaatcttcccaacatgtttggcttccgcaaccccgctggctccacccacaaccccaacatccttgtcactgaaggcgacacttggaccggcttctacgctgcctggtcgctcttgcgccaccaccgcggcggccacgactcgacctccgcacccgcgccaaccggccaacccggcatcaccccgacgcaccacggccatgtcaacaaggtgattgtcgatgtgcgcgactccaactcggactttgccaaggaactgcacaagctcggagccgagttgcgtgaatacgacccctacaacatggacaaggaccagatccaaaagcacctgctgcgcaacgacgtggacggcgtggcctttgttcccgtgcacgactcgattggccacatgatcaacatcaacaagatgctgctgcgcgcctttgaggaagaggagcggtgcaagtgccttgtcatgtggtcgtcgattgggacccagattcatccgggcagcggccacgatgacgacgaggatgtgcttgccaagagcaagggcaagtcgacggccacgcggacctcggccacgggcggcggcatgccctcttggggtcagcttttcgagaacaagtcgcagattgaagggccgtgaggaacagcaagtttgagcacgagtgtatcttgcgcattggctttgtctcgcaacaattctttggcctctcaaacgtgatccagtcccgcggcatgttccccgtcacgtcgcgctccaacaagtgggctcccatcaacgccaaggacgtggccatggtctctggtgctttgctagccaacccgtcgctcatgtccaagttcaccaagcaaaccctggtgctcacgggcccgcagtcgcactcgggcaaggacatggtcacggtgatcaactcgacgctcaacgccaagctgtcgctggaggaggtgtcgctcaaggacctcgagaccatcttgctcgaccaagaagatgtgcccaatgagggcgagctcgccatgacgctcgggtactaccactacatcaaggagaacaagctcgacattgtctcgaacgacgccaacaaggtgcttggtcgtgtgccctcggacattgacgtgttcttcaaggagaacggcaacttgttccgccctcgtcggaacgtgaatgcgaccccgtacttgaaggatctcaaacagtaaggcaaggaccatggcgtgc

SEQ ID NO: 89626 - DNA, 627 bp, Heterodera glycines
ccgacgcggtcgcaaagcataaaaaaagtgactgaacatggcagttcgttgaagcggggccccggcggaagtttgggcgcggcggacagcagcggggcaatttcgcaactcgccattccgacggtgggggcgctgaaggccagctcagccggagacatcgcgcaacagcagtctccccactcttgcttggctggaaccagctcgacctcatgtgttgagctgaacgcggaggcggaggagcgacgcctggtcgagctggtggagaagttcgacatggactggggcagcgatttggaggttgacactgaaattccgagtctcgagtcgctggtcagttgggaaattctcaagcatctgaagccaaaagagaagaagcgccaggaagtggtcaacgaactgtaccaaaccgaacgtacccacgtgttgcgtctgaaggtgctttacaaagtgttctatcggcccatggttctgcagcgggtcgcctctcctcacctggtcaaattgttattcggcaatttggacgaattattaaaagtacacgcggaaatgtgccaaaaaatgaagcgccttcggcttcagaatgggctgtacggggagttgggctcggtcatggaggagctgttctgt

SEQ ID NO: 89627 - DNA, 1013 bp, Heterodera glycines
cacaattaataaatttatttgacaaatgccactttttcttggcattgacctcggcacaacgtcagtgaaaattgccctaatcgatggagacaaaaagacatttttggaatgggacagaaaacacaacgcattaattgagagagaggagaaggacaaacacgaacaaagcccaaagaaaatattggacaccgtacagaaattgatgggagagatggaaacggacaaattggcacaagtgaaaggcattggcatttcgggacaaatgcacggagtgatgctgtgggaagccgactcaattggtttgggcgtggaccgttgccactgctcccctctgatcacgtggatggactcgcgctgcgacgagcaattcctgcggaaactgccaaacatccctcttgactcagtccaaaagtgcgtttatttcctcacaaaatgccgagtcgtggggtttcgtctccgacttcatttggaccgtccaacagataagctgattgatgccctccctctgtttcccatttcattttgcttttcctcacgcccatttccccactcatttgctgccctccatcgtttcccccggcactttcattggccgcacttcgcttcccttcgcccatttgccaaaaggtgtcccagtgactgtgcccctgggcgaccttcaagcgtcgcttttgccctttctcagtgctggagtggcagctcttcacattggcaccgcttcgcaaatagcctttgttagccagcgattagcagaagaaatgtccccaaaagtggtgcttcccaattccatccgtcgcgaccctttctttgacgacgactttttgctggtcgccccttcacttaacggtggcaatgtttttacgggcctttttcaacaaattgcttcttggtccgccgatttgttcggctttccttccgatttctctcctttgtccttttctgctgccttttctctgctcgaccgaatatttaattcaccaaattcgcagccaaatgacggcgaagtgccgccg

SEQ ID NO: 89628 - DNA, 630 bp, Heterodera glycines
attaagcaaaaatgacttccaattctactgatggttggggatgtaacaacagtgggtggggtcaaagccaagcaaaaatgacttccaattctgctgctgatggttggggatgtaacaacagtgcgttgcgtccgaaccaagcaaaaatgacttccaattctgctgctgatggttggggatgtaacaacagtgcgttgcgtccgaaccaagcaaaaatgacttccaattctgctgctgatggttggggatgtaacaacagtgcgttgcgtccgaaccaagcaaaaatgacttccaattctactgacggttggggatgtaacaacaatggctgggctccgagccaagcaaaaatgaccaattctactgatggttcgggatgtaacaacagtgtgaggggtccgcgcgaattttctcggagtttcagtggacgcccaggatttaatcgccaacctgtgcctctaatgaacaagttgcctccaattcctccgtccacaatacttttcgtcgacggcattgaaaataagaacaagaaattgccattgctttctgtcgaagagatcacaaagattttttgggacattgccaacatcagtgtgcttgacgttacccggcccaaacagcacatgcgca

SEQ ID NO: 89629 - DNA, 448 bp, Heterodera glycines
aaaaaaactacttcaaaaacaaaaccaaaagttactatcccttcaaccctatcctccccctctccttacgcaaagaaaataaaaaaactacccaaacaaaataaaaatacaatagacgcacggggcttgtaccatacaggtaaacacaacaagaaaccaagccgagctatcctggaattgcctggatggcaatgggatagagtacctataccgaaagacccaacggaagaatgtggtaaaatagtttttgaaattaaggtagatgcaaatggggaggtggttgcagttcgaaccatagagaaaaccattacgcccctcgtagaaaaaatctatgcggatgaactgcgtagccttacgtttagcaaaacaaaccataataatgcgtcttatcgtaacctatctacaggaaaagtgatcttcatactcgtagcaaagtagtagctgtttg

SEQ ID NO: 89630 - DNA, 895 bp, Heterodera glycines
ccaagtttgagaatctgatgccaacagccggagaaattgtgcacgaagaaaggcagcaggagaagatgaagaagacgaactttgaagaagcaaaggaagaaaaagggagaaaaggaacgattaaagggggaggaagaagaagcaaacgaaagcgatgccagcgcaaccgaactgcttcatgttcatcggaaaaggaaaagcaaacgcagcaattcgatggcattggcggtgccacaccgccgcgacagaaacggcactttcctcaagcggcggtggtggacaatggcgccagaagagtgacaaaagtgtggcacgatgaaaagcagcgggtgaaaatggcacgcgtggaaacggcggtggaagggggcggcggagacagcgacggcacaatggcaggcggaagaacacttagcagcagcagtgtcatttctgcgcgccaccatcagacgcagtcgcgcaacgcgctcaaaccgcgggcaccaaacaacacaacctctttcttgatgagcgatttggagaagcggcaacagcacgaggaagatgatccgcaacaacacacggacgcacttggccaagtcgcggggacgcagcgaggccaaaaagtgttggggagcaaggaggttgggggtgccaccaatggtggtcatcagctaacgacgccaatgatggcaggcgaaagcgcactgcttgcggagggcggcgacggcacggacattgaggagcaaagggacgccgacttcgaggagtgccttttctccacttccatcgaacggattgaaaggctatcgcgcgaagaggttaatcgggagttgctgctcgcagaccgcgacaaccgaatgctgaagcaacgagttacgctgctaagagacagctaccagcaagtccaagaagaaaa

SEQ ID NO: 89631 - DNA, 635 bp, Heterodera glycines
ttgagtttttgcatttcaaaagttcgctgtgaattgtgcactgtatggggcgaccttttctagagcatatgggcggcagaaaatattactcatgtcgaagatgcaaaacgtacctcaccaacagaagggagttgatttcgcacaccttcagaggtgcaaccggacaggcgtatctcttcagaaacgtcgtgaacatcgtcatggctaaagtcgagtcgcgtttcatgatcactggtcagcatatggtccgcgacgtgttttgtaaaatttgcaacggaaagcttggctggatgtacgaatttgcccatgagccacaacagcagtacaaagaaggccgagtcattttggagcgcgaattgttaaccgaacatgaggaaacggaccccgggcttgcggagcggaaccgaccattgacccgcacttcctcgtcctcctccgtgagcagcagtgggatcagttctgttacaatcacctgacaatttcggactgaataaatgatagaatccattcctcatcctctgtgctttcgccaaaaaatgactggcttcctaattttacttttatcattcattcatgcacatatactcactcaatttcccacaactgaacgaaatttattaccaacgatttgtgta

SEQ ID NO: 89632 - DNA, 609 bp, Heterodera glycines
aaagtattttaatgcgtcttgagaagtgttggttttgttcatcaacaatttatccgggccacggaattcaattcgtacgtaacgacgcaacggttttcaagttttgtaggtcaaaatgcaacaaattatttaaaaagaagaagaacccgcgcaaattgaaatggacgaaggcatcgcggcgaattcggggaaaagaattggtcaacgatgttactcaagcgatggaaattcgcagaaacgaaccgacaaaatatgatagaaacctttgggaaactgcagttgaggcagtaaaggaaattcacagcattcgacaccgtcggtacggagagcacataaaaagcactctgaagccgggaaaacaagcggtgaagagggcaatggtggagaaggcgcgcaagaaagtgcatttgataagggcgccagttgccatgggcgaggacgacgagaaattggaggtggtcgaagacggagagcaaaagacggaggagggcgaattgcaaatggaagtcaactgaccgccggtgcccacttcttccgttcctcatctcatgtttttgttgttgtttctttttgacaatttgattttttcaagaaaaatcttttatttgt

SEQ ID NO: 89633 - DNA, 633 bp, Heterodera glycines
aaatgacaggcgcgtgcatttgtacgatttgcctgccaacggcggcgcatttgttgagaaaaaagtattacaacatgcaggtgccataacctcggtgaacttcagcccaaatgggaagtatttggtggccacggacattgccagaaaagtggtgccttacagggtggacgacggtttcaaagtggcatctgaaaaagaatggtcttttcatacagcccgaatcaactgctgcgcctggtccagcaacagtcggtacatcgccacgagttctctcgacaccaatgtgatggtttgggacttgcaacaaagcggtgaacatccgctagtcatccgcggtgcccattcgatgagtgccatcaacggagttgcttggctttccgacaatcgactgcttactgttggccaagactcgaatgtgaagcagtggacactgaaactgtgaagacggtttacgcagacaatgagaaaacggcctttgacttttcaatactttagtccaaattctcattttgtggtgctcttgctctgtccccgctaatctcgacccttttttatttacccgcatttgatgtgcatcccccgagtccattcagattactttgtatgctaattaattttgccttttcaagcttt

SEQ ID NO: 89634 - DNA, 720 bp, Heterodera glycines
gagcttttgaaatttttgagtttgggtaattttggcaaacaatgctaacccttctgttggccatttgtctttctttgggcccaattttggcctatttgtccattgcacttttctctcaccgttttttgatcgtcgatcgttctcgcaatcggccaatttgcacttcgcccggctgtgtccgatgtaatcggaatgcaaatgaactcgcttccgccatggaccgctttcaaaaggctcgtttcgccgcccgcgcgcaattcgcacgcgttcggagtgcgctcgagcgcgcgcgttgcgcgtcggtcgacgacgcgcacgaacttttctttcgcatgaaatttgagggtgtgcaacgacccgtttggacgcgttcgcaactgccgccggcttttgtcgcaaaaatggaattatttgaacgccaacacgcggccattgcgaaggaatgcgaaagggcacttgaccaatgcccctatttgtgggcccggaacgaggaaagggcgcccgcactgcacacggacaatggcgcggccttctccgcttggttcgtttttccgctgatcaaccagggcgactggcaggaaaaacagtgtcgcgagtgcccgcgcatcaccgcattactccaccaattggccaccgacgacggcgtcgttgggacaaccgacggagtttctgctgtgtctgactgttcctctgcttctctgctcactgactgtttgttcg

SEQ ID NO: 89635 - DNA, 628 bp, Heterodera glycines
attttttcctacattttttgcatttcccgtttttgttcgcaatgtttgagcttgcggaccagtctgacggtaccagcggcataaagcagttgtgggctttgatagacccaatttggaaatttgaccgtgccgaattggtcgactgcatggcaaaacgggtcatctacgagactgatgaccttatcgcactggacaaaccattccaaatggcattttcgtcgggcccggatgaccagccccaactggacaggattttacaggacttaaagaagcacattgcgcccaaaattgaccggctgtttctcgtcagatcgttggacaaaaactgcagtggcgtcatcgttttcgccaagagccacgtcaagcagttggagatgaaggcccaactgcagaacgacgccctccttttccgttaccgagccatttgcaagggcgtcccgaagatggccaaggcgcgcatttcaatcccattgatcaaggttttgcgcggctccaacctcaaattttgcccattggttggcgaggcggacgagcggcagcaactgtaccacttgaacacggacgttcggatggtcaacggaaacccaaaggtccagtgcgcactgctcgacgcctttgaacggagagg

SEQ ID NO: 89636 - DNA, 1000 bp, Heterodera glycines
gcaacatgggcttcgaggattgtaaggctcgcttctactcgctgaaaacggtgtcgctgccgatgcaaggtgacaatgccaagctgatccaagtttgcggcgagctgacgctggtcaaggcggctgtgcaaaaacagcagcctgttcttccacgacgctttgtccaaaccatcatttaggcccaccaaacgcccaccgttttgtacgtgaagagcgatgtgtttcagtggttggataccgcctttctggttaccgttagtgaaaaatacaacgcggccaacaacgccggtgctactgtgccaagtccgccgactactgtcgctgaacagcaacagcccctcgaaaatggtggtggccaggttgctcctcctccaatggttaatggtggaagtggcaaactccatcaaatcgttgttgagtcggaacctaaaaaggcgtccgttgtcgtggatcactcacctcaaaaggaaccggagaaaaagccggatgcgccatctgatgctgctccaaccgttgttgactcattgccctctccgacgtctacaccgaataagaaggatgaagttatggcgatttccgccgttgctcctccctcctccattgtcgatgttccgaaaacggatgataccgccccgccgccgtctttgtctcagccggtggccgcaactgccgccgctgcaccaccaccaacatcggaacaacagccgaaccctgcggttgtcaccactgccgcggccaacaacaccaacaatagtttggctcaaaggccaaagtctgtcgtggccggctcgtacgcggccattgccgctgccgcacgagggaatgggccgaacaatgttgataacatcgtgaccgtgcacgttcctgctgcaacgaatggtccgacggcacctactccgtcaaaggagattccacagcacaacaacaacatcgcaaagcacaatcccgaacaccaaattgctgtcaaacaacagcagcaaacgccgccatctctgccgcc

SEQ ID NO: 89637 - DNA, 616 bp, Heterodera glycines
catccgtttatttccttctcacccatttaatctcaaaaactgaattaatccaattttgtcatggatccgtccgccgtttcttcttcgtccagcaccgatcagcaacaaaatgcggaagaggcgcaaaagggcgatttgacattggcacagcaaattgcggaggacaaacagaaaatgtttgaacgctcccagcagtaccaacaggaaattgaggacgaaattcgcaagactcagccgttggtttcgtccaagcaaaacattgtccatttggttggcgaatttgatgagaagacgagctctcagtacttcaaaaaggcgacggagcttgccggcgtttactcggacattcggcgaatccgtggcgatggcaattgcttttaccgcgctgtactcaccgcccaactcgagcgctgttttgaggacgccgaggagctgaaaaggttcaatgagcttgtcaaaggttggcgtgctcgtctgatggccgtcggctgcttccccgaattgaccaccggtgactattgcgattcgatggagcaactgatgacttcgctgctcaatggcacaatgctaccccaaattttgctggacgacctcaaccaggacggaattgccaatt

SEQ ID NO: 89638 - DNA, 1038 bp, Heterodera glycines
ttttttaatttaataaaataacagtcgcaatgtcttcaaaaagagttcgtttcaccgaggaaagaaatgcaacagaaagagtgaagagaagtcggacggaagcggcggaggaggagaaaagggaacgattggacgacgaggaggacggaggaccagccgaaacggcggaaggaatgaagacaaaacggacgaagaaacacacgttggactcggacgaggaggacgaaacggagggctaccaacggctggacatggacaaggtggagggtcaggaggagtcgaccctcgaatatgagggacacgtgaagatcatgcctttcaacatgaaagacgatttggaggaggggcatttcgacgcgaacggcacattcatttttgacaagaagcaaagtgtgatcaaagacgcgtggttggacaacatcgagtgggacaatgtgaagaatgcggccgggaaacattggggcaaattggatgacgaggatgacaaaaaggcggacgatgagaaggaagtggagccgaaggaagtgtatcgacgacttgtcgaattgctaaacgaaaaagagacaattggcgctgcgctgaagagactgaacaacgaaaaaaagtcaaacgcagcggaggagcgcaaacgccgttgggcggccaaaaaggcgggtgcgaatgtgcaggaggatgagaagaccaagcaaatcgcggaactaacctcgttggccgactcactgatttcacttggcaacatggaagcctatcagttggaccagaccagcatcaacgctttgttggacgacttgcaagcgaaaaacaaaattccgggcgcaaaagaagcgactttggatatgttttcggaggggtgaaggagaactgaattttaattgaatttggacctttgaataaaggcattttgatgtggataaaatttgtgatcactgatcaactttgctcgtaatctatctattttttttatttaaattttcctttgtacaaaaattctttccattaaataaaggattgtcattaaaaaaaaaaaaaaaaaaaaaa

SEQ ID NO: 89639 - DNA, 964 bp, Heterodera glycines
ggcaatggccgagaatcagttgagcaaaagcgcgaaggatctgccagtaatcattgcgcgtccatcaatcattggtgcaatttggcaagaaccattgccgggatggattgacaatttgaatggggccacgggcatatttgccagtgttgggaagggactgctgacagatatgtgcggtgatgtgaaatccgttgcggatattattcccgtcgacatcgttgccaatatgctcatcgtggcagccgcgtgtcgctcacagatgggccaatgcaaagaaattcccgtgttccattgcacttccggacaattgaacccgctgacgtgggaaagaattgtcgtttactgtgaacagtttttcattgcttttccgttcgacgagtgctaccgtatcccatccacacaatttcatgccaaccataaccttttcttggccaacttttatgctaagcatttgagcgttgcttatgcattggacggcgcttatcggctgttggggaagaaagcaaaatttgtgcgaatttactcaaaaatttggcgaatcatggaagttttgcactatttcacttcacgcggatgggttttcgagtcgcaaaatgcgctcaaaatgtgggaacggttaagcgaagaggacaaaaagctttattgtttcgatgttcgtaaagtcgactgggacaaatatttgtttgactatttgatgggaattaagatttatttgctccgggaaagtttggacgacgtgccgagggcacaagcaaatcttttatggcaaaaacaattgaatttgtactcaaatggtctcttttttgctttgctcgtccgtctttttgcgtggaggcgatccaaaagacaacgctgggcattttggctcagcggctttctgctgagctttgcctaccaaaatgccaaccattggttgcgtcctgctgttcggctgcgcaatttggaggagtacaagcggacggcg

SEQ ID NO: 89640 - DNA, 627 bp, Heterodera glycines
  unsure (1)..(627): unsure at all n locations
aattagttgaaaaccaaaaattaattggccgtgacgaaaacaatatcatcaaccacagaaaaatgaactgctccagcgctgcaatgttgatgctgttgatgaccattttcactgtgctgtccaatgtcaacgaggtagcagccgaggagcacgagctggtcagccgcattaagcgcaacggctacggatacagcagcggttatggtggtggctgttcagcctgccaaagcagctgcaccacctgtggttacacatcctaccataccgtgcctgcggctcccgctcccccgccaccaccgccgcctccgcctccgcctgcgcccgtctacagccagtcttcctactcntcctgctccacctgggggggcagctcctactcctcttacccgtcntcctcctactcctcttatcccgccttcttcctcttcctactcctcttaccccgcttcttcctcctcctactcgtcctacncgtcctactcctcctcttcctcctgctccacgtgcagcttgaacgggtccaggaacagctggaactacggtgggcagctccgcccaacacgtggaacagccgccgggcgcgtccatagtnggcgggataacggccggtggcataccgnctacggc

SEQ ID NO: 89641 - DNA, 644 bp, Heterodera glycines
aatcctttaaaaaaaaatgcacattccaaaaatagaattccccaaagaaattgttccaagtttggccaatttgtcgctaaatcgtcaaccaattgatgaccgtcttttgaagttactcgaacggacgcaaaaggatgtccagcgcctgacgaccgccaaccaacagctcaccaccgccaaccaacagctcaccaccgccaaccaacagctcacgacaacaaaccaacaacagcagaacacaatcaaccaccagcagcaaaacatccaacaactccaaaacttattggccggtcagcaaccgcttgttccagcgtttgcccccggggtttttggtgaacaacagcagcatcatcatgcgccagcggactttctcggcgaccagcatgcgctcggcggccagaatccacacgcggcaccttttggccccgactttttcggtggtcagcccgaaaattttggtgttcagcagcagcacatgcaggagcagcagggtccccctcctccgccgccaccgcagtaagacgttgcaagtggaagtcgaatgatgagttgacgtttgaccttttaacctcttatgttttaacgttattttgtctgatgaagaataaatctaatgcctcgtaaaaaaaaaaaaaaaaaaaaaa

SEQ ID NO: 89642 - DNA, 645 bp, Heterodera glycines
ttgtcttctcgacggacaatttgcgctctgcaaggctggcggaggtccgccaacatttcaagcagaattcgcggattttcttcgccaaaaacaatttgatggccgtggcgttgggcaaatcggcacaggacgaacaggcaaacgaattgcacaaagtgagcgcacttttgcggggccaaagtggactgatgttcaccaatgcgaaggcaaacgaagtgcaaaggtttttcgccgagcacaccgaggctgagtttgcccaggcgggcgccgtcgcctcggcggacatttcgctgccggccgggccaatgccggcggaattgcacttgcacggcgccatggaaccgcagctgcgcaagttgggcatgcccacacggctggaaaatggtgccattgagctgttggaggagttcactgtgtgcaaaacgggtgaccaactgtccgcggaccaggcccgcattttgaagcagttcggccaccgattggccaaattccgcgtccgtctgctcgcccgatggagcaaaaagaagggatttgaacagattgacggaggagcggaagaatgaatgaataattgttgtgtttttcggatggacccatctaccaatttactttgttaaatttgttttttttatttaaattgaattt

SEQ ID NO: 89643 - DNA, 492 bp, Heterodera glycines
cttgaccattttcttcggccaaattcatcttcttctttccataatttattttgctaaattcggcgctacagtatgtgccatcgatctcaggccgcgacggactacggtatctcttcctgttgctgttcctactgtagcacatgcaattgttgctcaataacggctgtgccattgccgacaactgctcaaccagtggttgcagctgtgaccgtaactgtttcatctcatcatcgtgttttaccgtatcatcggccgtcaatgatcagaatgttgctgctggctttgctgatggtgtattgttgttattgccatacggtacaatgcagcccgagcactgtatggaatacggtatcgggtgcggaagacaacattgacactgtagtggcggcggctaacaatggtggcggagccacatttctggtgccacagcagcaactgctggtgccgcttgtacgacaagaggtgcgcacaatgcccgaggttgcagcgtca

SEQ ID NO: 89644 - DNA, 1164 bp, Heterodera glycines
atttgacccccgtcggcccttctgtcgctccgttggctttttcttcgtcttcaaccgatgcttcagccgttgaattgccatatgccgtcccaaactttggcacacccactgaaaaattgttgctgggcggggagctgattgccgtgccaagcgctctgttggccgatgagaaaatctttcgttctgtgctctgtccaaaatcgttttggtcactttcgcaggcgtcgcgcgaccacctcgagcattttcttcccctcccttccatttcgtccgccattaaatcatcgtcagtttctgtcgctcgtcgcaattgtggcgccccgctcgacgagttgctcagttgcgcattcaccagcgacccaaatttttgctttggcaatccgttggccaaattttttgcgcgcattcgaaatggttacttcagttcacccgaacaagtccaactgagggaccaccggcgagtgctgtacgaccattacattcgccactatcagatgaacttgctgaagaccctgttgatcaactcccatgtgctgctcgagcagtccaccatgctcaactcgtttgatgagcacgtacggttgaacccacgcactttttgctccctgagaaagttggccaagcacaaggaagtccgggccagggcccaattgcgtattttaacgcatgataaaagactgtcgtgtccgcgcgggacaggtcgaagcggacggctgttcatcggacgactcagccccggcggatgatgttgacgatttggcaccggtgccgccgaatgcgcgcagcacactgtacgagccgaagatgtccagcgtggacttggacctgtaccagccgagccgggcaaaggacgtgcagacgctgtaccgggagtacgcactgttgcgcgagacggagcccgactgtcccagcctggacatcagcgacatcacacttgaagaagtgtacgaacgggcgggcatctctttccaagcggagcgcaatttctcacgcatcaccgaacagatggtcaagcagaagcagcaacaacagcagcagcaccgccagatgaacacaatgcaaccgcagacaatgcctccgaattgacatggcactatttttttgaatttattcttattttattcttttaatttgaattattttttaaataaattttttgattgc

SEQ ID NO: 89645 - DNA, 647 bp, Heterodera glycines
gtccaataaagatgttttggtcttccaattttgcacttctctcccgtcgtctggcaaacccgtcatgctccaatttttcgaccaatcttcgctttttcaatgttggcgcatcccttttcggtaggaaacgtgccgatgccatcgaagagagtgaaaaatcggtcgatttcggccgattggatgttcgtgtcggtcgcgtggttgcggttcggaagcacccgaacgcgaactcactgtatgtggcccacgtggagctgggcgagttgcagccgcgcacagtcattgccggactcgtcaaattcgtcggattggaagagcttcaaaaccggctcgtcgtttgcctttgcaatttgagaccgtcgaaaaaacgtggcatcgattcgcatgcgatgattttgtgcgcatcgaccgaacaaaaagttgaaccgttggaattgtctgatcagtcgtcccctcccggctctttgatcatttgtcccaattttgctcgtcagccggacaaagtgttgaaaaagagtgtgtgggaagaaattgcgttggatatgcttgtttctggcactggcgagtgcgttttcaagggcactccgctgcgagtggacgccgaagacggcgcttcttcgctggtgaccgcgccgacactgcgcaat

SEQ ID NO: 89646 - DNA, 559 bp, Heterodera glycines
gtccaattaagccgttcaattccaaaatgggcactaattactccacttcaaattcggctccgtttgattacggaatgacgtcacggaagaaaggcaaaaatcgaacatacgaatccaatcactttgataagaattatctgatcgaaggcaccgaattttgggcagagaacgaatatcgcaaggacagttatttatttgagaggagaaaaggaagcgatcgggcaaattttgccgaaatttacgtaaaaactccggcggagtacggaagtccgcgcgtctcctgctgggcattttcctgctcaccgtgcgcttcttcaaaagaaagtgccgttgccattccgtcccattccctccctccttcttccgccccgtggtcttcaccaattcaaccgaatggtgccaaaagtgctcatggctcccgcccggtgggcgtccgatcgaaatatttgccaacctttgggtgaatttggccaattattgtgtatcgctttttgtttgtaaatttttaacaagttgttaattttaagtaaataacgaataaatgacattcattgaaaaa

SEQ ID NO: 89647 - DNA, 965 bp, Heterodera glycines
gtccatttaagttaaattgttttttacatatttatttacttttaaaagcacttttgtttttcatttgtcaacacctttctgagtcccattagtcatgctcaacacgggaaaatttctcggcaaaacttttgtcataacgggggcatcgcgtggcattggcaaggaaattgcacttaaattggccaaagacggcgcgaacatagtcatttgcgcgaagacaactcaggacaacccaaagttgccagggacaatttacagtgcagcggaggaaattgaaaaacttggtgggaaggcccttcctctccaagtcgacgttcgtgatgaacagcaagtggaggaggcggtcgaaaaggcggtgaaaaaattcggtgccatcgattcgctggtgaacaatgccagcgccatttcactcaccaacactttggacactccgatgaaacgttacgatttgatgcattcggtgaatgtgcgtggcacttttttaatgtcccaaaagtgtgtgccatatctgcgtcaaacttcgaacccgcacattctcaatttgagtccgcctttgctgatggataaacaatggttcgctcctcacgtcgcgtataccatgtccaagtacggcatgtcaatgtgtgtgttgggaatgcacgaagagttccgcaaagatggcatcgcagtgaacgcactttggccacggacgaccatttggacggcagccacacaaatgctcacttcgggcagagggcagcgcaattcgagaaaacctgaaattattgccgacgcggcttatgtgattctttccaaaaactcgcgcgattacacgggaaatttcgcaattgacgaagaagtgctaaaggaagtcggagtcaaagacttttcgcaatacgccaacgatccgacggctgaacttttccctgacttttttgtgcccggtgtaaattacgaaaaagcgatcgaagcggcctttgcagcgg

SEQ ID NO: 89648 - DNA, 635 bp, Heterodera glycines
gtagcctttaagagcagaaagcatgtgtttgtcgtaacactggaactctcccgcgccagagagcttggcattatgttgatgagaaggatatttcagctcaccgtctggtcccaaacctaatgtgattccctgcaaagcaatgaacagaaaatcagaaacttaaaaccagagtagttaaactcagaatgtaagtgcaaaaacaaagatgatttgtgaaatcataccgtgattgtgttgcccatgtaatctgcgaaagcagacttgaagctctcacagaaacctctgtaaacctccataggagtcttcccatcaagaacaggaacatcatcaacagcaaacgacaaacaatctttgtactgttgtccatatctatctgtaaaatagatccctggttcagcatcaccaatctttgccacccaatcaggaagacctatctctgtttgtttcgatccatggaaagaaagtgaagcatgaagcttaagtcccactttcttaacaatctcagctactgccaagtacccagaccattcatatttcccagcagcttctttctcaacaactccccaaaagataggtaactcaataccttctacaccaagtagcttcaaagctttaagcccagctgtaatagcttt

SEQ ID NO: 89649 - DNA, 648 bp, Heterodera glycines
ccaagtttgagttttttccacttttctgcaatacaataaacaacaaatgcaagcagtgacgcgtccacccattgttttggagcgtggagtttccgggcgtgtaaaatggttcgatttcagtaaaggttatgggttcatcacgcgggatgacggaggtcaagatgtgtttctgcacgcatcatccatcgttcgcaaagtcaatatgtacttcgtgctgattgagggccagcgggtagaattcgacgtcatcgatggtgagaagggcagggaagcggccgctgtgtcggggcccggcggaattcgcgtgggcaccgccatccaatacaacaacactgcgcgcagtcagccgttgccggtcaatgccaacaattccgccggacggatgttcatcgccggcagatttcggcgccccgttggcaagccgaacaacaaagccaagtcggccgtcgcttcggtccccgcggtggtcaatggcggcgacgacagtgcaaagtgtccgccgctctctctgtccggcgtcactcgcaaaggccgtcgcatgttcaaagcgaatgatggcgaaaagggcaaaaacagcgacaaaaaggaaagtgccagtgacggcgttggcaaagaaaaggacaacggaggacgggagggcgaaaacga

SEQ ID NO: 89650 - DNA, 580 bp, Heterodera glycines
ggaatacatcctttctgtaacattggtgtactgcgaaagaccgatgataaatcattaatgaatggacagttggcgttaaaggggtgtgaaatcatggcactttatttcggcgctcacatgagtcagcgatgtcgtgaatttataccggtgctcaaacaattctacgatcagttgaaaaaatctcccgaaacaatgccttttgaaattgtttttgtgccctttgaccgttccgaggatgaattccgcaactctttgcgcgatttgcacgacgattggctgtacattccctatgggagtgttcacattaactcattggccgcgaggtttaacatcattaattggggagtcattccgacattggttgtgcttaaggaggacggcactttgataaccatggctggacaagcaaatgttcagcatttgtcggcatcagaagcaatggtccgctggcgctctattcctaatcccgaatccggattcaaagatttttcgaaattttaaatttccatatcttttttgttaatgttgctaaagcattggtttgatgtgtacaaccaacatgtgtgtcagggatggcacg

SEQ ID NO: 89651 - DNA, 978 bp, Heterodera glycines
ggagtgccttagaagtcaaaaaattcacttttatttttgtttttgtgccgtcatttcccattttgtgccaccgcgctccgttcgcttcgttttgtgccgtccaatgcaaaagggaggatgccaagtctgctgctgaacccgggcccgtcaacaatgaactttttctcctcctccctgccgttgccttcctttttcttccgtaaccgaaaaaaatgttacgatttgaacccgccggaagagagccaccaagtgacatacctcggcaacatgttgacaatcatgggcaagggcgacacgtccattgaccgtccgttggaagtgattacgcgcgcgtggggcgccaccgtcgccaaaggcgcgacgcgccacggcgccggcgccacttttggccagcaacaggcgcaacagttggcgatgcgcttgtgcgtgtgccaatcctgtcgctcagtgccgagacgtgcattggacgccatttctctgttcactccgctgaacacgccctcaaaatgggcgccaggtcatccacgacatgtggccgtttgccaacggcagttacgtttcgggccgggccgtcacaaagtcgcgggaagtccagcacaatgtccgtgtccaccatgagcaccgcaactgctgctcccgcgacttgccacagatgaggggagggcgacaggctggcggtgcaacacagacaggagaaggaatttgagcgcacaattcgcacttacaaaagcccatacatcagcttcacctatttccactcacagactttggccgaagaagcgaaacgcaacgcgcacacgctggtgctccattttgtgttcgcctttttcattctctttgctcctttctcggcgttgtacaacatgtcccatctgtcgtgcccacaactgttacattgactggacactgtccaagccatttctggcaattttgggtgtggtcaacgcgggcatgggcattgtgacggccatcggatat

SEQ ID NO: 89652 - DNA, 654 bp, Heterodera glycines
gggacgacgaaatgtgtccttcaaaaacgcaacacttggaacagttccattcgcttaatattcctatgattttcattctctccgcacttttctcactttctgcgacattcgcacagtttgtcccggccaaaaatcgctgctacagttgcgcatcggacaatatgaaagaaaatttcctcacgcgcagccgcggacccccggggcgcgtgcgcgagccgcgtctgttcgattcgatgtgcgactcggacacgtgggtaattcgggaaaaaagtgccatcgaatgtcagggcgcttgcttcaaatggcagcagacgctgaacaattcgggcgtcctttcatacgccaccatcagaggatgctacgaatggatgttcgattcgtccgttggtggccccactccctcctccgacagttcgtcgtccgtcgccttcaacactgaatgcaaacacacgcaacgcgcgttggtctgtctggacgagttcagctccgtcgaggagtccacctgctggtgcttcggcgacttttgcaacgcggcgacggcgaaaggcgacggaattcgaaatgccatccgagcgacggcatcggcactttttgcatcatcacttttcatgtcattttggaaattgcaacaaataaattgcaaataaataaaaa

SEQ ID NO: 89653 - DNA, 522 bp, Heterodera glycines
cacagtctcgcttccatcacatcaacgcccacccaatccaccagtcaaaatggccttcctttcctacttctcccggaccttccgccaataccccgagattctccctctcgtcggtgccgtttgcgctgtcacctcattcgggatctactcatccacggccaagatcttgggcgatcaagacttgcgcatccgtcaaaaccacggccacatcacttgagacgagcgcctcaggcggtgggaggaggccaagaagcactaagctgctccgctgtttcaagttcccgtcctcaacctgatcctctccataccaagtcaacccatcatcctactttctttcgtctaccgacataaacgaccgccttcaccactcgcttgtggttgcatgcctattcaatttgttgttggttcccagcctgctgttgcaaccatcctcgcttcacactttggacatgtcttttatgaaccccactgtttgcacgcttttgtttgccttcttgatgaatgcggaaatgtggaactgaa

SEQ ID NO: 89654 - DNA, 845 bp, Heterodera glycines
ctttttagctaattaactaaaatggcaacaacggacggaatggtcgaagatggcaaagtgggaaatgacctccaatcagcaaagttcacaaaggacaaagaagtcgttgacattgtgcagccaacggccaaattgataggattgacgaaggagcagctcgagcagtaccgaaatgaccccttttggaaggcgattcgttactcacttttcgtcgccttttggctgatttggctggccatgttcgtgggcgctgttctgattgttgttttgagcccaaaatgtcagcaagtgaattggaccgaaaaaatggtcgcttacaaaattttcaccctcgcatacaaagactctgagtccaaaaatgggttcggagactttgaggttattgagaaaaagttggaccaaatgaagggaattggagtcaatgcaatttggccaactcccgtgctcaaatactataaaaatgcgcttggcccagaggcaatcgaaaagttggaagtgtcggaccaactcggcggggctgaggggttcaaaaaactgatcaagcgggcccatgacaatcaaataaaagtgatcgtcgatttgccattgacagtcaatgccaaaggaaattgggccaacaaaacttctgatacaaaaaatggtattgccctgatcgaccttgacaatgcagcaaaccgagaaggacttaaagaagcggcagtgcgctttttggactttggcgtcgatggactggcaatcaccgattacggcctttttgccaattccgtccacttgggttctcttgtcgatcttattcgaactataccaaaggcggaaaaaattcccatttatgcacgtggctcttt

SEQ ID NO: 89655 - DNA, 250 bp, Heterodera glycines
atttaaaaatgtttaaattttttgctctacttttcctcttcatgagcaccaaacaacaacaggcagcaagggcgcaatttgaaagcgatgaggtgagcggaagagtggggcacggacagaaaaatgcgcggtcgcgcatcgctatttggaaaataatttcactatgattaaaaaaccaaataattttgtattattttcacttgatataaattaaaatttgaattttttaaaaaaaaaaaaaaaaaaaaaa

SEQ ID NO: 89656 - DNA, 609 bp, Heterodera glycines
ccaattaagcgctaaattgacccaaaatggcggccacaagtgccaccggttttcctgtttgcattttgacgccctgcagcaactcacatccatttgaggaacggagaattttggtcacacggacggaggaagacgcggtgaaaattggccgatcggtggtccgactgcagccgtcatcgaacaacgcgatttttgactgcaaagttttgtcacgaaaccatgccgttctgtgggcgaatggcgccggtcatttcatgatcaaagacacgcgctcatcaaacggcacattcatcaacaacgaacggttgagcgccagcggggaggagaacgagccgcgcgagctgttctccggcgacattcttcagcttggtgttgaaataattgacaccgcaaagaaggtggccagcggctgtgtgacgtgcattgtccgactgctcaacgaacgtggcgaagaatgcgcgggccgacccaagccggaccatggcacattcccaacactgttgcaacagatcccgcccaattacacactggtgaagaacgaccagctgttcatcctggaccaatacatcaaagaggcacagcacagagaaaatcagcttggactcaagc

SEQ ID NO: 89657 - DNA, 506 bp, Heterodera glycines
atcaaaatggctgtcgacgcttcgtccgctaccatccgtactcgcaagtaccttaccaaccgtctgcttcagcgcaagcagatggttgtggatgtgctccacgccaacattgccaacgtccccaaggacacgattcgcgccaagttggccaagatgtacaaggtcgagaaggaccttgtcgttgcctttggtttccgcactgccttcggtggcggcaagtcgactggctttgccttgatctacgactcgattgactcgctcaagaagttcgagcccaagtaccgcctcgtccgcctcggtctcgccgaggaggccaagactggtcgcaagcagcgcaaggaacgcaagaaccgtgccaagaaggcccgcggcaaggccaaggctatcgttctcggccaccgcaagtaaggtgttttggctgttttcaaatcatggcacttgtgtctttgtgcttttcttgtggtgaactcgttgtcatgagtaaagtatattgtgcatttttttca

SEQ ID NO: 89658 - DNA, 683 bp, Heterodera glycines
cctcgtgccgaattcggcacgaggattcattctaattttctttgcattgtcaaacaaacactaaaaatgcgtggtccttttatgcgtggcactatgccgctccgtcggactttttattatcttggccagggaaaaatacatttgcgtgaggaagtgaaggtctttgcaattgctttccacaatttcccaaacgtggcccaggaaggggccaaagaattcgtattttggcactgggcccaactccaattcaagaaccctcacgttcaattcgtgaaactcgcggatgtttgtgtgacgccatttgtgcaagctttcttaggcgatggcagagaagttgtttttgatttggagtgccgtacgagggagcaaataagcgaagcattaatcggaacattgggcatgacagagactgtacggaagcgaatgaaaatggacagttacaaaagggagaacccggccgaattcggctgcgactgcgaaaggcaatgcatttgcgaaatgcaagggcagcacccgtgcactgccattctttacgcgccgaagcatttgcgcgggagttggcgatggaatcactccacttacaatcctgaaaagcccgttccgtttccgcctgtggagggctacgactgatttgcgtttgtttcgatgctttgttttgataaacatttgtccttttgattggt

SEQ ID NO: 89659 - DNA, 670 bp, Heterodera glycines
ggggaatttactttgggttacacagcttcaagggaatttactttgggttacaaagcttcaacaacatgcaaagtgtccaatcgtcggccaccgcggcagtgaccgccgcttccaccgttccgttgagcattcagaatgaaattttgtggatcaagcaggacgctctccaagttcgcaacgccgtcattctcttggagcaggagaaggacagtcttcgcaaagcaattcgcaaactcaagttggagaatggccgcctgaagacaaaggtgaaaaccttgaacgaaaaggtggcaaagattagcaacgaggaaatggacgatgaagagggaaaattggcgcctgaatctgaattggactatgacgaactaaaccgaggggatttctacctaatcggaggtgtccatgacccgatcagtcttcgttttgaagctgcgatccgtgaccaaaatgccgtcgaacataaaagtgccgaacgctactactggtacaaaatggcggaattctttggtgacgaggaagccatgaagagcattctgcacgcgcagaatgtccaacaggccgaagaggccatgaaaaacatcaaaggcttcgacgttgccgaatgggacaaagtcaaacttaaacattgggaggacggacagcgactgaagcttgagcaagtccgttggat

SEQ ID NO: 89660 - DNA, 768 bp, Heterodera glycines
ctcgattttgctttaattcagcaaatttttgttctaagaaactatttcatcttacatctgatcaatatgcttaccaacaaattggcaaaatgtgccgctatgaccatgacccgttgccaaccgctgaacgcgttggcaatgttgggcggggcccgactgtgccaccacacgccaccaaactgcatggacgccattcgtccgcttggtccgaaaagcagtgtgccgagttttaagggccaggcaattgtgaacgcggaaatgaagaccatttcgtacgacgactacaagggcaaatggttgatcttcttcttctacccactcgactttacgtttgtgtgccccaccgaaatcattgcgttcagtgaccgcgtcgccgagttcaagcagctcggctgtgaggtgatcgcctgctcatgtgactcgcagttctcgcatttggcttgggtgaacacaccgcgcaatgatggcgggcttggcaagatggaaattcccgtgctcagtgacttcagcaagaaaattgcggctgactttggcgtgctggacaaggagaccggactgtcctatcgcggtctttttctgattgaccccaatggcactgttcgccattgtttggtcaacgatttgccggtgggccgaagtgttgacgaggcattgcgcattctgaaggccttccaattctttgagaaacatggcgaagtttgtcccgccgattgggaggagggcggtgaaacaattgacgtcaaatcgcccaaggagtacttcaaaaag

SEQ ID NO: 89661 - DNA, 651 bp, Heterodera glycines
cctcgtgccgaattcggcacgaggttgagatgcagccatcggcggagagtgtgcctccaattgacccaatttggcgcattggtctctacgaacggcacgtgttccgtagtaacgggcgggtgggggcattgtgcttggaatgtggcgaaatgttctgggaaaatggcactgatgagaaaaagcgcatgggccgagcgttgaagaggcaccttttgacaacgcacagacaatacggactgaaactgttggagcagatgttggaggaggaggaaagagagaaggcggaggggagggccgaaggtggacagatcgccaaagatgctaactcaactgtctgtggcactgtgcattcgcaatttgttgaggcatttcaccagacaattgtcgccactgaaacaatgccaacggagctaatcgaagagaaaagtcagctgaagcgaaaggatgtgccaaatccggaagatctctcatatcaaatcgacgcacgcgacgaggaattgtcaaaaagtttgccggcggcacaaacggacggcactttgacgtccaccgaatgcgatgccaacacctccatcacaactccgtccatttcggccgacctttgggcggccgcgcaacaacttagcacctcactgcataataacaataaaacct

SEQ ID NO: 89662 - DNA, 543 bp, Heterodera glycines
aatgtgcaaagcgttggggcaagcgccgggcattgtcacgcgggagggaattgcaaaaggcgtgcggatcattgacaacggcggacagtacaaagcggcaattggtggcgaacgtgaacattgtcggcgcgggtcgtctcttcaagcgtcaaatgtgcaaagcgttggggcaagcgccgggcattgtcacgcgggagggaattgcaaaaggcgtgcggatcattgacaacggcggacagtacaaagcggcaattggtggcgaacggtgagtggggggggcgacggacgaacgtggcgctggtccaaaaacaatcgtttgggatgggttcgagtcgacttggcctaaagggtttttcgggcatcccatggcattctgttgtaccctcatcagttcatattttctttcccttttttttgccttttcatttgcatttatttgtccattttttatatatttttcatccattcgttttattttcatatatattgtttattcattctttcatttgtttacaaattgtgctgataaaatcattttttgtc

SEQ ID NO: 89663 - DNA, 648 bp, Heterodera glycines
ataaaccaaaatatcaccatggttttcgtcaaggccgtcaagaacaaggcttacttcaagcgctaccaggtcaagtaccgtcgtcgccgcgagggcaagaccgactactacgcccgcaagcgcctcgtgacccaggccaagaacaagtacaactcgcccaagtaccgccttgttgtgcgcatcaccaatgccgacgtcatctgccagatcgtctactccaagatccagggtgacttcgtcttgaccgctgcctacgctcacgagctcccccgctacggcgtcaaggttggtctcaccaactgggctgccgcctacgccaccggcttgctcgttgctcgtcgtgccctcaagaagttgtcgcttgacgacaagtacgagggtttcgtcaaccccgacggcaccatcgccgaggtcgagccccttgaggacggtccccgtcccttcaaggccttcctcaatgtcggtcttgctcgtaccaccactgggtgccaaggtcttttgcggccatgaagggtgccttcggacggcggtatcttccggccccactccgagcagcgtttccccggctacgaccgcgagtccaaggagctcgacactggttgtggtccgcgtcgaacatcttcggggggccacgttggcgaatacatg

SEQ ID NO: 89664 - DNA, 590 bp, Heterodera glycines
tgtctctcctttccgtggttcttttcccctctttttgcctttgttctttgctccttttccttctcccctcggctcttttcgctgatggcttttcgtcgtctggccaaagagttgttttggcccgggtgatcattttcaaagcatccgaaaagcaggggacgattgcttctcaacctttgggcactgtggacatttccgagaccgttcccgggaagacaacgctgaacggcacaatcgaaggcctttccccgggcgaccacggctttcactttcaccaattcggcgacatttcccaggcctgcaaagcggcgggtgcgcatttcaatccgcacggaaaacgccacgggagcaaagaatcggaggaaagacacgtgggcgacctgggcaatgtgaaagccgctgagaatggggtggccgtggtggacattaaagactatttggtggcactgaacggcgtcaacagtgtggtcgggagggcattggtcgtacatgagaaggcggacgacatgggcaaggggggcaatgaggagagtgggaagacgggcaatgcgggaaaacggatcgcatgcggagtggtgggagtgatccca

SEQ ID NO: 89665 - DNA, 730 bp, Heterodera glycines
ttactcggcaacgaggtgaatttgcttacggtttaatgaatacagttacagtacaataactcaatgttcaacaaataaaaagctggaaaatgaagtcccattatttgttcgaattcttcttgtccaaatttgtttaaatgttgctgttgaatggccgcaaattggacgtatagaataaagaaggaaggaaggaacccagcagctcgtctgtaccccaaacagaccaacaaggaacaacaacagcaggggggcggaccgtccaacggttttcatgacatcacatccattggaggcggtggtggtggtggctcggcattgttccacagtagcaatggtaccgctgctgctgggctcagttcgtcgtccggctcgtcgccaaccatcctgcagcaacaacaacatcgacagttttcttcggcaatttcgcagcaaaaatcgttgacaccgccgcctctgtcggtgggcagttctaccttcaacccgacgcttgaacaactgttgcaggcaacgcagaacatatcttactcgctcagtccgctcaactccaacgggggaatgaatggcagcggtggcgagcaacacgacggcacaaattttaattctaacggcacgaacaacaccaacagcaacggcggtggtgggtcgtccccgttcagcggaacaacggcatcggatatgttggcagtgggagggcatcgttcagtcggtggtaacgcaaagacgctgcttt

SEQ ID NO: 89666 - DNA, 378 bp, Heterodera glycines
aaaaattattttattgctacaaatgtcgatgtttgctttaattttcttctttttattcatcaatatttttattgagcccgtttcgatggcaatgaaaaaatcgagcaaaagctgcaaagttggcgtaggcaatctgacggacgaaaatggcaacgtggtgatgaaaggacgattcaaaatgtgcccaaaaggattcaaaaaatgtgccaaaaatgaggcttttggcaccacggcattctgcgttgagctgttggaatgaatatgaagaaaattggaaaaatatgggaaaatgatacttaattaattcaaaatgttaataataatggaatataataaatgtgacattgttgtaaaaaaaaaaaaaaaaaaaaaaaaaaa

SEQ ID NO: 89667 - DNA, 636 bp, Heterodera glycines
aattaatccagataaacaattctaacttacgtcgaattaaactaacctcacgtttaaaaaatagaagaacagtcttaaaaagtaaaaaaaactaaaaattttacttatttataaaaaacaacaccgatgtaaaaaaatcctgttaactctagagaaattttaaaaaccaaaaagggtcacaaaaattataaaaaattttaccctaaaaaaaataaaaaaacaaatttctaaagacttctcttggtattataaaaaaaaataatttttaattttttaataaattattaaaaaaaataaaaaaaaaaaaaaataaaaaaaaacattcatcctcgaatccattaaaaaaactaattaatttgctaccttagaccaatcacgctaaaggtgcctttaaaattaataatctataggcagcccacacaaattaaaaaaaaaattaccaattattctaaaaaaaaactttaagaaaaaaaaaattaataaaaaagggtggagagataaaaaaaattaaaaaaaataataatagaaaaattttttttttcttaataaattaaaaaaaaataaaaaaattaaaaaaaaataaaaaaaaaaactttaaactttcaaaacattttttcaaaaataaaaaaaattttc

SEQ ID NO: 89668 - DNA, 650 bp, Heterodera glycines
ctttaacaatttgtcgtcaaaatttttgaaaaacggaccgttcacaaaagtcgcacttccattttttagtcgcttttgtttttcaaccgaagcatttgagaaggcgcaaaaggacatgaaacagctgaaggacgagccggacaacgacaccaaattggagctgtacgctttgttcaaacaggcaaatgaaggcgacgttcggggcgatcgtccaaaaatgctcgaatttgtggcgcgtgccaaattcgacgcctgggaaaaagtcaaagggatgccgaaggcagatgctcagcacaaatatgcggagattgtcaattcgttgttgaaaaatgcggggattaacaacgcgaacacttcggaaacagaatcggacggaatccgacggacgaaggagggcaaagtgtacaaaattgagctgaaccgttccgacaaatacaatgccatcacttgggagatgtatgagggtctgatcagcgcacttggcgatgcaagcgccgacagagaaacgagtgtgacagtgatcacaggcgttggttcctatttctgggccggcaatgattgggccaatttaacgcgcggcggcaaaacgagcgacgatttgcgtgctatggccgaccgtggggagcgcgtgttggagcgttacgtgcgcg

SEQ ID NO: 89669 - DNA, 636 bp, Heterodera glycines
attcgccagtcgacctttaaccatcagaaagcattgaagaatttgacagccataaaagaatatgtggcacatttggagcactttttcgactcaccgcaaatgaaggaacatttgaagacattggaatccttcccggaggcgcagttgccgcgcaatttcgacgcgcgtgacaaatggccaatgtgccctagcatccacgcggtgcccaaccagggcggttgcggatcatgctatgcggtgtctgcgatgggagttgccgccgatcggacgtgcattcacacgaacggcaccgacggcactcagttgagcgcattggacgtaatcgaatgttgcgaagtgtgcggcaattgcttcggaggcgacccgctgaaagcgatggtttattgggcattggaaggcgtcgtctccggtggccccgacggatgccgaccgtacgcagtgagcagcgcttgtgggacgccgtgtacgcccaacctttacgcggaggaacagacgaaacggaagtgccggaaggataagtgccaaacggcatattacaaaaacagtgccggaggggaatacgcggcggacaagcgaaagggttccttcgcttacactttgttcccccgcaaaatgagcgtcgaccaggcgggcaat

SEQ ID NO: 89670 - DNA, 625 bp, Heterodera glycines
gagaagcatggcaaggttgacaaggtcaaacggatcaaggactacgcatttgtgcactttgaggaacggtcagccactgtacaggcaatggaagcattgaaaaacacggcaagttgatggtgccccgatggaagtgtcgttggccaaaccgcaaggagaccaaaaccagaagaagaagctggccatcaagtcacggttcaacccacaacagtacggcgctggtgttacccccggcattggcccacgtggacgcaaagggtacgagtacatgggagcttttcgtggtggacgcggcggtgccggcccaagcatgcacatgggttatcaccaaccgtacccgggctacccgccagccggctacggtccgccaccatacgacccctactactccggttaccgtgcctacggcggtggtggctacgacatgtacggcggctaccccgctgacccggccgctgcttactatggacaacatccggcgcacgcgagcggatcgtacggcgccggccccggcggtcccccgggcggaccagccgcaatgcgtggcggggctgccggctatggcgcattcggcggcactgtccagcgcggacgcggtggcaaaagtgctggcgcgggccaagga

SEQ ID NO: 89671 - DNA, 669 bp, Heterodera glycines
gaaataattaattaattcaatttgtattttctcgcttcttatcaagtgctattagtagaaacaaatgaatcgtattggttcagcactttcaaagtcggttttcatccctcgtttgttctgtcaccgtttcttcgccagtggacccaccgatgcgcgacaaaatgtgctcgttgtcattgtcgatttcaacggcgaacagcaattgcttgtcaacggaaagtacagcgaattgctcggccgttcccccgactttccatttccgggcaacgtgaaaccgttggctgaaatgcaacagcaacaacagcagaaatttccattccctttggacgccttgccaaccaaacaactcggcaatggcttgggtgctgtcatgccactccacaaaatcgtcgagccttcatttgttgtttcggacgatcgtaccgccataccacgagcgttaaggcatcaccgaatgtggcaaatgggtgaagatgatggacggatgacggctaacacaaccaccgccaaatatgaatggaccgtggccggggtggatgggattcgaatgctgtgcgaagaggtgaatgcaatgttcggcaaacgctttttggctggcagtgaaataacggtgatttcgttgcgcgcaaatgtttcggaagcgcaacaaatgacgacgacaaccgcaac

SEQ ID NO: 89672 - DNA, 628 bp, Heterodera glycines
aatttaaattaaataatttttcatttgctgtatgatatggtccataagcagaaccagttagaaacaacagcagtgccaattgctgtggcacataatgacaatggcacggccgacatatttgagcaattcgaaattatgttcaacggtgacaaatcggtgttctttggcaacgaaacagtgacaggcagtttgaagatcaaattgaagcaagagaccgttctgaatgctatccatttgcattttataggtgtagccaaatggattggcacgggacgaaaggaggacaaggagggccaaaccgagaagatttattttgacaaaaattttgttttgctggaacgtccgcctggccatcccgggcctggccacttcaaatttgttgcccattttgcctattcattgccatttgagtgcccattgcccagcgggtgcgagacaagctacgagagtgggtcggcacacattcgttactttgcgcgtgccattctcgagaccgagcagcgggacaaattcatcgcaaagaaggccttcaccattgggtcctctcccggtcttgatcaattggtcccaccacaaccccagcccatcacgtgcaaggagacggtccggtatggcggctgttgctgct

SEQ ID NO: 89673 - DNA, 652 bp, Heterodera glycines
caagtttgaggtattttcatgtctgaccatttttgggacgaaaatgtcttcgatctgatcgttgaactagagaaggaaggccgccatgtacggcttgattggctgtcgtcaaattcagcgttggtcgaccgctttcaaacggacattgcgcgattgtccgaggaggaatattcgctctatgccgcctccagcagcaaacttcagcggatagcagcagccgaatgcgcgtacaaatacaaccggacggaggagttggataaactgtttgagaaggaccgcgactcggaggcgttgagggaaacaaatgtgaggcactttctgattaatcgcattctcgacgagttccggccgaacatccgtcgcctttctgccctgccaattgagcggacaattgacgcgttttgtttgaatcagccaaaggacattgaacagcacgtgttggatgtgtacgattttctgatggattgcccagaggcaccagcagcggcggaagcagcggcaccgagttaccaaggaggacaggagagcagcggaaccgcagagcaaccgcaggaagcggcagcgccagaggcaccggctgcggcagaagcagcggcaccgagttaccaaggaggacaggagagcagcggaaccgcagagcaaccgcaggaag

SEQ ID NO: 89674 - DNA, 930 bp, Heterodera glycines
gatttgtgataaatttgatttttcctttcgtttcttcttcccgcttttctaatgttccctttcaacactccctacaaccatttgcttaattggtcattggtttgttttctgatcccatggttctacagctattacaatgagcaacaccggctcagcagcatgcccgtggagcaggcgatgctcaaatcttgggacaccgtcatttcacagccatccataaaatttcggaaaattatggtcggcatcaattgcaatgttgatgtgatcgttagcggagtcagcatggtgaacaagctgaacatctcgtcaccaaatccaatcgcggacaaagaagtgctcaacggatttgaggatttgtacgaggcgtttgtgcacttttttacgcgtggtgcgcctgccgagcgatgtatggtcaatgacgcggcctttgaccggatggtccacaccgttgaagacaaacatctccgtgcacagcattatattggtggcaatgccgcattaatggctcagaaaatcgcctcttcgttccccgctgcaacggcttatttggttggtccgattggcccgcgaagccacgcgctgttacacccggccatcgttcgaaacaattccacacgaattgcggaggacgaattgcacctcattttggagtacaaacagggcgaaatcctcggggagtacgtttcgcccgcctcttctcgtttcattgtttcccatgaccaattcagtggcagtgcgatgatcatcgaaatgtttttcaaggcaatcatgcaattccgtcccgacctgatcattttgtccggaatccatggtctggaagcgcagaaccaagacgtgcgattggaaaagctgcgactgatcaaacggtcgctgatgcaagtgaatccgctgattccgattcatttgcaattgggcagcatggcggacgac

SEQ ID NO: 89675 - DNA, 761 bp, Heterodera glycines
atttaagtcaaaatccaagcttaataaataaaaggaaggcgacgagacagaagacaaagcccattttgatgagcagtcactgcaaaactttggaggaggacgaagaatggatggccaatttgcacttcgtccgctcggacattgacccggcgacggtgaaaccaatcgactcccgacaattggcttctttggtcaatgaattccttctccgttcggcagacattctgaacagattttgtgctcaatttgaaaatcggatgatggaattggactttcgtttggacacttttgaacgaatgttggcacttatggaaagaaaacttgaaaatgttaatgttgacgaagtgaaaaaacaatcggcggaagagaaagaaacggcggagaaagcggagggaatgacgcgcaaagaaaaaggggaagaaacgcccgaagggacgggggaagaaaaacgcacagacaaaaggcaggggaaggaaacggcggcggaagggacaacgaaggcgaatgaacaccccaaattggccaagtatttcaaaatgctcaaaatgggcgtgcctgaggcggcggtaaggcaaaaaatgagaagtgaaggaatggacgacgcactcccaaatgacccagagaaagaattgccattggaatcaccacaaaacaaagcgcaaatggtacatgatgcattggcagaggacgacgaatcgtcctcaaactcagatgaatgatttcctggccttcattcctttttatttaattttataactgaa

SEQ ID NO: 89676 - DNA, 464 bp, Heterodera glycines
catcgatttcctccctacaaaaagcatcaaattctcgaagaaaaaatgaagccatcattcaacttcaaccttttcgcatccgtctttcttgtgctttgtgtggcctcgcttgtcctctgtgagcataagcgagcagccgcagcagaagcatgtaatccgcccaaagacgtgggaactggcaacttggcactcaaacgatggtggtgggacggccatagttgtaagcaattcatctacaaagggcagggcggcaacacaaacaatttcccatcaaagaagcattgtgtccaagtgtgcaagccatgaatgagccgtggaaagaaggtgcagcgtgaagagaccagcaaaagaagaaaagcgaagaaattcaaagaaatttttgaaaaataaaatttaccgctaatagttaaaatgattttggtggaataaacaaaaaatttgcaaaaaaaaaaaaaaaaaaaaaa

SEQ ID NO: 89677 - DNA, 452 bp, Heterodera glycines
  unsure (1)..(452): unsure at all n locations
aaagaggaggcggaaaagcggaaaaaggacaaaggcttaagacaatttcaatccatcgaaatgaatggccatgacaacaaattagcgaagtcagttgagcctgaagaaaaaataatggggcaagaagagacagacgaaagtgagggggaggaggaagtgacagatgatgaagaggaggaagaaaaaaagggaagggaccaaagaaaagccaattgcaaggacgtctgttaggcacagaccgaccaaaatgccattggccactcattttggccattgacctgtcacggtctttacgaggaagaaaaggagacggtgagcacgcaattttgaaaggaccagcaaatttgaaattgcaaaagtcaccattctttgaaatgtacaaaacaccatccgattgatcgttaattaatcacctgctgagatcnnnnnanaaaaaaaaaaaaaaaaaaaaa

SEQ ID NO: 89678 - DNA, 624 bp, Heterodera glycines
cacacaaatcaaaatgttcttcctttgccctcccattgttcttcttccattgacccttttctgcgtcgcttcccatggcttaacaaatcattcgaaagcatttggaaatgaaagcgaatcgaatagaacggacttttttggcactgaacccatggaaattccccgtcataaaagtgccgacggattcgacccaatggtggacgacgtattcgctttgctttctgctggagaagagggggaagaggagggaaatgggacgaaggtgggaattacggtggaggaggaggaggaagaggaagagcagcagctgcttctccgttgtgccgatcagctgtcgccctttgtgccgcttttgctcgtgccgccccattaccatcgctgggacttcagttgccattttcaaggcaatcagtccgaaaagcccgccgatctttccccaaacaatgccaatgaaaatgccgacctcttcttgaaaatgtcaaagccgtgccgctccagccaatcatttcgcgatgccatcacttccgaacctaactgtcacctttttgttggttttgtcgaccatttccactcattccccacaaacactttggtcacaaaactcaacggaaaaactatgaacgg

SEQ ID NO: 89679 - DNA, 624 bp, Heterodera glycines
ctcaacgccacccgctccgccgtccgcgccgttgcgcagcgcatgcccctggcccgcaccatggcctcggccgcccccgccggcgccgttgccgctggtcagatcaagtcggtcattggtaccgtcgtcgatgtccagttcgatggccccctcccgcccattctcaacgccctcgaggtccaagaccacaacatccgcctcgtcctcgaagttgcccagcatctcggcgagaacacggtgcgcaccattgccatggacggtaccgagggtcttgtgcgtggccaaaaggtgctggacacgggtgcccccatcatgatccccgtgggccgcgagtgcctcggccgtatcatgaacgtgattggcgagcccattgacgagcgtggtcccatcaacgccaagaacaagctccccatccacgccgacccgcccgagtttgtcgacatgaccaccactcccgagattctcgagaccggtatcaaggtcattgacttgcttgccccctacgccaagggcggtaagattggtctcttcggtggtgccggtgtcggcaagactgtgctgatacaagaactcatcaacaacgtggccaaggcccatggtggtttctcggtcttcaccggtgtc

SEQ ID NO: 89680 - DNA, 619 bp, Heterodera glycines
ctgctttctcgtccttcgctttgtcctcccttctcccacttttcctcctttccctttcgtcctttgtgttttgtcactttcgcccccattttcctccgttccttcaaaaagcgtcggttgaacaacgtcgtcagtacaacagaatcgtgaccagccaaaacgacaccaaagcacaaatcaacagcaatgtgcagaattgggcttcaaatgcgggagttgcgagcgattacaacaatttcacatcggagcagcagcagcggtctcaacaattccatgacgcagtctccggcaatttgacaggccaagcgctgcaattattcaacaacctctggagcattcgtcagaatgatcaaatcactcgccttgccgagtgccagcaaattcgtgccgctttgaatgccaccggacgggaccacgtccttcaccttctcgtccccattcctcctccatctattgttggccctccgccttccggatgttttcctcggcctccttactcgaagccatttggcgggggatttgggccaaagtccggcggagcagccattccgggaagaggaggaccacagacaccggagagaagaaataacattggcactgaggagggtgaagagaaaaa

SEQ ID NO: 89681 - DNA, 639 bp, Heterodera glycines
cacaacagtacaaatttgatggagcttttgtctcaacaatcggcaaagtcggcggcgccggtcgatggcccacaaaaactttggcaccaaatcaatgacgaaaacggcaccgaagcatgcgaccgccacaacaatgggcgacggtgctgcttctgtttagactgtcgccgtcggcattgttcctttaccatttcgcccatcgacggcatggagtggctgcagcagtgccacccatcgtacggcgttgacgcggatttgtcggcaaaacggttcctggaggaaaagaagttgaatttgtcgcgccgtttccaactcatcgagcggggctatgtgctcaaattgaagaacgacgacggagaagggccggggggagggaaagcgcagcgaaggcggtgctccaaatgcgggtgcaagggaagtttgttcgatcagctcactgtccgtttgatcgccggtagcgaaatcgaaaacgaaggcaaaacgacggacgaagaggagagggagggagagcagcagaagcgcagcggcggggaagaagcggagaatggtgcgcaatgaaaggggcgaaaaaagcggcaatgccccggggattggtggcattaattaatttattactcatccatcacttacgaccatatt

SEQ ID NO: 89682 - DNA, 614 bp, Heterodera glycines
  unsure (1)..(614): unsure at all n locations
caattaagaattttaaatactcatatttattacaaatgtcggattgtatgaccgacgacgacgccgaggaggccctccgacagttcgctgaaataactaatacggacgaagcatttgcccattttattctccaggatgtcaatttcgacctcgatcgtgctttggcccgttattacacggccgatgaccccgaggcctcctacaaaaaattccaaaccgaaggtttggacagcgcacaaaacacgggcagtgaggtggatgacgaggaagggtcgggtggaaccccaaatgacaaatcaaagggtaaacagccgccgcacaaacgttcgcggcatgaggacgaatcgaaggaaagctcgaaattccctgccgaactgacgctgatcacnttggaatgtggacgggacggacggacgcaatttgaacaaacgattctatgcggtgctttacataattgcaagaacgaaccccgaagtgattttcctgcaagagatgactcgacctctgatgccccaactcaatgagctgatggccccgatgtacaacattgtggtctccgacgtgtacaacccggattacttctgtgtgactctcattagcaaaaacatcaaaat

SEQ ID NO: 89683 - DNA, 391 bp, Heterodera glycines
  unsure (1)..(391): unsure at all n locations
taagatgcctataatatgttttgaaattgaccaagagtacccgcatgggcaagatgcccatgaggacatgctccatgttcannnnagtactgcgccgaaatggttgaaacatttctcggaaaaatgtcggacaaggacgcgttccatttgcgcaaggagatgaatgatgttttgacgaaatacgaggccgccgccatcgacgacaaatgagaagagagggattgattgattgtctgccaatgatttattacgcttgcgcatattcatttgatcacaaattgtcactgcttttacgtttttgatcatctgttggattgtctattatcccaagttttcttggttccgtaaattgtgtttacnncnnanaaaaaaaaaaaaaaaaaaaaaaaaa

SEQ ID NO: 89684 - DNA, 557 bp, Heterodera glycines
taaattaaaaccctaatcgaccgtttttctatctgcaaaaaatgctgcaattcgaagaggtttgtcctaatgtcgtcggtgattcgccatgaaatctgttcgaaactttcatgcaggcaatggcccaattcaacgcaatgtttccaaatttgaattcgtccgtcgttgagtcagtgctgcgcaattgtgacggcgatgtgagcagaaccatcgatgaattattgcgacgaagtggccaagaagaaggaaataattcggagacggatgaacggcgaaagagtgtgtccactccgccgagggaccaatgtgccaatgacgagaaaatcgctttgctggtccaaaaccgcgagtttctgaggtatctccgtcgcgacccaaacttccaacgtgaaatgctcggccgttccaattcatctgattatcgacatcggcaccattcttcaactcatcgaagacgcaatttgcccgttctattaacgtcgtctcgcacttcccaatcgcctaattcaatccgtttttttcgtacatccgccgatgttatgaccaatccagcggaa

SEQ ID NO: 89685 - DNA, 647 bp, Heterodera glycines
caattaagcgtttttgactcaaattacttgtcgcgcaaaatcacaagcacactcgatgcctgcattttggtgtcacaaatgtcgcagccgatgcatagcattggagcgctatgaggacggagtgcgttgtgggcgttgccacgagggattcattgaggaaatcgacgatattcaggaagaccattctcagcgttccgcgtccgattcaccgcagcaaacgccgccgccgcttgttttgcaggggcacgagaacccattcggcgcatttcccggctcaccgtttgctcggctcttccaactcatccacaacaatatttttcctaccaccaccgccgcggctgggaacgacggtcgtccaacggtgctcatccatcgccggtccgcaagcgaagggccgtccacggcgacccatcagccgcagcatcgccaggccgctgccacgccgccaccagtgccgatggatcagcagccgcacacgcaacgcagtcacgctcagcagcaggcttccgaccgaccgcagccgcagcagcacgaacagatcaaccacaacgacctcctcactttgttcatggaccaattcctcggtccgatcatgaataacgctcaaatggacaacacgggtggccggacgcaagtcatcattcaat

SEQ ID NO: 89686 - DNA, 488 bp, Heterodera glycines
gtttgaggttcggttaaattacgtgctgggaagaggtggaaagagcgttggacgaattgattgagcaacgccgccagcggggcgtactgcccgaggtaaccgaatgggtaccgcccgctggcggaggaaggaggagagggaggaggtggaggggaagtcgacaacttcgtggaagtgctctgttggtttgtcgtgggagattggacggggcagtctcaccggatacatcatccgcagttctttcgttgacccgttttacaaaaaatgcaaagccaggagaggaaggagaccactttagtggcctggtcaacggaaagctgaccaaacatggccaccggcggataaacaaattgatcgaacgcaagaaacaatggacgcaaaattcatgatcagcgctttttcaaaccaaaattcattgtaaaaattttttaaaaataataaaaacatttggaaaaaaaaaaaaaaaaaaaaaaaaaaaaaaaaaaaaa

SEQ ID NO: 89687 - DNA, 1199 bp, Heterodera glycines
ccaagtttgagcgaagatcactcaaaaggggacgcccatggagagcagcgacgccaacaataacatcaacaacagcgagggggaggccgaaaataccaccaaaaacggcggagaggagggcgtcgagaagaagatcttgagcaaaggcgtcagcggggtggtcaaatggtttaacgtcatgaatggatacggcttcatttgccgtgatgacaccaacgacgacatttttgtgcacaattcggcaattacagcaaataatccatccaaaattcagcgatcattgggcgatggtgaaaaggttatgttcgacattgttgatggtgctaaagggccagaggcggccaacgtgactggtccggacggagtgcccgtgcaggggtccaaatatgctgcagatttgagccagcgtcgacgttttgcgggtccacgacggaattatttcttccgcggaaatcgaaaccgccgtccccggcatagcgaagaagcggcaggtggcgaagtgccggtgggcgaaaagaaagaaggcgcagaaaacaatggaaaagaggctaagaaggaagaggttgcaaaggacgccaacggaggacgtggcggtgggcagcgtcgaggccggggcgttcgtttccgcgggcgccgcaacaatcgtcgaaacgtcgcgggctcaacatctggtggcacagaaaatgaaggcgaacagaaaaaagaacaaacgcagccggaggaagagacgaaagtgaacggaggcgaatgagcgaaatgcgacctcttttgtttagcgataattaaaaaagtaataagtctgcttcctacgatgtgttatgaattgtgtcgacaatttaaaggatttgctgacacaaacatattacaatgctttttcccacctctcaattggattgaatgatatcctcacttttttaatcggttttacatttggactcatcagcacaataataattcaaaaaatagtttgaatattttacgcgaaacaattaaacaaatcattgagttgcccatcgggaagtgcttacagccctttcacacgggtttgtagtcaagactggtctccaactttttggcgtccgcaactttacggactgccttcatgaagtcctcctgtaccacgccgtccctctcctttcggatcgcattcagtccagcttccgtgcacacattgcgcaggtctgcccctgagaatccct

SEQ ID NO: 89688 - DNA, 747 bp, Heterodera glycines
ctgaataataaaaactcaaattcgagacttggacatttcgtgggctcgacattttattttacgtcattacacagcttttttcgcatttggtgaacttaacttcatccgattactaaaaagcccgtctccgaaggcgacttgtgacttttgttttttcgccgaatttctctccgcgaccattttctcgatgtcagagtttacttcgtccgacggatcagggaaaagcgttagcagtaaggtcagtgagtcggaaagctacgacgcgaccacgcttggtaaattgatgaacctcgacgccaaagtggtcgaatggctcgagaaagagccatatacggacgacgatccgctcttggttcttgacttccttggtccgtttaacaatcttcatggcgactacaaccaaaacaaggcctttttggtgcagaagttggttgccgctggaggggctagaatcgccgcgaacgtggacaacgttatcaaatttgcgacttgggacatgtttttcgaagcgcgtcgcattttgcaggctgacatggaagtgcgtcactttttctacaatccaaatccggcaatggctcttcaaaacaacattaaccaatttccgatcgtctctacaaccgtggttacgttttggtcagatgactcgcagaaattgaagacgcagccgtgtcagttcttcgagttttaaaggatgatccattgttcattcagcattttttgttgcaaataaagacttattacatactt

SEQ ID NO: 89689 - DNA, 705 bp, Heterodera glycines
attttcttccactgatcagtcacttctgatcaatcgttcattttgcttcttcgtttccctaaaccatgatgccctcgtcgccatcctccgcccccctaggcgcaaatgttttggtgaccggcgccaaccgcggcattggccttggcattgtcaaggaaattttaaaaactgacggcatcgtccatttgttagccggatgccgaaacccaagccaagcggaggaattgaaagagctgtcaaaatgtcacaaaaagctgaaattgatcaaaattgacgtgagttgcgatgaaagcatagcaaatgcggtggccgaagtgcgcaaaatgttgggctcagaagaggaaaaaggactgcacacactcattaacaatgccggaatattggagaaagagggcggcactttgttggcgcccgaccgcgccgcgtatttgcgccatttcaatgtgaacgtcgtcggcaccgtggccaccaccgccgcctttttgccattgctgcgaaaagcggcggcaacaaattcggagggccaaacggaggagcagcaggcggcgcccgttgtccgcgtggtgaacattggcggagcgttgggatgcattggcaaagtgttcttaaagccatcggagtgtccgtatcagaacatggcctatggcatgagcaaggccgccgtccatcacttcaacaaaatgttttcgattgatcagcccgact

SEQ ID NO: 89690 - DNA, 716 bp, Heterodera glycines
aagcagcttaacatttccttgcaccgcacttcggtcactctcttttctatgaagggcccaaatgatgccaattcgtccatgcaatttgaactgaggctggtcagtggccgaacagaattcccttccgttttcctcgccactcgcgccaattttctacttcaaaaaggcgaaaatcgcaactcggccattatttcgctgagggaccctttggatgggccgcacgaagtgcacctggaacttgtgcttcgtctgagtgtccgcggaatatttgccggaaaatacatggccaatttgacggttttcgtctcccaacaaaaagcgcaaccgcaccatccgccgcaattgcagcagaaaaacagcgcaaaaagacatcggaggaggagacggacacaccgtaacagagaagaaagaggcgcaagcggacaccgtaacggaatacgtaccgtaaccgaaaaaatcggcggatggtagtcaagtcacaaatcaaatcactcactgtcagcaactgcttttaaccggccatttcggtgtttgttctgccgaatacctcaatcattggaggatgctttttctctttttgttcatttgttttgtgccgcgaattgcaaatttcattttggcatttcattttcattttggcattcgcttttattctgattagataaatcgctagagaatgaaaaaaaaaaaaaaaaaaaaaaaaaaaaaaaaaaaaa

SEQ ID NO: 89691 - DNA, 667 bp, Heterodera glycines
caagtttgagtttagtttcgagtatttattattacctaattgtttatcattattgtcattcggtttaagctgcttttactttgtttaaatgtcatccggagtcgaagttcctcgtaattttcgacttcttgaagagctcgaagacgggcagaagggtaaaggggatggcacaatttcatgggggttggaggatgacgacgacatgacattgagtcggtggactgggatgatcatcggaccaagcagaacgccatttgagggacgaatttacaatttgcgcattgaatgtggaccaaattacccgcgggaagcgccgatcgttcgctttaccactaaaatcaacatgaacggagtgaatcagcagaacggagtggtcgacaaacgcgtggttccgtcacttcgtcagtggaacccttcttatcatataaagactgtgctcgaggacatacggaggcacttgatgactgccaaagagaattcgaagctttcccagcccgccgaaggttcgtcgtactgatgggttgcactccgttccttcaaacgaatattccttccatcggtttttgccccaatttgtcgtggtatttcgttataatttgagtccttcgaatttagctcctcctttttgttcgttcgtttgttttgtctcttcactataactgatttt

SEQ ID NO: 89692 - DNA, 849 bp, Heterodera glycines
ccctcttggatctttttccgctgtttctctgctcctccgctgctctctcccacctttcccaattgggcaattcgcccccgcgtcagtcgtccatctttgacagggtcaaggtcagctgaaacacatggaaaaggaaaactgaggaggcggagattgccaaaaagcgatggagccaaacttaaaaggattatttcaaagttggggtaccaacgcttctccccccaggccccgctctgccatcccatcgacatttcgttgtgccgtgacatcccttacaatcggacaattcttccgaatccgttcatcgatggattggacccgcaaagtctccaagcgcaaacagaacatttcaagccgctgattcgcaccaaatgttccccgcacattctgttcttcgtttgctcagtgttcgtgccaatgtgtcccgcacaattgccacaggcagtcacttcgtgccgttccgtctgcgaggaggttcgacatgattgcattaaaattttccacgagttcgactttccatggcccgccgtgctcaactgttcccgcttccccgcttctcccgaattgtgcatgcgtcccgagccaaccacgcccgagcagaaaccgtttcacagtttggcacccgcaaacagaaaggcgcgagtgccggagtgcccccaggatttggtggatttggacccggccgacccggcggcgaaatgcgcttttcgctgtgagaagagcacaatgttcaggaaggatctgaaggaaaaggcgcgtgtttggcttatgatgtgtgcctttctcaacgtttgcattggctctttcgccgttttttccttttgcatccatcgccgtcgctttgctttc

SEQ ID NO: 89693 - DNA, 621 bp, Heterodera glycines
aagtttgagtcaaaccaaaattaaatttattcatgttcttcgtgaaccttgctgcaatcttaattttcctgcaattttatttggatttgaccgaagcgggcatcgaatgccaaccaaacggagtctgtagagacgtttctggctcaactcctgcgagtaccgtatgctcaaaaaaatgctacagttgcacttacaaaaactgttgcaacaaagtgtacacgagccagtacgccaaatgctcaattaaggggtggcgtaaaaaaggatacattggcaatgtgccagtcgaaattggtgcaacgaagaaacgagacgtttactgttctaaaagcaatccatgcgcaaaagagggctacaaatgcgtggcctataaaaagggagatgacagaggcttctgctggagagaaaaagttgagaaagcgcctccgtcaagctttgctttggcaattgcgatcgcaggcctcgtcattctgctgtgatggactgatcagaaacagagttgaagggatcaaggaattacgaacagcgattttttgggattaactaatcaattatataattagtcatgccgtttacatttaaagatggcagtttttatattaaaaaagcatctgcgtggta

SEQ ID NO: 89694 - DNA, 1152 bp, Heterodera glycines
gtccaattaagataaaattcccatatttatgacacttgacgataaattaacttttcctccattagaagaacaaactgctcgcaagaggcgcgaacgaaaacatcaaaaagttatttcgtcaggttggaagaccaatacactcaattccatttgcttctctactgcacttttgctttgtttcgcccattttgaacaccttcaaacggatgctgattataaatttttcgaaattcaaaatatttcaatccgtcttcaaaaagatttcctcgctggaatcgttcgtaatggtcattctatctcagccgtcatgttcttgttgcatattgtcgctaccaaattgtccgaaactcgtttcactttccttggtctgctggctgtcctttcatggccggccttattcttcgtacattatgaacagattcacaaccgagattatctgatcagtcgcttagcactttctgcctttacactgctcatcagcacagcacttctctttttaccaaaaaagccgaaacgcaagaaaagaccgaacactttttacagtgccttttccgttgccagcactcctctctcgcaacgttcacgttttactcgggactcatctgttacagattttgtacttgataattcaaaaagaatgatggattttgaggacgatgaccaatcgctttcttcaaaatattctacgaaaatcgtacttcaaatagaatcagaaataggtcgtttttggacaagtcgaatttactgtccaagtccgcttccaaaaagtcttccgcgccttcccttcgttctttttccgtttgttcttctaccgttccttcgcattcttttggctggcgtgaaaaaagagaggaaactccgttaaaagaagtaaatcagctcatcgaccaactgatgttgtacagcaccgacgaagaaacggcagagaatgaattggacgacgaagcgattggaaggcaaagagaaatggccattggaacggcagcgaaaaacgaaggcaaaacgatgctgagcactcgagcgatttcgccaggaaggcagtgccgacacggcaaacagcagggaccattcgcatcgctcactttcaacccggccgtgcgtaaaattgccgctggccatgccttcccttttgaaggcggtttatttggctca

SEQ ID NO: 89695 - DNA, 485 bp, Heterodera glycines
gtccaataaggcttttaatttatcctttattcaaacataaatcatggccgattcttctaaggtccctggcggtggcaaagtcgtcccacgctctgctgctggcggtggcttaagacaacggcgagctggtggggcggcaaacactggtcgtactcgaactgctggcggaggagggggcggaggaatgaacagcggcggactgtggcgcttttatactgaggactcgaccgggttgaaaattggacctgttcccgtgttggtcatgtcgttggtgttcatcgcttctgtgttcgtcctccacatttggggaaaatacagtcggactcattgaattctcactttgccgattcattcggtctatcggcaaaaatgcgattttattcatagtttttacaaatcacttccatttaatggaatatttgttttgtatgtaattctgataaagtctttgttataaaaaaaaaaaaaaaaaaaaaaaaaaaaaa

SEQ ID NO: 89696 - DNA, 474 bp, Heterodera glycines
  unsure (1)..(474): unsure at all n locations
atttgttccaattttaatatgaatttcccatcaagaactcgaactcagttggtcacggactgcatcgattactcgaacgaaatcgaaggaattattcgtgctgttcccctaatatggcaacgatttgaagaagcatccaaattctttagagtgatcaacaaatttgtcggctatttcccaccacttcgcgattcatttcctacgccaggcaacgaaacattggacgaaattctgcgctgtgctggtgtcggagtcagattgttagttgaggcagagagtgtttcggactattccctctcaaacttacgtggcgccctgttcgccatttattattcggccgtgtactacatgccaacgactgatgactgattttgctgatggacttattcgtgacgaaaataaaataatttgttgttgcatttctctgttgttctgataaaaatttatttctcnnaaaaaaaaaaaaaaaaaaaa

SEQ ID NO: 89697 - DNA, 738 bp, Heterodera glycines
gccaattggaccatctaaaaatctgcttaatttgccatgaacaaaaaattcatcaacgcacttttccatcaacaaatgttcaaaaatgcagttcttcttccgttccgccacttcgctgctttgactgccacgcaaacgcacattgatcccgttcctttgtcctttcttcgccaatccgaagatgaaagcgaacagaagacgacgattatgccaaaatggaaggaggagggactgaaaattgagaggaactgctcaaatcgcattttccaaaccattgccaaagacattgtcgacgagtgcgggttggacaattccgcccaggactacgccttgtgggtcaaagcattcggctccaacttcagcatgttttttgcacttgaccaaaatcggcatccgatgggctctgttagcattgcactgtatccgcaggtggcacaatggagcatgttctttgtgaaggaccgcttccgtggtcaccggctcggaagtacgctcactcgacggtccatggaattgcccgggatccgacccgttttctgttacggagcggccgatatgtggttcaaatacgcggaggactacggactgaatcatttgttggactggcgcctttggtcaatgcacgccaattgcgcggatgtgcgtccagaacggttggactacgactcgagcgtggagctgaaggagtggcgcgaagtgtccttcgaccaattgttgagttttgaccgtctgcagacg

SEQ ID NO: 89698 - DNA, 1419 bp, Heterodera glycines
cttaagagtattaaatggctggacccgactctcgttttattctcgaattcttcaaccgtgaggctaaagagcttggagtaacgcaggaattgcttaacaattcacagcagtccgatcagttgatccaggcctactactttctgtgtgatttgatttttgaaaatgtcggcaccaccaaagagaacgagtgtgaagtggccactgatctgacgagggctcgtcccaagatgatcatccgaacgcaacagcatagcaatttggtgttcaacaagttgttcgatggttctaacgaatttctctactccgatctattgcaaccggacccccgcagaacgaagatgcacattgctcaactgattcgcttgtacaccacaaagtgtgacattgccaaagagctttcggcggtggacaatcacattgatgaacaaatgaaagcgcatgactttgagaagaactgtgaacgttccacacatgctcaactgaaagatcgcgaagaagcgcttaaccgcatggagaagcgaaatgacgaaatgggcagcaaagtgcgacgactcaaggacaaattgaacgatcgacaagcgctagcggaggatgagaaaagaaatgtcgaacgcattgacaaaattttgttgggggcacagtgcgaaaatgacgaatgcaaggaattgtttgcccaggaagaggaaaaccgcaaacgattggacaacaaaattttgagctcaccggaacgcatcatcgaagagctgtccaacatggaggtcgaagtggaggacatccgtcgcaaaaatgatcaagcagtgcaaaacgaccgaaagttggagagggaatacggcgaacaacgcgtgaccagccaatgcgtggagagtctgatcaacagcatgcaacaattggagatgatgcaggaacaaatggtggagatgcgggcgaaggaagaagagcgacgaaagcaaatggacgacttggaaatgacccgcaaaaatttggtggccgaaattgaagtgttggagagacagtcgacgaccgacttggaatcgttggggggcgaagtcaaccacagggctaagtcgctggcgatgctcaaccagcagaaggcacagctcgaaagtgatgaaaaggagttggccaagcaactgaagaagaagaaggacgacattcgccagcatcagcaggagatcaagcgaaaagaccgttctttcatcattctcaccgacacttacgacgattccgtggccaaacttttcaaaaatttgagccttgtggagcaaaaggtccaagtgagtcgctcaaaccttctcagcctgttcgacgagaaaaagagcgaaatttttggtccgttcaatcagtgaaatgataattattatgatggtggtgaacccccattggtctcgtgtataatttctgatcatgaaatatctcttc

SEQ ID NO: 89699 - DNA, 720 bp, Heterodera glycines
catgaataaatggcttctactattacgcacgtggtcttcgaccttgatggtgttctgatcgacactgaacgtcattatacaacggccaacgagcggacgttggagaaatttggagcaaaattcactcgagaaatgaagctcaaaatgatgggacgcaaaaagacggaggcggtcacggttttgctgaaggatgcggggatagcggatcgcgttacgatggaccaatacattgcggagtacgacaaacacgtccttcaaatcatgcgcgctcttacggaggaattgcctggtgccaccaaattgatcgaccatttgtacgcccacaacattccaatggccatctgtacgggatcggacaacgaggagtttgcaagcaaaatgcttaaatttgacgaatggcttaagaagattccgcttcgtgtgctgtgcgggagtgatccagaggtacgcattggcaaaccgaatccggacgcatacgaagtgaccattggacgttttgctgccaaaccgacttcgccgaagaatgtgctggtgtttgaggactcaattaacggagtggaaagcgcgttgggtgcgggatgcacggtggtgatggtgcctcagcgtgagtttctgccgaatgattggcccgagaaagaactccgttcgcgtccaaattttgccgccttgctcgattcgcttgacaatttttgcccgaagcaatttggattgccggattat

SEQ ID NO: 89700 - DNA, 532 bp, Heterodera glycines
caagtttgagatccattttcataaaaatgcataacttttattttcctcttctttcctttgtcatctttgtgtatttagcccatttctcagacgcaaccaaacaaaaatttcttggcggcgcccatggtaacgatgtggacaatttggatgcaccaaagcaacacattctcggcggagttggtggtgaaaaacagctcaaaccggacgatgcccagccaagaagaatgcgtggagcatggccatggattccacctcggaacgacaccaatggccaagaacagcgaaaatttctcggaggagcgaaggttgaaacagtgatgatcaaaccgccggaggcggatgatcagaaacagcagcaaaccattcttggcggagttcatggaaacgatgctaattgaatgaaaaatgtgatcggatatacacccgtccctccctcatttaaaaacatttgcaatttgacgaaatatccataaagataatgataaatatataaaaaattttttaaaaaaaaaaaaaaaaaaaaaaaaaaaaa

SEQ ID NO: 89701 - DNA, 374 bp, Heterodera glycines
  unsure (1)..(374): unsure at all n locations
cctgaatttttcctggatccaggtccaggtccaggccatttttgggcaacctggatctttcctggacctggattttccagaggnttgtccaggaaatcaaggtccaggtcaaatgtgaaaaaaaatccaggtccaggtccaggcaaaacaggaaaaaacctggattttcctggacaaaatttttgaatttattttttcaagtgaccgatgtttgtcaagttttcaaaaacaatttatataaatttaaaaacacattatgatttttaattagatatttttagatgcttctaagcaaataattaatttttttcaagattttttttgatttttaaaagaaatttcaaaaaaatccaggtccaggcctggatccaggt

SEQ ID NO: 89702 - DNA, 639 bp, Heterodera glycines
atacgaacagtcaagcaaaagactcgtttcgcatttccatttttttcttctcccattcctatggcctctgccccgtcctccgatcgcttttcctccgatcactttttctccgatcggtcccttcgcccgcaatgtctgcccaattgcgcttctctctcttttggctttgtagtggacaaattggcccagcattgtcactgctttagccatttgttcgaatgcggccaacgcattttcgaagtcagtgccaccgaattgagtcccaccaacggattcacttcacgagtgtttcgctgtgaattcgaatttggcacatttgtcggagaaaagcgaatgccaacgccaaagaagcggacaatgagtgcaattgcaaaagtgatttcactggagagaatggacactttgtgggagaatttcgttggcaaaaagcaaatggaaaagatgcgaaatagcagagagcagacagaaatgataaaaagcactcttttgcaattacaccgcaacgaatgcaatttgtacaaatttatcggctcttccgcgccccttccgcttccgaaggttttttacacgcaaacagcggaagagggggagggagtgggacttatattgatggaggacctcagcaaaagcacgcatttg

SEQ ID NO: 89703 - DNA, 428 bp, Heterodera glycines
gtccaattaagtggatttttcgcgcaaatttttttggcatttttggtgcataactactttttttttgacaatgtccatcgttggagggcactcgcttcgtgccgaagtgattcaactttacaagacgctgtaccacttgggcaaggactatccgcaaggctcgcgttggttccatgaacggctaaaaaacgcattcgcacgcaacgccaatgtgcaggaagaggccaaagtgcgcgagctgatcaaacggggcgagtacgtggtcaaggagttggaggcgctttatcggctgcgcaaatacagggcaatgaagaacagatattacaatgattaaatgtaaaaaaaaaacattaagccaaacacacacatttatttgaaaaagctttcacatttaaatatttaacttaaaaaaaaaaaataaaaaaaaa

SEQ ID NO: 89704 - DNA, 740 bp, Heterodera glycines
caattaagcccccgttccggtccaaattcggcccgctcgccgtcctccgcgcacggagtccttcaccaatacgctgatcagccgcaacaccaattggactccgcccgttcgttgagcattgaattggcctctgccacccattcgctttcaaacgctgtccaaatggcttccaccgggtcgaccaaaaagatggctttgcatgcctcggaatgcattgaggagatgacacgcgcatgtgacaaattgatcggcactcggcaattgatcaacaacgaccccgacatcagcacggacgaacggcgtcttctgctggagggtgttaaccgtgccatctccgccttccgtcaacggcttcattctgtccttggcaacggtgacgaaggtggcgccgggatggacgacggccaaacatcagcgactgctcacgtgggcaaatgggacggggaagaaagcggtggcctgagggtttgagccgaacgcggaggcgtcgtactgtataatatttggcgggtggacagaacgccaatttttgtgtttgaatctgtgcaactccaccatggttgtgtgtgccctcctctcccctcttattacatttctttgcattgtcatgacgtcgtcgcaactgaaattccaaaccctgtcgcattatgtcactcttttttccttctggtgctcatttttctccccttttgcgcaactgtcacaaattatttttgctcccttccgcagtgaccttcaca

SEQ ID NO: 89705 - DNA, 1126 bp, Heterodera glycines
tttaatttaacctctgacattggtcgggcgcccacccgaaaatcagcgaggcgctgctgcgccattgcgacggcggtgccaccgcttatggcgccagcgttttggacagaaaaattgagcggactttcaacgaagtttttgagcgagacgtggcggtgttttttgttggcactggcaccgctgccaatgcgttgtcaatggcttatgtgaatcgcgcgggtggcatcattttcgcgcatcggcatgcccatctgattgaggacgagtgcggcgcgcccgaatatttcacgggcggcgcccggttggtcggcgtaagcggtgccgagggacgcattgagccggaagcattagaggaggcaatccaacgctatccgccaaatcccgtgtcagtgcacgcgggccgccctatggctgtgtccatcacccaaagcacggagagcggcacgctctactcattggcacagatccgtcgtattgcgaacattgcgcattcgcatggcattcccttgcacatggacggggcgcgattcgcaaacgcaatggccgccttgggctgcacggcggccgaaatgagttggaagagcggcgtggacattttgtcgttcggcgcctccaaaaacggctgttggtgtgccgaggccattctcgtgttcaacgacttgcagcaggctcacaaagactttcccttcctgcgcaaaagggccgcccatttgttctccaaaacgcggttcatcgccgcccaattcgaggcgtatttccacgactcactttggctgcgcaatgctcggcatgccaacaagatggcttcccatttgacttcggcaattcgttcgttggatccgtcggtgattcgtttggcatggaccccccaggccaacgaagttttcgttgtgatgcgtcgttcagttgccgaaacattgcgcaaaagtggcgaaatttcgcatttttatgagtggaatgttccggacggagagcgacgcgagttgaagctgtacacggaggagggactgttccgtttggtcaccacatttgccaccaaagaagctgaagtggacgagttcgcttctcttctgaaggcgcattatttgggaaaatcggagcaaatgcgaagcatcgcttaacagca

SEQ ID NO: 89706 - DNA, 885 bp, Heterodera glycines
taatttcttaaaattactaatttatttcatcacattaatattatttaaaattgccgaaaacagcaatgtctgcggtacacactgtggaaaacccgccaatgccattccgatggccaattgagtacggcatgcaaactggtgccgaagtgatcatgacgggtgccacatacaatggccaacagaagcaatttgttgtcaacctgaacggtcgtggtgatgatgttgtgctgcatgtgaacccgcgcttcaaattcttggaggacacaattgtgttgaacaatcgcagctatgcgggctggcaaaaggaggaacggcaccggaacaaatttgctgtcggtgacacttttcgtctgcgtattgtgtgccatcattcgcactttgtgatcattgtcaatgacaaagaaattgctcaatttgagcaccgtatgtcacccgacagtgtccgatcgctggaggtcaacggcgatgtggtgttgcaccgtgtcaatttggtgaacatggcgcaaccagcgtccgcaccagcaccaacagtgcaaccgatggctccggcaccacagtttggccaaccgatgtatccgccgccgccttcccaaccatttggctatgcggcaccgcctccggatgttggcttttcgccctccattggcggcggtcattatccctcaatgccaccgtatccatccgcttcagtgccgcagccgaatgctcctgccgacgcatcacaatggcaccagccagattatggcacgcccaagccaaatgctccatatccgccatatggccaccattgagatgctgtgccaaaatgaaatgggcaatggatgaattttaccgtgataaaaaatgagtgtggggaaattagagtccgtaatttttaaaaatcgg

SEQ ID NO: 89707 - DNA, 260 bp, Heterodera glycines
gtccgtccgaactccgccgtaatgaaaaaaccgctttttgcttccttgccttacccgaataatggcgttcatcccgcgcaccattccaacgcttaacgcaaagagcagaacggacagaaggcattcggcaaatgggaaaaaactggtgatggctacggaaaacggcaaaaattgggacggcggaaacatttctggcatttctcgttgtttcgaaaattaattaataaataaatatgctaaaaaattttttataaaaaaaa

SEQ ID NO: 89708 - DNA, 655 bp, Heterodera glycines
gtccaatcaagataaaaaaacggactaaaaaaacattttcttaattcgccctcgaatgtctctttcttcgatccaccatatgtcacgtctgaaactttggatgaccccagtgcgcgacaatcactttgggttggatgacctcaaaattttcaacagcgatggttactctgaaaatgccccattttctcgtgagagcagccgaaactcttccgcggatggcagcatcgcatgcaacgcggatgctgctgatgcggtcattaacatgaaaattggcgtctggaaaccattgcctcagaaaacttgtggcttctgctacatacaatacaagcgtcactgtcagcgactcggagttgcatttccgcgtgtcaccgataagggcttctgggtcggacacaccaccaaagacgagcacggggatgtcatctgtccggagttgcgcaagctgaagtgcccgttgtgttacgcttctggaaagaaggcgcacacattgaaattctgtccattgaacagcatcaaagggaggcgtgacgaagcataaagtttcgtagaacaactaccaaaataacttgtttgtcggattgtttttgtattgaattttgttatcaccttgcttattgttagtttgtccaccattgctattctgttggtttgtcat

SEQ ID NO: 89709 - DNA, 837 bp, Heterodera glycines
cctcgtgccgaattcggcacgaggaattttgtaagtgaagaagagttgcaaaagcagcgtgaagctggcgaagaaaagcctgagagttcagagccggtggacaaacgaacactttacgaacggttgaaagagcaaaaggacatcaagcaattggaatacgatgaaacgcacgcattgaagaaccaattccgtggcattgacgaggccgagtcggactttcttacacaagtggagcgggccaaggaggagcaggaggcacgcaagcgcaaggaggaacaggaactggtgcgattgagtcgacaactgacgcaacaacacgcgaccggtgccacggctgagcagcaacaacacgcactgttggagaagccacaaaaagcgagcaccgccgcttcgtcagggatcagcagacaggcggcacttatcacatcgctcgtccgccgcaaaagaccgctttcaactgattctgaaccaaaatcggcgcgtggcgaagtgccatcgccgccctcgtcgtctgacagtgacaagcgcaagaccaatgaaccgtcgaaggcttcaggcggtccgccaccaaaacaacggcacgaatcgcattgccaaatcattggagtgcttcccggcttaccgaactactccgattcgagtgacgaggccgagagtagcaacaacagcgagagtttggagtcgggattgccatgtgtggcaatttacgcgggtaaaggcgcaccaaagccgcacggagagtgttgaaatggataccaacgaacgtgatgaggacatgctttttatgacgtatttttgcgaaatcccgctcatatttgtctaatttgttaataaaag

SEQ ID NO: 89710 - DNA, 653 bp, Heterodera glycines
gtttaggattcttcttcattacaacatttgtgatgtcgaaccaacaaaatggtgatgtcgctgttccggcagcagttgctccgaatgaacaacctaatcaaaacaaccaattccaactttggccctttctcaagtccattttgacccgtcttgtcatgttctggctgatctcgtcacttattcgaaactttttcggccctaaacaggaacgtgacgccgaccaaaatacatcattgaccggcggtggaaaaacgtacccgccctcttttaatatgttcatggcaaatgagcattttgacttatttgtttacctttctgcaaagtccgaacgcttccatgatttcgacaatgttgaatctcttttttggcatgaacatgatctcgtttacggggattggacctccggtgccattggtgacggctctcgacaaaaggcggtgacgatgatgccaactccggaagtgctccagcggaacggctcactgtatttgcacgttttcctggtcaaacagggacagtctcatcatccgcgtgccaaaaattatggcgggagggaaattgtgtactccagccatcaactgaacaaattcaaaaagaagtactaccaaaaaacagccaatttgctgacaggcaaaactggacaaagtgaattg

SEQ ID NO: 89711 - DNA, 584 bp, Heterodera glycines
ttacttcgaaagtgcgcaaagcgtttgtttggagtgcgacaagtcgtgcgcaacttgccatgggcctggtccgctccaatgcgacgaatgtgcacagggctttgccaaccatacgatgggttactgtcgccagtgctgttctcccgaccaattgactcagaaggacttgcactgtgaagattgctccaagagttaccccgaattccgcacgaaaagccatctgtcaatgctttctcttttggccaactttttcacaatcattggcctcgtccttttgggcactgttcttttttatttgtgtcgccaattgatttgctgttgtttcgagattggtcgcaatggaaatcgttctgatctcgagtacactccgctgacaacaattggtgatgatttggacggcagaaaaaaggaccaaaaacaaaacatgggttttgcgctagaagatgatgaatccgaatccgacagtgataatgcggagtcattgatggaaggtgaaaagagttcgccagaagccgagaaagagcagaaacagcagcggaaagtgccgacggaagaagccgagagctaaaaagcgtcggaggagg

SEQ ID NO: 89712 - DNA, 325 bp, Heterodera glycines
  unsure (1)..(325): unsure at all n locations
gtgggccgggccggaaaacggcaacaaattcgaggctcaacgctatgaacatggccaaacgtgttggaatggaccggagaggtccactttggtgcagttcgagtgcggtgaacagttcgaacttgtggaaaccagcgaaccgtccaagtgcgaatatcactttttggcaaaatctccgaccgcttgtgctaacccggaagagctaaagggggaacatgctgaactctgaaggataatttagcaagactaatgttgttcttctaaatgaaaattcttaatttaattcgacttgtttggttaaatttgtaatttccaaaaanaaaaa

SEQ ID NO: 89713 - DNA, 944 bp, Heterodera glycines
gtttgagggagagctcagcagaagtgaacggcccttctgtgcccggcattccgactgcttttctgcccaatcgccgcctccgtccgcaatgtttctgactccgttgggcaatgtgaagaacgaattggtcgtctgtcccaccgatttcggcggagatttcgtctttggaatggaactcgaaccatccaacagcgacttttgcgcgtcaactgccgcctttgccccttcgatctcaatgaatggtcctttcccgccgatgcaaacacaaatgattagaatgccaatgccatctttatcagcttcaatcacggaagaccagcagatggcctatttgctgtcctccgccggacagagtccgtccggctcgtcccaacactcgtccctggaggggtcgcctctgcagccgaactgccaccaaacgatgcttttaagcattggtaaatacgaactcaacgacagaaaaatgctgaccgaactcagcggagaagtcaaaacggacggcgcaaagaaaatggctgcgacggacgcagcgatgacagcaccgaactcacccgggggcagaagttccgggaccaaccaactcggccgcacttactccccgggacttcccttgtccatggtggaacggcaaaagattgtgcaactgtttcacgaagggtggaagatttgtgatatttccaaatatttgtgtgtcacgcacagttgcgtctccaaaattctccagcgattccgcgcgaccggttcagtccgcccgaaggatgccaaagaaggccgccaggagtcgcctttggtcgcggccattagggactaccggcagagacttggcattatgcggcagtcggagattcgggagcagctgatcagagacggactttgccgtcgcgaaaacgcgccctcccgctcgtccataaaatcatattttgcggacaaaacttagcggctta

SEQ ID NO: 89714 - DNA, 648 bp, Heterodera glycines
caacaacatcaaaatgcaccggcgacaatggaaattgacgagcagcaccaggcgaacagtgcgggccatgttgttgcgtcgggggaatgcgtacagcaaagggagcagcaacaggaaatgcccgatttgtcagcaatgaccgaagaggaacatttggagtatgttatccggtctttccatgacaggaaaccaaccgacgcaaagtgctcaagatggacagcacaatcagcaacacactcgctctccttctggcgcaatgagtacacctgctccaactccgatggaagtggaggagggaactgctggcggtaacaatgctaaagggccggctggtggcggagtccaactcggcgatttgttgcaacacccggaaatgcttcatcaattggttggtcaagtgccggttgatagcagtgaggcaacaacaaaggaccaaccgacggaagtcaaagaatctgatgagaagaaaacgagtacgaagaaagaggcggaacgaaaggacgacaacaaaaagggaaattccagcgaaaattgaagggcaaatgctgcgaaacgtcgtattattcgataaactgaactgatccatcatctgttgcttgctgactaataaagtttttttttttgttaaaaaaaaaaaaaaaaaaaaaa

SEQ ID NO: 89715 - DNA, 633 bp, Heterodera glycines
taaggttttctttttcttttctcaactttcggtctttttctgattctcaacatttcctttcccttttgcttattatttttcttcattacctcacttttcttcccctcacttttctcttttcattcttcccaatgtcctcccaaaatggcactgattcttcccttttggacgatggtcaatggttggacgggcatttccccctgcaccacgcagtgtttgacaacgatgtgccaaggctgggacaattgctcaaagaggcagcagcagcagcagctgaatcttcggtcatcgacagagaagacacccacgggaatacggccgtgcacatcggctgtatgcttggccacagagagtgtgtaaaattgctgttggaacatggggcatccgtccaatccggcaacaatttgggctggtgcagttttcacgaagcgataagttacggcgatcgcaaaacgattcgaatgatgctaatcgcgctcaaaaaacagtccagcggacagcttaaaagtcgactgcctttgttgggcgaacatttctcaaaattggccgacttttatatggagacaaaatgggagttctcctcgtggattcctcttctctcgcggattctcccctccgacactttcaaaattt

SEQ ID NO: 89716 - DNA, 634 bp, Heterodera glycines
gcgctcaagtttgttgttctggcactagccatctctgctgcggcaggaaaatcatccctttcgagcgctaacattcaagagctgcagtaccgggtggagggatgtgccgcagacttccccggccgctgggccggctccttcaacagctcaccccaggaacagtgcgttacaaacgctaaatacaatgccaggaacggatccagcccccaaaaccaaattattaaggaactgccaaagtgtatgctatccgccggcgccgctgaatcccacattacgaaactctcaaagtgtctgaacaaaaacattcttctgccatggaccttcgtcgaacgtgacaccggctacacccaattggaaacttttacgcacatgttcgccattcaagactgcctggaatcgtctgcggatgtgaagaacgttgactcactcgtgggcaagacctgtgcctaccagctgtacttacaatatggctacggcgcttcagaggacgcagcaaagaagtggttggaagcgtgcttgcacacagcgaacgttggtaaggccaccgacgccctgaaatgctatagcagtgctctcacagaccccgccgtcatccagcgcgcagcggactacattgctaagatgaggggttagg

SEQ ID NO: 89717 - DNA, 629 bp, Heterodera glycines
tatgtctctcaaccatacgctgtcttcatcatcgacaatcctttcggcggcggccgccggtgccaatgaaacgaccgaacgatttcgactggcattggatgactttgtcactgtccatccccatttgacttgtgcactcatcgccgtctccgtctcgttggccacccatctggcgctgttcgtcttcgcccgtctctttgactttgcgttggcaaagtttcgcccatttgtccgtcgttgtcgtcttcgtcgtggaggaggacggtcattccgcgttcacatcagcgatgcgccactgttgtcatccaacggaccgttcattcactcacaatttacgcaacatcagcaacgggcgagtggcaaaagccaactgctgcacaaagtgccaacaattgaagcggatggcggagacgacgacggtggcattgccaacgctgaaaaagcgaaacggacgacgacgcccgtcgccacgtctcgacaacgtcatcagcagcgcgggttgaggctgagcagcagcggcagcggtggtcgcatcggcacgcgacggacgacgacgacggtggacaccaccggcgctgccgcaaaagcggtgccggaaaccgctgccgggagcaaagcggcgccgaatg

SEQ ID NO: 89718 - DNA, 693 bp, Heterodera glycines
attaagtaataatcataaatggtgtttgcgggtgttaattgttctaccaatattcggtgggtgcatcgttgggcatggacgtctcgccgtttgtgctcttcgaccaaaattatttatgagcaaaacgggaatcccgctgaggtcctcaaacttagcaacgaaaaaatcgaccaaaatgccattggagcaaacgaagtttttgtccgatggatggccagtccgataaatccgtcagacatcaatcaaattcagggggtgtatccgattaagccacctttgcctgccgttgcggggaacgaaggctgtgcccgagttgagaagattggttccaacgttcgagagttgaaagtgggcgacatcgttcttcctaccaatgccggccttggcacttggcgtacccacggcatttatcagtcgactcaactgttccctattgacagttctttgcaactcgactcaatcgcaacggcaatgctccaagtgaatccgtccaccgcctatcgaatgcttcatgactatgccaaattggtccccggtgacattgtggtacaaaacgggggaaactctgctgtcggacgcttcattattcagatgtgtcgaaatttgggctttaaatcgatcagcgtcgtccgtgaccgaccccaaattaacgagatgaaagatgagctcaaacaattgggggcaactgaggtt

SEQ ID NO: 89719 - DNA, 933 bp, Heterodera glycines
gttacaaaaatgctttcttcttccgcctgctgtactctgttggccgccctcatttcggcggcgtttttcgccatggcaaacgcacaaacggtgaagcagtgcctgtgctccgaaattcagccctgttccgaaaagtacatgaacacatggaagacatgtatgcagcagtgtaagggccatttttccagcgtgggcggcgacgtggaaaaattgggccactgtttggacagcaaccaggcactgctccagtcgaccatcagatgcacccaatcgcatggggacgagtcatgtgccaaatcgccggccgcggttaagcaggtgccaaagcgatacccggaaacgttggaaattgcaacaatcagtgagatcaaccggatgatcaacggcatgggcctcgaaggcgcaatgaaaggtttgatggatgccggcaagaaagcgttcggctgtacgcgcaaatgcatgaacaccaaggcgggcaactgcgagaagacactcaagtgcggcttggacttcccgccggacaacgtggcggtgcaggaagtgaagaagtgcgccctcaacagcggactgaacaccgccaacgcgcaagcgctgtgcaaatgcgcgtccgccgcgggcgttaagaatttgacgccagccatctgcgcaaaggtcaaagtcacctaaacaagttcatgtcgtccgggcgctgctgatgactgactgatcagtgtagtaacagagagatgagcaattttagtgatcgattgaccgaaatcccccaaaatgttttgacaccggtgattgatcgatagttatcatttatcattttggtggtcccttccaccccatttgtttcccatgacatcacctttttcaatttaacacaaagcatttttctcttttcactggcaaaattgctttttcttatctgtagtaaaaaaaagaacatcc

SEQ ID NO: 89720 - DNA, 494 bp, Heterodera glycines
  unsure (1)..(494): unsure at all n locations
aaaaaatgatgcgggagataatgacgaacggacccatccaagttcaagtgaagtggtatgtggatgcctatttatatggccaaaacagcacacaggtcaatgtttacatgcacaccatcgtcaatcagactgacaagggtgattaccaagaaggatcattgaaactaatcggatggggcgaggaaagcacggacaaaggcgagctggtcaagtactggttcggcgtcaatagttttggcactgactggggactgaatggactgttcaaatggcgtcgagggacggatgaatgccgcattgaatcaaagggtatcagctttggcacccccgatgtttgagaaggcttaacgatatctgctagatgtcaattggaaaaaagaatttgacttaaaacccacgcgtctctaataacataataatgttaagtagatggttaaatgttgttgatacagaataaaaattaatagggctgaaacnaaaaaaaaaaaaaaaaa

SEQ ID NO: 89721 - DNA, 729 bp, Heterodera glycines
gtccatttaagcacttgatcagtgttttcctattttcttcaacaatcaatggatcaaactgatcacagtgccgttggtccctcctcatcctcgccttccctcccagtttcgtccaccgtcccgcgaaatgcgcttttattcgacccagcggcaccggcggaagttcaacagcaacaaaatgcggcggaggaggaggacgaccaattctatgaactgacggccgaagacttgcgcaaaatgctcaaagcgttgcaggatgagagcaaaagacagaattcgctgttgccaaccaaactgatgaaagagagggaccaacagctgaagcacaaggcgtacaaacattcgattgtgcgctttcgcctgaacaatggtcaaattttacaggcgcaattcctctccaccgaaccagtttcggcactgttcattttcctgcgccaaatcatttcgccaacgattcgtttcgaattgcaccaaattccgaccaccagtggaaaattgaaatcagacgactcgaccacttcgctgttggacgcgggcattacgccgaaaagtgtgctcattttgaaaattgtggcggccgacaattcaccggaatcacctgagcaaatgaacgccgaccaaatttttgtggccgacagttttcaaagctgcacacaaacggaagcaaaggccgaagctcaaaaatggctgtcgtcaaacaccgaattccgtccctatttggacaccatt

SEQ ID NO: 89722 - DNA, 435 bp, Heterodera glycines
gagagaagaacattcacattttcatatttcatttcatctttaaatctgccattaataaagcatctcaaataatccgccactgaggtcaaaatggtcgaagttcagcaactgatcgaactgatcttctgcattcttttgcccccggtcgccattctgttgcacggcggcttggacattctgcatttgatcctcaacattgtgctgtgcattctcggctatgtgccgggcataatccacgccctttggtactgcttcttctcgtgatgttaattgattcactaattgatgaccaatttcaaagtattatgccgtagacaaaatggatacccccgcattactcatcaaatcagatagcatttagctgaatttcaaaaattttgcttaaaatgttaataaagacattttttaccaaaaaacaaaaacacactgacaaaa

SEQ ID NO: 89723 - DNA, 641 bp, Heterodera glycines
caagtttgagagaaacttaaaaatattttatgatggaacgccgaaacagaaccaaaaatggcggtctgtcccccacccctcaagagacgaccattaatttgcccgtttcctccaatcgaagggcttcgtccgcttcgattctttttgcccaggcgagtttcgacacgggcctcgacgtgagccgcgcctcgcaattgtcgtcccagcggaatgtgctgagtacgcacgtgatggacttgggcagcggcagaccgtgcagtggcatccaatgcaaagcgttcaaatgggacaaaagccattcggaatggattcaaatcggagacacggtgaccaatgcgcaggggcgcattccgctggtgcaccccggcacttcgctgtccaaaggcctttacaaattgcgttttgccacgaaggaatattacgcacgtcaccagctgaagtcactgtttccgcaagttgacgtggtcattgaggtggacgacgccagcgaacattgccatgtgccggtgttactcaaccatttcggctactccgtttataagggacactgatggaatattccctctctcattaattctcattttggtgtatattaaaaacaaataaaataaataattaaaaaaaaaaaaaaaaaaaaaaaa

SEQ ID NO: 89724 - DNA, 845 bp, Heterodera glycines
  unsure (1)..(845): unsure at all n locations
gtcccgagtacatcttcatcttccgagacggtctttcggaggggcaattcgcaatggcatgcaaggaagaattgcgtgcactgaaacagggctgtgttgaatacgactcccgctatcagccaaagtttgtgatgattgtcgggactaagcggcacttcaaaaagttcttcctcgaggaggagggacgcaagggccgtccgttcaaccagaatttaacaccaggctccataatccaagataaggtgactgtgcgcggacatcacggaattctttcttcagccccacgcaccgattcacggaacgggcaaacccgtagaatacaccatgttggaggatgagattggcatcagcatggacgaattgcaaggagtgattatggcgttgtcttactcgcatcagattgtcaatgttgaggtgagcatgcccgaccctgtataccaagcccacgaattggccaagcgagggaaaaacaatttcgtgactttgaagcgtttcaagccggagcgtgtgccaaagattgacaagcaaattgtggcaaagggtggcaagcgtcagatcatttcaattgtcgactacaaagctgtgacgcgtcttctctcttactggggtgacgggacgttcaaattgtcgcatcgcttcactgcttgaattccgatggaccttataaatatataatactcttaaatacaccagataacatatttcttgctatttagcttcttccttctattttatttttcgtgtcattatgtattgaagcgctttgacttattgcttcaatggatgtaaaactcttaaataaagctgttgacagccccnaaaaaaaaaaaaaaaaaaaaaaaaaa

SEQ ID NO: 89725 - DNA, 1016 bp, Heterodera glycines
aatcattgatgagtcacccgtcgcaattggcaatggcggcacagaaacacagctgtcaactccattccgtggcgttttggacgtgcgctttgagcccggccaaactttgacagtgaagggaatcgtcagggagaaggcgcgccaattcagcgtcaatttgcacagtcggacggccgacttcagcggcagcgacgtgccgttgcgcgtcgcggcacgcgtcgaccgggcaaagattggcctcaattcgatggtgaacaaaatgtgggggaaggaacagcggaaggggcactcgttgaagcccggcaagcccatcgacttgcgaatccgggcgcatgacaaggaatttcagatcataatcgacggcaaagcgttcaaacggtacgcctaccaatcgccgcttcagtccatcacccatttgtccattgacggcgacttggccatacagcatattcattggggcgggaaagtttaccctgtcccctatgaaacgggccttccccacggcttcccaattggcaaatgcctgaaaatgtccggcactccgtcgctgagaaagggcgggcgctttgaagtcaatttgttgcgcaaaaatggtcacattgcgttgcatttaaacgcgcgttttgacgaaaaagcggtggtgcgcaattcgctcgaggcaaatgaatggggaaatgaggaaagggagggcaaaatgccattcgaaaggggccattgcttcgatttggccatcacaaatgaagccaatcattttgggattttcgtcaatgggcaacattttgccaattttgtgcatcggtcaaagcccgaagacatttttggcctgctaattcagggagacatcgaactgaccggactggaaatggaatgactgacctaattaccgtcattatgaaaaaaacttttggccaatctcaaccaaaataaattgggaaatatattcataaattaatgaccacaatttgttgacatatcttttaatcattaattaattggcaaaatactgactaattttc

SEQ ID NO: 89726 - DNA, 593 bp, Heterodera glycines
attttcctctgtttattagtcatcaaaatgggaaacattgtctattctgacaagttgtcctgttacgaaagtgccgactattgtgctcgttcatgctccgcatcttcgcagtgcgtttacccggacaattgtggcgactcggccaatgcgcattacgcgtgtttgcccttcgacacgcgactgctcacgtttgttctcgttccgatgatgtaaaagcattcagagagagaagaattaaaacaacgatagatagaaaaagttgtccaatgcctcaacaattaatcaggtggattttggtcgtttccttcctggtaatcgtcctctgctgctccgctttggtggtgttctacgcccttagggtgatccgacgatcattccgaaatccggtccaaactgacggagacatcgttttctacaatgccagaaacgtgcacaattttccgcaccctgcagcaatgaaacagccaacggtcgaagacgacggcagacaggaatattattacaacaattcacgtagaaatgattattactgattggttgtgaatgagtgacatgggattgttacggaaaaagtttttctttgcccaaaaaaa

SEQ ID NO: 89727 - DNA, 607 bp, Heterodera glycines
gacacgctgaaaagggacagcggagcactgctgtcccagttgttgacgttggaagggttggagaagaacagcaaagtcagtcagtccaggggcacagcgacgcctttggtcactgattaatttggaggtggccaagcgaatgagcaacggcaccattttcatcgacagagacggcgaactgttcgcctatgtcctggattacctgcgcaccggcaaattgcttctgccggagaattttcgcgagttggcacgccttcgagaggaggtgcaattctaccaaatcgaccaattaatgcagcagctgatccccttttacaacctcaaattccccccaaagacacccaccggccaaaacaacggaagtgtcgctttgaccgctgcggtggcggcagccgtggcgaaaacgaatgctttgtacgaaacgggtggcttcatcactctcggctaccgcggcacttttgcattcggacgagaccgacaagcggatgtcaaatttcgaaaattgcaccgcattttggtgtgcggaaaagcccaattatgcagggaggtattcggggacactctgaacgaaagtacggacccggacagagagggggccgaacggtac

SEQ ID NO: 89728 - DNA, 666 bp, Heterodera glycines
  unsure (1)..(666): unsure at all n locations
gtccaattaagatcattgatatttattgctaaacggcaaaacgtttcccaatctttaaatggaggatcaaccacaactttcacaaggatttttccagacttttttggatgaaaaagtgccggccgactttcagccgattttgcaagtgcttganngactcgtaccattggctcatcgtcggcgatgggcggctatccgccacaggggcagcaaatgcgggctcgtctcagcgacagtttgtactcgtacagcggttgcgtcattccacagacggtgacgcgngcggttccnaagacgacgggctgagcacccacaacggcatcatccaagtgaccagttggaaacgggtcgacggtggaaagctttgtttcttccaagtgttggattatacgctgtactcgcttgactttcctgtcattggcaacccgcaaccacacagtggaaacccggcggaatttcgccgagttgttcagcctcaaaaagatcccgacactcagcagacagcggccgaaagtgtcgccctttggcgcggcacccaagtgaaagacgagcctgaaaacgcatggggcggcggtgggtccgcgaagagggggcgcggctcgtcaccctcagaccagcgacagccgttgcggaagcgccagccggatgcgggcgcgcaaatggcac

SEQ ID NO: 89729 - DNA, 431 bp, Heterodera glycines
  unsure (1)..(431): unsure at all n locations
agcactttaaattataactgttcactcccaaaagtgaaagatgactgctaaaaatgtgtccccatcttccaaagagagcagttgttcaaggacttcttgcaactctgaaacgagtgaaactcgtccactttccatttgcaacgcacaatccatcgtcaatttccaaaagtcattgcgcgtttacaacggcaaatcgaaatttgctacgaagaaattggcttcctctgcgtccgttccgaccaatgcaaacaaagcaacaaccaaatagaggacaacagaacactcacaagcttttgttctaatggaattttcttacattctgtgtaattatgattgtctcatcttttacgacttcgatctctgatgtttttatttccatgaacattgaacaataaatcattacaaaattnaaaaaaaaaaaaaaaaaaaaa

SEQ ID NO: 89730 - DNA, 598 bp, Heterodera glycines
cttcggcgtcgtcgcccaccaccggctcatccgccgctggcacttctcatctcggagcagcggtggcccctcccaaagccgctgtggcgtccgacagcggagcattgccgactggcacaccaacaacgacagaaaccccaccgtcgacgacagcaagcagtacaacgacgaaagccactgcgaatgaaaaacgaattgcggaggagggctccggcggtgggctggcgttcgtcaccatgttcatgctgctcggcatctccgtctccgtttggctgctgtacgcctacttcaacccccacactcggtccggccaactgctgatcaaatatcgcccttcaaaatggcaaattccgagcagtcatgtcagatactcggcatctgtgcacatgtgatgaatggttttggtggtggtgctgcggcacagacagagagcagcgaaagccgggtgcagtgaaaggcggtgagcgggtgccgggaaacttcggagggaaccgtttgtctcgaatctgaaatttccggaaaagtccacccctttaaatacgatttttttgcatcaaagtacgctacaatttctcattttaattaaaatatgtttttt

SEQ ID NO: 89731 - DNA, 686 bp, Heterodera glycines
agacagcgaatgtcagtcaaagttctctttccatttatccgacaatcacaaccagttgagttgggccgagtgtcacacaaaaataaatcggcgatttggacttctcctcatttaccaacaaattcacctattagcgaagccaacaattattcataccttccattgttattgctccaaaaagaagaccaaaaatggaagcacccgctgaaattgacgaaatatacaggccacatgaagccagaattcacgaagccttttttaatacgctttccaaaccaattcatagcaaaaacgaaagaaggaaccgagcagaaggaatcttcacaacatcggaaagtcaacaggacagggaaagaatacacgtcacatggcgccattttggtcaaaagaccaagttcttccttgaccgtaatgaacatgatttgtttgaggcgcttcaccggaaaattcgcagtgaattgccaaattttcggggcaatttggccttccgagatgacaacagtcgtgaagttattctcaaatgcgatcggcaaatcagagaagcggctgcccgaagggacaatcgcctgcacattttcaccactctctccgaaagcccttcccttttcttggccgcgtctgagattggcactttgagtgcgagtcgtccctcctcgagggcaccgcttggctctccgatatccgcg

SEQ ID NO: 89732 - DNA, 632 bp, Heterodera glycines
aggccaaggagtgattttggtgtacgatgtgtccaatcggccgtctttcgagaatctcgaccatttgctgttggaggtggacacttactgcaccaaaagtgacaccgtcaaaatgttggtcggcaacaaaatcgacgcggagcgaagaatggtctcgcgggaggagggccttcaatttgcgaagaaacaccgaatgcttttcatcgaggcgagcgcaaagacgcgcgaaggagttcaatgcgcatttgaggaactcgtggaaaagcaatttcgacatggtcagtctgtgctctaaggatgaacatactcagtttttgtctttgccgcgccgttgcgccgtgtacgaaattgacactgcgcagtcggtgttgacgccgagtggaacccgctatcaatttggcgacgacctcgccatgctgcgcgctcgcttgcccgcctgtgtcggcctctatcgcccgcagggcattgtgtgcattggacagttggtagatgaactcaaccgtctttctttgccgcggctgcccgactttccgttgcacaaatttctgttgccgctcactgaacagcaagaggagaagctcaaggagcacacgcgacagatcaaaccgccacgttacgacgcagtgacaaac

SEQ ID NO: 89733 - DNA, 663 bp, Heterodera glycines
  unsure (1)..(663): unsure at all n locations
ttcaatttttattattttattccaaaatgttttctcagctttttctttttctcatttttctcgccttttctgctgaaagcgccccgcggggagaaaagaaaaaagacacaccaaaagatcggtattcgctttgcagaaaaggcggagtgccaattgcaaaacttaacgatcagatcaacggcaaagatttcgacaaactcttcgcaccgctgttcccacatccacttctcatcagtaatttactgtcattggaaggcttaaaatgcccggataaaattgcgcctttcatgaaaaagtgcgatgccaaaaaagatggcgaaataaatctgcgcgagttcaaatgctttgttaaatcactgctcgcctcatatttggtggacgaggaccggaacaaatgcatcacggaggaggagctggagagtttttacaaagaatgtggattaaaagaaatggaagaggaaatgatgggagacggatcagtgcgaaaagagtgatcggagagaggacattgggaaaagagcgatcaattgataatgtgatcaatcgataatgcctagcaataatatggaatttatcggtataagatatatgattagaatggtcacgtagaaataaataaacgacggtgattagtaaaaaanaaaaaaaaaaaaaaaaaaaaaa

SEQ ID NO: 89734 - DNA, 623 bp, Heterodera glycines
gtccaaataagtcaaaaagttgcgtaaaaatgcgtttcgttgcggtgattggcgatgggaaagcagtggatattttcgtcaaagtggcagcggtcgtttcaaaattgtgtcggaagagagcggtcgtccgaatcacgccgaatgagttcagttttgtcaatgtgtacaatgtccgtgagggaatgcacgtcgacttccgcattcacaaggataatttatttaattcatggagctttgacggcctttccctggacaacaacgcgattttcttcgaattgtccaccgacgacttcgtccgttcgctgcattcgcgtgccactcaaatcaaattgaaaatgaccaaaaaggacggggtgccgcaccttcgcgtggagctcagtgccaattccctggtcaacgaaattcccattgttttggttgttctacgacaatggcccgacttcaacccaccaaacatgggcatttctcagttggcagttgcacttccaaacgtcaaaacattgacaaaaattgtctcgggtgtgaaggacattggcggaaggcatttgatatttcgcgcaaacaatcgtggagagttcaacatcattggttatgccgaccaggcaaaagtcgctgtctatgct

SEQ ID NO: 89735 - DNA, 448 bp, Heterodera glycines
ttgaatcttttatattttaaatcatttaattgcgctaaatgtttcgtccctttgtcattttggcgttttgcctttttttcctttgcgctgtcgaccgttcaaatgccggcggaatgtttgaggatttgctggagggaataagcgacaaatttagtgaggggctcaagtcaatgcagcagggatatgagaaggcgaaacaggcatttgaagagtcggaggcacgcgcatggctaattgagtcagtgctcccaacgatcaaacagaaatttgaagaagtgaaggaatgggtccatgagaaaacgacgacagtttctgttgagggaccgcaggagaaagagaagtacaaagtgatcgaattggacgaaaaataggaaaacaatcgaaaaatcgcgattattattatccatttggaataaatgctcaaaacttaaaaaaaaaaaaaaacagg

SEQ ID NO: 89736 - DNA, 455 bp, Heterodera glycines
  unsure (1)..(455): unsure at all n locations
ttgagttttaactaaaattttatcgaaaccgttaattcgcaacgacaaaatgccggcccaatcgccattctttctttggatgaatgagaacagggagagattctacgagccgggaatgactcaagcggacgtggcgaaggccgcaggcgaggaatggcgccgtttgcccgagtcagagaaggccaagtggggacagagatcggcggaggaacgaggacgtcaaggggggcaagatgtggaggaagaggagcagtaaaacggagaacaaagggagtgaggggggaaaacaaagagaaaacgaaaggaagaaaaccccctttgatcatttaatttgatggcactccaacacattctcatgggcatttcagcctttcttcttaaagaagaccgaaaaataaagcaataaagtcggaaaaaagtttaaaanannaaaaaaaaaaaaaaaaaaaaaaaaa

SEQ ID NO: 89737 - DNA, 655 bp, Heterodera glycines
ctcccgccctctccctgctccgtcgcaatttgtcccttcttttgccttacttttcgtcttcatccgtccaattcgaaatgtccaaacatttccttttcctggcccttctgttttttgtcggacaaataagcgctaaatccatccacagcaaaagcgaagaaaaggaagacccattctttggggaagaaacggacggaacggaggaaccgcaagagacggacgagccgaagccgtacggctgggagaacatctacgaaaaatgcatggaccaatttgacgaccacaaaaagtgctgcgaagtgtcgggcggaggcgacgaatgtttgctggaggacacaacgacggaagcgggcgaaacgacgacggaggaaccggaatattcggacgaaacgttcaaaaagtgtatggcgaagctgaaccaaagcaaggacaattgctgcttcatattcgaggacaaaaagttgaaggaatgtgaacattggcaaccgcagacaaccacagaaacggcggaagagccggacaatgcgtacgcgaagtgccttcggcggggatattacgcggaagaatgctgcagaaaatacccattggcaagccaatgcagtgccaccacaacacaagaaaatacgtatggaggtgatatggcggaggaattcga

SEQ ID NO: 89738 - DNA, 680 bp, Heterodera glycines
  unsure (1)..(680): unsure at all n locations
gtttgagatggattcgcccaaatgccaaactttgaattttgcccggccgtttttcccaaataattttgtgcttttggaggtggaaaagtcggtggctgatgctttttcttcgtccaatatgatcactgatcaatttaatcacgaaagtctttcgcttacaatccgtggccattgctctgaccctttggtcgtgtgcacttcgtcccgaacattcggcgcaaaggacgtcgaagtgtccaacactttgctgttgctcgacgggacgccaaacggcgccggagcaaatcagcaacatatcgtctccatcacaaatcgctttgtggagctttccgaagcttttcttcccgaccaaacgttccgtctgaaggcgcttttggagcaaaatttgctcgatttttacaatgaaaatgcaccggcggcggaggaatcgaaaggaatcaaactgaatgaactgctcgaccatgtgcagatcagtgagcagcaattgcgtgaagaattggccaaatttgccgtcgttgaaccggctgaaggtgttgcgacttttaccaggctcattcttaacttggagatttatttgctctgtatttgttccttgataattgtccgttaattacccattggtttttgtcacaccacgggtaattattttttccaacttaaaaaanaaaaaaaaaaaaaaa

SEQ ID NO: 89739 - DNA, 707 bp, Heterodera glycines
gtctgcaacacatataaacatttttgcatttgccagtaataatggcaacgccgccaaaagcaaatgcgctgatcgaagcggccggcaagttcaacaaactgttcattatgccgcccaatcggccgacacgcatcaaaaaagcgatgaacattttgtttggccgcaccgaggaggaaaaacgagtgaccggcaattttgtgtcacgcattgcggaacgcaacccccgtcgtgaggacatgtcgaccacgcaggactggccaagtgtttggcccaccgcgcagtccttccgttcatcggtggtgccgttgcccgtccgcatgggcttccgccgtaggccggaacggttcgcgccaaaagggccgtacgggaacttggaattgatgaaaattcccaactttttgcatctgacgccggcgcatgtgcagcgccatgggcaggcaatcaaaaaattttgcaccaaatttcccgaggagttgaagcaggccgacgtcaaggagcagtacacgccgttgcggttggtctacagcgactacgttcaccagggcaacaacattcgggacaagcgagcgcgtgaagtgaccgccaaaattcagctgaactcgttcgggctcaaggacactcatgcgcacaacaaatgtcgtcagttggttggcgatcgctatgacgaggagacggacaccgtgaccttcaaggcggacaactgcccc

SEQ ID NO: 89740 - DNA, 907 bp, Heterodera glycines
ttgttggctgtgcctcgttcggtgctggcaacaaatacagggactgtgactttccgagactgatttatccgtcggtgggctccgttttcacggactcatactgctggtacgtcaacgtgacgtgcgaagaggcgaattatggcctcccggcgtacattgaattcaatgaaaacccaagcacaattgtcgccgcaccggagccaacacttggcagacgcataacggtcactttgcaatgcgtgggcaattcgtatgggcaaagagtgtggaccaagttcggcgtggacggtgaccccagcgcagtggtccaagtgaaaacggttagatgcgggacaaagtgcgcaacgaatgtaagcacaacgcctgccacgttaacatctccaaattcggaggggctgccgtactgtcgcgacagttgtgccgcgagaattgggcacggcacacgtggccaggactgtgatcaaactctgctaaacaacgctttgattgtttatccaagttatccgtacattctgtacggttgttggtatgttagcgtcacatgcgaggcaaaagccaacggcaacccaatttacatcaaactcaatgacgaagaaaaaacaattgtcacctcaactcagccaccgttcaacaaaataacggtcaatttgcaatgcgcgtggaattcttatgggcaaagagtttggagtaaaaccggcgtcgacggctaccccaaccgagtgatccaagtggaaaaggtaagctgtggaagaaattgcggcaccactgaaacttcgaccattccgaccaccgaataaagacaatgataaaaatatcacaatctgcccataatgaaggtgttatgacgttccttaaaaaccatcaaaattggcgtttttgaaaaagccatcaataaaaatttttgctt

SEQ ID NO: 89741 - DNA, 551 bp, Heterodera glycines
gtacagcgacgccttgttgataattttcatcgcctttttcaccgctttgctcggcgagggactcacttgggtgctcgtctacaggtccgacgagtacaaacggctgaaattctcgatggaacgcaaatcgaagaagttggagcgcaaaaaggacgcaattggcgccggaggggacgcggcaggcggtgcgggtgcggcgaacgcggccagcaaaacgacgaaacggaaaattgagcgggaggaggagagactgaagtcgaccaaccgcgacctgagcatgttccgcatgaagtccatgctcgccattggttttgtgttcgccgctttgctcagcactttctccagcattttcgagggtcgtgtggttgccaaattgccatttgagccgatcacttgggtccagggccttagccatcgcaatttggttggcgacgatttcaccgactgttccttcattttcctttacattctgtgcacaatgagcctccgtcagaatttgcaaaaattgctcggattcgccccgtcgcgttcgttcaatcgtcagacgcaga

SEQ ID NO: 89742 - DNA, 665 bp, Heterodera glycines
gacacaatgaattttgtcaagagaattgatttttattatgatgttacgacaatatcttcttggataatgttcgagcgtttaaatgtcacgcgaagactctgtccttccattgagtataacttccgacctgtgcattattcgagcttattaacttctgctggaagtttggtccctttctccacggcggcattgagaaaaaatttctttgaacagcagagagaattggcccgagtccatggcattacaattgggaccagacatggcgtaattgatgatttactcgcaaaattatcaaacacagtgctgccccaatgttttatgaatatggttgcgtcggaaagggggcacgaaagcctcattgaactttcaagaagcttttggcgcaaattatggatttcaaatgtacacctggaccatgaggagtttctcgagagtctcagacaattgaatattcaaattccacccgatgaaattattttcaataaccgatgggggaaattgatcgaacaatggcattgtgaacttctgaatcgacaggtggatgatttggttgaggacctttacatggaagttgatgaagccgaatatgaagccaaaaaacgcgagcaccgttcctttgttgaaaatgatggtagtcattattacgatgaggaggatgattctga

SEQ ID NO: 89743 - DNA, 631 bp, Heterodera glycines
gttttcccccgcagagtctgtcgacgctcagcctggcactgctgctctcgctcgtctattacccatcctttgaaggccgaaccaacgcgtacaaacagatgctttcaatcttccaaaatgcacaagaagtgtcctcactcgccaacctcgaggccagcttcaagttggacttcacccacctgtacaaccgcctttgtgccacactccattccgaaagaatgccgcttctgctgctctatctgctgctccataacaatgtcggcttccgcaactttgtgctctcccgcattaatcttgaacagctcgtgctccccgtcgtccgggttttatacgacggaatgtgctcagtgcctggccatggatttcaacgtccttcccccacgtcctccccgaaaatgcggcgacagtcccaattcagccacaataactcaacagttcacacccaccaaacttatttggcactgattgttctgctcatactcagcgaagatgacttctttaagaaagtcatccatgaaatgacaatcaaaaacattgactggtacactttggaccgaacaacgcatttggcagaaaccacgttgggcggtctcattgtgctggtgttttcaaagacaattcaaatcaatac

SEQ ID NO: 89744 - DNA, 656 bp, Heterodera glycines
gtttgagcgagtaatttcaagtccaaatggacgccgttaaagcgccaactttggcttcgattcaccacaaaaatcgtctccaatctccgctcaatgcccacggccatcctttgatcattgaaaatggcactgtcgcagaaacattagtggacaaagaagaagaggaattgacggaacaagtcggcacttttttgttcacttccgaatctgtgggcgaaggacacccggacaaaatgtgtgaccagatttctgatgccattttggatgcgcatttggcattggaccccacaacaaaagtcgcctgcgaggttgtcacaaagacaggaatggttttggtctgtggggaaattacttcgagcgcaaccgtcgattaccaatcggtcgtccgcgaaacgatcaaaaagattggttacgatgactccagcaaaggatttgactataaaacgtgcaatgtgttggttgcgttggaaaagcaatcgcccgagatcgccgcacgtgttcacgaagacaacgaaccggaagatgtgggggccggggatcaagggattatgttcggctacgcttccgacgaaagccccgaggcaatgccactgactttggtcctttcacataaattaaatcccaaataccaccaactccgaaaggccgccgctctg

SEQ ID NO: 89745 - DNA, 673 bp, Heterodera glycines
cctcgtgccgaattcggcacgaggagtttgaggacatgaacatgtaaatgtttgatttattcaaccaacaatattccacttctcttcctccaaatgtcctcactttgtcagtccgactttcccatgcgtcccattgattccctcaaattctcacttatgaactgcgcttttttctaccgtccgcctttgtcattgcgtgaaaccaccgaactccttgaacatgacggagacttccttgttcaggattccaatggaaccaaattgttgctttctgtgcgtgtttatggcgttgtgtccgaatttcgcataacaattgttcagaatcactctcgccaagtaatcttcgaatttgctggccaatgtttctcttctttggaacatttggtgctcacattttccaacggccgtggcggcaagcactttctgaagactgttgatggcgatgagtttctgctcgtccgtcccatttttagagcattgcacgccggtcgttttgggtacggcgagcgcatggaagtgagtgacagcgtacggaagggcaaatggctgccgagttttgtgcgaaccttgcgacccgaattcgctgctcgcccacagacggagactgacttggaacgactgatcgaattggaccatcgaaatttggtgcgcgtgtgtgactttttcaagcagt

SEQ ID NO: 89746 - DNA, 583 bp, Heterodera glycines
cagtcataaaaatgcttttctacccaatttctgtttctttgattttgttcaccttttttgccggaagcgctgaagcgcagaatgatgctggcgttttgggacccgtcgaggaaactgctgggcaaattggccgcaatttaagctgttccgctatacacgcggctgtccgcgccatcattacagcacatccggattggcaccagtggttctacgaggcgagacaaaatcaaagtgatcacattgaaacgtgcgcaaacacggaaagtggcgacgtccacgactatttgtcggaacaagtggacatgctcagatgccccgagtcgcgcagccgtttgatgactgtgtccatcgtgttcattatcgcctttctcattacgcttgcggtggccatcactcttggcattttgctttatcgaaaaaagtaaagaatggagggaaaggacgatggtttgagtctcgcgcgattgatgggacatttgtgcaccatgacaaaatggacgccaaagacgctatttcaaattgaaattcatttttttgttttgcataatttttagtgattaaattttttaatttgggtaaaaaa

SEQ ID NO: 89747 - DNA, 540 bp, Heterodera glycines
gaagtagccaccggaagacgtcgacaaagcggagtgttttctggcgaaatcaaccgactgaacgtgcaataacaacgttttggagaaagttgcagcgatattggttgccttttatcaggtgcatccaacccatggccggagatgcaatgctgtttatttgtcgtctatgaacatgccgaacagcagaaaaaactacatgtgcagaggcaattcgatggcttggtgaccattgcgcgccaacaagaagttgacgagcagacggcaggcactttttccgcggtcacttcgatcggtcggccaccgacgtttacatcgacttcgcggtacacaccggccgcttccgccccatccggctcgcgcacccaaatgtggtgatgcagggctttgatggtctcaaaaaaaacatgcttccgattaaatgcattacagtatcaccttgtagaattgctcaatgaatgagttaaatgtaaaaatgatgctcgataggccttgagaaaagcaattggaaaataaataaaaaaattttgtgttcaaaaaaaa

SEQ ID NO: 89748 - DNA, 534 bp, Heterodera glycines
cttaagctatcatagcaatatgataagtaactatttgaagtcccaacttgaacttgtggaagaacattcgactcgtttaaatgagcgcactcaaaattggcggcagaggaaacagacactgagcgcacgcgaaaaggaaattgtcagtgccgatatgtcaattgtggtgccgagtgacattaagccacgactgcgcggcagcaaatttgcccatgccacggaggaagagaggaaggccattgctgcgcaaatggaacagggaagggacgccaatcgcacggcgacgactgaggccaaacgaaacgccgcgcggcttggccaagcagaagccaagctggaccagcagattgaagcggagaaagcctattttgatgcacagttggagaagttggagaccgaactgcaatttgtcgcttcccttttgcccaaatctcagtgacttttttttataatttatttgactcccatcacttatttattagcgtttgcttacataaaaatgatctctcaaattttcttcagttataaaaataa

SEQ ID NO: 89749 - DNA, 682 bp, Heterodera glycines
gtccatttaagttgttgttttttattattacttttcttcattttgataatggcatccgcaaagtgtgccagggaagactgtggcaaaacggtgtaccctttggaggaattgaaatgcctggacaaggtatggcacaagacctgctttaaatgcacagactgcggcatgattttgtccatgaaaagctacaaaggctacgacaaaaagccatactgccaagctcattaccccaaaacggttccgtcggccgtggccgcaacgccggagatggaacaagcgaagcgaaacacggcctatcagagtcaggtgaaataccacgaggcgtatgagaagcaaatgaaaggcacgaagatggaagtggccgatgacccggaaacgatgcgacacaaagccaacatggtaaaccaatccttggcccattaccacggcgaactgcagaagaaagagaagcaggactcacagagggacaccactgcaggttcagccccgtctgttggttttgcggtgcacagttcgccctctttggattcgcttggctctgccatttccaccgcctcttccgtcgtccgtccgtccaacggcagcagcagcggaaatattggacacgttcagcagaacatccgccggaattcaccccaacagcaccaccaacagcagacgtactcctacgggcaactgttct

SEQ ID NO: 89750 - DNA, 769 bp, Heterodera glycines
aaaagcgatggaaagtggccgtagcgacgaagtgctggcccggcttgaggctgttcggcgccgtgtgctcgccgcaccgatgaacgtccacttcggcggagatccgagtcaaattcggctcggcacatgttcatcttccgcttcgtcgccgccaatcacggacattgcctcacaatgggccttcctcgaacagccgatccaccaacttctgcagtgtcccgctgactacggggcctccgaagcacaatttggacaaagccgtgccattgtcgtgggcggtgccgacagtgcgtttttgctgcagaaaactcggtttgacgacgactggaatggacccagcaccatgtccactttgctgcttgctcaatacttgcaacagtctgagggaccgctgtggaatgccgttcgtggcacggggctcgcctacggcgtcagtctgtacgttatgccggatcgcaaagcattgtcgttggacctgtaccggtgctctgagctgaccaaagcatacgaacagacacgagacacaaccctcgctgtgctcaatttggaccgacttgacacgaatttgctggagtctgccaagcgtagtctgatctgcgagctgatctcggggcagaacacggtgaagctgacagtgacttcggccattctggcaaccattcgatctctgggcaccgactttacacttaaattatgctcgccaatttggtatgccaaagcggaggatgtgttggcgattggtggcccgccaatccgacgacttttcgac

SEQ ID NO: 89751 - DNA, 643 bp, Heterodera glycines
cctcgtgccgaattcggcacgagggtccaattaagggattattcatttttcctgcttatttgatggcaagaaagaatttatgccgcaaaacatttgctacttttaagcaagaagagaggtatcccattgtccaacgagcaattggagcccgatggggcagaaaaactattcaaacgccgaacatcgaagaagaagcactacaatcagtcgaattgcgaccatcaacatctgccgaagactttgtggaatcaccgccgttaacgccatcaattgcgacaacttcggaggttgacgttctgtctgcggaaactgtggaatttggcgggtcgttctcagcgactgctgcgcaaatggatatcttcgagtcgaccccgtcaacgtctgcagttcaaatggacattgaagagacgactccatcaccatttactgtcaacgaccgctcacagcgaatcgaacaactcgagaatcaattgaacgatcgggacgataaaaatctgtgggaggatgcaattgcatacgattgcgaatttgaagaacagtctcaaaaaagcccagaacgaagtaattacattctcccggcacttcccaacgattgtcttcctctctctgtgccttcagcgagtcgattagtcgatgtgaagag

SEQ ID NO: 89752 - DNA, 708 bp, Heterodera glycines
ggagaaccgaatcaaactgattgttgctgactctaaggaggagagactttgcctggcagaacgtaatggagcagactttgtggtgcattgggacgattcacagtttgaggaatatttaatcatgcggaccaaagacgtcgctaccaatggccttcacattgtgtgcgatttcgtcacttcccctcgtacaggcgcccgttcactcaagtgcctttctgaaggtggtgtccttttcattggcggtatctccggtttggacgttcagctgccaatcaaattagtggccaaaaaccgtttggccattatgggcgttacgcgtggttccattgagcaactgaagaacctggtcacattgctttcagagggacagctcaatgcccccaattatcgcgtttatccggtggaccaggcatcacaagtgttgaagcaattgagcatgtccgaggttgaaggccgagccattttggaggtgtttaatccggacacagaagttaagaaggccgaggaagagcagaaataaacggattgtgataaaccgagtggaggagcctttccctcacctgtgcgcttttatattatttgtgacctttcctttctagtgattcatattggagaaggcacagttctatttaatcccggcggacgaaatttgcacagatgtaattaaggataaattttcaagcgtcaaaaaaaaaaaaaaaaaaaaaa

SEQ ID NO: 89753 - DNA, 1093 bp, Heterodera glycines
gccaccgggaatcccgtaaaatccggctgggcaaaaatctggagcgggaatcccgccggtctacattctactaactagtaaacccttgctaatccttcggaattggtgtcccgacggataaagattcgattacaaaaaattttaaaaaaattcaatacctatttttaaaagtgtactttgcttattcaattcatctgcgaattcgacaatgcttttttcctctctaaattcatcccttttcattcgtcaattgttcccccatcgtcgtttcttctgcttttctgcctttccacagcctattccccttgccttcgatgcgtatccatcgactgctgagcccgaaaagaccaatccgctggtaattgttcatggcctttttggtcataaacagaattggcgtggagttgccaaagcattgcaaaaagaacttgggaatcgcgtttttgtactcgatttgcggaatcatggcgaatcgccgcatcttccgcagtgcacttattcgtccatggcttcggatttgaggcaatttctcgagaaggaggtgttcactgtgtccgtctacaaaaccgcctttctgttagggcattcaatgggcggaaaagtcgtctccgaatttgctttcacaaaagtgaatgaaagcttaattgagaagttgattgtcgaagacattgcgccgcagaggaactcccattcaagtttagcccaattccgcgcttacatccaagcgttgcgttctgtcgacttgcgattgagcagaagcgaaattagccgatcgttggagtcaaaaattccagaagaaaccattcgagcatttcttctcacaaatttatataagccaagaggcggtcccttcaaatggcgttgcaatttggacgcattgtctgacaatttggaacatattttcgaccctttgatttcccgcgagagagttaccatgccgactttgtttcttcacggcgcaaattctacatattttctggaggacgacaaaattgcgttaagaaaaatattctcccacgcgaactttgaagaaatccccgaggcgggccattggctgcacgcggagcaaccgaaaatgttcatagattcggtc

SEQ ID NO: 89754 - DNA, 322 bp, Heterodera glycines
gtgtacactgacctgaaaatgggcgttgcgccgtcactgcacgacgcgttgttttggtacaatttgcaccgggacggaaacggagacctgcgcacgagacacgctgcttgtcctgtgttgaccggcgttaaatgggtgtcaaacaaatggatccacgaacggggccaggaattcatacggccatgcccgctgaagaaagaatataacgaaaaatatgtgggcgacgttagaccattttgagactcataaattttgtaaaaaattgaataaataaacatttttttatcgttaaaaaaaaaaaaaaaaaaaaaaaaaaaaaaaa

SEQ ID NO: 89755 - DNA, 636 bp, Heterodera glycines
aatttattctcttacaacatttaaatccgcagaaaatgctctcattgatagtcatcgtttgcttctttgggattgtgccgaatttgtcaaaaccgatcaaactcagaaaccattctccaatgaatgttttgtttatggcctggcccgaggcgcgttatccactggaattgccttttcaccgcgtggattgctttagtgagatggagaggcgacacatcgtgccacaagtcatcacttaccggctggaaaatatcaaaaaactccgtaacgggatatgtttggtacgaatccctacccggagccgagtgactgtcacacagatgaacacaaacaatgttaaaagttatgtgaaattcatcgctggttccacgcagctaagcatgccactgcatactgatcatattcattccggccaacacgaaaaatttgggccatggcatatgccgtgccgttacgcctacattgtgttccgctcccgaagtgatcagcttgaatgggtggagttccggcttgagcccgaactgaaagtggactcggccgatgatcagcgcaatgactgcgcatcggaggaacacaattttgccgaatcgctgttgaagcattgaactgactactgattggagtgtgacatttgaa

SEQ ID NO: 89756 - DNA, 726 bp, Heterodera glycines
gtccatttaagactagacgagcaaatgcttaaaatgcgttccgtcgtgccacatttcccaccgttgcctgctcttcgtgactttatctacatgtaccggatggacgcggacaaaacgctgagccaaaattacttgatggatatgaacttgactcggaagatggttaggagagccggagacttaacgaatgcgtttgttgtggaggtcggaccgggtccaggtggaattacccgagcaattcttgagcagccgtgcaaacgattggacgtggtcgaaattgacaaacaatttttgatgcctttgcagcatttgagcaatcattccatggagcggatgaatgtccatcgggcggacgtgctcaaatttgactttgaacaagtgtggacggatgcgggggcggccaaatgttcatgggttgaggagcatccgaattttcacatcattggtaatttgccctttcacatttcaacgccgttggtcataaagatgatgagacaaatgtctattcgccgtggaccgttcgtgtttggccgggttccgctcacctttaccttccagtccgaagttgccaggcgtgtagtcggcgaaccgggcaccgactgtcgctctcgcatcggagtgacgggccaaaatttgaccgagccgcgcattctcttcaatgtacctggcaaatgttttactcctccgcctgaccatgacgtgtgcgttgtgcagtttctgcctcga

SEQ ID NO: 89757 - DNA, 490 bp, Heterodera glycines
cctcgtgccgaattcggcacgaggaatataaatttgttccaaatgtgctgcatcaattcaaaaatgttgctgctcgtggcggcatttgttgttctgttgtgcctgctcaatcagaacgtcggagctgagaaaatcattgtactgtataatgggaaaaagtacgatctgaccgagttccacaaaagccatccgggaggtgaagaggtgttgaaaaaagtgaacggaaaggacgtgaaggagtatttggagggcaaaaagggagtgaaaacggaccatttggtgcagcacaaacacagcaaacatacaatcaacgaattcttgccaacgttcgagatcaaacactaaattacaacacttcgccaactgcagaatgttagctgaatttaaatgaatgaatatttaataaaaatgaatgcttacatatattgacgcttgtgtattgttacataaatgttaattgaaataattagaataaatatttgccttaaaa

SEQ ID NO: 89758 - DNA, 402 bp, Heterodera glycines
gattagacaaaaaggaactgtcgacccaaagaacgcaacaatttttccacaaagagcgaacagcacaaaccgtggtgggggtggtggaggcgggaaaatgctgagagggcgtgccgctgcggttggccacggcccccaacatcgtttgccccacgcgcattcgcacgcccatcttccgccacagcgacccaagcaaaaaggtcatcagcttcagcaacaacagcaagttcaaacaggtgcagcacaaattgtagcagcattgccaccttcggtgccccaaccgccgcagcaacagccccaagcgaccaatgccgtggcagcagcgagttctttggcggatttcccaaactgtgccaatgatgtcctttcaaagattggcgattttgtccgacaatggggtgc

SEQ ID NO: 89759 - DNA, 574 bp, Heterodera glycines
gaccaattaagctttgctcttaaaattctttctaattgctctgcgttaataatttggcacaatggtttgtgtttctaaaacgccgcgttctctccccaaaaaacgacggcaatcgactgagcaaaacaccgacactcctccaaatgaccatcccgaagtaaaaaaggccaaaatcgaggatctgctaaaaaagttctccaatggagggttcgatcagttttggaatgaaggattccaaccggaagaggaaccatcgcccgacttttgcaattgggatttcggcaaagagccaagaaaatgcgttttttgcattgcgaaagaagaggaagaagagtgggaagaagaagaggaagaggacaaagaatgagtggaagagagagaatgagaagacggggggagccgcgaaacaaaaagcaaaactttagagcacatcgaacatctattattaattcttaatatcaaatacacgaaaaaacaaaaacttaaaagaataataataattaatttaattgtgaattatcataattaagtttgtaattttttttgttctctctaaaataaaacgatttattcc

SEQ ID NO: 89760 - DNA, 782 bp, Heterodera glycines
gagaagtccaatcactcggcccaattaaattagccatccctttaattggccttaattaagagaatttcatatctctgaattaacctcggcaatgcattctctcgcctttatttccttcgctttttgcctttcactaacggacgcttttcgtactcaatcgtccggcgtccgggggacacttctctgtggaggtaaaagacgaacaaaaggccctctctctggcctaggttttagccttaggcttaggcctaagctttaggctaggcttaggcttgcccaaaaaaagacgagaagggcaattccccgccggtctccactgatcggcactctctcattaatttttgttttgtttttcttttgtctgaaggaaaagcactcgcggacacaaaagtgaccaattcctttgatttgtttattgttcggtaagaaagaaacaaaattggaatgaaggtgaaactttacgaccacgacaaagggccggacgcggacgatttgatggggacgacgacaacggacgagcagggacgattccaagtcagcggaaagaccaccgaactgaccaccatcgacgtccaactccgcatttaccacgactgcgatgatggcatgatgccttgccaacgcaaggtgaccttcaacatccccgattcgtacgtcacgtcgggtgcggtgccggcgaaattctttgacattggcacagtgaacatgcaaatcatattcgaccacgaagagcgatcatgcattcattaattgacagatctttatttttttattgaacaatg

SEQ ID NO: 89761 - DNA, 806 bp, Heterodera glycines
aaacatcgcttgaggacagagaggaaaagcgtaagaaactgctcaaagcacagcttaagtcggcgaaaatggtcgtgccaccggcgcctcaaattccgaaaaaaatcgccgaagagcacaaaaagaatggcacccaaccacaaaaggaagagtcgaagaaggacattgggaagaagaagcagccgcagatggcagagcgaagagagtcaagtggcgagagtggcaagaggggaagaggcagtgggatgagcagagagagcagcaagagagcccaagggaacagccgaaagaggggcagagagaggagcagagaaagcagcggcgacaaaggcagaaagacaatgcgacgttcgtcgcgaagtcgctcagtgaaacggcgcaggcgcgactcttcctcctcctcctactcgtccacttctcgctcccgttctcgctcccgctcctatcgccgcagtccaaagcgatcgcccgccagggatcgccgccgcgacagaacaaggcgttcaacttcgaattcctctcgctcgtcttcatcctcttccgcctcgtcctcttcacagtattcttcgtccgaacggtcacactctcagtcgcgttctttcaccagcgaccgggacgaggaggaggagcgcattcgcgatcgaatcatcgcacgaacgctttccacaagtgtgacggcggcacccgcaaaacagcctcaatcgaaggatgacggcgttgcaatggatgaagcgatggaatacgggccaaagccacccgaatcgcttgaagtttcaattctcaattcggacatggaaatgtcggag

SEQ ID NO: 89762 - DNA, 543 bp, Heterodera glycines
gtcctaatttgtgcattttaatttattttatttcaccgctatttctttcctaactctccgccaatgatttttcttcttttttgttttatggtgttgtttgccttttgcggccactcaaatggccaaatgactgctgccaaccaaacttggcttgcctcccaacaggcattggcaagaaacacgggcagatgcggctcgttttttgtccgttttggcgacttttgctacttgcgctgccgacaacgcttcggcgatgacggagccaacggcgactgtcccttgggtggaggaccgtgccttatggtgaacagaaacgtgaacatttgtttgcgagttgctttcagcctcagacagcagtgaaagaggcaaagaaagaacgaaaaacattggggaggaagtgatcggcagagcaaatgataagaaaaatggaaatgattgtgattttgtgaattgaattgatcaaaaatgaaaagccaagacttttgtgagtagtcccaacttgaaaatacacgtaaataattaaaaaaaaaaaaaaaaaaaaaa

SEQ ID NO: 89763 - DNA, 902 bp, Heterodera glycines
ccaagtttgagtgaacaattacaacaatctttcatcgtcaaacataaacaacaaaattcaatcctttttaatattaaatggttgttctgcccattttcgccgccgtcgccggcgccgtcggcgaagataagaaaaggcaacggacgggggaggccgaggagcaattggacggagacggagtgataacatcggcggagcagccgacgacgacggcgaacagcgaatgttcatcaattgtcggcgaagcgaccgacggcggcgggaaaacgccgacggggggagagacagtgacaaacgagtaccagcagcagtgccatcggaacaacatcattaacagcggcggcagctgccctttggcactttcgtcgtccgagcgaatggtcagcgaactgatcgcagcggtcattgagcagagcagacaaaggcaacagctgcagaaacaccagcaacagttgctgatcagtacgaacaaagtagaggagaccaataacagcggaggaagcgaaaatgaggcggagggggaagaaagaggggacgaaatggcaccggaggaggcgcaggcggcggggacattctgtccacgctgttcaacgcggtcaaaggcggtgacattggcagtcttttgggcgctttggccggcggcgcagatgtgaacgccaaggacacatcgagcggcaacactctgctgcaaatggccataatgacggggatcaccgaaattgtgaagcttctgctgaaccgcggtgcgaatgttaacgcgacaaacgctgagggcaaagacgcggtgcgaattgcgcaagagcaggcggaacaagcgccggacgaggacagcaaagagaaatatgagcagatggtacaactgttgcaggagaagcaatgatgagaaaaggaggggagaaaga

SEQ ID NO: 89764 - DNA, 659 bp, Heterodera glycines
cttttccattattgttctttctcttcgcgattccttcccattttaaattgatggtccaaaggcttcactgtaccaatcccgaaagtgtgcagtcggcacaaaaggcactgatcaatgccatcggtcgtcagttgatcactgactttcatccagctgtcaaaaacgtcgcttctgccagtcaaaatttgctccgttccttccaaagcctaagtcatcacttttacgaatacaccgccgctttatacgctttgggcttttcgggcataaattcggatgagttcgaagtgagggaacagtcgaaaactctgcagacggtgaccgaagtgctgaagaaagtccattcggaacagatcgattggatggattacttcacggcgatggcactgacaatcaatcaaaacagcaaaacggagaaggaacggctgaaagcattgattagcggcttttccgagagagagaggcaattgagcaaagcaatccatcggggcaagcaaatgccggacacgcggagtaacttttacgagacggagttggaggcgatgcgggaccaacaaagccaacgttaccgtttctttgcggataaacacttggaactgttgcgacgatatcacgaatggatgaaggattcgttgcttctactggagaaagaattgaatttg

SEQ ID NO: 89765 - DNA, 1063 bp, Heterodera glycines
taccacagaaaaaaagcaaacaaagaaatggcagggaaaatttttgtggtcactggcgcaaacaagggcattggttacggcattgcgcgtgggttggcccaacaagtgaatggtgccaccatttacatgacggcacgaacgccttcactaggcgaaaaggcattggatgacttggagaaggaattgggcataaaacgcatttcaaaattggcatttcatcagttggacatcactgatgagaaaagttgtgccgattttgcggcatttttgaagaaaacccacggcggattggacgtgctcatcaacaatgccggctttgcatacaaacataatgcgacagagtcggccgcaatccaagccgatgttacgattggtgtcaattattatggtaccaaattgatcagtgatcagctgggcccactgatcagagacgggggaagaattgtgaatgtgtgcagtcaaatgggcgtaatgggcagtcagattggtgtgatgggcaacctgtacaaacaggcactgattgatcagttcaaacgtgccgatgtcacttcggacgatatcaacacatttgtggaggaatacaaaaagcttgcccatgcggacaagcgcaaggagggcggctaccccgaatcggcctattgcgtgtctaaagcggccgaaattgcgctgtctgtgctgcaggcacgcgaattggccaagcggaacattgttgtgaatgcctgttgtcccggctacgtggacacggacatgacaagtcacaagggccatctgaccattgaccagggcgcggacacgccaattttcttggccattgaccaaagtgtgcagaaaggaggactgttctattatcagaggaagccgatcacatggcttcaagagtgaaaatgggaattgatcagtggctgatcaactgatcagaaaagaattggtgatttgcttgggcttcttgggagtacattttgatgaattttccatcactttattcgtggatattccaaaaaaaattttaagttaaatatttaataatgtgaaagctttttcaaataaatgtatgtgtttggct

SEQ ID NO: 89766 - DNA, 556 bp, Heterodera glycines
gtcttccgctctccaatcaacaaatgcctcccccggtgtcacaaaaaaatccgatcacagttcaactcaaattgaccaacagcacggacacatgcagcgattactcgttggaatttacgaacacttgctttaagctggtggaccaagtcaaattccatgtgaaagtgccgaaaacgtcaaaattggcaaatcattggggcatcgttccgcttgccactgacaatggcactgctgatcagcaacagttgttcacattgcccaacaatgtgcacctttacccgggcaaatcattcgcttctgccggcatttcagtgaacggtgctgaccgtccggaaattgttattttggatgtgcaatcggttctttgcacggaaaagcatgacgatgcagccacaaattgagcagaatgaaaactgattgggaccaaagggaaagtgccgaaaatgtcgtatgaaaacgatcgaacaaaaacaaattcgtatattgattttaccatttgtgcatttattagcagtaacaatcaacttaatcaacaatattaataatttttgtggtc

SEQ ID NO: 89767 - DNA, 496 bp, Heterodera glycines
caagtttgagcagtaaaatgaaactttttattttgttctgttcgattatttttgcgttaatgcaattgattttgacagaaaccgaagaaaagcaaatcgaagtgtttggagaagagcgcacaaaaagaggagacgaagggaaatgtgtcgacatcaaagaccaaatcgaagaagtgacaatcgaaggacagagaagggaagtggcgcttttggagggcccatgtttttcggaatgtcggctgaaattcgcccaaggcgcaaataaaagcatttggcaaagaatcaaaggcatttttggcggcggttcgaacaacgaaaagaaacggacggaggaggccaaatgctttgtccaatgcttttgtcgatgaatttccaaaagaaaatcgcttaattaattaattacccaattaattaatggatgactcacttaaaatgtcccattaaaatttttaatattaatacaaaatttctcaataaactcaaattatctccaaaa

SEQ ID NO: 89768 - DNA, 182 bp, Heterodera glycines
actaaaaaatactaataaataaaattcattttttaaataaatttaaagcgtaaaccacccaaaagggacaacaacacagcagcactaagcttaataatcagcaacaacaacaaaatgaaattgctaattgtgttgttgtgtgtcagcgcaatttacgcgagaagcttgcaaaagcgcggaca

SEQ ID NO: 89769 - DNA, 246 bp, Heterodera glycines
atgagaaaacagagttttcgatgtatttaacctcctcctcctcccccccctggcatggaattatttttaacacaaattttgcacatttagtttttttccttttgggtagggtacaccaggcatacactgtagttgggcattacggtaagagaatttgtattattttcgagggtgctatatgatgatactgtatttgttcattgtactataaatattttaagaataaaaaaaaaaaaaaaaaaaaaa

SEQ ID NO: 89770 - DNA, 637 bp, Heterodera glycines
gaggatttgtccagcaaagagttggccaagtgcgaactttacttggactttgtgaagatccacgacaacaccacagtttacaggcacattaatcgcattctcaatttgaacgcgaaggacgtcctcttggagatttcgaccgaactgcgcgacattgtcaccaccgttaccgaatatcacttcccagtcattgctgaccgcacttccaaattggtgttcgcctacacaattgacgttatcaacccggaacgcgactgcgcctttcacttccctaccaatgaattcgtcgcacttttatgttacatcgccgcttgttgtcccaatttggacactttttcgttgtcctttttgttgcaaggcgagttctctgacgaagacttcaagcagctctcttcatggctgtaccgcaccatccaaagtgttctttcgcttcgctgctccattctctgcatcgattgcaatttgaccatcgaattccgtgcttttttccctgaggctacacttatggaggccaataagacgggacacggtttggcaacgatgggcgagcaacggcgcacggatgacagcgaaacgacggaaatggacgacacgccggacacttattcaatttcgagaaagattcaaatgcgcgacg

SEQ ID NO: 89771 - DNA, 826 bp, Heterodera glycines
tgaagattcaatggctatgatacctttcaatttgtttctgctcagcgcccttttcttcacagcgaatgcatatgacttaatattaaagaatatttccgtgccagacgaattgaaggacaaatttgaatgcacttttgaagtgaaaaaagggaatggggagaacgaatgcggattgggagagttggaaacggacggacgacgaaacggcgaattgaaatgggcggaggacaaactgtgcatcaaagtgaaatgtgaagagaaaggaaacgataccaaatttgcattccgtctccagcagtgtgagctggtggacttaaaaaagtccgacaaaccgatgaaaaggcccatccatctgatcgactcgaacggatgtttggcctcaaatgccaaaggacaatggccaaaactcaatcctccactgaactattctttcgaagagagaacggtggaaatgcgcggatggacttttggcaacgaaacggacattggccaattccccgacgaagcgacactttcttgtgcggtcgaaatctgtgcggatccgtgtgaacagagctgtttggacaaaatttctcttgacaagtgcagcctcaatgattttatcggtgacaaaaatgccacggatatttgccacgaaggaaatgccgccgctgttcagggcacaatcagtttttgtttgatgacgcttctgatgttcctctgttcttccactgttttgatgtttcagtgataccaaaaaataattttattttgtttttataattctaattcgttaaagaatcaaataaatttttatttgtcaaaaaaaaaaaaaaaaaaaaaaaaa

SEQ ID NO: 89772 - DNA, 1026 bp, Heterodera glycines
gtccaattaagccacctggtttttgtgctaattacatatattttgtcaattttaatgtcagccaccacccattcgttgagcaagcaagaaattgcaaggttcagccggcaattgatgctgaaagggattggcccttcaggacaagaacgcattcgagaaacaaaggtgctaattattggcgccggaggattaggctgtcccgtttcaatgtatttagttgcggcaggcattggacgccttggaattgttgaccatgatgtcgtttccattgacaatttgcaccggcagacaatgcacgaccaaaaacgggtgggccagtccaaagccgattcattgaaagaatcattgtccagaattaacaatgaagcgaatgttgtggcttataacgtgttgctcaccagcaaaaatgttcttcaattgtttcgtgattatgatattgttgccgactgttcagacaatgttgccactcgatatttgatcaatgatgcttgtgtgttgagtggaaaaccgttggtatatggaagtgcgcttggttgggagggccaatttactgtctacaacaatggaacgaattgtccttgcttccgctgcatttttcctgatcccccaagtcctgaacatgtgatgagttgctcagaggcgggtgtgcttggccccgttgttggcgttattggaagtttgcaggccttagaaatcatcaaaattgctgtcagcggaaaatcatcatttgccggaaatttgtggatgtttgacgggtttgaaggcatatcaaaaagaatttctttgagagagaaaatgtcgaattgtgcgatttgcagtgaaaatccaaggattacagaattacaagattatcaaaagttctgcaggtcggatccctcaaataaggttcgctcattatgtttactttcggctgaacaaccagtgtcgccaacggatattcaaatttgcagaaccaaaaaatcacgcgcgtccttcattttgttagacgttcgacctcccacttcatttgaaatttgccattttgcc

SEQ ID NO: 89773 - DNA, 740 bp, Heterodera glycines
ggcgctttctccgcctcacatttcagctattccacttcagtcactgctgcttcttctgccaactcgaaaactccaacaaattgttcaactatttctgacccgaagactcaaagaccacaaagttcgcctgccggcacaatggccgaggggtggcagaacaggctggagaaccttgagtttatcgatgacgacattatttccggcgaggagtgtccattgattaggccgaattcgtctgggaaagtgccgacggcaaatgttccgtccaattttttgtcgaacacgacaatgcctcacaaactgcagacaacttcaaccagaaaagactcaaattgttccgtcacttctctgcttcccaatgctgaaaaagaatccgacaaatctttcgctggcgttgctttgtcgtgcggtggtggcaaaaaagcacaccaattgaatgacattaaggcagttgtggaaaagctgtcccggttggctttcgaactgtccgccactcgtcaccactcctcaacaattcattcgactctttctcatgtccgactgaaaccgagtgcaaaatttgaactgctcgacattgacctggagaagtttcaaacactgcagaacagtcgctcttccgcgtcgccatcctccgctggcactccctctgaccaattgccgtcaaaaacacggcttcagaatgtagcggcactgcgggcaaaagtgcgcggaattgcgcgacaagtggcacaatttgaaga

SEQ ID NO: 89774 - DNA, 635 bp, Heterodera glycines
attaagcgccattagtgatgatgtcaaacgcagcgacaccaaagttggctaaaaaagtgcttcgcaagaaaataggggaaattattgcgcagcaaatggcgggagaaaatggacgaaatatccgcgagagggaaactgcgacggtggcacaaaagctgttggtcaacgaatggttcccaaattcgacgcgactgtccatttacctaagcaatgagcaggaaatttgcacggacgacattgtgcgaactgcgctcagagagggcaaagaagtgttcatccccagattcaaaaagggggccgaacgaatggaaatgctccgattggaatcggagaacgaattcgattcgttggagggcactctttggggaatacgccaacactccgccagtctcagtcccccctcatttgaagaaacatccgccaaagcacctctcgatttggtcgtaatgcccggcgtggcatttaacacaagcggaaaacgacccggccatgggcgtgaattttacgaccgatttctgaatgaatacgcacaaaaataccgaacagtgccgagaacaattgcattggcattgaaagtgcaattggtggacgatttgccaatcgaaagcaaagaccgaatgctggacgaagtgatc

SEQ ID NO: 89775 - DNA, 645 bp, Heterodera glycines
cttttttttcgaccgaataaaatgttaccttcaatgtcaaaaaagcaaagaaagccagaacagaataaccggcaactacgcataattgaagtccaattgttcactccaactgcccgacgctacccacactttgattacgaagaaatgtgcaaggaattgggactcgaaatttcgaagcaaaagaaaactgcggagagcaattcttttcacgaccaagacgcagaagaaattgtgcgaagattggaggcgaaatatggctctcaaaccgttgtgtcacttccgtctacttggaagaaaccaagaaagaaaaccaaaaaagccatcaaatttgcgcctgaagatgtgatggacaaagggttaggctacgatttggaggacgatttcattgacgacgaacaagcgtacgatgaatgggtgcctacgacaatggacacggccaagcgaggtcattacgtgaacaaaggaccgttggagttccgacaaatcgactttgaccagacgacctcggaggaagacgaagagaaggacggggaggaggagagcaatgggacgagacgagagacgagcattttggaagcagacgaagaggaagcgatgaatatggaatgatcaaatttctataatttacatcattaatttattctg

SEQ ID NO: 89776 - DNA, 659 bp, Heterodera glycines
catttaagaagtgactaataatgtcgtcgtttggcactagcagtggaggtcgaattcgacagcgtggtactgttggaggtcgtggccaattcaacttgtccggcatggtggaaccacagcaagcttttcaaccaccaacgacacacccagccgactttagcgttagccgcggtcgagggcaccgttatctgcaaaatccattggaaagtctgacccacccgtgcaaacttgaagtggccatggccacccccgctgaagttgacttgtcgccggccattcgtgaaatcaagaaggatacgttttccgttggtgtcactccgaccacccttacatccgttggaaagggtccgtgcgtttcgtgtcagcaaagcgaagaagtcaaccgccagttgatggccgcgcttctgaaggaccttggaacttcgctcgtcaatttcgccgcgaaattggagcagccgtcgaaatgattggacaaatcgaaggacgaaaaagtgacgaagcgaaagacggaccgactaaagacccatttttaactgtgttcagttcctatctaaagtccttatcaattttatcataatacgtatgtttcacctaacttctcataatgacttaaataagaaaactaagaataaatccctatcataaaaaaaaaaaaaaaa

SEQ ID NO: 89777 - DNA, 360 bp, Heterodera glycines
gtttgagcttgtcatataactattatggagcatgttcaggcagtggttgaccctggcaaaaagtttgccaaagactcaattcgattggtgaaaaagtgcacaaagccggaccggaaagagtatcagaagatcgcctttgcaactgcgattggattcgccattatgggcttcatcggattcttcgtcaaactcatccacattcccatcaacaatattatcgtcggcggaggataagaaaaaggagaaaatgaacaaaaaaaagtccaccgttttttcacctgtgaattgttttcttcacctttgatttgttattgcacataaacaattcgcaattccaaaaaaaaaaaaaaaaaaaaaaaa

SEQ ID NO: 89778 - DNA, 562 bp, Heterodera glycines
ccgccaaatacttcttctacgacccggacttcgccttcctctccctgggcacatattcggcacttcgtgaaattgcgttcacccaacagttggcccaacatcgacccgacctccacttctattacatgggcttctacctgttcgactgtccgaaaatgcgttacaaaaatcggtttcggcccagcgaattgttgtgcgaccactgctttaattgggtccccgagacggaatgcgaccgaattctcgaggcgaacggcggccgtttcagcactttccatccgtccgctgagcccactcgtgccgagttggacagtgcccaaatggaccaaattctgtgccttcacggcgaccccccgcggccgctgactttcgccagcctttgcaactcattggaaacggccgctgctcatccatcatcttccacagacagtcaacgacagaacggacggggcgaggggccggagatggggcagcatgacgcctttttgaccgtcgatggcattggccccggcgctttgctgcgccaactgacggacaaagtgcgcacgtacgtccgccacgt

SEQ ID NO: 89779 - DNA, 616 bp, Heterodera glycines
gaatgaggtgcggagcgtttgtcaatagcgagcatgcgaatattgagcaattagtggctgctggccgccgtaatcgatcgagtgtgagcaaagcgaaatacctatttaactgaactaaaccgcatcacaatgtctgaagtctacggttttctcgacaggttcacaaaaagaataacgcgacgcagaggcaccactcccgcagcttcgggatttggagcggacagttcgatggatggtggcggtgtttcgaaggtgtgcatcggcctgtgcgtctgcattctgatccttttgattgtgttcgctgctctccttttgactgctgcgctatcgcctaaaagtttcgaaggcgttgctgtgctggggggcctcgcgagtcttttcgcagaataaatcgaaatgcgatgttcttcggtctttctgttgttgtcccataaggcataagccttaactactagtacttcattttcgagttgtgccctctattgaataccgtacatttgcttgtttatttgtactattgtcgttaaataataaatgcgtgcatgattttacacattattttaaaaagaattgtctttgataaattgttcgaatttgctaaaaaaaaaaaaaaaaa

SEQ ID NO: 89780 - DNA, 351 bp, Heterodera glycines
gtttgaggacaatttcccattttcgctctgctaaaatgcgcttttcccttctgttttctgtcctttcactgctctttttgatcttcgcttccgtcgacgcttttccccgtgccgattttgagcgaatttcgaagcgccaagtcgtcgtcaaagacaccaacgatttgccgaaatggtacggaaaataagccgacaaaagaaaagaaattggaggacggacaaatgaacgacagacaaatcggcgaaaacgatggaaattgttccttagaatagagaaaatctctaagtcgtaaaatatattttttctctgaataaaattatttgcgtttaaaataacaaaagaaaaaatgt

SEQ ID NO: 89781 - DNA, 633 bp, Heterodera glycines
ttttggcttaatcgcctgattctttttttatttttgccttttcttttattttttgcacttcatacaattgaaaatggctggcaaattcatcggcggaagaatgccttttcgtcaatcacttttggctccttcctttctcacagtttctcccctttggccttttcccttccgtcccaattccgcttcttcccatgcgcgtgtcttcgattccgaattcccttcttctcattctccgaaattgcgctgtgttttgtcggctaataataagacaaattcgcgggcccggcgttaccaccacccgcggcctcagctggtcatcttcgacaaggacggcactctgatctgttttcattctctgtgggtcccgtgggtgcgaagctttgccgaaaaagttgaggaggcgggcatcgatggcattgccccgaaggtgttccatgctctcggcttttgtccggttctcaaaaaggtaaagcgtggtcttctcgctgagggaacgatgcgccaaattcgggaccgagttgtccacctattggttcaaaacggtctcgaaaggcgcgagtcactgaacgtcgtggaaaaggccatccacggaacttcggaaggtccattcgcagaaagaacggtgcgtcaatt

SEQ ID NO: 89782 - DNA, 474 bp, Heterodera glycines
acaccattcaatcaaaaccaaccaaatccccactcattagctcattatgaaatttgcccctctggctttgcttgtgatccttttggtgtctttggtcgctgccgtctctgctaattccaacaacccttttgatgcggacgcggccgacaacggtggcatgaagcgcgtcaaacggcagcaacagcaatggcgttggagtccgcaacagcagcgctgggtgccaataaacattgcgaatgtgaacattgctcagaatggataagcgcactgagaaggagccgaaccgaccgaccgatggacggacggagacgaagacaaaatgccaagaatatgtgtgatcagtgacaaattcaaacccaatgccgcgccctttcgatttatttccgatggaatgacaattccaaacttttttttaatttgttaaaattaaagagtgcatggtaaaaaaaaaaaaaaaaaaaaaaaaaaaaaaaa

SEQ ID NO: 89783 - DNA, 829 bp, Heterodera glycines
agtttgagcaaacttacaaaaatacattttgaaatgccatttataaatctttggaccaaccttcccgaactcaaattggacaacgaattcagacgaacattcctcgcgacagtggccaattcaatgcaaaagccagtggaatcgacagcactaattgtccagtcgggaccaaactgttgccaaatcggaagtgaccctgccgaaccagcgatgattctgcaaatcaaatcaattggctgtgtcagcgcagatgaaaatgtaattcactgtaagaacatcagcgaattcgtccaaagtcgccttgggattccgcccgaccgcgtgatgattcactttcagtctttggagaagcacgaagtcgggaaaggaggaacgacggtggaaaagatgtgccagtaaattaaagaaggaaatggatggcatgttcaatcaccgacttggcaatgttaagaaatggaattaaaagcaaaacatttataattggaaattgaaacaagcaacaatgaattttgtttggatgctttccgtcagtaaattctcaagaaaagggaaagattaattcaagagaacatccaaaaagagaacacggcaacaaaggaaatgaatcaagaaaatgatggatcattcgttaaacttcttccgcttagaaagtcctccggccgcgggtgtgccttcgaatggtctcttgaacccaccaccaccgccccgttggccacggaaattacccccatggccccctgaagcgcctctgaagcctcctcctccacgtcctccgcctctaaatcctcctccacctctccctccgctgcctgcgcctgaagcgttaaag

SEQ ID NO: 89784 - DNA, 475 bp, Heterodera glycines
gtgccaagtgccgatttcttcggcggcattggccaccgcctttcaggcgacgagaacgttgcgatggtgttcatgctgttgatgatcaccattttggcaacgaatacggccattctgatcatgcaaattgtcatgttttggacagttatctcacggccaagggcagcagcaggtgaacagcagacggagaagaaaaagacggacaactacaagaaaatgatgagcaacaccaatggaaaagtccatttggtgtcatcgcctcgcaattcggccgaattgctattgtttgaccgcaaagggaatgccgtcgtctgaacgctgtgcctttcggcaatttgctagaaaaaaaaaaaataataattcattttttgttttcctaaatttccccattttacagtaacctcacccgtttttttgtactgctattatcagtaatttcattaattgacaagaaaaataaaagaatgaccattta

SEQ ID NO: 89785 - DNA, 654 bp, Heterodera glycines
cctcgtgccgaattcggcacgaggccaaaattcacaacaatgagcatcattcgacgacaattcttcgccaccaaactgttctctccccaattggctagcaacaaaatggctgtgctcccagtgcgccattgcgtaagcgtcgccacgccaacacaaaatgatgtgccatacaatccgtcgcccaccaccgcgcaaactttggacaccttaggcattggcacgacggtgcagccaccggagccaaaatggcaaaaggccggactccgaattgagctaaactgtgccgacgagcaaatcttccagagcattgtccaagagatcgtcgatcggttcggctgggacaactccgcctatgactacgccatgtggcgaaaagcgtttgggcccaacaatttcggcatgttcttcgccctggacgaagaccgattgccgatggcgtccacaagcatggcggtgtacccaaaaattgcacattggagcatgtattacgtgaaggaacgctaccggggacaccaattgggccgtgcgctcactcgacgagccatggaaatggctggggacagacacattttcggttacggagttgctgaaatgtgggccaaatacgcggaggagtacggcatgtgccatttcttggactggcagctgtggtca

SEQ ID NO: 89786 - DNA, 733 bp, Heterodera glycines
ttaagatataaaaaagtccccctaattggtaatgtcttccgaaaatcctccgtcaccgatgcaacgccaacagtcatcggtgcagcttcaacagtcatcagtgtcggatatgggcgacccggacgattgcttctcaatgttcctggttttcatgagctatgtgctgctgttcttcacctttccgtgcactatcttctcttgcattaagattgtccagcaatacgaacgagcggtcatttttcgactgggacgtattcgtcgtaaagcgcaaggacctggattgttcttcatccttccatgcgttgatgaatatcgctgcgtggacttgcgcaccgtgacttgtgatgtgccgcctcagcaagtgctttccaaagattcggtcactgtcaccgttgacgcggtggtcttttaccgtgtgttcaacgcaactcaggctgttatgatggggaacatttcgtcgtccaccactctgctggcacagacaactcttcgccatgtgttcggcacaaagactctgagcgaaatactcggcaacttcaacaagatcaaccgtgaaatgaagttgtccatggataagccaagcgatgtgtggggcgtggaagtggagctggtcgagctgaagaatgtgcgtttgccgcacgacatgcaacggtcgatggctgctgaagcggaggcgggacgcgaagcacgggcaaagatggtggcggctgagggcgaccacaagcggccaagg

SEQ ID NO: 89787 - DNA, 631 bp, Heterodera glycines
aaaaagtggaaatacaatttattttattatttgtaatggaagaacaagggcctttcttaattgattggaggacattgttcggaaaggcaccatttgagcttcggaaacaatgcattcgaggacatttgcgaaattcacatctgagatccattgtttggaggcttctcttaggagttttgcccatggaggacaggacacaatgggtcgaagtcattggtcaagaacgtagaaattataccgaattgagacatcggattgagtcaaacccaagaattaataattcgccagaaggaaagaattttgatggtaacaatccaatttcgctcaatgcagaaagtccgtggtgcagacattttgagaatcaatcaacgaggaaaaacatcgagaaagacgttgacagaacgtgtctgaaaagttcgaaacaatgccttcgtcagcttcacattaccgtccaatccgcggaggaggcaaaagcctccgccccctccacgccttcgaacgtcgccaattcgtacgccgttcaaattcgctggctcagttccgaatttctcaccggtttggcctacacacttaccgtactgtgcaacattcagtacagtaactttgagagagctcaccgctattttggcac

SEQ ID NO: 89788 - DNA, 630 bp, Heterodera glycines
atttcgagcttttaccaaaaaaatggcatcggagaacgaaattccggataaattcttagggaaattcaaattggaaaagaatgagaagttcgacgagtatttggccagcaaaggagtttcgtggattttaagaaaaatgatttgttttacgacggtcacaaaaattttcgaaaaatcagaagcggaaaagagcaaatacaacgcgtacaaccaaagttcgaaacataacacaaattgggagggatggaaaatcggagaaactttcgaaggcattgggttggacggcaaacagcacaaaataaccttcgatttgagcgacaacggcgacacactgacggagaagcatttgcgcatggacaatccttcggacgtgggcgaagtgtaccgttactcggtggacacagacagcggacatttgattctgactctctccaacgaatcactcactgcccgccgtttcttcaaacgaatccaatagaatttgacttgttttcttttgttttactttgagacgtgcttttttaactttcattttatttaaacacaaaaaatgttttgcctttttttgtttcttaatccaattatccataaaatattcggacattaaaaaaaaaaaaaaaaaaaaaaaaa

SEQ ID NO: 89789 - DNA, 631 bp, Heterodera glycines
gagatgtttgtgaagactttttctcgttcggttcgtaattcaactcgctttttctactcaacaaacaccaaattggatccctcaaaatggcgtattgaagtcgcattgctcatttaccgtcctccagttgttgctccaccaatgacggaagttgaagaacaattttataggatgtctgaatttgccaatcagaagtcgtcttacaaatgtgactttgaacttcagttagaaaaagatgaaaagctattggagaagcgacgacaacttgaaaacgaaggaagggaccttagcgcacttgacgaagaaattaatgtctcttctactcaacttagagatgattggttcgagaaaagtgaacagcttaccaagcagtacaaactggattcgccacaaacaacgacggatgaggacaaaaatctaaagacttttggaaggatgcagcaaaaaaagctggctttgcttgtgaagcaacggttccctgatgctcttaattctgattatgtatcgccatggattttaccacagttaatacgaactggcgatgatacattgcgacagactgcagaaaaatgtattgctcatatgtttccaaattttgatcaaatgccaattggatttcaaattcttggta

SEQ ID NO: 89790 - DNA, 627 bp, Heterodera glycines
cctcgtgccgaattcggcacgagggtttgagtaacaacaatgaaaagcttacaatagttctgctatatatataacttacctattctttcgcacatttttcacaaggatttattgaaaaacaaagaaatgaacgtgtcaggccccgcgattgatcaaagtgaaaaaaatcggaaactacttcaggatttgcaaaagaccaaacaacaaatgatgatgaggggtgccagtgctgtgagtcgttccgcccaatcgccacttttgccttccgcttcatcgagcagtttgtcctccctacaacaagcatcgactgatagtacgcagggaacattcgccaccagtgggcaacaacagcacggcactttagcgaataaatccaacacaatgctcgccatggaaatgatccaaaaatccagtataatcttttacccgaccaactccaattatggcaaccaacttctgcccgggtttccccgttttttggctgactgataaaacattttacggaaaaaaaaatagtatgactggggtttccgcgttgtgtacgggcggtggctgattgacggatatccgaaatattacttttttgttaaatttaaaaaaaatagggaattttgagtccgacgttgc

SEQ ID NO: 89791 - DNA, 646 bp, Heterodera glycines
gtccaattaagaatgtcacccaaacaattcaaactgacccattcgctgttttcgttccaacgcatttcgcaagcggacggagtcaaacggaaacaaatgaaagccgacgaaagcatttgcccaccacaaaggaaaaaaccaagcacttctctgaaagaagcggacggaagcgacggcgccgttgagaatgtccaaacgaaggaaaatatgcggccaattttggaagcggagagacaccaacagaacgacgatggcacaggggaaatccgttcgcctccgtcgtcttctcccactccgtggcatccttcgcatgcgctcgctgaaccgacgtggcagaaactgttgaggaaggaattccaaatgaaatacatgacgaacatttgttgctttttggaggaacaagccaaacagggtgtctccgtttttccgcctcgtcatctcatcttcaacgcgttcaatctgacaccctttaacacaatccgagttgtggtcatcggtcaagacccctaccacaacttgggacaggcacatggtctctgtttttctgtgccaaatggtcagccaattccgccgtctctcaaaaacattttcaaggaactctcgtcggaattccctgattttgtactgcccaaacatggcactctcg

SEQ ID NO: 89792 - DNA, 616 bp, Heterodera glycines
caagtttgagaataatttaaatggcaaactttccgcctaattctgacgaagagttcgaccgtggcaatttttcatcattgtcgggaatggtcggcatgaaccaacgacacttggactggttaatgaaaaacatatcccgcgaagacatggccgaactccaacaaaggacggggcaatgcgcccgaaagtgtgctgtgacgtatggaggtccgatcgtcgtcgttaccatcggtttcctcgagtttttgcgccgtaaacagaaccttccgatcacagcgccgcgctttttgatcggctaccccattatgtgtctcacttcggtggcccttggctcttccatcggcttcaaaaggtcgggttgcggtgcggaaatgcgactttttctcgacaagctctacgccaaatacgactcccaaatgaatgccgctagcgctcagatggcgccaggcgttggcggtggcacttcgccaacaaaaacctacgcccaattgcgcgaggccaaccgcgccggtcgtccaattgaattgggacagttgaagcaacagcaaacgcgacaacagcagaagaaaatggacggcagcaaagcgacgacggaagggactgagggcagcggcgg

SEQ ID NO: 89793 - DNA, 388 bp, Heterodera glycines
ccaagtttgaggcattaattccattgcttcaaatgtggtacgagagattgcccatgattatcgcggccgttagtatccccgcattttgtaccagcgactattacccactgcattggtatgggacgaatggctgcaaacatcatcgagttctgaaaggacatgagcagtcggctctccttatccgtgacagagagttgaccggctacgaatacaatttgatgggcatcgactcaattccggaggaggattaactgaccaacgagtgggattttagaacattagacgatgacgaattcctcgattatccattatgctgtctaattgtggatataatgtttaaatgaaacaatgttatgtgcaaaaaaaaaaaaaaaaaaaaaaaaaaaaa

SEQ ID NO: 89794 - DNA, 674 bp, Heterodera glycines
gtaatttacaaataaatttcgcaaatatttgaagtcaagtcccgttttctgtttttttcccgtcgatctcgaggcattattttgtgccaatgcttccgtcgccgtcattttccattcaattggtgtctcgtcttttttcccagttttttaatcgacccttatgttcgtccgcacatttattgtcaaaggacccttcaaattctcgcaattccggtcgcgatcacaactttttcgaaggcctctattttgagggagagataccacgagatcggatcaaacagaagtacactttgtccagcggaccgggcggttcgaacgtaaacagtcaccccacaaaggcggaaattcgtttcactgtcgacgaggccgattggattccgcggagagtgcgcgaacggctggtggaacgatacccacgctacatgaacaacaggggcgagttcgcattcacttcgcagaagacgcgctaccagattcaaaacatgaatgactgttttgatcggctccataacatgctgctgaactgctccgaggagttggtcaaggaagagcaccgaacgcatgtttcaccacaacacatcagcataatggaagaacggaaaaaacgctccgaagaatttcggttagcatcaaaaaattctcattcgcggaaaaaacaaaaccgacgttcgggc

SEQ ID NO: 89795 - DNA, 716 bp, Heterodera glycines
caattattgaagtgccactgaatccgacaaatcccagccaaccgaacatggaatttgtttacgaggctattgccactttattcaccactcatttcaaaaatttgacagagccgcaaattcgagtcacagtcaaagggttcttcagctttaaccgcacagttacaaagatgcgtgaacacatccgagacttcctcgtccagatcagggaagaagccggcgacgacactgcggaccttttcttggaagagaaagaggctgagatccagcgcattcaatcgttaaaacaagcgattcccggggttagaaatccgaacgaattgttggaggaggacatggtctgacaatgcgtccgtcgggtgggctcggccctgccttccccgtttttgttttttccatttgtccatcctgacattaaacgatcgttcgtattttttctctgtgcccatttgaattcctttcgtctgtttttgctctccttttcatgttttgtgtccgttctgctgagctttcccctgcttcttctaatggagtttgtttctttgcttctgattgtctctactcgtctgttttggtgagagatttgattgtttctgagtgtgttcctccatccgttttgctttatgaattcgaccattgtcgaccctccattattcttagtctgtcatctcttttttaaatattttttgtctgaaaaaaaaaaaaaaaaaaggaaggag

SEQ ID NO: 89796 - DNA, 1217 bp, Heterodera glycines
agcagtcgctggttaccataaattatttcatgaaaacgctttcctcgagttgtgaagctgttatattcgtcttcctcggtctttctgcagtttctaaaaatcacgatttggacttcatcttcattttggtcactttggcttcttgtctcgtctatcgcttcatcggcgtcggtgtgctcacttatttggtcaataaacgtcgcgtggaacgcattggccttgttgatcagttcatcatgggttacggagggattcgtggtgccgtttgctacggtttagtgatgtctttggaccccgaattggtcgaatgccgcaatatgttggcaactaccacaattatcgtcatccttttcacagtttttgtgcagggcggttccattgaaaagttggtcacttacttgaaggtcaagcaattcgaagcacacaaaaagaccgtttttgagatgatcgccgataatgtcagcagtcacatggtcggagggatggaaagtatcgccggactgcgcggggattattggtttcgaatgaagcttgaacgctacaacaaaaagtacataaagccgttcattatgctcaatccgaatgacaaggacatgaaaattgtccgacacaatgaggagattcaggtcaaagaagcggtcatttacttgaaaaagcacgggtcattcgccggaatgcctacggtacaaagcagcagggatttgtattcgcaacagcagccgtccaacggaattggcgcgccgagaatgagcttctcgcggctgacagtaccgcaacggactccccaggagagcattccgaggaatgaatccgtgggaacctttgtgaggaacaaatttgcggagcttcaatctagtgggcatcgctacagtcgccattacaacgaccaggacctccgccccgttcagcacagttttagcatgggcgacgatgaagagccactggacgatgaccaacactacaaaacgtttccgtacaacaaagcgactcaacgtgaagccgtccgactaatcaatgaagccaggcgtaaatcaagcagccaagtgaggaaaagtagcaaaccgacggccaacaaaatggacacattactcgagagcaacaaattcattgttgacgaagaaaatgaggaaaaggaagaatgatgtcagttcccatgcatttaagttatgggcccttttgttttcatctggcagagctttgtacacaattaaattttt

SEQ ID NO: 89797 - DNA, 805 bp, Heterodera glycines
ctgaagaatgcctgtcgtaaaaccacaaacggacagcgaatttacaaaatttcttttaaacgttgggactgctccgtgtattgttgatttttttgctacttggtgccaaccatgcagtgcgatcgctccggtttttgacgaattatccaacaattatcttaatttgaaatttgttaaagtggatgtcgacaaatgcaaagaaacaaagaacacatacggcgtcagtgcaatgccaacattcattgttctccttaatggtcagcgcgtggaccttttgcgtggtgccgacaaaactgcacttcagaatttggcccacaaatggtccaaaaattgtccaactcaaatggtctcaccgattcctggccaatgcgaattgtcaccgcttttcaacaaaatccaatgcgaatgtttgaacgaggacgattccaacaatttgaacaatttgctgaacggagttggtcccctgatcagtgattgtgacgagcaactgctgatcagcgtgtcgttcatccaaccggtcaaagtgcactccgtccttttcaacggccccaaagagaaggcgccgaaaactgtgaaaatttttgcgaacatcaccaacactcttgggttcgaccaggcacagtccaccgagccaattcagtgcatcgacttgtccgaagaaaaactcgtcgcgctcaaatacgtcaagttccagaatgtgttcaatctgcagtttttcgtggaggacaatgttggagggggcgacaaaaccgttgtcgatgagtttcgaatttacggcacgccaattgcgaagactacgaacatg

SEQ ID NO: 89798 - DNA, 423 bp, Heterodera glycines
aaagggggacgacgcctttgcacaaggcagcatcgcagggccatcaacgcattgtcaatttgctgttaggctgtcgaaaaaacttgcaaattgatttgccaaatagggagggcgacacggcactgcatttggcatgcgaagaccaacagatggatgttgcgttgcttttggcacgttccggggccagcatcgaaaagaagaatcgccagaacaaaacgccgattgatttggtcgacggcaaagaacagaaactgaaactgatcaaagcgagtgaatcggtgaagccaactgccggaacatagccgaattcctttgttaaatcaattctattgtttttcaatgtaattgtaatgaatcttttgatttcacttgaccaattaaaaattctgaattattagaaaaaaaaaaaagaaaaaaaaaaaa

SEQ ID NO: 89799 - DNA, 622 bp, Heterodera glycines
cctcgtgccgaattcggcacgaggattccgcttgccaatccgatgaacaaatggcgcttggacctttgtgggtccgccgggtcgcggacgttgatgctgagaagtgcagcagctgaccagagtctgaacccgcccggttataatcccggactgagcactacacaacaaaatgaatcggccaacagagccgagcaacagcagcagcatttgttgagcaaaagggcgtgggatttggccctgcagccggtgaaatccttgccgatgaatatgtttatgatgtacatggcgggcaacacaatctccattttcccaattatgatggtcgtaatgatggcgtggagaccgatgaaaactttgatgtcagtcaatgctgcttttaaaccgctggagcaagagcatgtcggctcactttggatccacaaaattgtttttgccttggggaatttatgcgcaattgcattggccgtgtacaaatgtcacacgatgggtcttctcccaaaccatgcttccgactggctcgattttgttcctcccctcgaaagagctcaatatgcactgtttaatgacatctaataaaaccctttgattgtttttaaatcgatttttctccataaatatttta

SEQ ID NO: 89800 - DNA, 546 bp, Heterodera glycines
gtttgagataatataaaacaaataaaacaatatggaacgcacattcatctgtttgaggcccacaaatccgtcgccggttggacgagtgattgcccgctttgagtctaatggactcaaattgatcgccatgaaaatgattaacgctacacgaaatcaagcgactgagcattacaaagagtacagagacagaccgtttttcaacaaactgatcaactacatcacgtcagggccagttgtggccatggtctgggaaggaattgactcagtcaagaaaagtctgcatctgctggagtcggcatgtttctacaatttgaggaatatggatgagtgccgtgacattgtgcgccatggttcgtgcaatgtgcaggacgcacaacgcaaaatcaacatttggttctcaccaaatgagttgcgcattaattccacaagcagataatcccaagcgaaattattatttttttcatttttattttaatttatattaaattgaataaaatcatcatttagaaaaaaaaaaaaaaaaaaaaaaaaaaaaaaaaaaaaaaa

SEQ ID NO: 89801 - DNA, 401 bp, Heterodera glycines
caagtttgagagtgatgcaaaattctatctacatcaaccccgatatcgaaaacaactacaaccgggctgtgccaccggctccgaacaacgcggttgctgtgccaccggctccgaacaacgcggttgctgtgccaccgcctccgaacaacccggttgctgtgccaccgcctccgaacgatccgaatcgaggcggctttgacgacacggtgtcgttgcttgggactcacccggtgccgcgtcattagaaaggagatgcgccggtgattcgtgtaatttcatcgtgtggatgaattgatgggcccacgtttgattattggatcatcataaatgattgtaaatcttgtgtttaaaaaaaataaatcgaagtaggccaaaaaaaaaaaaaaaaaaaaaaaaaaaaa

SEQ ID NO: 89802 - DNA, 620 bp, Heterodera glycines
agaaaaggaaacatagtaaaaagattaattcttgttggagacctgacatttcactatgtttcccagaccatccacgtctttcccaaagatattgaacaggaccaaattgtgccaagcttctgtggtcggctcgaaccggacaatgtcgtccagcgacaaactgcagcagcaaaaggtgctcaccgtggacacgatcaaccccaacgttatcaccatggaatacgcagtccgtggcccaattgttatccgtgcggttgaattggagaagcagttggcgaaagagtcgttgccgttccccagcgtgatcagagcgaacattggcgacgcacatgccatgggacagacgccgatcactttcattcgccaagtgattgccggcattacggagcccgcactgatcaagcaacagcccaacctgttcccggaggacgtgcagcgcaaggtggcctcactgttgcgcgcctgcggtggcggcagtgccggcgcgtacacacagagcaccggcattgacctgatccggcagcatgtggcccaatttgtggaaagacgtgacggtttcccctgtgatccggaaagtgtgtgcatctccggcggtgcgtccgagtccattcgcaacgtgc

SEQ ID NO: 89803 - DNA, 637 bp, Heterodera glycines
ataaagcatattttgagaaagcattgcatcgaattgcttgcatacaaatcaaaaatgacttcaagaagtgccaaaagaagtttgaagaaaagtgatggcttgtccggaaaagtgtccgtctcaaaagcacagcaaattgagcaattttttggcattgacgaggcaaaatgtgaaactgccgagcgaacgtcgaagtcgccgagtgccaagcgaagccgaaactcaacaaacacggcagtgcaattgctgaaaaagatggcgaagcacaaaaaggaattgaacagcagcaaagaaacgcgacgagaagaggacgagagggaaatggagaacattccggacacattggacgaattgaacagtcgggggacggaggacgaaaggggcaaaggaactgaaagtgtgcagacggtgaacgaattggacgaattgctcgactcagagacggccaaacgcattcaatcggaaagcgaagtgaccatccgattttgctgtccgctgctcgccaatgtcggctccgttgggcaattgttttccatcgacgacttttcccccctcaaaactctctcgtcgtcttccaatctttccgtccctccctttctctgtccgttcgttttccttttcctctctcgccctcact

SEQ ID NO: 89804 - DNA, 627 bp, Heterodera glycines
gtttgaggcaaggtcgaaaatattgttttattatggcaaatgaattaatttctcccacacctccggacattgagaacatttttaaaagactacgagcgaatccatccaacaaagtctgttttgactgtggtgctcgaaacccaacgtggtcttcagtcacatacggtgttttcatttgcatcgattgctcttctgtccaccgtaacctcggagtccatttgtccttcgtccgttccaccaatttggacacaaattggtcatggattcagcttcgtgccatgcaaatcggaggaaatgcaaatgcggtggctttcttcaagcagcacggatgcgagtcgaatgatgcgcaagtgaaatatcacagcaaagctgctgcgatgtataaaggtcgcatcatcgacttggcaacgaaggcgcagcaacaagcgggtagcaatatatttttcgatgctttgaaggaacaacaatcgccacaatcaaaaggtccgaatgaatccgaattttttggatcacatgaaactgaagagcataccaaagaaatgaaagaggcgtcgctttccgaaattccacacgcgcccatccaaaaaacgaagaaaataacgcttggccaaaagaaaggcggcagtt

SEQ ID NO: 89805 - DNA, 881 bp, Heterodera glycines
caagtttgagccttttttaaaaactagcaatgaaatgaaaaagaatgacttttgattttgaaaagagaggtgacaacgccgacgatgaggacagctctgccgatgaatgttcttcaagcactggtagcagtacaccaaacagcgaatattcggtggatgagataatcgggcacagaattgaaaatgggacggacaaatggagggtccgatggaaagggtgggcgccgaagtacgacacgtgggagccgcgtgagaatttctccaattctatgcatcttctggacaaatttgatgccaaacgacttgccggacaatgcaaagagaatgaggctgttgcaacccatccaatgtccaataataataatcagtcggattatgtcaaaaagttgcgtccccatcgttcgctgtgccttcctccgacttccgccgctgtgccatcggccggcagaaaaggaccaaagaagaaaggaagtgccaaacgaacgacggcggcaaaaactcccgtttcaattccacttttggaggccaaggcgatgctgcacacgtcgagaatgcccaaggacatgtcggagcgtgcgaaggagtgcaaagaaattcggaaattccttttgaattgcgtcaaacggacgaatgcatcggcgaccgccgccgcgcctcgcgtgctgtacatcagcggcgtcccgggcactggcaaaaccgcagcagtgctgaaggtgcaaaaagaattgtgttcggaaaagaagacacccaagttcgactttttgaacatcaacgcgttggaactgtccgacccgcggcaattgttcaccaaagtttatggacaagtacaaaacaattgcacagggacgaggaagaaaatatcggcaagaaatgcacagcaa

SEQ ID NO: 89806 - DNA, 402 bp, Heterodera glycines
ggaagttaaacataaatttgtgcttttttgctgtttggataattactacaaaatttgttgatgttatcattttggtaattttcaatgatttttgccccttttctcttcgttttgttcctttttggctccaatgaattaaacttattattggtggacagcagcagaaacattggaccaccagaagcaggcgaaagttgcgggtgcgcagataaacagcccgggactcttctgttggtgtgcattatcaaatgccgggacgaattggtgaaaaatgtcgaaaaaaagaacaatggatgattaaagtgaagacggataaataaagtatttaattagccaagttattaattatgcatttcaattaatttaatacgcaatttaataaataaaaattcattttaaaaa

SEQ ID NO: 89807 - DNA, 547 bp, Heterodera glycines
gccgaattcagccctaaaagcatccttttatattaaatcagcaaataaattaggaaaatggtgtcagtgaatggacgaaaggtgaaaattgtgaagaagcggacgaaccgtttcactcgtcacgagtcggaccggtacctccgcgtcaaacccaactggcgtaaaccgaagggcattgacaaccgtgttcgacgccgcttcaagggccaacgacggatgccgaagattggctacggtaatgctcgacagacccggcacatgttgcccaacggattgaggaaggtgttggtgcacaatgtcaaggacctggacgtgttgttgatgcagaacaaacgctattgcggtgagattggccacgcggtgtccagcaaaaagcgcaagcaaattgtggagcgtgcccaacagttgcgcattgtgctcaccaacggaaatgcccgactgcgcaccgaagaaaatgaatagacggcgacgaacagacggaacaaaaagaactgttgaaatttttggaaagtttcaattgaattgttttgttattttatttgttgaa

SEQ ID NO: 89808 - DNA, 783 bp, Heterodera glycines
caaccgaccaatttcgcctttcaaaaatcggaattgctcagaatgaaggagcaagcagaacaaagcggcgatgtcgcgagggtgcgcgacttgcagcagcaagtcaacgaattggaagagaaggccaagaaaattgaacaccaaagaacgaagaacttaagtgccatcagtgccatcaaccagcggaatagggaccatatgaaacaaacattccttggtgccggaatggtgcgggaagagcaggagaaggacgacgacccattcacacggaagtcggcgcggatgaaagtggtctcgggatccgtgaagtccaaaaccgccggcgaaggaagtggcgccaatgccgagttatccgttatggacacgatggtttcttcgttgggttcgttgtcgtcttcgtcggagtcctctccaaacaaaaaagtgcaacttccctcaactcacgatttattcaacgcacatggaatcgacataaatattgacataaaaatgcccgccgtcgtcggcggttcgttgagagcgccgccaattaccgactcacaggcaccacgaacacaacagaagacgagcagctcgcggacactcacattggaagaatacaaaaagaagagaggacttgtgtgagaatggacaaaagggggagcgacccactgtaaacaattcttacgtcattttgtttcacatgaaattcatacttttcgtatttgtgtgatcgaattttctataccataaaagataccaagacaaaaaaaaaaaaaaaaaaaaaaaaaaaaaaaaaaaaaa

SEQ ID NO: 89809 - DNA, 475 bp, Heterodera glycines
  unsure (1)..(475): unsure at all n locations
gtttgagggcacaatgcaccgcttctcttccacctgttgatgaggcaacacacttcattctcccggcttccggccgccgacagcatttcccaacaaaaccaacaccaacaacagcaggacatcaacaacaacaatgccgtagtcgatgataatgatgttgaagccgaagatgaagcggcagcagcggaaatgccgggggcgccggcggcgacggcacagcagcgctgggaggactcaaccggcggcggcgacgatggcatggaggaacagcgacgggacggaaatggcggggacgaagaggaggtcgccggcgatgaacaacaacagttacaacaacgacgacaacagatgttcaagcggaagttgttgttggcgcaggacaacgatggacggggcccggggcaagcggtnnccncnacngcgggcgaaacgncgccgcgggcgggggcccgctcgcctggggngctgntcccgc

SEQ ID NO: 89810 - DNA, 635 bp, Heterodera glycines
gttctttcccgtgttttgagctgttcaaagtaatgctcgaccaaactccgtccacttcgtcgacggcagtcacttacgccaatctgagcatcgatgaccgagacactctgatgaaaaatctgcagaaattgttcaaaacgcatcaccaagaacaaaatgtgacaaatgatcaacagcccgggagcagtacatccaaagggaccgactcgaggacaatgaaaaccgccgcgaggggacaaaccgagtttccgtttttcactccacgagacagcagatattccacgctgaagtcgacggttgtggatggaaaggccttaggctgttttatcattggcggagaatgtcgcttgagcttcccacaaatgcgggcgttgtgtcttggtgaaattccaacccaaaaaattgacgaatcaatgaaattgttggccattgtaaacgcattggccaccgaagaccaactcactgtgctgaagagggccgggttggcccaaccatcactgtcaaagtgcgaattgatcaccaaaaccaatgcagaaagactcatttccctgttgaattccactggcacttctccaattgacgaggttcagcggtcgcaattgcattcgtttagggtagttcacgactgttttggc

SEQ ID NO: 89811 - DNA, 330 bp, Heterodera glycines
gagcgggatatgcccgagccaaatttgccacttcctcgcaaaagagtcggcttcaaagagccgcacacggggcttgtgaaaaatgatttcttcgggtattggtacttacaatattgccttgtgaccggtctttacatgttggagccgtgggagaggaaaatgttcaatgtttttgtcacgggtttcattgccgttttatgcagtgccttttatgccttgtggaatgcgttgattaattaatttaattttttaaaagcgtaaatttatttatactgccaattttatttatttaataaagagtcaaaagcaaaaaaaaaaaaaaaaaaaaaa

SEQ ID NO: 89812 - DNA, 797 bp, Heterodera glycines
attcccttttctccatgcttcctcctctccatgccttcctttgcctcattttcttcgtgtcttcgtcaatttcgccccattcatccgcttcttctgtccattcatcagaggatgagttgtctcagatgttgtcctccttatggcacatagactcagaacatcggaaactcttccacaacgaatttcggatttcgtcaactgatgacaggggccgtttggtcgctgtccttccccgtccctccgtactcagtcgacccatcgtaacggcatttggccagttgtgtaatgttctccaatccgtcaacccaaatcagtctaacaacaattccctgcgacaaaaggtcgacttatttttagccgaaatggacaaaagcccaattttcaaaaaagcctccgaattttattctgcccatcgtttgtccaattcgaagtctttcaaacagaaattccattctctttggttttttccttcgtcctccattccatttggctctttgatgtgccgcttttcggctttttccggcaattggctttccttcatttcggcacaaaaacgaatgaacgtgaaacgattggtggtggaaagggaaagtgaggacatggcacttgtagagtttgggggaagtgacgccggaggggcaaacgttgcggacatgcgaggcaatgcgcagccgcagaaacggcactttgcgctgggggacagcgtcgaatttgaactgtccgccctcactttgtgtgcccttttgagaagagaaaggcatcaacaaaagaagcgatgttcatttaaaacggatgaa

SEQ ID NO: 89813 - DNA, 747 bp, Heterodera glycines
tttttttttttttttttttttttttttacggataagttttatgctttattgactgtagagagatcaggagtgaacgaggcaataatggtgatatcgggataagaagtgggggaatactacatacattctatgtcggttcacttcctgagattttcaatattgtctacgctttccaacatatagaccatccgtttgtcgcgctcctctaatttctcaataacagccttgtgtttcagggtttcttaaataatctggatttttgtttttaataaatattgttgaccttcgaaaaaaaaaaaaaaaaaaaaaaaaaaaaaactcgaggcgccgtttgactcccacgaaaaaatgcgatggcattgcattttttgtgcatctttccacctcaaattcaacccctaaatctggtcgatgagtttcattttcctttggctttttctgaatttgttcctccccaatggcgttgaagccatgccctattattacaattctcccaatttgcagcagcaaaagccctttttggccggcacgcgtttcaacatgggcatcgacccatggagcggcagccccgaaaggggaaacatcggattcggaaacaatttggctgcctttttttacgtttgccacacatgcagcagaggaagaagataaaaggagcgatcggtagaaaaacggcgttaatttttaaaaatttcatttgtttacaataaataaaagttgaaaaaaaaaaaaaaaaaaaaaaaaaaa

SEQ ID NO: 89814 - DNA, 626 bp, Heterodera glycines
caattcctcaatttgttatgcctttcctcggccctttctttgttttcgtcgtttctccgttctttgtttttgggtccgcttactctgaagatgaaccggtcacttgtggttccgtcctcaaattacaaagtgtcgccgacaatgtcaggctccattcccatgaggttaaatacggttcgggctccggccaacagtccgtgactggcaattccaacagcgacgacgtcaattcccattggcaaattattggcccaaattctgagccttgtcagagaggtcagccggtcaaatgcgactcgtccattcggtttatgcatctccaaacgcgctgtttcctccattcccacgaattctctgctccgctctctcgtggaatgcaagaggtttcttgttttggcaaggaggggcaacagagtgattctggcgaccattacaaagtcgtgtgttctggcgatgtttggactcaggacgagcagatcaaattgaagcacgagaatacgggaaattatctttcaatcagtggccaacagtttggcagaccaatttctggtcagcgagaagtgattgcggcgccgtccgacggccacaaatcgctgtggattgcagcggaaggcattttcatcaag

SEQ ID NO: 89815 - DNA, 481 bp, Heterodera glycines
aaaatttctcccaaaatgcgcacgtcccttttgatccccctcagccttttctctttgatcactttgctgttcattgtcagctttagtgaagcggacatcgaaatggacagtttgatgccacgaacgaaaagacaatgctgtggaggatgtggctatagtggcggatacggtggctatggaaacgacggtggtggacaatgctgtgatgcttgcggccagtgcggcagcggggggtacggtagcggggcgattataatcactaccggaggcggtggatacggatatggtggttacggtgacggatactgttacagttgcggtggtggaggatgctacggatgctgtggttgagaatgactcgaaggcacatcaattatataatgttcttttgtgcttttattttatttcacaattacatataaaaagagctcccgcgggtttgcgggtcgctttgatcactttcgccagctggacataataa

SEQ ID NO: 89816 - DNA, 640 bp, Heterodera glycines
gtccaattaagccttgaaacctctttttttctttgccaaccatcgcttctctcacttctctaaatgtctcatcacactcaaatccaacaatacttttgccctccttcggcccctgctgtgacctattacaattacggcaacatcaccaacattgacctctcgccgcaacaagccgttccacagggctttcaacagcaagttcagctaactgcgccggcttatacggtggctcagtattggcacaacgtcccttcacaaaatggcggttatcaaatgccacaaaacaatggacaccacgcggctgcctattcgtcgggggatcacccgaaaatgggaaagcacaaaggcattgggaaacgttttcatccacaaaagcatcagcagcgcgcgtcagctccccacggaattcgacgcaacggaaagtactccgcgggtgccaccaccaaacagcagcaggcaaatgccgacgacactgaccatcagccatcagcggcccaagccgcccaaatcattgaccttttgtccgagctgttggccgaatttaccaatttctcggccgaattcgcgcaatttgcttctttgatgcaagagaattgggcacaaacgcaacggccaatcaaacgaacgaattaattgggaa

SEQ ID NO: 89817 - DNA, 930 bp, Heterodera glycines
tacacattgaaacgcactcaaacggaggcgcgagtgttttgcgctgcgattggcgtcgcttgaaacacgacctgagctctcaagaactcaacgaatttgctgaggaatttattgatttgggcctttctgaactcagcaaagtgccgttgttcgtcatgtgtgttgttgaacatggcattgaatatttggaagatcttctcgaataccttggcacaaaacattcaaatatgcccgtaaagatgggttctttgcacaataaacagttggtggaaactattcaaattggacattactacgagaaagtgatctcatcctataagcagggaacatatcgttgtggtccgttgaaggaaattactttggtcggcaaaaagcaagaagaatgtggcgcctatttcgagcacttaattgaacgattagaggaatgcccatttctgaggattttgctgccatggagtgaacggactatctgttctgataaaaggccatccgaatccgatgatggaccaatttattggtgtcgtcctggtgagcaactgatccgaacggacgaatcgaaattcgacgaaataaagtcaaaacagcacaggaggggaagtgctggcactaaacaaactaaaagtgccggaattccgttgaaggcgttggagcggagggaaattctctttgaagatcgcactccttgccatgccgaccatgtgacagacgaaaacaaagcacacacaactgcagcagttggccttctgcaggcagtcagaagccccacggaaaaaggcaaaatcggcgaccgattagtgaaagatgtgatttgcttccatgctgcagacttcaaaagggtgacagatattttgaagttggatttgtatgagccgccaatgtcccagtgcacccaatgggttgaggaggccaaattaaacactttacgccgtg

SEQ ID NO: 89818 - DNA, 741 bp, Heterodera glycines
  unsure (1)..(741): unsure at all n locations
agttgtcgaagtgcattgtcctcgtggactacgccaggcagcgccaggaatggacgttcaacaaagtgagccaattgtcgacatcggtcgttgagttgcgcaacaaaatcgaaacggaggcaacgcgaacgcgaaagaacccgggggaagtgctgctgaagatcatccgcttctattcctccaagctgaacgttcttatgagcaaactgcgcgaccgcagttcggaggtgttgctttcttcttcgatgcagaaacaaattctgacattgactgcgtacgttcagcaattggatgacaattttgtgaaggcaaaggacatcgacgaggtcaaacaggaggtgctcgaagaagccaagcagaagctgttcgacatcgctcgttggtcggcttcgctgagccttcgcggtccaccgaagacttcgacggctgacgacggggaaaatgaaaacctaagcagtaacatcgaaacggagccgaagcaggaggagaccaaaggggaagaggaggagacgctgcagcagtcgatgaaggaagatgaggaagaaaagggcgaagaggaggaggacgaggaagaagaagaggaggactaagcaaattaacacagtgacagcgaaaaagaacacttcgcctaatttgacatcctgagttaacgtataagacagttttgatgtcgtttttataatttaaattaattgaataaagggaatcggcccnnnaaaataaaaaaaaaaaaaaaaaaaa

SEQ ID NO: 89819 - DNA, 1045 bp, Heterodera glycines
atcagttgattattggtctgctcccttccccccgcctcccttcaattgcgccgtgtaatccatctgtttgttagagtaccgtcccctttttgcattacagaagccccctgtaccgtatcccctcgcttttcccactgaacgttcagttaattgcccagcattggatggccttggccaaaaagcattcttattgactgagtgctaatgcgaattgccaattcccctgagcccaaatcgcccgccaatttcgacgcccgcgccgtcaacgcccgacgcgactcgcttatctttctcaacgattggacttctctgtcggtgatttgtttcggcgtttgtgagttggaaattcgctgttcgtacgccgagaaaagccagtgaaaggcgcccgagcagagcccacggaacccccggcacagattgaaaacagaagtctcttctcctccgctgcttctcctctcccgccgatgtccgcttttcctcccgcgtgcaatccctcccacgcgcgtgccatcggcgaacgcgtgctcgccaaaatgggaaatatgccgcaaacggacgaaggcgcaaaaaggcacgcccaaacgacgacaaattttgagacgccgacggaggccaaagaaacgtcttcgtcttttgcgcttttccgtccctccgattgtcccccgtcggccgattgtccgtcgcttaagccatcggtcggccaattgtccgtttcatggccaccggccggcgtctccgctcgcaatgctttggccgatgcgtttcgcggccttttgcccgcctctgtagccgctgccgtcgctccggtgagaacaccgacagccaattgaccaatactttgaggccaaccaagtgaaaatggtctattttcatccaacaaagagagtaacgaccaatcgatgattacagtaatcaaccacattacagtgaagggttcattacagtacagcattatacagtatacgcattaattcccttccctcgtgacaaacatttgtaatttggtactttatttaggaccaataaatcacaatcacttgtcaaa

SEQ ID NO: 89820 - DNA, 660 bp, Heterodera glycines
ctgatgttttctgcccgttcgtctttcacttttttgcgcattttccaatgctttgcccgtcggtgtcggccttcgcttgcagggaatgcaactgcagcagcacaagcacagccgtccaatgcaaatcaaatgcgagcatgggcagtgaacgcattcaatgcaccgcttgttcacagcaatgttccaatgccaaccatccaaaatgacaaccaagtgatcatccgtgttaaggctgcttcagtaaatccaattgacgtgcgaatgagcgaaggttatggaaatgaagtgctaagcaaaatcaaatgtttgactgaattcgttgaccgaggtctaccaaaaaggatggatttcttacaaacgcagcaaacaatcggagaaactttttcgagaatgggagaagccgatcaattccctcttattttgggccgcgattgtagcggagaagtggtggagaaaggacgggcggtaaaggatttggatgtcggagatcaagtcatcgctgtcgtccctccccattgccaaggatgtcactccgaattcgctctctcattcacaaacgctgtcgcccccaaaccggcgtcactcagccacacagagtctgccgctttgccgtacgtcgcatgtactgcttgggctgcactcgtcacgacaggcagaata

SEQ ID NO: 89821 - DNA, 467 bp, Heterodera glycines
cttaagaaatttattgaattcacttttttatttggtttcgtccgacaacaagaaatggcaaagcgcacaaaaaaggtcggcattgtcgggaagtacggcactcggtacggcgcctcgttgcggaagacagtcaaaaagatggaggtgtctcaacatgccaaatacacatgtgcattctgcggcaaggaggccatgaagcgagtgtgtgtcgggatttggaattgttccaagtgtcacaagaaagtggccggcggcgcctacgtgtacgccaccaccaccgcggcaacagtgcgaagcaccatccgccgtctgcgcgagaccaaagagtgatttgccgaatcccaacggcggagaacaatggtggtgacgacgacttttgcaccccactgccactgttttttgttgttatgtgttgtttttgaatgaaaatgggaattgttaaaaaaaaaaaaaaaaaaaaaaaaaaa

SEQ ID NO: 89822 - DNA, 471 bp, Heterodera glycines
ggcggctatttgttggcatgttacaacaacgactcagagcagtacgaatcaattgcaaagattggcactgggttcaaagacgaagacttgaaaagtcagtttaaagaattccaagagcttcggattgacaagccccgttcgtacttcgccttcgacccttcgttggcgcccgaccattggtttgaaccgtcggtggtgtgggaagtgaaggcggccgacatgtccatttcgccacgtcatttggctgcgcggggattggtcgacgctgagaagggcatttcacttcgctttccgcgtttcattcgaaaccgagcggacaaaaaacccgaaaatgcaacatcatcagaacaaattgcagagatgtaccgaaatcaggaccacattaagaaccaaaaggactgaaaagtggattttgatgaagaggaagagggggaggagaaaaaggaagaagcggacgatgagaaggaggaa

SEQ ID NO: 89823 - DNA, 1054 bp, Heterodera glycines
tagataactcatttgttaattattgctttttcacattggaaaaccttctttctgctctgtaccaaaatgccgggcatcaaaaggctcttcgacggcattctccgtttccgcaaaactcttcgtcccagcatggtcaaagaattcgagaaggtccgcgaccaccccgacccgagtgcgatgctgttcacctgcatggactcaaggttacaaccgtccaaatttatgggtgctcagatcggcgaattgtttgtcgtccgcaattccgccaatatggtgccggtggcaaaaagttttggcgattccggcggagaagtgtccgtcaccactgaaccagcagcactcgaattggcgattaggcgtggaaatgtccgacgagtggtcatttgtggacattccgattgcaaggcgatcaacacactttacgacctttaccatgggcgtccgtttgacgccgagtcgccgatggaccattggctgcgacggaacggacaccaaagtgtgcacaaattgacccaactgctgatggcggggcccggaacagagttggaattcgcatcggagaacggactgatggcattctgcgctcacattgaccgaacggaccaactgaacgcggtggacaaactgtcgcaaattaacacacttcagcagctgaccaacattgcgtcccacgagtttctgcgggaatacatcgtgaccaaaaaggtcggacttgatgcgatgtggctcgacattttcaatggcaaaatttacattttttcgcgaatgcaaaaactgtttttgcccatcgatgagaaaacgtcggccgatttattgcgggaggcgatcgggcaaattgaggaggaaaatgaaaacggaggcgaaaagcggagagagtgcagaaaggaacggcacggacgaacatgaggaaaagagagagaaattcattctttgcacataaaaccattattaattaattaatcgtagggtctgtgccgtggccaaacaccgagggccaaattacaaaaaggctgttataaataaatatagatcgaaaatgcaaaaaaaaaaaaaa

SEQ ID NO: 89824 - DNA, 643 bp, Heterodera glycines
gttaaacatgggttagtggaggtgggataacaacacttaagcgggggagtcgccatcgaaatgggaaaatgattttggtttgaatggtaacgaatttcgagaaacacttttgatgaagactctcacgctttaaaataattaatcgtatttaacggtaatttttatttcattgacaatttaaatccccgggttcctttgataattgaaggaaaatggcatcgaccgatcgcaccagcggagcggcaagtcgggaagtctcgagccggagcagttccgaaaactgttcattggcggtctgtcactaaatacaaccgacgagtcactgcatgctttctattcccaattcggaatgctcgtcgattgcattgtgatgcgtgacgcacaaacaaagcggtcgcgcggctttggttttgtttcgtttcaaacagccgacgaggttgatgcggcgatgtccgcgcgtccacacacaatcgacggcaaagtcgttgacccgaaacgagcggttcctcgtgaacaatcagcaaaagccgagtccaatgtgtccactaaacggctttacgtttcgggtgtccgagatgaacacgacgaagaatcgttcatgcattattttactgagtttggccccgtcgcaaaggtggagata

SEQ ID NO: 89825 - DNA, 660 bp, Heterodera glycines
ctatggtccgtatttccgttgatgttgtcaatgatgcgtaccagtttataaatccgtgtaagcagcgcgaaatttcccttcggaatctgcaaattcctaccattgaaaatctcggagttaccagggatcaatttgatgtcattgatttgactgacaataatattcgaaaattggacaatttgccgagattgaaacgtttggaaactctgcttttgcacaacaatcgtgtcgactttatttcaaaggaaatcggagatcaattgacgaaattgtccacccttgtgttgactaacaataacctggcacaacttggtgatattgacgttttggcctcctgccctcgtttggaatatttgagtctccaagggaaccctttgacccatttgcccaaatatcgtcagtacgtcatttataaactgaagaatgttcgggtcctcgattataaacgcattcgccttgcggaacgccaagcagcgaagaaactctttaaaggtgaaagcggtgcgcggctgaagagcgaattggtaaagcgttcgcagcaaatttcggaaggaggcgaagagacggaacagccgccgaaaaagcgcgcgacggaagagcagaaaaaaatcagagaactgatctccggtgctaaaacacttgtggacgttgaacgagtcc

SEQ ID NO: 89826 - DNA, 938 bp, Heterodera glycines
caaaacgagatttggcacgcaaagatcacttttttccacatacatttccgattttttgtggcgtaggcaatttggaggaccggacattttttttaatttgtggacccaaatcgcggaattgtatccaataagcacataaagctcctttatttgatatttaaagcaattgtgacaataaaaaagtaaaaaaaattgaaaaatgcgaaaaaaaaaatgtggatacaaagtccatgagtaccagggattcggtataccagggattcttgtgaaaaacccaggaatccgttcacgtttcccgtcttttttaacgggaaaaaaagcgggaaacccttctcgctttttttttgttttcccgtccggaaaattttttccggccttaagtaaatattgcctattacattttaagatgcttcctctgttcgtgacaaataaattgctgacaacgcaaattgttagaacaaatctctctcttcgactgccgtctcgtcaaaagaattttgggcccaattattacacagaaaaacaatggtggatcacgagaaaaataaagaagttattcatgcgatttcctatcttggaaaggacccttattttgggtattctgttcagcactttggccattccttttattactcagaggaaaaaactcctcaatatgcgcaacaatctttcggacgacgagtgggccgactttacgcaaaagcacaaagccacgatccttgcaagactcaaattcggccaaaatttgcacctcccattttacaacaaagacaaagcgttggaacaggacgagcaaacgcagaagacattcatggacagctgaacagaacggacgaaaattggcggaatgaaatttaaaagtcaaagcaatttttgttttattattttgtgttataattttggcccttttgagtaaaatgagataaaaaaaaaaaaaa

SEQ ID NO: 89827 - DNA, 621 bp, Heterodera glycines
acaagccgaaactatgcttcaaacactgaattatctgacgacgcatcagccggtgaaatggaacgcgagaatcggcgagtgcgatcaaacagactcagccagcaaagataccgcgagaagggtaatgaagcacgcaatttgttgcctcagctgtacagtcgaattgctgagttggaacgggaaaacaatttgttgaaggatttgttgtggagagaacgcgaccccaacagtttcgcggtggcacaacagcagaaaatggaatggaatcgtgcgaatggacaaacaatggacatggaaaatgcattcccacaacgcgcgatgagcgaaacttcggtcaattaatgctaattgataaaataattaattggcaaaagaaaaacatttacacataataaaaccggaaatacttttctatttttagattccttcaatgtttaattgccaaacagttcggtcaaataatttaattttcaactttactgaatcggaataaaaaatcaaacagaaaactgaactgaatttaaaaacgattaaaggcaatgccgccgggcaatgaaatgttggcacccgattggcaaatgcagttaataatgccgcacttgggggagcagtgggaattgg

SEQ ID NO: 89828 - DNA, 975 bp, Heterodera glycines
gtgccattcgacagaccatttgtctctgccgccgatggcattgcctttggcggtggcgaaattggaggcgcaggcaccgatttttcagccaccactttgctgttgttgaagaagttcagcggagagccgttgaagaaactcaagcgcaacgcagaagaagaagactttttaggggacgtgacacctctaccatttgtcaaaggcgcattatttgagggcgatagattttcggttggcattacaaccgggcgtcggatgaatggtggcggcggcggtaaaggaggcggtggcattggcactttggcgctcggtgaggtggaaaatgtggacgatgacgacaattgttgttgatgatgaagattgtggtggtgatgatggtgaaagttgttgctgctttgttgctgcaacatttggggttgaatcttcggaattggagacgtaggcggcaacggagtaggcgaagaggcagatgtgcggtcagcaaaatcgacatttaaggaaagacgattttgcggcggcggtggtggtggaacgggctgacgaaatgagttaaaagatgataaagaagttggaccaactcctccattctgtcgttgttgtacagaaacaacatcgccaccattggtcaggttcatgtccatggcattcccatcaccaacctgaaaatatttggataaatcaaaaatttttttttctcataaatattatttttactttctaaatcaaatttattaattgctgttgctaaccaaccgtttcatactcattcccgatggttgaataatatgcgtcatcatggtcctgttgttccaactgttgaccccttaaaaaatgcaccaaaataatttatatgtccgttgattgaggctttagcccgttaaatgattcggaacaaattttaattaccccttatgccttaaaaaattctcgtgttttgattggtcgaagaggatgaggagggtccggcgctaccaa

SEQ ID NO: 89829 - DNA, 639 bp, Heterodera glycines
cttgaccgacgcgggccaactcgtggcactgacgggtgccagtggggtggacagaaccacgctgttcaacactttgctgaacaggaacttgaagagtctgagcgtggagggtcaattgctgatcaacgcgcactctttgggccaattcatcaattacgccagcggggtgtttggttcgtcatttgtagtcagcaacattctccgtgttctgtctggattcccgattgtttttcgtattcagaaggctgatcgcaggcgttatacacccactgagcgcatgcgggacatgcaacaaaacattaatgagctcattcgcatcaaccgagtgaatgctgagacaattcagagccaagctgagacgattcgaattctcatggggttgcctggagtccgccaaatgtatgatgaacatcaagccaatgccaaccaaaacgcgaatcaaaacgcgaaccaaaacgcgcccatccaaaacatccagtatgcgcaacctcttcaaattgcccaagccggcaattttcaaaacctcaatcagctcccaaatttgcaacaaaatcaacagcaatatggtcagtatccgtttgttcctactcctcttgggtatccgccggcgcctcagggaaatccgtaatttgttcgtcg

SEQ ID NO: 89830 - DNA, 650 bp, Heterodera glycines
gtttgagataaatttattaagaacaatgcgttcagtaaaacatggaggaaaaaaaggaatgcgattcagatacaaattgtcagcagttaagaggcaaaacaaaaagcagaagaaaaagcaaaggaacatagctggatgctctttgatcaaaaaagcatggcaaacccaactatcatcgcggcaaaatttaagtgcaatgggactggtctatgatccaaatgaggcattgaaaaagaatcctgaattcgccatggaaatggaccaaagcgaaattgaagtaattggattgccagaagccaaagctttgggaagcgtgaaggaacaaaaaaaggcgaccaaatcaaagaaagcatgcccaaagttgaacaaatctgaggccgagtcgtcgaaagttgtgttggaacttcagcaaatcgcattggaaggagcccagcaaatggccgagcaaaagcaaaggaaaagagaacgggcgaagctgcagcaaagcgacatcgaattttgccagaaaatgttgcaaaggcacggagagaattatgagggcatgtctcgtgatcctttgaatatttggcaaaacactccaagacaaattgagcgaaagattggcgtatacaaacgaagcatcgccagtgactgaatgtgaaaagcgaaaa

SEQ ID NO: 89831 - DNA, 887 bp, Heterodera glycines
gtttgagataaataccgtaaacagtgactaattactgtaattatggccgccacaattgcgtcccatgcgccccaaatgaaacaacaaaatgtgcaggttgctgaagaagaaacattcggaaagacaaacggcggaatgccaaacggagcacagaagcagcagaatggccaagcgaaggagaagcaaaaagtgggccaaacggcgccggtggcacgtccgctgacagtgaaagattgggactacgacgagaggggccaatgcggaccaaagcattggctgcgcattgccaaatgcgaacatttgggcgatcaccaatcgcccattgacttccaactgtccaaaatgcgcgtccatccgctgaacattcacccgctgtgtttggtcaattttaaaaagcctttggctggccagctgatcaacacgggctgtggaatccaattccaacccgacccacagattgaaccgcccgaaatttacggtggcttattggaccaaaactatcgcttcgtccaataccatttccactgggcacagaatgacaatgaagggtctgagcacacaatcggtgggctgcgttacccagccgaacttcacttggtccaccagggtgtcaagaatccgtccaaattggccgttttgggcattttcctgaaattggacaacgaatcggagaacggcgaaaagaagaaatttgtgttctccgccgaagaaatggaagcgctgaagaaagtgatcgaatttgagcagaatgccgccattgacactgaacattcgctgtcctcaaaattgccgcccaattgttgccaggaaatggcttcttccgcggaacattttgtgtcttcgtttgtccgttacgagggctccctgaccacaccgccatgctccga

SEQ ID NO: 89832 - DNA, 688 bp, Heterodera glycines
aaagattcagtggatgtcggctcagtgatcatcaccaagctggacggtcatgccaagggcggaggcgcactttcagctgtcgccgccactcgttctccaatcatttttatcggcacgggtgaacacattgacgactttgagcagttcagagtgaaaccattcctgcaaaaattgcttggcatgggcgacatcgaaggccttgttgaaaaggtcactgaaatggggctggaggacaacgaggagctgatcaagcggcttaaacagggtcaatttacgctccgtgacatgtatgaacagttccaaaacattctcaagatgggcccgtttggtcaaattatgagtatgatccccggatttggcaccgattttctgtcaaagggcaacgaacaggagtccatgtccagactgaagaagttgatgaccatcatggactcaatggctgacaacgagttggaccacccaaaagccaacgatttgttcaacaaagagccaacacggctcgtccgagtggccaagggcagcggcacggcgccgcaggatgtcaaggagttgctttcacaatacaaaaaatttgcggacatggtcaaaaagatgggcagcatcaaaggcttgttcaagggaaatgaagtgaacccgaggaacatcaaccagaaccaaatggcccgcctcaaccagcaaatggccaaaa

SEQ ID NO: 89833 - DNA, 578 bp, Heterodera glycines
cctaaacgaggcttttgaaatcgtataatggtcgagaggcgcaaggaatcgcctaagcgtcgccgccgttcgtcaagttcttcgagttctggaagctcttccagtactggttctagctcatcaggttcatcttcgtcctcttccaccactgcttctcgttcaccttccccaaagaaacaaagagcagctgctcgtccttctgctcgtgacgatcgtactacacgtcgttctccaagaaggttaacctgttagggactctaattggctaagctaaccaatgtttctgctccctccatttcgatgtatacacttattcgcaaatcttttattttaggacggggggacggttaacccactcgtattcttttcgtttaataggtcgcgttctccccatcgtgtccaaccgaaaacagagaaaagcactgtcagctctcgccgttcaccgtctccccgtcgtcgtcgtccgtcgcctcccagccgcggcccgcgtcgccgttcgcgctcgcctcgtcatgaacgcgcggctccatcaccaccaccagtgaaaagggaacgtactccgggaacaccgccacgcc

SEQ ID NO: 89834 - DNA, 605 bp, Heterodera glycines
ctaatctggacatgtaaatcaacgacctttttccgctctttttttgttgcgcgcttttcaaaaaattttgggggacagatggtgtgggggcatgccgacaggcgccacagtggaaatttttaagtattttgttaagaaattattattaatttcattccaactttctgatcattgacgactctcttactacaatacttaattcagatgcaaagattcgtcttatatttaggtgaagctgaagcctccgccatggacacttcaatggttcaaatatgacgtcaaaggaatagaggacacttggacattggccactccatggttcaagaggaaattcattgcgtcaaaggatttgttggagctgagaaagtacgacgtcatccgccattatagggaggctggtcaagaattggagcatgatctgaaagtacagaaacggatgcttgagttcattgaagaataccgcagaaaacggggggagcccaagaggaaattgctgaaatctgccggaggaaaattaagggaaatttctttattcgtcacttcggaagatgttaaaagcaaatgattagtgttaaggataaaactctttgatttttcactaaaaa

SEQ ID NO: 89835 - DNA, 842 bp, Heterodera glycines
tcccagcccagaaggtgtttctggcccagaagatgatgatcgcaaagtgcaacatggccgggaagccggtgataactgcaacgcaaatgctcgaatcgatggtgaacaagccgagaccgactcgtgccgaggtcagtgacgtggccaacgcagtgctggacggctcggactgtgtgatgttgtctttttagtcggccaagggcgattatccggtggaatctctcaaaaccatgcacgacatttgtctggaggccgaaaccgcctttttccactcgaggtacttcgaggagttgttgcagaacacgcccagccccaccgggccgggcgaaaccatcgcaagcgctgccgccaacgccgcgaggagatgccgggcaagcgcaatcattgtgctgaccaccaccggaaagtcggcccaggagtgttcccgcttccgcgtgccaatccccgtgttggccatcacccgctatgagcaggtggcgcgtcagctgcagttgtgccgtggtctgttcccgctgtactacccgcacatggaacgcgacacggagtggacggaggacgtgaacaagcgcatcgcgtacggcatcggagtgggcaaggagcgcgggttcatccacaacggcgactttgtggtcattgtcaccggatggcaagcgggtgccggctccacaaacacaatccgtttgcagaaagtcgaataacagagggacgtgtccaatgagcttttgaagacttcgcgtgaccgatgaaaactttttttaggaatttacgcttttgtgacttttgttttcatatttttgttgactcggtgtttattctcaaataaagaaccttaggctttaaaa

SEQ ID NO: 89836 - DNA, 491 bp, Heterodera glycines
caagtttgagccaaagcatttcattgactttctgtttaaaaaaatgtcgcttcttgttttctctcgtctccgtactcttcctcgtcttgcgccgcttctgacgaacagtccttgtgcactcagcaccagtgccgttcgcaaagacattgacagtgccgcgaaatacgtcggagccggggctgcaactgtcggagtggccggttccggtgccggcattggcaacgtgttcggctcgttggtcatcggttatgcgcgcaatccgtccttgaagcagcagttgttccagtacgcgattctcggctttgcactgtctgaagccatgggactgttctgcctcaccatgggcttcttgatccttttcgctttctgaacattacgaagacgagcacagaggaatggataggaaatctttttttgttttttctcgcttccaataatagtatgtttttctatttttgtgttgtcagataaagttggactgattagaaaaa

SEQ ID NO: 89837 - DNA, 640 bp, Heterodera glycines
tgttgtcctttgtggaacggactgtccaatcgttactcgacaaaaagatgattgttcgacaagaaattgacatgttcgaagccacacaaatcggctcggccactttcaacgcgaattttaacccccaaatggcacttgacatgtgcaacgacctcggcgccaatttgggcaaaggcatcgtgctaatttcgcacttccatttgctttacaattgtgtgccgttggacgtcgccgttcaagtggactggaatttgttctacaacgaagtcatatttggggctgagcagcgaggagcggcagctaattcattcgatgggtttgcttaatccccaaatggattcattttgcgcctttattgtcggattgctgactttttcatttttgtttggtttttaggtctttctgaggctgttcttatccgtcacattcactcgcaccaccaacaaaaggacccgagcaaagggatgcgaatttacgttgtaattgttttgggtgttataattccgccattttttccacaaatctgttctttcaggtgtttatgcttcgtcaaatttggaatcagaagcccttgtgggaggtggcgcgttatttcggcgtcccccggggttggcttcagtccgttttgcagtccgccgtc

SEQ ID NO: 89838 - DNA, 808 bp, Heterodera glycines
gcaatttgaaaacagaacataattcacttcttcttctgctaaaccctccgcaacagaagtcaaatttcagaaaagaaaatgcacgaagcgaaaattatagtcggaattgcttccctttgttcgctggccgcgattttggccactctcgtggtgatcccgcaactgtacactcaaatcaacgaaatgaacaaccgcgtgatggacggtgttcaggctttccgcgtgaacacggattccgcgtggactgagctgatggaggtgcagatcagtgtcactccgccgacccgtccgcgagagaatcccttcaactccattttcctacgccaaaagcgccagggattgcctccccaatgcgtttgccaactgcagcagccaagctgtcctcctggtcctcctggcccgcctgggccccccggaacacccggcgagcccggcggcgccgggcagccgggaagcccaggacagcccggacaacaagcaccgccatgccctccgcccgtgtcgacgtgtcagaaatgcccagctgggccgtccggtcagccaggaagccaaggaccgcctgggccacccggaaacgatggacagcccgggcagcctggacagggcggcggacaaggcccgcctggcccaccgggtcctcagggacagcctggccaacccggacaaccaggaggacctggccagcccggtcaacccggacaaccaggaatcaaaagcacgacaattcccggcccacctggacctcccggaaacccaggagcaccgggccagcccggcagccccggacagcccggaaaccccggaggac

SEQ ID NO: 89839 - DNA, 619 bp, Heterodera glycines
attaagtttactttctgctttcctcttacaaatgaatatttgtgcatcaaagtgttgtttggcatcaccaattgcccatcgttctcattcggttgcgtttccgccatttgtccgtcgctttgcatcccatggacatgacgacaacaagccgcaccccattgatgacccggacattccgcgtcagcccgacatgtaccgccctggttccgattcgtttgcttatgaaaatccatggccaatgctgaacaagggccgtcttgattggcttttcaacgacggttggcgtcgaccactcgcggctgaccaaggcgctcacatgcgtcgccaatggatctatttcaaatgcatccctcgcgacgagcacaaagactggaagaagtggcacggcacaatgcccatcttcggcaccggatgttttgtcatgttgacctttgtgtggcaatactgcaattccgactggcccagcgcgaaagagtgggcactgcgcgaggcgcactttgaactcgtccgccgggagcgtgccggactgccgctgatcagcccggatctgatcgaacgcagccgggtggaggcggctctgccggccgaagaagagctgcgcgactttgagattctcatc

SEQ ID NO: 89840 - DNA, 451 bp, Heterodera glycines
  unsure (1)..(451): unsure at all n locations
tattgaagccggaacaagtaactgtgcagaatttgctgattgaaaatggacaactcattgaaactgtggcggaatatcagcggatgggcaaaatcgttgaagcgactaaataccaagagcgactgcacagaaatctcatttatttggcaaaactggcnntgattcgacatgttcttctcaccttttactggaaatcggtggagcgatacccccaacgaatgagtcgccaccgccagccgaacctctgttaaccgttaccaattccgctaatcctccgaacattgttgctacaatagctaacgcgggtttgcctcaccagcagcaatgccaacccgcggtgtctgtggccattgtcagccaaacatcgccgcccagtgggcatgcccaacagcgcggaatttcgactacgccacctgcccatggtgtgcagtaccaattcccctccccgcct

SEQ ID NO: 89841 - DNA, 671 bp, Heterodera glycines
gcttatttatgtttttacctgtattaatggatgtccatgacgacgaagttgaaattattgggactaagccaaatgagaggcaaataggaccgggctcatcgacaagaacaacagcaggaaaaattttactcccaacaacaaatgtctgaggaaagtgaagaagcattgttttgcatttctaagcatgacgttaaagaaataagccaagtggtcaaagcaatggcattccgagaccattgcacattaaatgtaagcaatgagggcattcgcttggcagttgacgaccaacacaatcagcaaggcagtgcctacttcagatccgagcacttccaagacttcaactttcgtacccaaacatgcagcattaaaataccgatgaggcctcttatggaagcactgaatatgttttccggtacgatgacaatggtgcaaatttcgtggaatggcgaaggctttccattgctcgtcattttggaagacgaaggcaggagttgttgtccacaccgaaattcgaactttgatagcgcccgagattctcgaattcgatttcgacaatgaaaatgtgacggccaaggcaattctgaactctctaccaattcgggagattatgcgcgacttggacgactccgccgaaacggtggtgctcactttcactcccggttatctgcaat

SEQ ID NO: 89842 - DNA, 669 bp, Heterodera glycines
aaaaatcaaaatgccgacattgagcatctgtccactcattacgaattggaccaaaaccttttcaaaaacaaaacattgcgcgagttttgtgccgcgattcacagtttctacggaaaatgctccaccaacattctcgatcacttcaaaaagcgattcaacattttgcaatttgcgaggcatttgccccatttctttgtcggcctcaattcaacatggatttacgaattcgttgtgctgctcgaaactaccggattaaatggccatattttggacaacgatttcgaaatggacgacaacgatcgattcattgtgaacacgcaactgcaacttttgttgcaggaggcgttccgcgtcagttggcttcagaacagcccattccatgacaaaatttgcgtctcactgatgcgtctttctcccacgagtgacgaccgactggcggaacacgagaaaagacttgaacaccgacttaagaacccaccgaagctggagctgaacatcgtcgtccccaaggataatgcgtcgaacaagaacaaggatttggcactgagtttggcatttcccccagtcgtcgtttggtcgtaccgccaaatgttttaccatttgttgttgctgaaccgggccaaacattggatgtaccgaaaatattttgcgctgaaagggacgaattgc

SEQ ID NO: 89843 - DNA, 490 bp, Heterodera glycines
gaggtaatttaattttctgtgctttcatttttatttgttgtcaatctgatcagtttcttttttctcacaaacaatttgtgttgtgtcatcgaacaaatgtcgactgtcagcaacggcaaagctgaatcgtccatgcgccgatacatctacatcttaccctaccttcccactggcattgcttcttattatttttacaaagcggcacagttggcgcgaaaatgggccactgtccacaagttcgggccgttcaaagtgtcggcagcgcatggatttgcccttctcattcccatgccgcacttggtgatattggcctttcaaattgcgtacacgcgaatgacacgtcgtaccgatgagaagatcaaaatgaaacaaaatgtttccaaatagttgcctattttcatttcctctgcgctgtttccattttgtccttgatttttgtggggcaatttaaattcgttttgtttttcggcaattaaatgcgcgcttcttc

SEQ ID NO: 89844 - DNA, 603 bp, Heterodera glycines
gtggcggtcgatttggcggcgataattgtcgagaaaaatgtcaactcttttctgtcggttgtggacattcccaagccgtctctttacgattatttcgcttttcttttcgcgttggccacaattttgtgggcaaatttattgtgcaaatcggacagcaacaacattttcaaagtgcatcgtctcatgttggtgctcgtcttcctcaaatcgctcactttgcttttccacggcgtcaacttttactttgtctctgtttatggccacgaacgtgagctttgggccatcatttactacgtcacgcatttgcttaaaggtgcgcttctcttcggcacaattattctgattggctccggttacactttttttcaaacaatttttgagtgacagagacaggcgactgttcattttcgtgttgcccctgcaaattttggccaacatcgcaatgataattctggaaaaatcggagttcagcgaccaacgctatctgttctggctggagatgttcaccttcctggacattgtctgctgcatgagcattcttttgcccattttgtggtctattgcctttctgacggagtgtgccgcaaaaacgacggatgggaa

SEQ ID NO: 89845 - DNA, 614 bp, Heterodera glycines
ggtgcgacttttggtcgtgaatcgggctcaaattttgatggttttagttccaactttgttggcttctgaggctctctctttgcggtaggacgcgatggtggtggttcaatttttgctttcgcacgaggcgggagcggaagccggggaggtgaaggtgggtaataaaccctgtattttttatgttccgaatcatcatcatatgcttcgtccttttttaattttcttctgatggcaatcctctgctgatcagtgtccatctgttcaatttcacgttgagcattgtagggcagcacaggcaagtcgccatagtattgtgttggcgctggcagcgctaacccactctccaacatataatcatcatctgtatcactttccggtaagggggcagcagctgcttccgcaagaaggtcccgcacaactggttgccgtcgttgtatatcatttcgccttttctcccactgctccaaacgaccatctctccgcgatgccctagtcgatctgggaggacgttgtgggcgaggcggaggacttcctggcggggatggagcgcgacccggaggacttggtgggcgccgatgacctctcttaggcggcggtggtggatgtggtggagg

SEQ ID NO: 89846 - DNA, 593 bp, Heterodera glycines
gcacattccaaagttgcaacaagaaactgcggaacaatgtgatgtttatgcatcacatttgggcccatgtggcccaacaaaagcacaccgactcggaagaacagtttatcaacatgcaggccgagcaacataacgccaacagcatcatcactaacggcacgaacaacggcaccgacacggccaccggcgacgagcatctcagcgatgtcagccgacttcacatgtgcccagagtgtctgttggaacagcccacaccgcaccgggcgcacctccattaccaccgcgtccataaacgcggcaaacgacatctgttggacaaaaaacccgggttgttgcacgtgtgcaacatctgtgagcaggtgttcgacgccaaggccatcgcttcgcactgtgccgtccaccatttgccggacaaaggcgctcagttggcactgccctacgggtgccggttcagcgccggcgtcaaatgccaattcagggcgtccaaccgcagtgcgttgctccggcacttttacgtccgccatgttggcactcacgtggtgctgtgtccgttctgtctgctcactttccccgtgccgcccgccaacaaacgc

SEQ ID NO: 89847 - DNA, 636 bp, Heterodera glycines
atgtccaatttccatttgtcctcaaaagtgttaaattacatcgacacacgtccaaaggaaaacgaagtcaaaggggcaataaaattggacgtcaatttacggatttttattaaaaacgaacgttctgttgaaaaggaaaaaagccgaaaggaaatggcaacgaatatttacgcaactttggacaaaaaagaacctttggccgcatttattgcgcggattggcgacactttggcactgaccgaagagccggaaaattacgctttaatgttcgaagagaaacgacgatttgtgacggaatataacaaacccagcgtggcacagggctttttcctcttgctgaccgcttctccgtccaatttcgctaaacactttctggcccaacttggccaaggttcgtgctccgcttggccccatttgcctttgttcgtttctctctgtgccgaccccgcctttgccgaagcatttaccgctcttaacggtgtccattgtttggccgaagtcatcgaagggttttccgacgaatggcacccattcgaaccaaatgcacctccgctgttctcgcttatgcgttcccttctcacatttatgcagcaattccccgtcctttgcccttgggccgacttttccccgcaattt

SEQ ID NO: 89848 - DNA, 545 bp, Heterodera glycines
cacattctcaatcaacacaaatgcttaactaataaaaaataaatcttctttttggtccattgccatagccaacgcttcatctcccaaattccatcggcggtgccattctccgtccgtctcccccccccccctccggtgctgcttttcctctgctcttccgctgatctcactccctccccaccgtttggtcctcaattatttctcattagtgccattttatgcttattccttcttctctccgcttcatcatccgctgtcattcttcagctgctgctgagtgttttttgccttcgttttcgtcccttttacaattgtataattctttcaattgagcaactttggcattatttcctcctccttgtttgttagcatttgaattagccgaggttcactcggttctcagccagcagaatggccaactccagtggccatgaccatccggcgcgcgggggctcactcggctaaagcctcgttcgcgcatcgctttggtcattttcggcgctgtgatgatccacctcagcatcggcacttaccacaccttcggt

SEQ ID NO: 89849 - DNA, 542 bp, Heterodera glycines
gagtttcataatattttcttcctccgtcctcccttttcgcctccttttaaatggctcgtcagcaattgaatattcgccgccgttccgttgtctcttacgttggcatcagtgagcatggccaatgcggctactgcaaattcacaaaacgcgcccatgacaaggccaagttcgcagcttcaaccagtgaatgcaatgcctccgtcgatgcgtcgacggtggcgagcagtacaaataatgatgggcaacaacaagcgaatccgcccaatgcacatgatgaaaatgccaacgatgatacaaatggagggggcgactcggccgtgttcggcctctgggcccaccggctcactgtccaccattaccaatggttggccaatcgcggctggcgacgttcgggtcgctttctgtacaagccgttgatgggccgcacgtgctgtccccagtacaccatcacgttggacgtgcacaaatttcgcctctctcacacccaaaagcgcgtgctgcgcacaatgcgcgactttttgcgcacggaccaaaggccgaaa

SEQ ID NO: 89850 - DNA, 655 bp, Heterodera glycines
ttttccgatggataagcaaacttttggtggagattcttctgccaattcggcagcggaagacaaaatgagcggttgctgttcagaacacattgtggaaattgagtggaaacatttcgactatctctccgccctcagtggcctttacacggcatcggtcgaacgtcgaaaatgcaatttgcttgtgctcgtgcagggcaatttggacaatttggaagggaaaatggtcattttaactatccacgacgtgggcaaaaaccacctgagttttgtcgacttcgtcaacagtctttcgatggcacccctccgcggccgttcccttttcctccatatttgtgtgcctggccaagagcccgaggcgccgattttcgccggaagcagtttcccgtcgatggatcagctcggccatgccatggtgcaagtgctgcgccatttcaaaatctctcattgttttgcaatgggcgaaggcgccggcgcggacatttgttgtcgattcgctttggattttccgtcgatggtccgggggttggtgttgatccattgcacttcgacaacccacggaattgtcgaaaacatcaaagagattttcgccgggttgcgtctcgaagacggcgaaatgactcattcggcgtggaattatttgctgactcaccgtttt

SEQ ID NO: 89851 - DNA, 651 bp, Heterodera glycines
ctctgaagtttgaaaatgttagaacggcttccgtctcagttagtgtcacgaagcgcgagctttgtccaaactcggatgacggcaaacaccgtcaattttttcatgcgtcgaaccggcgacactttgtggaagacggtgacgaacgtgtccatgggagggatgaagcgggggagggcgcggacgcggcagcccatccgaccgttgccccaattttaccgagtcggcatgctcaagtcgagtccgatgcgcatccgttaccctgggttaaatgcgcccattgtcccgcaaagtgttgccgaattggcctcgagaccgttttttgttgaggaacagtcggagcaggaaagggaggaggtgctgcactttgtgaggacccaagtggccaacaagagcagtcagaagcgccatttgtgcaaagagcgcctcactccgctggagcggggcttcagcggcagcactttcatgggccaacgcatgggaccgcccccagacatggacggggcgaacatggacgacttcgagtgcatttgtctttttaccgaccgaataacggaaatgcattccatcagaggacgtgttttcagcacgagggcactcgtttttgtcggcaatgggaacaaagttggcggttttgcattggcaagggcttcc

SEQ ID NO: 89852 - DNA, 907 bp, Heterodera glycines
caagtttgaggaaaatacttttaactgatttccaccattaaaatgcactttgttctcattgccttctgcattgtttggcaactggttgtcgccaataacgtggagcagccggccaaccgtgccaagcggttcacctccttcggctcattgtccaccattgggggccgcgttggatgtgttgtgtcgaagaataagctgttcgtcaacggacacttcaccaaggacctgagcgaggatgagcaggaggaattgaagcagtaccaggagcagctggatcagttcaagtccgaagtcaagacctacttggaggagcgccagaaacagttccgcaaccaggtggcgcgccagggcggcgccgaggccaaggagggcggaactcagctgaagaagccggagccgccaaagaagcccagcttctgctcggacaaagccaccacacagtacgtgttcgacggctgcagcgttcaaggcgacaacgtgtacattggggatacttttgtgcgcaagctgagcccggacgagcagaaggaattggcccagtttgaccagaaattcaccgcctaccagaaggcagtgacggccggcttccgcaagcaagttgaggagatgtttggccaacattttggcgccctgttcggcgcctccaatctaagcccatccactgctgaggacaaacaacaggcggtgccctcctccggcgctgagctagcgccggctggcgcagagaacggcacggcgccggaggcgccaaaaacgccgagcttctgcactttgttggtttgagatggcgagagagagaaaaagaaagaaaagcgaaagggcagacagagaaaccaaaggacaaagaaatcaataaaatcgatcaaacaatcgatgaattaatcgataatcaaccctattttaccgt

SEQ ID NO: 89853 - DNA, 957 bp, Heterodera glycines
gcagactctcgttttgccgttcttcttttttacggctaagataggcgctgcccaatgactgaaatcgattggcttaattgcgccaatttgaagaaggcgatccaattcggcattcacagcttccatggcgccatgtggaattgggcgagctcggcaaaatacacgctttgcatcagaccgcaaaatgagatgcgcctttgcctttgagcagtgtcccagtccttcttcaaagacttcagggaaatctttttggagtaccgctttaagcgttgacacattattgatcgatttgtttggcggcttcactgccgaaaaattttcaatcattgtcgcctgatcagccgatttgctggacggaaataaaatttggcggggaatgatctccaaagcttcgatccacggcaatcccaataaattgtgtccgacttctccgctcacataagcgatcagaatttgcggtggtttgtcggcaaattggacagtgcattggaatttgccaagtaaggcgaatggctggtcattgcaatttttggcatcgatgtcggatggagtcagttccggttctcccaactctcgccatgtttgcaatgaaataattgtggcctgagcgccggtgtcgccattcatggaagtttgccttccattaatcaaaatgcacaatttccaccatcgcccttgagtcgtgccgacatgcaggcaatttgcgtcgactttgacactgtgaaatgaccggtggctgttcggtggtgccattttcttctttgaccggcaaattgttgaaatgtgcccttttttgttgcacttaaagcaagtggcgtccttgaatgagcaatcggagcgccagtggtcaattttgccacatgatccacacggaagtgttggacgaccacgtgttggctttccacttgaattggcatttttatgttgccgttgatttgtgccgctttgtctttgtgc

SEQ ID NO: 89854 - DNA, 1242 bp, Heterodera glycines
atcagaaacgaggaggaaatgccattgaaaagcattaatgccctccaaaacggttaatgtctttgagtggcgtcccgaaacaattaaatttgccaaatgtctgccagaattcagcacgaggctttttttgaacattttggcattgtgttggacaacgccgagggcgtttacttttccggacaggaaattgccggaaaggtggtcattgagtgccgggaaccgcgccgaatcagcgaacttttgctggaagtgaagggacgggcgcggacgcattggacaaagtcacgcaaaatgtgcagcgaaaacgaaacgtacttttgcgagcagttcaacacggaatacacgcgaaagttgccaaaaacggaggccgaaaacgacgcggggggagaaacaccacgggaaggggggaggacagtggcggaacggagaagggaaagcatcaaaatgatgggccgtcttctccacgtcggcacccacgagattcccttctcctacgcactgccgaagagtttgccgagttcgttcgagggcgagttcggcttcgtccgctacacgtgccgtgccatctgcgaaagtccgtgggacttcgacacggtgtgctttttgcccttcactgtcattggcatcgaagatttgaaccacgaggccgaggttccgtcagcgccgaatttcgactcgccaagggtggccttacgccgggcgaaaatgtgccgatgaacgcgaaagttcgaaaccaaagcggacgaacgctgcgcgggttggagctcagactgagcaaagacgtggtgtacaagtgggccattcattcattcctttgcccaaaaagttaaattcaacactttttaagggacgacggcatataaaagcgaatttcatattattattttgaattttactgcaactttttgatatttaattcgttcatttcacagatcgaaaacatttgcgggtgccgaacagcgacggaccaccaaaaatgtggtggagagagtgcggctgaaaaaggtgcccagcgggagcgaattcgaaagtggcgcattgcctttggcggtgccttcggttccgccgcgactcgccccaaagtgtcgcctaatcgacatttcgtattctgttgagctgagttgtcagtcgccccctttttgcgtgtcccttcccgtggtcatcggaacgatccctttgttgcctcccaatctccgatcaaacgaccaaaatgtggcacagaacaacggcactaatggagtc

SEQ ID NO: 89855 - DNA, 726 bp, Heterodera glycines
acgaagcgcatcttcaaactctaaacagaaacactgttgtcagacattgtctttcaatggatttgagtcggcttttggtctttttgagtttggtggatgcgaaaattaatgagcatttgatgagtcgtttcaatctcgtcctgtctcaccgacataatcttcagtcttcgtcttattctgctcgcttaatgaattgtttctcgtccgccgtctcgaggattcaacacgcacgagcgcacatttaccattcgatcagtgacattggagttcatgtggatgacaacggatttaatcgactctttccccaacttttacattacgaaagggcaacggaaccaccccaagcggacattacactgactttcattcgtcctggagcaactccttcacattcccaaatcccgagtgttgtctcccagccgccttcgcgtgattctccgcctcattccgattcgacgccgaatcccccttctcatagtcagcagaataatccgactgctcttaattcgttgctttccggctttatgtcttttgcacatcaattgcttggcggtgttcctgatcaaaatcatccacgacaccccaccatttcgccgcgtatgtcttctcgctccgtttccttcgccccgcggtcgtccgcttcgtccagatcaactaattccacgggtttgactggacaattccctcgaccctttcgtcacgtgcaagggtcccaaagacgttttc

SEQ ID NO: 89856 - DNA, 639 bp, Heterodera glycines
cacaatttgggcattggttttttggtaaataatttttattagaggatgtggacatttttaggaaaatggaagaataataatacaaagaactaaaaattttgcattttatacctttcaatgtttatttaacccataaaataaatttggctcattcgaaatcattataaatagcatttatacttgcttaattttttcattttgttgtcttcatctcattaatattgcatttttcctctataaattgcactcttcctttcgttaatttttccaaaattgtagcttccaaattctcaaaatggtgcttcttacggaaaaaatcgccaaaattttaaactgccgtgtcagcgagctccgtgatcggcttaatcatccttccgattgtgaaacggtggtgaaagcgctgacaggacaccgtgttaaaacaacatacaaagacagaaatggatacaccaaaagctttgcttttgggggaattacagcacaaggagctgcaataactatggcttatggacgtctgggtcgtcctttcaatgttaatgtggccgcacatttctacgtccgtcaccgcattaaactccgacatcctttcctccactgtgctgttgagagctttccggaaggacaagaggatcgcttcta

SEQ ID NO: 89857 - DNA, 1093 bp, Heterodera glycines
caagtttgaggattttaggaaaaggtacacttactttctacaaaatgacctcacaacccattcgcgtattggtcactggtgcggctggacaaattggctattctctggttctgcaaatcgccaaaggggatgtttttggcaaagatcagcccattgtcctcgtccttctcgacatccctccgcttactgaagtgctcaccggcgtccattacgaattggttgactgtgcgcttcccaacctcttcggcgtcgaggcagtgaccacggaagaagcggccttcaaagacattgactacgcttttctggtcggagcgatgccccgcaaagaagggatggagcgaaaggaccttctcgcggccaatgtccgaattttcaaatcgcagggcgaagctttggccaaattttccaagccaacagtcaaagtgctcgtggtgggaaatccggccaacacaaacgcattaatttgcgccaaatacgcggccagcaaaattccggctaagaattttagtgccatgactcgtcttgaccacaaccgtgccatggcacaagtggcacaaaagtgcgcagatggaaccaccgttgggatggtgaaaaatgtgatcatttggggcaatcactcgagcactcagttcccggatattcgacatgccaaaattgccaaaggtggttccgaaactttggcctatgatgcggtcaaagacaccgcgtggattcaggaccaattcatcaagaccgtacaaaagcgtggcgctgtgatcatcgaaaagcgcaaattgtccagcgcaatgtccgcatcaaaagccgcgtgtgacccacatgcgcgattggtttttcggcactccgtccgacggtcgttgggtgtccatggctgtgccatcggacggctcttacggcatccccgagggattggtgttttccttccccgtcaccatcgatgcacagaaagagtggaaaattgtgcagggtctcgacctcgacgactttgccaaacagaagattgacatcactaagaaggaattgttggccgagcgcgacgaagcactcgcggcatgcaagtaatggaaaaggagagacaaacgtagaggaaatgaca

SEQ ID NO: 89858 - DNA, 1077 bp, Heterodera glycines
gagagcaccaaggaaagtctgtcgaacgtggcggaggggacgaaggaatggctgacgagtgccaaggacaaagtggccgattcgctgacttctacgaaggacactgtgaccggcaagtcggcggagatgcgcgacagggcgtccgacagttacgaggatgctaagcagggggcgcaggaccgttacgagcgtgccgtctcttccctccctccctcttactctttgcccatgaactctctctcgcccttctcttcctccgtcccccatttgccaatgccattctcttcctcttcctctccctcttcggcttcttcttcttcttcttcttcatccgctgcccctagcgactcccttctgctcgattatcttttctccggctacgacaagcgcatccgtccgttctccgatggccatgtccccgtgttggtcgaattgaccatcgttttggccattctcactgagttgcgagagaatcagcaggcggcctccttcgtcatttcgcacgttcaaaagtggacggacccgcgcctttcgtgggaccccgcggcgttcagcggactccgacagattgtcctcccgcgggcggacgtttggctgcccaaacttttcatttacaattccatggataccaaagaaatgctggcggataattacttcgacgtccgcctcacgcaccagggcaaactgaagataaacattccgcattacgtcacttgcatttgccgattggatattgcgcttttccccttcgacacccaattctgtgccattgcccaggcttcgccactgctcggagtcgaagagatggacgtcaacgtgacaatgccgcccaaagattcttacttttcgggaaatgccgaatgggaactgttcaatgtcagcgtaagggacaccaaattttgggaggatggcgagcggagggtcgaagtgcattatgtgatgcacatgcggaggaggcccgtctattacttgacggtcatcgtcgcccccacttttctcatctctttcctcagtattctcggcattttcgcgcccggcacaaatgaggggccccgaagtgagaaggtgtccttggga

SEQ ID NO: 89859 - DNA, 742 bp, Heterodera glycines
gtcgccctcacaaccattgcaatttctttgctcttttttcttataccgggtaaatggaatttaataatcccatgtaacactaacattccgtttttgtttagtcacaattggtcgctttttgctttccacgttggctttgacaaatcagcccatccacgacttgtacaccatcgccgttgggctttacgcctgttggatttgtgtccgtttgggccttctttctcgggaatgggctcgcagagggtggacttacgtgaaaaaggttggcacgggtcttttgccttttgaatgtccggttggttccttttcagctgttcaatgccacggggtttctgctggctcatgtctttgccgccgcttttcctttgtaggccgttcattccctttatgcctcagcctttacttccaaatgctcgtcatttctcctcttcgcgtggccattttccaatcgccgcttttcttcccctggaaagaatgggccatgggggttggtccacttcaaaattgtttgtgcttccggtttgatgggccccgactgtgggctgaaaacggcttttgaacaggtccaaacgacgacatgtgatgggttgtcactgtttgtttttaagatgtacgccgatgtgatttgggacatccgtttgcgagacctttacacgaacctggtgttcccaattgagaatacactcacttttatgatcgcgtttccttacgttctcagcaattttctcctcttttttgtcgg

SEQ ID NO: 89860 - DNA, 979 bp, Heterodera glycines
agtccaattggtccattctgaattccctcctccgtccgttgccctaagccatcaatttgaccattgggacgccctcaggggacggaagggaattgacaaattcgaacatttttctgccgcttcctccacaaaatccaatcgttttttggtttgcactgcttttggcgcttttttggcaacgaatttcgaaaattgcgccgttttggagagaatttgcgattcgcgcctcgggaaaaatccgaaggaagtgaaacgattcgaattgccatttcgaataggaaaaatcagtgccggaagggatcacctaatcattttggactctttgaacggagagatttggagtttcgggacggggacgaggggcgaattgggcacggggcgagtggaggcggacaattgggcggaggggccgagacggattccgagtttttccgaggcggacattcgctgcgtggacatcgaaagcggcgcatggcattctttggcactgaccgcggaaggcgatgtgtacggatggggatggaatggacacggccaaattgggcatccgtccacagaattttccatccaaccgacgccctttccttttgatttgggcgatggaagggccaccatgatacgttgcgctggcaataattcatttttgttgcttagcgatggaagtgaaatggaatttggagaaatttgcaccgaaaagccaatggacgaacaaatggcggaaaaaatgccagaaaatgggtccaaaaatggcaccgaaaaagacgaaaagaagggacaaagccaagaaaaggacggaaaggagaagagacaaagtccatcggcaaaaaggcaaaggcaccaacggacactgaaagtggcggtggtcggctgcagtcatggccaattagaagccatttacgaaagaatggtccaaatggaaagccaacagaacgccaaattcgacttgctcatttgctgcggggattttcagtccttaaaa

SEQ ID NO: 89861 - DNA, 1081 bp, Heterodera glycines
atcagttccatcatttccccattttcctttgatcaaattggccaagtcttccccaatcgcctttgaacgaccccattaatccgggatttttcactttaccaattcttcttttattttggtctcttctatttctgttcaacaccatccctcatttctggtcaacccatctctttcatttctggtcaaccccctttccccatttccctctcatctctcaaaatatttccttttaattaccgatcagttccattttccccatttattttggtcaacttgccccaatcatttcgatcagtgccattcccccatttattgatcaaatggcacaaatttagtttgggtcaatgccattcatcatttttctcaaattgcgcgcaattcttctgatcagcgtatcccttcctctttgatcagtgccattctctcccccattttcttttgatcaattgtccctcattgatcaatttcatttattttgatcaattccaccccattttatttgaccaattagtcccaattaatttgatcaggcccctccctctaattttcaattgattaaattgtgcaaatttcttttaatcagcgccacctcctccgtttttgtggtcgaattgcgcttttccttttgatcaattcccacatttttttgatcttagtgcgaacatttcttttggtcaatgccattctccattttattgtttgatcaaaattgcgcgcaatccttctaattatttacatcctttcccaaatttatttttgatcagtcccactctgaggggctcacaaatggcacctttcagtcaatcagtgccatccctttttctgatcaaatgcgcacattctcttttgatcagtgccatttccccattcttctcttcatcaaattgccccaatttattttggtcaatcgtcttttggctatttcttttgatcagtgtcacccctctccatttatattgatcaattgacgcatatttcggctgatcagtcccatcgccatctttgatcaaattgtgcaaatttatttgatctgtcccattttccccatttccatttgatcatttgtaccatttttcattgt

SEQ ID NO: 89862 - DNA, 632 bp, Heterodera glycines
gtccatttgatttcatcgccgtcatccaccacaattcccctcccactcaatcgacggcactcaaatggcgaggacggcactttcgggttcggcgacgaggcagaggagcatcaccgacaattccaacagcaattggtttgccggcgatgctgcaatactacgaacagaacaacagtgttccgctcgacagcggatgaatgcctcggcgatggcaaaaattagcttgcaaaagcaatgctccccgccggagtgctgctacacacaatgctccactgatgctccacaaaaatgtcatgatgataatgatgcccagaaagcttttgatgctgttcatctccgttccctcaactgcttcttctcctctttctgtcctccatttcggcactttcttccccccaaagtgctcctccgtctctgtctgctgttcctttttgctgtcggcggctgtccaattgtgcctggcggcgtctcggcaacggcacgttcacggcggacactcgttccgctcggcatggacaaacagatgttcccgcctcagatctttgacgaaaatgcgcccatttgcactgcggaaagggaaccgtgcggcttttacagtttttcgctggacggaaaagcgcccctcaaatgga

SEQ ID NO: 89863 - DNA, 594 bp, Heterodera glycines
cctttatgagtttgggacttttcccttcttcaaccgctgtgtattcgtcaaacagtgacaacgaaaacgaccaaaacaacaaattccgtggtagtactgttttgcgtgcttcgtcagaaaactctgcgacatcgaacaactctagtggatttgctttgtccaaccagcagaaagccccattttcggtcgccgaaggggccgcaactgcggcaaaacgcccgcaccggcgtggaatttcgccgtttaaacaacagcagcagcaaccgtatatatcgggcacaggtggcgccaaacggaaattgtcgaacactgggagtgagcaaagaatgcaccagcaaaacaaccaaaccatcggaacatcaaggtcagccagcagtgatgacgacgaatttttcctgttggacgtcgagccgagagcgaagcagcgacgatatgaggaacggatgagcacaaaattgagcggaattcggctgaaggatgagcacgggaaagcggtggggggaaggaccaatgaacggaatattacaacgattgcttctgctcaaatggcatggggagaccaatggaaacagcagaggaagggaccgatcatcg

SEQ ID NO: 89864 - DNA, 1013 bp, Heterodera glycines
cgaacattaaaatagggctaaacgagcacaaatgaacagtgagtgatttgaaattgtccaatcgaataaacaataagtcaagacattgaaaaaatcgatcactgctcattttgttccttgtttaatcaatcgatcattcgtccaacaaaaacccaattagggaagtgataatagcaaattgattgggcttcactcaattccctccctactgctgatccatcctaaaaatttggacggattgtcgggcttgaaacggccaacagtcaatttggcctttcactctttcggtctgttcattcgaattccccctccctcccctctttgtctgatgggattatccgatcccttccctaattgccttcccttttccttaattgccttttcgcttcgcttcgtccactttattttccttcctttgtttgccattgaatgattcgccttcctccccattttgttggatcatttttccgtttttattctgtgtgatctccgatgaaacatcgccgtcgcttggggggttttgccgggttaaaaagtgcgacaggaagtgcctacggggagaggcaacggaggcggtgggctgacccattggtgacggtggcgtcgaaaaatgatttgacggtggcgcccgagggaatggccgacgatggcaaatccaagtgggcttagagaaaaggcattgattttggcattacaacaaatcagtggcatttcgtgtcgacagacgcttttgccagccgacccggaggaaacggcagagagcaaagaggagacattggcacaacttctgaagagacatctgcgaaatttggtcggccggtcgttggcctacgcattatgacaaaaactgattgtcttcggcaatttcccttctcaggtgcatttcttcgttgaggattggttcatctccggcatgctcggcttcatcaccgccgctctttccatctccgtggacgttggctatgaatatttgaatcactgtatgccttttgcgccttctctttgttctctct

SEQ ID NO: 89865 - DNA, 654 bp, Heterodera glycines
  unsure (1)..(654): unsure at all n locations
gaaagaatttgatcactcagaagaagtggttacaaaaataactttnggagacaattcttttcaactttggtaatctgtcggtgcatacgacccgagcaaataatttggatacgaaacattctgctggacgggacactgaaaaaatgctgcaaagtgactgccatctnngccgaaagtgccgttgcgttacttcccctacaaagtgccgcgcaggtttttgctcgccaaacaacgccaaaagctgcgcaacagtcaaagcgattccgccggttcgacattttcttatgagaattctctgctgaatgcgcgtctcgacgggtgtgaatttgacggacgatcgctaacatcggacaccaaagaattcgctgacgtacagcagagcaaacaaacagcggagaagcgtcctcgctgtccgtcctcctccgccacttcggccttttccgcgtatcgtaccgccccaccaccgcctcgtccgtgttggcttcagcacttccacgcgtccgcggaatatgcaccgaaaacagcgcaaatttcaacgaatatcaacacaacaaaatgtgacggaagcggagggagaagcgaacgcgtgcaaccgcaacagcagcagacacgagaccttggcctggcggaactgaccgattacttccaacactt

SEQ ID NO: 89866 - DNA, 710 bp, Heterodera glycines
gtttgaggcattttggctgatcaccgctttttccttacattattatgcgctgcttcttcccccgtgtcgtccgaagtgttttcccctcgcccctttccttcgtccgttcctctctctccactttttatcccatcgatgaccaattgttcggtttggacgaggaacaacgacagcttcgtcaattggtctttcgactcgctcaaaaggaattggccccttttgctgatgaaattgaccgtcaaaatgaattcacaaaacttcgcgatttttggcgattgcttggtcaacaaggccttttgggggtcacagtgccagcggagtatggcgggtcggatcgcacttatttggaccattgcattgtgatggaggaattgtctcgtgcaagcggatcaatcgctctcagttatggggcccattccaatctttgcgtcaatcaaatccgtcggcatggcacacccgtgcaaaaagccaaatacttgcccaagctgtgctccggcgaagccattggcgcattggcaatgagcgaaacgaatgcgggttctgatgttgtttcgatgaaattgagtgcacgaaaaactggcgacaggcgttccttcgtgttgaacggctcaaaattttggataaccaatggacccgacgcggacattttggtggtttatgccaaaacaagccctgccaagcatcaacacggaattacggcatttatagtg

SEQ ID NO: 89867 - DNA, 542 bp, Heterodera glycines
ttgaggcattaatattacttttgttgcaatgctgccatccaatcttttcttcttgctgatgaccatgctcagcagttccctcctccatcagacattggcaaataaattttcagcagagaccgacgcagtaaatccgacgcgattaatccagagacggcatttgattcgaagccgcgcaactcacaaagaaaaaatgcactcgaacgtaaatgaaggctatttacagtgggaaaaggataaattccacgaagcactgggagaaaagattttgccgaagagttcccgatctctgatggaccccaagtttttgggatcggtggaaccgcggcttttgaaaacatcggcggatgggacgcggacaaaaagcgattcggaagaggaaaagtggcggaattggctgcgcaggcatttcccagctgcgagaacaatttctgatcagtgatcactgatcacttttcattttatcaaatgcaaatgatcgctcatctcacctttttgaattggatcggattttcaatcttcaataaactttatttattagc

SEQ ID NO: 89868 - DNA, 138 bp, Heterodera glycines
cactttcggctcgcttggcagagggcgtcagggcatttgatgacaccgacggaagagagaaagacgaaatttataaccattttttgaatttgttttgttgtgtcttctctatttttctttttgcttaaaacacacacg

SEQ ID NO: 89869 - DNA, 622 bp, Heterodera glycines
attcgaataaaaatttctgtccgattctctctgaaatgactacctccgatgagaaacaacttcaagtggttgtggcagccaacgagaagaaacaaattaagaaatcggaagttgactttcccgtggtattgaagcgtggggtgcagggacgtgtgaaatggtactcgcccgaggatgcctatgggttcatccatcgttacgacgtcgacgaagacattttcgtccacggctcctccatcgtccgcttcaacattcgcaacaaaaaccagcatcccgtccttagcattcagcaagaggtggaattcgatgtgatcaaagtccgcaagggtctcgaggcgcgttgtgtctctggcccgggtggccgacttgtcggacgcttcttcaatattcctcgtcgaagtgtctcgggtgctaagaatcagaaacatgccgtcaacggtggtttgcgttcgattcgccgacgcagcgacggcgaagccatcagaagaaggagaagggacgcgtggactccaacaaaaaggcagcggttgagaagaacactgaagacacaacggcagacttggccaatatgcgccttagtgaggacaaaaatgacagtggcaccgtggcggacacggaggag

SEQ ID NO: 89870 - DNA, 676 bp, Heterodera glycines
caagtttgagcaaaatgcgattggcttcgttattttctgttctgctgtttttattgttcatccatcgaacaattccctcaccttcgccaaaatttgatgaagccataaaagacaatggcattttcgcattcgattcgtccgaggacagtgccgaggaagtccctccttcgcctgcttttgccgattctttgcggtcgcctcactcctccgaggccgaggaggacggtccatctgctgaagaggaagaacagtttgtggacaatgtggccggatggcggccacgtccatctttcctgccgccttttgctgttcaaaatcgatgcctaaaagccaaattcttcgattcgaaatcggacgaatgccgcccttgttccatttgtgggcccgacctttatgagcgggaaaagtgccgtacggacagtgacaccgtctgcgagtggtgcctgaccaatttgcgagtgattgtccgcaacagcgactttcgcgtcaaatgtgaacagctcattgccctccgtgaccaattccgcgcggcattggttcaacattccgttgttgagggaaaagcgaagccaacgatttattcggtttcgatgttcgaaaatgcctccaaactgtggaagatcgagttgtttgtggagatggctttttacatcactctgattgccctcgtgttggc

SEQ ID NO: 89871 - DNA, 276 bp, Heterodera glycines
gcggatggttcaattatgagcttcaaggaagctcgtgatgcgggaatccttcagcttcaattcgacgggctggaaaccagactgaacgaggcatcggcgctgggagagatcaatccgggactcgccgaaattctcgtcgctccatgcggcttgtcagacaatggtctgccattgtcattggtccgcgcgtttctcaaataccagtcagtcaagggtcgcgtggacgatgtcaatggagaagtcattgatccggccaccgggcttggaaagtccatt

SEQ ID NO: 89872 - DNA, 550 bp, Heterodera glycines
tgaatccgtctgtcaacaaaattcacttctccaaagatgaattggacaagattttgagggatgctgacgagcagagggattttcccgcgttgctccgttcgcttggccaattggcttttcgtcccaccgatggcttttccctcccttcgtccgctctctcccaaatggcttcccattttgcttcgcttagccctttctccgcttttcactgggccaatggactcttcgctttgctcccatcagcagaaaaccatgccaattccgaagtgctcattgtttcgcttcttcgctcgttggttgacaatgtgccccttctgaatgccaacaaattgcgtgcctttgtcaaaactgaaatttcgcggcaatgcgtctcattttggcaaattgggaaagcgcatttggcatccgcactcactttatgtgtgctacgaatcttgctgatggaattgtcctatttggaggcaattcaaaacggagtctgtcgtgccgatttaatcgccgaagcgcagaacatttggtcgcaaatgctttctgctgatgaacttttgaa

SEQ ID NO: 89873 - DNA, 908 bp, Heterodera glycines
cactgattcaccccgaaaagatgcgattagtaactgctctgctaaaattcattgagcaaaggaaatccatccaatcggacgaacactttgactctgccgaaagggaaaaacagttcgacgaattgcgcgttgaaatgggtgaagccaaaataacagttgaagatttgtccctaactttcgcggttaatgctcccgctcgatgtttcccctacgaatgcgttgaattaattccaaacggcgcttcggttgaggtgaatggttccaatgtcgaattgtacgtgaaaaggcttgtcgactttcatttgaatgaaggaatccgtgagcagcttttcatgttccgcttcggcttcgacttggtttttcctctttcatctttgacttgctactcgaccagcgaacttcagactttgatctcgggagaacagagtccaagatggacacgagaagatttgttacggtattcggaaccaaaacttggttacactcgcgactcagtcggttttctgaacttcgtcgaagtgctcatgggtttcaattcggcggagcgtaaggccttccttcagtttacgaccgggtgctcttctttgcctcccggtggcctcgccaacctccaccctcgtctaactgtcgtacgcaaagtcggttctggagatgggtcttatccgtccgtcaacacgtgtgtgcattacttgaaactgcccgagtacagcagtgccggaatactcagagatcgtcttttggcggcaacagcagaaaagggattccatttgaattgaacgaattggcggggagaagcggggacgagtcagaagccattcattttcatcaatattttccattattatgtgaccacatgactgtataatatgattcttgatcggtgatcaattaaacagataatttgaaaa

SEQ ID NO: 89874 - DNA, 1100 bp, Heterodera glycines
ctcgactctctattgaaacgcgcgccacggcaccgtcgaagcaaaaagcaccgacggagcagaggacatcaccacgccgaacaccagcatcaacggggggatgtgttcggaggggaagccgaccaaaatggacaatttgcttcatctggaccccacgcgaagtcatttctgacgcgactcgattctgcgcattcgccgggctctccaaattcgcggaattctttcatgcaaatgatggtgttggaccgaagcagacagccttcggccgatgtcattgagactgtgtgccttcagaacggtgtgtgcacttgtgccgaaacgacctgcactttgcgctgctcttcgtgtgcgcgactcactttccgagagatttgcctgaatatttattcacctcatggtcaaatgcaaaagtttgcacttacctttcggcttaatccaaactctgtgcctcaaactgtgaaaatctctcagtcctcagctgagtacaccgttttggagaatgtgagagtcgtcgaatggcaaagttcgtcgttggatcgaccagaattgttgactgttgggtcagaaagtgcaatttcgcctgtttgaatctgctgaaagagaccaacggaaagtcgccccgttttatgctaatcggaaatccgcaaggactttttgacgagggcgaactcagcgcagatttggaagaacgaggcgaaggcacagtttcggaaaacagtggcagagcagcggacagaatggtccggacgcattatgtgatgtatgacaacgaccgactgctgagaagcaccgattgtcacgagcttttcgggagggtggcagacgaatcatgcgaaaatgagaaggaaacggacggaaaaggaagaacggaccaccgatttgaagaattttcttaaaattataaatattttcaaaaatttccatgccttcggcgccactcactgagagatggacgaactttgacattggtagcatggactttcgaataatcacatatttttaacttttcctctttatctcaattcaatgatcttgtttttctaaattgtttttttccgttcactttcgcatttttaacacataaataaatgtcaaaattt

SEQ ID NO: 89875 - DNA, 861 bp, Heterodera glycines
ttgagaccctccgcttccgtgaataattatacaggaatgaatgtcaatgacctggtaaatcagtttaaaagtgccgcacttagtgtgggtgaatatttgacgccggttttgcgcgagtccaaattccgtgagactggagtgcttactcctgaggaatttatcgcagctggcgatcactttgtccacctttgcccgacttggctttggtcaaaggccagtgattcaagcagagcgcgcgattatttaccaattgacaagcaatttctgatcagcaaaaaagtgccatgccatcatagatgttcagaaatgaactacaacgattcattggagaagatcatcaaggaggagggcgacgaatgggtggacacgcaccatttcgacacccaaaccaatttggcaccaaaagaattggacgatttggacacgattaacacagaagagaatgaaaaagcaacgacgggtgaaagcgaagaaagcggggaggagggagaagcattcgaccttgatgaatacatcggaagaggcggattggaggacgaggacccaaacaggtatatagcaaacactgtagcaaaagtgccgaaagaggctgctcagaatgagtcggatgatattggcattttacggactcgtacctatgacttacacatcacttatgacaaatactatcaggttccacgctcttggttgattggctatgatgagaatggcacgcctttgacggtggcacagatgaaggaggacttctcacctgaccactaggaccgcacaattacgctcgagtcgcacccccacgtgggcgacctttgcctggccaccatccacccgtgccaccatgcctctgtgatgaagcatctcatc

SEQ ID NO: 89876 - DNA, 612 bp, Heterodera glycines
agaatatgcaacaaaagtgcactttttcgttgattactcaagacaaaacggaagttgttgtcccttctgactttgtggatcagtccgatatgttgtcggattacgcaaaaatgcaacgtcagaacaacggagacgcggaggaattgcaagcgaaatttgaaatgaccaacgaaatgccattgatcagcaaattccacttggaaatgatcttcgaattcctcggcacttatcgagaggagaaacaaaaggaaaacgaaggggcggcggacgaaaagcaaacgacgaaaagcggcgaaagagcggccgaagcgacggcggaagaaagtgccgagttgtcgaccatgccgaagtgggcgttcgatttgttcgacaaactgccgaaaaatgaccttttcctggcaatgaatgccgccaattacttcggcatcgcccctttcgtttcgcttagtgccgcgttcgtttgcttccaaattttgcagaaaaaggggaagagggaagtcgcggaatatttgaacatggacgagaacgacaataacaacaacggcaaatgattgaacattcgcaatgtttcagtctctctattcacgattttttcaataaaacaaaataatt

SEQ ID NO: 89877 - DNA, 609 bp, Heterodera glycines
ccaacacgaacatgaaacccgcaattattactgcccttttaattgcgtttattctgcaccaaattaccgccgtaattgaaaatgaatgtggacaatgcaaacattgtctggataaaaatgattgttttctcaacatgatcactgcttgggctcagaatggcgaaatcgaatggccacgggtgttgggagagaacccaaatttgtggggaaaggaacaaaaagtgttggccgatgcgaaggcaaccgaagacaaacagttccaagacccgaaatttgaacaaaattttaaggcaatgaatgccattggtatggctcatcgcggtgcctaccattacttcagaggagagccgggaagtgccggtgccttggagcaagtgcggcattttctaaacacaagcataagggcgggattcaatgtgcacaaagactttgctgtggtcaatgttgaaatatataagaatgaaggtgcagacaaggaccaattcacgggaaagctgctcaattttgtcaagttactaaagagcaaagtgccgaaccttttcatccacaccagtgtcgatcattggtcggcactgatcaacaacgatcatgacgagttcttcgctctgt

SEQ ID NO: 89878 - DNA, 874 bp, Heterodera glycines
gagatctcggcaatttattttttaaatctgtatgtcttcagtaccgcaattatctgcttccgaacacaaagaacgaggaaatcgttattaccaagcaggaaaatatgaggaggccctttctcactacacccgcgctattataaagaacccgaatgatccgacttactttacaaatagagcactttgcaatttaaatcttaaaaaatgggactccgcagcggacgactgcagaaaagcgcttgacatggacagaaagaatgtgaaggcgaattactacctggggaaggtgtacgtacaccagggacagtttgatgaggctatcaaagtgctgtcgcgggctcatgaaggcgttctcaatcttaagcaaacatatggcgacgaaataacccaattgttacggttagcgcgcagagaaaagttccgtcaagaagaagacaaacgcataactcaggagattgaacttcaaagttacttaaaccaattaattgacgacgacatcgccaaaaaagtgaaccaattggaggacaaaaaggaaaatgacgttgaagaaaaggcggaagaactgaagacacagggggacaccttcaaaaaacagctgaacaatctctttgctcaggttgacgatcgtagacggaagcgcgacctcccggactatttgtgtggcaaaatcagtttcgagctgctcaaagaccctgtaatcactccttccgggatcacttacgaccgacaggacattctcacccatttgcaccgagtcggacatttcgaccccgtcacccgggttcctctcactgccgaccaactaatcccaaatttttccatgaaagaggttgttgaccattttgttcaggaaaacgaatgggctatagatttt

SEQ ID NO: 89879 - DNA, 1000 bp, Heterodera glycines
gagaaataatacataatcaattaataatgtgtcgatttcaatgcgatcaacaatgttgtcccagcaaacaaacatacacagcaaaggataagctgaaaacggaggagcagcaattctcacggaacaaaaatgtgaaatttttctcgcccgactcttctgatgaaagtgaggatgacgagcatcataatcatcatcatgacaatcatcatctgctgcggaccaaaacgaacctttcgaattacaactttttacaatcatgcgaagacaattttttccgatcattcgatgccacaaaaattgccgacaatttttgccatgacagtgactcatcgctgtcattatcatcagcagcaactgaggaggaggactcggaggagtacaacagccagcagagtgacagtgaggaggacagcagcaaaacaacctcatcatccattgacgggtcaacgacgacgttcaaactgaaatccattttgtcaacaagtgccaagaggagtccaacagctgagaagcatgcttacgagaggcgtgtcagttttgcggaccgctggggcatgcaattgacatcgtttcgcacaattccgaaccgttttgctgatcggttttatgacgaattggagctggacttcaatgaagttaatttctccgacaacacatcatatttttggtgccaatcgcttcagcagcagagaaacaatttgcaaaactggtcattagatgaacaaggagaggtagcctgctgagaattgcttaaattcggctggtagatgaacagaaaacagatgggctatgacggacgggcaacactttaattaattaaccctgcgcaacattctacacaaattttcattgattttgaagattttacctacgttcatttagcatttttttatctatttttttattagtataaaaaaatctttttaccgtagatcttacagtatcttttccattgcaattactgggagtaccgtcttttctaaaggatttgttgtcaacg

SEQ ID NO: 89880 - DNA, 595 bp, Heterodera glycines
gtttgagagccaattcaactccaaaagccgaaaatgtctcctgttattgcccctttcgtcctcgccatcattggcatcatcgccttgcccaccatcgaaggcgcagtcgggcgtcagcaagtcaagctgggcgagcagtacaaatacgagaatgtgcccggcaaattgatggtcaagcgacaaactgcggccagcaaggagccccagtatttgttcgccggtcaaacggcatggaccacggacggaaaagaccgctttggccatgccgagttggacttcgccactggcacaatgaccatccccaacttctccgagaacgacttgggctcctacaccttcccgcttgagcagcccaacttcagcgcagtgaatgggcccaacggatgcgagctgcagggtgtcggcgggacgatgttggatctgatcaaaaaagaatgagcgaagaacagcgactgatcggagggaagagaagaatggtgctaacgccggaatgacactcttttcaattgcattttaagcatttagcattaattaacactttggcatttgataatccagggataaagaacggacaaatcaaaaaaaaaaaaaaaaa

SEQ ID NO: 89881 - DNA, 480 bp, Heterodera glycines
cgaactgttatttattgagacaggccaggctgctctgcgtcgaaatatgtctcacaaaaacgcccaccgaggaccggttcctctctgttatctaaatataacgaaacacggcgtgtaatcctcaaatatacgagccgactaccgcctgtcctaatagaatggacgattgctactaatgaacgatctcctttgaaaggttttacggattcgatggacaacagacaggattgacacttgacaggagacaagagagagtgagccgcatagtaaaattattcgcgctttgcgtagtattgtgaacaatcgtaatttattgatttttttttaggtttgctgcgaacgcacaagtaaaacgtaacagaaaaatctttttgcaccgacttggaactttttgttgacactgttggaaaaagtttctctgaagacagttcaactctagtagggctggagggtgctttattaaaatttgctttaaaggaa

SEQ ID NO: 89882 - DNA, 744 bp, Heterodera glycines
agtccaattaagcttttcttttcccattcattctcttcgcctgtatatttaaaatgatttccatgatcaacaaattgctcgattggatccgttctctgttctggaaggaggaaatggaactgactttggtggggctgcaaagttctggcaaaacaacctttgtcaatgtcattgcgagcggacagttcactgaagacatgatcccaaccgttgggtttaatatgcgcaaaatcaccaagggaaacgtcaccatcaaactttgggacattggcggtcagccgcgcttccgttccatgtgggagcgttactgtcgcggtgtgaatgccattgtttttatggtcgatgctgctgacaaatccaaactcgagccggccaaaagtgagctgatgcaattgctgagcaagccccaattggaggccatccccgtgctggtgcttggcaacaaaaaagaccttcccgacgctctcgacgagggccaactaatcgacgcgatgaatctcgagtccatccaaaaccgggaaatctgctgctattccatctcctgcaaggaaaagtcgaacattgatatcactctgcaatggctgatccaacactcaaagacggcacgttgaagaattttggcaccgatcttcgtcaatttccttaaatattttgcactttttcatctccccatttcattttcctaaaattacttttttcttatttgattttggactaaaccaaaaaatattacggaaacattta

SEQ ID NO: 89883 - DNA, 628 bp, Heterodera glycines
gtccaattaagaaaagtcctttcacagtgctcatcgtcatcaaatgttttgtcagtggagaattaaagttaaaagcaacaacttcttgaattcgttttctttttactgccaaaagcagtgtctcttttcctctcaagaaaagtgcaacaacaaaaacaaatatttgcccgacgaggatggaatcgtccgttctgaatttcaatcagtgccgattcagtccgaaccttttaccgaaacacttctgaatcgaattcgacaattttccgctgaacaaccaaaacgagccatttttgtcgatgccgaaaacccttccaacattacaacgtttggccaatttctgtccaagactcactccgccgctcactttctcaattccattggcttctcctccggcgatgtcgcctgtgtcattcttccaaactgttggcattttttcgccatttttttggccgcttccatgcaaaaggcgtgcatttccccggtgagcacacttctcaatgaagtcgaactggcccgcatctttaatgaaacaaagtgcaaaggggtgttctgtgccgattctctgctcgaacgaattttggcgactcgtccgctttgtccccatttaaagtacgttgtgctcatttcc

SEQ ID NO: 89884 - DNA, 312 bp, Heterodera glycines
tatacacaatgtctttaattaccataattaattaatcaattaattaatttttcataatttgttccttccattgttcgcttctcttctcaggttgattgatcaccgccaccacacatacacactttccgatcacattttgctatatgaattccttcgcttatttaccatcaaacaaaatatgcaattttttggaccaccaatttaaagcacatttattttcatgatttaaataaattttccaccaataaacaattttgctttgcttttttctaaagaattataaatctttaaaaaaaaaaaaaaaaaaaaaaa

SEQ ID NO: 89885 - DNA, 599 bp, Heterodera glycines
cactgttgtggatgttgcagaagaaactgttgcacaatcaatggaccaattagaagaaggcattgaagtggggacggtcgtcaacgaagaaatggcacagaatgtgccggaagagcccatggcatcagtgcaattggcgaagcggtcgaagccgttcaatcagaggattgtcgagaacatcggatggcgaaaggaatttgggcgggttccaccgaaggaaagggactctttgggactgatcgaatgcattgatggcgcaacggtcggatgcaaccaacggcttctcgcttctctgaagagttcaaacccttcattgtttttgagaactgataagtttcgctcgagaaatgcgtgtggcaataaaaaaagcgaagtgagtctacaaattgatgaatttgacgaattctacaaacgatggatttcaaattatgagcaagagggagcggggaagagccacggagaggagaacagtgaacacgatgggaaggaggaaagtgaaagtggagacgaagaggaggagccaccacaaaacagccgaggacccgtgatcaaatgcccacggatgccaaagataagaatcaatttgaagcgacgtattt

SEQ ID NO: 89886 - DNA, 704 bp, Heterodera glycines
catgaaaaagcaacccagcgcattgcttccacaacgtcaacaattccgccaactcaacccgccactgacccacaccatgacctcgcttgccaacttacacaatgccaccgacgatgaccatttcggccgcctactcgaatccagtgtccagtccaatgtggtcgtgctcaacttccacgccgactgggccccgcaatgcaagcaaatgaacgaagtgtttggcgagctggcaaagttgcacccggccgtcgacttcatttcgattgaagccgaagagcttgtcgacacctctgaactctttgacattgctgccgtcccctcgtttgtcgtgctcaaggccggcaaacccgtcgaccgtgtcaacggcgccaacgccatcgaactgaccaacattgttgaaaagcacgccaaggcggccaaatcgcgctcggcgggcgccaacgccgacttttccgacacggcctcgacggccgctggcggcgccggcgccgatgcatccatggccgccgccccactggcgccggcggccctcgaggcgcgcctcaagcagctcatcaacatggcgcccatggtgctgttcatgaagggtaccccacaacaaccgcgggtgcgggttttcgcggcagaccattgagttggtgtcaaagtacaatgcccggtactcgacgttcaatatcttgggcgacgatcaggtcaggcagggc

SEQ ID NO: 89887 - DNA, 521 bp, Heterodera glycines
gcctttgttttgtctttgccgagcacaaatggctctctgcgtggcgatttatgataagcatgatgccctcctctatttacgcctcaaagatcgaatgtccgcttctcccttggaagtccaacgattcctgcacagttcgagtgacattgttgcggacaaaatgaactcccctggtaacaaggccacccaacaagaaaattttctcggtgcacttcttttgagtgatcgctttcggtcattagcttatctgacaaacaccggtacgaagttccttttggtcatcgatgcggaggagggcactctcaaagatcacgaaattcagctctttttcaaaaacattcacacaaaatattgcagcgccatttcaaatccgttttattcgtttggaagtactttgcaatccagtaaaattgatgccgtcgttaacgaactgcttacatccttttgactgttcagaaaagcagtaattgatcacagaaaagagaactattgcaaataaatataaattattttcttttgaa

SEQ ID NO: 89888 - DNA, 592 bp, Heterodera glycines
gtttgaggaattaaaaaaaaacaacaaaaattgttgagccatggaaaatgcggacgaaaagccgccgccggtgacaagcagcggcggcaccaatgccgccgccgccaccgctgcgttagcaatgcaaaaaattgtccaacaacacgcagcaaccatcgcgaaccaagtgcagcaacagcagcagcaacaaacagtttcttcttccgctgtcgtcgccccttccgtgggcatcgcttcattaccccaataccatgtgagcgcgccgcaccagaacatgccgggcagcaagtaccagcaactgttgctgttcatcgatgaattggggcgtgtcatccgccccacatacaacgcgaatcgcaacgcgcaggaacgcctgaagcgtgacattgtgcaggcgcggctgttggtgcgcgagtgcatggccgagttggagcagcagcgcaagcagcagcagacgtgacaggacggagatagagagaaagacgacagacaaattaccgattgattttttaatgtattgattgaccagttttgtaccaaaaatcttctcttttttctggattgatgcacaacgatgggaattgttcaaaaa

SEQ ID NO: 89889 - DNA, 884 bp, Heterodera glycines
aaggtttcccacattttcaaccgcaaaagaaatatcattgaattggagttgcgtcagacagttccgcttcaaaaaggatgtcagaattacaccggccctctcacaatcgttgatcaagagcttgaaggtcattttgctcacactatccaaatagacgccgccgtttctcgccacgacatccaatgccattcgaaggggcgtaaactaaagaagaaacggataatgctcgggaccggagaagaggtcgacgtcgacctaaactcgatggacttcgattcgccagtgctttggattagagtcgatcccaatttattactttatcgtcaaatgtcaatcaaccaaccgttttatcaatgggaacttatgcttctccatgaaagggatgttctagctcaacaacaagccattgaaacactttgccgtttttccgaacacaaaacaaagatacttttggaagagacagtccgaaacgacaaattcttctaccgaattcgacgagaggctgcccactgtcttgtccaaatttacaacagtctccccgaaagccgtcttggcgagtctcccccactcatcgattactttcgccagaattttgggagtaaaacttcgcctgacattccattaccaaataattacgcggccacttcctccaaccttcagaacaatttgcttggacaagctttgcccgctgctattggcttaattcgaggccaagacggaagagagtgtccggaatacgtgttggaattcatcatcaacctgattaggctcaatgacaacagcactaaccgttattctgacgattactacagaggagcactgatccacgcacttggcaaaactttgacaatgtctgaacggactgttgaacaacccgattgttt

SEQ ID NO: 89890 - DNA, 769 bp, Heterodera glycines
aggaaatgcactctaaataattaagtgaacctgtaaactttttaaaaatttctttatccttttttgcccaaaaatgactgccgcccgtcttctaaaaatggttccatccgaaagtgccttgttggtctgtgacatgcaggagaagttcagggagcacatcaaattctttccgcagattctgcaggtcacttgccgcctcattgaagctgctaaactgctcgacatgaagattttggccactgagcaaaacccgaatggacttggccacactgtgccagaaattgtcctcaaaaagcatgacattcccgtctttgagaagaccaagttttccatgtgcgtccccgacctccaacgcgaactcggcctctccccggccgttcggtcgctgcttctctgtggcattgaggcgcatgtttgcgtttaccagtccgccattgatttccaacagcaagggttcaacgtccacgtggtggtcgacgcaagttcaagccgttcaatggtggacaggatttatgcctacaaacagttggagaaagtgggcatcaatctgattaccagcgaatgtgccattctcggcttggttggcgacagtgcgcacccaaaattccgtgaagtccaaaaactgatcagagagagtgcgcccgacacgggactgatcagcaacacttcgcatgtctgatcagcagatgatagatctttccaaggactgtgatgagacacaaataaattttaatatgaaattcgtatttattttctttttattaataga

SEQ ID NO: 89891 - DNA, 863 bp, Heterodera glycines
attctctcctaactaattaatcttcaattttcctgctgtgtttattgttatgtttcaatattcgccttgcttaatttagtaattaattaattcattcgtgtaaatgtatcgccgtgtcttttgttattcttcggctcctttggccggtgcccttggcgcatacgctggtgtgacgatggcaaaccaaaattctccatcgacagaaaaaaacacaagcgaagttcagcagaaagtcgcaaagcaagcagtcgtaaaaagtggaactcacaattctcagcctaaagatgttcaatcgcttggcaccggtgaaataacgcgatgggactataattgggacaaaagagaccctttttctatggttattggaaaggaatacgaagcggcggacgaagaaaagaaaaaggaaattcttgccaagtttgttccgaccgcaacacggaacattttcctgatcagacacggacaatacgaattggattcaaagacgaaggagcttaccgctctcggacgtgaacaggccgacctcttgggaaagcgattggcggagttcgaagttggcaagggaaagaaaatcaacaaatgttttgtgtccacaatgaaaagagccgaagaaacagccgatattgccttgaagcatttgccacacgccgcacaaatccaaaaacattcggatttgctgagggaaggggcgccttgcgaaccggaaccgcctttaagttcatggagaccgcagtattacttccacgaggacggtgctcggattgaggctgccttccgcaaatatatccatcgcgcctcgccttcccaaaaggaggactcttttgagctgttcttttgccatgccaatgtgattcgttactttg

SEQ ID NO: 89892 - DNA, 605 bp, Heterodera glycines
actttccgttgccctttttgacccccccccctagggctttttctgcttcccttttctccctcaaatcacttcccccaatgatttgccccaacttcgttcttttgtcccttttatccgtctctctgttcagttccctttcattagctgataatcagaccataacagtgcatgggcaaacgatttgtcatcgtcgaagtgtgaagggactgcacgttgaactgagagagcacgacacatttgatcccgatgattcgttgggctcgacaacgacaggcttggatggctcgtttaaggtgcgcggattggaaaatgaaatcggctccatccgtccctatttgagaatcacccacaaatgcgacgtgaaggacgaattgaaatgccgtcgtgtaacggagatcgacatccccaaggagaaggtgaacaacgacgtgtacgagatgcattttgtgaatttaaatgtgcatggccatagggacacagagaattgcgatgagtgaccaaaagggaagaaggaaaagcgaaatttgaacagatcaattgtaaatcaaattcaaaatgaactgatcaagggaaatacacatcatttaaaaaaaaaaaaaaaaaaa

SEQ ID NO: 89893 - DNA, 628 bp, Heterodera glycines
atttccaatggatttgctgctgttcccattccctgggtcaatgatgtcgacaattttgaacttgcaaaattcgattattcgcctctccctaaatttgctgaaaatctgccaaatcgggtgttttgcaattgtaagggcaccggcggatgctcggctcagaaaggctgcgcatgtgtcgaaatgagtaccatcgaactctcagaaccaggtcgtgtgcacaatgcccatttgctcagtgagaatgcatttgagtcgcgcttcttcgagtgttcctcactctgttcgtgtgccggcacttgtgccaatcgattggcgccgcaaaacgacgcgcagcggaatcatttgcaaattttcaagacgctcaaggccgggtttggatgccgtgcactgaagccgattcggaaaggcagtttcatttgtttcctcggcggcgaaatctttcccttcgattatccgtccaaaaaagcggaggaattcaaacaaattgtcgatgctgacaaagtctgcttcgccttcagtgacaaagtgcgtcaattcgcctttttcgtgcgatttgaccgattcgcaaatgaatcgcgcttttttaacagcgcctgctgtcccaacaatcgtttggtccatctcttcc

SEQ ID NO: 89894 - DNA, 687 bp, Heterodera glycines
aataaagttttgccattgacactttcagcaaacaaacaaaaaaatgggcagcagtgcctccgaatcgccgccaccgccaaaacttgtcgccatccaagacttgcccatttacaaggccgagtccgtcccggccgtacgtgctgcacggcccgtcgacaccattggcaggccggccacttttggtgaggaagttttcggcaatttccgcttggttgcgctccaattgagggacttcgtttcggaaaagttgggcgttgtcaacagttcccttgcacccataagagacgcggccaacgccactgaacagttcatccttgacgagcagcgcaaagtgttgccccgtgccgtcgccatttccatgggcggcatggccggctttgtggcggccatgcgaaagggcggacggatgcgccgcacattttatcctttgattggactgctgacaatgaccgccttttgctacccaaatgagacggtgcactccgtccgcgttggcattgcccactcgcagagcgcatggcacaacttcaagcaggcgcctgaaccgaagagcagttgactgatgaacaattcaaatttgtgcatcgtttttggccattgtcaaggggtgacgaacacacacattttaatgttgtaggatttaaattttaaattctgtttttcggtctgataaataatttcaattaa

SEQ ID NO: 89895 - DNA, 625 bp, Heterodera glycines
ctttccgccatttcccttaattttcccgcggctcttccaaatgaaagccggcgccgaatgataaaagccgaagtgtcgctctgttatttgtactcatcgacaaatgccgccgacttcttggccaaatgcctttgtaagcaccgcaaacgaaagaaatgaacggcgaattgtgccaacccaaagcagcagcaccagcagcagaaacagaggcaggcacagaagggttgcatcgtcaccagcagcaccgatcatttcgtccggcgcttctccatcgtcttcggcccctctctttggccatcgtcgtcctcccccgtcgccttggccatcgtccccatcgtcgtccccccgatttccccccttttctcgggtctctgctcataatcgcctcctccccctcccgcttctccttctgctaattcttccgatggccttctcctcccttctcattcattctgcaaatgccctccaccatcggcacgaacacccgcaaaaatgttcaattgagggcgaaatttgcacaacaattaatgctcatgtgtgccgaaatgggacctgtgtgtccgcttgcactcttcgcggcatgaaagagtgccattgcgacgtggaggaggacaacttttgcttt

SEQ ID NO: 89896 - DNA, 611 bp, Heterodera glycines
gtttgagtaaaattttctatatattttgtaatgtcttggcctgatcttgtcaacaacaatttgatcggcactggtcatgtttctaaggctgcaatttgtggcttggacggttccatttggggaaaatcggacaattttaatttggatgccacggaagtaacggcagcgatgaacggactgaagcagccggatgctgtgctcgcctctggacttcgtttcgaaggagaaaaattttttgttctgcaagcggacacggatcggatcatcggcaaaaagatggccaccgggttcttcatttacaaaacgggcaaagctttcatcatttcaatctatgagggtggtgttcagcccgaaatgtgttcaaaaacgactggtgccttggctgactatttccgaagcattaactactgatcgatcgggaccgaaccaattgtgacccaaatccatgtttttgtagtgcctgatattcataaagcacatcgaatagccttccccgtccctaattgtccctaattggtttgatgctattaaagacaattaactgattaatgataatctaattgacaataattaatgcctttaaatgccatccccatccaccgttgttaata

SEQ ID NO: 89897 - DNA, 641 bp, Heterodera glycines
ttcgcaatgagtgccgctgcgacccaacgtcttcaagcgaagcggcaaactttggacgaggcttatgctcccccagccaattttttggagatcgaagtggtcaatcccatcactcacggggtcgggaagaaccgatacacggactacgaagttcgactgaggaccaacttgccggtgttcaaacacaaagagtcgagcgtccgtcgacgttactcggacttcgaatggctgaggaatgagttggagcgagacagcaaaataattgtgccgcctcttcccggaaaagccttcaagcgccaattgcctttccgttcggacgacggcattttcgaggagggcttcatcgaagaacgccgcaagggactggaacagtttctgaacaaagttgccggacatccgttggctcaaaatgaaaaatcgcttcatatctttttgcaaatgaacgagcttgacaaaaattacgtcccgggacgcattcgtacggcctgaccaactgacaaactctgcgaatttgccgtttgcccattctcgaccgattaatgtcatcgggttttccttcgtctttttttgttggctcccgccctcatattattattttattgacttatctccaacgtcactttctgaacattacttacgtc

SEQ ID NO: 89898 - DNA, 555 bp, Heterodera glycines
ccaagtttgaggtaaatatcggtttatttaatccaacccattaaataacccccacgtaagaattgaaagaaatggcgcccaaacaaaggatgagtgtggccaaccaacacttcagcaaaaatgtggtggcccgcggtcaggtggccaagtcattgaagcccaaggaaaatcagtacccggccgcgccatggctgatcggcattttcgtgttcgttgtttgtggctcagcagtgtttgagatcatccgatacgtgaagttgggcttctgatcacagtgtgattatatgtgtgtgtttggcattttgactgacggacggacgagtgtttctttttttcttggtgttgtcattggcgcattgtttggcgggaaatttggactggacacacatttaaatgaacaaatgatgatgatgaccgataattggttgacttccctttaacttctactctttcgttctctctgtccattcatttccatccatttgtttcacaatttcctaacaaatcgccaacagaaatttaattatttctttaaaaaaaaaaaaaaaaaaaaaa

SEQ ID NO: 89899 - DNA, 830 bp, Heterodera glycines
cgaatggaacagtcccattgggttcgttcctccgttcaccgatccattcatcagttgctgctgttgactgtgctggtgatggttttgcccgttgttttgccattggtggtggtgcttctcctgttgctgctgtttcgtcgcgctgtccaccgaatccaaaaatgccatgccgtaaaattgggcccgctctttcaaatttgagtacagtccatccagcagcgatgcccgagtgcgttccgccaatttggcaaatttttccgccttataagccgcgttttccgcattgatcagtttggtgagcaaaaagtcgcgcagttggcacttccaaattatggaagagcgcggaagcgtcgggccaaagaacggcacgtcgtctcgcgctgtcatcgacacgcggtaacgcgtgcggtcagtgcccggctcaatgggatgaaccaccaaataggcgtggagaaagttgctcgcgatcatgtccggacagaagggtgtgttctgctcttggaaaacaatggccacgatgtcgttgccaatgtgccgcttgcgctgcaattgttgcgcgtcgccaatgcaaacggtaccgtatgcccgccccactctgccccaccgaacctcggtgcccgactgtccatgaacggtgtccagtccgccacgataaccgtcaaaatgacgcaactgaactcggtggccgatgatggagagaaattcgtctaaggccgcgcagttggaggagtcgttgctgaacagctcctcctcggtggtctgcccaaacttttggtaaattgcacctgtgaaaggggggcaattaattgatcagtgattctattttgagt

SEQ ID NO: 89900 - DNA, 678 bp, Heterodera glycines
cagaacatacgtttttgcaaggtgctggtcagccggactgctcacacacttcggatgagtattgtcagctcccttattacaccgctatccacgaactattccctccagagcgttctcggtgggtgccgctgcccacccaaccgcccatcgccagccctctgtcagtgcgactcgtccagcggcaacatctacctggaaaccaactgaacctaaccatcgccatccaaggtggcactgacaagttgtcattgcatatcactccgctaaatggcttccaattgcgacattggtcattgacgccttttgatcctgccacttttgggatacgcaaaacgtactttgtgtttatgacttatggatttgaatcgcccggagaacgtctcgtttggattctgcttgagaataatgaacgcagtgttagcgcgacggacgaagtgccgagtttggaattggcagttgccaccaaatatgtgcatggaaaaaatcaaaactcggacaccttgttgcagttgcgttcgcttattgccaacagacggcggacgcctcacgcgggcgttggtttttggcgttgggccatcacaatgattgcgggtgtgtctgagattgtcatacatttcttctaattgccaattgtcttgccaaatactgatgcgcattactggatctaattcgcgactt

SEQ ID NO: 89901 - DNA, 1024 bp, Heterodera glycines
gacaaatttgtcaagcgttgggagcgttctcccgtcggcacttccttggccattcctcacattcctatggcggtgccttccatttcgcccctcgggcgtccccatcctccgccccctccccgctctccaagtcggccatcgtccaaacattcctttgcaggcgaccacggttcattattacaaacttctccgatcaaccgaattgtggacgaggagggccaagagtgggaggtggaggaagtgcagctggacgtgtccaagacgggactcggattctcaattagcgggggttgcgaccgcgagcctgacttgatgtataacgaccgatacattcgcgtgactgacatttcgaaagggggcgccgtggagacggaccgacgcattcgcatcggtgacgtgattctgttcgtcaacgattgggagacggccaacagagagcacgacttcgcagtgcaagcactgaagaacgcgggcacttttgttcgactgttagtcaaacgcctcaaatatccgccgctgcaaaaatcgctgagtcaaagccatttgagtgagcccatcgccagcggcaccttccaacggtcgttgagcggaggcgcggccgacagccgaacattgcctctgcagccccccgtccgttcccaatcattgcaccatttgccgatgaatgccgtcgcaacttcgccaaatgttgtcactgcgatgggcactttgccaaggcgggcgaatgtacagcagcaatttgcaacgccactaaatgacccgggcagacagccgagatgggttgtcatccgaaaaggcgaaatgggcttcggttttaacattgtgggcggcgaagatggcgagcccgtgtacatcactcgcgttgcacccggtggagcggcggaccagaccggcaacattcggatgggagacgtattgctgcgtgtcaacgatgttgacctgtcaatggctacccatggagaagcagcggtcgccctgaaggcgattccgcagggggcccaagtgaaactgctattgcaattca

SEQ ID NO: 89902 - DNA, 864 bp, Heterodera glycines
agcaaatcgcaaggcaacttttcatacataatttgcatatagaattagccatgatcttcaggttaggcaattttcgacattttcccgtcaatttttgcaagttgtgtattgctcgtttcaccgtggccttttctcgccgtattttccgtgaccatttttcgctgtttttgcgcagcaaacgaagtttgctctttggcgcttctttggtcggcgtttcgttcggttcaaatgtgactttggaagacgaatacaaaaggataaaaactgagtgcaaagaatgcgaccctttttcgcctcccccaactgacgaaggttggacactcttttggtgcaacaaaagtttggcggtgtaccggcggagatttgtggccaatgggggaaattgcgtgtttgaataccgatgcattggcacttacgaagacatttcacccaacgattttgtaactgtgcaggaggacatttcctgtcgactcaaatgggataaaaatgtgaacagcttggacgagttggattttgattacaacacggggacacaagtgattcggtgggagagcaaatatcccttccccctttggccacgcctttacattttcgctcgtcgccaattcgttgatcggccaaggaaacaaatttatatcttaagcagagcacttagcagcgacaatttcccggacccttcgcaaacgaccgtccgagtggaatgctatgaatccattttgatagtgcgcgcacacgacagtttagacaaaaaaggtttggactttgtgctctcttattacgacgacacgcggtcttccatcccacagaaaatctaccaatacggcattaatgttattggcccaagctttatcgaagatgtgcaca

SEQ ID NO: 89903 - DNA, 680 bp, Heterodera glycines
ccaagtttgagatgatcgtgataaatggtgcagcgcaatgttctttttcagcttcaaatttacccagtatttctgagtcaaaaaatctaaaggccgttgcgaaaaatggggcgaaacaaacaataagcagttttactgagttgtttgatgagctggccgagtgccaatggtattggggtggcatttccgctggcactgcttctcgcctgctacagcggcgatcccccggcacttttctggtgcgcgactcgcggtcggacagatcgatcttctctttttcttacgccaccgcctccggcgtttaccattcgcgcatttaccgattcaacggctatttttgtcttggcggtccaaatgctttgatccgttcgccatctttgcgcgactttgtcctccaaaccgtcgctcgttcttcggttgacagcggagaaacaaactgcaaaaaaacaggtctatcagcaacgacagcaagtcgtaacgcggagctgccacttcgaattttgatgcacccatcgtccgccgaaccgacagcgcaaccggtggacattcgtgttccattgtgtcgcaacaacttcgtgcccactctgagaggcgcttgccgtttggccattcgtcgctccatctccgactgttcacgaatcgaagaattgccaatccccaaaaagctcaaaaagtttctt

SEQ ID NO: 89904 - DNA, 654 bp, Heterodera glycines
gtttgagatgcttttgtctcctccactgctcttcgtgctcagtctgtgttcattgtgcgtctttggccataaaacgccgaatgcgtcggatggcccggcaatgccggaactgccgaaagcgctgcaaaagctgagcgacgcggagaggaactgtttgttcaccatttacacaatgtccaaactgttcgagaacaaaaaggtgcagaaaacgctggccaaacagttaaagtcatgcgacagcaaagacacttctgagccggacatttggaagagtcgggagaagagcaacggatggtgtgaggtgaacttggaaaggatcgacagcgaatatggccccgtaattatgcacgcccatggctcaatcgcctctatcaacggcgcccgtctatttgtgaagtcgacctcggggggcatttggatagcgatttatcagccggaatgcctaaaagagaaggatgagtcgaaaaaatcggaggaaggtgttgtgagcaacactttggaccgagtccgacgttgggttttgttaaaatgagaagaaaaggaagtgaaagccgacggaccaacaattataaattaacagacaactgctaatgatcaatgattgattttaagtgtaaatttgtttcaattggttttttaaataaaaattatttt

SEQ ID NO: 89905 - DNA, 825 bp, Heterodera glycines
cttcatttcaatatttttattttttattttggaatttcctctatcaaattgcccaataatctgtggcttttcctatggcttctcagcccataaaggcggttttgttcgatttgggcggagttgtggtggaatacagtgaccgaaatgcgtatttaaaccgactcaaaatcatccaatcaaatgccaaatttgtcgacctatttgaacagttcgagtgtggccttctgaccatttacgaaattgagcccgaatttcttaaaacagtaatgggaaataaaagcggagatgacctaattaaggcggctaatccgactaatttgatgaaaacgaaaaatcctttcgttgaaaatgccattcgctcacttcgttcctcgggcaaatatttggttggccttttgaccaacaatggattttgggtgcgcgacagatcggagtcgaagttgaccattgacacttccgacttcgattttgtcatcgaatcgtgcaaaatcggcgcgagaaagccaaatgcggatttctacgagatggctctgcttaaaatgggactgtccgcggcagagtgcgttttcatcgacgacctcgaagaaaattgcaaaggtgccgaagcggtcggaatacgaagcatttggctaaaggacgacgactacaaaacggccatcgaacaattggaagaaattatcggcgagaaattactttaaattgccattcttttgtggcaacattttgtagttaaatggtcaattttttaaactaatttgtggcttcctaagcttgtctgttgaacattcctttgttaattcatctaaatcatattaacttttataa

SEQ ID NO: 89906 - DNA, 1048 bp, Heterodera glycines
  unsure (1)..(1048): unsure at all n locations
caactcgccgtccatctgcttgttcagtacagcacaatgttggacatcaccgccagggcttttcagcgtcctttcgccattgcttttctgatgccttctcaacccactgcaaaaaatgtcgaagcgttccaacaagcggcggctgaactgcttatgccaatcatcgcctgcaacaaacgttacgtccattcgattttgcgtcaagncgatgctaatgctnttcggaacgggaccagcagaatgtgcagtcatactattccacttcagggaacgcacagcaaattgtgatcgtgtcgaacaaactcaagtccgtggttcaaaagacaaatgcgtggtttgagcgtgtttcagaccaattgtgtgaaagtgacgggtcggcggacgaatgcttttgcgaatgcgctggccccgaagagtttcgccagttcgttgttttgcttgcgcaaaaacactcgtcctgtgcgcttctgaatctcatggaattggcgccttgcaaagacgtcaaattaaaacactcaatccaagaggcgtaccttcgtttgacagacacagaagtagccaaaggtctgctgttctgtggacagacggctgtggtgcggagcacttttggggcaaattctgaacttccaaggcatgaaactgaggaccccaacagaacagaggaagaatgtattcctcttgtcgtggccagagaaagcactctcaaaacactttcatatcgtctattacggtgtgtctatcctttgctgactggtgaacgaatagtaattttggcgtcaaaacagcgcgtttcaaccggggttgaccttctcaacaagttgaactcaatgcgaatttgtcgaaggccagagggcgtaaaatggaatttcgattctgacatcgacactgaatcaaataccatgtccgacaacaacacacactgtcaattgtttggtatttctcgtgaggcgaacgcgacttcgcagtggattaatggcgagaagtgcgaacattgtactgtcgttgacttgggcaaccaaaaaatgcgggcccatgaatactcgggccg

SEQ ID NO: 89907 - DNA, 532 bp, Heterodera glycines
  unsure (1)..(532): unsure at all n locations
gaaagacaaaacccatcatttaattatttccactggcacaaatgtgccgcaattcgtcgcccccatttgttcttttcgttgttttgctggcactcgtcccctttttgtccaccggtggaatgccacgtcatcgacggcaccaacaaaaggaagcaatggaaaatgccggcggcgaaatggctgacgacagcggcgacacttcggcaaattgcagctacacggacccgtactgctacaactcggaggcgttcatcgacgcggtgccaataaaagaagaaaaagggacgaaatgaaagggagagagaaggcaaatgactcaattttgacgataaaaggcattcgaagtgttcttctgtatcatcaaaattaattgatatgccaattgattagctaatttgtgtcttcttaatgacttaagccatggcatttccatttttgtcgcgtttctttccaattcccccccccccgcaaaaaaaaagcaattanaaaaaaaaaaaaaaaaaaaaacccaaaaaaaaaaaaaaaaaaaaaa

SEQ ID NO: 89908 - DNA, 611 bp, Heterodera glycines
gaaaaacaaattatttcgtttttttttaaattttctatttcaaaaagaaaagacaataattccaatgaaagatgaaaacgctcattttactccacagcaaatttcaaagctgttaaatctacacatcaaaagtcacaaatgcctagatgttaagtgccaaactgaacgacaacagttgcttagcaccatagagaagctggcaagaaatttttacgacatttacaaaatgtttgaaaaacagaaacgtgagatgagcagaattagcaatttatacaaggatttctgtatacaatttggtctgccggtgaaaattgacttggtgaaacaacaggaaatcagtcagatcgacaaagtcgctaatatgatttaccaacattttataaaaataagagaggtcaacaagaaaagtaaagtgcatccaaatttcgatgagaacttgcaatcctctggattgacttccatcaatggacaatgcaaaaaggacttttctggtctgagcaatcgcaagaagagtgggtcttcttccagttcaatagtggctattgacaatgagaacagtgcacaaaaaaatggttgcgaaacatcgttacgggagacagacaatgggaaaa

SEQ ID NO: 89909 - DNA, 636 bp, Heterodera glycines
gaaataaatgcgtaattaaaaacggaaattaaaaaatggatgaagaaaagctgaaaaacgaagtggccaattgcatccgctccttccctgactttcctacaaaagatgttgtgtttagggacatttttccattgttttcaaatccgtcgctgatccgatcaatctgtgcccacattgtgacactttatcgacaaaaaattgatgtggttgtggcgctagaagcccgaggatttttgtttggcccaattgtggcgcttgagatggacgtgccatttgttcctgttcgcaagcgtggaaaactgcccgggtccgttttctcggcgacttatgtgaaggaatatgggcaggatgtttttgaaatccaaaagaatgcattgtcagagggacaacgtgtgctgttgttggacgacttattggctaccggtggctctttgaacgcggcttcccaactcataagccaatccaacgccaaaacgcaggctgtgtttgtcatcatcgagttggaaggacttaatggacgccgaaagatggattttgatgcggaaatcacttccttagttaaatacgcttaaaattgacacaattttttttttatcagatatcattttttgtttttatgtttggcatacatttttt

SEQ ID NO: 89910 - DNA, 599 bp, Heterodera glycines
tgatcaaaaatgcgttccatttgtttctgccatttttcggcattccccttttctcgtcaattcttcggtggatgccatcgctctttttcatcaccgatgacgcccttatttttgagcttttctcttctgctaatttattcccagtttgcttctcctacaaatgcatttattctgcaggaattgccattgtaccgtaacgttcgcaatcagcgacatgccactcccccgattggtccgtcaaaaccctccattgactatggaattcgtcgttcgactgtctctatgcctttggtgatcagaattgaggacggaatgccaaccatttttgtgcgtccctcgcgggcatttaatttccacagattgaatcgcttgcaagaattctggcaccgaaatgaagcactgagaagattgacccaaacggggaacagaccatgaaatgatcagcagagaaagaaaaagaaaagaaatcggatgatcagacaaattgaaaaggaaggacggaagacaaacggacaaaattgaccacacacatttaatttgatctctttcatgcaatttggaatatttaataataatgttaattaaacattaaaatttgt

SEQ ID NO: 89911 - DNA, 601 bp, Heterodera glycines
atctcaccaaaatcagtcgtctgtgccacttcaacgggctgttgcgtctgtttacaatgctaattcaatttcaacttcgtccagttcaactaaacatgcagtggatttgataaacgaatatctgacaatgctttccgtctgtctctcccatgatgaattgaacaaattcgccattttaatgcgccgttggcgcgcacgtgaaatgccaattttggagttcgcccaaaagctgctcgagctgtatgggccggagaggcggcaccttcttgcacgaatgcgcactttgcttcgcggcgacccttctgacttggaagcactgactgattttcttcgtgccaacggagtggtggagaacgcagcggcaatggccgcgtcgccacttttgaccgcggaaataagtttgggagaggggacggacagtgccaaaagcacggccagttccttgccttcggcaccgcttcatttttcgtcttcgcatggttttccatccgccgattttcaccgacctaattcatcataacctttcctgaataatttacagctgtcaattaatagttaacaataaattttaacattccaaaaaaaaaaaaaaaaaaaaaaa

SEQ ID NO: 89912 - DNA, 663 bp, Heterodera glycines
cctcgtgccgaattcggcacgagggtccaattaagcgtccctacccaaatgaatattgtgtgtccgtctcaccctgaagcggatttggtcgaagatgccagggccggcgatttgatttgtactcgctgcggtttggttgttggagaaagactaattgatgttgggactgaatggcgttcgtttagcaatgaaagttcgggaaaggacccctctcgcgtcggtgcccctgagaatccgcttctttctggctccgacttatcgacttcaattgccgtttctttcggatcggacagtgatagagctttggcaaatgcacagaggaagcttttgagcagcaccgatcgacaaatgacacaggctatgatggttattcgtgaaatgagcgagaaaatcaacttgacccggacaatccaagacagagcggctaaactgtacaaggaggtcctcgagtcgaaagccctccgcggaaagaacaacgaggcacaggcggccgcttgcctttacatcgcatgtcgtcaagagggggttcccagaacgttcaaggaaatttgtgcggtgtcaaaagtgtcgaagaaggaaattggacgctgtttcaagctcatccagaagaccatggagaccaacttggaccacataaccagtgccgatttcctgtcccggttt

SEQ ID NO: 89913 - DNA, 1280 bp, Heterodera glycines
atctttttgcatccccgtcctgacatcatggacgatttgtgccgtcgtgggctgctgaccacggaacaaaccccgcacgagccgtcctccgcagacaaatttgacggagcggatgaagcggtgttggccctggtggacaaataccgacgcacttgcggactgccgaccgccaagcgcagtgcgccctcaccgctcaattcgctgctgtcgccaggcaaactgccgcccgccggaaagccgccgacgccgtacatcccaacgccaggcggttccgctgggtacgcgccggccgcgttgctcaagcaacaacagcgcaacgcctcctttgggtatcactcgaacagcagcagcagcaaccaggacgactggcaggcacttcttcaaccaccgcctccaccaccgccgccgatgccttcgttgtcgtcagtgcagactgcgcttagcggtgggacaccgcgcggtattctgagccacgcgtcttcggctgctgctgcggcgcataaacgtgacactttgcgctcacccgggacagaggcgcgacgaccaaagaatcagacactgttcaaaaatgcgctggagcaaatccgtaaaatcaatgaggagtcaaagtcgggcagtggcactgtgccgtcagcgacttctgtttcggatccgtttccatcatcatccattcctccacttaaaacgccgtctccacttcgtccattgatctcaaccatttctgcaacttcaactgaacaacaacatttgccagcacctcctgtgcctcccaatcttccgcgtgacccacgactgctcaaacatggcaatgccaccgctgccgccgtcgttgttgttgtagacaagccaaaccaacaacaacaagttcgatgtgccacaattcctgtcgatgctcgccccaattctgtcctatcgccgccttgcgacccacgtctgaagcgcatcagtgctgaagcagtgcctgtttcgtcgccctccgtccttccgccactaccaaagttcaaggcaacggtgcccgtgttgaatgtcaggccggtgtcctctgctgccgccgttgttgtaccaccgccgccgccgtcaccaccgccaaatgtgtctgttttcaagcaattggtgccatctgctgcttctgtttcgacgacggcgccggcaccaccaaatttgggtttcaaacgcgcatatggccttgtcggaatggtatcttccggcattgatataccgccaccaccacctccgccagaacttgcaccgccggaggagaaaaagatgatgttgcagcc

SEQ ID NO: 89914 - DNA, 779 bp, Heterodera glycines
cataatttaagctatttgccttttttaacattattgggccaaaataatggccagacagcaacaatccacggcttcttcttcttgttcgtcatcatcgatgtgctgctgcaatgcgttggccaaaatgcatgaaagttttgtggccaaatttcgtgtcatccgaccgcaggccaatctgatcactttggacggggacaacaacaacgacatcattctccatgaagaagcagacgaagatgaagcaatagctcagccctgtacttcttccgccggacaacagccgaggccgattggtggtggtactgctgacgaactgcaacaggaggcggaggacaacgaaagtgttttgctgaacggcgccgaatcgccgacccccggcgccggcactttgggctacgaaattttggcggaggactccaaaacgccggccccattctatgaaatgatgagcgaaagtgagctgaatgccgaacttgccaaatatggccatggtccgatgggaaaacgtgcggctatccgacttttgaaccgaatttatgaggcaacacacccagtgatttcaagcgacacgccaatcccgcggaaagttcggcgcgcattggcgacggacgacggctgcggcgacaaaaatggggcggctgaacggcaacgggaacggaggaccaagcagaaaattggccaaatgttgcggttggccaacaaaaatgccgagacggagacgacagggaattatgccaagcaaaacgatgacggtggcggcgatggatttgccaacaatg

SEQ ID NO: 89915 - DNA, 282 bp, Heterodera glycines
atttggaactgtccgaatgcattcccttcgatttgtttcatcaacaactcattttcatgctccgttcctctctttcaaaacagcaacgaaacattttcaacgcattgaaaagttcagcggcggtgagaaatttcctcgtcgatttttatttgaataatgtcgactgattggattgtccttttcgacctcacaatcagccttaacattgcacttcacgttaatatttttcttattaattaatacacgtttacgttgaaaaaaaaaaaaaaaaaaaaaaaaaaa

SEQ ID NO: 89916 - DNA, 730 bp, Heterodera glycines
caagtttgagttaaaaattatggaaaaaagtgccaacaatttttcgaaaatattgtggacacaaaatgagcatcgtttccaacaaatttgtgctctcccatttattcgtgaacaaaaagatgggacacttgctgaggaacgctatcgccactacataatacaagacacactgttcctggagggattaagcagtgccatcgctgtggccgcttcaaaggccactgatcacccaaaagggcacgagcgtgccatgcttttgctgtcccatggcattgccattttggacaccgagttggacttgcacgatggcattctgcgcaagttgggcctggtcagtcgtagtgaagtgcacatgaactacgaccaatcgccagtgtgtcatcattatgtgtcctttctggcagcaacagcatcacaacaatctttgccggtgattgtcgcgtcaatgttgccctgctattggctctaccgcgaagtgcccaaatggatgttggcagaacgccaaaaagccggcggcacaaacaccgtaactcagtaccacgaatggattgacatgtactgtagtgaagagtatgccgaggcggtggacgaaatgttggcacatgcggatgaattatcgcaagaagcggatcagcggacgctcgcgaaaatggccaccgtttttgagcgcagcttccaactggaatggatgttctggaagtccgcctatcaaatgtgccaatggggaatt

SEQ ID NO: 89917 - DNA, 728 bp, Heterodera glycines
ctttaatttaatcctttcttccgcttcgaattagcaaaatgatttcgtccaccgccgtgcctcgcccccttcgctcttcgaatcaacaaaaacagcagccaaacgcactgaccaaacagaacggtgctcatcagcagaagacgcctatcaaagccagggaagacagcagaaacaggaacgacgcattgggcgcacagaaaccaaacggtcattcgccgcgtacgccgagcgttccgccggtgaataagcgatacgctcacgtaaaaagcaaagtcgggtcaatcactgagtacactccgtcgcccagtcgcgtgaagattttccacgagtctgtccgagtcagcgccactcccaaagtcggctcactgcaaaatgcgtcccatgtgcccgccggtggaaatgtgacgatcgagaacagaaaactcaacttccgggaggcagcaaagccacgggtggaggacaaatcggaagtgccaattccaaagagtgagaaaaagattgcgactcaaaagttggaatggaaagcccagcccaaagtcggttcgttggacaatgtgaagcacaaacccgcggggggcaacctcaaaatattccacgagtcggtgcgggtgaaatgcgagtccaaagttgggtcccttgacaacatcggacacgtgcccggcgggggcaatgttaagatttcggattacgcacgcagtgtttcccgcagcggtgatggctgcagacgt

SEQ ID NO: 89918 - DNA, 810 bp, Heterodera glycines
ttgagtttttttattttattcttttcttgccaaaaatggtcgacgttccggctgattttgctgttctgctaaactccgcgccgccaattagccgaattgagtcaaacaaaatgcattggctgcgaaaacggcaacagacaaatgcgacggcattgcaacgcggcatcgatcagattggccaactcgcgacggagagtcgaggtttgaagcgtccggtgaccagttttgcgcgttttgcggattctcccgacgaacaggcgctgtatttgctgtgggaaccactcacttcggaccaaccgacggcaaacggagggccgtcctcacggatttatggatatttaaaagtcgtccgggaccgacgattgtatttggtggacggagaagggcgacagttcgtcacgacgcccctttgtgttttggactttttcattcaccaatccgtccaacatcagggcaaaggcgcccaattgttcagagcaatgctaaaggctgagggcgatttgggggcccatcgctgtgcctttgataagccatccgacgtatttctccactttttggctcggcattttggcctcgaaaggcccctttggcagccaaattcttttgttgttttcccctcattttttgagggcattaagccagaaaaagtgtcttctgctggggacgaccgactgcggtcgatgaccgcgctggagagacaccgccggtcggtaaacgaacagtacaatgggcagccgccgatgagcagccgactgtcgccgctccctgctgcccaacgtgaccaggcgggcgcactgatccatcagcagc

SEQ ID NO: 89919 - DNA, 580 bp, Heterodera glycines
caagtttgagcattatgacagtaatccgtgattttttgtgccgttcgtcgtaccaatcgttggctcatttgtgccgtaatcaaattcgcgtttattctgtagaaagggagggggcgggcacggcttcgggcattgaacacgcgctcaaattcaacaaagcgggagcagtgcacaaaaaagagttgaaggattacaaatgcgtcgaatatcttcaccaaaataattattccttttatgacaaggaggtgggaaaattacaaaaaatataacggtcaaaatatactaacttaagccttcattgaaaaaaaatacatattcgggttcgaaataatttaatgccatattcatgatcagcgctctctaaaacccttaaagcatcacaaaactgctcaaaaccccctttttgtctctttttgtgggaagtaaagccgatgattaccaaaatgacataaattcctttttaagtgtgagctgcagcaatttcgcgtggtgcaaccgacgaacaaattgcctgacaccgaaccgaagttcaaatcatcttaaaccgattgatttcatgaaaaattttgttttttaatta

SEQ ID NO: 89920 - DNA, 646 bp, Heterodera glycines
aaaaccacttttccaagaaatggcttcttctgctgctggatttgccattgtcaccggtgccaacaccggcctcggcttgcattttgttaaatcactatatgcttccggcacttattccgccattgtgttggcctgtcgaagtgaacagcgcgcgaagagcgcaattgaacaaatttgctgtggccaatcatcgccggcggaaaatggcaacggcacacaaacaaaattagaatttgcgaagttggatttgacctgcaatgattcggtccgcactttcgtctcccaactcgacgagcgtccctatcaaaagggcagtttgcgattgctcgtcaacaatgccggcattatgggccatccctttcaattggtcgacggcgttgaggtgcatttcgcctccaaccatttgggtcattttctgctcacaaatttgctgatcaaacacaattggttggcttccgacgcgcgcattttgctggtcacttccggcctctacgaaaagtgccattccatgctgactgctgccgagttgaccaacaatgcagtcgctaaaaagcgttcgcccgccgaatattacgcgttcagcaagttggccaactgtttgcatgccgttgggttggccaatcggctcgcctcccccgccgtcgcg

SEQ ID NO: 89921 - DNA, 624 bp, Heterodera glycines
ctttgctcactccttccgtggcttcttcttcggggtgttcttccttcacaattaacagcttcacccaaaatttggcctctgttctctctgacaccaaacggtcaaaggccgaagtcgcggctttctttactcgccattggggcgagcaattcgtgccacagaaaaccctttgctcagcaccgaccattcccaaaatttccttggagcatttccggcattatttggacaacacagcgaagaaacaccgccaatatttgcgagtgcgaaaaacacttcagcggagcaatggccatctcatcggtgagcaaatcgcaccggatgaaatcccttcgattttcttctcctccgccttttcataccgtgactcggctacttttgaagcagttttccttgagccccgtcaaggggaggccgacaaaatcatttccggggccgagcaaagacggggggccgtgggtattggttcactttatcgtcccgcgagttgtggctcgttgagttcgatgcaaagtgtgcaaatgagcattgctcctgctgccgaggcttgtcacgggcgaatgttccgcggatgccatcggctccaaatgcgcctcgagcactttgatgatacggtcggaatgctgc

SEQ ID NO: 89922 - DNA, 740 bp, Heterodera glycines
gtttgagacactcgaaaaaactctctaagccttttaactccttccacttcttcttcttctgctgattttgaattaaaaccttttctctctcaatcgtttgtcctttgccaatccttccaaaagggcttttccaaatcccttttcaattcttttaaatctccaaatttccaccgattaaccacttctcactttcctctcctaaaccatccaaaaatgtcgcgcatggaaaagatttgcgaagacgtgaacagaaatgccgccctgctgaacatcttcggcaactccgattccgtgctgctgagctgctccgatttgtgctctgaaaatggctgtggtgcgatgtcgcgtgcccaaatgatttgcgaagatgtgaattatgaagcgatggccaattcggacggcgggggagggacggacgacgaagcgtatgcgctgatggaatttggcggctctcttttctgcgtgccggcctccatcttcgccaccgcggtccgcgtgccacttcagtcgtcggtttggcccaatcagccggccaatttcaccgtcggaaacccgtcgtcccaaccacaacaaggagatgtgtcggtcggacctcgcttgccggccgttcgtcacggcgtcggcggcctcaggcagtgggaaactgtcgccgaagatgtcgaaggctgctgctccacgacgtttgcggacgggccgaagtgtctttttaagttcgtcgcctcaacccccgacgcgtccat

SEQ ID NO: 89923 - DNA, 567 bp, Heterodera glycines
aaagcttttaaatttttcttcactgctttcttagtcagtttgttatcagttgctctccatttttattttgacaacaaaacaatttttcccgctaaatttggcgaacgatggcttcttctcattgcgcacccggatgatgaaacgatgttttttggaccaactctgttgttcctttcatctatcggtgttcaattgcatttgttgtgcattacgtcggggaattctgagggacttggaacgattaggcgaaatgaattgtattcgtctgcttctgtttatggcatccaacccaaatacatctcttttgtggatccagaagagcgaagattcccggatggttttcgcgattggaatatcaccagcctttctgcgctgatttactcttacattcgacggctgaaacccgatggactgatcacttttgacgaatggggcatcagtggacatccaaaccacagagacagcttcaaagctattttgaacttgaatactgaaggcaaacttaaagaactcggcctaaaaaaggcattggcactgaagagcagtgcagttttaaggaaatatgtc

SEQ ID NO: 89924 - DNA, 1001 bp, Heterodera glycines
ggtactttaaaattgcactttttaaaaacccaatgccttcaacaaatgcaaatgatggcatcacttccgccgatgatgcgactcgattgagaatggttgacccggtcgatcgttattcagcattaatagttcgtgggctgatagttggaacgggtgcgcttggattaggacttttcattcgaaattcaaaattgtttgcagcttttaaccacgtgaagcaaataccgcaagattattatcagaaaggaataattatgaaaggaattgtgcgcgatttggagtcaaatggcataatcaaagtggaacatcgaccagcaattcgtattcctagactttttggtaccaaaaaatcgaaagtgggtggaaatttgaatcttcgcttggctggaattgaattatcccctgttggaattgaatatttgcagaaggaaatgcaattgaaaggacgatttgtgaaattttctgtgataaaattagcacaaacggaaccggacattgtggaagcggacgttaccgcaaaaaaagccatccgtcacgttaacctcaacaccgaactcatccgcaagggtttcgctcgtacgccaactctcgacaaccattggcacagagagtcgctccaattcaacacgaattattcccgactgatcaccaggctgttgacctgtgagaaggttgccgaacgtcgcggacttggcctttgggaacgcgccacttgggttgagcgtgttcagtcgtacccatcgacggcagtgcaaattttcaaacactccgtgcccgccaaacttgcggtattcagtttcgagttgctcagagatctgtccatggttctgtactccatcgcccagaacatttattttatttgcgtggaactgttcaaatactgtgcatttggttaccgaaaattgtccatcggtatatctaaggcatttttgatctacacaaatgccaaaagacatctgatccaaattggctcaaaaatcggcgcgcgacagtcaccggcg

SEQ ID NO: 89925 - DNA, 868 bp, Heterodera glycines
atttgatatgcaatgacaacgacaaatagcgcctccaataattacactggtgaggtgagcaaaatcgagaaaaggcagcaaacgatgcggaacgaccctttcggacaacgctatctgagggacgaatgtgctgtgtttgactacaatgcgtgggacgacgttgactggccagaggagaaggaagcagaaattctccaaaccatccaagcgcaaatggccgacgccgttcccgagagtgtgtcgttaagtcttctcgagaacccgaaggatcgatgggaggccttctttgagactcacaacaataagtttttcatggaccggaaatggctgtcacgggaattctcggaactgttcgttcggccaaaggacagtgccaaaatcaatgtgctcgatgtcggctgtgggatgggcaatacgacaattcctctgctgcaaagtgctgaacacctcttcatgtacagctgcgatttttcgaagaaagccatcgaaacgctgcgaaatgaccaaagaatttcatctgaacggtgtcgtccattcgtttgggacattactgagaatgctcatcaaactcaagtggctgacggcactttggactttgtcctttgcattttcgttctctccgccgttcggcccgatcggttgcgtgccgccgtttcgaatttagtcgcactgttacggcccggcggaatgctgttgctgaaggactatggccgtcatgaccttacccaactgcgcttcaagtcaggcagactcatccaacacaatttgtaccgccgcggggacgacactctcgtctatttcttcaccaccgaggaaatggacgaattatttcgcgaagcgggcctcgagaagattcaaaatttcatgg

SEQ ID NO: 89926 - DNA, 575 bp, Heterodera glycines
gtttgagtcgcttttcaatttcaattttccaaaattccaacttttgaatgctttcttcgccacacaattttaaagttgcaattgtcggcgctgggcccagcggtctcacagccgcaagacaagctctgctctacggctacaaagtgcgcatttttgaaaaggaacaaaatttcggcggcgtttggcgcctcgccatctcagaaaatgcgcaaagacggcccgtgcctttgcaaagtgtgatggactgctcaaaacagctgtgtgcctttagtgaactcgccgttgctgaacattttcccacttttcttcgcccttctgacgctgtcgcttatttggagtcgtacgtgcgaacattcgaattggcacggcacatgaaacttggcacggaagttaaaacgattcgccgatcggagtgttggcaaaagacagataattagcgggggattggcaattaaaccaatggattaattaattaatcccttttcaagccgatggattgtccaatgggcggacagtgaacagccgaacaacggcccatcggaaggacagcgactggtcgaggaactgttcgatgc

SEQ ID NO: 89927 - DNA, 461 bp, Heterodera glycines
gtccaataaagcatataaaatttgccaatttgtttcccattttggaagaaatgtcccaagatttgttcggccacagcaaaagtgaggaatggaaggattcggacgagacgggcaacgactcggacaaactcagccaaatgtatgtcggcattcgcccggtggacaaatgcctgcgaattgcctatgccaaagcgatggacatgaagcatcagaaagtgattgtgatggtggagaacgacaacgattttcgcacctacgacacgaaggaagtgcccgtgggtgaaatcatcaaatattgaacattgttggctggtcgaaactgaaaaggtgtcgaaattgatggctttccggcggcggatgatttgaaaatttaaataatgctttttttccctctctttcactttgtcatttttgatcgtttgccttttttcacatacggttttaaattattgttttcaaaa

SEQ ID NO: 89928 - DNA, 584 bp, Heterodera glycines
gtttagatcagtttttaaaatttcatccatttgacatctatttttgaaaatcagcagtttcttctttctgtttaataatgaaaagcgaaagaaaaggtggcctcgttccatcgttgtcgtccaagcgccaacagcaaagtgtccccagccattcggttccatccacggagccttcgcctttagcttctccgtcgttatttttggcatcgcaaaatgtcggagacaagggacatcaaccgccacaaaagcacgtctacagcgaattagccttgcgcaacaattaccaaatgttggaacagagcaggacatgtcaagcggctgtcagcggaatcgccagtggcattttggggctgaccggcactttgggctttctgttctatttcctttgtgttttcttacaggcttttgtctggcaatacaagacgggctttcgatggagtgcgtttttcacgagtcgttcgcttttcctcacccattcggtcgttagtggccttttcacttatgtccttttttgggtgtttgtctacggacttgtccatgtttattagctggtttgtaccaacagtatttaattttctttattc

SEQ ID NO: 89929 - DNA, 1021 bp, Heterodera glycines
atttacatattttcccttttattttccatcataagaaaatgaacagtaagatgcacagatctttctttcattggacatcactactcatgcaaggcggtattttgtgtgcgccaataattgtcaatttacagagaaataaattgaaccatgacttcaaacttcgcaaaatgatgtccgctgaccttcccaatatgcctgatgaaaatctgctcgatttggttgaagctgaaatgttagccaaatctaatgatcggctttatccatttgaaaagcaccatttcggcatcaaagttaaggacgacattgaatcgaacacttacggctttttctattgtcaaaacggagtcactttccgattcagttcgagattggccttaaatgatgtcgagaccatccgacgccattatccaaattttctcggactttttaaagaaaatctcaaaagcaaatgggcgaaagacttggaaagtgtcaaggaaaatttacggtcggcaaaaacactgtgggattaccttaccattttcagagaaaaggacttgagccagcttcgcattgacacttcgaccctttccgacgacgaactcaaaagagtacttttgactccaaatgctaagagatttgtcatttcgcgagaggttctgcttgcggacagtttttaccatggcatgcccgccctgcacagttttgttgcctttggcacttcgtggggccttttctctctgctgaagaagcgaatgcccgagaaattggcaatagcaattgcgtttcctcttgctgtgattacttttgttcttctggacagagttgaccaaatcaacgaactcgccacttatgacaaggaagccgtggaagaggatgcagcatgcctttctggcgcaaaagaatatctccagtccagcattgaactcggcaaattgctttatcggttaaccgacggaaaagcgccttttgatgcgaatggaaattgcaaaagacacaaaatgaaatacaccgaccgaatgaaagcgatcgaaagcattga

SEQ ID NO: 89930 - DNA, 743 bp, Heterodera glycines
acgagggtccaattaagtaaacttttctattttcctcgccttttccaatgtctcggcatttttccttattttccacgaccggcagaatttgtgaactacggctgcagccaaagtgttctcgtcgtttgttttgcagcatttcgccttcaacaagttcgggtgctcatttggacagcggcagaaaatgtcaaaataaacctttatgcgcactgagtgcattctcacgggagcaactcggcacttccatcctccacccggaggcgaatcggtcgacgcaaaggattgtcctaatctcgaaaatttgttccctcggaagttcagctttcggtctcgtcatggttccgctggtcacttccgccctttgggagcccatcgccgaacggccggccatcgctgtgttcgccggcgtggccaacgtttttctgttgctcttcgctttcacgccaattctgctccatttcctgaccaaacgttttgtccaaaatgtgttcttcaacgaaagggagcagatgttcaccaccgtccactacaatttcttcctacaaaaacgcgctcttcgctttaccgccgatcaattggtcgatgcgtctgagctaccaaaggacaggcgcttttggctgccgttggccacttgcttggcccactcctacccaatgcttctcccattggacgccaattgctacagcgaccaaacggcgttcaaattgctcacaaaaaacataaaattgccgacgaaagaggag

SEQ ID NO: 89931 - DNA, 873 bp, Heterodera glycines
cacgtgtcaccggcgctcgaattgtccacgacaccgctgatttgcgtgagtcggacattggcacgcaggcggacctttacgagatcaacaaagtgggcgatgagtactttgcttggatcacatccgaaaagaccaccgccgtgacggtggtgttgcgtggaccgagcaaggacatcatcaacgaggtggagcgcaacattcaggacgcgttgcactgtgtgcgcaatgtgttgactaacccgcgtgttgtgcccggggctggtgcgctggaaatggcactttcgcatgctttgttggagaaggccaagtccatcccgggcgtccgtgccggcccgtacaaggcggtggcacacgcgttggaaattgtgccgcgcacactcatccaaaactgcggcggctcctccaccatacgtcagctgaccgcactgcgtgccaagcacgcccaacagccggacaccaactggacatggggcatcaacgggcgggacgcgggcggcgagttggtcgacatggcgcagcccgcgggcgtttgggactcactcactgtgcgactgcaggccatcaaaacagccattgagacgtccattatgattttgcgcatcgatgacattgtcagtggaacgaagaagcgcgacaaagacgagaacggaggcggcggtgcaatgccgggtcccggagggtttgaataatagcgaagaaaggcgaaggagaggaaaggaacttcccaattcaacatatttaaagaagtggccattttgttggattgaacaaatttcgaaactccaaaatgctgttgaccgtttcatgctttacttatccattcaatcacaaattgaatttgctttgttttgcctaataaaatttgtttttgtt

SEQ ID NO: 89932 - DNA, 641 bp, Heterodera glycines
cttttaaatcgcacaaaattcctttggctattgttggcaaaggggcttgtcggtcagtaaacgaattcgacaagattcgacagctcggcgaaggcacttatggcgtcgtgtacgaaggtcgtgacaaaaaatcagggcaaacggtcgcacttaagcaaattcgccttaacttgaagaaagagggcgtttccgtgtccgtaatgcgtgagattcaatctctgatggacattgagcatgaaaatgttgtgcgacttttcgacgttgtcgtggggcgaagaattgaccaaattttcttagtgatggaatattgtgaccaggaccttgcctctttactcgacaatatgaattctccatttaccgaatcacagattaaatgccttttgctacaacttttccgtggtctccgtcatttgcacagtcgtttcattgtccaccgggacattaaggtttcaaaccttttactcactgaatttggtgctctaaaaatcgctgattttggtctcgcaagattatgcggtgttccgccaactgaaatgactccgcgagtcgtcactctttggtatcgttcgcccgaattattattcggcagtaaattccaatctccggcaattgacatgtgggcctgtggctgcataatgggc

SEQ ID NO: 89933 - DNA, 716 bp, Heterodera glycines
acaaaatgaaaatgggtcaacaatttatcccagcaacttcttcaatggctttcttcgcacgaaacgtccaattaagtggatcttcaaatttatcggctaaattcgacataattgacagacgtattgcaagtttagagcagagttggcgtaatgccatgcccatctcatcaaattctgcaactgccggcacctcggccatgtcttttgattatgcagagaaccgatttttgctgtgtggcaatgctcgggggaatgtgtcggtcgtcgatttcgagtcattttccaactctctgtcaaatgccgaagtttacccgaggcattacgtcgtaattaacaccaataggaaaagtcatcacgaatttatggtcaatggatgtcaatggtatcccgtcgattcaagcatttttgcaacgtcaggaagagacaaattgctaaagatctgggatgctgatcagctcaagtcggtggaaaaatttgcattcgagcagcccatttccagctttcattggttcgttccgtgcgattgcaactcttcgcttattcccattgccacttcctcgtcaaatgtcgttttgttggacccgcgattgggtaacactgcacaacaaattcgctgtttgcagcaacgcatttggtcagtccgctgggaccgtttccgtgactatgttttggtgactgggagcgacagtggcgaaatcgctttgtgggacattaga

SEQ ID NO: 89934 - DNA, 659 bp, Heterodera glycines
acgagggtttgagaaagtgctttactaataaattattcataatgaaaaggccttcttcggttgtcgcttttggtagtcatttatttgtcggctttatcctgttgtcgcttttcattggcactttgggcactgagaaaaaagagacgaaacctgccgctgctcattctcccgccgatgccaaacatccgccgccagtcgccgcccacgcggccgctggcgccggccacgcctccgatccgaaacacgcttctccttctcccgctggggctgctgctgctgcttcccacgctcatccgcccaatggcggcgccgcccacgcggccgaaccaaaacatgctgcggctcccgctatcaaaataactgatgaggccaacaatgtttactcggtgtgtgtggagagagacgttctgccggcgccggaaaatgcgtcaaaggacaaattgaaggcaatcgctgcgaaatgcgacgaatgcggggcggcaaaatgcaaagcgaaatgcgggggcaaagaagtgaacgacgcatgccgaacatgcattatgcaaaactgtccaccggcaaaataaaaaatagcagaaatgaggagggaaagaaaggcaaaaacggcacggaaggaggacaaaatgatggcacgacgagaaggaatggatgaatgaatg

SEQ ID NO: 89935 - DNA, 514 bp, Heterodera glycines
caagtttgagctattcagttctgatttgcaatttgttttattaccattctcaacaatgccgaaagcttcgaaaaacaaggaccccaacatgccaaagcgtgcccaatctgcctacttcatctggatgttggccaacagggagaagatcaaaaagccggggatgagtgtggctgaagtggctaaagccgcaggtgtcgagtggggacgcatgtcagcagcggacaagacactttgggaacagaaggcggcagacgacaagaagcgctacgagcaggaaatgactcagtacagagctcgccagaagtagacgattgggcagtgaatgacgttttatctttgacttccttttccgctgttctctcctatatttaaaagtcaacaaaaatcgaccttccatttgtcgtccttttcgacattctgatttatttctctcagtttaacttttattctgatcatgtacgtatacattgcatctggaaaatgatgatcaaataaatggaaatcatcaaaaaaa

SEQ ID NO: 89936 - DNA, 616 bp, Heterodera glycines
gagaaacttaccaatttgaaaaaattttgatatgaattcatttatttttcgtcgattaccttcattacgatttcctacggcttctatgaattttcggaaaatgttttcaactgctgcttcgtcttctcagcagttcaatgtcgaaaaaccggtcatcaacaaaagcgatatcatggagcccgaggattatgatctcactgatcggaggaaatgggttatcgaaaatatttcgaactcaattggtgatttgactaagatgatttttgcggttatttacatccaagggaaacagcacaaagtgacccaggatgacataattcacgtcgaacataacattccgctcgatgttggagaggaaattgccctggaaaaggtcctaatgatcggaaatgatgaatttacattaatcgggcgtccgttactcgacccaaaatttgtgcatgttcgggccacggttattgagaagacgaccacctctcctgaagtgcaatacgattttcgcaaaaagaatattttaaaccccgtttggctgagtcatgagctgaccgtcttacggataaacaacattcatttggataaaatgttgcttggagagacttgaacaatgagaatgtct

SEQ ID NO: 89937 - DNA, 679 bp, Heterodera glycines
gtccaattaagttgacaattttcgaacttttgttgacgcattatgcacgagcgagttcaacaggatttccgttccagcaagttttcaacacgagccaatcaaaatgggcagcacggaaatcggagtcgcgaagttcgtttcgacaacacaaatggacgggcgtacacacgtcgcaacggcagttattcgtcggaaccgtcgtcgggtcgacgaagctccttttcccgtcatcaagatggtgctcgtacatacgtaccctccactgcagtacagcgaccgatcagcccgaatgggtgtgacagtggcggcatgtttctaatggtcgaccccttcaacattccaaacacattgggcgcccaaattcaagtatttgatctccaagagaacgcgaatttaggcatccgacatattattggttactgcattccattgcgttgctgtgtgggtctgttcaagcacattcagccatgccgtgccatcaagtcgatggaaagtcaatctatggatgaacagttcgcgcacaagtacaaattccaccccaaccttccattgagcgttgtcccgcttcacgacacggaattccatcggatgatgggctcaccggtgatgccgttgcgcgacggttatcagcaacgtaacagattctttgtgcgtccctcttccccgcggttggctcaac

SEQ ID NO: 89938 - DNA, 566 bp, Heterodera glycines
gttaaataaacgaagtttctttaaagttgcaataaaggtgaagtcgtcataatacggggttagtcctgaaatagacattcctatgagcagaaaagaaccatattacatcgaccatcgccaagtttcatcggataatttattttttttttcggtagaacggtagtgtagattttttttgaaaatttcaggaggtttcctctgtgacgtaaagcgaaatctccaaaattttcaagagaatccgcacaaacgcactccctcaaagaataaattgttcgagaatttggcaatgcctcctgcgacttggttccctcttgctcggttcagtctaaatatggcgcagtttcttggacccagggatgcagaaacttccaagggttcccccaaaataaatttaggttcccccattttaagttttcgcagtattttgcccgacacatcaagtaacgcggtcgacagttgggttcccttaaaacagcgcggtcaatagtttggttcccccaaaaacagtgcgcttgacagttaggttccctcaaagtagtgcactcaacagtcaagtttccctaaga

SEQ ID NO: 89939 - DNA, 613 bp, Heterodera glycines
tttgagggaatggccaaatcaactgaggaggaaagaattgcaaatgtccattttgaccttgaactggtcaattcggattttattcgaccgatgcgaatgaactttcgccggagggggcgcgacttatactgggacatggcgcttgggcacgacagtgtcgccgcactcattttccacaccgaaaggaagcagttgctgttcgtcaagcagttcagaccacctgttttcgttaacgtcgtccggtcactgcccgaaaacaaaaacaaatctctcgccgaagtccgctgggagaattatccgattgaaaatggatgcaccgtcgaattgtgcgccggacttatggacgaaccgggcaaaacgccgttagagcatatgaaaaaggaaatactggaagaatgcggttatcgagtggacgagtcgaacatccgcccgattcggcgttatgtgacgggcatttcgctgtcgggcgcaattcaacatttgttttacgttgagttggacgagtcgatgtgggaaccgaaggctggcggagggaatgagcacgagggcgaattcatccaaaatgttttcatggacatcggagaagccgaagcacttttggagaaggaaaatt

SEQ ID NO: 89940 - DNA, 560 bp, Heterodera glycines
ttgagcactgtgtttaaataatttgaaaaaaaagttcgcatcaactaaaaaaccaaaaaataaaaaagtatttgtaacaatggcaatggctgatgttaagcccaaccatactttgtacatcaacaaatgaaaaagtgaagaaagaagagctaaagaaggcactgtacgcaattttctcacagtttggacaaatcatcgacattttggccttcaaacacttaaaaatgcgtggacagtcccatgtcattttcaaggagataaattcggccgccactgccctccgttccatgcagggcttccccttctacgacaagccgatgcgcatccaattctccagggaggactctgatgtgatctccaaagcgaaaggcacttttgtcgaacgtcccaagaagaacatcgccgtgccgaaaaagaagaaaaaacttgccgagggtccgaccaaaaagagcaaaacgtccggcaaagagggacaacagcgttcgaccgcaccgcccaacaaaattttgttcatcaccaatttaccaccggaatgtacggaggaaatgttacgcgttgtt

SEQ ID NO: 89941 - DNA, 641 bp, Heterodera glycines
acgaggcctcgtgccgaattcggcacgagggtccaattaagatcattttctaatgacttattcgtacattgtatgtgagaaaaacaacacacaacggagcgacaatggccaatgtatcgacaatagaacgaaaatgggatatggcgctggaagttgcagaatcattcccatcggcgaactcgaccagctggaggaggaactagacccttgcctttccgcagcagtgcgacagaaaaaggagccgtcggagggattgccggcgcgtttgaagtattgcctctgctgcgtcgttgtgttccttcttctcgctctcctcgctgtgtctctcttacttttgtttggcagtgattgtcccaccaattcgcatcaactcacgactcaatttgaacaaccaaaagacgctttgctttatcaggaggaaacgcacattcgtaaagagaataatcagccaaagaatggcagcaaataccaccacgaacaattcacaaaagaagcatcccggggaaagaccgttcagccacaattcaagaaagacgaagtgttcaacaatgcaactgaacaacaacagaatgaggaggacgagcagtacagcaacacaactgtacaacaacggaacttgaacttggagtataataattctt

SEQ ID NO: 89942 - DNA, 563 bp, Heterodera glycines
gtccaattaagatgttggaaaaacctattttgcaccgaaattatctttcttcaatctcttccgctctgctaatgagcttccaacgagcacaactacaaaaggttgctgtgcattgtgaagggacaattagaagttgtagcaacagcagcagcagttcatctgatgacactcatccaacgtcgaagaaaatgccgccatggcaaaaaaactgcgaattttgtagacagcgcacagactttcgactattggacacgatgtgaagacagtgtgatcgaaaaggaatttcaacgtggaaaaatgatactgatggtcaacaaacagccggccgtccattccgattcgttcatttacaatccgaccaccagtaaataccaaatgcaaagtgcgccacgccttcgattgttcgattgccatgaaattcgtcaagttctcagcccctacggacttgaaattggtacattgaattcggcattgttggattattatcatgacgataacgatgtcatcgacatagatttgcgcgcacttttcggcacaaacataatgttgaacgaaccgcccaa

SEQ ID NO: 89943 - DNA, 575 bp, Heterodera glycines
gtccatttaagccatgaatgagtgccattcaccagtttttggaatggagtgcactttctgccgagttaacgttcaaatttgaaaatttgcgcaggctcctttatttgttcgtcgattcgctgtttgggctgatcattttgacttttgccacttcgcaatggacaaacatttccaccaatttttgggccgcaattcatttgtacatcgaacagttggaaacgctgatcacttggctgaccaacaaccccgcggggctgaaactgaacgacgcgctgaacacctttctggccaactttttcttctaccatatccatttgtggaaaacttatgtcaccgtttttgaacactcattgactaattggttgctaattgtcgccttcggcgcattgggcttttcggtgctcgtcgcttttctgtctgactttcttcgcgtgcttaccgtgcacattttctgcttccacatttacacgcacaggttggccaaagtctcctgcaccgcctttgtgggcctcggccgcgcctttcgcagcaaaaaatggaatccgttgagacggcgtgtggacagcgtcccgttt

SEQ ID NO: 89944 - DNA, 667 bp, Heterodera glycines
gagattctttttttatatcattgaatcccacgtttgttcttattaatttgccagccttttcgaatatttaatggcaacgcaaaatggcgccgcaatggcaacggatcttctccaacgaaaggcttttaagattggcatcatcggcggcactgggctcgaggacccgcacataatggagcgcagcggcgaagtgcgcgtcgaaacgccgtacggacgcccttccgacgcactcattgagggaaatgtggcgggtgttccgtgtgtgctgttgtcacgccatggtcgtcgtcatcagcagtctcccaccaacataaattatcgggcaaacatttgggcgctgaaaaaggccggcgtcaatgtcatcgtcgccgcgtgcgcttgcggctctctgcgggaggaattggagcccggcaaattggtgctgatcgactcgttcatcgaccggacgacgaagcgcgagcagaccttttacgatggactgccgggtcatccgccgggcatttgccatatgccaatgcatcccgcactcaacgaacgcctgcgacgggcgctgctcgccacggcgacgcgtttgggcgctgcacacagcgaccgcggcgtgttggtgtgcgtggagggaccacgcttctccacgcgggcggagagcgagctgttccgcgtttggggc

SEQ ID NO: 89945 - DNA, 551 bp, Heterodera glycines
atcaaatcggacaatatttttgttgcatttgcattttcgcctttatcaatggcctttcaacaacatttaggtcaacaaattctctccacttctgatttccgtgttttcgcctctccgcaactgtgccaacttcgctgcaacaacgcaaaaagcggcgcattctccgctgcccttttcgctgaaaacgatggacgaattcgacgaggacgcggcgatggcacagcgaccgatgcccaaatggaaaaaggccggacttcgaattgagcgtaactgtgccgaaaaccaaatttttctgagcattgtccaagagattgtcgacaaatttggctgggacaattccgcccacgactatgacatgtggaagaaggcatttgggcccaacttcagcatgttcttcgtcctcgaccaaaacagagtgccgatgggttgcattagcatggcattgtacccgcaggtggcacattggagcatgttctacgtgaaggacccctatcatggccaccaacttggccgtgcgctcgctcgcagagcgctggaatttgcaggggaca

SEQ ID NO: 89946 - DNA, 758 bp, Heterodera glycines
ctccattcttcttcaaccatgcctggtgcttggcacacatcctttccaagtggccactcttcttgcactttcggcaaacggttgtttcatgtcgacaattcctcgacgaatggctcaaaccgcatcgccaacatacgcgttgcgatcgattgctgctgcgtgttcctgtcgaaatgctgctctcattcgacgaatgatccgagttcgttcgtttcttttttgccttcaatttggtcgccatcaagtttcgtgagcccatcggttgttgttcgaggacctttgcttcagcgatggtcgactggtacatttggaggtcttcgacgactccatcatactcgaccaggtcaccatccgctgcaagcttcgaaaggattcgctttctcagctcggcatccttcggtgatttcagtgccgtcaaaagcatgaggcaagaaaattgctcttcgttgagcttttcaaactgaaaatcacgcaagagtcgcttatgtctgttgataaaaggacgaaagctttcatcttcgcttttcgaggctctcagacattcatagcgatcaatccaaatggattgtggccggctgaaggcaatctttaggcgctcctctgtttggctgtagtcaaaatcgatgactttcttcggcagacatgacttgctgtactggctgaaagccacttcactcagcttcgtcatgagcagcttgacctttgcttcgtctgccagttgcggtgccgcacagtcgagggcaaaattgaagcgctcc

SEQ ID NO: 89947 - DNA, 580 bp, Heterodera glycines
cttatctccaaggccgaccgcaagcaaatctacgagtaccttttccgcgagggtgtgctcgtcgcccgcaaggacttcgagttgccccgccacaaggacatccccgtgtccaacttggccgtcctcaaggcgtgccagtcgctcgagtcgcgcggtttcgtcaagtcccagttctcgtggcagtggttctactacaccttgaccgatgccggtatcgagtacctccgcgagtacctccacatccccgccgagatcgttcccgccaccttcaagaaggtccgcgccgctgcctcgcgtcccgaccgtcccgagcgtgatgcccgccgtccccgccaagagggcgagcgcgagtcttaccgccgcgccgacaagaaggagggcgcccccgctggcgagtacaacccgcagttccgtggcggtattggccgtggccgtcccgctgcccccgctcagcagtaaggacaacccttgcctgatgaagaaaagccttccttggacatgggttgtcgcgcgcgcgcaaggcttgtggtcgatttggtgtgatttctctctaggtggcacccgtcgtcgcttgtctttg

SEQ ID NO: 89948 - DNA, 552 bp, Heterodera glycines
gtccaattaacattcattttgcttttttgtttcttcctacatatattccatgtaatgtgtttctctactaaaaaaaaaatgacaagttttctcgcaaaaacgaagacaatgtttgccaattctttccattgtttttctgcgtccgaaattggcgcgtttgaggcggagcattgctgtgcatgcgagaacaacgcatctttgggccgacaaattttggaaggttgcatgttccgtggactctgaaaagttggcatttcgcggacaggcgacgacagccatcggcgccgcctattggcatccgatgttctttacggaaactcgtcgttcacgcagtgcggtccaagcacatttaaaatgtgcctcttgcgggaaggaagtaaacaaagtttacgaagggacggacgacgccggcggggggtcgcgcaacgcttttggtcattacaccgacacggaaaagcggacggagctcagcggtttgggtggcgtcgcttatgcggacattgagcgggcatttgccgtcggcggcatgcggtcggggcacaggcggaatgc

SEQ ID NO: 89949 - DNA, 773 bp, Heterodera glycines
acgagggttatccatctaaaaatacaatgtccgccattcgtaaaaagttggttattgtcggggacggcgcttgtggtaagacatgtttgctgattgtgttcagcaaagaccagttcccagatgtttatgtgccaacggtttttgaaaattatgtcgcggacatcgaagtggatgggaaacaggtcgaacttgcgttgtgggacacggccgggcaggaggactacgaccgactccgaccgctcagctacccggatactgacgtgattttgatgtgctttagcattgactcgcccgactcgttggataacattccagaaaagtggacacccgaagtgcgccatttttgtccaaatgtgcctatcattttggttggaaacaagaaagacttgcgcaatgaccagcagaccattcgcgacctttcacggaacaaacaggaaccggtgaagtcggagcagggaaaggcaattgcagaacaaattggtgcatatgcttatttggagtgcagtgcgaagaccaaggagggaatccgagaagtatttgagaaggcaactcaggcagcacttcagcagaagaaaaagaagaagaagggctgcaacgtgctttgattgggcttcgcttctgatggagggaatcgcacttaaaatgaaaaacagaatttccttttttctttggtcgttttgtcgccattttccatcaaatgctttttgtgctaatattctgttcatgagtggcgtcattcaacttgaactttcaattaaatttgactttatttt

SEQ ID NO: 89950 - DNA, 1005 bp, Heterodera glycines
gaggcaatcatttgcattcctacaaatcaatcactgatcagaaacactcgagcccaacaatgcgctgcaacttgatgttcatgactttgatgtccgtcatgttggccatggctttggctgggcttgccaacgcacaggacaatgccaatgctgaaacaggtttgcgaacagcacggtccgatcgtgttgcccttcgcaaacgtcgcttcatcggtgatctgatcgacattggcaaatttgcatttgatactggctgcaaactgttccacaccgccatttgcgacttgggcaaaaaacggaagcgtgaggccgtctacggcaaaaatgagccggcgccaaacccggcagcggtgaacgagttcaaagtcctgcagagcacccctattgacgagcttgtggaaaaggtgaagaagcagctgagagaagtggcggagaagcctggcttcaaggatctgagcccggtggaccaggaagacacacttttggatgcaatcagcgcagacgatcagtttatgaaggacctcgtaagagaatctatcgacgattcagtggtacagctgcggaaagtgacggacgactttgtcacgtactctcatgcaaatttggaggggaggaaggccatgaagaaagtgttcgacgcctacgagaacacctacaagacgccgaagcagaagctggacaaagtgaagcagctgcaggcggaaatgtcggatgagctgcgcaacagcctgaagatgaccacggaccctgaggtgctgaaggaggcgtcgttcgccttcggcgatgtgccgaccttcaccggaatcaccaagagagtgtcggtgttgccgcccaaatacttgagcatcaaaggccatgaacaatgcgtggacaagtaccccactggaagcatgtacaaagtgtgcttgccggcaaagaagaagtacgaatgcgcggaagacgcgtggaaggcactcaatgccttggagggcaaagataagctcgagacgtgcccttcttactgat

SEQ ID NO: 89951 - DNA, 940 bp, Heterodera glycines
ccaatacactcgtgaagagttgcaactctttttggagacaatgcgtcgcttcaagtccagcggcctttacaggcgtttcggaatgatccatcgccggtcgggcgtccattcggggcccgccttcttagtatggcaccgcgaatttttgaaacggctggaactcgtctttcgcgctttgcatccggagaattcggagcccattttgggcctgccctattgggactcgactttggaccacgacttaccatcgcccgaggattcggttatgttcagcgaatatttactcggagaaccggacgaagcgggctttgtgaccaacggattatttgccaattggacgacgatggatggtcggcactccttccaacgaatgttcggtgaccaggacgacggcgaattcattaacgacgcacgcattgattgggtgatgacgcaagacatcgtggaaagcgtgatggcattcactctgccgacacagaattgcatcaattacgaagtggacgaccgctttttggagtattcgcatgattatgtgcactatttcatcagtggcgacatgcaggagaggttcagctccagcaacgaccccatcttcttcatgcaccacggctttatcgactcaatttgggagcattggaggcaaaacaaacagagtcggctccaacgcgagacggactttccgcgcaatgacgccgcgtgtgcgccgcggtggcacttctcagaagagttcatgccgatgctgcagccgttgtggaacatcgacgtgctctccaacaactacacggacaacatgtacgagtttatgccgaggccgagctgtgcgcgaaccggcaagtcggaggaatgcgggagcagcgattatttgtggtgcgactcgcgaacaaatggtggtcacgcggtttgtacgtcaaagattaagcccgggggggatttgtgccgg

SEQ ID NO: 89952 - DNA, 667 bp, Heterodera glycines
agcagttgcccctcaggccatcagcagcagatgaacgcatgccaaaaactcaagcgtccgactccgccaatcacgacttactcatccgtcgggccggagagggactgtccgctgcgcaaagaccgcgctgaaccgaactggaccgagacggatgaggcgatttgcgacgatagcgacctcattggcattatgcagcgccagtatgtcaatttgccgcacagcacacaaaaggcggcacgtcgcacgaacgcagttcgccagcgaatggttgcggacgcgacggagtcgtccgactgctcctccgacgtcacaacacccaacggtgccattatggaggaatgggcatcgctggcgacggagggcgacggcgcggcgatggcacgcgaaaatggcagtgagaaaagcacaagcagcagcagaacaggcgttgactctctgtccgccttgctcaatcggcgcgtctctcctcctcaccaccactctctgtcgccctccgccgctctttccgggggtgccgcgtccattcagttgcgccgtgccacatgcggtgaactggacaagtcaaagcgcggcgaacttggccacagcattttctatgtggatgagcccgactcgccgtccgcggatggaccgaacgcgtcgcattcgttagccgcgactccttcct

SEQ ID NO: 89953 - DNA, 835 bp, Heterodera glycines
ggcacaccttttagtcgcctttatcaattatcacaatggctcccaagggtaagaagatcgccgccgctcccttcaagacggccgccaaggctggcgccgtcaaggaccctcgtttcgagaaggccacccgcaacttcggcattggaaacgctgtccagcccaagcgcgacctcacccgctacaccaagtggcccgagtacgtgcgcctccagcgccagcgcgccatcctcaagcgccgcctgaaggttccccccgcgatcaaccagttctcgcgcgttgtcgacaagaacgttgcctcgcagctcttcaagctcctcaacaagatccgccccgagaccaagcaggagaagaagcagcgtctcaaggccattgccgaggccaaggccgccggcaagactgtcgaggctggcaagaagcccgttgttgtcaagtacggcatcaaccacgtgactgccctcattgaggccaagaaggccaagctcgttgtcattgcgcacgatgtcgaccccattgagctcgttgtcttcctccccgccttgtgccgcaagatgaacgtgccctacgtcattgtcaagggcaaggcccgcattggtaccgttgtgcacaagaagaccgccacggcccttgccattgttgatgtccagcccgagaacgccaaggagctcgctgcccttgtgtcggttgcccaggccaacttcaacgacaagtccgatgagatccgcaagacctggggtggcggtatcatgggcaagaagtccaacgacatgatgctcaagcgcgagaaggcccgtgccaaggaggtgtccaccgctcaccttgcctaagctcattcttg

SEQ ID NO: 89954 - DNA, 829 bp, Heterodera glycines
gataaactttgttttatgaaaataagccggtagactttttttgtaggccgggaatacctcaaaaaattgatttccgaacctgagtccttggaaaaccaaacaagaaccctgtttccgatcccgtaccactaacaacaatagatatgaattcagcagaaatggccagcccctccattgacattggtctgcttgtcctgcgcggaaatgaggaattaatacggcaaaaattgaaacgccttttggcaataacaatgccaaaagtacgtcaaaagttgtacgtgcatttggagcaaatggacgtcatccgggcacttcttcccgccatttacattaatgcggcatccattgcgccgaaaattgatctccgagtccttctgaaccgaacgaccagcgtcccagttgaccgggttttctatgacgaggtcaaagacccaagccatccgatttttccgatgcttcgcgaagagaatgggccaactttcaagatggattcttttgccacctcccatcacaaacttccggaaaagccgtatgaccatgtcgtgttgggcgggacgttcgaccgattgcacaacgggcacaaattgctgctctccgaggcggcaatgatggcacggacaagaatcacttgcggagtgacggacggaaaaatgaatgaaaaaaaaattctttacgaactgatggagccggtcgaaactcgttgccgctccgtcaccgaattcattggcgacatttccgaaggcatcgaatgccaaacagtgcccatttatgatgcgtatggtccggccattgttggtgaccattaccaagcgattgttgtcagtgacga

SEQ ID NO: 89955 - DNA, 1039 bp, Heterodera glycines
  unsure (1)..(1039): unsure at all n locations
gtttgagattccaaccattttatcataaataatagaattaactttaaattcatccgacttttgaatatgcgcattttggtgggcgttaaacgggtaattgacttcgctgtcaaagtgcgcgtaaaaaaggacggcaccggcgttgtgaaggatggcgtaaaccattcgatgaacccattctgcgaaattgcgttagaagaggcggtgcgaatcaaagagcgtaaagagaaggagggcggtgggcccgttgaagtcgtcgccttttcatttggcacacaaaaagcacaggaaacactgaggacggcacttgcaaaaggcgctgacaaagcattgctcgtcgaggtcgacaacgccacagaggagaagttggagcctatccatgtggcacgggcattggccaaattggcgaaggaagacaaatacgacttgctgttgttgggaaaacaggcaatcgacgatgatgcaaaccaaacaggacaaatggtcgccggatatttgaattggccacaggcgactttcgccagcaaaattgaagaggatggcgcttatataaaagtaacgcgagaaatcgacggcggattagacactgtgaaattgaaattgccagccgttgtcaccgccgatcttcgactcaatgaagttcggtcttgtttcaacaaacattgattgtttttgttttttagcctcgttacgccaccctcccaaacattatgaaagccaagaaaaagccattggaaaaaaagacagcgcaagaatttggcattgacatgactaatcagacagaaactttggaagtctccgatcctccagttcgacaggcgggcggttttgtggacgatgtgcctggattagtttcgaagctcaaggagaagggagtgatttgaccgacaaatgagttatatggccagaagatatatactatatatatttttacactttgtctattgagaagtcgttttttctctctaatttgcccgctttatcctgccaaatagctgtttaaattctaaattttgcttaanaaaaaaaaaaaaaaaaa

SEQ ID NO: 89956 - DNA, 592 bp, Heterodera glycines
gtccaattaagccgttttactgacattggcaacaagaatggaccgcttggagttcagggatttcccttcctctggtggcggtgcttcgtccgaatttttcaattccgactccgtcaataataaacctcctcctgacccggcctttccttctggcaatcttttggatgtttcttcgtccagcgaatcgcaaagggatgactcctcaaaagtgcattttctttctctgagtttttaccgtcgcttctttgatatagacgaagaacaggtttttgcccgtttgttgaacagtgcgatgcctcgccggacgggcaatttcatctccgattttgtgcacccgaaccccgatttgaggggaccattttgggttagtgtttcgctcgtattttctattgcgattgttggcaatctgtcgcgttttttgcataccttcggctccgacgaattgtttatcagcgacttcagctttgtcactggtgccacttccctcgtgttcgggtacgtgctgacaatgccttctttggtctatgcctttctgtggtaccatcgtccgctcaatctccaatattcctttcttcaatttgctgtgtgcctt

SEQ ID NO: 89957 - DNA, 573 bp, Heterodera glycines
atcaatttgtataactcacctcaacagaacaaaaatgggaaaagttagcaaaacaaaatccgcaaagaaatccgccggaggcagcggaaataaaacggtgatttgggcggtggaagacattgtggacggaccgaaatacgaaacaattgggacgaagagacagaaactctacaaagtgcgatggggagagacgtacgaattggccagcaacattcccccgggactcatcgatttgtacgaaaagcgggaaaagaagcaaatcaaaatcctcggccccattggtcaccagcgaatcttcgaccagcgaagggtcgctaagcccgaaggagagaattccgctccatcagacgaaattcgccattgaaatcggtgacaaagtgaagtgcctcagttacagcgaagtgcgcaacacttacaaagaggaattgttgcagtatttcgaggaaagggccaaaatcgacgaagagtaaagcggaaggaaaagccacgcaaaagcattcacaaataaattagcatcgctcaactcaactcgaattgaccctcactatcccccgatgtttccgttctctctca

SEQ ID NO: 89958 - DNA, 742 bp, Heterodera glycines
tgcaagtagcgccaaaatttttgtttttccaaattatgtatctccataaataacatatgtctttttcctgtaatttaaagcaatgtttttgggagctcgttcagctcttttcattgatcgtaaagatgccggccaaaaattggctaaggctttagcccatattttgcctcaacgtgataacattgtggttttggcacttccgcgtggcggagttccagtggcttgtgaagtcgctgatgcctttcaggctcctctcgatcttctgatggtaagaaagataggtgctcctggccatgaagaatatggaattggtgctgttgtggaaggaaatccgcccgagctcgttatgaatgaggaggctgtcagaattacacgaccatctgaagcatatgtgcaacagcaaatgcagaagcaactcaaagaaatggagagacagcgaaaaacatatttgggcgacaaaccgccggtgtcgctggaagggcgaattgccattgtcgtggacgacggaattgcaacgggtggcactgctcgagttgcgctcaaagctttgcgtcagaaaaatgttagtcgtgcaattttggcctctccgatggcgccttccgacactttggccgaattacgcgctgaaggaaatgaagtgctctgtttggagacaccgccgaatttcagtgcagttggactccattaccaacgcttcgatcaaaccagcgacgaagaggtcatccgctgcatggaaaaagca

SEQ ID NO: 89959 - DNA, 607 bp, Heterodera glycines
ctccacgccaattttgaagtcggtgaggagcagcggcggaggatcgccatgttcaaccaatttgagcgttgctgagggctcaaaaaacggtggaggcagcagcgggagcgcaaacgcacaacaggggacaaatggaagcggaaacaaccttttcattgctttgttcgactacaatgcacgaacggatgacgacctgaactttaagaagggggaagcgttggaaattctgaacgatttccaaggcgattggtggtacgcgaagagtttgatcagtggcaagtgcggctttatcccgtccaattacgtcgcccgcgagtcttccatcgatgcacaaccatggtatttcggcaaattgcgcagaatcgatgcggaaaagttgctgatgttgggcgtcaatgagcacggggcgttcctcgtccgcgactcggagtcgcgtcacaacgaattttcactgtccgtcagggacggtgaagtggtgaagcactaccgaattcgtcagttggacaacggcggctttttcatcgcccgtcgcgtcactttcggcactttgcaagaattagtccaacattacagcgaggaagccgacggactttgtgtgactttgaca

SEQ ID NO: 89960 - DNA, 633 bp, Heterodera glycines
atttatttattaattaattttcgaaacaacgacaaatgccagaaatgtttccgccgtcccaatttttgccgttttccgtagccatcaccaattttttcccatttgccgaatgccttctgtccgttctgctctttgcgttaagcgttggaatggtgcgcgggatgaacgccattattcgggtgttgtacatcacattgatcagccggcccggcgctgaaccaccggcgtctccgcgtcttgccgaattggacgagcaaatcggtgacattcgtcgacgaatgtccgcactgtcaccgaccgacgaatttgcccaatatttcaaattggaacggttggccaacaaattggaggaggaacgcaagaaaatttgtgtaccgtcccgcaaaattgtgcctgctttttcccagaaatttgcgcttggcatgagggcggtggcacttttcatttcgcttgcattggcattgcattcgtccacagaaacgcgtctcttcaccatttgtgccgaccatttttatccgttcaattttttgttggattttccgttttcaatcgccgcctttcagtggactaatcaaaatgatgatgttgctgacttgcagcagccggtcggccttttctccttttcaatccttt

SEQ ID NO: 89961 - DNA, 754 bp, Heterodera glycines
gcaatatttagccagaaatgttcaagaaattcgattcggcagaggatgtggtcgggtcccagcagctcaaaggatctgtgcagaagtcaatccgggccaagctggttgagcagtatccgagcattgagccgtacatggacgccattctgccgaagaaggagaacttcaagttggtcaagtgcaaggaccacctgcagctgatcgcggacgccaacggcactgtccacttcgttaaaagccgtgatttggcaaattatttcccaactctgagactgctgcacaaatacccgttcatgcttccacaccaacaggtagacaaaggtgccatcaaatttgtgttaaacggttcgcatataatgtgccctgggctgaccagcgcgggtggccgacttttggacgattgcaacgaaggggcattggttgccattatggcggaaggaaagcagcacgcaatgggaattggacaaatgaagctttcgtcggcgaatgtgcggtcacaaaatgttggcattgccattgacaatgtccacttcatgaacgacgggctgtggcgattaaccactgttcaatgagcacagaacaatttttttttaaattattgtttaattgactctataattaatcgctttttcaattttaaattgttgatgtatgaggaatcatattttttcgtgctttatttgcaaaatgaaatacacaaaattttcattcgaatgtttacattaataaatgtgaggtgattaaaaaaaaaaaa

SEQ ID NO: 89962 - DNA, 906 bp, Heterodera glycines
ctagtctcgagtttttttttttttttttttttttttttttttttttttttaaaaaattcattttatttgcgtcaatataaaatttgttttaaaaattttgactaaaatattccttgtcaattgtctggcaaaaagcgatcaaatttgggtatttgctcaatgtctccacaattgctttgtttggcatttccgtggtcagaagagtgtacaaatggccaaaagcgagtgcatcaagttcggtcggttggtcgcccacaaagaattgctgctggcccaatttgatggaaagcgcgtggaaacatttgtcgcatcgctccgccactttggctattggaaggtccgcccagccgatgtccgccaaataattgtgcatttcgcgccgtttgagcgtcggcagcagccaattcaaaggccacaagtaaacgctgccgtacctttttttggtcaccaattcgtaggattcgtcgtcaagccatgacaaatatttttcggcgtttcgaagcgtttcctcaatcagtgagcaaaatgcctgaatgtccgcctgttcagcagcgcttagcgtatttgacggacgaattccttttttgccgaccaaatcaacaatagggaagaattcagcgaccagagtgttctgaagacgcagaaagggcacttctcccgtcggggacataaattccgcgtttggcctctgctccaaaacgaaggacagatcggccatcataagaaaggcacggacagccaacgtgtcggcatattggtacatcagcgcttgctccttttggtacggcgcgtaaagcaccgcgtccttccattcttcagtcattgtgggcagtgtttgtgcaacaaaattgctgaggaacataccaaaaataatagcaaatcaaaaggatgcaaagtttcaggact

SEQ ID NO: 89963 - DNA, 640 bp, Heterodera glycines
cttaaaaatgcacaagcagaaagtaatatgaaactaccaatctcaagcaacaaattcaacaagtacgaactctacaaatttcgacatgcgactatggccatcgttgaaaatatcggattttctacttctaacagctccgcagtcagttccttgtcttttctgcttagaacttattttgagcaattgtgtcgcgactcgcttaactcggccattaattctggtcgtgcagaagttggcttggaagatgtttcttatgttttcggagccaatggaattaatataactgaacttcatgattatatccagcaagttcaaccatatgcggctgatgagcatcctttgtttcccgtcactgaaccattaaatgtgccgccgccttcctctgaaattgcggacacatccgagcaaaaaaatggcgagagagaatcagcagggaatgacggggctgaagttgacgaggaagggaatagggagcaaaacaacaaacactccttgaactcattcaactcgaggtccaatgttcgaaatgcaatttctcaaaagatttttccaaattttgtcggtgcgtttgccccgaatctcggcttttccgtccgaaaggtcgaacttccgacggagaatgtctctgtggaccaacatt

SEQ ID NO: 89964 - DNA, 571 bp, Heterodera glycines
cgcctccaattttcggcaatggaaaatgttgttgctgctgccgatgttgcggtcgacaattttgaggagcgcactcgccaattcttcgccttcgtcaacgagggaaacatcggacaattgcgtgcgctggtcgactcgctgaacgcggacgaactgagcaatttgctgcggatgaaccaaccgaatgtccaaccgcctcgagccgctctcattaacgcaattgtaaagcagcacacggaaatgttggagaagggcgcagatccgcatcagactgtgcttggccgactgaacaatttggacatgaatgtgacgccgctttggactgctgtcaatatggccaatttggacatgtgccgtgcgctgatcgcccatggtgccaacatcgaattggggacggactctggcgaatcgacgctgctctgcgcatgtttcgaaggcagttttgagattgtcactcttctcgtcgagaatggcgccaacgttaatctcgcggacagcgacggaatgacgccactaattgtcacttgttactttaccggaaagattgacattgtgctcctgctgcttttac

SEQ ID NO: 89965 - DNA, 647 bp, Heterodera glycines
attagttatatacattatatttaaacggctcttcaattatgacgtcaacctcgccacctttgaccaacggtgtcgccaatcatttatccgagaacggttcagcgacaagccctgaactgatcgtgttccgcagcattgtgcaagatttggttagctatgtggaccgcttccccaacccgggcaaatccgttcgtggccacacattcaaaacattttgcggcggcaaacgagcaaatcaggcagtgatggcctcacggatgggcactcatgtgacaatggtcagcatggacggcgacgatttgtttgcagccgaaaatgtgcgatcaattgcccaaaatgatgttgatgtgtcgctagtgaagcaattgtcgggccaaacaacgggcaccaccacaattaccgtatccagagacggtgagaattgtattgtggttacattgggcgccaacacttcattgggcgctgaatgcgcacttgccattgagcatacggtggcacgcgcacgcctcgtgttgtgccagcaggagattgaccagcagggcacgttgaccgtttttcggatagccaaacggcacagcgttaccacctttttcaacccggcgcccggccgtgccgacattgaccggacgattttgccactttgcgac

SEQ ID NO: 89966 - DNA, 593 bp, Heterodera glycines
tccgcccaatttgcgatgccaaaacaggcaactatcagcctcagcagtgtcgggatgagaaacattgcttctgcgttaattacctaactggagtacggcaaaacaaaaaggaagtgccaaccaacgaaattttgcattgtgaaggcggccaagtcgatttttccatcgatgatagccatatcattaaatcggagaaaggtgagggagaaaaaggcgacgaggagctgatcccgatcggatcgccggtctgcaagaagccgagagatgcgggccacagatgccatggccgagctggcggaccaatcgcggccaaaaaccttaagtggtattttgacacggagacttttgattgtttggcattttcgtacaacggctgtggcggcaacggaaatcatttcgactcgcccgcagattgttgggacaaatgcaaacttgtggacctcgccggttgtgcggggatgcgcctgccggcaacggataagcagggtcacacaatcatttgcgccggggctggctacccatcgcctaccgcggcatgtccgtccggctatcggtgcacaatgttggcgcacatgggagtttgctgtcattca

SEQ ID NO: 89967 - DNA, 782 bp, Heterodera glycines
cacacattccgacgcaattacttcattattttgggattagtacccaacgcttttcttttgcagcttttgaacaatgagcggtggcatttatggcggagatgacgtcggtgcattggtgttcgaccccggctcgcacagtttccgcgtcggttacggtggcgaggagttcccccgctttgacattccggcacgggtcggcgtctgtcctcggccttccgccggcactgacgcgtcccaaaccgctgacgccacaattgaagaggtggcctcaggacggggggccaacgccagcaacaaattcgaccattacattggcacaacaaagctgaatgtgccccgggccggcatggaggtgaagccgtacatgcgggagggcatggtggaggactgggaactttttgagaagatgctcgactacatctacgggccgtgtcttggagcagaaagccgtgagcatggcgtactgttcacagagccaccatggaacccaaaggaaaagcggcaacggttgaccgagttggtgttcgagaagtacggcgtgccggcctattatttggccaaaaatgccgtgctggccgcatttgcaagcggtcgtacagccgggttggtcatcgacagcggctcctcccacacctccgctgtgccggtgtacgacggatattgcatcacaaattctgttgtcaaatcgccggtcggcggtgactttgtcgtggaccaatgccgcaaaatgttggtcaaagagggcgtggatattgtgccctattacaaagtggcatccaaaa

SEQ ID NO: 89968 - DNA, 643 bp, Heterodera glycines
cccgattgtccatcttctttctgtgcattatcacattccgactaccatccaaagcatttcgtggcccgtcgcactcagtggacgcgatttgatctcaattgctaagacaggctcaggcaaaacccttggatttattctacctgccatcgttcacactatggcccagcctccacgtcgaccaaatgatgggcctggagtgcttgtgctgcttcctactcgcgaattggctgtgcaggtggagcaagtggcacgagaatactgcaagctgatgaaattggatgtgacttgttgttacggtggagcaccgaaagcaggacaggcaaacgatttgcgaagaggcgtcgatatttgcgttgccactccggggcgcattctcgactttatggaggccaataccaccaatatgcgtcgctgcacttttttggttttggacgaagctgaccgtatgctcgatatgggatttgaacctcaaattcgcaagattgttggccaaattcggccggatcgtcagtctctgatgttctcggccacttggccaaaagaggtgcgctctctcgctgccgatttccaagtgaatccggtccatttgaacgtcggttcgttagagttggcggccaaccacaacatccaacaacacgtggaa

SEQ ID NO: 89969 - DNA, 862 bp, Heterodera glycines
gtccaattaagcaattttttctatttttataaaatgcttccgccgggcgaatggcgcatgaccgacctgttgctggacccggccatccgcacatgggtgttcgtgcccattgtgttaatcacttttttggttggcattgtccggcactacgtgttcctgttgctggtcaccaagaagagtgctgacctgcagtcagtgcgggacagccattggctgctgaaggcgcgtctgttgcgtgagaatgggcgctttttgcccgccgattcgtttgcccagcggcgctggctgctgtgtgacgagcagcatggccagctggtcaagcggcaggacaaacagaacacgcagccgaacccgatgctggacccgtccacgatgacggagatggtcaagggcaacatgctgaacatggtgcccatgctggtcatcggcggttggatcaactggaccttttccggcttcgtcaccacgcgggtgcccttcccgttgacacttcgcttcaaaccgatgcttcagcggggcgtcgatttgcagtctttggacgcttcatgggtttcctccgcttcatggtacttcctgaacgtgttcggcctccgctcggtgtacgcgctggtgttgggcggcgagaatgcggccgagatgatggacgagcaggcaatgctcggcatggcacagccacagatggtcgcgccgggccaagacccgaagggggcgttcaaatccgaatgggaggcgctgcagctgtacacgcacacgttcaacccgagatagaaaaacggaaagaaaaccgtcgataaaaatacacaatttttttttgtcatttcgctaaacatattcattcgtaaagtaaactttagcgattttt

SEQ ID NO: 89970 - DNA, 693 bp, Heterodera glycines
ccatttaaggtgcattaattatgtcacaatcaccgcaaatggcgactttcagcggtctgacagcaaatatttaccacgaaaaacagaagaggcaactttgcttgctccacacactgaacaaccttttccaacgtgaagaatttgtacgggatgaattggacgaaatttgtgaaagactcgacgacagcaaatggttcaacacccaccgttcatggcttggacttggcaattatgatgcaaacattttactctgcgcgttaaaaacacgtggactggtcggacgatggttcgacaaacgaatgccagcttcttggatccggaaggaagtgatagtcgcatacatcttcaacatcccatccaccgggttcatgccattgccatttcttaacggacgccattggttcaccatcaaacaatttgggcccacttattacaatttggactccaaattggccgccccaacactgatcagcacagccaatggcattgtccactacatcaactcacttttggcccaaggcaacgaactgttgctggttgtccgccccgaaaatgaggccaattgtttgctggccaatggcgaagaagaacacggaggaggagaatgattaaatgataaatgaatgcctcaacaaatgtgtcttaaatatttaaatttctttccacatttcaagtcatatatatttatatttc

SEQ ID NO: 89971 - DNA, 622 bp, Heterodera glycines
tgagatttttcggacgaatgcgcacttcgaattcgcagcggcgaggaaaagccgcagagggaaacgcacgcgacggccattccgttgccatgcggcggccaatttattccttttggtgaagaaaatcatcaccgaatcaaccaaattgttcgctgacccaaatgcggtgctcagcaaattggtggagctgttccgtcagtgccttcgtcagttcgcccacgggtgcctttccgcctttttgccccaagcccttcccggcgtttcgccgggggcgggcggaataatcggcgcctccacctccattctgcagaatttgatgcgcgacgacagcgtcgtccgactcgacgccgaccaaaccttttttacgtgttgtgtcctcgccaccgccgattggagtgcggagacgaccatgcaattgcaggacaaactgaggcaaaagatagcggacggcgacttcggtcaggagacggatcttttccacagcatttgcaacagtgcgttgatgcttttggtgcaggacgccgaaacgatgtgcgagccgtcattgcaggcgatgaacaaaatagattggtcaaatgtcgaccaagtgggcgatgagtcaccgtatgtttcgacgatccga

SEQ ID NO: 89972 - DNA, 625 bp, Heterodera glycines
ggaacccctcgccaattgagtgcgttttttggcattgccatggcttttcccctcctccccttcttttttctgtttccgcttgccctcgtccctctccaaaggacagctgcggttcatccaccgctgttcaaccgaattgtccccaccagcgaacggacagtgaatctgactttgacgcgggattttggcgaggcaaaagcggggaacgatgaaagcgcaaataattcaaatttgaccgcatcaccggtggaggcgaaaattcatcgactgaaagagctgagaaacgaaatgcgtgcattgacggcgatgatcaaagaagaacgacgacgaagcaaatccaaagacattcggcaccggcaccgatcaatcgcggagaaaatgcgcaccgaaatcagcagacaatttcgaaaatggcgcaaaaaagtgctaagcaaaattcacttggttatgcaacgattggaccaattggagggcgaaatgcacaggacaaaggataatttgcaaaaagtgatgcacgacaacggccgggaggaagggggcaaatggggcgggggcagcaaaaagcggcggccaccgccttcgcattccgccgaatcattgtcagcagtgcgccgcgtgcaaatga

SEQ ID NO: 89973 - DNA, 556 bp, Heterodera glycines
gttttccatactctctccatttggttgtctctttcttctcctttctctttctctatgttttccatactctctcctctccttccatctgttttaatttaccgttcgattcgttcactttgcgcagtttcccctggttcagatgcaacttcggtgcgtaaatgatgtccttcaccaagttggccatgtcttctcccaattgtccgctgtgcgtccattcgtccaccagcaaatcgcataagcggatgatacgaattggcaccgctttccagcagtacgacgccacggcggaagcagtgtttgagttgcagcaaagggtaaatgctcagcagagagatgtacggcttggaaaggcgcgtgccggcgccctcaacgcactgctccaacttaatccatctgaccgtgccatattagagtgcttttccatgctggataatgccgaccggtgcgtctgttgccaaaagagcgtttgctgaacatttgccagtgccattggactggccgccgtttcggcacttccttcgccactttcgacgactcgttcagccaattccgtgtt

SEQ ID NO: 89974 - DNA, 379 bp, Heterodera glycines
gcgattggtcggcggggaaagacggcacagccaaagacaatgtcaacaattccaataggtgggcaatcagttggaactgctgctcgacttccgcaccaactcgtggctgtccctgggctggcgtcccctcaacatccctccttcgtgtcgactctttccccaaatgcacggcacggcagccgaaggtcggcacggggaggacggagtgcagacgagcggatttggttggtggtgacatggcgaacaaatggccattcattggctgccaattcagcaaagtccgcgctgagtttgcctttgcatccaatggactgcaccgacgtaataatggcctcggtgctggagggcaccgaccttttgcacattgccgacatgtact

SEQ ID NO: 89975 - DNA, 515 bp, Heterodera glycines
caaggcgcttcgccgtcagttgcccgtcactcgctccaagctgaactggatagagacttccactccttccgcatcactcaacaggacatgaaacagccgccgacgcccaccgtcgctgtccaacaacagtcccagtgaaaaacaacaaatgaacggactgacggacggatgaatgacaccgcaactaattggagagagacactttcgcgtcctcaccactcattttaattggtgtactaaatcataatctgcttgtgtctgtttcatctccttcttcatttgtccgtgtgctttttcgttttgtgcccttcgtgaacattcgccatccaaaaattaagaatttggcgctatctcacaccacctctccgactgatcagtgatcagctttgtcattccctgctgctcgtattgactcatctccgccgtttgcgattgatttttgatggattttccctttcttttctgtttgtaaaacataccctcccccactcttcagcataaattatttaaactga

SEQ ID NO: 89976 - DNA, 673 bp, Heterodera glycines
tttgagttttaattgttaatttttaccgaattcctgaaaaatggctgatccgaaaaaggctgtctgcgtgctcgtcggtgatgcggacccatccgtgaaagggatgattactttcactcaagacaaggaaggttcacccgtgtcagttcagggcgaaatcagtggtcttgagcctggtcttcacggcttccatgtccatgcctacggcgatttgtccaacgggtgcacttccgccggcccgcatttcaatccaacaaacaaaacgcacggcggaccgcaggatcaaatccgacatgtcggtgatttgggcaatgtccatgctgggtcggacggaattgccaagctgacattttctgaccatttgatttcgctgtgcggtgccaacaacattgtcggtcgtgcgcttgtcgtgcacaaatccgaagacgatttgggccgtggtctgggtgaaaaggaagatgagagtaagaaaaccggaaacgcaggggctcggctggcgtgtggaatcattggacttgcaaaaccatgactcgccagcgacggagacgaacagtcgaaatgacgacaccatggaaggaagagaaaaggaaaccgacttaggacactccatttataattgtttaatcagaccaatcttccgttttttgctttgataaatgtttcacctaaaaaa

SEQ ID NO: 89977 - DNA, 1106 bp, Heterodera glycines
gggctgcaggcttccgcgagcggctgacccaccacttttacgcgcagtatttggacgggttcaccttctacaaaatgaccaatttggacaatcgaattgccaacgcggaccaactgctgacgcaggacgtggaccgcttctgcgagggcattgtcgagctgtactccaacctgtccaaacccttcgtcgatgttttgctttacgtcagtcgcatcggcgcttccatcggttggcaggcgcccattcagctgttcgtctatttgctcttctccggcacggcactcacttatctgcggaggcccattggccgtatgacagtgatggaacaacaattggagggcgactaccgtttcgtcaactcgcgactgattgtcaacagtgaagagattgcattttatcagggcaatgagcgcgaacgcgtttctgtgctgaacgccttccaacggatgatttcccatctccgttcgctgattttgttccgcttttccatcgctttcatggacaatattgtggccaaatatgtggcaactgttgtcggctggtcaaccctgtccaggccctacttcaacgaacaaaatgagggaatgatgcgcaaggacaaaacggaactgatgcaggcttattacaccaccggccgtatgatggtgaagctggcggatgcgctgggccgcctggcgttggccgggcgcgagatgacgcggttggccggcttcttcttccgagttgaccaactgatgcacgtcctggccgaccttgagcagggcaaataccaaaggacaatgctctcaattaacgcggattcaaagaatgtggccaatggaaacggaggcctcgtcgtcattgaacagcagcagaaactgaacaatgatgaccagcacagcaacagcacaaccgcaccgtcgtcccctccggcactgttgttctcctcctcctccaactcgtcctcctcctgctccctgtcctccttccgccccggctccggccatgtccttgtccaagacaatttgatccgtttccaacaagttccgctggtgacgcccaacggcgacgtgctcatccgctcgttggactttgaggtgccatccggcaccaatgtgctcgtctgc

SEQ ID NO: 89978 - DNA, 648 bp, Heterodera glycines
cgaacattaattggcaattaattaagtcgttttgtttttaaatgacattagaaggcgaaagaggtggattacatgcacttttgactgctcggttggatgaggatgagcaattcattgcgacaataaattacctgaacgacaatttgcgtttggatgccgaaacgacggagcaaaaactcagaatggtattggaggaccgggagctggagctgaaccaacagtacttggaacagcttgaaaagatgaatgaccgcgtgcagggatttgtacagcaaattcggtcgatgaattcgatttgctgcgaactcactgaacgcattcaaacgaacaaggaaaagacacgcgagttgctgaagagaacagccgttctgcagacggaaaagcgcgaattgggtgccaagaatgcatttttggacgaatttttcgccaaatattccctaaacgaagaggaggagacggcattggcactacccaatcagcaggggtcgccttccgacgcatttttctcggccttacgacgtttgttagaagtggagaaaaatgtgacggaacaattggcattggagccgaacagtttggcattgatggaactttcgcatttactcggcgacaaattgcgccaaacttacgccactctttacgcgtgtg

SEQ ID NO: 89979 - DNA, 611 bp, Heterodera glycines
gtccagttaagccagcaccttctctcaacgatttaataagttttctctatttgctgcacagaatgccttttgcgaatttcagtgtggacagtatcctttccaccggagaagggaacagcggcacttccaaatgccacaattcctttcgtccctccgtcgttttcgcttcgtcatgccatggctgtctcactgacgagggaagttcctgtttcgaaatgcgtccattcgattccgttgacaccgaattctgtccccgggcgggcgacgacgacacttcgctggtcatttcccgctgggctttgcagtgcattcggatgattgcgggcgacgatgccaaaatgacgacgatgaaaacggtgaatgccgattcgccggagcaaatttcgccaacggatgctgcgaattccatctttctgaatccgtcgattgctcttggcaatggcaatgccttcccactttttcaacaaatgcaaaaggccaaacgaattcgcactgcgttcagtccgtctcaactcgtcaaactcgagcaggcattcaatggaagtcaatatttggtgggaagtgagcggaaagtgttggccaaacaattggcactgtccgaaacgcaggtg

SEQ ID NO: 89980 - DNA, 1104 bp, Heterodera glycines
ccaataaagaaaaccttacaaatatacgtttttaatattatggcattgcctaacaggcctccgtatcttccggataattgggataatgatgttgagatgagcggcttaatgtcttttttaaaggctcgacatgtcaactcgacaaattatgatagggtcattgagttttggaagagagtgatttcagattattgtcgtcaccaaaagaattgcattttttcgttggatgaactcaaattgaaattcaaacgaggaacgcaacttccgagtccgttgccaaccgtcgtaatggaaatgcaaaatgccggactcgttcaatcgaaggaggaactcgaaaagcagaatcagggctggctacagtggagcatctctttgctgaagccgaacagttggcttccgggcctcgcgaatccaacggacgccggcaaaaggcacccattcgaattggtgcacatccccacactcaaacaacaggccaaggagttgctccgtttctatcgaaatcactttgaaatgttcgctgactgttccgacgtggtcgactacaacgacttgcgagaacagacggcccatctgatggacgagcgctgcttcgacttggtgatcaatgagttggccagaatgggcgaagtgagcatgggaagcagcaaaagcggcgacagagtgctcaaatttaaggaccaatcatcgaagggacccgcccgtttcacagagactgacgcaaatgtccatgacctgaagcgcacaatgcaacgcctggacttggacataaaaaatgcagaaaaacgagagcaaagtttgaaagaggaggcgcgcgtggcactcggacgaaaggataaaaagggggcgttgaacattatgcggaaggttgcccgagtgcgcaaggacatccaggacaaagacgtgcaataccaaagactgttggcaatgctcgagcagttggcggcctccaaacagaccaaggaaatcatcgacgtgtacaagcagggctctaacgcattccgagagaccatggctagacagggactgacaccggacaaagtggacctcacaatggacggcgtgttggagacgatgcaggactaccaagacgtggaagaggcg

SEQ ID NO: 89981 - DNA, 792 bp, Heterodera glycines
ttgagatgcatttgttccatgccttccttcaccgttcgctgctgatgaatttgccgccttcgtcctcttcttcccccgtcctgtttaatcggctgaccaatcgtcaaactttggctttttctgccattgtccgtcgtgtaactcgcggtttttctactcgtcaacgcaatctgtacaaagtgttgggcgtttctccttccgcctcacaaagcgacatcaaaaaagcgtattatacactgtccaaaaagtatcatccggatgtcacaggttccaacgaatcgtgcgcaaagaaatatttggaaatcaaagaggcttatgacgtattgcgtgatgaaaagcaacgagaagaacacgaccgatggttagcggccgaagaagttcagcggcaacgtccaattaacggacgacagccgtatgtacgcagacagaaagtgtacgacgatttgtggccaaacaatggaaccttttcggatgaggaaatacgaaggatttggcgcagtatgagtggcaacagcgaatttggacggtcgaattgggaatttgaaacggaggtgaagcgtaaacgacagatggcatatgaggaacagacgaggagaagaaatgagtgggcgaagaacgggttcggccaaaacaatggtcgaagtgattggactgaccaggaccaatacaaaatcattggcaaaattctcctctgttatgtgctcatcacttttttcatcgaaattttcagcgcttcccttggacttttccgagacccatttctgccgccatataacagagaagaagacatca

SEQ ID NO: 89982 - DNA, 543 bp, Heterodera glycines
gctaatgctcgttggtcttgaccatttgcttcccgtccgtccggttgccctttgtctcattgaatattcgtccactctttcgccctccttcctttttgtacatttcattagcaatttctccaaaagttcctcttccgccggcacttccgatcatcacatcactttcgtttccctccatacgactttgggtcttttgagaatggtcatgggcaaaatggcccaacgattgaatttggacacctttcatttcgtttccgtctcggatttcctcggcgattcgcttctgttcgactgtgatcgacttttctcatggatcacgaaggaagtccttcgctccgttctccccgaccgcccccaactcgtcgtcctggacgaccttttcctttctcacccgtccattcgtcctgccaaactgctccaatttctgctcgctctctttgtccgtcttcccgaccgttccttcttcataatggccaccgcaaatgccactccattgtccgcatatatttccaatttcttcaattttcacattcgactgactcc

SEQ ID NO: 89983 - DNA, 916 bp, Heterodera glycines
gcaatttgcgcgttaattgaaagagcccagaattatgctggacactcgacgtcaatcgggcgcaattgaccaggctgaaatcctcataatttacggactgcgcattgaacatttgtattataagtattcttcgaatgaggtggaagatgaacagctgatggactcgttgtgcaaaattgtctatgcgataggcaacgcgccactcgcccgacagagggcaatgctttgtcaaatttaccaccacgcgctgcacgaccgatggcataaggcgaagaatttgctgctgatgtcgcatttgcaagcactggtggaccattcggatgccagcactcaagtcaatttccaagaaaagacaccgacccaaaaacaatcgaattaagattttgtacaatcgcacaatttgccaactcggactttgtgcttttcgtcatggatttgttcgtgaagcgcatcagaatttgtctgagatccagaacacccaacgggccaaagacttgcttgctcaaggcattccgccgcgacaatcggaaaaaacggcagaacaggagttgaaggagcgctctctgcaagtgccctaccacatgcacatcaatttggagttgatggagtgcgtttacctcatctgctcaatgatgctcgagatcccaaacatcgcttgctacgagtacgacgtgcgtcgacggcttctctcccgttccttccattaccaactgaaattctccgagaaagcggcgctcatcggtcctccggagaacacccgcgaacacgtggttgccgcctcgagggcaatgctcaggggcgaatggatcaaatgtcgcaattacataattaacgacaaaatgaacgcaaaggtgtggaatttgtttcgcaattctgacgccgtcaaacaaatgctcatccaacgtgtgcaagaaga

SEQ ID NO: 89984 - DNA, 472 bp, Heterodera glycines
cggaagtgtcgcgctgttcgacactctttcgctctctcctctgtctgttcttcgccaaactcattgctcttttgtcaccgccctttcatttttgcctcaacggtcgtgcgacgtcaaagatttaggccatatcggtgaaactatttcgcacaatttgccttcaaagcgctgttttttgccggggatttgcgccgattttcgttgtgcccttgtctctgtgagcgttgaccgaacaattcaggttcaccaatttcccttccccactcaaagttctttctccgccttccttttccgtctgtcaattctgacttctgttctctacgttcttttgtggactctttttgcataaataaccattggcattgatttgttgtgatctttgaatgtctctaaattttaaattgtgaatctgtgatacatacgaaataataaagttttttgttaaaaaaaaaaaaaaaaaaaaaaaaaaaaa

SEQ ID NO: 89985 - DNA, 650 bp, Heterodera glycines
gtccatttaagatttagacaaacaatttcctaaaaatgttgagccgactttctaaaatcactgttcgtggctatgcaaaggatcttaagtttggttcggaagggaggaaagctatgctctccggtgttgacatgttagcggatgctgtcgctgttacgatgggtcccaagggaagaaacgtggtcatcgaacaatcctggggcagtccgaagattaccaaggacggtgtcactgttgcaaaggccattgacttcaaggacaaattccaaaacatgggcgccaaacttgttcaggacgtggcaaacaagacaaatgaggaagctggtgacggaacgacttgtgccactgtgttggcacgtgccatcgcaaaggaaggcttcgagaacatctccaaaggtgctaatccggtggaggtgcgcaagggactgatgaacgcagtggacgaattggtcaaggaactgaaggcaatgagcaaaacagtgacaactcccgaagaaatcgctcaagtggccactattgcagcgaacggagacaaaaccattcgaaaactgatctccgatgccatgaagaacgtcggaaacaaaggtgtcatcacggcgaaggaccgcacgactttgttggaccaattggagtttattgaagggataaag

SEQ ID NO: 89986 - DNA, 967 bp, Heterodera glycines
gtttgaggtgccatatcagatcaattaagcattaattaagtacatcgttcatttccattgcccccatttattaatcgatggctgccaatgcaaatgatggaaccgccaaagggcaaaaaaagcaaaaacaaattgcccaacggactgcgcccgcttttggaggcatttgcacgagaatcactgcgcagtcagccgacagatttggcacaattcggacaaatattcttcgaaacactaattgaacagaaaatgcgaaattcggaaagcactgttgaagcccttctcggagacaaattcaattacgacattttcagaagcgaattgcatgaaaaactgaaaaaattctcttcgccgcaacaaaacggacggcccaaaagtccgatggatatcgcagcaaccaaaatccaagctatttttcgcgggcacatggtccgaactcatcccgaaaaatttgggttggacgccgaaacgatggacggactgaatcagaaaatgcggagaaattccaacgaacgattggagacggtggatttcaaaaaagacttaaaacggcactcaatcggcgggtacagtcacgcggagcaaacgaatgccacgccggaggacagagcagcgaccaaaattcaatcagaaattcgcggatttctggccagaaaacactacgagcaacagaagaaggatagctcggtggcggccaccaaaatccaagcgcaaattcgcggcttcttgacacggaaacggctcgaagagcaaggctttgtgctcagtccgccccgctcgcgtgcttcgacgcgcgcgtcggccggcgatgttaaggcccaatgaatgatcgggttgggtgggctcggctcgtctccccaaatgcttttgtgtgccgggcgctgtttggtgaaaacggcacagatggaaaaaaccaaacgcaacaaaaaccaaaacgcaattatcatttttattattattttatatt

SEQ ID NO: 89987 - DNA, 1356 bp, Heterodera glycines
tgagaatttggggacgtgctgttattctcatttcccctatgattgcctctgaaaacaatcacttagaagcccaaaatggcaacagtcccgagggagaagaagagtcgaattgcggaggcagtgcttcgccttcgtctcttcgcgactgtcattctcgagcatcgaccaacgaacacaccaacatttctcatcactctcttcacgatgacaatgcaccaccttctccctccttggccaatatctcaacaaacattgaactccatccacacaacaatgcgcttggaggttcctcctctcataaattcatcaaaaggccattgaatgcttatatgatatggacaagacaggaaaggaagcgaattttaacggacgatcccaaaatgaagatgaacgaagtgagcaaagctattcagatgggcgaaaaatggaagaaaatgtcggacaaggaaaagaaaccttacttcgaaatggcaaaaaaattctctgaagaacacaaattggtgcttcaagaacaccctgaactgcaatatgcgccctccaaaaagaaggtggtgaagaaactggccgatggaaagcaattgtccgtggtcgattcttcgtccgtcaagtcgtgcaccataacacccgacgcgtcgagaagcacaacgccgcggggttcttcaaatctgatcacaccacaaccggtgtcacagagtcaaatgttttctccgtttcaatctccaactgtgcaacttgctcaggtccttcagggagtgcgttctgtgaccaaccaggctgccatctcttctaattcgcccatccaaaatccgttgcttggctcggcttcgacctttccgcaagcgttcctccaatcccattcgttacctcagcgtgtcgctaattcctccgtttctttgctcggaggaatgtctcagtcgggtaccacgccagttagtgctgctactcggaccacgcctggtcaaatgttggacctctactacacctcactttgccagcctgccttccccagcataaccgagaaccctgttaatcctcttggaatgtatccttcacactatttgttggagcagtacaaccagcatctttctcagcagcaacaacagcagggaaataacggaggcacatccaatgcatctgcaaatgggggtggacggttttagcaagtggatcaccgatcgatcactcatgcctaatcaacttgatcatcctcaacacatgtcattttgtgctatgctcctcccttcgcatccattcgaatctcctcttttcaatgttcctcttcaccccacccaatgaacttgcagatttatctacctgatcaattttctattttctcgtgcgaattttggcccttcg

SEQ ID NO: 89988 - DNA, 670 bp, Heterodera glycines
aggtttttaatcctttaaatggggcgtcgtctgcccaatgttttggttaccggaacgccggggaccggaaaatcgacgttggccaaaaaagttgcacaaaatgttggcatggagcatatcgacaccgcattgattataaaggaacgcgaattttatgcggaatacgacgcccaattggacacccacgtgctcaacgaggacgcactccttgaccatttggaagaacgctttggctctgacgcgggcggcctaattttggactatcactgtgccgaaatgttcccaaagcgatggttcgacctcgtcattgtcctccgttgtgccaccgactcgctgttcgatcggctgaccgaacggggctattcggagaggaaaagacgcgagaatttggaggccgaaattttcggcatcatcgcagaggaggcaaatgccagttatgacgagtcggtcgtgcacgagttggagaacagcacagccgaacaactggaggccaacgttcggacggtcaccaatttggtgggggcgcacaaacagagaaagtgaacgaaaaagagcaaaggcaaagcagcggatttgtgtcataaatttcaaagcattttttgttgcttctaattttattgcaatttttaaatttaaaaaaaaaaaaaaaaaaaaaaaaaaaaaaaaaaaa

SEQ ID NO: 89989 - DNA, 1165 bp, Heterodera glycines
ccaagtttgagttttccaatggagcgttctttgtgcagtcggaacggtgcgggaaatgacagtgtggtgaatgtgagggatgacgaagtgcaggacgacgacgacgagttcttccacggcacggcatttgaaagtgacgaaggataggacggcatagggaaaaggcaaacgaaatactgtataatttgattaagcggttcgcggagaggacaaggagaaccgagggacgacggacacggcgaaatatggggttgactatgacgagatggacaaagggtctcaacagcggccacctccccacccttcggaccttccccagtcgacttcacttcgctacccgtcaaatctgtccaaaatcagcgaatcgcccgatgaattctctttttcgtttaaacgaggagaaaatgccatccaacagttcaatcgcgaccatgaggagttgcgtcgtcagaatcacctgcgcttgccctccgtttcctttcacacgtcccattattcgatgaaacacagttgggaggaaagcgcacttcgacttcaaaacgcgacgcattgttcatttgcaagacccgagctcgacctgagcacggtggacgtaaccgaaaccaaacagcagctttcgtccattaaaaaccaaactgtcgccaattctttttccgcctttcccaatacttccgcttccaatcaatcggcggcggcatctccccaattcctttctgggagtaggcattgcatttacttcggtttctgccgattggactttgagtcggaacagacgctgattctgcgcaacagacacccgcggggggaacgcgtccaaatcaaatgcgaatggacagttaacacgacgaaccaaccgcactatagaattttgtatccgcgcgaaacgacacagagcagagaacacacgcaaattttgggcagtgaacaagcggccaaagtggtcatcggattcactccgtccgattgcgcctattataagaacttcctgcgcattgagtgcaaatcgcgcgatgaaacgcgcgaatattactttttggtccatggttacggcggacgtgccgtggtggagccgacgatggaggaccgaagcgcgaacttgtgcttctccacgaacggtcaatttcaactgattgtacggtccatttcgaaatttcgtttttggctg

SEQ ID NO: 89990 - DNA, 609 bp, Heterodera glycines
ctccctcacccgcatcatcatcaccagcacaaatcgcacggcctctgggagctgaccagcttgaacttctcgtccacgcccgccgttgacaacgatgacaagcagcaccttgggggcaacaataatccggcattctattctcgctttacgcacgagaagcgcaatgccaaagcagcaaaagcggtttcggcgccaatgccggctaagcaaaacaacgatgccgagcagggcaaggtcaatgatgatggcattttcgctgtacaacaacaacattccgccgacgacaccaccgacgacggttgggaggaggatggcatttttgctcagtgccaaaaattgccgccgtaccaacagcaaaagtcgtcgttgctgctgacgccggccgccacgtcgtcttcctcggcaatggtggacagtgtgatcagttgccactcctcgttggcatcgacgtccgctttttctacgcagcaaaggtgctcaaacagtgccgaaatgctgacgagtggtgccggcggagtgatgttcgactcggccattgtcagcgacggcggcgcgccgtccaacttgggcttctttggccatgaacatgacgagcagcagcagaaggaa

SEQ ID NO: 89991 - DNA, 1269 bp, Heterodera glycines
cccagcccaaccccagaagtgaccttcaaagatcgttcagtgcatgagattcacttggagaatggctacacttatgttattgagcagaacttaaagcacttcgcctcggttatcaccgttttggccaagttcagtgagcaaattctgttgcaaccgaccgaagacggtttgatgctgtccgcctcttcctccgcgcggtcggcttacgcaaaagtgaaactgtgccgtcagttttttgaccggctgagggcacgcgaaaatttggggccggacggcgaagtgttctgtcggctggccacgaagagtttgatgcacattttcaaaagcgcggcccaatcgtccgtcggccccgtcccctcgtgctcacttgagttggacccccaatcggactttgcctacgtccatctccaatgtttgtccggcattcggcgctgttttgtgctgtcgttgcgtgagtatgccatggtctgtgacaatgtgttcaacgagcggcaacggctcaagaatcgggtgaccgcccacgccaaaatgctcgccactcttttgagtccgttggactgcagcgatctggaattggttgcgttggccgaccgattcaccgcctgccggtacatccctcgcgaggagtacggaaaagtcagacgaacggaggtgcaaattccggtggaccactgcgagcagtaccgcatcgaagtgcccacccgcgtggtggtcaacctgcgcgagttgcgccccatccttcagtttgccgacctttgtggcatgtccgtctcgctgcactttgaccgtgccggacgcccgctgattgttgcggtggaagagaatgtggactttgccgctgaatttgtgctcggcaccctcgatgaacagttgccgctcaatgagcaacaacaacaaccgacgccgcagcagcaacaagaacagcaacccgtagtccaacaacgcgaagaacaaccgccacaacatcggcacaaccaaatgctgcggcaccattcgccggcccctgcggcagtcgcagaacgggtggaggaggaacacaacgaaacgacgccaaaccgtgaccaaatgttgatggtgcagcaggaggaggacgtccaactgtccatccgctcgacaccgattctcccgattgcagcgctgcggcaggaggaacacaacgaaacagcaccaaaccatggccaaatgtctatcggtcccacgcccattctcgcggtcgccgcaacggtgcagcagcagcaggaggcgcacaatgaaatttcacaaaatgat

SEQ ID NO: 89992 - DNA, 618 bp, Heterodera glycines
gtccaattaagaatcccaatgaacgatttgctgcctttgcccaattccctctcgtccccctcgttgttgtcctcctcctcctcctccgccgatgctgtcaaggagtaccgattggttctgttgggcacccaacacaaaaagccattgttcgaaaaaatgtgttcagcagcacaaaagtttgaacagcacattcaatacgcggacatttggtatttaacgtttcaattcaaagacagcgaagagccggttgtggtggaaataaccgacccaggcacagagaaaacgggcgaacgccaaatggccatccaacaaaaatcagacgcgatcattctctgctactccgctttcaatcccggctcatttctcgccttggagtccgtcacagaggactttcaaacattcaatggaaaaccgcccgccactctgctgctgtgcaacgaggaccaattggcggaggagggcttcgaggacggacacgaaacggacactgctgacgacggatacggcaccaactcgggcggagggtcgccgtcggacagagaaatgccaccacagacagtgccaaaaaggaggagcacaacgccaacggggagacagcattcgatggagcgaatccga

SEQ ID NO: 89993 - DNA, 657 bp, Heterodera glycines
gtccatttaagtcaaggagtcatacatttaatgactcgatctcgaagtggcagtcgttgtggcgatgttgttcgttatgtgcttggacagaatacacatcagcagagttacaaccaacacatttacgatgacattgatgttttcctcgacttttcgcactgccgtccgagtgatcaggagcgtgccctcttctttgagttggaagcggtccttcagtttgcccagcgttccgccgattgtttggccatttacggcgctggtgctagtgccgaagttcgtgcagcactgcaaaattgtgatgatgctgacatacaaaatgcttcttttgccatcgtccgtcaattcgtccgtcgcattcgcaaatattttgaaacggcgcaacgaattgaaaaggtggtccctgagctgttgtgggagctctgttccggccctttgcctcccgttgagcagctcgactcggcccaagccctctgcaaacaactcgcccgactcatcgatttcgtctttcattttgaaaaaatgaaaatgaacacacccggcgatgcaggaacgactttcagttttttcaggcgagtgatttcgcggaagcaagcggcggcgcgcgaagcggagaccgactgttccctcgagttgggccacaccatttccctgttcctc

SEQ ID NO: 89994 - DNA, 534 bp, Heterodera glycines
caagtttgaggttttaaataattccgctaatatttgttaattcatttttggcctttctctgctcaaatgcgactcgttcagcttctccatttggcactgcttgttcagcttttgctggcgcctgttcttttggccgttggccaaaccgatgaaaaagtcaaacgaattcaaaagagagaggggccccccgaggcgaatttggtcgacaaaagtgcggtgccggccgaagggaatggcatgaaaatacggagacgacgcggcaccaaactgaaggcaatggcaggcggtgccgcggcaggactcggcgcggcacttctctacaaagcatttaagggcaaaggctaattgaatgagggaggagaagcagcggagaagggagggaatctccgaaggggtgataatccgaaagatattcataaatgaattaaaaataaattaacaaggaaatacgaaataacattcaatgaaataataaaattcacttttatttaaattaaaaataatacttattgcacttaaaaagttattttactt

SEQ ID NO: 89995 - DNA, 209 bp, Heterodera glycines
ctgaacccggcaataaaaaagagacgcggagaaacggggagaaaaatcggcgcctaagaaaatttgattgactttgtcttttttgacatggaattttgcacttttattatttttgctgttttttttttttgtctcttttgctgcagctgagtgtctaactgtcgcgtaaaaataaatttgcttaaacaaaaaaaaaaaaaaaaaaaaaa

SEQ ID NO: 89996 - DNA, 637 bp, Heterodera glycines
gtttgagtcactttctttctaatgttggccaccgttcgctttcactccgtcactaacaatcgcattgattgttgtcaacaaactctgttttcgctggacgatagtgagaatttgccggggacggacttttccgttgggaaagcgaagtcaaaacttttgtcggatgggcggagagagcagcagaaaatggcgaagaaaacgaacggcggaaaaacggagggaattggcaaaacagcggcaggtggcagcagagggtccgactcccttctgacggacgaagtccaattggacggaggcgccgccgacggcgcgtcggacgacgaaagcggcgactttttgcccattgcattgggcacaaaatgtgccgccggtcacgcagaggaaaacggccgggcaaattgggcggccaattggcgactcagcggacgacggtgtctgaagagggcgtccgttgttttgggctgctgtttcccatgggccgttggctttaaacaattcaaatgatcgcaatttgccatttccttttcatttcccttgaatctcaacatttgcttcacagcaatcattaaatgttctcattattattattattattattattattattattgaattttacaaaaataatgtaatttta

SEQ ID NO: 89997 - DNA, 648 bp, Heterodera glycines
tatttaagttatattttcactacataattttgatttgctggtaaatgtctctgtacgacgacattggaattgaatcatcaacatcagtgcaggtcaaagaagagaatttggagaaaaaagctgatgactttccgacaccaaactctgctcaagaaaccccaaaatgtcaccgtctcagcagtgtcagcggccaacaaaatgaatttgtccctttctcaaattcgcaactcgtaagccaagaaagccattctacagaatgcggccgctgccgcttcacaaaataaatcagcccccggcgttgccttcgcgcagccgttacccgccactcttccgaatatgcctcagctgctgaacaagaagggcggcacgttcaagctgaagccacacaaagcaattccattgcccatcgattcgaccggcgctttcactttggtgccgaaatcactgaaagaagacaaagtatttttgtttggtgaactgatggtggaagacgagtacaacccaaccgcacccactgattattcgtcgtttaaacagaaaagggagcaacaacggttaaaggagaaaattgccaaagaaattgcggatcggctggccaaggaagcggcggatgaggaagacaaacggcggaagggcgccgccatcgca

SEQ ID NO: 89998 - DNA, 651 bp, Heterodera glycines
ggaacttcgatttaacgatttcctataagcgaagttatacacagaatgagttccgcttcttcacctgtgccttcacttatccttaactcgggcttcccaatgtctcaaattgggtttggcacttggatgtgcaaaccaacagaggtcaacgaaattgttaaaagtgccattcgtaatggatatcggcatttggattgtgcattcatttatcaaaatcaatcggagattggcgcagctctcaaagacatgctccaacacggagagattaagcgcgaggatttgttcatcaccagcaaagtttggaacacttttcacagctttgacgccgcattggcaaatgtccaaaaaagcttagaacagctcgggcttgattatttggacctttgtctgatccattggcccatgggttacaaagaggggacagaactcttcccaaaggacgcggagggacagaaagtgtttttgtcggacgtggactttttggacacgtggcgggcgttggaaaaggcggtggcccttggcagagttcggtccatcggcgtgtccaatttcaactcggcccaaattcaacggatcatcgacaattgcaacatcagaccaagcgttttacagacggaatgtcacgtgttcttccagcagaaaaagttgcgc

SEQ ID NO: 89999 - DNA, 1049 bp, Heterodera glycines
tatcagagacgagggtttgagcacttaaaaattattttaaatcacttgaaaagaagcatgggttctttctctaaattggcaatcgaccaactcgaacttaaggggaaacgcgttttaatgcgcgtcgattttaacgtgccaattaaggatggcaaagtgacgagcaatcagcgcattgtggccgctctgtcgacaattaaatatgccattgaccatgaagcaaagtcagttgtgttgatgagtcacttgggacgaccggacggccaagcacaggcaaaatattcgatgaagccggtgcacgaggaattggagcgactgcttggaaagacggttgtctttttgactgactgtgtcgggacagaaattgaaaatgcgaccgccgacccaaagccgggcaccatcattttgctggagaaccttcgttttcatgtggaggaggagggaaaaggcaaaaattcggctggcgaaacagtgaaagcgtccaaagaggcggtgaacgcctttcgtgcatctctctcaaaacatggcgacctttacgtgaacgacgcatttggcacggcgcatcgagcgcatagttcaatggtcggctgtgcgatggagaagagggcgtctggttttctgatgaagaaggagttggagtattttgccaaggcactcgagtcgcccacccgtccattcctggccattctcggcggtgccaaagtggcggacaaaattcagctgatcaacaatttgttggacaaggtggacgagatggtcatctgcggtggcatggcattcactttctacaaagtgctcaccggcaaatccattggcaaatcgttgtttgacgaggagggttccaaaattatcaacgatttgatggcaaaagcgaaggacaaaaatgtgaaaattcaccaaccggttgattttgtggttggcgatgagttcaaagagggcactccattcgccaatgttgacgcaaaggatggaattccgaacggaaaaatgggcttggacattggtcaggaaactctcaaacaatttgccgaagtgattggacgtgcaaa

SEQ ID NO: 90000 - DNA, 618 bp, Heterodera glycines
gtccaattaagcctttctttttgactttccattgactgtgctttttgtccacctttcgtcttcaattttgttcatccaaaatggcggaggaaaccagcaaaaccagtgaaaacatcgctgaggacaacggcatcaaagcgctcgactctttgtttgccgccgtcgcccacgcctcaaaatgtttggcatccgctgccggcacgcccaacttctgcttggccacgcccgccttcctcgccttcatggtttggtgctgtttcctcatgccgccggtcgctgtgcttttccgcagttaccgccgcgacggcaacgcgttcactgtgcaggcggcgtacaacgtcattctgtgcttcttcctctgggtgcccggcatgttgcacgccctttggttctgtttcggtgagacggtgcgtatgcttcgtcgtcgcgtgccgccatcggacgacgcacagaaaaacgaataagggaaaagcaacgaaggatgacagagagagacacaacggcaccgattagacactaattagacgataatttatatgttttaaatagatttcttaaattcttaagtgtttttattttgaggtgcataaaaaaagacacattcaaaaaaaaaaaaaa

SEQ ID NO: 90001 - DNA, 466 bp, Heterodera glycines
gccgccgatttcctcccaataaaaagcaccaaattctcattaacaaaaagccttcaaaaaaaaaatgcattttttgttgaacttcaagctttttgcatccatctttcttgtactttgtgtggtttcgtttgtcgtctgccaggacaagccagctgaagcatgccttcatcccaaagacgagggaactggcggcttggcactcacacgatggtggtgggacggtagtgattgcgaggaatttacctacaaagggcagggcggcaacacaaacaatttcccatcaaaggagctttgtgatgacgtgtgcaagccatgaatgagccgtggaaagaagatgcaacatgaagagacaagcaaagaagaaaatcaaagaaattaaattcaaaaaatgaaatgtagcactaatgcctaatgattttgtggaataaacaaaacattgcaaaaaaaaaaaaaaaaaaaaaaaaaa

SEQ ID NO: 90002 - DNA, 703 bp, Heterodera glycines
tgacaattttggcaattttttgtttggcatttgttcaccttggcatttctggcaaatacgataagtcggatgagcacgatggcaaatatggtgccggtccacctggtggctactcacatgagaacaacaacaacaacaattatggtggcgattcttcgggcgaaaaatatgagacaatggaacatatgtggtcatgtgccaccaaatggcaatgggaaaagcccggcgtgtcaatgaaatgggaaattaccgacacactcaccgaagcggcggtggacacggattgcccatcacggaaaaatcggatgaacaattgttgctacttgcagactgaatgctacaacaagcaaataggacaaaagagctgtgacaaccaattctgtgaatgtatggagcgagccactgctggcaaaaaacgatgctcaatttgggaggggccaggcttctgtcgtcattaccgcttatacggcgaatcggcataccgcgcagcggcccccccgttttggagcagttgtggcactgtgttgaacagcgaaaaatatttgggatgtccttgcggcacgtacaaaacatgggaacgctgcggttttctgtatatgggctaccgttacctgtgctatgcgtgctaatcaaaaaatatataataatttttagttttgtcactcatgcttattttgtggaagtgataaatttgtttttagaa

SEQ ID NO: 90003 - DNA, 676 bp, Heterodera glycines
cggacagtttgcgccggttggccttcttcggcgtggcactgtccaccgtcagtacgctgatctgcgttctctccgtgccgatggtgtatagttacgtgcagcacatcaactcacaaatgatggccgaagttgacttctgcaaaatgcgttccggcaatatttggcgcgaagtgacgcgcactcagggaatgcatgcggctgactcgccaccgcgtggcgcgtaatgctgacgcgtgctgcggctgtggcgaatccccgcgtggtccgcccggccctcccggcccagatggaaatcccggcggcgacggacagcccggcggacctggacagcctggcgcaccggcacaggctccgccgcgtccgaaaccgagcggcacaggatgtcaaacatgtgctccggccgagaacggacatcccggcccccagggcccacccggccaacctggcgcagcgggagagcccggggcacccggctatcccggcaaaaagggcccacgcggtccgcccggtccagcgggtccggacggaaagcccggcgacgccggagcacccggacagccaggcgcaccaggagaactcaagcccggacccgtcaaagtgggaccgcccggcccgcctggctatcccggcaaacccggcggacctggccaacctggccaacctggagagcccggac

SEQ ID NO: 90004 - DNA, 663 bp, Heterodera glycines
cgatcgttcactcgtagctgacaaattcactaattaccaggtgattcttatagcatctacccatttaaaatgtcaaagattcccaaattggcacccgccggcttgaagaatcgggccccaagtccttttatcgcatggcttcgcaatgctttgctcaaagtcaagcgtgatccgactttaacaccaccatcgaacattcctaagccagatgaacagagtcagttcagaccacacaatcgcttccccaacactcagtccagtcgtagcattgagccagcgatggcgcagggcggcgtgcaccacaaattggccgacaattattacttggaacgcgacggacgccgcgaagttcgtccaccgaagcccatttacaaagcgctgggagagacgccgttgtgggaaaagccgagcggtgggcaatcgctgaccactgaacaaatggggaaaaacattggtgccgccatcaacaaaggccctgcccaaaattatggcatttcttttccgactcctggcttcggctatgaatggaaacgcaacgccgaggtggagcagttcacgcagcaaagaaacgcggaatttgccaaactcgagaagtacgacaaatttgtgaaatagagcgtttcatccaatggaatgattgattttaagttacggggcagcaga

SEQ ID NO: 90005 - DNA, 641 bp, Heterodera glycines
gtttgagttgtcagtgtataacatgtttctggtataagtgtctttcgtctccacgtttctcaatttttgtccgggcgattgatttgccgctcccttccactgtcgtcactccaaaattcccaactcaactctccccggccaaatctccacgttcggctcttctttcaggggtcatctgagcaacctttttggaagtgttcagcagtggtttaacacttcggccagcgcgagagttgtatcatcggcagacgaagcgttcactccgtccttcgaacaaagtgcacttagcccaccgctcagccaaactcatatgaattcgattagcagccaaggactcgccgaaccatctgtgatgaacaattccaacaccaatctgcaaacatttcgcgaagtgttgttcaatgaaactgtgctgaagttgctgaggcgttacgaatttgttgggtccatagggtcgggggcacaaggattggttatttgctgcaaggatttgctgacgaatcaacgtgtggcaatcaaaaggctgacgaggcctttcacccaatgttatccacgcaaaaagggcttatcgtgagttcgaaatcatgaacctggtgaaccatcgcaacatcatcaaattactttacgcgtacacctcccaa

SEQ ID NO: 90006 - DNA, 809 bp, Heterodera glycines
cccaattcttcctcattagcattaattaattaattcgtttcccttcccaaatgccttttctgtcccttttctcttccgtctccgcttttgcccttctctctctcctttccttttcttcttctgtccatcacttccatcataaccatcactccgattcgtccaaaggacacaacggccatcatcagcagaaggaccatcaaacggcacaagaaattccttccaattcgttcccttgcgcctgcggcggtcattcgtccggcggggaaaatgcgcgatggatgaacggaatgccggcgaatggagttccgttgtttttgtttccggacaatgtcttgcgattggtcggcgtcgttctccgaagtgaaaatgcttttcatagggacaacaacgaattggcgcggcatcttttccatcttttggcccaccagttcccccgaaaatggtttatcgtcggaatcggcacaatgccatcgaatggtgcgaacgaaccgaaaatgtgggcccgcgaaggaatcgacgcactgaacgggactgtacagttgcaaagcccgcccggttacggtagctttccctttttggacggacggcgttttcaacgagaaaacggaagcaaaatttggtatttcgtatatgcggtggagccaatgacggacaaagcaaaggacggattgccaaagcaaagcttggcaaagtgtttgtcggaaggttgcccttctcgcgacaatttcgcctcactttgtgccaacaatcgccgtcagcttggaacggtcgtcgaatttgaccaaagttcggaaatgtccattttcgca

SEQ ID NO: 90007 - DNA, 332 bp, Heterodera glycines
aattggagattgggggcttaatggagattgggggataattagagcaaatacggtaggccattttgccgtaaattgtctcattttagtgcattttcctccaatctcttacaattagcaaaatctctcctcctacgcttgtaacttttcccatagttctctttgcttcttttctttcactttttatttctttccgtttcaaagccttttccgttttctctctctctctccattcattacgggtttttttgtttaattatttattttcatatattattgttgattatacggcattaaaaaaaattcatgtgaaaaaaaaaaaaaaaaaaaaaaaa

SEQ ID NO: 90008 - DNA, 297 bp, Heterodera glycines
acagaacgatgtgtgcgtgctgaactgtcgcatcgacttgggcatctgtgtggtcaaaaagtgcagcctgactgtgtgccctcggcccaaggatttcgggtcggtgccatgagaagtgccgaagcaaatgaggaaaatgcagaatgatcagagagagggagagaagagcagaggagagatgaacagcagccaattcaaatcactggtgatcagtgctaattgcctaccaattgaccgatcaattatttgactgatcgaaatttttatttacaaacgaaaaaaaaaaaaaaaaaaaaa

SEQ ID NO: 90009 - DNA, 522 bp, Heterodera glycines
gtttgaggtgtcccatcggaatgcttttcgcctcttccgtcttccgcttctttctccgtcctcctccaaagcgttattcgtccttcctcctgaacacaatgtggagccctctcttctgtctgctggtcttcgctggtttggccgcgtgttgcgtttcccttccacagattcaatacgtcaatgacaagccgtactatctgatgcagaacatggaatgtcgaggaggcaaaatttacgagatcaatcaggtccaggacatcgacgagtgcaaggcggcatgtgtaactcggaattgccgggcagtcaacctcttccagctgggcgagttccaattcaaatgcgaaattttggcccatgtccacgggtacttccctgcccaaggagccgcttgttacatttcttacgtttgaaagagagagggcaatgtgacagattaatgaaaagcgatgtttttgcatttttatttttttagtttttttccctttgcttttttcccttaataaattttcttttgtgaaaaaa

SEQ ID NO: 90010 - DNA, 772 bp, Heterodera glycines
ttgagttttcttttcgctcaaaagggcacatgtcgccatcagcacaaagggaagtgttcgcgtcgcgcgtctttccctgcgattcattggcgccgctcacaccgaatggcacgacaaatgcaccggcgcccctttcgaaagtgtcgacagagtcctcgacgagtacagagacttgaccagcgaactttcgtccctttgcgatggctccaccgaactttcccccggcgaacattccgtcgcttttcacttcaaactgccgatggattccgtgtcgaccattgccaaagacggacacggcgtggtcaaatacttttgcgttgcgtcgttggatttgcccgacgacgggggagacaacgaaatcgttgcggagaaggaattcgctgtcactgcctatctgaacttagacgcgcctcattttcgagagcccgcccattcctccgaacaaattaccaaaggcggagttttttgcggaagaatacggcgggtgaaggcggagctgtgcgtcgaggaattgggcttaatgacgggagagacatgcgaagtgacactgacagtggagaacacagcgaaaagggggcgccggaaaagccacgccggggaggggcacaaatgcggactgatcagtctgtgccagcaggtcgacttcaaggccaaggccaaaacgggagaatggcagaaacggtctctgacgacggcggtacaaagccagggcatttgcaaagcgaactgtgccaagaagcccgaaaccaggagaacacagttcataatccca

SEQ ID NO: 90011 - DNA, 677 bp, Heterodera glycines
gtccatttaagcaatttgttaaacaactttttgagcaataatatcaaatcatatttgaatggatccgtccgctccagcgaagaagcgtggccgaccaccgaaggcgggcggcgtagcgaaaacaattgccaagaaaccaccagcgaccacaaaagcggcgcccaagtcgccgtccaagtcaccagccaaatcgcctccgagttcaccaccgcagccggcaaagggctcgcccgccgcaaagaacgccgtcaagccggcagcagcgactggacgcggccgtggccgcccaaagggcaccggcacatcggcagcagcgaagaagaaggcggccgcaccggcgggcggaggcacgggcaagcgcggacgcccaccgaagaagacagcgcagaaggccaaggagagcgatacggacgagcacgacgaggggactgaccctgacgaatcggcgagcagcaaatcgccctgacttttgacgtgttgaatgtgtgacttttgctgacccttgcgcggatggatctctgtgtaatgatgataatttcaccacccccattttttgtttgtttgttttttcttttgatttcttccgtttattttgacaccctttttttgtctccctttttcccccttttattttctgtcgcattctcgtaccattaaccaacccacacactgttctt

SEQ ID NO: 90012 - DNA, 1105 bp, Heterodera glycines
atccgctggacgattcgctaagtgaatttgacagagcgcaactgcgcgaattggacatgtttgaggacaacagcaacaaattttgcgaagtcgaagatgaaaatcccgaacgaatgcattacgtcaacttggccaagaaccccgagcggtacaccggttacaaaggcaattcggcggtcaaagtttggaagtgcatttacaacgagaactgtttcaaacccgacccgaaattcgacaaaaagtttctcctccaaccgacgccaacggggatgtgtttggagaagagagtgttctatcggctcatctccggccttcactcggccattaccgtttcgattgcggcccacaattacagaccggcccccggcggtttcggcaccggcacttggtaccgaaatgttgaattttttgaaaatcgcttcggtacgaaatggggcaaagaagggcccgaacggttgaggaatttgtacttcacttacatgctggaactgagggcattggtcaaagcgacgccgtacatccgaaaaagtcaactgttctacacgggcaacgagcaggaagaccgagaaacgcagcaatccttggaacacttcctcgccgtgctcaaagagttccccaaccaattcgacgagactcaacttttctcgaatttccaagagtcccacgcccgtctgctgaaggaggagtttcgcctgcacttttggaacatttcgcgtattatggactgtgtcggctgcgacaagtgccgactttggggcaaattgcaaacgcacggaatgggaacggcactgaaagtgctcttttcggaccttccgcggaacggaaacggagggaaagcgaacggaaggaaagagcaaacggaaaacggagaaagtgcagcgaacggcggacttttcaaattgacaagaaatgatttggtcgctctgttccaaagctttggcagatattcctccagcatttgggagatcgacggattcagaaaagagttccgacacgacgaattgtgaattgtccgctgaatttctttttcgtttcgcaaatgtcccatttttcctcctcctcgtttcctctccttttgtacgatgagtccgattaatttatttct

SEQ ID NO: 90013 - DNA, 622 bp, Heterodera glycines
ggaacttggaaatcattcttcaaaatgggtcgcgttcgcaccaagactgtcaagaaggcctcccgggtcatgattgagaagtactacccccgcctcaccttggacttccagtccaacaagaaggtcgcctcggaggttgcttccatctcgtccaagcgtctccgcaacaagattgctggtttcaccacccacttgatgcgccgcattcaaaagggtcccgtccgcggcatctccttcaaactccaagaggaggagcgtgagcgcaaggacaactacgttcccgatgtgtctgctcttgagcagaatgagctcgttgttgacaccgagaccgctgcccttttggcgtccctcgacatcaagcttccccaaatccgcaccgtcgctgtcaccgcccaaggtgagcgtcaaggccggaacgccgttgtgggcgccaacttccgtggcgaccgcggtgaccgcccccgtcgccccaagacccagcagtaagttgcatttgttctcttccgagctgtgcaaacttttcatccaacacgatgtattttgcttgattggtatcgcttgttggcgcgggctgggcatttcgaccgccatcaatacaccaacattggtcaatctaaaaaaa

SEQ ID NO: 90014 - DNA, 217 bp, Heterodera glycines
taaaatctttcccggaatgtctgcggataaaacgggcgcactttttgtgggcgatatcattttagccgtcaatggcgagtcattactcaatgcccggcatgacgacgctgtccgtgcacttaaacaaaacgggaaaatggtcaatttgcaagtgcaatatcgacgcgatttgcacctccgtcgggagaatatgctgcaccggctgaattgggaggag

SEQ ID NO: 90015 - DNA, 911 bp, Heterodera glycines
gaccagcaaaactcatgcatgattcgactgataatcgacgaaccaacccaactctgtgcgactcttttccaacaacatgctcgtaccatgttggaccaagttgacattatgctgctgctccatagacaggacggcgaggctacgcctggtgaattgatttgccggtcatcgcgtcgagttttgccgtgtgtgcgaattgatgacacttttttgcctcgtggagagtatttgctctgtgcccattcattttcaaaatttggagaacaaatggtttcggggactattgtcatacacagttcacgggaaattcaaaccatgaaactgcggaccacaactctcgacgacttgcgtcagtcaatgtgttctttgctgctcaaagaaggcgtcctccaaaattcttctcctgggattgccacacgttatctcaccaatgaatttgctggtttggtgttaatggtggacaattacagctcggacaattgtttgaaggtccattccgattgtcaaaactcaacaaatgttctttccactcgttcttctttgcttgcgttcgattccatccctccgctgcatcgacaggttgtcactcttttgacgcacttcgaaccctcccaatcttttatggtcactcatcgatgggtttaccaccaaacaaaattcccacaactgcgcgactttgtgccctgcactgaatttgcttccgctcagaattttccaccgttacaaacggaaacaatcggttatttgcatggcccttttccggtctataaatgatttgttcacatcttctaatttcgtcaaacatatcttttctatttcttttgtggatttattttttcccatcttcagcatctcatacatatcacttccattgtatattttcctcctttcatcaatgaatttattgactt

SEQ ID NO: 90016 - DNA, 736 bp, Heterodera glycines
  unsure (1)..(736): unsure at all n locations
taatgtttcacattcaccgctatgacaaattgcaatggtgtggactggcgatccatcgtcgcactttgagtttgaccgtcgactattgtcgttatcgccagcgccgtccgtccatttcttttccgtcttccgccgttcgctcatccgaccattttcgcttcatttgcaacaccaccaatcatcgctttttgccattgggggttgggcgtctcaactcaattttgcattcgactgtttgcggagttggcccctctaatttttcagccggttttgcaaatcatttggttcaacatcgctttctttcttcaaagtctgatggtttgaacgtcttcgaaccgaagtggaagaaggcaattctagttgtactccttgtctctgctgttatcgttttgataatactggaggccagatcgaatttggcgaccgacgaagagggggaaggtttggaggagcaccggcggaaggaagaggagaagcggaggggccgccaggagcggatggcagctaatcggctgcctccggcagagccggaggccgaggaagagccggaggttattccatggcaagcgcgtagcgcggatgacgatgatgatcatgatgatccggatgcgcccgacaattggcgaaaccggacaaactgaagaaataagaaattgttgtggacagccattttttgaatgttatgttgatctctcgcataaattgtttttgttnaaaaaaaaaaaaaaaaaaaaaa

SEQ ID NO: 90017 - DNA, 737 bp, Heterodera glycines
gccatccggaacatttcaaggcgaaagttctgtggatgctgcgcaagttaaaagccaatcgtgaacgcccgccttcactaatcttcattattcgcgatggactggacgaaggaaaagtggacaatgcgttgtccagtgagattgggctgtttcgcgaaagctgttctcagatcagccaatcgtggaagccgaaatttgtttattgtttggcggacaaacgacacaacagacgctttttcgaggtcgaggaacggctgccggacgcggcccagccgcgcaatgtgtgcaacccgcaaccgggttccgcggtcgatcgcaagttgacccgttcgggtgttctcaacctctacgttcaagcccatcatcccgtacgcgggacagcgaagattcccgagtttattttcccatgtaacgaagtgtgtgctaccaaggaggagttggaggcatttatcaacggactctgtcactcatggcaaattgtgaaggcggcgacgtcactgccggtccccgtttaccaggcccacgaacttgcgaagcgtggaaggtccaattacatggagctgaggagaatggcgcccgaacgaattccacggagtgttgttttttcaagtgatgtgcgaacaattatccgagttgctctcttacaacgacagtcctctcagtgaaacgcgaacaacggcttaatccaaaaatcagataatgacactgatggactaatattataaaagcggaaacaa

SEQ ID NO: 90018 - DNA, 604 bp, Heterodera glycines
gtttagttttgatggaaggcatcgatcagcctgtgacaaaaacgtgcaccatcgttgaaaaggactacgaccaacacgagctgttcatcttccggcctctcaagttcaacacctgctcagtcgtcaaactttccatcgaacccataaatccgtcagaactgccaaaaatgctcgactcgctgcgtaaagtgaacaaatcctacccactgctgaccacccgagtagaggaaagtggggagcacgtgatgctcggaacgggcgaactttacatggactgtgtgatgcacgacatgagaaaggtgttctccgaaatcgacatcaaagtcgctgacccggtggtgtccttctgcgaaactgtcggcgaaacttcgtccctgaaatgttttgctcaaacacccaaccaaaagaacaaaataacgatgattgccgaacccctcgagaagggattggcggaggatatcgaaggcgaaattgtgaagatcatttggaatagaaagcaacttggtgactttttccaaaccaaatacgaatgggatttgctcgctgcgcgttccatttgggcatttggtcccgagacaaatggtccgaacatttttctggacga

SEQ ID NO: 90019 - DNA, 584 bp, Heterodera glycines
gaaataacaaattcgggcaaatgggactgcatcattcttcacgacgtagatttggtgcctgaacatgatcacaatttgtaccgctgcttcaaggaccatccaacccactttttccggcgttttgacgagaataattacgcgtaatttattttattaatcatatatttatttaaataataaagaaacttacccctaaaaatatgaaaattggaaaaataatttaaaattcaaggctttcaattttcccagaatattcatattatttttgggaagactggcagttctgggtccataacttatgacagaatggtagccacaataagacatgaattcttaactcaatattttggtggatatatatgattacatttaaaaacaaatccaaaaactaattaacgaaataattaattgcattttataattaagtcctcttccggacaacaactttggcgaagtgtccggcttcaccccggaacaatatcagcgggtcaacggctactccaatctgttctggggatggggtgacgaagatgttgacatgttcaacagaattctgagtgttggctacccggacgagcgtaaaa

SEQ ID NO: 90020 - DNA, 626 bp, Heterodera glycines
gtttgagccgcctttatctgtcccttccgcttcctgcttctcttcctcgcccttgtaattaaattccatcccctgcgctcgttttggccttccctcccacaaatgactgaagtgcctcccaacgcgcgtcaatggacactccattttggtggattggtggaagcggtcaatggcgcacacattgaccccagtggacgcactgatctactcaaagtgttggacagagccaagcgggacggcagtttgcaattggatggtggcgaaataacactgttggaatgcgattgcgatgcagtgagagtgagttcagcgaaggtggacgaaagcagcaaacctttagcattcattccactccatcagctttcttctgttggctttgtccatgaaccaccacaaaacattttggcactgaaagttggtgacgtggatgagaacaagcccgatcagtttgatctgataattctttacacttcaactgaggaaatggccggagaaatttgtcagtatttggccttctgttttcaattcatttaccgagaagcactgtcaacgctggagcaaaatgaacacgaaagggaggaaaggaaaaagacgccgcagcaaggggacatttcggcaaagttcgc

SEQ ID NO: 90021 - DNA, 738 bp, Heterodera glycines
  unsure (1)..(738): unsure at all n locations
tgagagtttcccaaaaaacaattctgcccaatatggtcacttcttcgccagacattcagcttatttttcagtcagttgaccgcgatcggtccggtcaaatcagtgccgatgagcttcaacaggcgctgtccaatggcacatggaagccgttcaacccggagacgtgccgaatgatgatttcaatgttcgactcaaacaacgatgggggcatcaattttcaggaattcggcgcactttgggagtacatcaacgattggacgcgcacttttcgcactttcgaccgcgacaacagcggaaacatcgaccgcgacgaattggtcaatgcgttgacacaattcggttatcgtctgtccggcactttttacgatatgttaatgcgcaaatttgaccgaactcaaagcggtcgcataaacttcgacgacttcatccaactttgcgttgtgctccaaacactgactaccgcttttcgagaaaaggacaccgaccgggacggatggattcgaatttattatgaggaattcctcgccatggttttctcgctgaagatgtaagtcaatgatggctaaacaatgagcaaaagaagggggaattattgactgatgaggatttgctaatacagtaacccacttatttttgtatgttttctgttaaacattatttacatatcactttcaattttacgacatttttgtttgaataaaaatttggaaactttnnaanaaaaaaaaaaaaaaaaaa

SEQ ID NO: 90022 - DNA, 931 bp, Heterodera glycines
gataatttgccaataagcaatatccacattaaagcaattgaatagtctgataattactaaaatgaacaattacgaattcgccatgaattcgcctcacatggaaatggccaaattcaaggagttcatggacgactctagtgaagaatttgtcgctttgtcaccgatgatacaaaaccagcgagattggagcccatattcgaaccaaggagggaccgtttgtgtgttggttggtgacgattttgtcgtggtcgctaatgacactcgtctgacgggcgatgctgaaattgagattctgtcgcgcaagtgcgagaagacgcacattttgaccaacaaaatcataatgacttcttgcggattttacggcgatgtgctccaattgaggcgcattctcgagctacgtattaaccacttcgagtttatctaccagaggcccatgtctttggaccagtgcggtgaaatgctttcccgtactctttactcgcgtcgttttttcccctatttcacggggaccattatttgtggaattaccagtgatggccgtggtgacctttacagttacgacccggttggttgtattgaaaccaaattattcgaagcaagtggaaatggtggaagcactctgagtacatttttcgagaaccaatgggcttactcgacggtcgcacccgaggagcgtaaaaacatgccaaaacggactttggagcgtgctctttcggttatccgtgatgcttttcgtgggctgtcagagcgcgagacaaccaccggcgactctctcaatgtgtattggttgcaggcgggtgacgaaaaggttcatcaggagacttatcgcctgcgtggagattagccgcttttctgtgctgttgttggaaataatccgatcattttttgtctccgtcggcatatttttttcttataaattctgccatttaaa

SEQ ID NO: 90023 - DNA, 566 bp, Heterodera glycines
ttgcagccaaaactaatctcatagtctcataaactctcaattcataacaactcgagactagttctatcacttcattcccaaaatgtccttccttcgtctgatcacttttgttcttctgatcactctgtgctctttgccttctctggtcgaaagcggcctcattggcattgtcggcactcccgttgaagccgcttggtgcggtgttttgggcaaagaatccagccattgccctactgctggaggcggtcaacatggcggaggaggaggaggaggaggaggaggaaattacggtggtggagccccgggtggaaattacggcggttccagcggctcatacaatggccatcgcgcacgccgattcgcttgataaatgacaaataaagaaagtggatgatgatgaagtgttataaataaaaagtaaacaaaacaatctatttttaattactttattttaaattgtttttttaattttttagctattttagtgaatgttcgatgtttattttaataattttcctttttaataaatttgagttcatttgaaaaaaaaaaaaaaaaaaaaaaaa

SEQ ID NO: 90024 - DNA, 552 bp, Heterodera glycines
caagtttgaggtattaaaatggaaaaggaacgtgatattttggtttcactcgcatcgaaacacagaacagttccgtatgacgttttgatgaatgctctcaaaattgcaaatgaaagggaatttgaagacttcatcattgaatcgatttatcaggatatcattcagggacggctcaatccaataaaacgccatttggagatttatgattggaaaaatgaaaaagttggcgactttcagtttatggcggagacactaaaccaatgggataaacattgcggcaattttttgaattcaattggcaccgaaatgatccgttctaataacactgccgctgagtttgtggcaaatgagaaagcggtgaacgaagaaatcgaaaacattcggaagactttcagttacgaggacccgaagaagtttcttggcgacaaagacacgttcaaaacttcttcgaagcccgaagcaaagaaattcaaaagcatgaaaaataagaagccaggaaattagcacttttgttttgtgtgcaatttttgcgtaaataatttatgcaaaaaa

SEQ ID NO: 90025 - DNA, 569 bp, Heterodera glycines
cctcgtgccgaattcggcacgaggtggtcgtattttgtacgctgtgttggagcattcttttcggcaacgcgagggggacgaaaagcgatgctatcttgaacttccgcccctaattgcaccgatcaaatgctcaattttgcccatttcttctaatgagcgacttgacccaataatctttgctgttcgggaccaactgacctctcgagaaatctcttctaaaattgatgacagttctggttccattggtcgtcgctatgctcgaactgacgaaattggcataccatttggcattacggtggactttgagtctgagttgcagccgtggactgtgaccttgcgaaatgcgccaacaatgcaacaaattcgtgtttctgttagtgaaattggtgaagttgtcgggcatttggtgaaaggcaaaatgaattgggagacagcaatggccaaatacccaattttcaatgccaaataaatatttgcatttcatacatattgtattttattgactttctttttgttgggattataagtttataaaaaaaaaaaaaaaaaaaaaaaaaaaaaaaaaaaaa

SEQ ID NO: 90026 - DNA, 648 bp, Heterodera glycines
ttaagattcaataaaaaattttaatgcatttgtcagtttgttcattattgctaaaaaggcttccttctacacgcttggccactacgcttgctaatgttagggcaaaaaatgtgaagcagccgtcgactgagcggataaatgcaatttctctggatgatttcccaattgcttatcctgattttcttcgctccgaagttcttgatcgtagagacccgttgtttgaacaactcgtccaagcagacatgtttgaaagacgtatggtaattgacatccccgaattctatgttggttctgtgttagctgtcacaatgtctgaccctaacaccgtaagtaagcagcacagattcgttggcatatgcattcggcgcgaaaaacagggacttcagcacacttttacacttcgaaatgttattgatggcctcggtattgaaattatgtacgaaatatacaacccaacaattttgcggattgaaactcttttgctcgagaaaagactggacgaggacctcacctaccttgcggatgctttgcccgagtacaccactttcaaattcaacatggaaccagtgagccatacagcaggaaaaccggttcccgtgaaccccttaaaggtgaagctgaagcctccgccatggacacttcaatggt

SEQ ID NO: 90027 - DNA, 650 bp, Heterodera glycines
agtccttaagcttatttcattaattttgatgtcaagcttgctatgagctttcaatggccttggcattttgattttcctccatttttcaccatccaaccaaacctttcaactcgtgacaaacaactaaaagcttggggacgacttttgctcgattattgccaagcaaatcgtatttacaccactgatttggacgaaatttcaaagtcggatttattcaacaatcgtcgactgaatagacatttggatctgtcagggattcgggcagtgttcgactttctcgaacttcaaaaacacgttgagtggaaggataaggacaagacgcgctgcaacatttattggcgtagaccagaagagtggggccaattgctttacgagtgggcaaattcaattggattgttgaacactgtggtcacattgtacgagttgacccaaggcgaagacgtcgcgaaagaatctttttacggtttggacaaagacgtgctgttaaaagggctccaacatttggagaaccaaggcaaagctgtgctgattgacattgacggcgaaaagggcggtgtcaaatttctgtgaacaaagctttgtgttcaccgttctatggccatggaaaagggttcgaattttttgcgcaattccgacattgttgaggaggg

SEQ ID NO: 90028 - DNA, 630 bp, Heterodera glycines
cctcgtgccgaattcggcacgaggaagttttcttttcataattgtcaattttttttaatcttcaatgaatgcctaccaacagcagcaacaacagcaacttctccaggcttactacagccaattccaaccccaaggggtggcaggtgctgacggacaagtgccggccaagtacaagagcacactgtgcaacatttggttgatggagggcatttgcacgcgcggaaaacaatgccattacgcacatgggatcaaagagctgaactacagacaagatgacacaatgagtcgcttctacaaaacatctctgtgcactttttaccagcagcgcggcttttgtaacaacggcgaccaatgtcggtgggcccatggcgaagccgaacttcgcaagggggcagacggttcttctaatggactggcgaattattacgctgcgacaatgcaagcgatggccaccggtcagcagaacgccaacggctcgtcagccgaagcggcggcggctgccgctgctgccggttggaattgaattgattctcgatcatttgtataactaaccgattgtcaaaaattgttaagaatgcataacatttgggcaaaaatgtatctttcaatttgaaaaaaaaaaaaaaaaaa

SEQ ID NO: 90029 - DNA, 629 bp, Heterodera glycines
ccaagtttgaggtaataattttttaattaattatttttggctaaagtttaattatgatgaatttatttaaattccgagacatcgttttattacggaccattgcctttcctccgaattttgtattaaatcgtggaattaattaccgggaaaacagcaccatcggatcaaagcaaagtattggaaatgcagacgaattcaaattgcgcgaatttggccaaaaatacctcggcaaaaaagaagtgaagttcacagagaaattggaatttcgaagcagtgccaatgaagtgccaatgccaatttaccaatgcattaattcgcgaggagaatttgttgacggaagcgaagagtgtcctctgccgaaggaaatcgcagttaaaatatacaaagaaatggttaaattgaatacaatggacaaaattttgtatgaatcgcaacggcaaggacgaatttcattttatatgaccaattttggcgaggaggccagtcacatgggctcggccgccgcgttggaacttcgagatttggtctacggacagtacagagaagtgggcgtccttctgtggcgcggcttttcgttggaccaatgcatgaaccaatgctatgggaacgaattggacgaaggcaaaggc

SEQ ID NO: 90030 - DNA, 638 bp, Heterodera glycines
gtcaaatcttacaatttttatattatttgaaagcccttcacaagcaatttcaatggaccatcttatcgcattgatcgacggtgcttgccttcgcatgcaaagtagtgcccttcattgggttagtgacagtatcaagtcgaagtccgagcctaagaagccggagaagttcaaaacgcagctgtgccatcactacagtcagaatggattttgccggttcggttccagttgttggtttgcgcatggggagaacgaacttcgctctgtctctgctggttcgtccttttcttcgcccatcgggagccgtaaaccgcgttcgttgttgccacgcccgcctccgccgctgatgttcggttccagttgttggtttgcgcatggggagaacgaacttcgctctgtttctgctggttcgtccttttcttcgcccatcgggagccgtaaaccgcgttcgttgttgccacgcccgcctccgtcgctgctgttcaacattttccccaaaaatccctgattttcccgagaatgcttttttttccgcactcaccgtttttaatttttgaaatcaaatttacattttttattgtcaaagtttttcaaactttcgaataaatttatgatctgttaaaaaaaaaaaaaaaaaaaaa

SEQ ID NO: 90031 - DNA, 643 bp, Heterodera glycines
ttctttttatttctaaacattatgaagaagtttgactatctcgtcattggcggcggttccggtggcatcgcatcggcacgccgtgccgcggaattcaaagtgaaagtcggactcatcgagtcggagcgccttggtggcacatgcgtcaaccttggatgtgttcccaagaaagtgatgtacaacaccgccatacatgccgagtttctgcgggaccatgctgactacggcttcgactcaatgaacgtaaaattcaattggagcaaaatcaaaaattcccgtgacgaatacatccgccgtctgaattccatgtatcagaccaacttggaaaattccaaggtggaaatagtccgtggacgggccaaattcaacaaagacggctctgtcgaagtctccagaagtgatggctcaaaagagacatgtcagggtacgcacacactgatcgcagtcggcggtgcgccgcggattccgaaggacgtgccgggcgccaagtacggcacgagcagtgatggattttttggctttgagcaaatgcccaataaaacagtcgtggttggtgccggatacattgcagtcgaattggcatcaattttggctgaccttggctctgaacccatctgctgatccgttatgatcgtgttctgcg

SEQ ID NO: 90032 - DNA, 586 bp, Heterodera glycines
gtcggctgccgacggaggacaacggcaccactagcggcgaaaatccgtcgcatcagttggacgatggggacgacgttcaccaattccaattgccgctcgcttttcggtcatcgctggtccatccatctacgacaactgcacaaaatgttcaccaccatcaattgcttcagcagccgcaactcaacatcatcgttccctccatggaatgtgtttccgtcattcatcccaaaagagagcaacaattctccgcctccgttgaccaattcttagacggcgaagacgacctattcaagacggagccgttggatttgtcgctgtcatcggcacgtacaaaggcaaacgaaaacggcacaatggtagggaatggcgcaacagtcgctggcggcatccagcgcagaaaacggacgacaaacaaaagacaaatggtggaggaaatgtgcgaaacggcggcgacggggagaaaagtgacgccaacggaagcggagaaacggacttcgcccccctccgccgttggtatttctttgcccccctccgtcgtccctccgtccggcactctcttcactcccctcgcttctccttccgctgt

SEQ ID NO: 90033 - DNA, 636 bp, Heterodera glycines
ataaggtgcactctttaactatttctattttcgcttttggtgttgctaatgtctcaacgcgaagaacctcgtcctcaaatcaaagcgaagctcaagaactcacttatcgcttttcatttgtttctccttgtttccggtgttgtgctcttcagttttgctttgtggcttcaatttgaccctgcccgtgaatttcttctccgtctcgtccacttctccgagtccactccctttttcgagatcgctgtttacttaatgttgggcacatcgctcttcatttttattgccgtcgggattggattctcgggaatttggaagttggagcggtgtttgcttagcggattctctgtgcttcttctgctgttgatacattgcaaattgctcatccttattcttttggttgcctatcgttttaagttccccgatgacacagtaatgactgagtacctcagtaaaatggcccaacatcactaccatcgcgacaaatgggcgacacctctgatggattccgtccaattctatcacaaatgttgcggaagaaacggtgcgcaagactattcggagtcattttggtacaaagcgaacgcccaaatgggaatgccaacaaacggcgcaggacgcccgggcttggcacttgca

SEQ ID NO: 90034 - DNA, 403 bp, Heterodera glycines
gtttgagacttccatttgacttttgaccattttctccgtctttccctatgcccgccgtcccttccggctaccaagtggtgcagcagggccgtcaaggaccttcgtgcatggacaagctgaagttgggcttcgccatgggtgttctgatcggtggctcgaccggcgttctcatcggcactttcacatcactaaggatgggcctccgtgggcgcgagttgctcagacagacgggcaaaatcgcggcgcaaatgggcggttccttcggcgtttttatgaccgttgcgcaaggcattcgatgctgagggacggccgagagagaacgttttgtgctttttatattttatttagctgttttttgttggcctaataaattatattctcaaaaaaaaaaaaaaaaaaaaaa

SEQ ID NO: 90035 - DNA, 901 bp, Heterodera glycines
  unsure (1)..(901): unsure at all n locations
taatagattattaattaattaaattaatttgttctgtactgaaatgacccgccccttctgatcaccactcattcgcacttttgtcacttcgactcaccacttgcttttctgatggaccctcccgatctatccgagactcagccgaccattccgaaaaggggccaccaccaccggcgtcgcgtggatatctccgcctcgcgtttgccccgcgctgtgctcgtccgcatctttgggcatttgagtgtggctgagttgggtgctgtttctctcgtttgttgcagttggaaattcatcgtcgactcaaatgacttcgatctgtgggctcgccatgctcgtgctcagctgccggagagcgcgctgtccgacccgtatttgtttgtcaacatttcctcccacagggaaatgttgagggcatttaaacacgcctggaatccatcggactgttctcgaaatgcttttgtccgcaccaatggtttcaccgtccatcggcaacccattgcacagagtacggatggaattcggggcaaagttggcgtttcgagcggggcgcactgttgggaattttgctgggaaggcccactcggaactaccgctgntgttggagtggcgacaaaacatgccgcgttgcattgtcccggctatttgccggtaattggcagcgacgaccaaagctggggatggaatttggtgaacaatacaattgcgcacaacggcgaattcgtggaacgatacccgcgtctgaacaagaggaggaacgacgggagcaagcagcggaagacagaacgaacgaagaaagtgatcaagacgccgacatcgatgtcgttgactgatcgaggattgatggtttattttcactacacgtataaataaaaatgttaaannnnannanaaaaaaaaaaaa

SEQ ID NO: 90036 - DNA, 583 bp, Heterodera glycines
cccttctgcttttgttcgcctttctcgtcattcttccgcctgtttgctcccgttatgaagatcggtacaacatgaacatgcttccctgggacctgaagccggtccaagacttcatcggcctttggcaaatggaccgcagcagcggaaacttcaaagaattgccgccaccaaatttaattgacttggccatcaatccaatcccgaaatttggagcacggacaatgaacattacgttggtttatgatttttaaaagccgacaaattcaaaaacccaaggcacacttacttggactcggcccgaaatgtcatccgaagtgattacggctttatgccagtgaaaaatgccacccgaagggacccgcgggtgcacgtggcatatctgacgacgagcagcgaaggatggtcgatgatggagcagggcttcttcaaggacggcaaattgattttccacctcaaacaattcttgaaacgctcattcggtgccgggagcaatttggacatcagagaatttgagcgtcaatttgaactgtccggcttccactcgatgacactcaaagtgcgcgccgaaacatcttttcagacg

SEQ ID NO: 90037 - DNA, 1045 bp, Heterodera glycines
cctcgtgccgaattcggcacgaggcaaataagcaaataaaaataagacaaaagctgaattcgaaacaaacgtgatgagcgtcgaagaatcgccacttttaagggaatttaagacatttctgcaggcgactcttgtcgcattcggaagcgatggggcacccttttcgctggtgaatcagagattcagtgaggattgggttggctcgccttctctcaaggaatacgcgaccaaattaggttatgtccatccaaatggcatcttcaaattgttgcagtcaatccctgatcaggtgacaatgatggtaaatccgaccggcgaagtcattttgaagccggtccctatggaggaaacacgcgacaatttggaaaaaatcgacgcaacaaacaaagaactcaaagctgagagaaagcgtcgccagcagtaccaacaggggcctcttccagcgtcggtcattgcgcaattggcggcaggcatctgttggcccccgccggtgcccgcgcaaccgttgtcctcggttttcaacgcgagcatcgagcgtaccgcacccctcgccactccatctatcgctactattagccgaccaccgccgccgccgccgatgacaaagaaattcaacccaaatttgattccgcttggaacgcctcggtttgcgcggtgtgccagtaccagcaacatcgctgcggacagcagcgccgacagtgggcccagtgcttccggtggaccgactccatcgccgatggtattccatccaccacaccagcagccgcaacagcaaccacaacgttcgaaggtattctttgggcagcgtaaaaaaccaccacctcctgtcgccgtgccccgcaacgatttcggcgatttggcgcctcctgtcgccgtgtcccgcaacgatttcggcgatttggcgcctcctgtggccgtgccccgcaacgatttttgcgatatgccgcctcctgccgccgtgtcccgcaacgatgtggcgcaaacgttgtcctcggtcttcaagaggaacgaaggctattatgaagaggactttcatgcgttggcg

SEQ ID NO: 90038 - DNA, 630 bp, Heterodera glycines
gtccaattaagcttttcctcgtttaacttttcctcaaccttttgcctctctttcctcccaatttttcttttaccaatgtattctttccgttttttcctcttcgtctttttgttcatccattttcgtttcattggcacggcacaaattgtgaatggtcagcagctggacagcaattcggagcagcttcagtctaaccaaacgtacagtgtcaccaacgtcgaccgcatgtccaatgcgttccattcgccaacggacaatcagacgacttctcttctcggagacgaaaccctcaaacccagcgacaacgaagcgaactgtacgactacggaaaatggttgcgagttgaacgatggcaaatatttccttcgtttggtgctcattcttttggccgtccccaccgttctgctcattatcattgtgatggtcggtttcatcagccacaaaaagaaacgtcgtaacgaattccatttggacaacggcgccgccaccatttgagaaaagagtgacgatacgataaaccattgaaaatttggtatttgtttttgaaaatttggtattttgtttttcttgcaatcgatcagcatattcccgtgtcttttctttatggataaattgtcgatctgaaaaaaa

SEQ ID NO: 90039 - DNA, 499 bp, Heterodera glycines
gtaaattgttcggttatcgacgcaaaaaagtgacaaaaaaggactcaatcaccggacggaacaattcatttccagtgccgtatttgtccaaattggaaggcaatcagttgcaaccggggcaatccctaattgtacgtggcattatcatttcttccgatgagtttgtcatcaatttaaccaatggtccgcgtgtcgaattggacgacgaagtgcggacactcgacgatcggttgctgtgcatgcgcgtggaaatggggcagaagaggcggaaagtgcatttgaacgcgtgcataaacggcgaatggggccgcgaggcactcatcaaacacaaatggcgaaacggcgacgaatttgacatccgagtccgatgccatgaggacgaattcgagctgttcatcgaccacaaactttgtgcccgttttgctcattatgtgccgttgtccacaatttcgcacatttacataaacggaggcattgagctgtattcggtgtcctggga

SEQ ID NO: 90040 - DNA, 320 bp, Heterodera glycines
cctacataccactcgcctgcctcgcactccgagtcgcctatgtaccgcgttccgtttccctttcgcttggttgtgtcagggtgagtcggctctctgtgggccatcatggccacaccgcacggccgctgaactcgcagtgcatgcatgccgcgtttcgtttgtgttgatgtccgtcatctcgcagccgatcgcggtgatctcggtgtctcacggccaagcgaaagcttccagattggctgaatcaatcgtaacaacacaactgctcgccacaactccctcttttgctttcccaatcgtagacgccccacattgccattcga

SEQ ID NO: 90041 - DNA, 612 bp, Heterodera glycines
gttgctttgattttctgtccttttggccgatgagttacaattatccgctaaaaattgtcgttgtcggcgaccacaactgtggcaagtcgtgcattttgttgcgcttttccgagaattccttccgttctgaccacgtgagtacgctcggagtcgatttcaaattgaaaaccatcaaaattggacgggacaaaattcggttggaattgtggtatttcaatgtgttaactctccgtttcatttgcatcaaaatgcttatcgttaggcatggaaaggtatcggaccatttacaattcgtattaccactcggcccacggagtgatgtgtgtgtacgacttgacaaacgaaaagtcatttcaaaatttggaaaattattggctaagacaagtgaaggaacacgcgccacaaaatgccgtcctccttatggtgggcaacaaagccgacttggactccgagcggaaggtggactttgaccgtgccgaaaatttggcaaagaaaatcggcgtgtcaatttacgaagtgagcgcaaaaacgggcataaactgtgacgacgcattcgttgaacttgccactgtcatgagggacagacttttgaactcggcattgaattccgat

SEQ ID NO: 90042 - DNA, 836 bp, Heterodera glycines
cctcgtgccgaattcggcacgaggctttaatatataggatgtacatccgagagttagaatccccgggtgagcttcctctggtttggttaaatgcgctctcccgttcttgctttcgtccgactaaagatgaccaacttgtatcgcttgttgagctgagacaggccgcagaacggatcgcggtcgaaaacgcgcagttgaaccgggtcaatgccatgctcctaattttaattcaacgtcccgcaggagttctgcctcatcaggccgtgcccgtcgctggtgcttttggccaacaacaaaaccaacagccggccaatgcttttcccattccaccggttgtacctgttgtgcctgtcaacgcgaacaacagacttcacaccgatgaacttcaattggaaatttctcgccatgcacggaccttgaatgagctgtcggtcgaatacgctcgtttgatgcacaccaacagaacccttgttgaacaactttttgcaggtggtgcaccgccttatgttcatcaacagtttgaaccggtcgatgctttggtcaaccagaacgttttccatgtcaatccaccggcaccgaatgggaacaacaacgaggcggtcgatgctttggtcaaccagaacgttttccatgtcaatccaccggcaccgaatggggacaacgatggcgatgatctgcaaatgttttttgaggacgatgttgttgatgcttatcttcagaatatggacccgaactaaaagaaattcatccgccgatgatctttcactcatttatcgtgtttcattttaaaaatgtttaatgtgtgtctgtctgacaatgagaataaaatcacgact

SEQ ID NO: 90043 - DNA, 642 bp, Heterodera glycines
gctaattacgttttagtaataaaatgccaaaattttcgcggaaaatgctgagacctccacgaaaaaggattgccaagaaaagtgatgacaaaaaatcgacggaagacgaaaaaaagaagaagaagaaacggaggttgcccaaaacactgaaggagtgttttgagtgcgtcgacgtcggttccatcgttttgtgcgcctcctatttggacattccgccggagccgatcagcagcagcagtgacgagaaaagcaacgggaaaagaaagaagcaaaagggacagacgaaaaaagaagggcccaaaattgtgacggatgtccacgaatttgggtgcattccatggcgactttcgcttgtgcaccagcttcgcaaggacgacaacggaggctattccaaacacattctcaagttggcactgcactcggactatcgcaaggacgtcgcatggcgtgccgatgtgtccggcactttgacgatgaaaaaatgggtggacaaaatgccggagggcaccgacccgaggaaattggacgaacattcggagcgttttgccaccatcttcaatcagtgctgccaaacccaggcttttggcaccgaatttccgctaccaattggcaattcgtcggcggagacggcgaacagtgtct

SEQ ID NO: 90044 - DNA, 624 bp, Heterodera glycines
cttggttggtccaactctactcaattgaattaagcaatgattgattgccattgccatttggcggatgaaagttttaatgaggacattagtcaggtgattgaccgagcgaagcaaaatggtgtcaaagctgctttagtggtcgcagaatttaaggatgattttgagcgaattttggaattggcccaccaatttcccgattttatctttccatgtcttggaatgcatcctgtgcaacgtggacacatttcatgcagtgaagaaatgtacaaaaatttcgaagtggacaaatggattcgcactcattcagaccaactgatcgcagttggcgaggttggcttggatttcaagcctcaacatttgaagaacggagacgcggacaaggaggaacagcgcaaagtttttcgtgcacaaattgaactagctaaagaattgcagttgcccctaaacgtgcattctcgttcggctggtacgcctgtaattgaatggttggccgcgcatggggcgcaaaatgtgctgttgcacgccttcagtggcaatgtgaaaaatgctcaaaagggcatcgaaaagggcttcttcttttccattcctccatcctttactctctcaaaagaaaagagagcgatt

SEQ ID NO: 90045 - DNA, 1044 bp, Heterodera glycines
atttgttcaaatgaattctttctgatgtgtttaaacaatgcatggttcttcaccattaacagaggctaatctgtgcatgaaatttgagtcttctttttcatggaaggattgggttaggttacgtgacacttggaatgccgttgttacgtcgcaatcgcagattcacaggcattctgaacagctcgacaaaattgtttcggaggaaagcagttacagaaattatgcatctgacattcaaaatcgacaaattatgatccaaattgtggaaagaaatgtgaacaaagcgagggaattggtacgaacggcgcgatatcagttgaacgctttcaattcggcgctgagtcaaagaagagaacgattcccaaactgagcacggaatattggagctgaacaaccaaaacgccgaaatgcgcttggagttgagccgacttcgcaatgagttggttttccgacgtcgacatatgctcaaaagcctttacgaagtgttttttctgccgaagctgaagcgctcttcgattgcggcaccgctcgtcttcagaaggcaatgcttttgctccaacttcgatgccattcgctccttgcatttcccttctgtgcctgctcgactcgggcacaatgatgccgagttaagttcggccgctggttttatcgttcaacttttactcgcaattagccatattttggacattccgctcaaacatttgctccttttcaatggttctcgttccgcaatatttagtcgttcttctttggaacgctttggacctcttttccacttcctctgcaaagagtcaaaggaatccgctggaccaaacgatgtacctgctcaacgaaggcatcgtcccacatgagggccaagactggcggttgtgtctgagggggaccgaccggaccatgcagcctagtgcgaagagcggggactactctaagcaaccgaatgccagacggtgtcgagcaactcgcgaaaaggctacactacaattaggaagaagaatacacctaatacgcggcgcgggaggaggggcggccaaaagcaaaggaaaa

SEQ ID NO: 90046 - DNA, 552 bp, Heterodera glycines
cctcgtgccgaattcggcacgaggcttggctttgctgctgctttcgatgaccattttcagcactttccgtggcttttttcggctctcttcgcttggcttcttctcctttttcttcttttggagctgtttccttccttttcagccaatttatctcttcagttggtaagccctcgccgtgctctgatcgctttattccgtgcccccaacccaaccgaacattatttggcctttctcgacatattccgaatcggtgccatctgttgggtgataagcaatcatctcggcagtgaaggacgtctcgatgtgcttttgggacttccgcacggcgaacatttcaaacagtccgtccattcccttcccatctttggccccatttttggcaattctgctctcggtgtggaagtttttttggttctttccggctttttggccgcccgctcgtggcatcgtcggtggcaatccgaccttggcttttggccaaactctctcaactttctgcttcatcgttgacttcggctcgctccaacaacaaaggcattcgtttttttggct

SEQ ID NO: 90047 - DNA, 618 bp, Heterodera glycines
gagaaatatccggcccgcaacaatctcgagcaccttgcgatgctcaagtgtacggaggaaccgcacattgtgcgcaagacgggaatcatttgcacgatagggcccgtttgtcgttcggtggaaatgttggttcaaatgatcgaaaatgggatggacgtcgcccggatgaacttcagtcacggggaccacgaatatcacggcggtaccatcaaaaatgtgcgtgaagcagctgccaaatgcaccaagaaacgcaacgtggcgattgcactggacacaaaagggcccgagattaggacgggacttttggcagggggcggttcggctgaaattctgttggagaaggacgcgtccattcgcctgaccaccgactcggcatttgagaagtcgggcaccgccatcaacctctacgtcgactacaagaacataacgaaggttgtgaccaaaggatcgcgcgtgtacatcgatgacggattgctgtcgcttattgtggaagaaattttcgacgacgccatactgtgcaaagttgaaaatggagggaaattgggcagtcgcaaaggggtgaatttgcccggaacaccggtcgatttgccagccgtttccgagaaggacatcaaggac

SEQ ID NO: 90048 - DNA, 446 bp, Heterodera glycines
  unsure (1)..(446): unsure at all n locations
ctcggaggaaaatgtgccgaatccgcttttgttggagaaggaagtggtgccgaaccagcaggactcggtggaaaatgtgccgaatccgctttgttggagaaggaagtggtgccgaaccaacagaactcggacttaaactcatgtgccatggaatccactcacgtttcgtctgccaatcacttttttgcacagtactgtgccgaaatggttgaaacacttctcgggaaaatgtcggacaaagacgccttccatttgcgcaaggagatgaatgatgttttgacgaaatacgaggccgccaccatcgacgacaaatgagaagagggaagattgattgattgtctgccagtgatttttatgggtttctgcgcttgaattttttccatttgaacgtcaatttcgtcagtaaagcaaaatatatttnnnaanaaannnnaaaaaaaaaaaaa

SEQ ID NO: 90049 - DNA, 636 bp, Heterodera glycines
  unsure (1)..(636): unsure at all n locations
ctcgggccaatattacgcattcgttttttcataaatgccgggaatttgcggaggaattgtacggaaatttagtaattcgaaaaacgaatcgaaggaggatttttgcattgaaaacgacaatttggaaatgatggcggagctcagtgaggaggacatggactcatctgaagaagacgaaaattggaaggaaattaacgacgaggaacaaaacacatcggcaggacagaaggggacgcaagtttcgcgaagaaaaagattaaaagaaagactggaacagcgaaaggccaacgaaatgagaaccgtttttgtgggtaatgcgccaccgacttcaacgcggagagacattaccaaaatattccgggctttcggaaaaattgaggccgtttatcagcggactttgcttcagatgacggagaaattgacaaaattgatggagggaaaggacaaaacattgaaagaccgcttaaaatcgaccaatttttttgttcgtttttcttcgcaagaggaaactgagaatgcggcatgcaaaatgaatgggactcatttgggtggcaacacaattcgagtgacgacaagcaaccgacgcanatttgagcactcactttccatttttctcggcaatttgccatactccgc

SEQ ID NO: 90050 - DNA, 1006 bp, Heterodera glycines
ccaaataagatatttaatccatttattggtcctttattttcgttcttgttgtctgctgattatgggcaatgaacactcaaatcgctcaaagggtcatccgtcatcttcgtcctcaaaaaaggatagtccggcgactcgccttcaaaaagcgctgccgtccgcgctaaaattcggctcaaatgatctctcgtcgagtgccttacgacgccttttggaacagtcgaagaaaagtcgaagtttgcaactgaaaggggccggcatcaaaagagtgccgtcgggaattgtcgaggaggtccattctttgctcagaattttggagctgtcgtcgaacaaattgcgcgaattgccttcgaccatcggcactttcagcatgctcaaacagttgtacatcgccaacaaccgtctgaccaatttgcccgacgaaattggctgtttgaagacattggaattgctcgatgtttctggcaatcagctcactgaactgcccgacccattggccgcgtgcaattcgctgacccaaatgaacgcgtccaacaacaaattcagcacatttccctccgtcgtgacgcgactgctgcggttggaggtcatcgacttgtcggagaattcgatcactgaacttccggacgaaattgccattctgcgcgccactgaactgatcattcggcgtaaccaattggccttgctgaacgcctccaacttgaccaaatgcgagcacttgaagattcttcgcgtggaagagaactgtctgccgagggaggcgttcactgccgaacttctcgaaaagtccgagctgactctgatcactcacgagggcaatcttttcgcggagaaggaatttcaggcactccccggctacgacgcgtacgaacagcgttttactgcgacacgccgcagacttttctgattgtgcgaaataagaaaataattataaatttctaaagataatttttatttttgtacttatttttgctttccaaaatgtttttaaagacatttggtggcc

SEQ ID NO: 90051 - DNA, 749 bp, Heterodera glycines
gagcagaagacgaaagagcacgcgatgcagtccaagcagcagccacgggaattgaaagccaaggaaacgatcatccgaaaacagtttcgacaagcggtcaaaattcaaacgcgccaattcaaagcgtaccaatcccaaatgctccaaatggcgccccgggaggagcacagagaactgctgaaccgactgaaggaggaacagagtcggaagatcgcctcccttgcggaccaatacgaagcgaccattgaaacgatggtcacggaacaaacgatcaaattggacgcccaacaggaggaggacttgcgacagctgaccgaaaaactgaacagggagctgagcatgttgacggagtaccaggagaaacagcgggttgaactgagcgcacaaattgagcgcgagcgagtgcaactgcaggaccgcgtcaaccttcggcttgctgtgctgaaacagaaaatgaacgaagaaaaggtccattttgagcggaacagagagcgacagttggcgcagttgcacgaccgacaggcgcaagcgttgagtgccttctccgtcgatgagagacggaagaaaagttccatgggaagtgacgggggacggaacgacgcgtcgtccacaaatttgtgaattgggcccagcgggcattcgttgccttttctctccttttgtcgccttcaattttcaattgtttcgacaatttttacttatctttttctttctccaacgaatttttgtatgtttttgtctttacttat

SEQ ID NO: 90052 - DNA, 423 bp, Heterodera glycines
ctttattctgttggctataaagatgagtgaaaatgaactcggtcgtaccctggaccagtgtttagcggatactgcgcttaaaattttggcaggtggttctattggtgttgtcacagcgcttgcgcttttcaaggggaagaggtcttggccggtttggcttgggacaggcgttggcatcggcatgggcttcaacaattgccaaaatcaattgaagagggacactgccaaaacgatggcccaaaagtcagcaaagaatggtcaaatgcgatgaataaattcacccaaaatttggaatgtatcattaggctaaaaacatttgtcgattggaatgttgatacgactcagctaaacatagtgaaatttaactgttcatcgtttgttttgtttttcaccagttgagaaaatacacatacgaaataaaaa

SEQ ID NO: 90053 - DNA, 888 bp, Heterodera glycines
aggacgagccatggatgccggcggagaaagtatacacaatcaaaggccgtggtacggtgatcaccggcaaattggagcagggcactctgaaaaagaacgacaaagtgaccattgttggactgggcaaaaaattggacaccacaatcgccggcttggaaacattccgcaaaacagttgatcaggcggagcccggggaccaattgggagttctcctcaagggccttggtccgaaggacgtgcgcaggggaagtgtgctgctcaaacagggccaagacgcacattttacggacaaagttcgagcgcagatttacttgctgaaaccggaggagggcggctccaaaatgccgttggcccacatgttcaaggagcacatgttttcattgacatgggactcggcggccaccgttatgttgcagggccgtgacttcgtcatgccgggcgagactgttgagctcgagtttctgttcaacactccccaatttgttcgtccccaacagcgtttcactctccgccatgacaaaaccacaatcgcctgcggcgtctttttggaggctcttcccgagtcggagggcgaaattcgcgacaaaaagtggaggaaaatgcaaatgcgaggagtgatggaaagggttggtttcaatccgttcggcaaccgatcgtttgagcgagcgtgcaaacctgactataccaattcgccgaaggacaacccggccgaggcattgttcaaagccgaggcaaaagcctagaaagaactttagcgaggggcacgactttagatgaaggatttgttttttcattaattaaatcactcatttccgtttcatttatttggcgttctgtttttattccatgataaattcctctttaccaaaaaaaaaaaaaaaaaaaaaa

SEQ ID NO: 90054 - DNA, 651 bp, Heterodera glycines
taaaaagaaaaaaaatgttgttttatgaccatcacacgagaacttgttgttttttcaacgtgcaaaagtgcgccttcacattcgcactcatcggttttgtgctcaatttggtcgcattggtcccaatatttttgccatattcgcccacttctcaagaaaagccaagcatttacattggcaaatgcttgcacatcctgttttctgcgatgctgtttttgtcaatcatgttggcctacaaacttcgcaaagcttggctctatacgccataccttatttacacgggaatttcgttggctcttgcagtttttggctgcttaacctatttgtactttctgattacggacccacaatcactgcttgacgacaattggcgaaaagcacacccgggcaaagcaacgaacgattcagaggctcgcgcaattgcgtcggcttggcttgctttgatgttggtttatttgctgttcagcggttggatttattccgtcatttaccgcgcttaaaaagatttttgttttaattccattgaaattattcatgaatcacccatttatcaaaatttgtatgtctccttttttaaatctctacatttatcactgttatcattatcagaccgatgattgatttgtgaaatgcaaattatcaaaattaaaa

SEQ ID NO: 90055 - DNA, 362 bp, Heterodera glycines
cgtggatctacaattaaatatcttcgaattccggacgaagtgcctgatctggtgaaggacgaagtcaaggaagtccgacgtcagcaaaaagataaccaacggatgaagaagcaatttgcaaagggaacaaaaggtgccggtggtccatcagctggaggcggcagacctcaacagggcggacgaccgggcggtgggccgtcacgaggggcgtacagaggcggggcacatccgtcgggaggccagccaaggagaaactgacaatgcattattttcgccatgttttgttgtttgctagatctccatttggaaccaattaacgctggaataaatttccgaagactttaagacacaaacaacatgaa

SEQ ID NO: 90056 - DNA, 844 bp, Heterodera glycines
ttaccgtttcgtggcttacacgacggtttctttctccatcatctcacttttgtcggtgtgcttgacactgccaatgctgaagagttacgtgtccaacgtgggcatgaaaatggactctgagctcagctcatgccagcacaatgccaaagacatttggtccgaagtcagtcagctgaagggaatgcctctgctggtcgccggaaaccgtactgcgcgtagcgcatacggtagctgccaagagtgttgctccggcggtgcccaaggccaacccggccaacccggacagcctggacgacccggaaaccccggagcgcccggctcaccaggacagcccggacaaaccccgcagacgccttgcgagcaagtgcacccgcctccatgcaccccgtgccctggcggtcagcccggtaacaatggcccacctggacccccgggagcgccaggagcacccggccagcccggcaccggaggaggacagccgcaacccggagagcccggcccacctggacccaatggccagcccggacaacccggacagcccggagcgcctggacagcccggacaacccgcaagcccaccgccaacggagcccgctcctgcaggcccacctggagaggctggtgcacctggacagcccggtcagcctggagcccctggacagcccggcgcggccggacagcccggcccgaagggacctcccggaggcccaggacagccaggcaatggcggagccccaggccagcccggccaacccggacagcctggaaaccccggagagcgcggaatctgtcccaaatactgtgccgtggacggcggagtgttcttcgaggacggcacacgaaga

SEQ ID NO: 90057 - DNA, 326 bp, Heterodera glycines
cgaggaactcactttttggctgggtcaattttcttcagtgcgctgacagtttcctgggtcctttgggacaacagaaatcagcagcacaaaaggacttcctccgtgcgctcaattttggcgtcggcacaacggcaaaagaatatggaggaatatttggagcagcagaaactttatgaggagtacaaaatgtcagtttctgacggtcataattaaacaattatttgatcattcattttgtcattaattgatcagtcgttgttttgtttatgtcgttattaagaagtgatcttttgcttttctgctgtaattgacatgacttttaaaaa

SEQ ID NO: 90058 - DNA, 614 bp, Heterodera glycines
agcctgattttctgattctaatttccaattttcgaatacattcctttcagtgatgcagccgcagtcaaagcgaaagattcaggtttcttttctgatcagaaatgggtcggtcgagtcgaagcatcgcggcttcgtcaacgccctccaatttgacccgacgacgcgcagtctcttttcggccggttcagattcggtcattcgccagtgggacacttcggcgccgtcgggcagcgccgcctttctccgctcattggagcaccactgtgactgggtgaacgacaaacggcaaattgtgacgcgggacagtgatgggaacgtcgaactgtgggatgtgatgcaatgcggcagggtgaacaccttcccgatgggcaccaacatggaggaagtgatcaaggacaatgtgcggaaggtgtggatcccgagttggttcggcgtggatgccaagtgcggggtgttggaaatcactttggacgagagcgacgcgttctccgcttgggtctccgcccgtgacgcgggtttcaccgacaaagccaacgatgccaaagttaattacggcggtctccttttgcgcagtcttttcgagcattggccccacgcgtacgttggcgacgacg

SEQ ID NO: 90059 - DNA, 914 bp, Heterodera glycines
tccagcaaatccctccctttaatcatcgcctccattattattatcctcttccatttgacgacagttttgtccgatcacctctgatcaccattattcgtgcgtcttcaacttcttcatcattctgtcgcccgtttcgattcccctttccccaaccatcacaaaaactccaccaaaatcattgtttctccactacttttgtgtagcgaatgttccgtccgacggagctgtatttttttacactaacaatagcaccagtaacagcagcaacacggaggaacaactgttgaccctcatcattttcaaggagtacatccgaaagaaacagcaccaattttggaacgggacgacggcacggaagaggaaaacaacagcaaacgaagaagcaacgtcaaacagaacggaggatcaacggaaagagagggagacaaaggagcaggtcatccggacattggatcaacaccaacaacaacagaacgagcagcaaaacggagataaacggttgagactactaacaaagcaaaagcataaacaccgacaagttcaacaacagaacaacaacaacagaagaaggagttactgtttgctgttgaggctcatcagacagtgacgacgacgacgtcgagcagtacaaaccatcaccaaaaaaacaaattgttttcattgttttttgttgttatttgcattttgttagggttcatctacagcatcagcctcacattttcttcgctccatccacccaaacaacaaaaattagggtagcaccaaaagacataaacagagcagccagatttttatccaacgccacctctctctcatcactcactcatttttgccttcaattcctcattctcacacacataccaaaaaaagtgatcagcaaagagtgatcaaaaccccccaaaaatggcagcacc

SEQ ID NO: 90060 - DNA, 792 bp, Heterodera glycines
caagtttgagaataattcttcaaaatgaccaaatttgtttgtgttttgttgctgctttttgcttggactctccaaattgtccatccttccgtagttccgtccgatcaaatttatatcatcgaattcaaccgcgacaattcgaacaatcaacaggacaatgatttaaaatcggccaatggagttgaagacagcaaaatgaccaatggcgtcatttcacaagactctgcccaagttgtgacgaccaatggcacgaccgagttggaaacggacccactcactgtttcagtggaattgcaaagaggcggacgtgctgttggcaatcagttcaacatcaatttcactgacatcagctatgtgttggtgtgcagtgcaagattccgcatttcattaccaagcgatacaactctgcgaagtcactcgaaaatgactgccgtgccgaacacatctgatcaattcacgttgcctaatggagtgcatttgtacccgggtctttctcacactgctgaagtgatcttgagcggaaatggacagcctgaagtgaccattctggacacattgactgtgctgaccactgaaaaatgtccgaatgatgtttgaatgaagcgctgaaaaatttcgaaaaaaaaaatttcgaatttccaaaaagatcaatgggtttggtgtaagcaataccgattggattagaattgggacaaacaaatttaatttcccaatcagtttgatccctttatttaattgtattaccaatattctccattattcgaatgaaactttttgtatcaaaataaaatc

SEQ ID NO: 90061 - DNA, 639 bp, Heterodera glycines
tgccagatcaattaacttgacaattaatcccttgtccctaattttcgccaatttttgtcctccaaatgatttgtcccaacgaatcgaagccggacactgccaatggcgagcagcacaaaaattcagcggcaatgaatggccacggatttgtgccctcgggcaatgccgaaacggagggaaaagccgacaaaagacaccagcagcaaagaaaactgtacaaagcagacgaaaacccaccatttctgctgacctttttgtttggctttcagcaagtgatggtgtccctgtccgtgctcgtatccatcccgtttctgatctcggacgaggcgtgcccaggaagggaccgtgatcagctccgagtgcgtctgatcgccgccacttttgtcacctgtggcattggcacaattttgcagacggcgtttgggatgaggttggctcttctccaaggcgtcgctttcgcttacattccatcgatcaaagcgttcatgagcatggaccaattccgctgtaatgccacgattgacgactttgtgccgccgaaagtgtacgaggacaaaatggccattatccaaggcactctgatggcctcctcgagcatcacttttctgatcggcgccacgggaatggttggcaaaatga

SEQ ID NO: 90062 - DNA, 405 bp, Heterodera glycines
cactgctcaaaatacaatgaaaactgctcttgagttggcaaaaaaaattgcttgtggtgtatttattgcacacgtttttcgccaaaaagttggccgaattcttacgggagtaggtgattccatgctgccgactatccacgatggcgacattctatgggctcgagtttgggatccgaacgatgctttacgaccgggggacgtcgtgtgtttagttgaccctctcgatgcagaagagtatgtcataaaacgcatttccgctgtccacaaagactgcatagaagttcgcggcgacaatgcgaaaaagtcgttggactcgcgcaaatatggccccgtgccggctggacttgtccgctaccgcgtgtctttgcgactcctccccttaaatcgttgaacattgcgaaaacc

SEQ ID NO: 90063 - DNA, 593 bp, Heterodera glycines
cattcgttttgccattttctatggcttaattaaacaaaggcacttgtcaccacacattcactaattacccaaatgctttgttttgccacctcaaaatgttttcctcaaagcttcgaccaatacaaaagccgatcaaatccactcatcttcatctttttgctgacgattcatcttttattagcggaaattgcttcggaaaagtcatcaaaagaaacatttaaagattctctggtgcaaaattcgccaaaaagcgacctcaactttctattccaacaacggagcactcagaaaacagctttcatcagacatcattatgcttcttccgtagcaaatggccaatctggacaacattctcggcaccggcgacggatacccaccggaattattggcaaattaattgccaaattaagcggaaagacgggaaaaattgcagcgactgcaagcaaaagcgatgatatttttgttgggaccgcaaaggttggacgaattccaaaccgcgggacagcgcccggacgcttttacaaatcgcgcgggttcgaacccccgccctttgtctcttacgcggcccccgcaggaagcgaagtggccaaaag

SEQ ID NO: 90064 - DNA, 666 bp, Heterodera glycines
agaatatggcacgaaccaagcaaacagcccgcaaaacccaatcccaaaaaggcttttcgtcgagcagtggcagccaacacatgcagagtcaactgcacaacttgagaaaacagttggctacgaagcgtcccaacccaaaacgagggatcggatacaaagaattgcctcctgttaaaatagcccaaaaacgtcatcataagaaaggagcattggcacttaaagagatccgcaagtaccagaagagtgtgaatctgctcatcccgcgccgtcctttcatgcgtttggtccgcgaagtcacccaggacatgtcgcagtcgaccgacctgcgctggcagggcttggcactgctggcgattcaggaggccgccgaactgtacttggtctcattgttcgacgacaccaatctttgcgccatccatgccagtcgagtgaccataatgccgaaggacatgcaactcgtgcgcaaaattcgtggagagacttttcttaagccgttgtcctcgcagtactgatcgaagaaaatggtggtggttgatttcatagtcgatgacaatttgaatatgatatttttcgcaaatctcttttgtattctcgacccattccattttcactattatcctactttgtccaaaccccaaaatctttctgataaatcagctttactgc

SEQ ID NO: 90065 - DNA, 241 bp, Heterodera glycines
caacagcagtcaaaagtggcgaaactaaggacatcagccgggggttttctttttccaatggaagcgggttgcactctccaagagccgatgatcagctaacatttttcatccatattttgttgtattatttattcattataaaaggctcaacattttgattatataaaatttttatttttttccaactcaaaccatttgctcaaataaaaagataagctcaaaaaaaaaaaaaaaaaaaaaa

SEQ ID NO: 90066 - DNA, 449 bp, Heterodera glycines
gtttcgtttatagttcatatttatttggtaatcgcatcatggaaatgaccggcggtgaccatcagctcaaccattttgtccagcaactccaagcagaaattcagaagcagggattgcaggaacagattttgaaaatgaataatcgatgtttcgacctttgcatcaccgattcgcgtcttccgagtaaattggacggaaggactcagacgtgcattgccaattgtgtcggtcggattttggacgcaaaaacactgatgtttgaacatctccaaaaacgttctggcagtggcggagccatgtgaacgatggccaacccactgatcaattgctgtcgctgtttttgttattcttgttgccttttttgtcttccgtttatttgacgaattggcactatttttaattttacaaaataaatacttattcaaaaaaaaaaaaaaaaaaaaaaaaaa

SEQ ID NO: 90067 - DNA, 292 bp, Heterodera glycines
aatgaggagccgggccaaaagagttgcaacggatgtgagccaagttgtgacaatccgaagccggagatttgcactgcgcgcttttgtgactgttcatgcgactgtgtgaagggattgttccgcgacaaaacgaaaaaatgtgtgcccaaatgtccgtattgaggaaggaaattgatactaacgatgtaatgatatcaaattatttaatcattcattaatctaagaaatagcaattatttaaaaattgaaaagaattagaatttgttagttttcaataaatccgttaattaaa

SEQ ID NO: 90068 - DNA, 402 bp, Heterodera glycines
acgcagcagggagcccaattcggagttggcacaacgagtgatactgcggctgaagcggcaggacggagttctgctcagttcggacggaccgtacggaaacattttgaaattcaaacccccactttgttttggggaagacgacctacgaaaagcggtgaatgcactcgataaagcattggccgaattcacaacggaagaagagaaaacgaaataaaattaactttatgcaaatttcccactaataatttaagtaacaataaaataaattaaaggtataaaaaaaataggtatcacatcttatttcacaaaataaagagggaacaattgtttttacattgggcagaatgaaatgaaagaatcgacccgaaaaaagaaaacaacgattagaccgggcaaagaaaa

SEQ ID NO: 90069 - DNA, 594 bp, Heterodera glycines
gatgagaagaatatggtcgtggagaagaatacttcatcttcaacttctgctactgactcttcaccagacggagggaactatatcaaagaggaaatgctccagagagaggttttttgtgagtgtcttggtggcgaacgtgtttcggtccgtgcttcgcttatgtttcagagccaaacctttgccaatatgtggaagtctttgaacgtggacaccaatgagttgcctgacgattttgtcttcccgatgacgagtgttgcagttccggtctttaaaaagattatcaattggatggagagtcacgtcggacagcaagtgcctgagtttgaagaggacccaaatactcgcgaacgcaaatggttcgtccagactgacttcgaaaaggattttttcaaggtcgaagttgaagagttggttgactttctgaatgctagcaactttctcaatttgcaatctctctatcgtcattcgtgtcaggctatggctgctttgctcaaggaccgttctcctgaggaaattcgtgatctgcttgggattgaggacgatctgactgaggagcacaaggcggaaattcgtccgcaaaatgtttggtgcaac

SEQ ID NO: 90070 - DNA, 776 bp, Heterodera glycines
aaatgttcaacaatcacgccaaccacttcatgccgaatttttgcattcccccacctccgccaccacaacttcctcaacctttgaattcggctcgagttttctttccgccggttcctcatcaccatcatccggcttattaccttcaacctcaacatgcacatcctcatatgaaccctcagttcttcaatttaagcgttccgcctcctcaaattacgcaaaatatcagcagtttgatcgcagcaaatattaacaactatccaactcgtcatccgctcaatggcacacatcaaataaccacatcggaaaggttcagcaaaacgttccatactgggcatgcgaatggtttcacatcgaaaggcaatggagcgccgctcagcaggtcaagaaagcgatttcttgaacaaattaccaacgaagaagggtggatttaattttaattaaatacatgtttgaaagattcagcacctcggggagaacttccaattgaactggacacagcgcccagaaatcgtcaactttcgggacaaagttctactgaagtcgaccaggaagccgccgacgaatcaccaaacagcaaagagtcgggttgcagtgaaaattcacaggaaagtctccgtttggtgcccacggacaatgacagcgacggcgaacaccccgaaatgggccgcaactggcggatattgatgctgttcaatgggctcgtcagggatgaggatttggccccgaattgcgaacggcctcaggcagaagatggacgaacttaccctgacattcag

SEQ ID NO: 90071 - DNA, 596 bp, Heterodera glycines
ctttcttcgtgaaaaacttcggaaatgtcgacgcaacaacaacaacgtaagacgcgttccccaattgtattggagcgtggagtctctggtcgtgtcaaatggttcgacttctggaaaggctatggattcatcacacgcgatgacgggggccaagatgtgtttcttcacgcgtcatccattgttcgaaaggtccaaatgcatttcgtgctgattgaggggcaaaagttggaatttgacatcattgatggtgagaaggggagggaggcggccgttgtgtccgggcctggtgggattcgcgtcggtacagccatccgatacaatccacaacagcaactggccgctggcaaggacttcaaacgtatcaatgcttctgctggtggcagcagactcccgccgcgtcctcctgtggcgaagaagaccacaaagaaaatggcgaactccaaatgtgatgaccataacgaacccaaagtggacaacaacgaagagcagcaggagcactgatcggtgttcagatgctgcatatttctttattgtcttttaattttgaaattcgactcgaaatttgttaattagaaaataaagacgattatttaaaa

SEQ ID NO: 90072 - DNA, 272 bp, Heterodera glycines
ccgacgacaacgaaagggcagaaacgattaacgcatttggacgactgatcagattcatcgtagaagcaatgatcgaagggtatggccaaagagtgactgagttgagaacggagcgaaggggcagcggagagacgacggaggaaaagggcaaatcggacgacgaattgaaaagtgatcgaaacgaactacaaaacataccatagattattcatacaaaacaaaaacatacacatataaatatgtagccttaaaaaaaaaaaaaaaaaaaaaaa

SEQ ID NO: 90073 - DNA, 425 bp, Heterodera glycines
cgggatttcccactccgaaaaacaaaaaatatccaaattagaaatttgtcaaaaaacctgggaataaaaagaatttgatttaattttattaaaaaaaaattatttggaattttaaaaaattccatttttattttgtacacttttcaggttgccaatccgaacagtgaggcgaagaaaacggacagtccgccgatgactccatcgccagcgaccaccgcgacaaatggcggcactgtgtcagcggcgggaaacgaaagcgctgccgtgctatggggcaaactgttcaggcacccctcattttggcaagtcttacagtgaaaaaatgggcataaaatcagaatgccaaattcaaagaaaactaaatcactgtagtctgcactcaatttaaatttttttgatttaaattaataattttattaaaaatt

SEQ ID NO: 90074 - DNA, 70 bp, Heterodera glycines; identical to SEQ ID NO: 81115

SEQ ID NO: 90075 - DNA, 648 bp, Heterodera glycines
ctacgtatatgcttaaagcatttaattagcattggaataattgccgcaaataaattgcaatgactcaggaaagcacaatgatttgtgttgacaattcggaatggatgcgaaatggcgatcttccgcccaccagattcaattgtcagcaggaggccgttcgcgtacttattcaacttaaattgagaagtaaccctgaaaatgctgttggccttctttcgttggcggatcgtattgatgtgctcaattcactgaccactgaagatcgcaagttgttggtccgtcttcatagtcttgaaattcttggcgtttcgaaagttttcgatggaatcaaaaccgcatacttggcactcaaacacaggaagaatcgcaaccatcgtcagcgcattgtcgtattcgtgggcagtccattggacccattgttggcagaaaaagaaatgtttatgaaattcgctaaaaagctaaaaaaggaaaaagtgagtgtcgattttgtcctatttggcgaggccaccgccgagaacaacaaaataattgccgattttgtggacattcttaacggcactgaagagggaggagcctcgcatttgttggtcgtgccggttggagacaccaaactgtacgatgcattgcttcgttcgcccatttgtgcgg

SEQ ID NO: 90076 - DNA, 361 bp, Heterodera glycines
cagcaaaatttcacactgaaaatgtcttctgcgtccaccattctcgtaaagctgctgataattgccatttgcctttcattaacaattgccatgccagcagtggacaatcaaattgaaagtgttccacttcggcaaaagcgttatggctacggcggcggtggatttggcggcggatttggcggtggaatgggctttgatggctgatttggacgctgagccgtgaagaacattaatacgcattgtgaatgatcagaaatcgatcaatataaatgatgtgcgacagaactctgtttttaaagactttcaagtttataaaataaattagttagcggaaaattttttttaaaaaaaaaaaaaaaaa

SEQ ID NO: 90077 - DNA, 993 bp, Heterodera glycines
gtccaattaagaaaaaaaagatttttaattatgccatttttgactttgaatgccatgcgttcattgtgccgtcttccaccatcacttttctccaacggcatcatgcaaattcgttttgtgcaccatcacaaggaattggaggaacccggtgggtttgagcgtttcatgggctggcgacgctcgaaccccgcaaaagcgaaccgaaacacccacatcaacgaacgatacatgagaaggttgaggggcgccaaacggctgataattgacctggaagaggattatgccgagcgacgacaattggatcagatgcgaccggatgaagtccgaatgtacttattgcggaaggggaagccgaacattttcaaggatgtggcgccaagggattggaatgagcaccagataactctgaacacattcggtcaagcaattgacccgtatattcctcccgaaacttcgctgttttcacgaggggccaaagacattttccccgatttgaaggcatttgctacccgcaaataccaagggatattctacgggttgaggaggattcggaagaaggacggatttcagaacttcaatttgaaggatttcacaaaacttgccgagcaaatctacgcaaatgcgtacaatgcgttggcactgcgagacaaaacgaagctgcacgaactgatcactgaggccgcgttctctaaaatgtggcccgatgttgagaaaggcacactccattggaaattggtgcagttcagcgaaccgtccaaagtgctaacggtgcgctgcttggacaacccgaccaaatcgggcaacgacattgcgcagattattgtacgaatgcacagcacacagattttggcactttacgacaaggacggccatttgttattggactctgaggaggagccaaggcaatgtttggaatacgtcgtctttgagaatcacgtggccagcgtcgatggaatgtggcgtttacactgccgcatttaccctaattggctg

SEQ ID NO: 90078 - DNA, 584 bp, Heterodera glycines
ccaagtttgagcacattttcaaaataagttttcaattatttgtgccgatgaccttcttcaaggaggtggactatttgtcgttgcgtctcgacgacccggtgtccgcgttggccgattatctgcccaattccatcatttacaccattaattattcgttggcccttccgcccaatttggtgctgctttacatgggcctgaggccaagtctgatcacttcccgagtcaaattccccactttgggaatgacttgtgccaatctgttcggattgttcggctttcttcttctcaacattgtctatttatacacagtcttttccgacgtcagactgtccttgttcatgtgcagtttattgcgcaccgttttctacaacaccacttacgtgtgctatttcctcttccccgtccttgccgttgaccaatacctttacgtgtgccaaaacgtcgagttgagcattcgctctctgaaggcggtgattggcgtgtgctttgccattccgatgattgtggccgtgtacgatttgtggctgcagaaagtcattctctacgactttatgttcgcttatattcgcatgagtccctacaca

SEQ ID NO: 90079 - DNA, 1237 bp, Heterodera glycines
cccactcgcttaaggcgcttcgcaatttgcgtcggcgttgacgaagaaaatgggacttgtctgatggtttatgagaacgacttaaacgccattgaagtgaggatggtgttttccggtgtgcaaattggcaaatggtaccggttcgacttggcaaaaggcacgagacgaaattgggaggtagcggaggaacgattgccgacgcggattatgccacggggggacgcggggagtggcggaacacgcggggatcgcattcagctttgccttcccattttctttgtccccaacttcaaatgttttggctgcacttggcgtgtcacttcaccaacttcttttaatgacaaaatgcacttcaatttcgtttcgcctcgattggaagcgccaggcaaaattaatttcagcgaagaacgactggccgaattgaacatccgtccgggggagcagtgttttgcatttttgacattggattgccaagggcccgggccgagcataaaaccgccgcaatggacactcgatgcagtggagcattttcacagggtcaatgttgacccattggccccctccgttctgtccgtttccctcggcgcttcgaaagaatggggcattctgctcgatttggtcattgaatctgaggacgaaagaaatggaatgggtttcattctgtgcttacgcgacggaaaattcgcttttggtcgaattttaaaaaccgaaggtcacaacgacagctgctggagggcaaatgtgggcgacactgtcggcttctctttgattgatgttgattgctttaattaccccgttcggttggctttgaatgttattgcctggcaatccccggcgttcacttctgttgactccgacgttcttgccgaccaatttccccaagaatccttgcccgaatttccttcagttcgccttatttctaaaagtactggaaaaatggctcaacatttgttcgaactctgttttcctatcgatgactcccaaatgtcgtgtttgcgcatgggctccctcaaggtggaccgacttggtgttctgatcgacttgaatggtgatttgttgtccgcctggagcaacatgaagcgcaaagggactgacgccatttcttcactgttattggcccgagtgagggcccgtttttcatcattgcctgaccaacagcagccgctttggatggtggccgaaatgctcgaaattgccaaaatgcgagtcgacacggaaagcaaacgacaaacgctgg

SEQ ID NO: 90080 - DNA, 620 bp, Heterodera glycines
gagaattaaagcattttaattgttcaatggaagtcaaattgaagccctattccgatccgtcccgttgggtggccatttacccgctgtacatcgatgcctccaagtcgttggcacagggtcgccgaattgcgaaggcgaaagcagtcaacaacccgacatgccaagaaatattcgatgttctcaaccacgccggccttcgctgtgaattggaacagaaaaaaacgcaccctcgggcgcagtcgcgtggcgccgccaacccgaaacagcaacaacaggaggagggacgaatccgagtgcaactcaaaggggacgacggagaaaatgtgagcgaaggggcggcacagccaaagttcatgacccgacaacaaatgatggaatacgctgcggaaatggtgcccaaactgaagacacggcagcagcaaacccaagtcgaacagaacgacgcgacggggaagcagaagaagcggaagtgaacgaacggacggacattcaaccaatgacatcaaaatgtacaattaatacaattgttgtttgttatatagaaactctcgttttctttttgatgttgtatagaattttggttagaaattaataacaaattcagacatttaaaaaaaaaa

SEQ ID NO: 90081 - DNA, 803 bp, Heterodera glycines
  unsure (1)..(803): unsure at all n locations
gtccaattaagcaagacaaataccttcaatcattttcattgtgtaaaatggccagtaattcaaatgcccaactgttggatgcatgcgaaaaaggggcggaattaaaaaacatcaaatccctaattgagcgcggggcgaatgtgaactttgccgataaagacggtctttcccctttgatgggggcatgcgtcttcggtaacgttgagattgcgcactgtcttgtcgagttgggcgcgacaattgagcaaaaagatgacgagggattgaccgcccttgggcatgctgtcattgcagggcagctcgagtccgtcaaaatgttgaccggaaaaaacgcgaactgtttggtgtttgccaaagacaatcgctcgccgatggtcatcgcctgtcaggaaggccgcatggaaatcctgagccattttcggtccgttggtgtgaatttgaatcactgtgacgagcacggaattactccgcttatggtcgcaactcaaaaaaagagggtggacgttgtctgtttcttgttgcaaaacggagccgacaaaagtcagactgatgccaaagggagaaccgcgctcgcatttgccgatgacctgcgcgattcgaaagaacgtaaccagcttttgaagttgttgagtgaccgctgaagtgagaggaaagggacggtgatcagaaaattctttgtcagagattaaaaaatgttttgccgttgttgattttgaccgtttaatgtgttcatttctaaattcattggtgcttctttttactcatccataaagcgcctttacaacnnanaaaaaaaaaaaaaa

SEQ ID NO: 90082 - DNA, 547 bp, Heterodera glycines
cacgacttggaaggactgtttgcaaggctgaaggagcttggcatcaaaattgccatttgcacagcggacagtcgggcgggaacgacgcgagttttgaagactcgaaaagtcgaacaattcgaggatttgatcgtttgtggcgacgacaaaggatcagtgccgaaaccccagccggacaatgctctgttcatctgccgacaattgggagtggaccctaagaatgccatggtaatcggcgacactcctgccgatttgggaatgggacggtctgccaaactcggctcaatcgctggtgttctggcggggattggagaacacaaagaactgaacgaagctgaccatttggttgaacatgttggagaacttcttcctctgattggctgagatttccacgttgtcgtgggactgcgcataacccaaagtcggattgaatcaatcctttgttctgtcgatacgtcgtgcttttccctccccccccccaaatttccccctttttttttgtttcccctcccatttttgccaacacattccgaatgaatgagcttac

SEQ ID NO: 90083 - DNA, 911 bp, Heterodera glycines
ccaagtttgagatcaaaaaataataatttatgatggctgctcaaaggattttaggcgctcttggacaaattggtgttggacttactgccgctggagttcttgctcaagctgcactttacaatgttgacgctgggcaacgcgctgttattttcgaccgttttaccggagttaaaccgaatgttactggcgaaggaacgcattttttgatcccatgggttcaacgtcctatcatgttcgacattcgctcgacaccaagggctgttaatactatcactgggagcaaagacttgcagaacgtgtcgatcactttgcgtatcctccatcgtccagacccatcaaaattgccacaaatctaccttaacattggcacagattatgctgaaagagttctgccatcaattacaaacgaaattctgaaagcggttgtggcacaatttgatgctcacgaaatgattactcaacgtgaatcagttagccaccgtgtgtccgtcgaactcgcagagagggccaaacaatttggattcattcttgatgacatttctatcactcatttgtcgttcggtcgggaattcaccgaagcggttgagatgaagcaagttgcacagcaagaggctgagaaggctcgctacttggtcgagaaagctgagcagatgaagctggctgcaatcacaacggccgagggcgatgcccaggcttcgaaacttctcgcccaggccttttctcaagtgggcgacggactgattgagcttcgcaagttggaagctgctgaggagatcgcggagctgctttcgacttccaagaacgtttcctatcttcccaaagacatcagtccgctgttagccctcccacaatgatttttctgttggatttaaatgtttttggacatgttttcattatctcacttattgatt

SEQ ID NO: 90084 - DNA, 660 bp, Heterodera glycines
gaattttctggcactgtttgcgccgattgcggtgcctcttgtccgagttgggcttcgctgaatcacggcgtgctgatctgctccgattgttgttttgtacatcgaaatttgggccgtcacttcagccaagtccgttcactgacaaaaggcgtttggcacgacaaacaattggctctgctccaattgctctgtcgtaatggcgccaacaatgtttgggagcattcgctgatcgattcgttggggggcgcaggtcgggcgaagaagaagccagtctccaatgatccgataattcccaaaaaggaggcgtttattacggcgaaatatgcgcaattggcattcgccatcagaccggccaaggacgaattcaatgtggacgatttgaatcgccagctttggtcgtgtgttcgcactgcgcacgttgaaaccgcgttgaggcttttggcgcttggcgcgtgtccaaattacgcggacactgagaagggaaacactccgttgcatgtcgcggccaaagagggtcagaatttgcaggcggaattgctttggttgtacggggcggacattggccaacggaatggggcggggcaaacgccggcggaattggcgaaaacggagggatttaacgaactcgcggaacgactcgtcgaattggagtacgaaatg

SEQ ID NO: 90085 - DNA, 571 bp, Heterodera glycines
aaggagggtttgagtcaagaaactattaaaagtatggctgcaattgagaagcctcagattgttcaacaacccgtgcaagtttttggtcggaaaaagacagcgactgccgttgcattcgcgaagaagggcaaaggcctgataaaggtcaatggacgtcctttggagtttattcagccagaaattctgcgcatcaaacttcaagagccaattctaattgtgggcaaagacaaatttgcaggcattgacatacgaattcgcgtcaaaggcggtggacacgttgcacaaatttatgctgttcgtcaagcacttgccaaatcggtggtggctttctaccagaagaatgtcgatgaacaaagcaaaaaggagctgaaagagcaatttgtcgcctacgaccgcaatttgttggtggccgaccctcggcgccacgagccgaagaagtttggaggacctggagctcgtgctcgctaccagaagtcttaccgttaagatctatgggataccattttttgacgatcctttttgttgttgatgtaatgcgttatcattaaaattttgttggaaaaaaaaaaaa

SEQ ID NO: 90086 - DNA, 670 bp, Heterodera glycines
gtccaattaaggtcttaaaatctgagaattaaaattttgtggaatgtctaacgacaaaaaagacgaatcatcaatttcaacgaatacccttgttaacaaagaaaaggcttctattgttcaggagtcatcatttgtcactcctggcattttccgtcgtcgtaaaatgctcacaggcagacaactgaatgatgaaggaaacaatgaagctaaggaaaaaagcgcggatttcaaatggtcaattgaccaaatcgcaaagatacaacccattgaatttgatgagactgaggagttttcattgccacctgaaaattgggacccttgtgcaaaattcaagactccacaatttgaaaatattgatcacttttggactcacaacaacttaattgctccttcaccgggactattcgccacagcctctgctttacgtcgtgttcaaccgtccgccaattctccaaccacctcaccgtttcagctcgctctttctcctttcggttcgggtccttcctgctcatcgaaatgctctttgtccgattccacattcatgtccccgacaatgatgctaactcattcccaaatgtctgagtcgaccaaagcgaaaatgtttactgctaaagaagagctaacgacgacaagtactggcaatggagacacaaaagagaatatgattgcg

SEQ ID NO: 90087 - DNA, 601 bp, Heterodera glycines
gtttgagccatttaaaaaaaaatctgacaaaatgaatttttctccgatcactctgtttctgctctcttcacttgccattttctatgcagcggttgcattccgccaacaaacggtcgccgttcgcggccgtttaatgtgtggggataagccattgacggacacgaaagtgaagctgtggaataagaacaaaattggccgtgatgatcagctggcggacgtgaaaacggacgcgcagggaaatttcgcattggacggcggcgtcgggtccattttcggcatgaatgtgcacctgaaaatttatcacgactgtgatcgtggcatccttccgtgccaacgcaaagttaacctcggcattccgggcgagtacgtcacgcggaccagcaccgttcagcgatggttagacgccggcacaatgaacatgcagctgaagtttcatgacgaatcaacttcatgcatcaactaatttaatgtttaagaggatgagatgaaaaaaaattcaatttttgaagcccttgaaaaacgttttaaaatttttgactttgtcttcattatataaacttattaacaactaagaaaaaaaaaaaaaaaaaaaaaaaaaaaa

SEQ ID NO: 90088 - DNA, 397 bp, Heterodera glycines
attttcatttccatccttaaaaaaaaattcaaaatgaaaagccttactcaaattaccccaattattctcccaatatttttgttactcttggttttatcaccaccaaacgcaatcggccaagatttgtgccaatgggacagcggcaaatgctttgaccgagggtgtccatatggttgtccatatgacacggaaccagaatgtggttgtacttcaccaaagcatgacgccggcaagaagcaaaccaattagcctagaagccgagaactaaacaaattaacagaaaaaaggcttgaaggagggacgcaggatgaatatttgtctaaaaatgaaatacatggattaattaatgtattatttaatgatttaatccgaaaatgataaaaaaaaaaaaaaaaaa

SEQ ID NO: 90089 - DNA, 625 bp, Heterodera glycines
caattaagaaaaatggttatttctcaaattgctaaaacactatggtcacacaataaagaagagcatttttgcagttattgctacggcttacggggcgaacgctttaagggcacgtttaagagatgaccgaattcgatacagttttgcagaacgagcccgtaaatatggtctggtaagttttgggcccgcccagcgacttcgccgtgtcactgttttggtcaatcgcgagtcgggcggacgacgggcggccgaccttttcaagcgcaatgcacttcccctgctcaatttggccgggctgcaagtgaatgttgtggaggtctcttccgcttctgaattggaatcgctgtgccgcgtgttggacaattctgaggccgactgcatatttttggttggcggtgatggcactttgagtagggcactcgtcggattgagccaaaacagtgcgccattgccaattggtttattccctggtggtcgaaaaaacattgcattttggagaatttttcaatcaaaaaaccagaacagagattcgatggatttgaatgaccaagactcaaaatcagtgccaatgttttgcgaaagtgcaatggcactgattgagggggaaaatcgactcgtttatcca

SEQ ID NO: 90090 - DNA, 480 bp, Heterodera glycines
caatattttgcgcaggagagaaccgatgtccagactaagcaaatattcctcgcaatttgcaggtcatttgtttcgcccgctgttccgctgaccgttccgctaagcgaagatcgtcaggggaatatttacgtcagttgggatgttttgtccttcgacggcattcgccgctccttcgctggtgctttggcctggcagaaaagccaattcgaggcatttctgaccatcatttgtttgattgcttcttctacgctttctcaggacgtcctccaaacggcgtcggaattacgtcgcaaattgcgcttaattgacgaatttttcgccgatccgttttcctatgcccaagagaggcaaaaacgatgactggcaaaatgttggagacggaaagcaaattttcgggtgaagcgataattctggcaaatttaccgttgtgtatttcaggaattcattgctttggcgaatttttactgatgttgagaaagc

SEQ ID NO: 90091 - DNA, 789 bp, Heterodera glycines
attaagagcagctaggcagccgaaatttattgttagtcatgatccccgcctgttactccaattattaaatcctccgcgtcgctcaaattttggtcaaagttttttgatactcgattaaattggcattgtaggagaaattcgacagcgaaagttgtacccaaaaaagtgcttagagataattgctatcagagcacttcgttggactcgggtcttcgcattgccacgcttccggcgtatggacaatttacgacaattggcgttgcgatttatgctggttcacgaaatgaagtgcattaccctcccggcacagctcatttcctggagaaaatttcttttttgtcgtcacaacaattcccagacaaagcgcacactttggatttgttggagaaatttggcgctctgatcgactgtcagtccacgcgtgacactttcgtttacgccgcttcatgtcgcgttgagaatgccttcgacgtgttatcaatcattgcggacgcggttctgcggcccaacattttggacaatgaggttgaatattgtcgtgatgtcatccgttatgagaatgaaacactttccagacagcctgagtgtgaacctttactcactgattggatacatcaggctgcttttcgctcgaatacggtcggtctttcccggtactgtcccaacaaattggtcgatgtggtaaactccggccacattttgtccttccttagccaatattacacttcgccacgcattgttttggcaagcgtgggtgttgaccagcaatttcttgtcgactcgggcaaa

SEQ ID NO: 90092 - DNA, 671 bp, Heterodera glycines
gtttgaggtaaaaacacacaaattatcgtgtggattattgtaatgcatccctacgaattcaaattggacgcgatactcagcagatcagaattacccgtggaaaaacttgaaaagcacgcgtggaacccggaggaccggtcgttgaatttgtacgtgaaggaggaggacgtgctgacgatgcaccgacacccggtggcccaaagcacagacggaatgcggggaaaagttggctacacgcgcggcttccacgtctggcagctgaattggccggtcaaccaacgcggcacccacgcggtcgtcggcgtggccaccaaagacgcgccgctgcacgccccgggctatgtgtcactgattggggcggacgcggagggcttcggctggaacattgtggagaacaaatgctaccacgacgcacagaacacaaagccatggtccttcccttatgagcagccattcgtcgcgccggagaagcttttctgcgtgttggacatggacgagggccaattggccttcgccaccgactccaaatatttgggcgtcgccttccgcggcctcaaaggcaaaaaactgtacccggccgtcagtgcggtgtggggacactgcgaaatcactctcagatatttgggcggactcaatccggacagtcacttgatggacacttgtcggaggtc

SEQ ID NO: 90093 - DNA, 593 bp, Heterodera glycines
tttccaattgtttcttaaattaagctgctaactaaattcgttaatcgaagcgacaaaatgaagtggacttacaaagaggagaactctttcgacaagcgccgcgcggaaggcgaaaagattcgccgaaagtacccggaccgaattcctgtgatcgtggagaagtcgccgaactcgcgtctgcgcgatttggacaagaagaagtatttggtgccagcggaactgaccatcggccagttttacttcctcatccgcaaaaggatccatcttcgccccgaagaatcgctctttttctttatcaacagcgttatcccccagacaatgacaaccatgggacagctctaccaggaccgccacgaggaggacttgttcatgtacatcgcttacagcgaggagaacgtttacggctgatcgtcggttgggcggcggagtgtcggtttggccgtggcgcataaaactcccatcgatgggagggaataaccagcgaatcgtcgtcggcttttatgtacctttttcatccctttcattcatatttttcaagtaatttgtgtgatcacgcatcgatgatgattatataaaatcgcttttttcaaaaa

SEQ ID NO: 90094 - DNA, 505 bp, Heterodera glycines
ccaagtttgagcaaatgttccaaaaaaacacagcatttttcctcctatttattgccttctttctcggcattgcttctgctcggctaaagcgtggctcttacggctacaatccgccgccaactcctctcccgttgcctcagccctgcgggcagtacaatcagtacggaagcggcggcgcctttggaggcggcggaggaggcagctacagtcagccgaactgcaacacatacgggcagcagaacaactacggccagtccaattacggtggtcaaagtaattacggtcagcaggaaagtgcgggtggatttggcggaattggcggcagcccatctcagttcggagtgggggcgccaggctgtggcggggcgagttgctaatcgactgaccgatcggaccgatgcgaaaagccaaccgatcagcgaccaggcgattgaatccgtcatttcctgttaatcaattcatcctagcgttctttttacaaccaaaaaaacaaaacaaaaaaagg

SEQ ID NO: 90095 - DNA, 105 bp, Heterodera glycines
aaatgttatctcaatattttgcacaaaaactttatttgtgtccgcataatcgacaacgttttgataagaaactcttatactgtgaaaaaaaaaaaaaaaaaaaaa

SEQ ID NO: 90096 - DNA, 661 bp, Heterodera glycines
caagtttgagcatttaaattccaatcttccaaccaattctcttttcgtcaaaatgctttctcccttctcctacgacccgttctatcgccgttcgttgtggcctatggccactcatgttggcaacgtcctttcgcccttccgccagttggagcgcgaactcgaccacttcttcgaggggatgcagcccatgcttcgtgaccacgccgctcagctgaacgtcacggacaagggcgaactcacttacaaagtcgatgtcagcggcttccgccccgaggaaatcaacgtggaggtgattggtaatgagatcatcgtcaacggggaacaccgcgagcagaacgacagcgaatcggtccaccgtcagttctcgcgccgtgtgctcatcccggagggcatccaaaaggagagcatcaagtgcgagctggacggcggccgtttgttcatctgcggaatgaaaacggctggcaaaggcggacgtaccattcccattgaaatgaagaagaaggcggccgtggaccagcagaaggaggaggagaagcagcagtagaaaaggacggcggaagtgaagacggactgactgtcggtcgaccgaatgatccattgacattgatctttttattttgatacttttgcaaagtgatctataaattatttttccttcaaa

SEQ ID NO: 90097 - DNA, 633 bp, Heterodera glycines
cccaattcttacgtattcccttttttgtttttgtacttcaaatttactgctaatttcttagaattgcttcacacaatgtcggcgatcgaaaatgacgagacaaagagcagaatttggcagcaactgaagaccaaactccactcgacgatggtcgccttcggaagcgggtcggtgcagttgcccaagctgatggacacgttcaggcatgattggggctccgaattgacttcgtacgcggtccaactcggcttcggctgcaacgacgcggcggtgtacaaaatgttgctgacgatgcccgacgaaattgaaagcggcttcatatcggccactggcaccttcgcgttcaaagtgattccgaaggcggagaccagcgaaaacttgacgaagatcgaccagagcaaccaataccaagatgaaatgcgaagaatatttgcacggcgtcgctcctcaatgtcgagcggcttccatcgttcattccctttcaaccagtctttccatgtgcgtccgcctgtcagaatgcctccaccgccgcctccgatgcccttcaatttgagtgcacccatcttaaacggaccgaaatttccaggacttgtcattcagttgcctaactgtgcggatgcgcagcgtcgcgtt

SEQ ID NO: 90098 - DNA, 597 bp, Heterodera glycines
gtttgagcaaaacgatgacgaataaaactgcactgatcatcgcttccgacgggtcagaagacattgagctgatcgtcaccagtgatgtgctgcgtcgagcggggatcaatgtgaccattgctggacttcaggaccgtgcccaaattgagctggcgcgtaaggccaagctgcaggtggacgcactgttcaaggacgtccttgacaagcagtacgacgcggttgtgttgccgggcggtcagccgggctccgacaatttggccgctgacccacgggttggcaccgtgttgcgcgcacatgaaaaagcgggtgccattgttgcggcaatttgtgccgctcccattgcatttgtggcacaccaaattggcgttgggggcgtactcacttcatacccatccgttcagaagacaatcactgacgccggctacgcgtactctgaccagcacaaagtgtgcgtgcacaaaaacgtggtgaccagccgtgggcctgggactgcctttgactttgcgctgaagcttgttgagctgttggtcaacattggcaaggcggacgaaattcgcggggcgatgctgctcgactgagactgatcggtggcgttga

SEQ ID NO: 90099 - DNA, 534 bp, Heterodera glycines
gttatgctcaatgacaccaaattagagtcaactttgagcacgacgattaaatcaatcgaccttcagattgaattgcctaaatgtttggattgcctggctgacggattgaatgtcacggaagaggccattacagagaatggcggcggcacaattcgtttcctgcgttcttccccgccagtctccgtccccatcttgcctccttacattttgctgttgcacgaccaaacaaatgatgccaatgtttggcggaaaactcttcagattctgtcggcctccggcttttgctgtgttgcgcctcacctctcaaattttgtttttgacgaggaggaaaatgtaaattttttgctgaacttaacttcacatatcggagcacgtgaagttgtgcttgtggccagttcgatgtccggcatttacctcattccgttcctttctcgtggaattaagaaaaaggacattcatttccacgttaaagcattcattgcaattggcgtgtcggacactcaccgactaaaagtggaagaattggtcaataac

SEQ ID NO: 90100 - DNA, 510 bp, Heterodera glycines
  unsure (1)..(510): unsure at all n locations
ccctgcgcctcctagcgactcaattgttaatgccaatggccctcagttaaacaatcaacaaacggacactggtctcgtaaacattgttccgcttgcatggcaaccgccgaaattcacaaatggcggaatccaaggacaatcagagtcgaatcctatgccttttggtggaggattttcatttacgactactgttcctccagcagctaacggtcctttccaatttggtgctgcacctccagtggccaacggaaatgtgttccagtttgctgagacgactgattctgctgtttctacgaatgttcgacacggtgttacgggaaggaaattgctgcacgctcgaaggaagaagcgttgattgcattcaatgttagaaaaatcaccggttttgtttttgttcgttagaatatgttattttcatggaatattatgtccaggaaataaatttatttttgatttttttgcgaataaattgctgaaattcnaaaaaaaaaaaaaaaaaaaaaaaaaaaa

SEQ ID NO: 90101 - DNA, 781 bp, Heterodera glycines
tcaatgagttggttcatcataatcattctgctaattttcttcatttttctgcttgttgtcttcttcagtttgccaaaatcattgccttttgacccttcgggcaaacactgtcttatcactgggggttcacgtggcattggcaaagccatcggtgccgaattgctcttgcgcgggtgccgtgcactgtctgtgttcgcgcgtgaccctatcgctttggcaacggcacgaaaagagttggaggcgttgtgccgtcagccgggccaaaccgtccacacttttcaagttgacctggcagccgatgggccggccaaaattgaggaaattgttcgcgaagcggagcgtcagtcgggcgctgtcgatttgctggtgaacaatgccggtacatgtgtgcagggagcgttcgacgagttgcccagcgatgcgtttgagcgtcagttgcgcaccaattttctaggcgctgtgtatgtgacgcgctctgttgttggcggtatgaaacgacgccgttttggccacatttcgtttgtgtgttcagcggctggccaattggcaatttggggttattccgcctattcgccatcaaaatttgcactccgtggctttgccaacgcgttgcacatggaactgttaccatggaatgtcggcgtctcaattctatttccgcccaacacagccactgacgggttccgtgacgaattgcgtacaatgccaccacagatccgtgccatctctggcactgccgggctgttccaagccagcgatgtcgccgcacgccttgtccaag

SEQ ID NO: 90102 - DNA, 296 bp, Heterodera glycines
agggatggcaattgcgtctgattataaaaagttgcatgcgaagtcgactaaatgccaaaagattaagctgtcaaaaatggaacagaaattattcggtcagaagccagtggaaatcattggaaaaacccaacacaatggcattgtttggtatattgtacagttggagaagaaaaacgccattctgctgaaccatgactttgtgatcaagaaatatccacaattgttgctgaaaagttacggcttgtaatttataagttatcctatataggtaataaaaaagtttgagtgttaaaaaa

SEQ ID NO: 90103 - DNA, 362 bp, Heterodera glycines
cataaatggaccaagaaatgagtgcgggaattaacaaagccgtccttctggaaagatcaatcatgaaatcttgatggaggagacgcgtcgaattccaattttaggcgaagtcgttggccaattacgaaatatttatggttcttcgttagccgagcagttcaaaaacgaactcattatcgccagccaacttaatcgtggaccgatgaataatgggatcagcaacccgcacatggacatgcttcttggtgttgatgagaaaattagcgatcttttgcaccaattgtaatcacacagctgatttactctcacaatgttgttgccgataaattgtatgaattcgaaaaaaaaaaaaaaaaaaaaga

SEQ ID NO: 90104 - DNA, 320 bp, Heterodera glycines
ccaacatttacgaagttacaatattttataagaataaggaaatggcgatagataaaaagggccacgtgactgttagttgtgcccgtgtgaaaatacagtttcccagttacgcttttttcggccgaagggtgagagaagttaacgctaaaatcaagagtttgcagaacgaatgtgacatgattgaggggaatgtccaaaagctgcgaagtaactttcgaccgaattccgcgaattgacacaaacgctgtattctgatgctgcttatttatatttattatgcataaactttaagcatcaaaaaaaaaaaaaaaaaaaaaaaa

SEQ ID NO: 90105 - DNA, 743 bp, Heterodera glycines
gtttgagataataggaatcctttctatcattattcaaaatgtctcaccgtaaattttctgcacctcgccacgggtccatgggcttcacgcccaagaagcgagcgaagcgtcatcgcggaaaggtcaaggctttcccgaaggatgacccaaagaaacccatccatctgacggcgttcatcgcctacaaggctggcatgtcacatattgtgcgcgacgtggacaaacttggctcgaaggtgcacaaaaaggaagtggtggaggcggtcacaattctcgagacgcctcccatggtcattgtcggtgtggtcggttacatcgaaacgccgcgcgggccgcgtccgctcaaaaccgtttttgctgagcatttgagcgaggactgcaaaagacgtttctacaagaattggtacaagtgcaagaagaaggcattcacgaagtatgccaagaaatggcaagacgaggcgggacagaaatccatcgaggccgacctgaataaaatcaagaagtactgttcttatgtgcgcgtcattgctcacacccagatgaaactgatgaagcaccgcaacaagaaggcacacataatggagatccaaatcaatgggggtaccgttgccgaaaaaatggactgggctcgtgagcacttagagaagcagggtccccgtggagcagtgtgtgagctcgctacaccatcgactgcatcggtgtcacaaaggaaagggttgaaaggagtgaccagcggatggcac

SEQ ID NO: 90106 - DNA, 670 bp, Heterodera glycines
gtccatttaagaacccactttccaataaatcacaatggctttcattggatacggcgctcttacggccgcgctgagtggcatcattttgtacgcaaatttgcccacccgtctgaccattggcgccattgtgccgaccgttgaatttttggccgagacccaactgaaaaagttggaacccggccaagctgtggctggaccacaaattaaggctagcgatttgttcaatgccggccatcctctgcttgtgatggctgtccgtcgacctggctgcgctttttgccgaaagcaggcgagcgcgttgtgcagcgcggcgagcacacgttttgcggacaaaggcgtgcgtgtggttggcgtagtgcatgagcagcacggcgtggaccaattccgcccatttctgccctgcgcggacgcaatttatctggatgaggaaaaacgctttttcggcccttcacagcgttggcttccgctttggatgggctttttgcgtctgtccacctatgtgaactattacaaagcgtggaaggctggctttgccggcaacaccgagggagaaggccgactgttaaggggtgtttacctggtgaatggcgataacatgctttttgcacatttggaaaaacaatggggcgacgaggtcaaaatggacaaattggtggacgcagtttcaaag

SEQ ID NO: 90107 - DNA, 460 bp, Heterodera glycines
gtttgaggaaatttaagcttttgcattcttttcaaatttactttgacttcaataaagaagaaaaatggcttcatctggctttagcgtctatgttggcaacattccgtacaacgcaactgaagcggacattggcaatttgtttagtcagtgcggagtggtcaccaatgttcgcattgtgtacgaccgcgagaccaatcgcccaaagggctttggcttctgtgaattccaggaccaacaaggagctcagaatgcggttacaaatctgaacggagccgagctcaatgggcgtgcgctgcgtgtcaattggaccaacaaataagaaggttgtgcttgaactggacggatgatgatggatggattgtcatttttgaggatcgttttgacaattttcatttttctttgttgattggttttttgaaataaaggaatggttcgttaaaaaaaaaaaaaaaaaaaaaaa

SEQ ID NO: 90108 - DNA, 653 bp, Heterodera glycines
ttccaaaacgagggtttgagaaataataacagtcattgtgattgtaaaatccactaaatggcaaaagaaaacaaaaccggggaacaacaaagcaagcgaaagaaatgtcgccggtcaaattcgccctcagatgagtttcatcgtccaatggaagtgcccgaccacatttatgtggctgggatgccgagacatcgcgcgaagtccgagacgaaacccgaaatgtttgtgccaagccgaataacggtcgctggtgggaacacaaccgtcgcttccaaggcgcagccggtcgaaattctcagagagcgccaaactcttctccaaccttcggacaatgaaaacaatgtcatgaatggcattccggaaatgcttacagcaaacgaactgacgcacgaggacagcacaaacaatgcgagtgaaataatggcagcgcaaggcaacgaaacgacatcgatagttgttgacaaggacccgctgaaggagttgaagatgatgcggcggcgattgattcagctgacgaaacgcgtttccgaattggaaacgcaaaatgcgcagaatgccaatgaaaggactttgctgctgggtattgtgagtgcgtctactttgctaagtgtcgttttgttggcttcacaaattcgcacatggctgagccgcta

SEQ ID NO: 90109 - DNA, 470 bp, Heterodera glycines
attcattttattattttattggcccttttcctaaaattcaatttacaaaaatggtttccaagcttcttccggtcattctctgctgcttgtttttggcttctttcgccctctgctcgcccaaggctgctgatgtgctgaaatttaaacgagaagcggcgatcagcagttgtggagctggacagtttgaatacgggggcggctgttgtacgacatgcacaagcgatgctgattgtacgggcgggaagctttgtgtgcccatcctcaacttgctcagcgtcagtctgtgctttgccccatgcggaaattaagacagaaaagaaagcagcaaatgagggtgttgatagtgtgataaattgataggattaaatggaaaatggggagttaataattacttaaatgcatttaaatagtgattgatcaataaatatttttcggaaaaaaaaaaaaaaaaaaaaaaaaaaaaaaaaaaa

SEQ ID NO: 90110 - DNA, 870 bp, Heterodera glycines
  unsure (1)..(870): unsure at all n locations
attttgttcgccatttttgcagtcaaaacatcaccaaaccgacaacaaaatgtgacgagcaagaaaattcttccgccccctcctgttcttcttcgtctgctgcccttgtccatgtgcaaaaccgtggccaatggccggtggaagtgttggccaaatttttggccgattgttttgtgctcggcgactttgtctcggaatatttaataaacgcagatgctggacgaagttgggccgcacatgaagcgaatgcggtgggaggacgaacattgggacggacaaatccaacgctaccgggagagggaacaaatgctggaaaattggcttcccgaaaaccaagcactgatccgacgcatttggcacacttcgtttcccgccccatttgagccgtcgccgtacgtacacattctcgacctgcaccaggacggattcatcagcccacatttggacaagtcgaggtattgcggccgggtgatctccggtctgtcccttctgtccgcttctgtgatgcgaatgcggcacaaaagtgccgagttggggcagctgtgcgtggccgatttgttgctcagccggctcagtctttactggctcagcgggtcggcacgctacgacttcactcatgcgctgttgggggccgaagagagtcgctttggcacccaaacggtgccaagggagcgacgcattgcgctcatttgccgggaagtggtggtgccaacggcgaaaagtgaccaaatcgactgacaaaacgaatcaatgaatgggcgagagcccaaattttgcttatttattaatttttttttgtgtgtgttatttaattttattcgntttttgtgatcttttttttgcatagaatgaaaaattatgatgaatgtt

SEQ ID NO: 90111 - DNA, 624 bp, Heterodera glycines
cctcgtgccgaattcggcacgagggttaaaatgagtgaactgaatccattgaacataagcgactctctattcgcgactcacctttcatcgcagcactctccgacttttttcgggacttctcaattccaaccgttccccagcagggaattgattgccacttcttatgcaaatgccttcaattaccattccattgaacaacagcgttcaattgactcccacaacttgacgacattttctccgtcatgttgctgggaagggcatcatcgtccgttgccgccctcaaatacattggcaatcaatgccactgaatgtcatgcaaatccacacgagtgcgctgatgagaatgagcttgaaattggctgcggtggacttagcgttctttctgttagtcacgatgggacagacaattcgtttttcatcagcggtacatctgccgacagtttgagtccacgagagagcggtggcgacgttcatcgacgccccttcaacaacattttgaattcaaacaatacgccaccgttgaactctgccacgagcaaagggtttcgcacagaattggaaaaacaacgctatttggagaggcgcagcagaaacaacgaggcagccaagcagtcgaggaacaaa

SEQ ID NO: 90112 - DNA, 672 bp, Heterodera glycines
ctcacaatggcgtcaaaaattaaaccattaatttgtccgtcgatattaaatgctgatctgtcagatttggctaatgagtgtcgaaaacttatggccgctggtgcggattatttgcatttggatattatggacggccatttcgtgccgaatttgacgttcggacatccgctcattgaatgtctgaggaataaattgggaaatgacgcgaagttggacgtgcacatgatggtgtccaacccgtccaaatggctcgaccctctgcacaaagcaggcatcgatcaattcactttccattgggaggcactcggagaggacgaagcggtggacacactcatcgaccgagtcaaatccaagggaatacgatgtggactgtccatcaaaccaatgacgccgctggacaaactgatgaagttttgcgaaaagatcgacacagcactcataatgacggtcgaaccgggattcggcggacaaaagtttatgcaggaccaaatggaaaaggtgcgccaactgcgaaaagcgtacccaaacttggacatccaagtggacggcggggtcggactggacaacatcgaacactgtgcgaacgcaggggccaatatgatcgtttctgggactggaatcgttcggtcggctgacccgcgtcagacaatgccaaagatgaaggaaactgtc

SEQ ID NO: 90113 - DNA, 510 bp, Heterodera glycines
actttgattaatccaatggaaaagagattgaatccatctgcacttcctacgcttatgttatcgaatttcggtggttattcggtggagacactttgcacgcttgggaaggagttcgtattggaacttatgactcggatgattagcattgtgagcactttaaaaatggatattaaaggagacaataaaaaagatctagacattgttcgaattcaacttgattattctcgtctcatttttctctgtcttactgaggtccgtcttcgcatcgatttaaaacttgctgagggaattggagagaatcagaatttgaaagatgttcgtccttctgatgaacggctgttggagctcctttcagagccgaatcaaccggaagaaaatgcgaaaaaggcaaatttggcagagagattcgaacaaaacagaaaggagttaattcgattgaattgtcatttaaaaaaattggattggttgtcagttaatgcggagaatggagataaataattctgcgaaaaa

SEQ ID NO: 90114 - DNA, 506 bp, Heterodera glycines
gtaatacgcagaaaaactgctccatttgataagaattcaaagaatttgtgattttatccgtttttgtctgccgttttcatccgattattccgtttttgtcttgaaatttaactgtttttaatcgttttctgccgatggtttgcgttccatgcataattctgcccgtcgtgttggccatttaccttcgatttgttcagccatacattttgcgttttatgcctcagcgatggcgtatttggtttgactcggtgctttacccgacatgtccagtgaacaaaatggaaacgacaaacaaatcgaaaacggagaacaacaaaacagacggagaaggagagacggggaaggaatgcgaaaaggacaaatgaaacagaaaacatcaacaaagttgtatttaagtgattatgaaaatcaaaattcactaaactgatttcctttgtgcatcaaaattcgttgtcttctgagaataataaagtcgcgattcaagaaaaaaaaaaaaaaaaaaacaa

SEQ ID NO: 90115 - DNA, 632 bp, Heterodera glycines
tggacaatttccttttttggacccttgcgccttccaaacggctttcaccgccgcttctgacggaaggcgcgtcttttcaacagcagcaggatgagagacaaatgcataccgttgacctgtctcaacggttcatcgactcacttccctcttctttttttctgggtgaacatgcaacttacaaagaccatgccgccatttcactgcttaatttggctcacaaccattttgtcactgtccccccgttggtggcacagttcatcaatctgatcagcctcgatataagcaacaatcacttggcattgttgccaaaagagatctcttcgttgaaaaaccttcgcgaactttcacttagaaacaatttgctagagaatttgcctaaagaatttcaacgactgcaatgtctacgggaattgaacatttccggcaatttgttggagcatttcccgcgagaactgctccaaatcaaatctctccgtgtgctttatttgggtgccaatcgtctacagtcttttccgtcggacatatgccgtttgtccaaccttcaagtgctttacctgggtggaaatgcgttagtcgatgtgccggatacaatcgggcagctgtcagagttaacttcgcttggtttggcggac

SEQ ID NO: 90116 - DNA, 545 bp, Heterodera glycines
aacaagcgacagttatattgtgtgactcgcccaaaatgtctaagatgggccgaatggaatcggacacggacccaaatacggtgacaattctgaggaagcaccaagcgccccagcgtgtactgaagtcggacgcggatgttaatgcggcaaaaaagcgcggcgacgacgtggaaacgacgaagaaatatttcgcaggggtgaatcgtcagcacaaaacggacaaaaacaccgcggttttggacgcggagacggagcaattgcaccacgaaagggtttcgctcaaattgggcactgtgattcagcaggcgcggcaggccaaggaatggactcagaaggagttggcaacgcgtgccaatgagaaagtggaggtcattcgggagtacgaaaacggcaaagccgtgcccaaccaatcgatccttacgaagatggagcgttgccttggcgttaaactgcgcgggaaggaacttggccagccgcttgcgcccgcctcaacggccaaaccgacgacgacggcgaaaaaatgagcagccgcaagaggcgaaagt

SEQ ID NO: 90117 - DNA, 591 bp, Heterodera glycines
tccttctccccagttcaaatctttaacgacgaggccagcgaggagcgtgccgagaatgcgcgtctttcgtccttcattggcgccattgccgtgggcgatctcgtcaagtcgacgctcggacccaagggcatggacaagatcctgcaatccatgtcgacgggcgaaatcatggtgaccaacgacggagccaccatcctcaagtcaatttggttggataaccctgcggccaaggttctcgtcaacctgtccaaggtccaagacgacgaagtcggcgacggcaccacgtccgtgtgcgtgttcggctccgaactgctgcgcgaagccgaaaagctcgtcaaccaaaagatccacccgcaagtcatcattgagggctaccgcattgcgtctgccgcggcgctcaaggccctcgaggcggccgccgtcgacaatggcagcaatcccgaaaagttccgtcaggacttgatcaacattgccaagaccacgttgtcgtccaaggtgttgtcgcaggaccgtgtctactttgcccagctggccgccgacccggtgctgaagttgaacgggcccacccacttgggtacccttcataacatt

SEQ ID NO: 90118 - DNA, 604 bp, Heterodera glycines
attccctccaatttcgttccatcgttttcaaaatgatgtggatgttcttccacactcaaatcaaggacacggttctattcaaatggtggaaagtcgaaactatcggaagtcttctgatcacttgtttggtcatgtattttggtgccatttgcttcgaagccatcaaatggcttaggcttatgcttgaacaaaagtcgcgtcagccgaactccgccaattccgccggactcaacatgacagaccaaaacaaaacagtgccaatgactaatcgccggtacgccgaatcgctcctctcccgggtccatcttctccagagtgttctgttcacggttcaactactgctctcctacctgctgatgctctgcttcatgactttctctgtttggattggaatggccatttgtgccggtgctgccaccggtttttggctttttgggaggagagtgccaatgttggcatttgcatcgagcggagcagcggggagcggacagggatatgcgagcaccggccgaacggaactccattaaaagccatgcattcattttccccaattaatttgcatcgaataaacgcatttggccaaaaaaaaaaaaaaaagcccaaa

SEQ ID NO: 90119 - DNA, 860 bp, Heterodera glycines
gtccaattaagaggaagcgataaaagtaattttgtcgatggattcacaattattagcgacgaatgaccattctaatggagaaacagcagcaacattagaggagatctacagaaaagcacttgaatattggaactcagttgggtctgacttgaacggaatgcttgggggctttcaacaattgcaccgccccgacattaatgactccatcaattttttgtgcgaattgaggaaaaagtcctttcttcgccacttcgaccgcgcgttggactgcggctgtggcattggccgagtgacaaagcatttgcttttgcccgccttccgttccgtcgacatggtcgacttctccgaccatttgatcgctcaatctcacatttttgtgccttcttcgtccaatcccacggaaaacaattcggttggacagcgttttgtcgaatctttgcacacttttgcgccggccgaaaagggcggagattacgacatgatttggatccaatgggtgaccggacaattggaggacaaccatttggtggactttctcagaagatgcaaggagagtgtcctccgtcgggacggttgcattgtggtgaaagacaacgtggccaaagggactgaaaaagaatttgacgaagtcgacaattcatgggccaggccccgggaaatgctgcacaaattgttcgaacgagccgactgtcgaattgtgctggagagaaaacagccgaacattccgaaagctctttacgaggttcgaacctttgctctcaaaccgttgtcaaatgatgaaacaaatgggatgaatgatgattgaaaacacacatattttattcattatttacttcatgatttttcctttctctgtggtt

SEQ ID NO: 90120 - DNA, 582 bp, Heterodera glycines
cttaagtgtcggtcaataatgaaattatttttgttattttctttgtttttaatacaattttcttccgccatcgataacatggaacatcttatgccagaaaatgacgcagacagtttgatttcgtatttagaatttcagcgttggcataaagcggtgatgggagcagagccacgggaaagctcaatcctttttggcaaaaatgataaagacgcagatggcatgctaacggtggccgagtttgtgccattggcatttgagcttagccgaaagcctccggaacgtcagacggacaaaatttttaagaaatttgatgtcaattcggacgaacaattggaccgtcaggagcttttgaaaggcgattccatctccgaggaaattgttgatggtctttttcaggtcgccgatgtgaacaacgatggtcgcatttcatttgacgaattttcaaccgtggccaacactttggaaagtcgcttgtccaaggatgagaaaaacgcgggcatggccatgtcattgttggcccaattggacacggacaaagatgaaccaattaatggcactgaactgtttgaatatgctcacaaa

SEQ ID NO: 90121 - DNA, 551 bp, Heterodera glycines
atgatcgggacgggaatccgataactgcggacgatctttgcgttgccggcgcgttggctgtgctgatgaaggatacggtgaagccaaatttgatgcagacactcgaagggacgcccgtctttgtccattccggtccatttgccaacattgcgcacgggaacagttccatcctggctgatcaggtggcactcaaattggtcggctcggatggctttgtgatcactgaggccggctttggcgctgacattggcatggagaaattcttcaacattaaatgccgaacgagtggcctttggccaaatgccgttgtcattgttgcgacggtgcgcgcattgaaaatgcacggcggtggcccgcccgttgtgcctggcaatccgctgccctttgaatatttgaatcccaatttggagttggtggccaagggttgtgacacaaacttgcgcaaacagatcgaaaatgcgcaactgtttggcgtgccggtgctgatctgtgtgaacaaatttggcaccgattcggacgacgaattgggacttgtggtggacaaaccacgc

SEQ ID NO: 90122 - DNA, 115 bp, Heterodera glycines
atttccaggactcactgccagttggatgaaatgaaattcaattgtactgctttcattatgctttcaaaagttaactttcaaattaatgtccattgttctttaatttagtatgttt

SEQ ID NO: 90123 - DNA, 797 bp, Heterodera glycines
gttttctctccttcattttagttttgatccatctgatcagtttctttttttctcacaaacaatttgtgttgtgtcatcgaacaaatgtcgactgtcaccaacggcaaagctgaatcgtccatgggccgatacgtctacatcttgccctacctgcccactgtcatcccttcttattttttttacaaaacggcacagtcggcgcggaaatgggcccctgtccacaagttcggcccgttcaaagtgtctgcagcgcatggatttgcccttctcattcccatgccgcacttggtgatattggcgttgcaaatttggtacacgcgattgtcacgtcgtatcaatgagaaaaacaaatgatacaaaatgtttccaaacagagcaatatgcttcaattcttgtgacactgtttccattttgtcaatgattttttgtggcaatttaaattcgttttgttattcggcaattattgcttttcactgttatgcttcgaaagcgcctcgctctatataaaaataatataagaagaattacatgttcattcactaattggcttgtcccattaattgtcgtgaaattggacggatttttttaaaattaaatcttgggtacttatgaggttaacgccacataaaaatgtttttgtttttaatgacaaaaatgtgtttccaggggtattcggggctgctgatcacgaatatgacatccatttcgaccgattccgaaccgggactcgaacaaaaagccgaaataggttgagatgcatttgaagctattttatatgttacctgtgtacggtattg

SEQ ID NO: 90124 - DNA, 791 bp, Heterodera glycines
actctgttggctgcccttggagatgaagacgctgaggtgggctttctccttgggggaggcgaactattgaactcagagcgtgaaacccccttttggcgttgtcgaccccgacgcaagcgtcgccgaaattgaggacgcattccgcactttcatgtacccgcagagacattgcgattattctgatacaccaacacttggcggtagcatgatctcgataccaaagtggcaccagacacagtggctcaccatcccggtcgtgctcgaaatcccctccaaagaaatgccttatgacgcgtccaaagatagcattttgaaccgagcacgtggcctggtgaacactgacgacctcaagtcatagaagaagacattacaaaaaacaaattctcctttattagtcaatgaatgtgtttaattaattatgggaatgacgagaacctacatacaaatttgtacttttggtcttttcttggtactccaaaacccagacattatgcacaacaaaatttggttttgatgcatctatcagcgattgatcccttcagcacgttgaatagtaacatttattcccaaattcccgttttcagcaaaaaaattcgcatgatttgtgtcaaaagccaaacagtctgattgagaaattgcggcagcgaccccctcgtgaatacttcgtggactggcttcccagcaaagtcgacgccgattgttggataattccaatttgtaaacgaaattttcggcttcctttttggtcccaattagttgaacaactgcgtagaacatttggtagctttgac

SEQ ID NO: 90125 - DNA, 543 bp, Heterodera glycines
  unsure (1)..(543): unsure at all n locations
catttgctcgatcagttcgtcgcgccggcccttcgtctgtggatggtaatagacctggtctcctccgttctattggtgatgattgtcataaaaaaatgttttgtgcgcattcgaattccgcgcacaaaacgtcaaattgagctgagagcggcgaagagacgcaaaaggaaggcactgaaagagtcgggcggaggagacggcggcgagtcgcaggagagcgagcacaatcagtacagaggtgggcaaaccatcgttctgaactcgttcaatggcgcaaatgggggcaatgggatgaggagaagcggaaacggagcgaacggaggggcggaaagggcggcgcaacggcaaacgattgcctcgagaagcattcccgtttagagacagcgcaacggcacaagccaattaaggaattaattaacgaattaattaattaattaatgaacaaattagctaattaacgaattaattacgaatatttgttgatcagctcgttttgtttacttattaaatataattttgctcaaaanaaaaaaaaaaaaaaaa

SEQ ID NO: 90126 - DNA, 1166 bp, Heterodera glycines
gtctatgcgtcgtccaaatggtcgactgcccccagcaaaacggacaccgccagcaattgcctctgttcaatgcttccgagcattttttcgaaggggctgagaaactatttgaaatttggttcgataatgaccagcagaagcgagaaaatggccacaaaagcacactgagaaccattcccgagaacgaactgcggcaacttctgaacacggccgggtgccacattctccaggtgcttagaacagctgaaatcgatgcgtatttgctaagcgagagcagcatgttcatctcggatcgacgtctcattttgaagacgtgcggacagacgcggccgttgcttgtgatcgggaagttgttggagttggcacggaaacattgccaaatggacacagtgaccaatgtgtattattcgcgtaagaatttcttccggcctcatttacagccccaactccacgccactttcgacgaggaagtggattaccttgacggcttcttccagggtggaagcgctttttgcatgggtcctctgaagcacgaccgatggtatttatacactttgactacgccccgtgctccgctgaactgttccgaccacactttggagctgcaaatgaccggaattcctgtggagttactcagtgtctacagtaaatcggcatgccccggcggtgcggcggagtgcactcgccgatccggcattctgtcactgttacctcgggggaccatcgtccaagacgaactgttcgagccggtcggatacagtatgaatggggtcccggctggtgacgaatacgtgaccattcacgtaactcccgagcccgagttttgctacgccagcttcgagacaaaccatcgccggggctgtctctatgaacaaaccctgcgggtgctcgactgcttcaggcagttttttgccggggattgggctgttcggatgattgcgaagcaatttaagaccgggacgcttcattttgacactttttgctaatgaacattcaaatggagcaattgaagtgcagcagagattgtgggcggaggatttcccgggctatcggcgactgagcgttcaaatgcttcgccttcaggcaaattggggggggggggagggggagaaatcatttaattagtcgaataaaatgccaaagtcatttcagagtgacactttgct

SEQ ID NO: 90127 - DNA, 641 bp, Heterodera glycines
gtccaattaagattcttttaaatttgaataaatttgaaatgacgacaatagcggcgaacggtggcggcgaaacattttcacgaaaagtttttgtaggtggactgcctctggacatagcgcagcagacggagctggaactttctcgcgcttttcgacagttcggcgaacttcaaatagaatggcccaccaaacgggtgaaccagggcaaaacgacattggacggcaaaccggcagggcccggctacgcgttcattgttttcgctgacccgcgttcggtgggtcttttgttgagcaaatgtcgccgtgaggtgacagcgcccggggagaagacgcgtcgttacttcctgacactgtccagccgaacggtgcacaacaaacccgtacaggtccgtccttggcgtcactcggacgccgtgttcacccctcgttcggggttgcccgttaacatccgatggactgtgtttatcgggggccttccccgtcccaccagagcgatcgacctttaccaagtgctgatgccccccatccgtggaggcgttggccgtgactgtattgtgcacgtggacatcgacgtggactcggagatgcgctacccgaagggggcggcacgcatttgcttcagtcgctacgacgcattcgtg

SEQ ID NO: 90128 - DNA, 964 bp, Heterodera glycines
gtccaattaagactttcaaaaataataatttaatcgacaattttccccgcaaatggccgaagagaatacaaatcaatcggaaggactcgacttctttctgaaccgaagcggatggacagatgcccaattggaggaagtcattcggcttttgtacggcaaaaggctccaacaactttcgattgcccagcgtttcttggactcggcgcaagaagcaaattttgagctgaaaggttttcaaatggtggcgcaggaggagcagtgccgaaggccgaagaaaatgcgcgtggcggccatccaaaacaaaattgtgttgtcgacgagtgcgccggtgcaagcgcaaagggacgcactgcaccaaagagtcggcaaaatgatcgacgcggcggcacgagcgggtgcccaaattgtttgcctgcaggaggcgtggacgatgcctttcgctttttgcacccgcgaaagattaccatggacggaatttggagaataagccgaggacggagcgaccacaaaattcttaagcgaattggcaaaacgacttggcggtgtgaaaattgcgccaattttggagcgtgacattcacaaggatgaccttttgtggaacaccgccgtgatcatctcacagacaggcgcagtgatcggaaaaacgcgcaaaaatcacattccgcgggtgggcgacttcaacgaatcgacttattacatggagtccacccttggccaccccgtcttcgaaacggcttttggcgccaaaattgccgtgaacatttgctacgggcgccaccatccgcaaaattggatgatgtacgcgttgaatggtgtgcttctgctgatgctaccaaatgcacttgtttcttctccccccactgtttgaggtgccgacatcattttcaacccttccgccactgtcagcggactcagcgaagcactttggcccatcgaagcgcgcaacgcggccatcgccaaccac

SEQ ID NO: 90129 - DNA, 494 bp, Heterodera glycines
gtccaattaagatgcccgcccctttggctgttcaacagaaaatgataagcgaagacgggtcggacgcaaacattccccagcaacacttttccgccaatggcaccccccagcaaccgccgtccgccactgtccctcccgccgccgcggctgcgcaccttttgaagaattcgctgtccgcccctctgctggccaatttgccgcccgtccctccccaatgcggccccccaaccgtttctttggcattgctcatcgatttcgccatccattggaactaccgacaattcgaaattttgtccgaactgaacagcaaaaagaaggagacggaccggaagatcagcgtggtcgagtttgctcacaacactcgtctgattttcgtgcgtcttctcgccattgtccgttggctgaaaagtgccaaaaaattcgagccgctcgcctccattcgccacttgctcgacgaacaggcgacccgttacgtggagaccgccgatcggttg

SEQ ID NO: 90130 - DNA, 541 bp, Heterodera glycines
ggacaatcaccgaaagctcatcagagttaccgctcctcctccgcagaggcaacaacaacaactgatcaatggcgtagtaatgtctcacaatcaacatttgcacgtgccgaacacggcaattggtgggaggacgacgacggtggacatggccataccccaacggcagcagttgtccgacagtgaagtgttgccggtgcatcatcattgtctttatcgaattgaccacccacaaattctttcttcgggcactgcgacagacttttcggtccttcagaatttcccggcggccaaacctcgcaatgccgtcaatttgaacaataacaacatgcaacaatttgtgccaacaacagaatcgttttcgtcgccttcctcgtcgtcggcgccaaacactgccattgagctgacattgatgaacggcgaattgtcgatggactcatccgctaccatttctcagtttcatccaattgtcttggacaattcgcccaccaagacactccccgaagatgtgcgaaatgcttatgagcagatgctcaaagagaat

SEQ ID NO: 90131 - DNA, 651 bp, Heterodera glycines
cttctcctcctgcccaatgaaacggccaaaaagagacaattcccgtacaaaatcggcctccgtcgtcgacagtttctccttcaacggtcaacgtttgtcctgctccaactcgtcctcttcacctccgccgtttcattcggacgaagcagcgaacgatcgccaacaccgaagggcatcggcacaacagcagaagaagataacgaacaatgggacggcggatgtgatgaaaaaaatgccgaaaatgaacggcacaacgagcagaggatggacaagggagacggacagcagaagtaacgacaacaacaacaacgaggacgacgaaacggacaatgggacaacgacggaagaacaacagaccgggacggggacatacacaggcatgcgcgactcggccacttcgtcgtcgtcggcatgctctgcttcatcgacgcttcgtcgaccgttcgaccatcccaccaacctctttttgtgccaacaagcgctgaactcgtccaacaacttgacgctgaacggcatgcccacgaccaacaacgagctactgttcccctccgccacaactcctctcctgcaacaatacggcaccaccgcccaacttggcactgctcaattcggcatctccgcccaacttggcactgctcaattccgcatctc

SEQ ID NO: 90132 - DNA, 616 bp, Heterodera glycines
aattaagcgaatttactaaatagaaatggatcttttcgacatttttgaacacataaacactaacgaagacgttcagtttctgcgtagttctggaaatgctggtgccttggcaccacagccgttggtccccaacactgtctattcattgtccgatctgtgttcggcattcagctctgccgcttctctttctgcccctcctatgggcatggcttctaactccgatgcttttgggctgcgttcgacaattctccccgcggctcctctctctgcccctcccgtgggcatcagtacgaactccgatgactttgggctgcgttcgacaattgtccccgcggctcctctctctgcccctcctatgggcatcagttcgaacatcgataacactggcgcaactcgcgaacgcaaccaccaatacttttttggccatgactttacgacggaatctttctcgagcaattccgggacgacgcgcataagaaaaccgcagccgctgaacttctcgttgaaagtctttttgggtggtattcctgctaatatgacgacgaatggtttggaattgaactttgcccgattcgggaagagtatcatcgactggccgaagaagacgggcaacaag

SEQ ID NO: 90133 - DNA, 544 bp, Heterodera glycines
cggaaacgagcgcttccgttgccctgaggcgttgttccagccatccttccacagcatggagtcggctggcatccacgagacgtcgtacaactccatcatgaagtgcgacattgacatccgcaaagacttgtacgcgaacacggtgctgtccggcggctcgaccatgtacccgggcattgcggaccgtatgcagaaggagatcaccgcgctggcgccgtccacgatgaagatcaaaatcattgcgccgccggagcgcaaatattcggtgtggatcggcggctccatcctcgcctcgctctccactttccagcagatgtggatcagcaaatccgagtacgacgagtcgggcccgtccattgtgcaccgcaagtgcttctgattgagcggcggtgatgtccgcagggaggcgaaagaaggaggaaaatgttggaggataaaatttgatttttttttttttttgctgttttggcatggcgtatttaatttaaaatgataatatatagaggcggatttaaaaaaaaaaaaaaaaaaaaaaaaaaaaaaa

SEQ ID NO: 90134 - DNA, 473 bp, Heterodera glycines
cctagtttgaggtatacaacagttttcactcggatcggaccgctttggcatcttcctccatcgtttgtcgtaaacagtgtggactttgacggacctggtctttattttgagaaagatgtgttttctcccttcaaatagcactgtttttgggcgttccattggttttattcaccaattcggtcgtcgctttctcttcccacccattgcccaatgtgaacacgtggccggactcaaaatggacaaaatgcttcagctccaatgccgattttgttttttcactcgccgaaatggtcgttggatagtcgaatgcaccaaatttggaaggcacaggacaattttacgcgatttcaacgccgatctctattggtgatgtgagaggaaagactaaaaattattttcgaatgtggtcgaatttacaaataaaatttgttgtagaaacaaaccgaaagagaaacgatcgaattgtatgaaaa

SEQ ID NO: 90135 - DNA, 659 bp, Heterodera glycines
gtttgtaagacaccaccaattaagagctattacaactgcacaattcgactatttgtttaaaaacgccattttaaacgccaaattttcgcggaaaagtgacggcactcattcacttttactcattcttcccacattcacttcacttcactcatccatttgacctgtgacctttgcgctgtgtgatggacgttgacggtgctgcgcaggatgagatggttacggatggtcccggttacattgccaactgtccgaccggcagcatggcccagcagagcagcaacaacggcggcgggagcagtacaagcagcagcagcggcggtgggaacggtgccggagggaacagtgcggtcggctcctcccaccagcagtaccggtccatgtcgccgctgagcggcctgggcatggcggccgcttcttcagcttctggcaccagcagcacgtcctcctcctcctcgtcgtcctcctcctcagtgattccgctggacattggcctgggcatgttgccgattgcggagaattggtgcaacacgcaggtcaaggtggtcaagtttaactacatgtggacgattaacaacttttctttttgtcgcgaggaaatgggcgaagttttgaagagttcgacgttcagtgccggcccgaacgacaagctgaagtggtgc

SEQ ID NO: 90136 - DNA, 476 bp, Heterodera glycines
ataagatgaaattgggcatctgcataagctggggacgaactggcgggcgattgatggtgcctccgagcaatgagccaatccgaccattcactctgatttggaataagacggatggtttggttgcacttcttgggcaaaagttggaaaagggaacttgggttctcttcacactgtccactcggacggcctttttgcattctgtcgaccgaaaattggttgaccgcgtgtccatcacagaccaacgtcgtgagacagcagttgacagtatgaacattcaggtgatggcattcgttcgctccttccgacggtacaacgattattatcgcattggcatggaccaactgatcggatgggttttggtgtcggaggattcatttgtccgaagggtcgtcctccaagaaaacctcgctgctcaaatgtccatcatcttcaaacatgactgtgtgcgtggcttcaattgggtggccgtctcggtg

SEQ ID NO: 90137 - DNA, 829 bp, Heterodera glycines
cagtctcagagtcagtaactgaatattaaaaatgaaagtggaaaagattaagacaaggagaggcaagaaatttcttgaggacagagcaccgaaattggtcgaaaatgacaaagtgacactttttgtgaagggaaagaaatgttcagtgatgctcaacaaaatacttggcgaactttaccaactgaagaagccattggccaatcgactgcaacgaaataatgacagccatccctttgaggatgattcgttattgtgcagattttctcacaaatttgacgcttctttatttgtcttcgggtccagcacaaagaaacggccgaattcattgctttttggcagaatgtacgaccatcaaatgttggatatggtcgaattgcaagtggagaattttgtctctagcgacgaatttaaacaagtcaaaagcgtaaccttggggtcgaagccatgcatcattttgcaaggtcacctttttgagtctaacggaatacttcaacggattggcaatttaatggtggatttgtttcgtggccccaaagtggagtacttacggcttcaaggcaccgaattgataatttcattgacagcagtttccgaagagcggattaaattcagagtttacagagcatccctaaagaaggacatggaatctgcgaccccaaaaatagaattggttgaaatgggaccgaatattgacttcaaaatcgacaggacgaaattggcaagcgattcgctcttcaaaactgcactcagaaaaccccaggaagttcagaaaagtgccaaaaagaacgtgaaatttgatgcattcggaaacaaagtggcacaagtgcac

SEQ ID NO: 90138 - DNA, 965 bp, Heterodera glycines
aataagatgcgttctcatcagtttaatttacgccaactccgtaagcctttccgaaatgtcgcctcaactaacagtgaaggccttcgtcatcggaacagcatcgtcgggccaccgggagttccatggacatcgttggccttgttggcaacagcacctccaattgttgcgcctgaagatgacatcctgaacagtctttttgctcaggttggaggaatgccaactttgaaatccaccggcaccactgttgaacttgtgcggcgccgttccttttcttatggttcaaattgtgcaaaatgcggcaaaccattgcgaaggactccgaccaccaacgacaactcaaagttgctctactgcaaagactgcaacattatattcagcagttcttcttcgaatgacgcgtcgtccaagaaattcaacattttgaagaacggtcccatccaatcgccgccgtatccgaccgaaatttcggcatatttggacaaatatgtggttggccaacaacaggcaaaaaaggcgttgtctgtcggcatttaccagcattacaaacgcttggaaaacaatcagcgttttctgaatcagttttttgacaacaattttccaaatgtggcgtctgttcaacaacagcatcaccagcaacagtcgcaaatgcatcccaacataagcattcactacccattctcacacccgcacgacttggcaactgacttgctttgtgcgattgcacctcaatgacccaagcgggctatgtgggcgaagacgtagagtcagtgctgcaaaaattgctgcaaaatgcgcaagggaacgtggaaaaggcgcaacgtggcatcgtatttttggacgaaattgacaaaattgctgccactcgtgaggcgatcagtcacgcgtacagagacgtgagcggagagggcgtccagcacgctttgctaaaaatggtcgaaggcgctgtcgtaaatgtgaagacagga

SEQ ID NO: 90139 - DNA, 577 bp, Heterodera glycines
gaatttcatatctctgaattaacctcggcaatgcattctctcgcctttatttccttcgctttttgcctttcactaacggacgcttttcgtactcaatcgtccggcgtccgggggacacttctctgtggaggaaaagcactcgcggacacaaaagtgaaactttacgaccacgacaaagggccggacgcggacgatttgatggggacgacgacaacggacgagcagggacgattccaagtcagcggaaagaccaccgaactgaccaccatcgacgtccaactccgcatttaccacgactgcgatgatggcatgatgccttgccaacgcaaggtgaccttcaacatccccgattcgtacgtcacgtcgggtgcggtgccggcgaaattctttgacattggcacagtgaacatgcaaatcatattcgaccacgaagagcgatcatgcattcattaattgacagatctttatttttttattgaacaatgaatgatttgtgagttattctgctaaagagtccgttcttcggtctttgggcctttgcctcagaatcaaatttctgtttggaaaaaaaaaaaaa

SEQ ID NO: 90140 - DNA, 593 bp, Heterodera glycines
aatactcacttttcaaacgggtctcaacgccgccggcagaacacaaattctgaacagcgactcttctcttccttcgactttttcttccgtcctttcaattgcattgagcgatttgcacgtccgaatgcaaaatgtgcaagaagaccaagtccgagccttgctgcaagaaacaagtggtggagctgcgcaatgacattgccaccaacggatgcatcgccgggggcatcgaatgctgcgatttgacggcgcacactgtgcagcgaagaccccaaacgactggccaactgtttctggaggagctgtacttcgtcaagcacgtcgacaacaattcactcgctgattctccccgcgagcgtgaaattctggccgaatatcgcaatttgctgtactccatcattctgaatggacttcgccaatggagcaagtcgggcgtactggcacaaatcacgaacggagaacagttcgaacacgcgctgaaattgttggagggaaaggagggcattccgacggtggcggacgaagagcgaaagaggaaatttttggatgactcaaagtgttcgttggtcaatgcgttggacgaacttttcaacctt

SEQ ID NO: 90141 - DNA, 613 bp, Heterodera glycines
tattaattaacgacgccatcacaatgtgatgatgacccattaggaccacatcgaaagtttcattcatttcgttcgttcgatttccatggaatgccctccgggttcttcgttcgacccttccccgtctccgtctgtcgcttctcagccgttttccgaggaatgccattccccggacaaccaaatttctcttgataattctgtgcctgaggaaagtccgaatggaaatgccaacgtttgcatgggcgaggcaaagccccgctgggggccgacccatgccggggccaaacagttggcatcgatgtacggcaaagggaaacgactccaagaagtcacttgcatttgcgttgcgtcagccctttttctgtcggtcggctgctccctcctttaccactttcggcttgtccccgtcggtcagctcattttggcatccctcccccgtgtgctgatggccgatttcaactcgggcgtcgtccattggggcgcggatacgtggggaaccgtggacactttcgtcggaaggaattacaatcgttcgtttcgtgaacaccacgttgactcgacagcgatcactcggcatgatttagtggaagtgaatggagacaattttatgctg

SEQ ID NO: 90142 - DNA, 435 bp, Heterodera glycines
atgtcggcagttaaaggacgacgtgagcaggacagaaaggaatgggcagcctattggaatattcgatggaaggaggtggaggtgcgatggatggaagtgcttatatcgacatggaatcttggtcaaatgtattgtcagcatgtggcgtggacaaccatgaaatgcgtgaaagataccaccaagttcgacttcgctcgcgtagccaaaatggaaagtacacgtacacacttacgacccgaacctttgaagacgctgatggcaagaaacttccccaaccggttgaaacacggaagcagttggacaggcgcgagtatcagagctacttgaaacttcgtgacagaagccgtcaatcaattcacaagaaacgtgtgtgttttgttctttttactatttcataaggtctaatttttaattgtaaccgtttaatcgattttg

SEQ ID NO: 90143 - DNA, 971 bp, Heterodera glycines
taaagtttttcgttcccaaaaatggactcgcaactctctgctgctgagacttctgtcgactccgtatgccatcaattggtgctccgttcggctaattggcaaatttcgcccaaattggagcagagcatttactggaacgttgaccgaatttttgtggacctcaattggagccagaacagatcctgcccaaaccccgaagtgatccaagtgcaacacacgccaatgcccagcaaagagaaagcaatcgaataccttcgtcatatcctcgacaattcgtttcgcatccgtcgtttggacctgaacatccaagtctcaaccgaattggtggtcaatgacattttggacgttttgaatggccatgctaaagtacaacttgaagaactgttcgtccgacgtcgttatgtgggcagcaaattctccggtctcgtgccgctcattcggtcgaatgccaaaacgttgaaacaaattggcaaaattggtttgggcgaggctatcaaagcactcagtgacgagatccacctcgaacgtctctcgttaatcaacttcgacctggtcgaacaagaccagcgtttggacagcgaagaattggcccaaaactcgcgcttttacattcgtcggttggctggcattggcaccacctttgaccacttgtcctacacttgtttcaccggtttcgagatcaccaaaatgccagccctcaacatgctccgtcagtgcaaggtcaaaagtcttcgtctgacgatgcaaagcggcgtggccatcaaagacccggaactccctcgcccgctgttgccgatgatgcagcgaattcaattggtcggcggaatggacgcgtcgtcggagagactgtcgttgctgtttcccgccctggaggagctcgaaattgaaaagcaggacctgatcactggccaccgattggaaaagcgagcgcgcgtcctctccaattacgcgcccgactttgtcggtgacgc

SEQ ID NO: 90144 - DNA, 531 bp, Heterodera glycines
aaagggccgaaatcgcaaaaaaatgaaactgaaaagccgccccagcagaagcagcctcaagaaaagccgggggcgcaacaggacgacacggagacggaggaggacagcaaagaagacaagcggaagccgataaagtgtcaggaggagaggaaatgctacgcacactcggagtgtggcgcaaggagcaaatgcaaaccggcgacgctggacaggaagaagaaggtgggcacgtgcgactgcggcgtgtgcgggggattccaactgttattgctgtgcagtctcaacagtggcgccctttcccttgacaaaaacattgtgccgcgggagtgtgccggactgaaagatgcttgtgtcgaaaagccattattcgtgggcagcaaatccaaaaagtgcgactgcgaagtgggcttccaaaaggcgggctttaagaatctgagggatggacagaagaaagtgtgcaacaagcagaaatgtgatggcaaaaaagacacgtgctttggcatgaattgctacggcggaaaatgcagatgt

SEQ ID NO: 90145 - DNA, 491 bp, Heterodera glycines
agtggtttgcactctatagtcttgcagtgcaacagtagacgtagaaaagaagcacgtcgcttgatgttcgcacccacatttgtgacgtgaggctgactcgccctcgattcaagttgggacgaaagcctatgaaccgagtctaagctcggcagagaccactagtgcaatgtagccattcactgataacaggatacatttgaagcacaaaggccgactggaccatcatcaccattgcatcggcagcatcttgtctctttggacccgcacatccgtcattgtgattctcgtgacatccctcccgctctctggctacctgttggttgtgtcatgcattcacttgtacaagtctggctcgcgatactttgcaagcagcggaggcacatccaccccggcatcgtcgctcgctggcggctcgtcgactggcgacgccttgattcccatggtcgtagcaggcgcgcaagtcttgggcagcatcggaaacttcatcaacc

SEQ ID NO: 90146 - DNA, 693 bp, Heterodera glycines
atttctcaaagcgtatcagccgctacaaatattttaaaaggcctccgacaagcaagcaacaaattcgtcacccaacacacaccaccaacgatgagaagcgtcaacacaacaccgttccgtcgccgacctcttccgcttcgcattgtgtcgtccgtgctggtgctgctgctctgtacgctcgatgtgtcactggcagcggagaagaacggcgccagcccgcctatatataatacgctcaccttcattttgctcgttccgctagtcatcgtcatctgcgcgttcatctacctcctgttcatgaagccaaagaatgcggaaggcgacgaagaagacgaagaaggcaaaggaggagctgacggcgatgtcgagaagggagcggacgacgataaaaaggagactccaccttctgctgctggagacgtcgtggcggtgccatcggaacgcgtggttgatgagcagcaaaaggaggacgagggtggcgacaaagctgaagaggagaagaaggaggagggcgggtcggcagcggaagagaagaaagaggaggcagccgcggagaccggcggagagaagtcggcgaccacggaagagacgactgaggaaacgacggaaacgaccgacgaaacttctggaacccctgagacttccgaaagcggctccggctcggcatcgtcatctgcctctggctcgggatcg

SEQ ID NO: 90147 - DNA, 510 bp, Heterodera glycines
caattaagatttattttagcttaatttttcttcctaaaatggacatcgatgaattgaaaaaaatgagtcctgagcagcaaaacaagcttctcgaggatgttcgtcgtcaatccgacacccaatcggttctgtctttgttggcctccttctctgaaaaatgttcccaacggtgtatcacaagtccgggcaacactttgagcggaggtgaaaaacagtgtttgcaacgatgcgtggacagatggcttgacagcttcagcattgtttcaactgcttttgctgccaaggcccaacagatggccggcatgggcagttttggctcgccagacggagggccgtctttttcatgagggtggacagctcattgatcgttgggaatttgattttgttgtttttcgcttgtttgatcttttagtggtttctttttgaaaacagcatcgactcgttgagcaatattttcaattttaatattagctcaaaatgccagacacagataaaaatttgtcaacaaaa

SEQ ID NO: 90148 - DNA, 109 bp, Heterodera glycines
caagacttggatttatggaaaacgtccgaaaatccattccggtaaatgttggaacttattttctccctttctttcattttcttacaattagcataaaagagtgtatacc

SEQ ID NO: 90149 - DNA, 569 bp, Heterodera glycines
gtccatttaagcagtttatttatattttttttttacaaatttcgtggtgccatggcgtttcaacggatttaatgcaaatcgacgaacaacaacagcagcaaatggctgctgccaatgagtgctgcttcatatatccgttcccggcttctgggctgtcctcccgccaactgatgcgtgtcctctccgcttggctgatgccgtctttctccgccgacgaggagggcccgtcgatgaacgtgccctcctgcttttccgatattgactcctcgtttgaatgcgcttcattttctgtacccatggtcttctcccacgacgaatggtttgtccaatgtgtgcccgccctgggcgaacagcttgacaaacttttgctcctgtcccaacaccagcgggatagaggaaggaaactcatgcctccaacaacgacggaatacggacgacgacggggagtgtcatgtgcgacgggtgctgcgccatttgctcgcgttgaccacccgaattccgatgcggacacagcccaggaccgaaatgcgactgttcattgcggttttcggcactttgctccgctggtc

SEQ ID NO: 90150 - DNA, 581 bp, Heterodera glycines
gcttcttcttcttcttcatgtatgtggaacggcaattcgttcgaattgtcgcggtcattacaatgggaggcagttccctgcgttccatccgtcgcattagctctttttatccatccctttccgtcaaccgaccacaacgcttttcatacgttgtacaaatgtcgtccgactcgaacaatgttcggcatggcgttgcgctcctttgttggcattgtggcggagattcaatgacaccgtccgacgacaacgccggcactgtccttttgtgctcgcgttgcggccgcctgcagccgttgcccgcgcgcatcgactttttctcctattttggcttggatgaccccgcaggcgcaacaattggcgaggcggagctgaagcgacgtttccggcgcatgcagtcgctggtccatcccgacaaatttgccggacgggacgaaaacgagcgcgctttggctgaacaacactccgctttcctcaacaacgcttaccgcacactccgcgagcccttcgcccgtgcggaatatttgctgactttgctggagacgcttaaaaatgacgatggtacgtcccctggcactgcttcg

SEQ ID NO: 90151 - DNA, 656 bp, Heterodera glycines
ggtggattccttaatagtaacttctcttgtatttgacatcgattcattcgctagaaaattttcggccgaacaaagtgacttcactctaagtcgcttttcagaaatttttatggaaatggaactttcaagcatatttcttggtcgcttttctttttctgacttggttgagttttctgaaaatctgttcatctattgctcacgttttatgttcaccccattttcgagcactggttctgttggaaatggtgatcagattcatttcaactcagatggaatgtcatccggtagaattgcggaccgaaactacaaacaacgattatttggactttttctgtgctacagtttgtactttcttcaaccttcgcaatacgttgttccgatttctgttacttcttctcagttggatgatttctatgaatttactagctccgttcttttacctgaagagaatttcgaggctctttattgtttttaccgtcttctcaacgcaaacgcattctcaattgcccctgttttgggaaatttcaatccgcttctccaagggaccttccacccgaccctcctcgacaaatcttcgtctgaatcgagtggtatcgaactcgtccaagattttggattacttttttctctgagtaatagtgaagtgttgaagcaat

SEQ ID NO: 90152 - DNA, 700 bp, Heterodera glycines
cccaattaaaccgagcaaatttcaaatttaaaaaatgtttctgaaaaggagaatctccgagcctagcgacgaagatgaaaaacaacggacaaatcaaattcctatcgataacaattcatgtgttgacggtattccgctgaacatccaatcattacgaaaaacttatgtggacagagaagagccatttttactggaaaaggacatgctttcctgtccatttgaccaattctctatttggttcggaaatgcgatcacgcaaaccgacctcaaatacgaagaagtgaatggctttgctttgtcaactgtctcgaggaatggaaggccaagttcgagaatgctattgctcaaaggtttcagtaaggttggtggtttcgtgttcttcactcactcaaacagcaaaaaggggaaggaattgagtgagaatccgtacgtctccgcactgttttattggccaaaggtaaaccgccaaattcgaattgagggtcgagtggaaattctcggggaagaagtggccgacgtttactggtcaaaacggccaattgagtcccgaattggttcaaagttgagtgatcagagttcggtaattccaaaccgagagcatttgacacgaaaacaacgtgagctggaagaactttgctcagtcaatggagaagaggcaattacgaggccaagtgattggttgagttattctcttccaccg

SEQ ID NO: 90153 - DNA, 670 bp, Heterodera glycines
ataaggttcttttttaacagaaataaataaattttcgtcttattcaatggctcagtcacagaatggtggtgtcaaaaaccgtcggatttcacttggttcgcctaaggacctgaaggaagtgcacttttttgaggaagatgaagtccccgatgtgccgttaaatggtgcaagagtcaaagtttgctatgccggagtttgtctaactgacaaagaaatcagtaacacgaaacaagcacgtataactcacggcgttaaggacaccagtctttttccaggctacgaagtttccggagtgatcgatgagtttgggcccaatgcaactccggttgagtacaatttgaaagtcggcgacaaagtcattgtatggcccactgaagagatgtgccaaaatggctatgctgactttgtggcagtgccaaatttgtcgcttcttgtcaagattcccgacactttgtcaatgcatgtcgcgtcgattcttccggccggcgcaacttgggcactctctgcgattgtccatgcccgtcctgtcgttgaggccatcgccagcacaaaaggatgttgcaacattttaattgttggcgctggtggacttggactttggattctgacattggccaaacattttcttaccgcgggtcaggagaaccgaatcaaactgattggtgctgac

SEQ ID NO: 90154 - DNA, 592 bp, Heterodera glycines
tcctaattaaaaataacatgtaaaaatggcagcaaaggaactgttccttgctcagcagcccgacctgttcaagccgattcaatccatcaatgccgtgctcatactgatctgtctcggctcctccaccgccgtgccgggcattggcgtcctttggttcatcggcctttgctctctgatcgtctcagtcaccgccacggaatttgtctattcgtctgtcctcacgctgctctgcggggtgggcttttggctttcattcggcttcgcctcccacgtgccggacaatggccattcggccggctatattttcgcggggattttcctggtggcccaagtggcctgctatgccatccctgtgctgatcatttacgatcggagccgaacggacggtccggcagccgccggacacgaacaaatcgccaacgtacatccgtttggggtcaccacggacggatgtgagcagcactaccagtcaatgcaacatgaacgtcccattgtctgacattgccaaagttccgttcgcattgactcctcccattttttggcccaatttcaccattttttgtttattaattattaaacagtaattgcaaaa

SEQ ID NO: 90155 - DNA, 640 bp, Heterodera glycines
caatggtaaagcttcagcgaattccagcggaatttggcattgagtgcaatgtttacggaaaatgcgaatttttcaatgccggcggttcggtgaaggaccgaattgcgctgaggatgttggaaatagcggagcaaagcggcagactgcgtgccgggatgacagtgattgagcccacctcgggcaacacgggcattggccttgctttggcatgtgccgtcaaaggatatcactgtgttattgtgatgccggagagaatgagccgagagaaggagctgacgctgaaggcactcggggcaaagattgtgcgcaccaaagacaaagcgcggtacgacagcgaacaatcgcacatcggcatggcgttcaaattgagaaaggaaacgcccaattcggtggtgttggaccagtacaaaaacatcgccaaccctttgacacacttcgaaggcaccgcggcagagattctggacgcgttggatggcaaagtggacatggtcgtcgtcggagtcggcactggcggtaccatcacgggcatctctcgcagaatcaaaaaggccaacccgaactgcataatcgttggcgtcgaccccatcgggtccatcctcggcggagaggacgaacacgcaggacataagtacaatgtgga

SEQ ID NO: 90156 - DNA, 1115 bp, Heterodera glycines
ttgaaatgaccaaaaaaacagcggaaacagtggtagcaaaaaaggaaacaaagccaaaagaactgaacgaaatgcaactgcaaaggctcaatctgatcaaaaagatcaaagagaagaaagcggtggcaaaagagaagagggagagggagcggaacgaaaaacaaatgcaaagactcgaatttattcgacgaatgaccgaactgcgccatttgaatccgttggcttccccatcgcgtgggcctttcctctacgaaggcgactatttctaccgcgaaattttagtcggtcgatcagattcaaatgccaacaatggtgaagcggaggtcgattgtgtcagtgttagtgcccccggaggttttgatgaattattcgtcacaaacccagccgaaaatagtgccatttcgataagcaaaatgatttgtggaagaaagaaggctttgaacaacaaggaagaggatggagggacttattcagaagaaagtttcaaaaaccttggtgttgaagcccgcgaatttcttggcagtttcctcaaattcatcgatgaccagcgtctcgttgacttggcaacccaaggagtcactggtggtgcgtcaatgtttcacagtttgacgatgaaaaacgccaactgtctgcgagagtctttacggctttattgtaaatccggccaagcgcttcttgtgcaagttcatttttggctgttaaagcatttgagtcaaactcgactgacttcgtacttaaatctgttacgcttccttaaaaacgcgggcagcaatctcagcgattacattgcctcttctccaaccgctgaagccgaactcgaaaaggcgaacaaaaccatttcggaattcattgcgcaaaaactgtacgaacctccgttgagttcgtcttccaaatttatcgaatgcgatccgatcaaaaacgtgagtttggtgctcgtctatccgcaaatcaatgccaagatgagtcaacatacaatccgtgcccacgagaccctatttaggaatctcttgccgcttgctgtttgctgtgtcgagaaggttgagcttaacttgaacgtcgaccggcccatcagtgtggaggagtgcgcttggatgtgcattcagatgattcggcag

SEQ ID NO: 90157 - DNA, 465 bp, Heterodera glycines
tggtgatggcagctgtgatcatttccatgggcttcagtgtggacattccggcacacgtctcctaccatttccacatcgcaaaatggacagaagatgggcaacgacagcggacaattgaggaacgaattcgaatgtcattcgcttctgtcggctttcccgctgtacaagcatcaacatgtacaaacatttgcattctttgtctactcgtcgtccctgtctatccggcacaagtttttgtgcgaatcctttgcacatgcatcacactttgtacaatccattcactgtgccttctgccggcgttgttcaatttgttgggcactttggaagcatttctaagctcaaaatttgcataaaaatattctcatcacatttttttataaataaatatttctatttaattaaatttgtcaatattttatttttttgttattttttgagcttttttaaggaataaagaatttgaat

SEQ ID NO: 90158 - DNA, 687 bp, Heterodera glycines
atttaagcttttccttctcccccaattaattccgttcgctttctccgctttttctctccgatgacttccccctttcactccctcgtggagtctcagcgggaattctttcggacgggcaaaaccgccgaattggcacatcggaggcagcagctgaagaaactgcgcaagacaatcctcgacaacagcgaatttctctgcgaagccgtgcaaaaggacctgaaaagggacgcgaaactgaattatccgctcgaaatttcgtctgtgatcattgaaattgaatatgtactcgacaatttggagcgatggacggcgcctttaaatgtcgaaaagactttcaccacacttctcgactccccgcaaatcgttcgcgagccgaagggcgtcgttttgctcattggtccatggaattaccccctcaacactttgctaatgcctttggtcgacgttttagccgctgggaatactgccattttgaaaccgtccgaagtcgcgtcgaacaccgccgccgccgttgacgaaattatttcgaaggcatttgaccggaattatttggcagtggtgcagggcggcgttgaacagaccggcgaattgctgaaggaaaagttcgaccacattgtgttcaccgggtcagcgctggtcgcccgccacatttccagggcggccgcggaacatttgacgccctgcact

SEQ ID NO: 90159 - DNA, 1078 bp, Heterodera glycines
ctgctcctttcgcttgccgccctttggcttttcccccgccaccaaatgcggctcctctgggcattgtccgcgcttttcgtgtgcagcatccttttctgtttggcagtttctcttttgttcggcactcctccgacgctgatcccccatctgatgaatcagtcttcgttccaaccctttgccgaccttttgttcctgaaccccgtcgcccgtgctggccccttcctcgtcgctctgttcgtctccctttggctgctgccccgtctcgcccatcagaagcatcttctccgcgtcccccccccccccatttttgtccccaattttccctcttctctccctttttaggctttgtgtccccttggctccctccttctcatccttttgctcgccctgctcctttggtgtccccattggctttggtccgtccctccctatgcttcatcttcccattcgtccgttccttcgccttttttccccgccctttacgccgcctttcatcgcaccgcctgggcaactttgctgcttctgttggccattcttttggatgcctccaggggaaacgcattgaactccttcttctgctggcgctgcttccaccccctctctaagctggtgtttcccgttcttctgctctccgagcccatcgctctgtccctcttctcctctcttcatcgtcccgtccattcgacgcctctttccaccgtgctcgcttggatcggaatcctcgtctgttctctgatcgtcgctttgctaattgacaccgctctgacccgtccaatccgttggatttgtggcgcaagggaggaaacgaacgacgctgtgaacaccagcagcagcaatcgaatgaaaaacggaaggatgatcatggaaatggaaggggaggggaagaaacggacgttgggatgatataagcagagggtagaggagtgatcagaaggactgatcagacagacggaccaatcacttggccaacaaacgatcactcgaattaagccattaataattaataatccgaccaattaattaaattagcatgttgtgtataagaattagcagtctttacgcatttacttcacagaaa

SEQ ID NO: 90160 - DNA, 1046 bp, Heterodera glycines
gtttgaccaactccttcgtggaggcactgcggctggccggttcattcatcccgtcatctccatgggcgcccaggccgcgtgtcgtccagtgtaccagggccaagaaccgtcgctgaattgccaaaatcttttcttgaacaacatcatcttacggtggcgttcaaagttctaaaggttcaccgctcggccattcatttggccatctgttccaacccgatcaagccaattaagctgtactggcagtggaatgagcgcgttatgggggtgtactggcgacagggtaaccggaaaaaaaggctatgcctgagatcagtcaaatgtgcgaccggggcaatgtgacggtggagaaatcgcagcttttatttgttctatttgttgccttcaacctttgcctatggcttcaacatcgactgtcaatgaaaagcgagcaagatggaaacaggattataaatgccgaaaaatgggccgtctccattgtgagatgcgttcattggtccgtacgcgcaataattttgaggttgaacgcatcaaactcacttgtgagcaaccacttgcccaatcagtcgccgatgcagtgaaagaaagcgaggagcttgtcaatgtggaacagaagccgaaaaaaattccaatatggaggaggaaggattctgaactcttttcaaggccttgcacctttttggaggacacccgcttttatttgctctccaagcggcaaccaatccccgccgcattacgccgcaatggacttacatcgaaagctattgatgccattgtgaaggatttgttcggcaaagcaaaaagtggtgaagcaaagtcgccctcccccatggaccataagccattttctgccaaatcgtccacgaatgccaacaccgccgccaaaacacccgccacggtgggcaagcgcttgcgcaaggcccgtttgcggaaattgcagtccgccaatccgtcaacatccgccgcaaaattgttggtgtctttggagccgttgaatcgcaaagttccgcctcagcttcggcagtgcaattttacgcccaattatgcag

SEQ ID NO: 90161 - DNA, 644 bp, Heterodera glycines
  unsure (1)..(644): unsure at all n locations
ttttttttaaatgcatataattaacaactcaatttggctcaaatttctcatcaccgcatttctgttcaaaattgcttgctctaaatttggttcaagtgaaaataaaggcttctttttttattttggttatggtagcaacttgcttgaagaacgtatccatgtacaggtaaaaggtgctacttttgtggcaattggagcgctgaagggttacaggctggcatttgttgatttcgaagaaccgaatcgttggcacagtgcagccgcaacaattgagcagaagcaaggctcacttgtttggggatgcatttggaaagtgccaaattcatttgcggacgaactggacaaacaggagaccaaatacaagcgaattgatgttactgtttttccacgcccaagtacaaatgaacgtttcaatttaaatatgcgattgttttcaaattttgttataaaatgccgtacctatcaatatgagaggcccgacatgaaatatggtctaccatctcctcaatataaacacgtgatcgtgaccggtgcagaggaacacggactgcccaccaaactacattcagtggttgcgcgaaaattttgaggacaatggctatgacgggcctgtggaattgaatctgaangcacttgagacaatg

SEQ ID NO: 90162 - DNA, 906 bp, Heterodera glycines
catcagttgaataaagaacagtggtcagagtcgttttcgtacggccttttccgtatggaatttgttcggaccgggacaaatggcgatatggatcaaggtcacagattaggacgacctgctcattgtcagttaccgtgtacaaaaatagcattcaacgtgaaatgctaattaaaaatggcaaataccggtcagtctccaaactcaaaattatttaatgcggactaaatcgatgaaaatagaatttggggcgcgcttgcccttttttaggctgaaaaagtgccgggactgaagtgtccaaatccagccgttacggtaggggtcaactccgtctggccaactccgtctcagcaatgttcaaaaagctataacttttttctttgttggccaaacttcacaatcatggtatcattcgaaagccctagatgtttagaagatatttataagctatttctcagtgattaatcagctctcaaaaaagttgtcagttgaaaaccgcaaaaaaggcagaattttcaaagttttttatttctatctttttttatagttcgaaattttctgtaatttccagtaggctaatagagcctgtgaagagctttcgaatgatatcaagattgtttgattcggtcaataacttcaagagttatattgactcaaagttggcgggacggagttggcccgttccgcgttccgccgtgttagtgtttcaaattttccaaagatttctatttttttaattttgtcattttctttcccctagactcccatcacttttccgtattcccaaattttccatttttttaaatttccccctttggctcccttcactttgccatttttttccataattttcatatttttttcattatttttctcttttagactctctccgttcccttcgcttcttct

SEQ ID NO: 90163 - DNA, 624 bp, Heterodera glycines
caatcgtcttcgcgctcttttaggccctctgatgacacggattcgcggggaagctgttcgtcacttttgatctgcttttcctattgttcttcaatcatatgtttcccttgcgccatttgtctttccatccgggtcattcagcagtatgagcgcgctgtgattttccgtcttgggaaagtgatgcgcgaggcggcagggcccggtctgatcttcattttgccatgcattgatgatttccgttgcattgatatgcgcacgacttccttcgacgttccgccgcaagaagttctgtccaaagactccgtctccgtcactgtggacgcagtgatttatttccgcgtgttcgatgccaacaaagctgtcgtcaatgttgagaatgcgacgatgtcaacacagcttttgggacagacgacgcttcgcaacattttgggcaccaaaactttgtccgaattgcttagcaaaagggaccagatcaatttcgaaatgcagcaagtgttggacaaactcaccgacgcttggggcgtaaaagttgagcgcgtcgatgtgaaggacgttcgcctgcccaaagatatgcaacgttcgatggccgcgtaagcggaggcggcgcgcgaagcgagggcaaag

SEQ ID NO: 90164 - DNA, 836 bp, Heterodera glycines
ctttagtatttttcttttgaaatcgtataatggtcgagaggcgcaaggaatcgcctaagcgtcgccgccgttcgtcaagttcttcgagttctggaagctcttccagtactggttctagctcatcaggttcatcttcgtcctcttccaccactgcttctcgttcaccttccccaaagaaacaaagagcagctgctcgtccttctgctcgtgacgatcgtactacacgtcgttctccaagaaggtcgcgttctccccatcgtgtccaaccgaaaacagagaaaagcactgtcagctctcgccgttcaccgtctccccgtcgtcgtcgtccgtcgcctcccagccgcggcccgcgtcgccgttcgcgctcgcctcgtcatgaacgcgcggctccatcaccaccaccagtgaaaagggaacgtactccggaaccaccgccacgccgactttgtgttcgaaatctaagcagaaatatcacaaaagcgcacatggaggaaatcttcgctctgtttggggctctaaagtcctgtgagttgccaatggaccgtgtgcatgtgcatttgccccggggatacggctatgtggagtatgaaaaggcggaggatgcggagaaggctctgaaacatatggacggaggtcaaattgacggactggaaattcagtgcgaaatgacttttccttttaaagggaccggcggaggtcgtggtcattcgcccgtcgggattaattctatgggcattgggatcaagcgcgagcggagccgttcccctgcgcgtcgttttgccgctcgtttgtcgcctccgcgtcgcggccgtcgctcgcgctcgccgactccgatg

SEQ ID NO: 90165 - DNA, 657 bp, Heterodera glycines
gccaagtttgagcccacaaatctgctgactaattccctactcattcactccgttccaaaatgccgaccactgtcgtgcgcacaacaaccactcggacgactggtggtggtgtacaccaccactccatcagaatggtgccgatttggtcgattaagctgatcactgcagttttggcccttctgatgctgatcctcatcttcttcctgcacacggccatttggcaatattacgtggtcactttcatcgacctcgtgctcacttgcggctttctgctcggctgggcccttccgccggtgctcaatcgtttcctcaccttttaccgatcggaccaaatttcgtattcgatcatcgccggactgaccattctctcgttgattctctgcgccgcttatttgattcacaacgattactacaaacacggggacaactacaaaatcatggtcggcgtcaccatttgtatgaccgtggagaccttgatgtgttgtgtgttgctttcgtggatatgtttcggtaattacacaatcgtcgaaacacgctaaacgacctaaggacaaaaagagaaaatgttctgaaaattttccaaagccccgtgcactttatgaaccaaactttttatcataactaggcggggaaagccgccttcgcccaatccacgga

SEQ ID NO: 90166 - DNA, 772 bp, Heterodera glycines
caccgccggagcccaaccgcagcaagtggtacaacaacaccacaccaaacagcagcagcagcggttgtttcaacagcaacagcaaatcagaggcaaacaaaaataaaataaggaggagaagtccacgccaattggctcgactgggcaaaatcggcctgttttccattttttaccaaatgtccatgtaatttgagtttgatccgtaagtttagtgctgggccatcaagtgatgaacaataacgatatgcagctgctcatgaatcggttcaaggaggccagtcaacgggggagcaacgacgaggtggaaagatttttctcggacttgcgcaagacgccccacatgttcaacgcgtttttgaagctgaccaaaaaacagggcgtctgtatatcaggcgatccgtttcctcatcaacatcaaccgcaaggaggtgctgcaacacaaccgcagcaacagcactttgtgcagccgcagtcgtccttctaccagccgaaccaaccgcagcagaacggtggcaacattccatcgtcacagtttggcgggcccttccaacagcaaatgccgtcccacggcgccggaacggcgcaatggatgcaacccccgaaccaatcgcagcaacagtccgccgcctcccaacggaattcgtcctgacaaatgagcaataactgtttgatggatgaagcaaataaatgttttggcggatgtccaacgacgaaatgatctgattgtgagcagctgatttagttttgtttttttgtgtttcgaattatccca

SEQ ID NO: 90167 - DNA, 883 bp, Heterodera glycines
attttgttcagtttagttggagatgaagcgagttacggctgatcaaaataaacaatcaaaatggcagtgatcagcgtaaatttgaattagcgcgaatttcatttttttcatacgtattatatatatgttatataggttttgagtttcgtttcaaaaaacaaaatctcccggccgaagtgaaaatgacaaatgtactcaattctccgatgctcgaagggattaaggacagcggacgacattttgtatcggggggaattgcaggtatggccgaggtttgtttcgcacatcctttcgactgtatgaaaacgcgattgcaaatcggccaattccatggcattctcgattgtgcgcgccgtacgctgcttaatgaaggcccatcaggtttttacaaaggccttttgccaccgcttgtcatcgaaacgccaaaacgtgcccttaaattcatggcttttgaccgctattggcgtgttctccgttcggatgcgcttcccacttggctggtgattgaatcattattccatgtccggactgttcaccggtctcactgaagctgtgctcgtttgtcccttcgaagtggtcaaagtgcgactccaatcggagctgaacacgcccttctttcaacaaaaaagttcagctaccgtcgcccgtgaaattgttcattcgaatggttggggcactgagggcctttaccgtggcattggtgctaacctttggaggcacggcgtgtggaactcgtgttacttcggaatttaccataatttgaggcttttcctttgctccatcccttcaaaaaattctcagtcctccgccgatcgtttggaaacggccagcttgaccatgcgtcttacgatcgcctcactctccgcaattgtggccaatttgg

SEQ ID NO: 90168 - DNA, 603 bp, Heterodera glycines
ctgaaacgcccggaccgcctggacccagcactgaaacaccaggacccgaatcaagcacatcaacaccatctgagggaccaggaactccgagcactgaaacacccggaccgcctggacccagcactgagacacccggaccgcctggacccagcactgaaacacccggaccgcctggacccagcactgaaacacctggaccgcctggacccagcactgaaacgcccggaccgcctggacccagcactgaaacacctggaccgcctggacccagcactgaaacaccaggacccgaatcaagcacatcaacaccatctgagggaccaggaactccgagcactgagacacccggacccagcactgaagcgcctggacccagcactgagacacccggaccgcctggacccagcactgaaacacccggaccgccttgacccagcactgaaacacccggacccgaatcaagcacatcaacaccatctgagggaccaggaactccgagcactgaaacaccaggaccgcctggacccagcactgaaacacccggaccgcctggacccagcactgaaacacccggacccgaatcaagcacatcaacaccatctg

SEQ ID NO: 90169 - DNA, 593 bp, Heterodera glycines
tttgccaagacgtattaccaaggaaacgcaacgtctgctgcaggatcctgtccccggtatttcagcagttcctgatgaggccaatgcacggtactttcatgtgataatcgcgggtccggacgagtcgccatttgccgggggcgtgtttaagttggaattgtttctgccggaggagtatccaatggctgcaccgaaagttcgttttatgacaaagatttatcatccaaacattgacaaacttgggcgaatttgtcttgacatactcaaagataaatggtcaccagctttgcaaattcgcaccgttcttctctccattcaggcgcttctgtctgctccgaacccggacgacccgttggcaactgatgtggcagaacagtggaaaaacagcgaaacagaagcgattcaaactgcaaaacagtggacccgattgtatgcgcatgcctgattactgtgtgagttggtgaggacttggcttggctggcgctagaagggcggaggaacatcttttttttgtttttgtgaattaattcgtggatatgtgaagacgacgacggcgacactttctttcccactctttttcctccccctttttt

SEQ ID NO: 90170 - DNA, 330 bp, Heterodera glycines
  unsure (1)..(330): unsure at all n locations
aaaaggccagcgcagagttgactttgataattgaagacaaaaagacgactttggacgagaaggtgaagcggacggaggagctgacagccaaaatgtcggacaacacgaagaaggagctgaatctgaacaacagtgccgacgtcgtcgccttcgtcnaagnttcgtactccgccgtcgccgtgccgngcggtggccacggagggcaaagcatgatcaatcagtctgatcggaggattcggcattgttgtgtgatgaaatgtagccaataatgaaattcattgattaaattaattttcgttttaaaaaaaaaaaaaaaaaaaaaaaaaaaaa

SEQ ID NO: 90171 - DNA, 687 bp, Heterodera glycines
atttcaatggcatcgaagtcgccccaaaatacgctgccctcctccccaaatcacatctgccatcaaaataagcagctcaataacaatttgaaaagggtggggaatggcgcggcgcttggcacttttcactcggagagattttcgtcgttggaaagagagaagcaaagagaaaagaattccggagaaagcgatggaccaaaagcgaaacgaatgaccgaattttcaacggaggaggaaaagccggagaagaagcgggacggagaagacaccagtgaaaagtacaagggaagcagtgaccaacagcagcagcagcagcagcagtcgatggggtccaacggcacattaaaccgaagtttgtcgtcgcccgaactgctccaacttccccggttcggcttccatttgctcgtaactccgtccaccgcgtcgccctccccgctgcctaccaatgaacttcttcagccattgctaatcaccagcaccgcactgtccaattcgctgctttttcctcccaaatcgtccttttccgcattgtcctcctcgtcgtcgctgcaaagtttgaaagaacagcaccaagaagaacacgaacagcaaattctgagaccaaaaatgcagctgaacggctcttccatcctttccattgatatcggacgattatctcaaaagaatgcctccgccgttcattgcgcg

SEQ ID NO: 90172 - DNA, 1065 bp, Heterodera glycines
tgcccttccccctttccctcttcgtccctctctctctccccctctccctctcaccctttcacccccttccctcacgcccctccttcctctcgccttctccccttctccggaacctcccccaaatcccttctcatctctcttcctcttctttgcacgctcactcaaataagctgggtggattgatatgcaacatgtaaacactcgaattattgggcacccaacaatcggtccctttgtcctatcatttatttcctttacttttaatcatttttaatattctttcgtaatgttctggggataacatccccactaatcctcatttttcgcttttttggccttccaatgaaaaaaaagccgaaaaattgaattaatttttaaaaatgtaaaaaataagaattttaaaccagaaatttataaactaacatcaatagtataagcaataaactgaaaaatgtcttctcaacaaccgaaattgtattattttgctggggttcgaggccgaggcgaatacattcgccaaattttaaaattcgccaaagtgccatttgaggaagtgagcataaacattgaagactggcccaaatataaagaagaaatgccccttggccaaattcccgttttggaggttaacggcgttaagttctcccaatccctggccatttcccgttaccttggagaaacttacggactatcgttcaatgatccgctggaacgtgctcttctcaatatgatcgtcgatcaaatttcagacactcagaacagcggtgccttcaaagaatggccaatggtccgtttggacttagtgccgtgcggagataaggcggcttttttccgagaaaagatacgcccgcagttggacggatgcgcgagtttagtcgagaaatatttggtggagaaaggcgacggcattttgcttggcaaagacaaaatcacttgggccgatatttatgccgctgaatttttcgcaaaatgcattcattttggagaaaaagactgcctcgaggcgtaccctcaaattaaatcactgatcgctcgcgttcaaaatgagcccatcatcaaggagca

SEQ ID NO: 90173 - DNA, 613 bp, Heterodera glycines
  unsure (1)..(613): unsure at all n locations
cttacgttggtcctcatcttctgttaatgctttctagaaggtctctcccaatttttttttttcggcgttcccgcgcctcaaattttcctgttttttgctattcgactgaaaatggcgcacaaatgttggagagtgacacatcgggtgagcaactccaattgttgcgcaccattgtcgattcgcatctgacaaatggacagacatttttcgtgccgtggtccgataagcgggctttgcagtcgatacttttgccattcaaagagctggccaatcagggcgttgctttggaatttatcatcgacgcttgttccaaaaagtgtccgccctttttatggcgttgacaaaaaatgggcgagaaacgaccaaaaagttgggtgtatttgtcgactgtatggaaatgacttatgaagacgccatgcgattttatgcgaaatgggcgagcggactcgaagaagtgtcggcagattgtgttcagcaacggctgagcattttccttggccgcggcgttcgggcgggtgcccaaatgcgaagtgttgtgatgcgatgtccggagatacttttcatgggggttcctcancaaatggacatgttttgggagaatattttggatttc

SEQ ID NO: 90174 - DNA, 825 bp, Heterodera glycines
cattctcggtctcttccccctcaagattcttgactacttcttcttcttatgtaaacaaacaaaataccaaacatccccccaattcgattcgccatttttcttttctttcttttctcatttacattgcgtttccgcaaaatgtcaaatttgaattttgaagacaatttgcaacgcgtacaagtggaaattcaatggaagcaatgcctttataatccgatcgtcgctccgtttgccgacgtcggctcttacccaattttcactgacgaattcaaagggacgcgcaagtgcactttggatgtgtacgttcagggaaacttagagcatttggacgacaaagttgttttcctcaccgttcatgacgttggcaagacgtatttgtcttgcgtggaccttgccaacagtccgacgctctctccgctggtcggtcagcgtgccgttttcctccacgtttctgtgccagggcaagcgcccggcgctgaaaattttgtcggagacttcccctccatggaacaattgggggacggactttcacaagtgatggagcagttcaatctgagcaaatgcattgccattggggagagcgcgggtgccgacatcgtttgtcgttttgcgatgagcttcccccaactcgtcgtcggtgccgttttggtccattgcatttcgacaacccacggaatcattgccagcatcaaagagcttttcaccaatttgctccttaatgatggtgaaatgactcacagcgcgtggaattggcttttggtccacaaatttggaaatcatgaaatggacaaagaaaagcgcaattacgtcgatgccatcaaagcg

SEQ ID NO: 90175 - DNA, 647 bp, Heterodera glycines
ttaagatgttgagtcggagtcctgaaatggaagaagaacgtttgcccattgtttcgatggtaattgtcgcggacaaaagtcgtgcgccggccaatttcattacgctaacgaaaacttacgacgacggaagtgacgcagatttatggaaggatgggttcggtttcgggttgttcaaccgttccgttcgttatatcgctgtaagccgacacatcgccgaaacgccgcccagcggtttggaagtgttgactgacgtggccgtcatttcggacaaagaagcagttccgtccagcttcgtctgcttggacttcaccgttgacaccaaagaacgcgccctgaagaagaaatatttgtgcgcccgcttcactcctcggactgatgcaattgacgcggtgaccaatttaattgttttggcgcggtcgcggaggccccccaaagggtacactttggccggtgacattgacggcatggacatttggttccgagtgtccataatccccgaaagttatggacgacttacgcacagccaatccacggaattacaacattttttcaccggcgcttctccaaaaggagtgggaatttacccgaacattgcccctccgttgggtaccaccgcacagaatcgacattcgaccactgacctcgac

SEQ ID NO: 90176 - DNA, 528 bp, Heterodera glycines
gtcactaattggccctcgggcgttaaacgacgactgacagagtaattaaatttttccgacgccaaaacaatggcagaactcatcaccaaattgtgtacgacaaaactggccattttgaaatggcttcaaatgctttgtgccgtcatcaccgtcctttttctgattgacggtcagcgccagtcgtggttctacactttggtttttgtcgtttccattgtgttcggcctcatctcgttgctcactctgatcgccaactttttcctacactcgcgcaatcagtcggtccctctgcccgcctttgaaattggcttcaatgcgttggctgcctttgtctgtttggcatttgccgttttgctcaccatcgattcagtccgaatgttcggcgacgacttcagccaccaccgctttttgccaccagcgaacattggcaaggacgggtggcgcaatcggactttggtggtggcgattgtccaaatggttgacgccatttgctacggtctttcgctgcacagagtgcggcaacgaatg

SEQ ID NO: 90177 - DNA, 694 bp, Heterodera glycines
ctccgttaataatttttggctaaaaatggtgaatattttggccgatttggtcgccttgggcgacgttgaaaagcgcgctttggactttttgccaagggcagcgcgcggctattacgaaagcggagccgacgatgagcagacgcttcgggaaaaccgcgaggcattcagaaattttctgatccgtccctttgccctgagagatgtgtcccaattggacccttccgtcaccgttcgcctttccccctcaacggccaacccgaagtgtcgtccgttcgctcgcacttttgcctgcccaattggcatcgcgccatcggcattccaccgaatggcgcacgacgagggcgaaatagcgacagtcaaggctgctggcgagacgggcactctgatgatttgcagcactttgtccaccgttccgttggagaaagtggcagaagcggcgcccgaggggagcactttgtggtttcagctgtacatttacaaagaccggacattgactgagaaaatcgtccgaagggccgaaaaggccggctttgccgctttggtgctcaccgtcgacgcgccactgttcggacggcgaagggcggacgagcgcaacgccttccaattgccgggccatttgaatattgccaacttcgcctctcacatggaacagtcgaccctttccggcgccgaagtcggctcctccggcctttcc

SEQ ID NO: 90178 - DNA, 633 bp, Heterodera glycines
cccattcatccgttgacaaagggataatgctaagcggcgtaaaaatgcgaaaattgccgacaaaccgagaaaagggtggcaatttcgtgctgagggcggaagtgttggaggcggcgataaaagaggacaaagccaacggactgacccctttcattttggtggtcaccgtcggcacgactaacacttgcgcggtggaatcgtgccgcgagttggggccgatatgcaacagagagggcatttggatgcacgtcgacgccgcttatgcaggcagttttttcatttgcgacgaattccgccatttgtcggacggtgttgaattggcagattcgttcaatttcaacgctcacaaagcattgatgatcaattttgattgttctccgatgtggtttaaaaacggagacgaagcaatcgcatttttcaacgtcgatccggtttaccttaagcacgaacatcaaagggatgcgtacgattttcggcatctccaagttgcgcttggccgtcgcttcagggcactgaaaatttggtttgtgtttcgtgcgattggcattcagcgaattcaggactttttgagaatgcaaaacaaatttggcaaattgttcgccgatcttttgctcggagacgaccgttttgagc

SEQ ID NO: 90179 - DNA, 707 bp, Heterodera glycines
tgagctttttcattcgttttgctaatgggtcctgctgctttgctgcttctcctcccctccctccttctgctttttctgctcatccgtgctcttcttgagcttatccccgtctcgcggttggataagcgttctgtgctaatcaccggctgcgattcgggctttggcttcgacttggcattgcgatgtttgggtgccgggatgcgcgtttttgccggctgtttgactcagacaggaattcagtctctaaagaaaagtgcccaagaaaagggaattgccgtggaacttttggaaccaattgaattggacgtcacaagtgacgaatctgtggcaaaggcattggaattcgtggaacgaaaattaggaccgggaaaagggcttcacgctttggtcaacaacgcgggaatcagtggcaacgagagttgggacgattggctgattccaaaggactacgaagatgttttccaggtgaacactctcggcacaattcgcgtcactcacgcattcaaacgactcgtaaagcgcgagagggagtcccgaattgtgattatggccagctcctgcggccgcgtggcactgccaacgctcggcccttacagtgtgtccaaattccctgttgaggcgtaccccgacataattcgcactgaactgattcttttcggtgtcaaagtggcagtgatcgaacccggctttttccgcactccgatcac

SEQ ID NO: 90180 - DNA, 598 bp, Heterodera glycines
attgctgccgtcctaaatctcctattatctccaatgttcggtcgcttcgtttcatcccttttctcctccacggtttcttccgtttttcgccccgaacgattcctgcaaaaattttccccaaatttctgctgtcattcgaactttctccgacaattttcgtttacagcccaaaatcattatgatgacattttaatgcgggacattcgcagaggttctcctccaaagcatgcgcgaaaaccacacgacagaaagccaatcaaaggaaccgcttttaggaaaggcattgttataaaagttgtcgtgaaacacccaaaaaagcctaattctggcaatcgacaatgcgtgttggtgcgtttatccaccggaaggcaatgcatcgcttacattcctggggagggacacaatttacaggagcacagccaaatttacgtgcgcggtggtcgcagaagggatttgatcggagtcagagcaaatgtcatgaggggaaagctcgactgtgcggcggtcaaaaagaaataaatccgaaaacgatcaatgcttttataattcggtaaaatattatgatagagtggtcaaaggacattaaacattggtaaaa

SEQ ID NO: 90181 - DNA, 499 bp, Heterodera glycines
  unsure (1)..(499): unsure at all n locations
cttgtgttgaaggcaagtaacaaaaatatcaacaccaaacagcagcagagtaaggattcgacgtttcagaaatggaccaaacacccgttgaagatcggtctgttgagctatgttccgatgacgacgaaacaaagcgaaaagtcgaaaccgattctgaggattactttatggtggaaaaacaattgagagaacgtcgtgttggaatacaaaatttctcttcgatggttttgtttgaccggaaagcgaagcagcgacaaaaaatggcagaaaagcggaggaaagagcgaaacaatgcgaaattgatactctatggtcgtccccgcaaaacgaaacaatgctcttcagttttttcaaaggaagactttgcgcaaattggaaagaaagatggcagttcagcaaacgaacgcattaaacgaattcgataaaatacttctttttgtttcgtttttattttaataaattacttttcncattgnnnngaaagaaaaaaaaaaaaaaa

SEQ ID NO: 90182 - DNA, 622 bp, Heterodera glycines
gtccaattaagaagctttagcgcagtcggtcgcttcgtcaaaacacacaaattcaaaaatggcgcgcaaaagccgccaagaacagcagcgaagaagccaatctcgggaacagcaagagaacattccgccatgttgtgcgcagatgcgtcacgagaacgagctgttgaggcgcgcgttacgcaaggaacgcgagcgccgtatgttcactaccaacgcgtacagacagctgttggagcagttcaaccatttggtggacttccggcgcgtggttgtggccaacggagggggcgaacggtcggaacaactgcaacagtgccagtcatcaccgtcgagcgtcaatggtgcgtctgtcccgttgtcatcagaagcagaaacggcattggccatggcaccgacagctacggcagcggccgtgacaccgtcaataacggcaccggtggtgaacaatcaacacaaacaaattataacggaacagccggcggcactgaaccaacatcatcacccaaattggtattttgtggcattagaacgagacgccaacaacacaagaggcaacagcagtaacaatgactccgccgaactgctccgtgacgagcgagtgtggcgaatgtttgctcgcagc

SEQ ID NO: 90183 - DNA, 699 bp, Heterodera glycines
cggcacgagggttatcaccaggttcttatacaaaccaaatgttgctcccttatttttcataacacttccatttgtaagtcaaattttatcttaaatacttagatttgattcgttaattacctaattcatattttctccatgacaaaaacttgttaaatgcttgagacaccacgaacaattcccgggtttcattcggcggggccgcgtcgactcagtttggccacgtctcactacagacagtttggaattgtcagttctccgttggcgacttcgtctccttctccgatgcttttctcgtctgctgctgctgccactctcccggatcgcttgccgttacgccgtccaaaaaagccaccgcaaaagttgcctcttttaatgccgcaattgcacctgcagtttccttcgagtcgaacgaacacaattcgcagcaccgatttgtcttccatttacacggtgcagccggaggaggcagcgttggacgagcgaaatgcacatttgcttcaatgtatccaaatgcaacaagaactcatcaatcaggccaccgctgcaattgcgctttgtcataaaaagttcaggttcagtgggactcttcaagagctcagcgcacagcgacttcttttggtttctcaggagcgccttgcgttgctcaaccgtcaaatggaccaattgaacgaacagcgaattttgaccaatttgtcc

SEQ ID NO: 90184 - DNA, 1165 bp, Heterodera glycines
tccatttctaaatacaaaatcatttctcctctttgatcagctgattccttccaaatgccttctgagtacggcattgaaaccgactcagtgactcttcagcgttttgtgctaaacgaacagaagaaattcccggatgcaaccggcgacctgaccactcttctgaccagtctgttgaccgctgtcaaagcgatctcttcggctgtccgcaaggcgggattggcacaattgtacggagttgcgggaaatgtaaatgtgcaaggggaagacgtgaagaaattggatgtgctgagcaacgaactgatgattaacatgttgaagtcgtcatacaccgtttccactttggtttctgaagagaacgaacaggtcattgaggtggaagtgagcggcacccaaggcaaatacatcgtcacgttcgacccgctggacgggtcatcgaacatcgactgtttggtgtccatcggaaccatcttcggcatcttcagaaaggcgagcaacacttccaccaaggaggaggacactctgcagacaggacggaaaatggtagctgcggggtacgcattgtacgggtcggccactatggtggtgctgtcgaccccgggccgtgtcgatgggttcactttggacccgagcattggcgaatttattctcacaaatccggcgatgcgagtgccgaagaagggcaaaatttacagtataaatgagggatatgccaagaaatggtccaaagggatcaccgaatacatccgatcgcgcaaattccccgaagagggcaaatcggcgtacggacagcgctatgtcgggtcgatggtagccgatgttcaccgcactttgttgtacggcggcattttcatgtatcccgcgaccacagatgcgccaaatgggaaacttcgcctcctttacgaatgcaatccgatggcatttgtcatggaaaacgccggggggaaggcccactcggggaaatgcccgattttggacatacagccgaagtccatccaccaaagagcgcccatctttttgggctcgaaggaagacgtggaggaattgctggaatacatccgaaaacacgaccaataagaaaatgagacggaacgaaagacaaccaatgaacaatcgagcaaaatgataattatctataacaattacatggaattggcagggcatttaa

SEQ ID NO: 90185 - DNA, 1024 bp, Heterodera glycines
taaagataaaatacttgcgacaatattctttattctgttgtcttcatcaacaaaattgacacaaaaagggacataatggccactgcttgcaagttggaaatgagcttggacgagatcatcaaagcaaataagagcaagaccaaccaggcttcaattaatgggcgaaagactcaaatgactggaaagcgattgattcgcggcaatattgcgaagggaaagccattcatccgaaagcaaatcaatgggcagaatcagaccaagaagtttggacttaaacgcgttggaattaatgttcgccgtggtcgccctttgagaaagtctaaccgtgttgttgtcatgagaaaaaatttcgctgcgaagaacagagccgtaatttccgctacaaagaatttagtgaataaactcgtcaagaaagctcttaacaaatcgaatgtttcgccccgtggcaagcgttttatcgctaattctgcccgtcgtgtccgcacaattattctcaacaaagtcagtccccgttctcgggtgatcactcgtcaacgccagcgaattgttgccgtacaaccgcaacagcagcccgtttttgttcaacgagttgtccgtgggcgtggtccaattcgttatgcgtccgatgctgcgttagttcctcagacgatgaaaatggttccgaagcgacgattccgcatcaatcctatgcaacaacagcaacctgtcctacttgtacagaatcaatcaccgaaacgccgattgccgtccttttcatcgatgagtgttcgtcaacacgtcaatgcattgcgtcgtgcgactactgtgcaacaactccagactcagtttgttaaccagcagctaccgattcgtcagcagtttcgagggcggcaggccatcactacccccgttgtgccaaatcgcagtcgaggcaaacaacaattcattcttgaccaacccgtgcaagcaggacctcaatttatgaaattttctccccgccgtcagcgccggcagactgcctctaccaatacgtcatcgttcaaca

SEQ ID NO: 90186 - DNA, 992 bp, Heterodera glycines
gagaaaaattttcaaatctttccattttttgtaattaattttttatgacttaataactccgtgtttgttgttgttgtataaattaattagagcacttatgcagaatggaggcagattttcacgctccttggttttacgggtcactttcccgcgagaaaactgagaagtgcttacagtcatgcgcagatgggactttcctgatcagaaattcaacaaactatccgggcgatttcacactttgcgttgcttgcaatttgcgggtcgagcattacaggatttacatggtgaatgaccactttacgtgtgacaaagaggagctgttcgacacgctcactcagctcgtatcgcactacaaaagggatgccgacggactgtgccatcgtttggtgtgcccttacatttccgaggaatgccaaaggcagcgaactcacatcgatttggtgttagttgaggagcgcaaaaaggagttcgagcaagcggcgctgttactctccgttgaccatcttcggcttggcactgtcattggacacggcgaattcggagacgttctttcgggcacataccgaggcagaaaagttgcagtgaaaacgctgaagaacggaatggtccaggatttgctggccgaagcgcgttttatgattggccttcaccatgaaaaattggtctttttggtcggcgttgtcattgaggacccgcgcgaaagtgaagtgtacatgctgaccgagttcatggccaatggcaatttggtggattttctccgttcccgcggccgtcaccacgtggaccgaccgcgacttgttcaatttgcgcaggacgtggcggaaggaatggcatttttggagtcgcgcaattttgtccacagagatttggccgcccgcaatgtgctgttggacgaccgattgggggcccacatcggggaccttcggactccctccattggccaatcagcccgcaaaaaaagtcgcggaaagggaaagtttcccgatcaatgg

SEQ ID NO: 90187 - DNA, 393 bp, Heterodera glycines
ttttgatgtaaaatttgtctccattagcattgctttcattcattttagtttctacaaaaatcaaagcacaaatcaagggcactgtgagagatggcaaagtctaagaaccacaccagtcataatcaaaacagaaaggaccaccgaaacggcattcacaagcctaaaaaggagcgttacatgtcgatgaagggagtggacccgaaattcttgcgcaatttgcgttttgccaagaaacacaacaagcggaatgtgaaagcgtcgaccgaatctgccaagtaaacggacgaagaaatggcgctggagggattcgataggctgatttgagaccaattgtcagacttttgttattattttctttcttatttttgttgagtaaaaagggcacgggaaaaa

SEQ ID NO: 90188 - DNA, 266 bp, Heterodera glycines
ctggggttgtcaatccgaacgcggttggggctgtcaatccgaacgcggctggggctgtcaatccgaacggtgccgcgttcgatgataccctaagcctttatggggaagaacgccttgatcgccattaggtgtggttctctacaaagaaagaggagagtggctcgaagtttatgctttcaatgcaagaccaatgaatgttaaggaactcaacccgtgttagctctgtctcatattttgcgtccgttaaatgaatgtacgaaaatgta

SEQ ID NO: 90189 - DNA, 873 bp, Heterodera glycines
cctggacccagcactgaaacacctggaccgcctggacccagcactcaaacaccaggacccgaatcaagcacatcaacaccatctgagggaccaggaactccgagcactgagacacccggacccagcactgaagcgcctggaccgcctggacccagcactgaaacgcccggaccgtctggacccagcactgaaacgcccggaccgtctggacccagcactgaaacgcctggaccgcctggacccagcactgccggaacttcctctacaaagacctacactgttccaacaactccaaaaccacctccgtgttgttatggctgtgactaccctgtcgactgccacacttctgggaaggattgcgactattccccgcttcagccgccttatcaaagcgacccttacccggttgggaagtgcgtcttcaaaaatgtcacttgcgccgctccaaacaccggcaaagtgctcttcatgaagctcaacaatgaccccaactccgtcgtttcgtcttccgtctcaccgttcaacaaagtcacagtcattttgcagtgcacctgcaaaccgtacttcgcaccttattgggtccaagtgggcgttgacggcaacccggccaagcaggtcaacgtcaaatcggcaacctgcggacgtcactgttactagaaaatgatgtccactcattgtccaacaaaagaattaagcaaaaaggaaattaattagaaaatcaattagagaaaaatttccttgcgcattttttaaattgtaattttctttattaataaatatgtagtagaaaaaaaaaaaaaaaatagaagaatatcatattattcgatataataattttttgaaaaaaaaaaaaaaaagaaaaaaaaaaaaaaa

SEQ ID NO: 90190 - DNA, 660 bp, Heterodera glycines
aattttcactgcttttgcatacattcattctcgcgcattacaaaatgtcgattatatcaaataaaccgatgaatatctcgtttagtaattcctgtagtccggattgcccgggcctcacgtggtgctcctgacatccctaacagtgagaacatagacagagatgcggttgctggtttagtaaaaagtgttgctgagggttggtgttgtcatctggcggagaagaacacgttggcactgtttattccatccaaacttttctcatctactttatcgcgcgagaattttgtcgatctgttggagtactgtgaggagcacttgaaggtccgtcgcattttggcttgcttcaacaagtcggacatcaatccatgccagggcattccacgcgccctccgttgcattggcttcaccctcctcccgcccgaacgttaccccgctggcattgacaagaacaccatttttgcgatggtttacaaaatctaagcgcagtcgacgtccttctcccccccccctttctctatctttgtaaaagatcgacacaattttaaacgagttgtattttctatccatgtattcctacagaaaatagcgtttttcatccattcacagtgatgtcaaataaaagtgtgaccaacaaaaaaaaaaaaaaaaaaaaaaaaaaaa

SEQ ID NO: 90191 - DNA, 629 bp, Heterodera glycines
  unsure (1)..(629): unsure at all n locations
cttcgtcctcctcccccttccccaactgtcgctgcttcctaattttgttttccgtctgctgctgttgctctttgttctgtcccttctccaatggcgaaaatgtttactgcacatactaccgggattccaacgagatcacttgcggtacggtgacttgtgagacgcattcgccgttcactcccgacaattccgagcttgacggtctcgacacgaaattgccgaggggatggtaccgtattgggacactgtcaatcagacacgacagggcgtagttcaacctgtacaggcgacgggccactggactcggctattgggacttttacacacagattccggagcggaattgcatcggtcaattcggcttgcacgcgggtgaaaacattgccggatctgtggcagtgaaagacaaacgatgttttgatcgcctcgtcgtgcaaattggagcgcaaatncgacccaccgaaaagttcgatgttctccaatgccgaaagcgtgtgttcaactcgtgttggcttggctcgcacactttgcacgaccaacacacttatctaaccaacctccaatcatattaaccaaagaatatacgaataacaaacaataataacaactaaattattaacaattaaaat

SEQ ID NO: 90192 - DNA, 657 bp, Heterodera glycines
gagattcttcagatgcatttttgtgctagacagctgttcattccaaatgtctcggccattcccttggccaatgcctttcgttccgtccatcgaatttcattttgccttccttcccttttcggcaaaactcccaaccgaccaacacacttcctgagtggcatgccactgtcgtctgattcgaagaatgtccggctcgttgaagagtctgcccaacccatggaatggacggcggacgaattggcactgaaagagaaagcgacagccgaaaatgcatggaccccaatttaccgttaccgtggctttgtcggcgtttggttcattttgcgcttcaacttggtgttcctcatcttttctctggcttctcttccgctgtccatttctcagcatattcccatctccccctccattggcctcatccttttttcgtccctcgtttttgccggcatcaaaaaatatttcacgcgaattgtcgccgtcatttccgtagacaccgcctcccggtccatctatcgcattggctacccctccgtttttgccacacggcgcagtcgcttcgcccgctttttggacgttcagccgttgtccaccaattcggacagtgtgcgaggcgttgcacgccttcgctttaccgatggggcgaaagatgactttttgctg

SEQ ID NO: 90193 - DNA, 581 bp, Heterodera glycines
tgcccttgttgtgctcggcgacaagtgccgcaaccagcttgcccgcgagtaccgcgacgccatcaagctcacctactcgcagctcggcaagacggtcccctcgttcctcgaggcgtccatcattgccgacgagattctcgccatcaaggacttgcccgccaaccccaagatcaacgtcgtctacaacaagttcttgtcggtgattgcctacgagcccacccacatgcacaccatctcgtacgccgacttgaaggccgcgcccaagctcgccacctacgagatggaaggcgacattttgtccaacttgcaccagttcatgtttgccacgtcggtccactgggccatgaacgagggccacgctgccgagtttgccgcccgtcggtccgccatggataacgccaccaagaacgccggcgagatggtcgatcggttgaccctcttgtacaaccgtcagcgtcaggcttccattaccaacgatctcgtggatatcattaccggtgcttcggccttgtaagttgttgtgtgtgctgtttggcgagtttgcgtgcgcgagttggcggggcgagtgtgagttggaaatg

SEQ ID NO: 90194 - DNA, 873 bp, Heterodera glycines
aaggaaaagcttttgttcctgcgccgaatactgtggtggcatatccacccacattcttataaatacagagaagaatccctttggcgactgaccatccatccgctggacatgaactcgttcttcgcgcggtccatcccatcctcggctcgtcataacttctgaagagcggaaagggaggggaccgagcacagtcgtcgttcatccgcgcccatctcccgccacgacgccatttccgaacgacgactttgtcgacaaaagctcatcggcggagcagcgccataaaaatttgcgagttgcccccagcactttcacttgccatccaataaaaacgagattgaagccgtgccgaggcctttcctccccaagtgttttcaaagcaaccgcagcgccttcaccgtcttcacaactcttctgtttccgagtcggccaaccaatgagtgacgagacaattttaaacgcaacggacagcgattggcccttcagcaaaagcgaaactcggaactcaacggttgctgtgctgccccaaaaagtgttggtgacgggaggctgcggttttatcggctccaacttcatcaactatattttcgagaagtggcccaaagcaagcttcgtcaatttggacaaactcgccttcggcgcttctcccgaccatatcattgacgacattagcttctctccacgatatgtgttcgtccacggttctttgttggacgaaaatttggtgaaaacggtgctcaacgaacaccgaatagacacggtcatccatttcgctgccattacacacgtggacgaatcgtacaccgatcgcattggcacaattcaggagaatgtgattgccacaacaacactgctcgaggcgattaatttctatgg

SEQ ID NO: 90195 - DNA, 575 bp, Heterodera glycines
gacaaacggacccgtttttctccaatcgactttccctgcccaataaaatgcatctttttcctcttttgctagtgacattcgcagttgctggcttcctctcattggcttctggccaacaaaatgccaattccacggatggcccagcagacgacgatgatgaagcggcgcccgttgacgcggaagaacagttcaggcagttgttccaggcagtagacgcggacgacaacgggtcaatcagcggggcggaggcattgcaattttggcagaacaaatcgaagacgatggacccagcggagttgaaaaagaagttggatacgttcaacgccaaaacattggacgaggcggtcgaacggggtttcaaaaaggtggacaaaaatggagacagtgcggtgagcccggaagaactcaaagcgtatattcaaagctgagaaaacagaggccagaggagaagtcagaaaggcgaagcaacgatcagacgaattgaattcgtttaattcatagacggactttcgtttcaccccttattcagctaattaatttttaattattacattgatttgtataaattgtccaaa

SEQ ID NO: 90196 - DNA, 409 bp, Heterodera glycines
gtcgtctaagataaccaaaaatgaccaagggtacccccagtttcggtaagcgtcacaccaaggcgcacacgctctgcaagcgttgcggtcgccgcgccttccacaaccaaaagaagacgtgcgcccagtgcggctacccctcggccaagctccgctccttcaactggtccgagaaggccaagcgccgcaagaccacgggcactggccgcatgcgccacctcaagaacgtcaaccgtcgtttcggcaacggtttccgctctggcacccccaaggccgcctctgcctaaagcaaccacaactctgtgattttcaaacatgtgtatttgtgtcggtttgggttgatgcaagtttcccgcgccgtcatttcgtgtcgatacatttcccacgtgaatggatcaaaaaaaaaaaa

SEQ ID NO: 90197 - DNA, 636 bp, Heterodera glycines
tgtccatttaagcctcatccgatgggtcccttctctttgtttccgttcgtctccctttttctctctgccgtccttttcgttccgtccgccgtttccgaattggtctctcttacggtgggtgtcagtgccttcagtgcgttgggccttttcatcggcgattttggcggactttacacactcaccaaatgcaaattttacgaatgctgtgatgcgccgtggataaaccgggacatcgcaatgagactcgagcccgacgtggatgagcgtctgtacgggcaacacattgcacagaatacggtggtcagggcgctgaaggcccatttggccaagtcgaacccaaacaaagcattggtgatgtcctttcacggatggaccgggtcgggcaaaaattacttggccaaaatgatcgccaaagcgatttacaagaaggaaatgcgcagccaattcgtccaccaattcgtggccactcatcacttcccaaatgcagacgaagtcgacaaatacaaaggccaacttcgtacttggatacggacaaatttgacgaattgcgaacggtcgcttttcatattcgacgaaatggacaaaatgccaatgcaagtgttggatgcaattgtgccgttcattgacttttacgac

SEQ ID NO: 90198 - DNA, 433 bp, Heterodera glycines
ccaaacaaaaaacttaaaacttcgtttccataaaatcaaaaaatgaaaagccttactcaaattacctcaattattctcccaatgtgttttttgcttctgcttttatcaccaccaaacgcaatcggccaaaatttgtgccaatgggaaggcaaatgtgtggactatggttgcccaactgcttgcacttcagagtgtgtgtgtgcttcgcttgagaaatttgtaaatgcatcaaacttggcgccgggaaagcaaaccgattagcatcgaagccgaaaattcaacaagaaaaagcttggaggcgggtcagaatgattgatttgtttgcaattaattacttggaataattaattaataattccatttgatgatttgaattcgaaaatgataaaaaggggaacttcaaaaaaaaaaaaaaaaaaaaaaaaaaaaaaaa

SEQ ID NO: 90199 - DNA, 751 bp, Heterodera glycines
caagtttgagctctagttaaatatgcttacgagcaaattttctgaacggattaaaagccttcaaccactttttataatttgtggctgtactgggacgggaaaaagtgatctcggcattgaattagcaaagcatttcaatggcgaagtaataaatgcggattcaatgcaaatttacaaaggtcttgacatagcgacgaacaaagtgacaacggaagaaatgcaaggcgtaactcaccatttgatgagtttttgtgatccgtgtgagtccaattacaacgtccatcactaccgcaacgccgttttgccattgatagaaaggctatgggcgaatggcaaattgccaattattgttggtggcactggttattatatggaagcagcaatttattatgacaatttggtacaaacaaacgcccaaaaatcagacgacctaagaaatgagctgttacaaaaatttcccacctgcgacttattacacgaggaactcaagagagttgacccaatatcagcaggggaagtacacaaaaatgcaaagtttaaagtgctgcgagctttggaaatattttattcaactgggcaaacaaaaagcgaacaccataaaatgcaaagggaaggacaagctgcgaattttcacttggctggccgtctccatacaaaaagcacattactcttcactttggacgccgacaaagaagtactaagccagcggttgaacagccgagttgacgacatgctcaagcggggcttaatc

SEQ ID NO: 90200 - DNA, 678 bp, Heterodera glycines
agtttgagattttagcagtatttttaatttaaataattttaaatgatgtcttcgagttcttttgagcaattatcgtgcgaaattgccgaattggagaagttacgccaacaatcacaactcccaaatgttcaaaaggctatcgatgagctaattggaagatggaaagtgaaaaaggaagaacagaaaatgaaaacggacaaagggacagcggagacactttcagccccgacagaagcaccgaaactgatcagcggaagtgtccacgttcgtccgacaaagaaactgaccacttacgcgtttgatgagagtgacaagttcgtgaagctgtactattccctgcccggtatttccgactccgtccccggcacaatttcgaccgatttccgtgaaaactctttttccattgtttgctccgacgtcaaagggattgactacgaaattcgagtgcaaggactttgtcaggctgttgagccggaaaagtgtgtggtgaagcaaaaaagcggtgaccaattgttaattatgctgaagaaggcgaaagaacgacaaaattggggatcccttctgaaattggaaaaggaagtgggcaaaagcaaggcgaaaacgatggacaaagagagcgacccgcaagaaggtctgatgaatatgatgaagcaaatgtacgacgacggagatgacgag

SEQ ID NO: 90201 - DNA, 894 bp, Heterodera glycines
agaaaatatttttttaaaacctatttctattttatactcacgatattctcatcaatgagtactaaccgaggacgaggacgtgtgtctttaccgagtggagaccattctcaaacttctgaatatgggggtcgtggacgtgggatgtattctttccaccaacaggacgtgaaagaaagttcgcaaatcgctggccgtggacgtggaactactctccaacagaagacggaacacggaggcggctacagcatgggtatgcaacaacagcaagaaatttcaccaatgcgtgggccccgagggggccgaggacacgacgtctcgggacatggcttagaccgtcaccctgttgctcctaccatgccctctccagttccctttggtggcgtttccgccgtccaaccaacttctgggcgcggacagcttccgtcgatgagccgttacggagcgtatgctgcattcaccaaacaacgtgaccaaatggaccagcagaaagctgtgctcgaagaagtcgcgactcgattggaagaacacaaaggggatgagacgagcgttgaaagtcaggctgaggaagttacgagtacgacgttgcagcgtggtctgcttcagcacgaagtgggaggaatggaggcacagcaaatggttgtgggtgagcaggcgcaatgcccatctgctgagggtgttccgcatgccttcctttgcgccgggtgtcagttccgcgcggattgtgccaacttgcttcgtgccatcggtgctcttttgaaagacttcggcagtgctgcatctgttgacggaggacgcaacaacgggactacctaaaagacataacgaatcgtcataaatatctccaccgtattttaacactgaatttgagttctagatttccatttaattttctta

SEQ ID NO: 90202 - DNA, 626 bp, Heterodera glycines
gaaattcaaaacaaaaacaataacatttaaaactctttggtgcctaaatcaccagctctaccaaaatgaccttaacgatggatgaactgagaaacaaagtccaaaatggccaaattagcaccgttgtcgttggctctgtcgatttgcacgggcgactgattgggaagcgattgacggcacggcattttgttgaaatggcgcaaaaaaaggacaaaatgtccatgtgctattatttccttgcgatgacaattgaaggccacgtggccgaagggttcgaagtcgcgcggtgggaaaacggatttggcaacggccttttgcaactcgactttggcacgctctgccgcaccccgtggatggaaaagacggcactgataatggcggatatgcatgatcaccgcgatttgcctttcttttgtgccccgaggacaattttgcgtcgtcaattgcaaaaactatccgagaagggctttcgggcgaagttcgcctccgaattggagtttcatttgttcagcgagagccaaaagagtgcgcgggaaaagcaatggcgcaatttgggcacggcacagccgcaccaccggtgcatgcatttggtgggctcatcgggggacgagccgttcatgcggaga

SEQ ID NO: 90203 - DNA, 494 bp, Heterodera glycines
gtccaattaagccgtttgaatttcggcacttttcacaatgattgcggcattttgttccacaaggacggcgggcagtcgaattgtgaagggcattgtttgctcctccgatttctcctcccattcgctgtgcggtccgccgctgatccgttcgccctttgacaatccgttgcgccgttttgaaccgcttacacccaacaaaagcgccgacggcacggccgacggtgttgcgtcattgtcagccgagcaaagtggcacgtcggcccagggcatcggtctgaaggagttcagggagacgaccacagtgcaggcgctgcgcgccttcggccaccaattggcggacgcgatgctgtacttgcggaacgccgtgcgtgccaccgcgtacatgccgttggtcagcgggcgacggaatgcagcggtgattatgacggcacaccaaagcacaacaacggagacggctgttggaagcggtggcacggcgccgccgacgacggggg

SEQ ID NO: 90204 - DNA, 577 bp, Heterodera glycines
  unsure (1)..(577): unsure at all n locations
agtaaattgaaacccaacattttcaccaaatcagcaaatgtcaacgaatgacgttaaggaagcggctgcctccactgttcttcctccgtcttcaagtcaaagcatttcaatggcttcttccgcggatgggtcaccgcttagagaggaaaacttcgtacattcattgaaatcgcaggtggacggagaaaacatcgaggaaatcattcaaagccagaaaaaagcgttggaacgttttgagaagaccaacgaaatgctggcgacgtgttcttcgctggcagaaaagcgattggatcgggcgagaaaagactttgccattggaagggaaaagatttgccgagctaaatccgacttggactcaatcttccgacggatcgcctccttcaaacaaacattggccagcaattacccggccgaatttgtcgcagcgcaaactgactcgcctcacaatcagaatagtgactgcatcaatgaaccaaacggatgactaaatgacgtaatttccgatatttaactcttttagaattattttttacgaaaataaattttctttcgggtaaaaaanaaaaaaaaaaaaaaa

SEQ ID NO: 90205 - DNA, 600 bp, Heterodera glycines
gtaaaaacctattttcgcggattccatcttttcatagcttttacatataacagaaaggcacaagttgccatttttactacgtattattttatttgttgatgaataatgtcttctcgaagaaatgaatatctcgatgcgaaggttttaggtttttctacaataatttttcgaaaaacagttaagatttatgttggtggtttacctgaggatgcaacttctgaagagttggacgatgcgtttcatcgctttggacgcatacgaaaaatctgggttgctcgtcgtcctcctggctttgcttttgtcgagtttgaggatgcacgagatgctgaagatgctgtgcgtgcactcgacggaacgaggatttgtggcgtcaaggcccgcgtagagctttctcatgggagcggaagagggggcggacgcggttttcgaggcggagggggacgttatgacgaccgttatggtcgtgatcgttatgaccgtgatcgcgaccgtcgttatcgttcaaggtcgcgttctcgcactcctcgccgttcccgaagccgctctcctccgcttcgtgagcgcagccgatctccgagctacagccgtcgttctcgctct

SEQ ID NO: 90206 - DNA, 536 bp, Heterodera glycines
  unsure (1)..(536): unsure at all n locations
gtccaataaaggccattttgaagaatttatttgcgtatttggagaactatctaattgtggttgtgagtttggaaactctgtcctcacaaaatgcctctttgtcccaaatgtcagcggcctgtttattttgctgagcgcgtcacttccattggaaaagattggcaccgtccttgtctccagtgtcataattctgcctgtaagaagacgctcaccgttgggaagcattgcgaacacgacggaaagccatattgtgagcgatgctacggcgcattgtttggacctcgcggctacgggcatggcggagttgagtctcatgtgttcttggacgggactacctgagaaaatggtggtgcgagatgtttaagaatattatatatctcatatgatgtttgttcaattaccattcaactgaagttctaccttaatcattcattttctatccacatacgtattccattccatgagttgtaagaaaaattcatatgtgtataatgtgccaacatctcagtatgtattgtangctatgatttatgtat

SEQ ID NO: 90207 - DNA, 830 bp, Heterodera glycines
ccccgtcgggtgcacagcttggagaattgctgaagcaatttgcttggtcagtcgttcttgcaccggaagacgtcgactgaacatttcgacaatgcgtgccaatttgctgagccccaacacttttttgtttggaaggtatccaatgtggactttgccaagaaaagggacaagatgatgttcacacaaagaaaacatttcaatgtcacggacaatcaccatttcatcggtgtcttcatcaaaaaccgcctcgttcagcacatcatcaaagttttcgtcgtatccctttgtaaaataaagcattgctttcgcggcacgcactggcgttttgagcagaccctgcctctgtacgtcttcgcccacatggctgatgatgctctcgtacgccttgaccatgttgtccaattgcgggtgctctcccagccccgccattggcactgccgtcggcgaagggggcaaaagcctcgaaaccttatcaattggctttgctgctgttgctaatgtctcctcctcccccttcttcagcttttgctcattttcttctccgctgattgcttccaaaaagccgctgctgctgctgctactgctataacttgtgttgcttgtgctgcttttgctcatttgggacaatttcgaattagaatgagcacaacaatcaatcagcaaaggctaaattgacacgcatttatgtctgttcgatgggcttccgtggtgaatgagggataaaacatttgaaaatgccttggttgaaacatcgggattttctgatttcccaaaattttagggcattttaattacatccccagaggaatgcgctcttataggaaaaaaaa

SEQ ID NO: 90208 - DNA, 529 bp, Heterodera glycines
attccacttcactaatctgacttttcataatggctgcacgttctaatactaataaagaaactctaaagaaccattcaaacatagataaaacaattgcaaccaagaagctggtggtacaagactacaaaaatcgattgaaggacagaataaaatcggttaaatgataattttgaatgtatattgggcgcttcgaaggtaaattgcgatgatgcgacacatcgatcaaacagtgccggaaaattaggagagcattatgcaatcagaaacgaagcaattgcgagggctgcgcttctcgtcaaggcaacaaatgagttaaaaatgctgacaaatgaaatccgagaatttctcactattcgcgacttcaattttataagcaactcaatttccaaagcagaagaagatttcaaaaagcgattgaaacaatatgaaaatgattacagtgcacttcggatgagcataagcacaatggcatcagagattgatcgagaattggtggaaaattctttgtatagattctgagttatttttg

SEQ ID NO: 90209 - DNA, 645 bp, Heterodera glycines
gtccaattaagaagccactgttatttgtaatactcacttttcaaacgggtctcagcgccgccggcagagcacaaattctgaacagcgactcttctcttccttcgactttttcttccgtcctttcaattgcattgagcgatttgcacgtccgaatgcaaaatgtgcaagaagaccaagtccgagccttgctgcaagaagttatcgtcttgcttcagcgaagagatgaaggggtcccagatgttcagacaagtggtggagctgcgcaatgacattgccaccaacggatgcatcgccgggggcgtcgaatgctgtgatttgacggcgcacactgtgcagcgaagaccccaaacgactggccaactgtttctggagaagctgtacttcgtcaagcacgtcgacaacaattcactcgctgattctccccgcgagcgtgaaattctggccgaatatcgcaatttgctgtactccatcattctgaatggacttcgccaatggagcaagtcgggcgtactggcacaaatcacgaacggagaacagttcgaacacgcgctgaaattgttggagggaaaggagggcattccgacggtggcggacgaagagcgaaagaggaaatttttggatgactcaaagtgttcgttggtcaat

SEQ ID NO: 90210 - DNA, 979 bp, Heterodera glycines
gtttgagacctgtcaaccccaactccgtcaaacatccacaaattaaccctaagtgaactaatggccgccgaatcgcaatacccaattccttaccgaagcaaactcaccgaaccttttgagccgggacaaacgctaattgttaaaggaaaaacagcggaagactcagtccgtttcaccattaatctccaccatacgtcggccgacttcagtggtaacgatgttcccctgcacatttctgtgcgatttgatgaaggaaagattgtgttcaacactttctcgaagggcgaatggggcaaggaggagcgcaagagcaatccatataaaaagggggacgacatcgatctccgaattcgtgcccacgacagcaaattcactgtttatgcggaccaaaaagaattgaaggagtttgagcatcgcgttccgttaagtcatgtcacacacttttccatcgacggcgatgttctcatcacgcaaatccattggggagggaaatattaccccgttccttatgagagcggaatcaccggcgatggttttgcacccggaaaaactctgttgattttcggaacgcccgagaaaaagggcaaacgtttccacataaatttgctgaagaaaaacggggacattgccctgcatttgaacccccgttttgacgaaaaggcaattatacggaattctttgatagccaatgagtggggaaacgaagaacgcgagggcaaaattccactggagaaaggcattggctttgacctgaaagtgatcaacgaggagtacgccttccaaattttcatcaacgatgaacgctactgcacttacgcacaccgagtggagccgcacgacctccacggactccaaattggcggggacgtcgaaatcaccggcattcaaatcttctgaaaggatttagaaaactggcgaatgaattgaatgacgatcattcgttgtgatggatgggtgttccgttttaattaatctgaca

SEQ ID NO: 90211 - DNA, 669 bp, Heterodera glycines
gtcgcatattggcagcggtgggtctcacaaacaatagccaaatttattaaaatgtctgctgctaatgatgttgctgcaactgctaatgatccatcaactgtcgtttgtgaagagaaaaaatcttccgccgctgaagaggaactcattgacgttgttactgttggggaaaacaatccgacggggagtgccgggacaaaaactggggagtccgacgaagtttttgttgtggaacaaatcaaaaacaagcgaagtgtgaacgggacggatgagtatttgatcaaatggaagggttacgacgacgagcaagatgacacgtgggaacccctggaaaacttgcattgtcccgaattgctcaaggaatttgagacgaattattgcccagcaaagacaaagcgtcgcaaaaaaagtagcggaaaagtagccaaaaagagaaagatttccagtgactcaacactaccaacaattccacttgtgctgaaggatcgttaccacatcggagaagatggagcagttcctgaacatatcattggggtcatgaaacacgaagagtccggcaaaatgatggctcttttgacttatacggaccacagagaagcgacggaatttgtacctacggaaatactgctggagaacaaactaaccgcaaagatgattttgaatttctaccag

SEQ ID NO: 90212 - DNA, 1316 bp, Heterodera glycines
atttattcaaatcgcttgggaagagtctgcacagagttaacggatacatttcaaacaagagcggttttgtggacgcgtggaaattggcgaaggaaaccttggaattatggactgaaatccaatcgtcgacacttcgaaatttaaatgatcttctgaaagaagtcgctcgttatcaagaagaattggctcggatgcgaaaacgtgccaaagacgcggacactttggaaacgatcaatttgatgctaacaacgaccacctgtctgcaaaaagcaagggacacgttcaaccagcgaagcactgaggtggtcagtctgaaacagagcaacaaagaatggacggctgccagcacaaaagaataccttcgagcacgcaacaaattgaacaaggctcacgaggagtacaagcagtacatggacaagtacagccaaatacgcgacactttcgaagaacgcgtcaaccaagccgcacgctctttccaagaacatgaccgactccatttgctacaaatgaaaagtttttttacgcaaatggcgaaatgtttggaaaatgcccacggcgcaaatgcacaagtgagcgcaactcttcgccagagagtcgagcagaacattaacgtggagcagatgatgttccgatttatcgaggagaagggcaccggcactgaaccgccacaaaaactccaatggacaaatgcggacgaacttccccccgaattggacgttgtctcgtgcgtccaatcccagtcttcctcctcaaattcgtctgccatcgtccctaacttttccggcaaccaattgcagtcgaatgcgaatcatttgctcggcctgaatgactcgtggctaaccgtcggcggagggaaaagtatcgccgcgggtggcggcgaatcggcaaacagtggcggaagcattgacggaggattcggggaaagtatgtgcagtttgggagtcaaaaggggcagtatcaacggatgttcggagcaaaataagtcggccggagagagcgattccgagaggcatttggagttgcctttctctgccaacccttcctcttctgttctgtccaatttctctgctcaaaatccatcgtcctcttatgttccccagcaaatctcttcttggcttggccgtcagaagttcagcggtcgtctgaagaaacatttctcaacttctcagtccaatttggccggtccaatggcaattgaaccattcgcagtcggagaaagtgatcagcagacaaaggacgaactcatcggatcagcttcgaatttttccaaaagttgcaatgatccatccatcaaaacgaattcttccgctggtctt

SEQ ID NO: 90213 - DNA, 532 bp, Heterodera glycines
cttgtgtcaaaaaaattgagttcccggatgagcctgtttttttttgttcggataggttggccagatacgaacagtccatgctaattgagacgggacatgtgtacgcccaggcggcacgcgacaatgcgctggcggcacgcaacaattctgtgacggcgcaagagagtgcccgggccgtacgtgacatcaccgaccttatggtcaaacagctcgagtccaaggaccgtcaaatcgtcgacaaagactttcaactggcacaaaaagatgtgctgctggaagaaaaagaccggctgttacgccagaaggacgagatgatcgcacgtcttcagggttatatcaacggacttggtgttccattgcccgcgccggcagaacagcagcagcagggcggcggtggccaatgagagagagaggcctctgacagaatccgactgaccggaagaaaaaaattcgtggacttttcttttatgtggaatgttttgttttgttttttttgatgctttgcgcctaaaaaataaacattgcttctgac

SEQ ID NO: 90214 - DNA, 652 bp, Heterodera glycines
cattttcccaatgcgttttgccatcgccccttctctctgtcgtcgtgtgctttgtagacattgttggcctcgtcttcattttggtcggcttctgtcttcctccgcttcagttccttggcactgtccccaatcggtgaccgccaccaccagcacgaacagcttcagaacatgccgttattcgtcacaggcggctgctgtagcacccgaaaattatgaatttcaagccgaaattgacagtcttttgggcatcgttgcgaagtcgctttattcggaccaagaagtgttcatccgtgaactcatttcgaatgcgtcggacgcattggaaaagcggcgatgttcggaattgcaaggcgacgcagccgaagaaatggcaactctcgagctgagaattgaggtggacgagaagggcaagaagcttacattcgtcgacacaggcattggcatgagcagggaagagctcgtcaatttgctgggcacaattgccaagtctgggtccaaggcgtttcgagcggacgagaaaaacgccgcggctgccgaggcaatcatcggccaattcggagtcggcttttattcggctttcgttgtcagtgagaaagtttccgttaccacccgaaaacttggcgaagtaatggggcacatttggagttggaaa

SEQ ID NO: 90215 - DNA, 856 bp, Heterodera glycines
gacagtgccgtcaatgtcttctggcacagtgtctccccttcgtgacgttcctctgcgtctctctgataagccctcccttccctttccctcccctcgccgtttgaccaatgactgtccttcttccccttctcccgctccgatcactttgtatctccgattggtcagttgggtctgctcaatgggtggccttctgttcggctacgcttcttcctccattaatgatttgctccctttcatcgtccgtgagatgcgtcttggccctgctgaggttggcgtggtcatctcctgctttatggtcggcgcgggcatcggcggttttgttggcggaaggctggcggaccgaattgggcgcaagcgcagtttggtgctgttcgacgcgctgttcattgtgttcagtgtgtgcacttcattggctccaacatttacgtttctcgtcatcgcgcgaatgttttacggcttcacttgcgggggcatcagttcgtctgcgcctgttctcctcgccgagatttccaccatagaatttcggtcccaaagtgtgtcgatgagtcttttgttcatcgtttttggcgaactgtgcgttttcatcatcggcgcggtgttcggcaacatttggtacgaaactgtgtccatttggcgatggattaacattgcggtggtgatccccgctgttgctctgctgttctgccacgctttcctggtgcccgaaagtccacgatggttggcccaaaatggacagttgcaaaagtgtcttgacactttgcggcgaatgcgcagcgattcactgcaaacgcaaaaggaattccgagaaatccaacaggtcgtcaacggcaattcgggaagagacaatttcggtgat

SEQ ID NO: 90216 - DNA, 701 bp, Heterodera glycines
cttttctgtcctcccaattggttgctgctgatcatcatccgcttattcttccggcactgattaccttcgtcattttgctggtctcttctgtcttcttttttatttaccgcagattccgacagaagccaaatattattttgttcgttgggttgtcgggttcaggaaaaacgacactgttcaccaagttgataaactcgaagaattgttgggactcattcatttcgctgaaggaaaatcagttcgacagttacgcgacggacaatggccaaacgctcactttgctcgattttcccgggtccgattcattcaagaaaactttgtgtcgcaagtggctgaacgagaaacggaattctcttaagggcgtcgttttcgtcttggacagtgcgacgttcaacaaaaaagatgccgccgaattgctgtacgatgtgctgtttgagtcgggcaatgccgtcccggttctgatcgcatgcaacaaacaggacattggacacgccaaatcgcactctctcatcaaaaaggcattggaaaatgagttcggcttgatcaatgtttcgcgtgaagctgccctcagttcgatcagcggagaatccgaaaagcgaattttgacaaaaagcgggaaggaattcgcctggtccgaattgaagaacaagaaaattgattgtttggagtgcaccacaccaaaagatgagaatttatcattg

SEQ ID NO: 90217 - DNA, 620 bp, Heterodera glycines
  unsure (1)..(620): unsure at all n locations
ccaagtttgagtaaaataaaaccaaaaaaatgcgaatttggccttcccctttcgttcctccgtcccttcccttcgcacttttgctccccttttgcttctgtgtcgctctgttgttgcgctttggcgccggacgcgacgacgccgcggtcggcgaattgcaacacaaccgactgcacccgccggacaccaaagagattcagcagtgtttgtcgcccgacttggaggccgaggaaagcacttcgggccgtttcttcgccgctgtgatcgacgccggctccaccggcacgcggcttcacctcttcgagttcagccacgagttagagcaggagccgagcgcgttcaagctggaggccgagatttacaaggagattaaacctggcgtttcgtgcttcgccaaaacgcccgaattggcggcggagaatgtgcgcgaattgttgctgaccgccaaacggcaaattccggccgaactttgggccaaaacgcccatcgctttccgcgccacggcgggcgttcgtttgctgtcggaanaggaggcggacgcaattttatcggagattgaaagtgaagtgttgtccagggggcttttggtggacgacgacgcggtgggcgttctcagcggc

SEQ ID NO: 90218 - DNA, 922 bp, Heterodera glycines
gagaaattaatttcttacaaattttcgcttcaaatgactttcgcttttgctgtgctccttttgcttttcattcctccgctgacattggcaaaaaatgcgcgagcggagggacccgtgccggttgttctttggcatggcatgggcgattcgtgctgcaacccgtacagcatgggcttcatccgcaaattgattctcaccaatatgccccatgcttatgtgctttcgctgcagttgggctcctcagttgccgaggacattggccgcggctatttcgccaatatgaacgacgaagtggcggccgtgtgccaacagttggccgaggacgcgcgacttgcgaacggttacaatgccatcggattttcacaaggcgcactttttgttcgtgcgctcgcccaacggtgtccgcacccgcccattcgaaatttgatttccatcggagggcctcagcagggcatttttgggctccccttttgccccggttccttttacgtttgctcgctcatccgtcgtttgcttgacaatggcgcgtacaccgaatttgcacaacacaacctcgtccaagcgcaatattggcatgacccaaatttggccgagggctatcgccgcgcgaacattttcctggcccacgggaactgtgaacggagctgcgacagcacgtatcgcgacaacatgggcaaactgcgcaactttgtgctggtcggtttcagcaatgaccacaaattggtgccgaaggaaacggcgtggttcggtttctacgccgacaacgacacacaaacgatagtgccaatggagcagactgaactttacaagcaggatcgcattggactgaaaacactgaacgagtcgaaccgtctccattttctgactttcaacggcgaacatctccaaataccccacgatctgttcatctccgaaattgtcg

SEQ ID NO: 90219 - DNA, 568 bp, Heterodera glycines
  unsure (1)..(568): unsure at all n locations
caagattattcaacatggccgacaacgctcccaagaagcgcactttccgcaagttcacctaccgcggtgtcgatctcgaggatcttatggacctcacctctgagcagctcgttgagctcgttcactgccgtgcccgccgtcgcttccagcgcggtctcaagcgcaagcccttgaccctcatcaagaagcttcgcaaggcccgcaaggagtgccccgagaacgagaagcccgctgttgtcaagacccacttgcgcaacatgatcattgttcccgagatgattggctccgtcgtgggtgtgtacaacggcaagaccttcaaccaagtcgaagtgcgccccgagatggttggccactatcttggtgagttctccatcacctacaagcccgtcaagcacggtcgccccggtattggtgccaccaactcgtcccgtttcgttcccctcaagtaaggatcacatctctcttgtttgtgtttcgcgaaatgtaatcaatgctgtgcgactttcttgtgcggtttcgttctcttgtgcggatcgagcaaaaatacacggcgtacttcatgtcngaa

SEQ ID NO: 90220 - DNA, 433 bp, Heterodera glycines
accaggccattttggctgaggaggaccgtgtcgtgctcatccgatttggccacgattgggacccgagttgcatgagaatggacgagacgctttacaaaatcaccaacaaagccaaaaactttgccgacatttacttggatgacatcagtgaggtgcccgacttcaacaaaatgtacgagttgtacgacccggtcaccgcaatgttcttcttcacgaacaagcatatcatgatcgacttgggcaccggcaacaacaacaaaatcaattggccaatgcacgacggccaagaactgatcgacatcatcgagacggtgtaccggggcgcacgcaaaggccggggtttggtcatctcaccgaaggattactccaccaaatacaaatactgagcaacacaaatggcgacggagcagaaatcgggcggccgcatgttgtc

SEQ ID NO: 90221 - DNA, 797 bp, Heterodera glycines
ctcaatggccgtgccggctttctcgcctctttgcttgaacttcgtttactttttggtcaacaattactttccgacgatgaaattcgttctgttttggatgctatggtttcttccggcagaaaatactccaaaaagcacaaatctccggcccaactgatgttcgaatggtacaacactgaataccttggcgcggcgcacggcgtcagcggaatttaccaaatgatgttaagcttttgggacttgttggatgcttctgcaaagtcggatttgaagcaaagcgtcgattggctgttgagcacccaattttcggatggcaattttccctcgtcgtccgatcgaatcggattgtctgaggaactcgtccattggtgccacggcgcctccggcgttttgcatttgctcatcgtcgcctctttggagtttaaggaggacaaatatttggagtcggctgaacgatgtgtcaatctcatctgggcccgaggaattctgcgaaaaggacccggcatttgtcacggagtggccggtgaattgtgagagaatttagagagagagagaaagagtgagaaatcgggcgggtgaataatagcactgaataattattaatttaattaaaaagcaaaggcatttccaatgtttgtgttgtcttttcaggcaatggctacgcttttcttctcctcttccgactcaccaaaaatgacaaattcctgcaaatggcccattggttcgccttcgtaatgatggccccctcttttgaggcgtccgcccgtgtccccgactgtccgtcgagtcttttcgaa

SEQ ID NO: 90222 - DNA, 925 bp, Heterodera glycines
ttcctaaattgttgttgcatctaagttctgttttataataatagtaatgtcgctgctgcccatcagtcgctgctcctcccttttccatgccgcccgttctttggcgtgccgtcgtcctcctcccctggcgtcgtgtcattgtttgctctcagtgccatccacggcaccgttttcgtcccatttgtcgtcgtcgtcgccagtcgtcctccacagcctcacaactccggtgacctccactcactggtgccatcgtcgtgcatttgcctctcaatcgacgccatccgcaccggcgccaaattcaacaaacaatactccggctgctgctggcagagggggcattgggttgtatcaccgctacaagcaatggttgcagaactatccggccctgtacaaattgcatcgactcactgttgacggctccaaatggtgttactccgatctcaaaacgttcttttggttggcctacggactgcgcaaagggcgcatcacactgaacgatctcaacgcgcgcgaactgttcatctacatccaggccgggtcccaattggtcaaactgagtttgctcgccgcgttggctgtgctgcctgccggatttccgctgataatcatttcgatgcttgtgtcgcccaaattggtactgacccggcacttttggaccgattggcaaagccaacagttccaaatggacgacctgcggcgcaacgagcgcaaactgttcccccgcattgttgacgcgttgcggcagcacaacccatcgtcagcggccgcattggcagcgcttgagcagcaattgccactgactgttgaccaattggttacgctgcaaaagtcggcgaacattgtgcccgcctcgttggacgcgtacacgcagcagcaccggttcttcctgaaaagggtgcacaatttgccgttttggaccaccgac

SEQ ID NO: 90223 - DNA, 987 bp, Heterodera glycines
aattgtcattcgttttcatttctctacattcggtggtattcctcgattcgtctttcacacgcattttaagcatcatcaaatccaattcaaccgcagcttacctcaaacaatgtcctcctcttctggtcacccgcaaacatcaagcgcatccgcaatacgagcattgcaaatggagttgcgctcattgcaatcacaaccattggagggtttcactgtcacctgtgatgatgacaacatgttcaagtggacagtcggcatttttggaccacccggcacattgtaccagggtggctacttcaaagcacatttgaaattcccaacaaattacccatactcacctccaacaatgcgtttcattcatccggtgtggcatccaaatgtctacgagaatggcgacatttgcataagcatattgcacccaccggttgatgacccgcacagtggcgagatgccttccgagcgatggaatccaacacaaagtgtgcgcacagtgttgctgtctgtgatttcgctgctcaacgagccaaacacgtcatctccggccaacgtggacgcatcggtgatgtaccggaaatacaaagaccacggggaccaggagtatgcgactattatcaggaaacaggtggaaaagtccaaagaggaggccaaaaaggacggcatcaaagtgccggaaaccatcgacgaatacgtggtgaaagcgaagccgagagtgcagggcaacgagtccaacgatgtgattgagctggacgaggattactacgactacgaggacgacgacaccgatgaagacgctgaatacggcggcgaagaagagcaggacagtggccaaggagatgacgaaagttgagcggaactactaacaaatgtgtctaaacgttttctgtgtaaaaaaggacaatcaaccaacgatttgctctgctgtttgacataaacaattaattcaacatgcaaaaatgttttccatgtttttttttgaggataaaacat

SEQ ID NO: 90224 - DNA, 519 bp, Heterodera glycines
gcagtgccaatggcacaaaatttccgccttttttgccaccaaacgccaccatccgtcaattcggacggttccgaggcgaaacggcgccaaataaatgagccaccaaaggaggggtccggcggagctccatccctttccgtcgacccgttcggctgggagccgaccaaatgggaacgctttttcctcgtgttgacgcggtgttacgagcgcagtgccgacattcccgcaattattcctctccgagttggtaaacagtacacgaaacgaatgcgcctcctccgcttttccttcgctttgctggtcgcgatcatcgtctgctttggggccgagttttacatggccagttgggaccgacgcatgcgcaggggccaactgagcgatggcgacgtgaaatttttggaaaagatgcgcgataaagttagatgacaaaagagacacatacacacacatatatatattattttttcgcaatgatttccaaaatatttaaaatatctgaaaaaaatatctagggtttaa

SEQ ID NO: 90225 - DNA, 653 bp, Heterodera glycines
atgcttaaagtgataggcaacaaaaatcaattcgaagcattcgtttcgtccaccgaaggggaaagcaaaagatcgctttttgtgcacttttccgccccttgggcctcctcttgcgcgcagttggacgatttgctgatggaacttcagagggaatacggacagaatgctttcgatatagccaaagtcgacgcggagtcattgcccgaagtttcaatggcacaaaaagtctgtgccgttccgtctgtcatcattttcaagggcggaaaagtcgccggccgcgtggagggatttcagcccgccgaattgaaagattgggccgccaaatgttcgttggattcgttttccgctggtgaaagcgacgctccgtccggcgctgccatttgcgaggatcccaactcgcgtctgaagagactgatcaacactgctcgactcactctgttcatgaaagggacgcccgaggggccgaaatgcggcttcagccgtcagattgttgatttattgcgcagtcacaacgtggatttttggacctttgacatactcgcggatgagcaggtgcgacaaggactgaaatcctacagcgattggcccacttatccgcaagtctatttggacggagaactgttgggcggactcgatgtgatcagagaggagct

SEQ ID NO: 90226 - DNA, 1143 bp, Heterodera glycines
ccctattctattctataaaaagtatccatttcttattaatcactctactatgaaatacagcacttttcggttctcagctgtgaaaggtggcatggctctattatgctggtaaaaaataatctctaagatcattttcgccttgtcgttgtgggcggcggaacagctggatgtgccgttgtgtcgaagttcgcgagaatattacccaaacaacaaattgctgtgattgaacatcaaaatattcattactatcaacccggcttaacattagctgcggccggtctgatggattttgaacagctccatcgtgacgaaagttccattttgccacacggcgtgaaatggtttcaaaagccagttcaccgtctccatcccgattcaaatgaacttttcttaaaaaacggtcaagccatttcctatgattttttagttttggctacggggcttgaacttcgttttgatttaattgaaggtcttccatccgggacagaatctgttcttctttctccttccatcagttccatttattttcccgatggagcaaaaaagacattagaagagctcaaaaatttttcaaccggcgaggcagtttttacctttccatcaacgcatataaaatgcgctggagctccactgaagatttgctttttggcggaagaaattttacgaaggaagggagtccggtcgaattgttccgtgcattattacaccgcacttggtcggatattcggcgtaccaaaatatgccgcttcccttgagcgcattgtgaaagaacgtggggttgagtttcacccgcgccacaatttagtgaaagtgaaccccgaaaaacacgaggcggagttcgaattgctcgacgaaaaagggaaaggcacggggcaacggcaaattgtcgagtattccttcctgcacattgggcctccatgttcacccgtcaaagtccttagagaatacgctaaagaaagccggaacaattcaaatggaacacaacttaccgaccctgaaggatgggtgaatgtggaccccggcactttacagtcccctgcttttcaaaatatcttcgctatcggtgattgtgctaacacacctaattcgaaaacagcggccgctgtgtccagtcaatttaaagcactttccaaaaatttgaaa

SEQ ID NO: 90227 - DNA, 963 bp, Heterodera glycines
ccaagtttgagaatcaaaatgagacttagcttatcacgttttgcctccaccgtggcaatgttcgccggagggcccatcgagcggccgttggcctattacagccagtttcggcccgcttcgctgaccatgcatcaatacttggactttggccgcaagggcagtgcgtttacctcctaccacttcctgaagacggaactgctggtccgcatggcgaacattatgcaggagttcgacctgctgcccgccaaactgatgcagacgcccagcgcacgccatgtgggctcgtggtacaaacaaagcttctctgaactgctccatttcgagggcctcgagcccagcgacatggcgttggacaagttcaacaaccaattgcgcacaattttgcatcgtcacaacaccgtcgtggagacaatggctgaggcactgctcgaactgaaggaaagccacggcgtggacattgcatgcgaacgcaacattcagtacttcttggatcgtctctacttgaatcggatttccatacgaatgttgcaaaaccaacacttggcaattttcgccgccgcctgcgacaccaatggcactaacaatcagtcgcgcaagacagtcgtggtggacccggccggccatgttggacacattgacccgcagtgcaatgtgcgcgacattctgctggacgcctacgaaaacgcgaggtttctctccgagcaacacttttgcgtgtcgccaatgctcgacttgcgctgcttcaacacccgaattcccgaccagcaaattagcgtcccgctggttccgctccatttgtactacattgtgttcgaattgttgaagaattcgatgcgtgccaccattgagcatcaccatcgggtcaaaggctttgatgccgactcttccgatgatttggcagaagtgcgtgcctgcattgtgctcggcgcggaaaacctttcaattaagatcagtgatcgcggt

SEQ ID NO: 90228 - DNA, 521 bp, Heterodera glycines
agaatttttcattttccaaaccaataaaagatggcaataattgcgaaagtgtttctccttctccttctgtttctcatgtcaatggcttctcttttattttgcgcgaattggccaaaaaataccgtccctttggagacttatgtggacgaatcgctccatctccattgcaaattgtgcaacaaaatcgccaattcagcttcggacggagccaaatggctacagaaatcggaggagggctatgtgtctctgctgaagttttgcatcgacgaactgcgcaacagcgacaaacgcagccaaacattgccggctgaggagggccatcaccaatttctgttcgcgtgccacggattcaccgcggacaaacgaaaattgagcgaaacgattggggcgatagcgaaaaaagaagccgacttctgcaaggagcagaaatattgccaaatgttttgatgtgttcagtgattttcatattttagtgcctttttaaatacaaatggacaaattaaaaaaaaaaaaaaaaaaaa

SEQ ID NO: 90229 - DNA, 454 bp, Heterodera glycines
gaagatgtcaaaaacggggctatccgcggcaattgatgatgaattcgaccctgacattgatctttcacagaggtccaggtcggattgggttggttcatttgctggtaatccgtccacagctccgacggtttatgcgatgttcaacaacagcgtttggacttttatgcttgtttacggcgtgacaggccgatttatttccgcaagtgttgtaagtttactcacgatgccagccactgctgctctgtgggtttgggaggctgatcgcgactacgaacgctgggaagggtcgcgggtgttacgtgagcgccgagttccaaaatttgtgctcccgcgaacgattttcgattggtctgactttgattatgctcaacagatgagaaaggctcctaccggttaaggaaaaagactatttacctaatacatatttgaataaagagcattgtttcaaaaaaaa

SEQ ID NO: 90230 - DNA, 694 bp, Heterodera glycines
gttgcacaaaggttcttaccaatgaagactccgcttgacagttcttacgaccatttaatcgaatctcccaaatattttttccatccatcgtccgtttttcgttcccctttgctgggagcgacaaaaggagcgaagattggactttgggttgatttgacaaattccgacaatttttacaacgaggaagaggttttaaacaatggaagcaaatttctaaaaatgaaaatggtggggcacaaacaaacgccgacgcctgagcaaacgacggcattcattgaagcgattgaccgttttatcacgaataacccggacgatgtgattgtggtgcattgcactcatggtttcaatcggaccggctttctcatctcggcctatctgtacgaaaagtgcgacatgagtatcgaaatggcagtcagagaatttgcggagtgtcgtccgaatggcatttacaagcagtactacttggacgaccttcgcaagagatacggcgatgaggacgaagacgagatgacagtttgaatatccaatagatcggcaaaacactgtgatttccttttagttccccggaaggcctttgtgggagaacggaccgatcagtgacgacgaattcaccaacaacggagcatttgtcatggaggcgacttccaacaattctgacgttggcattgcttcgaatgggccttcgtcttcctcg

SEQ ID NO: 90231 - DNA, 498 bp, Heterodera glycines
atttggttatacaacaacagtttgtattttttttgttttttaattcttaacaatggctcctccaaaattctcagacctcggaaagtctgcaaaggatttgttcagcaaaggctatgcccatgggttcatgaaattagatgtcacttctgacgttgctcccaccgtccaatttaagacttccgcagcgcatgatctcaattcccaaaagttggatgggaaccttgaagtcaaatacaaaattcttgaacatggtttgaccatcaccgagaaatggaagacggacaaccaactgacgaacgtgctcgaattgaaggacaaggttctgcgaggactcaaactgacggtggagacggcattcaagccgcacgtggaaggaagtcgccatgccattgccaaggcggactgggcaaatgatgcgttccatgtcaacggggatttgactttgtttggtggcccactgttcaccggatcgtttggtgctaaaatgagcaacgattg

SEQ ID NO: 90232 - DNA, 545 bp, Heterodera glycines
cagcaaatcactggttcatatcaataacaatccccggcgctgtccaaaatatgccattgttcgtttgaccgaagggaccaatgtgcttcagttttaccaattattgcttgataatggtcaagaagaagtgtcttttgtcaacgaaatgcgtgaaaatgccttccaattatatgagaaaccaaactaatgacacgggaaaggatgaggcatcaatagcagctgatacaggtgccggaaagaaaaagctgcctgacgctgaacaaaaacagacgacggacacaaaggagcggaagagtccgataatggtcgacaaaggagtgcaagtgatccccgaaaggacaatcttcccctcgccctctttcagttcatcttttcgcactcaattgccggcctctccaattttgcgtacggccaaaaaggaacagacgtcgagtttggtgcttccattgcgggatgcgagcaatcatgaaaaactttcctttgattgatggaccgataaactttgtcttttatttgtcgttagtctcgcattacaattagtttca

SEQ ID NO: 90233 - DNA, 666 bp, Heterodera glycines
gtccaattaagttttgttttcatttctttcggcaaaatgtctctgtcagcgctcaaaaaacagttcaacaaggccaaccagtacctgaacgaatcaattggcactgctgaggcgacgaaacttgacgaagaatttacggagatggaaagaaaggtggacatgacaaacgaactgatcacgcaggtcatcgcgggtaccaacgaatatttacagcctaaccctgcggttcgtgccaaaatcgccgcattgggcgcaatgtccaaagtgcgcggttccaccaaaaatcaatcgtatccccaaacggagggaatgttggcggacacaatgcaaaagtacggccgttcgcttggcattcaatcggactttggaaaggccctttgtgacgcggccgatgccttccgtcaaatggccgacgtaaaataccaattggaggacaacgtaaagcacaactttctcgacccgatcagcgattttcaaaacaatgaactcaaagatttcaatgcacatcgcaacaaattgaaaagtcgacgattggattacgacgcaaaaaagcgcaaacaaacaaaagaggacgaattggtacaagctgaggaaaaattggaggagtcgaaacgactgacagaaaaagcgatgttcaacattttgaacaacgacgtggaacaaatc

SEQ ID NO: 90234 - DNA, 398 bp, Heterodera glycines
ctggtcactatccaaggcactgcctacacagtggccgacatggccaacttattggcattggccaatgtgccaaatttggcaaccatttaccaaaactcggcatcacaaattaacgcacagcaatacacacccatgtattgcgtgcatgggaattccgcggacagcacaccgcagcaatacgcatatccgaacggaattaactcaaccggcacagtgacaaaaggggcgggggacggcactgtaaacatcgactcgttgagagtgtgccaacaatggaaggaccagggcaaattggtgaatcaagtggtcgaaattgcaaatgtttcgcacgaaagaattttgcacacccggcaattttacgatgtgatcgactcaattcttattgcctgagtaaatga

SEQ ID NO: 90235 - DNA, 870 bp, Heterodera glycines
  unsure (1)..(870): unsure at all n locations
cctcgtgccgaattcggcacgaggtttgagttctattattaaacttcctagaacaaacaaattgctttccaatttataaaatgagcagcagcaaaatcacgcgtgaccagctgaacgagagtgtggctgaagtcttgaaacaatcccaagagaagaagcgcaatttccgagaaacgattgaactgcaaattgctctgaaaaactacgacccacagaaggacaagcgtttcagtggaactgttagactgaagcacatccctcgtccgaaaacgaaggtttgcattcttggcgaccaaaaacattgtgacgaggccaatgccaacggaattccatgcatgacagcggacgacctgaagaagttgaacaaggacaagaagctgatcaaaaagctcagcaaaagctacgacgctttccttgcctccgaatcactcatcaaacaaatccctcgtattcttggtcccggactgaacaaggctggcaagttcccaagtgtggtgtcacacaacgacatgctgaacgcaaaggtggatgaagtgaaggcgaccgtcaaattccaaatgaaaaaggtgctctgtctggcggttgcaattggtcatgttgagatgtcgcaggacgaactggtctcgaacatttcgctgggcgtcaacttcctcgtctcgttgctgaagaagaattggcaaaatgtgcgctcgttgaacatcaaatcgacgatgggccccgcggtgcgtctgttctgatcggttacgatttttgcgtccgtatctttttgatgtgtgacctgaccatccaccgatcggccactgttgttgattttgttaaatgcgaaaaatgaatattatttgttanaaaaaaaaaaaaaaaaaaaaaaaa

SEQ ID NO: 90236 - DNA, 714 bp, Heterodera glycines
gtccaattaagcatccattagcattagcaaatgtgcgacgtcctcctcatcctttccctctccatttaactttagagagaagcttgttttcattaacataaaagaagatgtcaagcatcagcccggccaatcccaaaaaattctccataccttcagagaccaattgtgtggtctgtgtagacattgccacgggaaatcattattcagtcgcatcatgcaacggttgcaaaacatttttccgtcgtgccattgttaacaatcggtcgttcatttgcatggggaatggcaattgtccaattgacaaaggggttcgctgtgcgtgccgtgcctgtcgtttggagaaatgtttgcaggtcggaatggacccgaatgcgatacaatccgagagagaccgaatcggttacacgaagagaacacggcgagaaaaacttgtgggatttgacgaaggcattggccacgagaggggcgacctttgcgcggagtcttttgcttcgaacgatgccgatttggaggagtccgatgaagatgacgtcatttttcgcgataccgaaccaatcggatgctcaccttctgtaaatattgcgcagcgttcaaagtctcagctttacgaagaagttctcgagcgtctcactcaactcgagaacaatttcacacttttgttgagtcggagcgaaattcaaccgtacgcgactttggaagaagcgttaaaagctc

SEQ ID NO: 90237 - DNA, 1066 bp, Heterodera glycines
caattaagctggtgcttcttttaatgtctgaaaacatgggtgctatttttgagaacattgctttgcatgactttgtcgtgaaagaagtgataaacagtttcccggacaaaaagagcatttttcttttacttgcgaaatccgatgagaaggctttgctcatctgcaacaaacaagcttttgaagaggaagtggcaaatgtttccgattggttggtcaaatcgaaattgcgttacattgattcaaatgatcgttttggaaactttgaaatggcattgccttctgaatccaatcaaatcaaagtcacgttcatttatccggctaccgaatgggacattgagaaatattcgcgtcagacgccgttcttcatttatgagacgccggaagactacaaaaatatcactttgaattatctttcggagattgactacgttaaacaactcaaatgggtttacaattttttggagaagaaaagtgagtcggagcgaattgtttttgaggatgaagacaaacagaatggttttgttcttgcgcccgatttgaaatggaacgggactaatgtggatgatctttatttgttggcaattgcacatcgccatggcttgcgttcagtgagggacttgactccagacgatttgcctcttcttgagaacattcgtgaccaatcagccaaattaatcaagacgaaatacggattggatcagaatcaactgaagatgtacttccactaccagccgactttctaccatctccacgtgcacattgtgactctgaagtacgatgccccgggttggggaggcacttcgattctgctgcaaagcgtcattgacaacatcaaaaattatcccaacttctacaaaaatgctactttgcccttcatcggaaaggaaaagcattcccttaccaagaaattctttgaggctgggcgtgtttgaattttgaataccgattttgaattttgttgttacttttgataatttgacgatgaaaatctcactgaatgactgtttttattgttgttttactacggattaaacttgataattaaaaaaaaaaaaaaaaaaaaaaa

SEQ ID NO: 90238 - DNA, 826 bp, Heterodera glycines
ggccatggaaattaaggaaaaatcaaagaatacttccacaagtgcggtgcttccattaacggcggaagaacggatgaaacgtcgacaaattatgaggacggaagtgttggaaaatgtggaaccttttctcaaaatgaagaaaaaaagtttggaagatgcgcaggaggacgagcgcgagaatttccgccgttttaaaatgtttgagacgagcgcacttcagcaaaaggcaaagattgaggaaaatattcgagactaccgcaagagtttgaccgctctcgaaatgctctcagaacaaaattgaaaaaggcgttgactcggtcgagatcacttacaaattggacgagaacctttactcgagggcattggtcgaagagatggacaaagtttgtattcggctcggtgccaatgttatggtcgaatacgaattggacgaagcgcgacaattgttgcgcgaacacctggaaaatgtggaaaaaagctccaaagagacggaggaggacatcgcatttctgcaggatcaaatcactaccactgaaatcaaccttgccaacctgtacaactacgctgtgcaaaacagaaaacagatgtccatgaactccgaactttcagtgggacaaatcggattggacgccgtggaataaaaacagaaattcatgagttaaattctttttgaaataaaactatttttgctatttaaataacaacagtcctccactatgtccagtacctattctttttcttttcacttctttcttttcgaccataatcgtttttcttttcgttcataaaattgactttctgaaaaaaaaaaaaaaaaaaaaaaaaa

SEQ ID NO: 90239 - DNA, 906 bp, Heterodera glycines
caatttcaaatcgtccagcaaccacgaacgtcttttcttttcagaatatgccgatcttcggcgatccttcctccccttatgacgaagccgtagagaaagcgactgcggagacgatgacaaatgagaactggacattgatgtttgacatttgcgaccgcgtagcctccgaaggtccccgcgcctgcaagcagtgtttgttgtcggtgcgcaagcgtctcaaccaccgcgacccccacgtcgttctgctggtcttgtctctgttggactgtctttggaacaattgcggaacgcactttcgacgcgaagtgtcctctaaagactttgtcggggagctcaattacaaatgcacaaatagtaatcgcgttgttgcgggaaagggcccgttcgctggtgaagaaatgggcggagaacgaatgctcaaaggacagttctctttcgctggttgaaagtctttacagagatcttcgagaccaaggactgagctttgagctcgattcgacaaccaacaatcattgtcagaagaagaaggcgattgtcagcaacgatccgaatgtcatgtcgagtgagcaggaagaagcggacattgcgaaggccattgctttgtcattgccagaaggagggaagcagcaggcatcctcacgaaatttctacaccagtgccgtcgttggaacagctccgaccaggcatatgcccattaattccacgacacaaaaatcgcagctcaaaaaagtgaaggcccttattacttttgatgccgcggaggaccaccaggtgtcctttttagctggcgaattgatgatccgattccgacaatgtggaccaaattgggggggccgggttaacaggacccggcgggggagccaccgggacttttttcggggaagtgtgttaaccaaaaacttcaac

SEQ ID NO: 90240 - DNA, 372 bp, Heterodera glycines
cccaagtttgagcttttctaaaaattaactgctgccaaagtcttcatcatgtcttcaaagcctctctacggaaaggatgttcttacggaaggttcggagatctcgcgtgaattggaggcacgtcatcgtaaacgtaaggaggaggacaagcccatctggtacagcaaataccttataaatgacccgaaactcggcacccgctacttttggacttttgctggggtgaccaccgttctgttcggtgcatacattcgccgctgtcttcgctgattggacaaaacgatgggaatgtcttattttcggaagtgtatatgttatttagacggaataaattgttaggataaaaaaaaaaaaaaaaaaaaaaaaaaaaaa

SEQ ID NO: 90241 - DNA, 925 bp, Heterodera glycines
gtatttttgacgattcttctatttctttttttcttctccaatgctgaaaaattaacgtttcttggcggacattcattcaatgaaatgggagaatttcgtgtgaaatttcgtcaattggaggcggacattgaggaactgaagggcaaaaatgaagcaattcaaaaaagattggtcgagttcgaacagaaactgtcgacaagcgcaaattatacgcgaattgtgagtggacaagagatgattcgaattttggcgaaaaacaattggaaccaaacggacagtcacaaggaactgttcttgtttaagccaaatctgttaaaagtcgtttgtctgggagctgaaaaggttccacgtactgtacgtgccaaaaacagggcgccaaaaaatttggaaattgtttactacgaagtgaaaattctttcagcggaacaaaaggattttggaacccaaaatgactcaattggcattggctttgcacccaagtcgatgccattaggcaccaaggttggcacgcaccccggcacttttgcctacttcaacgatggcaatgtacgtggccacagaattgtgggcagcaccaagcaaaacttggccaaattcgatgccggtgacgtcatcggatgtggactgaatttgaccagcaaagaaatcattctgacgaagaatggcgaacgattggggaaaaaggagcagccgtaccaccgcttcatttcctctcattacggcagcgaattgtttgatagcaatttcttcttcgcatcaaaagaaaccgacgatttatatccggcaatttccttgaacaaccccggggacgaagtggaggccaattttggaccgaacttcaaatacacacttaattaaatgacatatccctttttccgatttattatttgtatttgaaaaataatgtgttaaacagtaaaaaaaa

SEQ ID NO: 90242 - DNA, 796 bp, Heterodera glycines
gagatgtacattcgagaattaaaatcaccagatataaaaccccctgaagagctccttcaggttttttctaatccatcccgccgttccattcgtttggccgatgaagcacggcaatgcgcgtaccaaaacgagatgtctcgtttagcgcgaattattcaatctcaacaatggacgatttcctctcaacagaggaccatcgaatcgcaacaacggacaatcgaaatgttggtctcccggcttcctcggaatgatggagcggcggctccgcccaatggcgacgaacgacgtgacatgggaggagcgcccaacgaacagcagcatggccaaccgcccattcttcaaattgacaatcgtccgcacattgcgcccgagcccaatggtcgaggaggacaaaatggaggcggacatgggcaacgcccaaacggaaatgccaacatcgttcgtggccaaaatgtcgtaccagtggctcctcccccatttgtggctcaacgacaacaagagcaaggacaaaacgaaggcgggaatggacgacgcccacacggaaatgccaatatcgtgcgtggccaaaatgtcgtaccagtggctcctcccccatttgtggctcaacgacaacaagagcaaggacaaaacgaaggcggaaatggacgacgcccacacggaaatgccaacatcgttcgtggccaaaatgtcgtaccagtggctcctcccccatttgtggctcaacgacaacaagagcaaggacaaaacgaaggcggaaatggacgacgcccaaacggaaatgccaacatcgttcgtg

SEQ ID NO: 90243 - DNA, 906 bp, Heterodera glycines
gtccaattaagccatgttgtccaaaaagagtgaaggggtcacaacaattgcacttgaagaaggactaattgacgtaacacgaaccgactccgaatcgaagccaatttggcacgatgccatccccctaaaccacgtggtcgccgtcaggcaaagccgcgtcaaattacgctccggcgtgccaacgggaaatgtctcctccattgagtcggcaaatagcaactcgctgttcctttactactcatacagacgaaatgcatacgcatggcgaattagggagtgcgtcatcaaattcgagacgaatacggacgttgaaaaatggtcaactttgctgggaaatgcactcaccgcccaaaaacaccgaccgaaacgtctgttggtgttcatcaacccattcggtggcaaaggacacgcaatttccatttgggagaaggaggttgagccaattttcaaattggccaacatccaatacgaagtgcgcaagacggaaagggccgaccacgcgttggaaattgtgcgcgagttcagcgtcgactcatgggaaggcattgacggcatcgtttcggtcggtggcgacggccttttcaacgaaattctctccgccacagtcattcgcacacaaattgagcatgggaagaattacaacaacatcgaaaccgtgttggagaggccacgcattcggctgggcataattggggccggctcggccaattcgattgtgtcgacagtgcatggagtcaacgactaccaaaccgctgccattcacgtggcggtaggaaacgaacggatggtggacatttgtgcggtctacgaaaatgggctgctttcacgattttctggcgatgcgatttcgtgcggatggcttggcgatgtgttgcgcgactcggaaagctaccgatgtttggggcc

SEQ ID NO: 90244 - DNA, 651 bp, Heterodera glycines
gtccatttaagatgatgtttttccaattgtcatcctcagcaccaacatcatcttccgtcgatgggccacagcagttttttcaacaccaccaccaccaatttgtcccatcgatctcaccactgttcgacacctccggcgccggcatgttgggcacgttggcggcacccaccactgcctcaatcttcatgccgtccttgttcggcggctgcggcggggccgccgccggtgatggcaccatcaccgccgctggctcgctgatgcaaagtttgttgagcgcggcagtctgcagcggcgcattcccgttggtcggcacgactgttgcagcctcaccgctgactgctaccacctctcaacatcgcaaattgttcataggcgggctcagccatgagacgacggatgaacagttacgtgattactactccaaatggggcaaagtcattgactgcattgtgatcagggaccctgtgacgaggcaatccagaggctttggctttgtaacatatgcaacaattgagatggccgactccgcgatggcagaccgtccccacacaatagctggcaaggtgggtgatccaaagcgtgcaattccgcgcgagcaaatgctgcaggcgaccagctgtccacccgcctttctcgacgttgagcccccct

SEQ ID NO: 90245 - DNA, 643 bp, Heterodera glycines
caattaagatgggtctccttttcatggctcgtattaattattttcgtgctttttcttcaactgtttcaagatctttcaagcaggtaaagcataccgtccaggacaatgttacaaccattgaattagtcgatgttcctattgcgtcaactcatagagaattgaaggaatctgctgctactcaatctaaaactccggatgactgttcttgtgttttatgcaaaattccaacaagcatttcctacaaagatgtgcttattctggaacaattcatgcgattggacggcactgttttcccaagacaattaactggtctttgccatgaccagcaacaacgacttgagcggtgtgtgatgcaagcgcattggtcgggacttttcccggatcggactataccggaatttgaccgtgctgggtacaagcgattcaaccgacattgggacgacgatttggcaatgtttcggctgaagtacaaattgcaccctggcagttggttttacatcaaacggtacaatccacgaattcgagagtaccgcccattcaaagccgacgaaattcctgacattgagagagagtgatttattgtgaattctctttatttcatttgataaacgtaaacggattaaaaaaaaaaaaaaaaaaaaaa

SEQ ID NO: 90246 - DNA, 823 bp, Heterodera glycines
ttttttttttttttttttttttttgtaaacagctaaatttatttccgactgtgttccaaatcggttataaaacaaacagttatgaccacaatcgataacaaaaagagtgcttttgccctgtccttggccggtttacaaagttcctcgtacacttcgtccgaattgtacactctgtccacatttggcaacgaaaagcgtccgcgcggtgcggcgcgcaattggcgctccaacgcttccctttcacgcgcgtctttttgctgctttggcaattggaaattgttccctttagcgaatgcctgattctgctgatgacatttattatcaatgctaatattacgctgacaatgaacgattgaaaatgcggatgagacggactgaggaagaattcggagagacgaataaatgtataagaaattggccatcccctcgtgccgaattcggcacgaggcttttaataccctcgcactaattactctcaagatgtcgcctctccgttttatcattgcctttcttttggtcgttttgtgcgctttttccgcactgataaccgcgcaagaagagagagttgacaatgaacctgctgctctgcgcgccagacgcggaatgtacggttcgccgtacggcggcggaatgggcggcggcggaccatggggaggaaatttcggaaagaaatgagaagggagcaaaatgtggtgatcaagacgaacagaacaagccatttgattgaatatttgtgaaaatagtcaatgtaacaattagaaagaaataaaattacaatttaaaaaaaaaaaaaaaaaaaaaaaaaaaaaaaaaaaaaaaaaaa

SEQ ID NO: 90247 - DNA, 846 bp, Heterodera glycines
atgcttcctgcccctttggtcggtttcattttgctgttagggcattttgtgtttgtttctgtcggttccaatttccacgtgctcaaaaaacggggatacgacgaaagcgaaagttacagcagtgaagaagagccaacgtacaagcgccacgggtatggcgggcgctttggtggcaaacgccaccgttacccaccggcgcatggcaagggacaccgcccgtcgacgtacgatggcttcccttacggcgattctccgcttcttccccaagtcatcgccgcccctccgatgcctttctcgcctttgcaattgccttccatttcgaaagcccaaagcgaccttggcgcattgcaagtcgcttctcctgttttggaaggctctccaccgaaagaatcgcctcctctcgacgcttcccaacctttgaacggcgccacggcaattcagtcgcctgctgcagcgcccgagacaaacataatgaattctttggcggcttctcctccattggcaacatcgcagcaattggcatccctttgggtgggcggaagaaagaaacggtcctttaaagagccaaagacaaaaaaagcgaaagaacggaaagcgatcagagagaatgagccgcaggggacggagacaacactcgcagcggacacagaagagacgacggaaaagccgacaaagaaagcggcaaaggaaaagccaaaacaaagaatgatggaggaaaagggcgaaaaggaagcggagaaaaagaaaggaggagaagcaggcaaagaaggagagcaagtgggcaagacgaagaagaagcagcagcagaaggcggagaagcaggaaaagaagcggcacagaaaggag

SEQ ID NO: 90248 - DNA, 445 bp, Heterodera glycines
  unsure (1)..(445): unsure at all n locations
tggcatattgccaaaacagctcggctatatgctcattcaggacggcgccattgcaaaatctgaaggtgatttagtgaatgccgaaagattggccaccgttgtgttgcgaatgatcgccgttggtccgttctttgctccatccgtcgcccaggccaatgcgcaaataaatgcaagtggcgatgagggcaacgagttcaatcggctcacagttttgttctccgatcaccagtatgacattgtaatcggaaatagcgccgggggtatttctatcggcggcggaaggcaaacgcaacaccaaaagcagacaattcatgtggtgaaacgaacgctgcccatatgcgaatagacagaccaatgaataaacaagatggaatttgtgcatttttcatttaaatttgaattgcaaaaaaaacagagagtggaanannnnnnnnnnnnnanaaaa

SEQ ID NO: 90249 - DNA, 631 bp, Heterodera glycines
cctcgtgccgaattcggcacgaggccaattaagcattttctagttttctattgacttttgcaataaattgaagccttctcatctgagatgtctgtgcctgaaactcattcgccaaccgttgagcaattgccaaaacttccaacggaattgcagtccgaagttgctcaacgggctgggctaaagcatgtgacgacgctggaaaagaatgtgctgccgactaaggaggatttggaggaggagcgcaagcacgagagcttaaagaagggcattcagaactttgacgcgctcaaattgcgccacgtggagacggaggacaaatgcatgttgccctcatcaaatgacattgccgtggagaagacgccacagctggccgcggagttcgaccagtccggactgaaacacgtggaaacgacggtgaagaccaacatcgaagtgattgacaaggcggaacaaaactaagccaatggcgtgacataaacaacagatgttttgaagacggatttgtgacgattatttttggtgtcttgatttgctttctattttgtaccttctttatttggtgagctttacaaattccagagattatgagataaatcgcgttaattcaacaaaaaaaaaaaaaaaaaaaaaa

SEQ ID NO: 90250 - DNA, 695 bp, Heterodera glycines
cctcgtccgaattcggcacgagggtaaatctttgttttgttaaaaatgctttctctcgcaattcgacgtttcatcgtccaacattcaaatggcacatttatgagcactaattttgtcgcgacatcgtcaaactttttgctgatggaccaagaaaatgacaaagagacgaagaaggactttaggaaaattgtgaaactgctcgaacgaagtccgactcagaaaagaaagaaagagcaggaaaaagcggaagaaaatgcgaaaagagacaaaagagaagagaacggaagggaggaggaaaggaccaattggaaggagcacatcagcaaaagtctgcacaaaagttacgacgaatacgcgacgaggaaaagcatggaaagttggaagaggagggcccgaagggacacattttgctatatgagagaccggaacttgcccgacttggtcacttacacccatcggtacatcgaaggcctaaccgaactgaacgggaaaaacaatcagaggtccttcgaggacaacgagttggttgttgttgtgttgaaatttgtgatgaacgaattgctcaaagggaataatgtccaatcggcgcggaacgaacgcatagaaaaaaaaccgaaatgattctaatcgtcatcaattcggaatattaattgtttctttccttgtttttagtgattaaaaggatcaattaaaaa

SEQ ID NO: 90251 - DNA, 903 bp, Heterodera glycines
tatgatgatgaactccgacaattcgagtgctatcaacagcaaatccttcgatcaaatttcggagattggatcaatggccacggacggactgcttcaggacgacggagtgccggattatgcaaaaatcataatcaaacagcagcaggcactcattgccacgcttatgaacatgcaacagcagcagcaggagtctcggtacgcgtcgaccatctcactttttcaacagcatcagccgcactttctctccaacaacgattcgtcctttccccctcctggcatccccacccatccgtctcctccgcccggcatccgtccacccgtctctcccgcgccagtgtcggcacctccgccgcctccaccgggctttcgtgcacccccaggcttcaacgtaagcgtcagttcccgcaagttcgaactcgactccaccaaatccgacaccggcggctcccacaaattcgacatcagagaggagctgaagaaggcatttgccttagacgacaccaacgaaaacgacagctcctccgccgagcagcagaatttgtcgccacgttcgcagaacattcgcgaggcacagaacgcgcgtctgcccatgtcgagcagtttctcgtccatcgaaaatttgcaaaatttcaccggtttaagccaacaggactcatcttcgcccgtctccgcgctcagtcggcagcccatcgccgcggccgttccgtctcctcagtccgcgtcgtcgtcggtgtgcgccttggcacttaattatgtgttggttgatcaaatggtgttgaattatgagcgagtgtacgagcaaaaggagaaaatggccagcgaaactctcaccatggtggacagacagtcttcgcccgaacggagcatttaccaacgctttgccaacctcggcgccgtcctcta

SEQ ID NO: 90252 - DNA, 570 bp, Heterodera glycines
cggccatactcacataacaaattcatcatgggtaagccacgtggtttgaatgctgcgcgctctctgagcaaccgccgtcgtgatcagcgttgggctgacaagcagtacaagaagcgtgctctcggcactgccttcaagtcgtcgccctttgccggtgcctcgcacgccaagggcatcgtccttgagaagattggtgttgaggccaagcagcccaactctgccattcgcaagtgtgtccgtgtccagctcatcaagaacggcaagaagatcaccgctttcgtgcccaacgatggttgcttgaactacatcgatgagaacgatgaggttcttgttgccggtttcggccgtaagggtcgcgccgtcggtgatattcccggtgtccgcttcaaggtcgtcaaggtctctggtgtgtcgctccttgccttgtacaaggagaagaaggagaagcctcgttcgtaagaagttttgcttgccacgctcgccgctctcaactgcttgcttttgcgcgtgtgcttgtcgtgtgttgctcttccgtgctggccggttcttccgattccgtcaatacaactc

SEQ ID NO: 90253 - DNA, 530 bp, Heterodera glycines
cctcgtgccgaattcggcacgaggattaagtcaaaaatggatcctccgtcagtaattgcaagtgccgatgcaaatggtgaccaacgccagcagggcggcgatgtcaaaattgagcaagtgcgaaatcaactcgacggcgtcacaacggtgatgtcgcaaaacgtggagcgtattctcgagcgtggcgaacgccttgaccaattggacaaccgcagccaggcgctgcacgagtcgtcgcagtcgttcacccacacgagtcagcgagtgcagcggcgcatgtgtctccaatcgatgaaatggtccatcattttcggcctcttcctttgtgttatgcttgtgctgctcgtgctgaccattctccgcattttcaacgtcatctgaaggcgaacggagcggcgaaacgaaaaacaaaacaaaatgagaaaataataaataaaaacatttattttttactcatgaataaatttacattctttacaaatgagatgaatctgtgcgcatattttaataaatcatcaaatagataaaaa

SEQ ID NO: 90254 - DNA, 538 bp, Heterodera glycines
gtttgagatacctcctcctcccattcgttcattcttctccaattcgtcctttcccttctcaaatggcccaattccccgtcgccaacattctcctcgcctcccttttgttgggtttcgtcattttgaacagcaaaacgaatgcgcagtttcaatacggcggcggaatgttagccgaagggccccaaatggaaggccttttggaggattacggtagggtgggcgactatcccttcgaaagtcttgcaaaacgcgcgccgctcgaccgttccgcaatggccagatttggtaagcgcgcaccgctcgaccgttccgcgttggcacgattcggcaagagggcgccgttggatcggtccgcaattgcgcggttcggaaagtgaggagaaacggacggatggatggaaaccggtggaaaatggcggaaggaaaggaaccaccggcggaaaacaaacattttctgttttcattccttctcaaatttactttttccacacacattttatggcgaaaaagaaattattttctcggttaaaaaaaaaaa

SEQ ID NO: 90255 - DNA, 609 bp, Heterodera glycines
gtcaattggtctttcgactcgctcagagggaattggcgccgctcgccactcaaattgaccgtcatgaccaattcacaaagctccgcgagttttggcgcttactcgtccaaaacggacttttggggatcacagttccggcggagtttggcgggtcggaacgcaattattttgaccattgcattgtgatggaggaattgtcacgtgctagcggttccattggcctcagttacggcgtccattccaacgtcggagaatgtgcttggcgaggaagactgcggcttgtacattctgatgtccggtcttgattcggagcgattggtttttgcggcggcacccctcggattgatgcaatctgcttgcgacatcgctttcgagtacgcccattgccttcggcaaaccgatcggcaattttcaggtaccgtttcgacttctgttccgcatttcgacgcccgctcagcttatgcaaggcaaattggccgatatgtacacgcgtttgtgcgcctcccgggcgtatttgtacgcagtagcacggaacgctgtttcggctgaatgtttaaaggcaaaagattcggcagcggcaattctttttttggccgaaaaggcattgga

SEQ ID NO: 90256 - DNA, 729 bp, Heterodera glycines
gtccatttaagatttcaaataagttaattaatgtgctccagttctgtagccgcatttcgcttttgtcagttttcttcgtccttattcaaagcacagtgtccgcagcgcattttttgcagagccgcatcgactgtcatgtcgacctctgaagaattcaaaaagcagaccattgtgccggatgtggtcacaaaggcgccggaaaagcgggcaaaagtggtgttcgacagcggagtcgaggctaatcttggcaacgtcctgacgcctacccaagtgcagaatccgccgaaagtcacctgggaggccgaggctggcaaactgtactcccttatcatgaccgaccccgacgcaccgagtcgcaaggagccgaaattccgcgaatggcaccactggctcgtcgtgaacattcctggcaccgaggtggacaagggcgatgtgctaagtgaatatgttggttcggggcctccccaggacacgggtctgcaccgttacgtctacctgatttaccaacaaaagaacacaattaaagacaccgaacacggccacctgaccaatcgttctggtgacaaccgtggtgggtggaaaactgaaaaattcgcgaaaaagcacgaacttggcgacccggtggctggcaatttttatcaggctgaatttgacgactatgtgccaaaactgtacaagcaattgggttgttgaatgaagagacgttttgctgaattgcgatggaaatga

SEQ ID NO: 90257 - DNA, 468 bp, Heterodera glycines
  unsure (1)..(468): unsure at all n locations
gagggttatttgtcgggaatttcttattctttctacaaaatatttccatttcaaatgttgccaccgaaggaaatttgggaaaacgatgcctacgatcggtggaatgattttaatgtggctctgatcattgtgatttgtgtcattggctttgcnactganactcgctatgcaccacagctgccatttggtttacagtggcgcaacgcaataaaaaggcacggatcccacggcatttgtcttcctctgatcgcccttacatcggacgtccggtggaaccaatggttatggaagagggccatttggtgaaagacaaatccaagcaggacaaggcatacagagaactgacaaagcccgatggactcgttatcaccagtgtttaaaataattatttacttatggaaaagccattaatcctatattttcaaattgaacatgtaaattagtaaaaaaaaattttgttaaaaaaaa

SEQ ID NO: 90258 - DNA, 389 bp, Heterodera glycines
gtttgagttaaattatttcctgctaattactcgttttaaaatatctgcggaaatggcagtcattgcaccgaaaatggcagcaattgaggaatttgaacacatctcctgcttacactacgaaaaggacactttcaaacccaacgactgttgtgcaaacccaagaagcatcactcaatcagcaaaagatgtggtcacttttgaatgggccaaagagaaagtgcaaatcgaagaacaccgttcgctcgagccttctaagaaggaacacaaatggacaaaaatggaacagaattgaaaagaaaagcaaaagaagaaaatgcattttctttggattgataaagcgatcattcgatgattaatttgtaataccaataaacaatttatgcaaaaaa

SEQ ID NO: 90259 - DNA, 591 bp, Heterodera glycines
ccaagtttgagctgtcatcgttttcccttttccatcctttcaattcaattcgatgtcaatcgatgaaattgagcggacaattcctttgccttcgtcccatctcttctctcattcgcaattcgtccgggctgagattcactcttttgaagaagcttttgtccacaacaaacgcttcaaagagttcgaaggattactcaaaacgaatcacaaaacttacgaaagtgtcgaagcgaaattcgacctgcaaaaaatcgaaaaaatgagcactttgacgaatcgactgaacaaattggcggatcatttggggaaaattggccatttgcattttgaaaagggtgagcttaatgcaatggatttggaggagaagccaatgttcgaaattgttcggcttgcggaacaaaaacagcacgaaattgaagaaggacgaaggaatggcaaatcgaaagcggagaaagtgaccgaagcgatggcaaatgaatgattttcagtcatttgtttgagttcatttttaatacctttgaatgggtttctgttcgaatgtctgtctggtcaaaatattatgtaaattctgcaaaataaaatatttttaaa

SEQ ID NO: 90260 - DNA, 691 bp, Heterodera glycines
cccggtgcattgctaatcatcataaaagatgtcaccgaggaaaaatatttgatcaatcttcctacatcacctggcccatcttttgctgatcgaaatgctaataacgaaccaagaaattgccgaaataagccaatggaaacgatgaaagcatcgagcagcagcctttgttataaaaacagctgttttttgtccgatttattgtcgaatacgaacagaagagggaatttgcggctgctcgaaagtgagccgtttgctaacgaagcggcaaccgaagcggaaacggagcgacttttgttcgcggaattggagcagcaaatggacgaagacggaaacaaacagaaacacccggatgaacaaatgccgtgccattcagcttcatcttcggcattttctgctgacaactatcacacccaattgccaatcttttgcggcgtttgttttgccgaatgcgccgcctttgattctttcgcattgcgccgctgtgaaccgttcggtgcgacacacactttctgcgacgactgctggcgacagcacattggccaatgtttgagcaacggccgagtgccaatcagctgcatggcccccaattgttcatccgtcgtccgcccttcggtcgctttgcttgttgttggacaacccattgcgcagcggtaccgtcaactcatggtcaaacgacgccgtttgtgccgcg

SEQ ID NO: 90261 - DNA, 647 bp, Heterodera glycines
caattaagaaggaatttcgcgttgggactgctaatctttagtctcaccatttttttctcttcctccaatcattaataattcaaacaactgatcagttcctgatcaatcattgcttcaaaatgtccgacattgctggtgcttccagcagcgctttttctgccgatgcttcttcaacaaagaaaaagggcgattttttgtttctcgctgagttgggcgaaggctcctattcaaccgtttatttggcttcagagcgccaaacaagtcgaaaatttgcagtgaaaatgtgtctcaagaagaaaatcatcaaagaaaaaaaggtgcagcaaattttccgtgaacgtgacattctccgacttttgtccacgcccgcaaatgcgtgcccatttgttgtccatttgttttgcacatttcaagacgatgagtcgctgttttttgtgctttcctatgcgcccaaaaaagatcttatggcccggctgaaaaagctccaacggttcagcgttggccagtgccaatttgcgatggccgaacttttcttggcactcgagcacatccatgccctggacgtcatccacgggtatgtaaacgcggaaaaaatttggttgcccgaaggccgggacattttgttgtcggactttgggtgtgccaaa

SEQ ID NO: 90262 - DNA, 564 bp, Heterodera glycines
gagaaatgaatcgtgctactgcaaacgaagtctccgtttttgacgattttcattctgacatagaaaagtcgaagaaaattaacaaagatcggttgtccaaattttgtcctaaacttttcaagaaggaaaatgggattggaatgtcttcaattgcttcggtgccttttgaagcacttttggccggtgaattcgtcttcccatgttcctccatccattcgtatgttcacaatgcctacaaatcgaagaatcccgcagaaattgcggatgaattggaattgttgctgaataaattaacggatttttgccgaagtgactccgactttgagaaggttctgaatttttctctcgcattgtccgattgttttggccgtttatttttcgattgcaaatcgctcgaattgaatatgaaattagtgcggatgcaggaaaaagttaaaaacctgacgtcagcacaatttttattcgcccagaatatggccctaatcaagaacaaagctgcttttgtcccctcatttgatgactgttcagattatattgtaaaagaaattcgaatgcgtgaactct

SEQ ID NO: 90263 - DNA, 686 bp, Heterodera glycines
cgttacgtcgcttacagtcctcgcgccaaagaaactcacctaaatacgagtcgaatatttcttttttaattggcgtgtggcttcaaaacagaaaagtgccaaattattttcgaatttgagaaatgaattccaattcgttgctcttctctctgttcactttactgttgagcatcgccgccaatggccatttttgcttcggaaaagccatgggccagcagcgctcgcgacgagtggcggctgtggacaatggcaattttatcgtcgtggacggatccgtcagtgttgtcaatggagtgatctccggcaatggctgttattaccatgacggaaaagtgacggattatggcaaaacgcggacgctgaccggcgcagaacgtgccaaactgaagaagttcatcgacgaaatgcagcagatgagcgtaaagttcgcgcaggaaatgcaacggatgttcagcgcgacttttccgttcggtccgcccgcggcgccgccgccgcaatttcatttaccaccgcaagtgccgtgcttctgctcatcgtcgtcgtgttcaaagtttagagaaaaggcaaatcggatgaaataaatgatggaggaaaatgaatgtgatttggcataataaaactggctactgtagatgggctttaccatatagccacatgtcctaatgatactgtagcttttatttatt

SEQ ID NO: 90264 - DNA, 466 bp, Heterodera glycines
tccgcttttaataatttcaaataattttccgctttttccaaatgttccatttgcgtttcgttgtgcttcttctgctggtaattgtcggccttttcattggccccaattttgtttctgctgattgggataaaaaggtggccggttgggacgacaagaaagtgaacaaaggctgggaggaagccgaagcaccgctcaacatccgtgcccgtcgcggcggatgggatgagcgcattttgggcggtcgtgaacaatgaatggagagaatgagtgaagaagaagaagaagaagaattcgggatggatgccaaaaaagtaaacattcattttcaatttaattccccctttccgcccccatttgagcccctttttccaaatttcaattatcaaatgcataaacctgttctttctctccaataaatgatccgattttaaaaaaaaaaaaaaaaaaaaaaaaaaaaaaaaaaaaa

SEQ ID NO: 90265 - DNA, 820 bp, Heterodera glycines
agatccttttgcactcaaatccttatagtaattactcaccatggacatatctctgtctctgaacggacttggagcaaagcctttggtgccgattgctgacctgggcgacagcaacaagtactcggcggaagagacggactgccgcaataaattggcctcattgtaccggctggtcgacctgttccattggagtcaggccatctacaaccacatcacacttcgactgcccggaaagaaccacgaaattctgatcaaccctttgggcatgatctatcgcgaggtgaccgccagttcatttgtcaaaatatccgtcgacggacgcattgttgaccctggatcaactccgctcgggatcaaccaggccggatatatccttcacacggccattcacgaggcccgtcccgatgtcaaatgtgtgcttcacctccacagcgcgtcgggtgccgccgtttcgtcaatgaaatgcggtcttttgccactgaatcaggaatcgatggtcatcggacctgtggcgtaccacgaatattgtggaatgctttctgccgaagatgaaaaaacggagattgtcaaacatttgggggacaaaaaagtcattttcttgcgtaaccacggctttgccgcctgcggcgcctccgtggaagaggcgctccacttggcctatcacacgctgatcgcctgtgagactcaagtgtccgcgatggcggcgggcgaaaaaaatttgatatacccatatgaaattgcgaagaagtgctcttatgacatcgcacaacacggagccaacggaatgaatcgtacggcatcggcccaaaacggtacaatg

SEQ ID NO: 90266 - DNA, 1091 bp, Heterodera glycines
atttcgcttcgcattttctgtttcccccagttttcgctgcccgaaacagcaaaaggaaagaaaaaagaggaaagggagggagagcaacgaccaaacgcttcgacaattcctccgacaatccctccaccctcccaattccctcatttgtcagcccctgtccaacatcagaccatccattccatccgtcgcgcataacgcagaaggacaggcgagccgatcgcagcgatgacgacgataacgccccaacaaaaaccaattcttaaagcggtgattttagtcggcggcgcccaaaaaggcactcgttttcggcccctctctctccaacttccgaagccattgttccccgttgccggtgtcccactaattgagcatcacatttcgcagctttgcgaacagttggaaaacctccacgaaatttttattgttggattttacccggccgaacaatttgcgaactttatttctgattgtgagaaaaagtatcgacgcgtgccaatccgatacattcaagagaactgtccgttgggcactgccggtggccttttgcagtacaaagacattctaatcgacagaaaacctccggatgcactctttgttctgaatgcggatgcttgcggagaattccctttccttgaaatggtgcaggagttgaaccaaaagacggaggcgaaatgcttgattttgaccactgaggcgacacgggagcagtcggtcaactacggatcggtggtcattgattccgtcggtttggagtgttcgcgtggccgtgttcttcattatgtcgataaacccgcaactttcgtctccactcacatttcctgtggcgtttatttgctccgcggcaattcgttcgatgtcattttggaacaagcggaaaaaacagcctccgagcgtggcctaaacaccgactctccgacgatgcaattgtttcattcaaatcaactttggtttgaaaaggacatcttcccccaaatgacctccgatggcactctttttgcatggcatacaaaccgttggtggtcgcagacaaaaacagctggtgccgtcctttacgccaaccgccattatttgggcctttaccgcgcgcgatg

SEQ ID NO: 90267 - DNA, 468 bp, Heterodera glycines
  unsure (1)..(468): unsure at all n locations
gtccaattaagatttttaaacacttaccaaaaaatgttgggccacttttccaaacttagtgttcgttgctacgcttctgccactagctttcgtccgttcttcgaccgggtgctcatcgagcgttttctgcccgaacaaaagacgaagggcgggattatgattcccgagaaggctcaggggaaggttctcgagggtactgttgtcgccattgggcccggttatcgcaatgacgaggggaagacaattccgatgcaacttcaaattggtgaccgtgtcttgttgccggagtatggcggtgctaagatcgtcatggaggacaaggagtaccacgttttccgcgaatcggacatcatcgggaaattcgaatgagtttgtgaggcggtctctgattttatttgtttttgtttgaatcattttttactattgataaattgttgtcactttcaaannnnnnnnnannnaaaaaaa

SEQ ID NO: 90268 - DNA, 659 bp, Heterodera glycines
ccaagtttgaggtcatcgatgttgatccgttccaggcagcaattgtgcgcactttttcgtagttccattcctcttttaaagcccagaatcggctgttattctgtgctcgctcaaatgtcaactgaggttgaaaaggcgcagaaagcgaagccgggcggagacacaatcttcgggaagataatccgcaaggaaatgccttcgacaattctttatgaagatgacgaggtgctcgcgtttaaagacataaaccccgaggcacccgtccattttttggtcattcctaagaagtgcatcactgctctgtccaacagcgaagagcaggaccaagcagttctgggcaaactgttgctgacagcgaataacgtggcaaaggcacagggtctctccaacggatatcgcattgtgatcaacaacggtcgccatggatgtcaaagtgtgtaccatttgcatttgcacgtgcttggcgggcgtcagttgggctggccaccgggttaaacacttggaaatgtcaatcttatcgattgattttttgaagggacttctggcacttttctacacactttgttggggaaatttggctattttaaatgattactgaaatgacattaatgaaatgacattaatttattattgcatcatactatattccccagataaaa

SEQ ID NO: 90269 - DNA, 1345 bp, Heterodera glycines
cttaagtcttctgtcctttcaatttcaaaaaaattgctcacatttgtgaaattttgtagctgtttgtctgtctttttccgcatcgataacacttccaaagagaaatggctgttgacgtaaattcggctctgaccaaggcttacgacgagttaaggagcattgacatgaacatatcaatgctttccggagtttcagaaagatttaaccggaaaagaagcgcaccaacaaatgattctttctctactccctttgatcggcgtgtgcaggagggtggccgaaaaattattatcgggccggaaagcagcgatcgcaatgcgaagcgtgggcgttacgccgcggacgagggtccgcctggtgattattccccgccctcttcagcgcgtactcaccgcactttgcaatctagtgtcgtgatgcccaccattgagaccaaatcgcgtacggcggtaatcaacgagatgaagaagaacgagaacaaagaagaccaagtgcgaaaccgacgtcttttcggtaatcttttggttgccacgttgcgtaaatttcaaaacgaggaaaagacggttgggagcaaaggacaagtgcagattgacaagcaacgcgaagttgagcgtcgtttagaggagacggagaaggaaaacagaaaccgaatgatgcgggagagagaggcactgatggcgaagaagcgcgagaaggaaatggaaattcaatccctccggcgtcaaaaggccattgagcaatcggccgaagagaaaacgaaacatttccgtcgccttcagtgcttcatccaaactcagactaagcccccgctgttcttcctcccctccaaacacacactccgaactttggaactcctcaaagagtcatcaaagaaaattgaaacactcattgagttacgacgtgatgaaatgactcgcgaattgcgtcggctcgacacgtacaccaccgccagctttggcgggacaattggtcaggctaagaataatgtggcggatgagtcggacgaccaagacgaggaggagacaaatgttcgcggcggactgaagtcggcgattgtggtgaaaatggaaggaatgactggcgaaacagttgctgaagcggaagaggagaaaagggacgaggaggagggcgaagaagaaacgggacagaaagacggagagggggaggatgaagcagagcccaaagatggagaggagggggaagaagagacggggcccaaagagggcgaggaacaggccgaacagcaacaaaatggccgagcagactcagaagggccggactaagtttttggtttgttctggctgcccttttgttgtttgtcgtctgcaaatacaaaccatcgtcgact

SEQ ID NO: 90270 - DNA, 695 bp, Heterodera glycines
gtccatttaagctgcgcctttttcagtccgtttttgccatttttgttcacaacagccaacgactcgactgagcacaacgaccaccacactatcgaccagtaaaaccattacagcggtggcgggtcgacgagtctttcccccgccgccgttcgccaccgccgccccttctcttcggctggcctctttttcaccactctcttcgcccgcctcacctctcccgccacttttatcaaaacttatcatcggtgcgtttgttggccgtaataattctccccggcgtttgctctgtccccaacagcgcagcagcagcagggcactaacattggccaaaggcttcttcctctctacatcagccgcttttatggcggaaaggagtggcgccggacacataaatcacaatggaattgccacactttccgaacgtaatgcgcacagaacatcggtgcaacagtgtccttcgtttgcgccgtttaaaccaaatcgggcattaattgtttcaaaatcttcgctgcttgagtatgaatttgatcggagagggcctaaaaatgaatacagcggccttgacgacccgcgttttctcaaggagttgcatatacaacaaataaatatggaagaccttagaataaggcataaacttcagttacattatttggacacaatcgttgaagaattggagaggcataaaattgagtgga

SEQ ID NO: 90271 - DNA, 969 bp, Heterodera glycines
ggccgaacactggacgaagtgatcagcgaaatggacttggccaaagcatacggagcaccgtacgatttggtcgaacaaacgcttaacaaacggcggaaaatgctgcgaaaaacggcgaagggaacgagcagaaacattgggcccaaaaatgcgaaggatgccgcgtacgaccacaaaatgatacggcacaaaatatttccgatggcagccgcttcttatggggacacggaaaatgtgaagaattgcattcggaacacttttcgaaatgccacgttgtaccgtaattcggtggtacagtgtaacggtaaggcttatgaattgtgttcggcatttacggcagtgtcccatgaggacaaagcgatcattttgtcatttcgtgggacggacacgggatatcaattaattgaagaaacgattcaaattgcacttttcaaacgatcccaatcacctgacgaagaatgggggaaagttggaagttatttcctgaagattttcaatcagctcgtcgaagagggaaaaatcatcgattatttggccaaattagtgaacacgtacaacaactacgagctttgggtgaccggacattctttgggtggcgcaatggctgccattgccagtgccaccattggtgacgcgaaactgatcagtgcgcagcgactaaaactggtcacatttggacagccgaggacgggcaatggcgaatgggcgacagcgatggaccaaaaagtcggccccttcaattaccgcgtcgtgaacaaccgcgacttggtgccgcatatgccgcccctttggttcgaagggtaccgccaccatatgactgaagttttctataacaacgcaaagaacaaaaccgaggaatttgtcatctgcgcggatgaagccgaatcggaggaatgtgcgggaaaatattggttctacaatgttcgggaccatttgaattattttgggaaatcggtgtccgaatgggga

SEQ ID NO: 90272 - DNA, 527 bp, Heterodera glycines
caaagtaggacaaccacaacatctacaacggacaaaacagcagcaggaatttgtcaccttccgttacacttggccagtgcgaataacggaacgactgatcggtgccggtgaatctgccattttgaatgtcagcccggcattttgcactgccttcaatggtgtccaattcacttggcttttgcgcatttgcgaggaggaaatattgcctgcggacactagcgaccaaagtgagggcgacatttcgatggactcgtcgtatttcgcatcgggcggcgatgacgacgaattggagatggtgcagcaacaacagcagcaaaggaaagtgaacatcaccctctactacaaggaggggccggcacgcgacgttaagctgagcgggggaaacatttccattcgaaactcggagggcattctcttcgacaatatgccattgcgcaacttggagtacacaaagggcggcggatggtcgccgataagcgactaaaggctggggggacggcagagggacgagcagcgcaagttcagcg

SEQ ID NO: 90273 - DNA, 842 bp, Heterodera glycines
ttcaacttttctcgtcctttgcccctttcgctatgctttccctcaatggcactttccctcctcagtctcttaaacccttggctttggcatttgttctcgatggcgggattggttcccaattggaggagcttggctatcccatcaataactcggtgatttggagtggggaagcaataatcgatgcgcccgaccttttggccaaatgtcataaaaagtttatcgatgccggggcggacataatcgagacgaacagttaccacgtcagcattcagaaactcatggaaagccggggcttttcgctgggacaggccgagtccatcctccacaaatccgtgctgattgcccgtgaggcaattgctgcttcgggtcgtccggtggccctcgtcggtgccgtcggtccttacgccacctatttgagggatgcctcggaatacaccggtgcttacgtgaaaaagcccgacttccaagagcagaccatcatcgactattatctcctccaatgccgtcctctgattgccgcaggagtgaccacgctgaacttcgagaccattccgtcggtgaaagaaatcgaatgtgtggccaaagtgatggaccaattggacgacactgtgcaggcgtgggtttcctgttcatgtcaagaccggaaaaggacgcgcagcggcgacgcatttgcggacgcagtgaaaatagcaaatggacacccaaagattgtagcgatcggtatcaattgcactgcgcccgatcatatcactgaattgctaacagaggcgaaaaaagcgaacaattcaaaggcattggtggtttacccctacagtgggcaagtgtacaacgcggaaacccgc

SEQ ID NO: 90274 - DNA, 1512 bp, Heterodera glycines
ccgttgttgtacggattcgcatgatgatagcgtggaagcggcgtgcgttgtactccgtgtttgcgccacgctgtgcaattgccaaaaattgctttcgagttaagggttcaacatttattttaaaaacaacagtacaatttgaaattgaacacatctacaaaacaatggacaaaatttcaagagggaaaaaagttttatgatctccgcctccaaattcaacgacgcacggcaagttggggtggcgcaagcggatgccatgctttatgtaatagtgcatgcggacctttaattttttgttaccgacaaacaaaacaaataaaaataccgttatgccgaggtagcctcggtacgcgggggccgagtgggtgtccaggatggacaggtcattacagcggaccggaaaattgcgcacggacgggcgcaggtgggcggtgcgcagttggacggagcgcaaatgctccacaatgtcccgccgtttctctaagcttttgaaaagcacatgcagctcgtgagcgttgcattcgaaccgcttgcagagatggtccacgagcggaacggggcgacggcgttcggcacatgcacatttttttggagtgcctaaatttaaatttaaatatacgtttaaaacaaaagcaacttgttgctggcgtctcctcaccaattggagcgagcggctcgcgcttcatctcctcgtcaatcaggctgatccaactgggatcatccgcctcctcctcttgctttttcgttggctctttgttggcgtcctgtaaatccatttcgggataagcgttgtttatccaatcggtggcaagaattaaatccatttaaaatctgtgaaaataaaaaaaaaaaactataaataaaaagaaaattacataaaaaaaagtaaaatggacgccttccaacaatttaaaagggaggatggacaatttcgtcatccattcacaatgattgtgtctgggagcacaggaagtgggaagtcagagtggataatgcgtctgttgcgaaatgtggacaaaatgatctctacccctgttgaacgcgttatttatagctatggtgagttgaacacaaatgtgatgaatctgcagcgcgccggcaaagttgccaatgtgccagtcactgtacacagcggcgtcccacgcgcggaacaagtgcgggagtgtgccaaaaaagaaaaaaccttgctggtgctggatgatttggtggtgggtatgagtcaacaatatttagacgcactcttcacccgtggctcacacaattggggcgtcagcgtaattttggtgactcagcacctgttcaacaaagagctgcgtgtggcgcgcactaattcacactatttagtattaatgcgtaatcctgcgggggcgttgcagatacgcaccatcgccacccacctcttcccgtcaaggactgcccattttattgaggcctaccgggacgcatgcgcaaaaaattttggataccttctcgtggacatgcacccagagagtccggaagatatccgccttc

SEQ ID NO: 90275 - DNA, 759 bp, Heterodera glycines
gtgaaagtgacgccagtaataataacagttcgaaatggacggggaattaaaccaagggacagacccgaaaattgtgcacagagatgtcattgaaatgtttcctgagttggatctgacgcaaattgtctctgaatttggccatctttcgcctgagggcctcgccggcattgtcattgaccgaatggcactcattcctcggaagaaaaatggaacattgaagagaaaggcagacaatgagagcaatgacgaagttttgtcggaatactcggggggcagtgagacggcagaacaattgggcaaccttctcgtggacaaaatgcttggcgaaatgttacgatcgtgcaaagttgaattgcgaagcaaacgcgctgtggtcgattcgtccgcatggactggtgtcaaaacattgatgattgagcactttccaatggtccgtgccgacttcgtcaccaaaatggtgcgccattttgaaggtgccattgtaccaactgcaatcgcttgtttctttgtggagaacagttttggggacaagttgcagaaaattgctccttcgtttaatcagtcattttggtacaaaatggcgattcccattcaatgccgaggccgtcgtctgaagcaggcttatgtttctgagcagttgcgtgagcacttcaaactgtacaacgaactgatgtgtcagtaccagagccaatacccggaactgcttaccggactcaaactcacccagcaagctcgccatattctgttggaacgttctga

SEQ ID NO: 90276 - DNA, 652 bp, Heterodera glycines
  unsure (1)..(652): unsure at all n locations
ccaaacatgccaaacagcggcgtacaaaatcactacagaaaacgcgtcgcatattactacgattccaatgttggcaactattattacggccaaggccatgtgatgaaaccgcaccgaattcggatgacccatcacttgttacttaattatggtgtttatcgtcacttggatgtttatcgtcccttccccgcctcccttgaggacatgacccgctttcacagcgaagagtacatggacttcctccgttctgcaactcctgaaactttgaagcagttcaacaagcaaatgttaaaatttaatgttggtgaagattgccctgtctttgacggactcttcgagttttgccaactttccagtggcggctctttggcggctgcggtaaagcttaacaaacaaaaggctgaaattgccatcaattggatggggcgggttgcaccacgccaaaaaatcagaggcgtccggcttctgctacaccaatgacattgtgctgggcattttggagctgttgaaataccacaaacgggttttgtacgtcgacatcgacgtgcatcatggcgatggtgtcgaagaagccttttacaccaccgatcgagtgatgaccgtttcttttcacaaatacggcgactttttcccggngaccggcgaattgaaa

SEQ ID NO: 90277 - DNA, 1117 bp, Heterodera glycines
taattaaatccattccttcgggggaccgtgccgggtgccgcggggtaagcagtgctggttcgtttcatcacggcaccgaaccttttggctagtcagcaatcgttgcttaacttgccagatcggacgggtgcgcatgattccactgttccaagcaccccaccaaaagcaaaacgatataaccaaaatataaggaaaaattttttctccatcttcctttttgatactaaagcatcagagtgctaaaattaagttgtaaataaaattttggtgcactttagagcactttctgaaaaaaatatttatgaaacaaaaaaatcgattttttcaagtgtccgtttggggtactcaaacaattatggggagcaaaaatccaacgcagaattaaagtacaggctatagggaagctattcccgaaggattcggtctccccataaatctgggcgcatcggttcggggggactgccccgaaaacaaaaaaatcgattttttcaagtgtccgtttggggtactcaaacaattatggggagcaaaaatccaacgcagaattaaagtacaggctatagggaagctattcccgaaggattcggtctccccataaatctgggcgcatcggttcggggggactgccccgaaaacaaaaaaatcgattttttcaagtgtccgtttggggtactcaaacaattatggggagcaaaaatccaacgcagaattaaagtacaggctatagggaagctattcccgaaggattcggtctccccataaatctgggcgcatcggttcagggggactgccccgaaaacccaaaaaaaaatttttttggataaaaattatttaaatgaactgactagataatatttaaaataggttattactcttcctttcagtatccctgcaaagtttggtgcgcttctgatcagtttctgaaaaaaaagttaagcctaaactttttggcctgtttaaaaaggaattaaaaattttattcatctccctttttgatagaaaaagcatcagagtgcctaaactaacctgtaaataaagttttgtgtgtttcagagcacgttctgaaaaaatacttatgaattaattttgcaaaataataaataattaatgaaaaagt

SEQ ID NO: 90278 - DNA, 1079 bp, Heterodera glycines
attttggccctctgtcagcacattacgaggaagacgatgaactgcttacaccgacaaagcgacttcgcgaattgcggctgaattctgacgaaaaatgtgcgatgtccgattcaatcccacgggctgttgagctgtttatggagaagaaacgagcaaggatttcaaaattcctgtacacgtacaacggcaacttgcaattgaatttgccacaattgcacgcatttgcatgctcaacgggcggactgattgatgacgaatttagagaaagaatttggccaattctcgcaaaaaatctcccacaagcaaaacgatgtaaagatacgcaatgggacgccctccgctcggaggaatacaatgaccaaacaaatcattcgagcgacgaattgcaacaacaacagcaaacccttttcctatcagattccgactttgaatctgcactttccacgttcaccccgtccatttcgggctgtgatgatcaattgatggatgcggaggacgacgccgagggggacgacgcccaaagaatggccccccaaaacgcaacggtcttcgacttctctcctgaccagctgcgtgcccacaaggaatggaatcaggtcgaattggacgtggcacggacattggcacggtttccaccgaacattgacgaggacgaaagggcatgtctgcagaacgagttgaccccacttattgtgaggatattgtgcgaaaatgaagacttccgttactatcaaggctttcacgacgtgtgtctgacttttctgttggttctcggcgctgattcggccctccaagttatgcgggacatttgtgcccgaggcgccttccacaattatttgtgctgttcgctcgaagagagtgcaatgcgcgagttgcaggacctgtacgtgttgctgttcctgcatgaccaagaagtggagaagcggctgagaagcgccgagttgggcactctgtttgcgctcagttggcccctcacttggttttcacatgcactccaaaattactcccaggtggtcctgttcttccaccttttcctctcttctcatccgctgatgccaatttacgggagtggccgcgtt

SEQ ID NO: 90279 - DNA, 1794 bp, Heterodera glycines
gtccggagtcactgaatgcgttcattgagtcatcgtccgcccaattgatttcgcgcaaagagaatttcaaattggcgcagcaaagctttctcgagtgttcccaatactacggagagggcgcctctgccgtgccggacgttttttcacccggattgcgtcattttgcaagcaattcaaaaatgcccttaatgaactcgaagcgcggaaagcatctgaaaaagttggcatttttgccataattcgtcggaagattgggaaaagtgcaatggatattatgactgccgtccataggttcgatttctcagtgctcacttccgaccaagttgatgttctgcttccaatttttcttgccaaattgatggacattgagcgtttggagcggaaattgactctgatgaagcctttggttttctgttcccgaattgtttggcctttctctgcttttccctctccaagtctctcttcgtgcgcctcctcttcccctccccccgtctctcccttctcttccacccttctctctcctccactcgttgtccctcttcgttttcgcgaattctgtgcccaacccattcgagcagttcattttcaacacaaaaacttctgacagagagagaacagaggcaaaaggccaaagtgactttcgcgcgtttctttggttgcaattcgcgcggcaatgagtgcaattgagggggaaacgtgtggagtgttgggacggcttcagttcgaagtccatgcaatcgttggcttcgcccgactttgtgccggcgatgtgttcgaagtttcggtaaggcacggccaccagcgatggcgcagcagaggcaaaacgttggcggacaaaagccagcggtgggagcagcgcatgtcgacgatggacgtgctgtggaacgagccggtggtggtgaaggtgctcgaagtgaaattcctcaagtcgcgctgtttgaacgaacgccaatttgacccagcaaaattcgcattggcacagccccaattggtcacgatgaatctgaatagtgccgggagcatcaaactccgtttggtggtcacttggcttccacttttggcaacaaaaacaattggcgaaaattcgctgaataattgccaaaaaggaaatttgacggagagagaaaagcaaaggacggaccatcggacgaacggatcgaaacaaaacgccagactaacgcaaaatgaacagaaaaaaagagaagaggaagaaagggggagggaaatgcaacagcaaaacacggagacgaaggaggaggaccaatgccagaacgaatcggcggacggcgcagcggtcaaagtttgcctgagggacaaaaaaaggcaaagggagcagcgaattcagctggggaacagtgtcagcacggggtcgaattttggaattggcaaagagaaatggcgctgttcttccacaactttgctggacgacgtgtacaaagacttggccaagtccattccgactatcgatgaccttaccgttctacacccgtcccatttcgcgtctcttccctcgtcgtccccacgccatcggtcgttcgactcggaaagtgaccgcgccaaaacggaagcgaaaaatccgcgtcgcattttctcatttataaaacgcggacaatccgaagcgagtgccgatcagcagaagaaggattggagaaagtcggcgagtttaggagaaatcgcattggcaaaagacgaatgctttacgactacaaatgcggaaaaagcatcgccagtctctacggaaaagaatggaaacggtgcaaaaaggggcaaaccgagcagtgtgaagaaaggacg

SEQ ID NO: 90280 - DNA, 583 bp, Heterodera glycines
cactttcgacatcaccgtgcaaaacaccgccagcaatttccttcgcaacaattacattttcataacggtcggcaaactcaactcggccgtcgaaacgattgaccaacaattcattgaagtccagaaatattccaagcaggacaaattgttggaaatgcttaaaactgatgccatttggaggccacgcccaaacgaagaccctttcttgaagccggccaagaaaacgctaattttcgtggaaacgaagcgaaattcggaccgtcttgcaattgctctgacacaagaaaaattctacaatacgcaaagtttgaacagcgatcggaccctcgaacaacgtcacttggccgtccccaaattcatccagggccaatacgacattttgggggccactgacgtggccgctcgtggtatcaacataccgaatgtcgaacacgtgattaactacgatttgcccgagaaagaaatcgacacttacatccaccgaattggtcgcaccggaagagcgggcaacacgggcttggccacttccttcttcgacccgacttcacccgaagacatggcccacggcgctttttacgttgag

SEQ ID NO: 90281 - DNA, 826 bp, Heterodera glycines
aacaatcgtatttgggcaacaaacgaccaactccaagtggattttcctggaccaatcaccggactcttcaaagggaaacaaaccagctcggcaacaaattgctttgcgcaaccagcaacactgtacgtcaaatggcacagtctccaactcctgtcgccaatccatcgcgcagaccactgcaattacgcctccgagtattgccaactgcaagacaacagctcactcatctggacttcagcatgtccaaacgacaactgcttcatgtgcgacttccaagaagccgaagaaatccacggagaattcaccaagctcaacggtcaaacaacagcattttggatctcggaagaccgacaaaaggcactgaccttcaccgagacacatgcagtccaagcatgcgacgggagacaaatcgtcctatcggagcagaacttcggcattccaaaagagcaatatgacatcatcatgagcaaccacacaagagagagacgcaacgtgcaacccgagcaactcgcttcgcagctttcagctgctcaacttgccacaacaatggcactctcgcagctctatttgaaggaatgccagcgcaatgtgcgtgtcagcaacccaacgcttcaggcacggaaactcctcaagcgcgataatctgcaagcccgatggatcagcgaaacaacaatcgaagtgtttccctgcgttccaatctccctctccaacatcagctaccgaacaacaaaggactgctacaagttcattccggtcacaatacatttgccaaacgcaacaagagacgcattcctcgacccggagatgcgcatcctctcactcatct

SEQ ID NO: 90282 - DNA, 659 bp, Heterodera glycines
gtttgagcaacaaattgaaagcctaagtagctcatattccaaaattatggaagcgaatagagccggtcaaattgcgccaaatacaaaggctgaaaatcatgggaacgcacggactgaaattcgacagcctgcaaatacgacattcagaaaaggtcacagaagagcccattcgatgccatccaacgcacagaaagcggacaaaacaatggcaaacggaaaacaacaaacgatcggtgaaaagcaacccgaacacaaacgtgcgtgtgatgcgacatcggcacattcgcctcaaaccgaatattcttaactcttcggctgcagcgaacgcttccaagaaaagacacccgcagccaaacttcgacacaatcgaagtgctcgaggaggagcacgagttcgaggtccaatgtcaagcttggtaaggcgaggctgacgaagtcatcacaaataaaggttccaatcaacgaggaggaaatgatgagctttcccgggatggaagaaggctcacaaaagtcggataaaatcagcacccacaggaggttttggcagctgaattgcaagggcgtccacttctccggccttcccacttggctacaacacaatgaattcctccacttcggacatcgacccccacttccgagttttggttcttgctttaatag

SEQ ID NO: 90283 - DNA, 698 bp, Heterodera glycines
gtttagagccaaaaaattctttactctattaaataaactcacttattttgccatggaattaatcagaggcgtgaccgacagaatgtctgcaatgtgtttctaaagtcatgcaaaagcgtgcggctgtctgtgtgcttgttggtgatgaagacccgaatgtgaaagggaagattaacttcatccaggagaaggatgactctccggtgaccatacagggtgagatcactggcctttcgcccgggaaaacacggcttccacgtccacgctttccgtgacctgtccagcgggtgaatgtctgctgggccccacttcaatcccacgaacaaaacccatggtggaccgtgaggatgagacacgccatgtgggcgatctcggcaacgtgttggccgggcaggacggagtggcaaaactcgatttcacggacaaagtgatttcactggtcggtccgcacaacatcatcggccgcgcgcttgtcgtgcacaagctcgaggacgacttgggccgtggtgaaggactcaagaagccggagagcatggagactggcaatgcgggtccccgtttggcgtgcggagtgatcggaattgctcagtgatgggggaatgacgaccataagcggaagagagatctgattattgacctatctcattttgtcgatacgacagttattcaatttgtaagacatgtttaaacattcaaat

SEQ ID NO: 90284 - DNA, 966 bp, Heterodera glycines
cgcagagaaagcagacaatttccgacacacagcgagagagcacagactttgcggagagcgcaggtcgaagggccatccccaaaagaggccgcttggcttcccgagcagaagaaacacacggccgacgagcattggcacggccaccctttcaacacggcccaagcggtgccttcgcagccattcgatagagcgacgaacgacggcactttccctcccccctccattctcagctttctttgctcacgcacaatctctccccccccaccccccgttttttggtgctttgacaaaacgacgaaggcaacgcggaggaaaaggagcaaacggtgatttatgacgaagttaatcagctgtcgaagaacggcaattgcgtgggaattctctccgattgttttttgcccattggcggtgatctccgcacttttctttggtgtcggatgcaacgccaaccatctctattccgagggtggctctttccccgtcctttcctccgacaattcgccgcccattccaaatgatccgccgacttttggttccccagccgaccttcttgacaatgaattgcagcagcccaaccaacagtaccaaactgagtttgccccttccatggaacaaatggtcgacgaacaaaggcgcaatcggctggccaaaattattgaacaaatgagggataatggacagtttagccagcaggaaattgccgatgggcccggactctttttggaagaaggagaagcgaatgttcccattgagcgaccatcggaaacggagacttattgggacggactaaaagagggtgaactcgagtcttccgaaatgttcggtgaaaacgaagggaagaaaattgctgccgttaaaaagggccaaaacgaatttgtggagtttgtggagccacgtcaacaccaaaacaaccgccacaaagaatggatggacaaacgtgtgccaaccgattcggacagaaaaacg

SEQ ID NO: 90285 - DNA, 800 bp, Heterodera glycines
ccaagtttgagatgggcagtaaacgccgtctcttacttcattttagtcaggctcaccagacttttagacgtgcggagttcgatgccatttgtcagattaagggaatttctgtggtgcccaactctccttcggatgggatacacattcaatcgtttgagtttcaaaacgacgaatttgacgtctttcggctgttggaaagggccgtgttagtgaaagcggcgtacgaactgatcgccgagggggacgggcatgagcaagtgatggccaaattggcatccgatccgagttcgtcgcttgcgcgcttcgactccgccgatcagtcgtggtctctgctcgttcgtccccatcaaaagaagcgcagcggcgattacgcccgatcggttgttgagcgttacactgccattccgcttctgactctcgcgccagttgaccttgcgcatccgagcaatgtgttctcggtgatcgaaatgtacgaggcgaacggacggagggaaacgccggacaaagtttactttgtacgactcgttgggagaggggcgaggacatctgaagacactcttttctctgagtcagcgccggtacatcggcaactccacgatggacccggaactcgcgttcatccaggccaacttggccaaaactcggcccggcgcactcgccatggaccccttttgtggaacaggtggactgctcctccccgccgcttatttcggttcctccgattttggcgctcagataaaatgggacgtcgcgcgagcgaggggccgctcgtctcgtgacggtgagcagtggctctgtgc

SEQ ID NO: 90286 - DNA, 894 bp, Heterodera glycines
ggctgcaggtttccatgatcggattcgacccaacaaatgaacaaaattcggggcaacagcttttcatggccgaaattggacaacgaatcaacaatctcatcaaattcaacatcggccccaaatggatgagtttgaactttgccgctttgtttttccgattttttggctttccgtcggaagctgctaattgtttggaagctgctttaacattcccccaatttttggacatttctctcactcaattggcccaacttttgctccatttgaatccaccgatggaaaatgccaaaaaggaaaatgacggaattgaaaggattttgcgtattgcgatgcaaaaaggagaaaatgagcccgtccctttccatttgatgggcattttccatttgcgccaaaatcgctccgttttggcctaccgtttcttcagagaggcgttggaccgcgacccgaacttcgaacccgcgctgaacgaattgctacggatgaaatgcactcagagagtggggaaaaagccgcgactgatccgcgacatttacgcaccaatttgctgttggcccaatgagcagaacgtcgtctgtttcgagcggagggccaaagggtcggtctggagggaatccgtccgttgtttccgcttggaatcgccgcctgtttcctccggcggggaattccccgccgttcactttgtgtatttccgctgcaacactccttatacgggtcgcagttaccccccgcctccattcgcccctttggtcgccccccttttacgcccggcaggtcggaactgcgtcaaattgaacttcgtcgattcatccaacaaatcgaggctgaggaatcattgaagaccaaacgaaatgaaaggacgtcccatcgtccgtcggtgttggcactcgattacgg

SEQ ID NO: 90287 - DNA, 799 bp, Heterodera glycines
aagaatcgtcgagccgaagagagaggaaagcaaaactgacaaagagaaccgatcaaaggctaacagtcgccctccttcgcccttttcgtcgtcttctcagcgtccccgacgttcggtctctcccgtctccgtgtcaaatggatttcacaacagtagggcgtcgagtcgactgggctcaacgaattctttggctgctaaccattccaaaactcattgccaaccggatgtagccaatttgagaaaatattcggcatcgacgctgcctttggcgcaattacggcagaaacaaattgtttaccaggagtggcagtggcgctatttaatcggaaatggcggtgaggcgctggccaaaatggtgcgagaagtacaggaagcaggcggacaccagccaaatgttctgagctacggctataaagaggtcggacggctccatttctcgggacccgtcgaagctgtcgaagaattgcacaagaaaataactgctaagattagcctgttgaacaaaaacggctcaatgatgaaggacagcattagcatggagaagcaattccattgtcaagtgatcggaaagggcggcgagtttttgcgaaggctgaaaaggaagcacggagtgaaggaaatcaatgtgccatcagagttttccaactcggaccagattcatattgaaaggccctctctcttcaagcttcgctcatgtaaagacgacctgcttaaactggtggatgattggcgcaacgattgctacgaggaggtgccggtccagcgtcgttttgtgccgatgattcggggaaaaaattcg

SEQ ID NO: 90288 - DNA, 1205 bp, Heterodera glycines
aacacatagacgagagagtagtggttagagaaagatacaaaagggcgccaattcaaacacacagtgaatccccaagccgatttatttattttttacagactatggtactccctctgactgccgccctatccaaattgctaagctgtaaacccgaaaatttatcagaatatttgaacaaccccgaggcggtgaacaaagcgaacgcctacctgtgtggcaaaaaactcaaaacaacctatcagggtcctgattgcaagaccaaagatgtcaaatttggcacattttcgctgaaacctgccgctgaaacctacgcctttgagggatttcttggcaagtttccgaaaattctgtttcggtccaacaccatgcgttcagatgtcaaagtccaacagtatttctacataaaacaccggattcgcctactgtaccctcagctcaagtgcattgttgagtaccacaacaagggccattgcaaatactacccattgggtacaaatttgtatccgaaaaaaataaaataaataaaccccattaagagttgttggccattgaggagggctgtgagagtgcacccatcgaaaaacctgccgctgaaacggactatctggactacttgaactttcgcagtgggtggcaatcagcactctactgatcaatgaagcgtgcgagacaatcggaaaagttgggcgccttccctgagattgagttcgccgtcaacacaatgggcgtcacggtgtattgcccacggcacctgcaaacgcctcggtttgtgccatgggaccagcccgggcggtgcccgagctgcagaagcggaactgttgagctggactacatcatccagcccgagggggtgaccatcttttcgaatcggctaaagacggacggcgagaactttgtgccatttgacgcaattggtaagcttctgcatctgtttgccaaaaacctaacccttttcttaagtggattttgccgatcgtgctaaattccgcataagggcacggaataaggtgttcactttgccgctgcgacacccggaggtccacgccgcaggcccgagcttggaagaagccgtaaaagaacagaaggaaatgacgcagatgccataagcattgtccatttttccattatttttggtcttgttctgatggattacccaagaataatcgaaagtgaactcgcttttctcatcccttcggggattattg

SEQ ID NO: 90289 - DNA, 600 bp, Heterodera glycines
ctggcattctccagcgctatgaaatgcaacagtttcggctgagttgcgccaatttcgagtcggaatcgagctgttgctcgacctcacaacagatggagataattgtcgactccgagtcggactccaatctgacgcggtgtccgtgttgtcgctgtgcccaagtgaatttgatctgtgccaactgtctgaacactaatgatgtccgaattggcaaagcgcgggaggacaaacggcgtctgttgaggagcaaaagtgccatttgccatctcatccagaacgcactcgccgacgaaatcaaattcgagggtgaatttcaccacctcagtcgctccattgaagaaattcgggcgaaaattgcgcacaaaaaggaccaagttggacgacttagacaacgcatttcgcacacggaaagtcaaagtgagcgcaatcgacagaatgtgctccttctcgagaagaaaatggtaagccattcggaccgaatcaatcggacaaatgcgaagaagacggagctgcaaaagcagttgatgaacacaaaagcgaagttgaacacccaaattgtgcacatcgcccgcttcctcttccacttgctccgcctggaga

SEQ ID NO: 90290 - DNA, 682 bp, Heterodera glycines
gtttgagaagctattttacatgaattaagacaacaacaaaaaaattatgtctggtaaagtgcattagtacccgcttccttttggtttctaattcgccaacactcggaggaatgccaaagaaaagaccttctcttgcgcttcttcggagaggtgcgagtgttgtcccttcccccgagattcactcggcttcgtcgagtctcgaaagtgctttctctttccaccaacaaaacgtaaggacagcctttctgttcggcaaaaacaatgtcctcgcattttctggcgacagagaagcccctggttatttgtcgcttcatcatgaccaaaatcggatgcttattctcaaatggattccgaattcgcttctcctttcgaaacccgggggttcaacaacaaatgctgtcaaaagtccaagtcactcatcgcattgtgtgccggtgtcgattaaattcgagaccgtttcacatttgcacttgcataaaaatgagggcactctttcatcttcaattgtccttatcgattctgatggtgttcaacagttttgcttttcgttctctcttgagcaacattgtttctcctttctgaagacgttggaaggcgcacttttcccacttttcaaaatcgaccccccattaaattccattaaaatcgaatgcggtgccacaggtcgtccactaatgggaat

SEQ ID NO: 90291 - DNA, 877 bp, Heterodera glycines
accacgaaatacacgaacaaatccacgaattttacgaagtgtccccggaagaagtgaaagcaactgccagaggaattctccagagaggctgcgaatccatcttcaaacgtatctttggagaatacaatgcggaggaaataatccagatgcgcgacgaaggagcatccaatgttgaaattgaggagaaaatcacagaggcactgaaccaaattcgaagtccgcagaagcgacaggaggccggccgatttgcgatgtcatgtcgccgaatattcgcaatgattgaacgtcgtcgacgatcggcggataacgccgaacattcgctggatcaactgttcaaatcgcatttgatttggctgaatgagcagcaacgggaggagctgaagcaaatgaaagggtccggaaagggacggacggaaatgcagcagagagtgatggaatggtacggacagttggaggggcaagagaagcagaaagcgcgagaacacctgcgggacggatgccgggacatattggcacaagtgttgggcaaagaaaaggctgaccaactgaagcaattgagagaaggcggcatgagcgggacggaattggaagcaaaagccaacgaaatggtggaccaaattcaggaggaggagaagaaggcgaaggccaaggaatttgggacagtgtgcagaaagatactgctggaagagtccgattgaacacggcggacgcatcgccagcgcacacttccgccgagagcactgctaacgcaatgctaacgaactctgacactcttccgattcgtcccattgttcactcattggcatttcacttcccatttttccattgtccgcccgccattacttttacgcgcattctttctaaaatatccgttctg

SEQ ID NO: 90292 - DNA, 1122 bp, Heterodera glycines
ctctcctataattttgggctttcaattcaaaaaaatttcgccatccctgtgcgtaaatgactaaaaaaggcgacgacgaaagcggcggtgaagcagcggcggcaattcgtgtgctcgtgacgggtggcaccggactggtcgggtcggcaattcgacaggtggtgacggaggaagagcagcaacagaagccccagcggttgcaggagcagtggtttttcgtgggcagcagcgagtgcgacctgaccgacttggagcagacgcgggcgcttttccgccgcgttcggccgacgcacgtggtcaatttggcggcaatggtcggcggactgttccacaacttgcgccacaacctccaattctttgtcaagaatttggcgatctgtcaaaatgttctccaatgctgccatgagactgacgtggaacggtgcgtttcgtgcctttccacgtgcattttccccgacaaaacgccgtacccaattgacgagacaatggtgtacaatggaccgccgcatgacagcaattttggctattcgtacgccaaacgaatgatcgatgtgctcaaccgcggatatgctcaggagcacaatcgaaagtacacttcggcagtgccgtgcaatatatttggaccgcgtgacaattacaatttggagaacgcccacgtggtcccggcactgatccacaagtgctttttggccaagcgcgacggcggccctgtggtgggtgccggctcgggcaaaccgttgcggcaattcatttactcgttggacctcggccgtctctttgtgtgggcaatccgcgaatacgaggacgtggaacccatcattctgtccgttgacccttccgacgaagtgacaatcactgatgtggtcaccgccattgtcaaagcaatgcaatttaagggcgaagtcattttcgacacgaccaaggcggacggacagtacaaaaagacctcgtcaaatgctaaactgcgcgcccggctgcccgacttcaaattcacgcccttcgaacgtgccattgcggagtctgtgcaatggttcgaggccaattacgagaaggcgcgcaaatgaacgaatggacaaacggccgacggacaaacgaccgaaaattcttagtgatagacaatta

SEQ ID NO: 90293 - DNA, 600 bp, Heterodera glycines
atctcttttatctccgactcatctgctgaatgaaacaagcctgaaccttagatgcccatattgcccaaagaaattcctaaagaatactgaagccatttctcacatggatccgtgtctgaagagtcggccttacccttgtacgaactgttctaggcggtttaaatctgcgcaaaatttgagccaacatgagaggattcacacaaatgttcgaccttataattgccagtattgtgagaagaattttactcagaagtcacatttacaacagcacgaacgcatacacacaggtgaaccggccttctcatgccgttactgtggcgagacgttcaatatttattcatccaaaatacagcacgaaaaaagtatttgtggccttcacgaggccttggacaaacagaaagaaaattcgagtgaaaagaacggtttcgcaaagattgcaccacttcctcaaccgagcaaaacgacgccgaccgaacaatcatcgtcacggggaccagcagtaagaccgactgtgagaacagcacacaacggcactattcacgacagattaacattttgccgcaaagactcagcctcgatgacccatctctgcgtctcatt

SEQ ID NO: 90294 - DNA, 785 bp, Heterodera glycines
aaatccttgcctaagaatgttggtattaagatgtttgccgattaccttatacagtggtcctttatctgggtgaaaataacacaaaatttatttattttcttgatggcgaaccattgcagaaacaaaaggatttgggcattttaatcaatcaaatccttttctaaccatattaataaaattttaaaaaattccatatttttcttgttatcagcttcaccgaacattaaaaactcgaagcttgaaactttaatttcggcatataaaagctatagcagaccatagttaaaatacgccaaagaaacttggaatctattaaaaaaagaaaaatgcacgcaaaattgaagcagtccaaaaattttacaagaaaagcattcaaaaaagtggccttgttcccatgccggatgaagaaaggcgtgcattttcacctctcgtcccaaaaaacgagaggtgagaggcgagagtcccaaaaatggcgagagttggcgagagacgagaggcgagggttgtcccacccctgatatgaaaaccgattgaattcaattcactcaaaagttttgaaataaaatgcaaaattcgaccaaagacccagcagcagaaggaaattctgccgatgtgatttgtttgggtcagaatgagggggccaccaatgctgaatcatcatcagccagtgatccgcaacagcaaaacattttgaaggatttttgtgaaaagtttgcctcgttggaattgaattcttcgcagcaactgtccatgattggggaactcagagcagataataacaatct

SEQ ID NO: 90295 - DNA, 802 bp, Heterodera glycines
ctttctctaaacaaaacgaacatttgccagcagttggctcaggacaacggcccaaagagaagtgaagtgaattgcctctgctctgaacactgatgatgatggttcgttcttcctcctcttccttttcccttccgtcgtacttcctttctctcctccccctccttctcctccttttctcccaatgttcccaaatttcttttgcttgccaatgccaatgggccccgccaaaggacaattattgttcctccgattgggttgcccacgtgcaggtgatcaaacgacaggacggcgtgcgaatgccggcggggatcaccgaccgacagacggacttaaactcgcgacacgaagtcaaatatttaaggatgtttaagatcagcaaacaaatgccggtcaatcagcagaaccaagtgattctccctgtcaatgtttatacggccaccgaggatgccgcctgtggcattttgctcgagtcgggacaccaatatttgttggccggcgattacgtcaacggcacaatgctcaccggactgtgccggcaaattctgctcgaagaccttaaggagtcacgaaagcacgacattctcgagtggacagaagtgccgcaaaagctgaaagaacagctggaaaagcaggaatttgatcagaaatgcaactgaacagaatggaaaaagaaagagaggacaaacaattgcaaatgaatgatcagaaaaaatcaaacggacagagaaatggcccaatcgggcactttttgctgaacgaacatttccaataaacgacgaataaattagcctattggcaaaac

SEQ ID NO: 90296 - DNA, 781 bp, Heterodera glycines
  unsure (1)..(781): unsure at all n locations
cctcgttccgaattcggcacgagggtttgagttccatcacaaaatgtcatcggcagagcgtaaaattgacgtgaatcggactaattattcagtggttgactccgaatttgattctatgcgtgaacgctttgagaaggaaatgcgccgagtggacgaggaaatgcagcgtcttcgccacgagttcgaggggtaccgccccgccgcttcgcgttcttcgccttatacaacggcgggcactcagcccatttatggtggaggaagttcactgagcaatggcgcgggcggcggggcgatggcgcgccattcgccgacttacgacccgtacttggaaaacctaaagagcccactgatcaaagacgaaagtgacgggaaaacgttgaggctcagattcgacgtcgcccaatacagacctgaggaagtgacggtgaaaacggtggacaaccgtttgttggtccatgccaaacacgaggagaaaacgccaagccgcacggtctatcgggagtacaatcaggaatttatgctcccccgcggcaccaaccctgaacagatcagctcaactttgagtactgacggcgttctcaccgtcgaggcaccgcttccccaattggccatccaaaaccattaaagaaaacggagaaaacaatgaggagagaacagagcgtaattttttttgaaaattacttaccgtccccacatttgtcatcttcaaaagaacaaatttatttttcaattgccttttaaaattacatggnctaatgtgagaataaacaattttttgggc

SEQ ID NO: 90297 - DNA, 417 bp, Heterodera glycines
attcttttaaattttttaatttttaattattttggctctgtcaacttcaatttgggaatgccttctcatacacttctaattctttgcttgctcttttgctttgccttaaccaatggaaatgccaacagtgacaacgacgccgaagacactgacattgaatcatttgtccgcgaaaggtgcgactcggcttgtgaggaccccggcgaaacatcggaggagtgcgcattcgtttgtctgaactgtgtccaaacagaatgccaacactgcaccaatggcaccgaatcgaatggtggcacaaaggaaaaatgccaaaaatgttttgaagaaaacaaagcaaagtgtgtacagtaatattgactaatcttaaaaataaatgaccaatggcaaaaaaaaaaaaaaaaaaaaaaaaaaaaaaaa

SEQ ID NO: 90298 - DNA, 489 bp, Heterodera glycines
ggcccctttcatcaaccccgacgagcagtcgatgatcgactggcttcattaatttcggaccgataaacgtgggaatttcggttcctcccgacatgaaaccgtacaaatcgggcatttaccatccgtccgatttcgactgccaatttaaagtggttggcctccattcgatgcttgtagtgggctatggagaaaatatttatggagacaaatattggatagtaaagaacagctggggacaaaaatgggggcaggagcacggatatctgaactttgccagaggggtcaatgcgtgcggaattgaggacgaaccaatcggactgatggcgtaaaggaacggacggaccaaaacatttgaattgaagagaacagaaaacgaacaaacaaagttaatgacaaaatttatttttgtattgaaattctaaatacgaaaatggaaattaattggttctattgtaaaaaaaaaaaaaaaaaaaaaaaaaaaaaaaaaaa

SEQ ID NO: 90299 - DNA, 813 bp, Heterodera glycines
ggaagttccattagagtgaccatgaatatcaattcttcgtctctaagttccttgaagggccgcgacctcactctcaaaccggacgtatcaaaaccacgctgggatcagtcgacttatcaaggccgggcgcgacactttttcgctgtgttgaatcctcttaatttgtttacctccaatcaaggattggaagaaagtcgcaacattgtcttagattatcgaaaaggcattttttccccagaattaacagttgagcgtttatggaaggccaaacatctgtatgaatcagcttatcatccgatgtctgaccaaaaaatgttgccttttggtcgaatgtgcgcccaagtgccatgcaatatggttttgatcggtggcatgctcagtttttataagtctccgttggccgtcgttttttggcaatggaccaaccaatcattcaacgccgtcgtcaattacaccaaccggtctggtgactctgtgagcactgaccaattgctgaaggcatacgcatgcgcaacgggcggggcattaaccgcggctttgggattgaatgccgcggccaaaaaaatgccgccacttttcggtcgtctcgttccttttgctgctgttagtgttgcgaacacaataaatgttccgatgatgcgacgaaaggaatttactgacggaatccaattagttgatgagcgcggcgttcccctcgcaaagagtcaaacggtggcatggcacgcggttgcgcaagtggtggtcagccgagtgctcatggcaactccgtacatggtgctcactccccttccccgtcaatcagttaacaaaaaa

SEQ ID NO: 90300 - DNA, 960 bp, Heterodera glycines
ctccttctcaagcttatccaggcgggcattgtcgatgattgggatgatcctcgtctgttcacgctgactgcccttagacgtcgcggagttccgtccgagacagtgaacaagttcattgcccacctcgggctcaccgtggcccagtccagcattgacccggctatgttcgacgcctttttacgcgatcatttgaacgttactgcaccgagaacaatggcagttctcgagccgcttagacttcgcattaccaattatcgagagttgggttttataccagcgaaaagcaccttacgggtcaaacaattcccatcctcaattaatgaaagtacggacgaatgggaaattgcatttgacgagtttgtctacattgagcaggctgcttttagagaggttgccgaaaaaagttatcgtcgactgacattggaacagccggtgggactgcgtcatgtcaatttggcagtcaaaattgacaaactggagcgggatgagcacggaaatcccatcgaattggtggtaactgcgaatccggtgagtagtgagtgtaagccgaaagcattcattcattgggtggcgagaccggtgctttgtgaggtgcgtctctacgacaaactatttgtacacaaaaatcctgaggaccctgccgaagtccctgggggttttttgactgacataaacccgaactcgctccatgttctttcaaatgcaatggttgacggaagtattattcgcactattcgtccgttggatcgctttcaatttgaacggaacggctttttctgtttggatccgaatgattcgtggtcgagtgagaaaaaattcgtcttcaatcgcatcgtttctctgcgtgaggatgcaggaaaaaacatttaaacttttccctgcttttttctgtttatttttatttattagtgcattttcattgttttgttgttgatagataaattgttgactctctaaaaa

SEQ ID NO: 90301 - DNA, 746 bp, Heterodera glycines
  unsure (1)..(746): unsure at all n locations
ttcagtaatttttccaaaatattaatttaattctcatctattggacaatgagaggcgaggctaaggacccaaaaggcgaagcaacggcagaagcggtttcagtggagaagcaacaggaaatccttcttatgaacaaattggcttctactggcaaactgccgccaaaatctgctagcaattttctccagaaaaagcttcaacaaagaaaatttttcgattccggtgactacaacatgaacaagaacaagcctattccaccgccgataggccagaatttgactgctgccaacactcccaaactggccgttccgattgaaactgaacccgagaaaaaaatggaagaatcagctccgattattgtatcgcaattgctcccaatgatgcgtcccttggccggctcaatttcgggttgttcgatggatggcggcgaatctgacgatgagggcggacagcttcagattcctcgacctgacacagtgccgcagcgcaaatcgtccattttacatccgtcagcacatagcaaattgagtcctcaaccgcacattcaccacgaacacactgacgagtcgttgaccttcccccagtcgtaaggagtgaaccgaaggcgaaaggagcgcaaatcgaaatggtgatcttccaacagcaattatagctgagatcggctttttgtttgatgtaaaatttacttggacttttgaggaatgacttttttgggcaannaaaaaaaaaaaaaaaaaaaaaaaaaa

SEQ ID NO: 90302 - DNA, 817 bp, Heterodera glycines
gatcatagaacatacaatacatcattatgcttttacttgcctccctccgaggtccgtgtcgtcgtcctcgcgttctcaaaacgctgcgctctcttaaagtccctcacttttccacaatgaaccgtgactatgtcattgaaactgtgaatttcacttccgaacgtgactctgtgttcaaattcttgcaagaagtgtttttggtcaacgagccgatcacccgcgtcatcggttgcaccccctcggacacctcaccaatattcgacgacatttgtgagaagtgttctaaatttgatttgtcatttacggccaaaaacaacgatggaaaaatactgggagttctgttgaatgcgcccttcaaattggaaaatattcacgaaagctacagagacattgggcgcatgccgaacaaaaaggaattcggagaagagattcgcaatggcccttttccatctcaaaatgccaatcgaatccacgccattctcactttcgtgaatagtcatatcgcactgttgccccccgaagaggatatcaaattagtcgaattgcaggccatggctgtaggtccaggacacgccaggactggcttgggctccggtatgctccgtgcactcatccaaacggcttccgcaaaaggctattcccatttgttcacctgtgccaccgccatcgcctctcagacggggcttaaaaaatttggctttgacgagatcaaaactgtccctttcaactcttttctggaggacggagtgcaatcttttctggggttcacgacaacggagtgggcgcaaaacttgtggcattgcatatctgaagtctg

SEQ ID NO: 90303 - DNA, 740 bp, Heterodera glycines
gaccattagccgtcattgtcgcgaaatgacctggtcgatcatcttactcgatttgaccgcatttttgagcaagttgcttcgcaagtgtatgctctgaatgattcggcagagaaactgcgcgacatttttgtggaacaccgacaaaaattgggtggccatttcgcactgattgacccatttgagaagcaaaaagagcggcgacgactgatcgacgcttattcggcactgaaaggcatcgacgcctttccctcttcgaatgcgcttttgcaacttggcgaatattttccgaagcaacaaccggggacggcacagccccaatttgggatgactcagttcggtcagccctctgttggtggtggcctttttagtgcctcaaaagcgcccgccttcagtttcgccccctccgctcaacagtcctccaccaatctcttcggcacaccaaaaccaacgccttttggtatgccaaccacaactgccacctcgccaagtcctttcggtgctgcggcagcagtcattccaacttcggctggcgcgtccgctgtgccgtcgcttttcggcacttccgtctcttccgccggcggttcgtccgccccttcacagccgacatttggcgggttcagcaacacgctcagttcggcaagcagcgggacgctcttcaaaggctcggcacccgccaaaccgacaaatcttttcggcagtaaatgatccaatggcctattccttctatttgtttttttttg

SEQ ID NO: 90304 - DNA, 492 bp, Heterodera glycines
gtccctttaagcagcgtgaggatgactttgaaaatagttagttctcttgagaatttgatcagattgactccggatgtccattcgattcttgtcctcgatggggacggagttccggttgtcagtgcaggcgaagagatacgaaatcggtcccagtattcaatttcttacaattcgcttgtcgagcaggccaaaaagttgggcatgggagaacagaaattttgggtgtttcgctacgaaatgaaccaggtggttatgctcaggagggatgcatttgccgtattcattatggcttctgcaaatgccaatatgggaattctctgcactatgtcagcgcaacttggaccaattttggaggaatgtaaagtcatcgtaaacgaagtcataaatggacagatggccgggcaaagtccgagataaatgaccaaatttttcttgtcgagaattttacatcataaagttttaactataataaaaaaaaaaaaaaaaaaaaaa

SEQ ID NO: 90305 - DNA, 642 bp, Heterodera glycines
  unsure (1)..(642): unsure at all n locations
gggacgtggaggaccaattgttcgacttttacacgcccagcgagccgaaaaagaaaaagctcctccaccatccgtcggccgccgcttcgcccgtcggtgcgcgttcctccctctccggcactcgcattggttcacttgcgctcggttcgctgactctcaacgcggcgcccgacttggaattatattctcccgctttgccaccctccgcttctttgaacgccgttgcgccatcgaaatacggtccctcgcccgcagcgaactcttcggcacggcaattgctcggaggaggggcaaggggcggagattctgttggcagtgttccgtcggcagttgcgcctgacgaatgtccgctgaagaagaaatacgcgaaggaagcgtggccagcggaaatgagaaggcgttcgggcagcattctctgagcaaataagcaaatgaactcgaataaaactgcaaagtttctgcgaaacaccccattttcttctgttgttaaaattgtccgttttatccctcccttttcatctcattcattcctttcgctcattcttctccatttgtgtgtattttgtttgctatttttgtttgtttgttccattttcgttcgaataatttttgccgattaaattttcttttnaaaaaaaaaaa

SEQ ID NO: 90306 - DNA, 582 bp, Heterodera glycines
attccatccccttataataaatattacttccttctcttccgaattctctattaaaatttgattgccgtgcaaaaaatggacggggacggcgacgaaagctattgcgactcggacttggagttggagcggagctcgtcggcgaacaatgtcaaccaactgacgttggtgcccaccgaattcacttccattccggaggccatgcagaattttaatgccgattttgactcgagatacggggcccagcatgcgccgttcttccatggatctctgcaggatgccattgccgaggcgttcgactcgcccgcgggtggcgctgaacatcgacggcctttggccatttacctccacgacgaccaatcagttgcggcgcacatcttcgctcaaacggtgatgtccaatgtgaatgtgagcaacctgctcaagtgtcagttcattttgtgggcttgggacgtttcgttggcggacaacaaaaagcatttgttcgattggttggagttggccaacctgaccgaagtgtccaactacatcaaaatggtgccgcgttccgaatttccgatgcttattgtgctgatcaaggatcgt

SEQ ID NO: 90307 - DNA, 660 bp, Heterodera glycines
  unsure (1)..(660): unsure at all n locations
aaccgctctaaaaccgccgaaatgcctcccaagagtaaaaagatctctccaaccccaagaggccggctcctacggtcctcaagtgcgtgaaggcgagctcgtcttcagcgttgcccacatcttcgcctcgttcaacgacaccttcgtccacgttaccgatctttccggccgcgaaaccatcacccgtgtcaccggtggcatgaaggacaaggctgatcgtgatgagtcgtccccgtacgccgacatgtgggccgcccaggacgttgccgtccgctgcaaagagctcggcatcactgccctccacattaagctccgtgctaccggtggtgttggccccgccacccccggacccggtgcccagtcggctctccgtgctcttgcccgtgccggtatgcgtattggccgcattgaggatgtgacccccatcccgaccgattcgacccgccgcaagggtggtcgtcgtagtcgtcgtctctgagcgcgcacggtgggctattgctgttcttcaacacattggtctctgttgctggctggtcagaaacacacccatgggagtggagcgcagtcgtgtgtgaggttgccgtgtcgggttgaggtgtcattttcttgttgctttgcctgtgcgaacacaatacatacatggccgctgcngaaaanaaa

SEQ ID NO: 90308 - DNA, 626 bp, Heterodera glycines
gtcaaatctcgtcaaaatgtcgctcgttgtctccgaaaagggctcgttctcttacatcttgcgtgtgctcaacaccaacttggagggtaagcagaagatcatgtacgcccttacctccattaagggtgtgggtcgtcgctacgccaaccttgtctgcaagaaggctgaggttgacaccaacaagcgcgctggcgacatcaccgccgaggaactcgagcgcattgtgaccatcatccaaaacccgctccagttcaagatccccaagttcttcctcaacaggcaaaaggacatccgtaccggtgagtacgcccagaacgtgtccaacgctgtcgacaacaacctccgtgaggatctcgagcgcctgaagaagatccgcgtccaccgcggtctccgtcactggtggggcatccgtgtccgtggtcagcacaccaagacgactggccgtcgcggtaagactgttggtgttgccaagaagaagtaagctccattttggtgccgaaaatttttttgtcgtaccgactgctctctgcctcggatttcatgtctttttgtcgtgtgtggcgtatgggttttcacatcacaatacatccgcaaatggatcatgcctgaaaaaaaaaaaaaaaaaa

SEQ ID NO: 90309 - DNA, 856 bp, Heterodera glycines
accctttaagagcaatttcattataccgcgattcgcttttttccctcataggagtgacaaagatggagccgtcaaatgaaaatgttaacggggacaacgtgccaaacgccgcgttgaagggcgggcatccgccggccgaaaaaattggttgcatgcgcattgcacgcaaggagcgcaacctgagccaacagccggaggagcgggagaagagcggcggcaccacgcccgcctcggcatcggagagcggcgactcggcgcacagcgagggcgagacgcgtgtgcggccgggcgcaaccaatgtgcttgcgtacaccgacttggccaaacagaccaagttggattatccgactgatgcggtccgccactgccatgagaagccgttcccaagcaagcaggcatacactgcgcaccgtaccaacgcggcgcagatgcaagcgcaccagcagttccagccaagacgctttggacacctgaagttccagacacgcgagtacggcccgttgcacaaacagtgagggggaaaatgaatagtgccaccgacggatggatgggagagggatgcataggaaaacgatcgacggatgatgagataaaattgggcgagagcaaacgacgacgagatgccaagagttgtttattttgttgttttgattccagtgtctgatggagcactgcttttctctttctttcttttctgtcatttccacacttttcccttccttttttcttgacatgggccaaaatgttgatgattgttttcgtaacaaaacttcaaattgtacaaatgcaacatttctcatttatagtaaattattttgttttgaaaaaaaaaaaaaaaaaaaaaaaaaaaaaaaaa

SEQ ID NO: 90310 - DNA, 656 bp, Heterodera glycines
cttcgtgaaaaattcggcacgaggaaaaacatactattgtatacctgataaatatgtgcatcttccatttctcgctttttaaataaattgttttgaaaaatttaaccgacctagacagctttatacaaatgataaatgaccttgggttccagagagctcgtcaacttgagacacacattgaagttttacgccgcaaaattgaattattgcgagaacagaattatcggttgttggagaaccgtcttctgagagaccagaaccaacttctgagcgatcagaaccaacttctgagagaccggaaccaacgtgtgagcgagcagatccaacttctgagagacgccgctaacgagcgccggcaggctggcggtggcatcgacgagggtgccaacgtcggtggacaggccgaaccaagtgaccgtgatgccactagtgccgaaggacagcgcgagccgaacggtggtggcaacgatcgtgatgcgggtgccaccaactgactggcatttacaagaccgagagaagcagtttcctgttgatgtaagaacataaacaaatgaaaaccatccactttttgttgcagaaaatgtattagtaagatcatacagaaaaatttaatagcaataaaaagatgtgtgtgaaaaaaaaaaaaaaaaaaaaaa

SEQ ID NO: 90311 - DNA, 471 bp, Heterodera glycines
ggtttcattttccatccaaaatcaaatctttgacctttgaatttcaacccttcacccatgccatttgtaccttatcggctcaaaaccatggaggagcaacaacctctggcactgttctactaatgaccgggacaacatcagcaacaagcagcactaataacactattaatactaataataacaacaacaacggtaacagtacctgtgtgaaagggtcgtcaacaacgcatacggtaacggcgcctccatcggacatcagtttgacagagcggatgaagcatttgctgaacacgggcaatgacgcggatgtgcactttttggttggcagcgatgacaaaaaagagcttcttcctgcgcataaactgattttgaagacggcctccaatgtgttcgaggcaatgtttcgatttgacacggaaaacttgttccgtccggcatgttgaacaaggacgagctgatcagcgtgtatct

SEQ ID NO: 90312 - DNA, 836 bp, Heterodera glycines
ggaccatctaaaggcgcattctctactaccaccaccccgacctccccaatttccactacggtccgcagcatccgatgaaaccggcacggttggcggccactcacagtttggtgctcaactacgaactgcacaagcatttgacgtgtgtccatccgcccaaggccacccaacatgacttggcccgcttccatgcgcccgaatatgtgcagtttttgaagcggatttcgccgctgaacgcggatcagtacgagggactgttcaatcgctttaacattggcgaagattgtcccgtcttcgatggcattttcgacttttgttccctttacaccggcggaacgctcgagggcgccattcggcttaaccacggccaagcggaaattgcgattaattggagcggagggttacaccacgcgaaaaaggccgaagcatcgggcttttggtacggcaacgacattgtgatcggcatcatccaactcttgaagtgccatccgagagtcctttacattgacattgacattcaccacggcgacggcgtccaaaaggcgttcaacctcaccgaccgggtgatgaccgtctctttccaccgctatggcagatatttcttccctggcactggcgacatgtacgacgttggcatgggccatggccgctatttttcagtgaacgttccgctgagggaagggatggacgacgaaagttaccacagcgtttttaagcccgtcattcaggccgtcgtggacaatttcaatccttcggtgattgttctccaatgtggcgccgattcgttgggctccgatcggctcggctgttttaacctcagctttgacggccacggg

SEQ ID NO: 90313 - DNA, 363 bp, Heterodera glycines
gtttcttggtcgttactacacggtgtttgatgtgggccaaagtcgtgttggttttgcgcaggccaaagacggaaatgaaattccaattgagcctcaagtgcgcgattgcgtaaggggaggcgcactttgctttgatcattccaacggagttgacgattctgatcagcagatggttgagggcgattttgtaatgacggactgaagaaaattgattttatttatgcaattttcagttttatacaatttttaatccatgacgaagcctatgagtaaactatttttcctagtctgataattgtaatcaccatgtaattatcaatcgatgtgataaataaatcattaaaaaaaaaaaaaaaaaaaaaa

SEQ ID NO: 90314 - DNA, 430 bp, Heterodera glycines
  unsure (1)..(430): unsure at all n locations
atttcctanaatgtccggaattgatcaatagagttttccaattcccccaaatcccgtgctgtgccttaaaattgtttttaaattcaaaaaataaataaaaaacacttgtaaaagtttgtatttttgccaaatgccccaaggtttgacaaatgatttgtggccattcagctgagtaaagcctctccaattggtccgcatgaatcagaacttttcttattgagttccccgtcatgtcctttttctgaacgcttccctcctgccctgatgctccggaaaaattcgttcgcaatttccgcgttttccgtcgatgcttcgagctctttgataagagcatttccaatgccctggaagacgtgaaaaggcgccagaattattcgttcaaactcaattgattgtaaaagtggctcatcgacagttcccatggtgagcg

SEQ ID NO: 90315 - DNA, 522 bp, Heterodera glycines
  unsure (1)..(522): unsure at all n locations
gtccatttaagataagcggctctccgatctttttttggattcttttatttaaataaatggataacgaaaaatatgccatgcttgtgcgttccgttcacaaaatcgtttctcttgcggacgaactcattgagcagaacaacgagttgaccgaatacgtccagggtttggagttgcagggccagcaattgcctgacctcgaaattccggccagggatatggtttctgctcttttgcaaaactatagtggccagagacacgcgacgggtgttcaggcaaagatggaacttcttagagaggcgatcaacaatatttcgaaacttgccgatttgttcgtggctcgtaactgttacttgatcaagcgaattcatgcacatttggagacggaacgcttccgtaccaatgatagagggattaactgaacgaatactgatcaatcaaatgctttgtttttgaagacaaatctacaatatttttcatttaaattatggtttattagttatgaataattgaaaattttcncta

SEQ ID NO: 90316 - DNA, 860 bp, Heterodera glycines
agggcgtgtttcactgctgctttttctgttccgtcgcaaaaggggcgatattcccgcggagaattaatcgagaaaatccgcacaacgccacgcgaccaatggacagaagcaaaacgaacaaagggagaagagaaaggcaatcgctggcagacatttcccaagaagtgatcagccaaatcctccgtctgtttcccttctcttcttcttccctccgcgttcacttctctccattctcttcgtccctgcttttccgtgctaagtctacttcatctgtccaacagctcaaaaagcaacaaaatatcccctcacaatcactttgtcgcgctgtgatcaatgacaatgcgaatgtacaaataatggaccgaattcgccgtgtcgcctcgaatttgtcgctaactgcgaagggacaaagagaacggcgacaaaatttggcattactttggggaagaggagaagcgaagaaagcgaaaaatggagaacaaaaggaaaggacgaaggaggagggggcattgagcaaattgtgtaagatgtccgtcgacacaatggcaatcactgcgcttccgctcgactgttggcttaaggaacggctcaaaaattgggtccaattgtccgggcacgaaggaacgattgtgcccgcctcaaatcacacgctttggaagaagcagccgaggggaaatcgggcagaggcccatgcttatgaagaaataatgagagactcggaattgtgcggaatcactcccaaattttacaaggaaatcgctcacaacaacgaaacattcatcgaaatccaagatttgctggcacaattcccaaacacaaaaagtcgtgccattatggacatcaaaattggcacacgcaca

SEQ ID NO: 90317 - DNA, 561 bp, Heterodera glycines
gtttcatgttaaaccaattaattacagttgcacttgcacgttgcactttcttgatttcttcacaacaagaacatttcgcggtaaccaacgcgacttggccagggagcgcaatctgaagaaacagcaacagcaaaaaaagcaagagcagggcacgtccactgagaaacggatggaaagggacgcagaagcaatgcgcctaaaacagcagaaagctgcagcgaaaaaagccgaagaggaaaaggcaaatgcacaagcgccgaaggtggtgaaagtggaccctttgaagggactgtgacaagcgaaaagaaccactcggccatgggatgcacaaactgacgcttttccgtgctttatttagtcaatttttcgaattcttttcagcaaaaaccataattaacaaaacttctgcccataacaaaagcatcgcatttaagctatgtagttgaacgccttcatattctttcaaatgcttcatgtttttatatgtgtgttacgcttcaataaaggctatccgtttaaaaaaaaaaaaaaaaaaaaaaaaaaaaaaaaaaaaaaaaaaaa

SEQ ID NO: 90318 - DNA, 851 bp, Heterodera glycines
gatgcttttcctcgcctatagggcaacattatgtaggaatttacgcctaagtgtcgtttcgaaagcagcaaataatgttgcggaacaggggacttcttcagtttcgggaaataaggagaatctgttaaatgcctatttacagctctccaaatgccgtctcaccgcattgatcgcttgcacttccgtcagtggttttctgatgtcccccgccctctcttccgccccctcctcccttttcttctcttgcgtcgttggcactgcgcttctttcggcttctgccagtacatgcaacaacgtaatcgaacgtcagcacgataaacagatgaaaaggacgcgttcgagagtgctgcccgtagggaggttgacgcccattcacgctttgctcttcgccggtgccacgggaactgccggacttggcatcctttgcctcagttgtaatcacctcacctccgcccttggcttcgtaaatctcgcgctttacgccggtgcctatacgccgatgaaacgaatccatcacagctgcacttggatcggtgccattgtgggtgccatcccgccactcatgggttattcagctgccaccggtcatctcgattcggccgcttttgtgctcggcgcactgcttttctcctggcaatttccccatttcaatgcccttagttggaatttacgtgccgattattcggcagcgggatacaaaatgatgtgcgtgacgaacgaaggattgtgcaaacggacaacattgaggcactctgtggcgctgctttgtctctgctcttttgctgctcctttcacacatttgaccacttggaccttcgctttcacttcactccctctaaacctttcaatgc

SEQ ID NO: 90319 - DNA, 850 bp, Heterodera glycines
caatctttgattagcaaaaatggtatcagcaattgcacaatatttcctagcctttcttctgtcagcatccgttatcgcatttttctcgtttcttcttctgactgctttgtccattttcaaaccatggaccaaaaggaacaaatcccatttcgtcgccccccgttttcactttcgtccggaagaagaagaagaggcgaatgcgcagttcccttgcctgctgacgcgggaagagacgagttggaaggggctgcagcactcggaacccgaactttacctgtcggtaattgtgccagcgaagaacgaggaaaaaagactccctcggatgctcgacgagtgtttgaaatatttggaaaagagggcggccaaggactcggaatttacatatgaagttattgttgtggatgatgggagcaccgacggcacagctgatgtggccttctcctacgcacgttctcaccccctttttattctccgacttccaaaaaacgtcggaaagggcggcgccgtccgcgagggcgccctctgcgcccgtggccaattcattttgttcgccgacgcggacggtgcgtcacgattttcggactttcgaagattggagaaacaaatgcattcgctttgcaacggcgatgttttgccgtcgtcggagccgacggattggacacatccggcaattgtggtgggttcgcgagcgcatttggaagaggaaagcatgagcagaaggtcgatattgcgcaccgttctgatggtcggctttcacgttttggtttgggttttttcgggtcgaagtgtcagggacacgcaatgtggcttcaaacttttgagtcgtgccccggcagccaaactctttcct

SEQ ID NO: 90320 - DNA, 674 bp, Heterodera glycines
cgtaggggaccgcctgaattgggaatagtttggaggaccattaacatcagttggcactgccacggcgttttcaaggcacttctctcttttgagtttgccaattactcccgtctgaacgaatccgaagtcgaccctttgctgctttcctgggatgttctgatgcgtttttttggagatttggacgtcctttcccgggttcgcttttgcgatgccatcgatgtcaaaaccctttccaatgcgttggcccatttgtttaattctctctccgaccccccggggcataaagatgccatttgcgttgtttctaatgtcgacgagcttttcgctggcccttttcactataaattggtggaccgtcctttcgatcgtgaacattttacgagtaatctcttcttccggactttggccacgatccccgctttgtttcgcgaatggcacggcactctcagcaaaacggaagcgaacacagtcaatgaatacacccaaaaatatttgagtcatttgcttattcaacgtgaattgcgcagtttggaaaatatgaaacgtgggcggttagaggtccgaattctgtccaaagtgcgtgagatcgaatgcacttatcggctggaggagacgacaatgactttgacaatacttttgcctgaaaattatccgatcaaagcgccagaagtgga

SEQ ID NO: 90321 - DNA, 641 bp, Heterodera glycines
ttcctatctcccgtttctttgtgtttctgtgataaataaaaatgtcttctcattcttcttctgttgtggttgataattgttgtccaccatcacaaatgacaacttcttcttcccccgctgcctttcgttcttctgcgctcgcttttcttcagttcctcaacaaatcggtcacccctttccatgctgtcgaatcggtcgaggccattctgaagagtgcaaattttgttcaaaagtccgagtatgacaagcttcaaattcaaccaaaggatcgtttctatgtcaaaaaaagcgagacttccatttttgcttttgctgctggcggtgcctttaaaccgtccgaagcgggggtttccattgtcgtcgcgcacactgacagtccttgcttgcgcattaagcccgtctccaaaaagacctccgaacaatttcttcaagtcggtgtttcgctgtacggcggcggtctgtggcgcacgtggttcgaccgcgacctgagcaccgccggccaagtgttgttccgcgagtcggcggacgcggacgcgcccatccgacacaagctggtcgacctgcgccgcccgcttttccacattcccagcctggccatccatttggacagcgacccctccaagttcgagctgaacaaagaa

SEQ ID NO: 90322 - DNA, 539 bp, Heterodera glycines
ggtctgtgcagcacgaccagtcgggagtattattttgtgattgtcggtcgtcaggaccaacctctgttcgagatggacttcccgccaaagaagcgcgagcagcagcaggagacgcaccatttgctgcagttcatcgcgcacgccgcgctggacattgtggacgagcagacacttcgcgagacgcaaatgtattttaagattgtagacaagttcaacgaatggtttgtgtcggcatttgttactgccagtagaattcgctttttgatgttgcacacgcaaaaaaatgaagacggaatcaaacaattcttccaggaaatttatgagatgtacatcaaattctcgatgaaccctttctatcgacaagacactccgatcagatcgccaagttttgagcaaaaagcggcgatgtatggacggaagtttttaggggtttaaaaaagaccttggaaatttaagtttttgttgccatcagatttgtgtattttttgcattacattattttatacgggtttaaatcttaaataaaagaattcgctttt

SEQ ID NO: 90323 - DNA, 858 bp, Heterodera glycines
gtctctgttaacaccaatggataggttcgtctcatttgttaacactcaatcgtcgctgtctcggggggaaccggcgccacatatttgttgtacacttacattatgaaaatccaagccggccacagatatgaaatcggtgaccaaaccggcaaaacgtacattgttacgggagcgacgtcgggaattggtaagacgatagcgacggaattggcaatgaaaaacgccgaagttgtgatggcatgcagaaacagaaacaaatgtttggaagtgcggcgtgacattgtgctgaatacgaggaacaaaaaggtcttttgtcgaatgtgcgatttgtcagacatggaaagtgtacacgaatttgtgcggaaaatgaccaaaggaaaatacgacttcaaaaaaattgatggagttattttgaacgcggccaccaaaagcaaaaagtacagcaccaacaaagacggagtggagacgaacttggccaccaatcatttgggctccttccttctcgttggccttttgcttcagaagctgctcgaccaggacggacaatcgcgcattgtttttgtcgggacggacatagcgacgaaaaacagtctaaaattggagcttggcaaattgaatactgccaaatacacaaataaatttctccgttccaccgaaaaattggacatcgaaaaaggcaaatacgacatgcatggagcatacaaattttcaaaactaacgcagcttgtattcgcacgtgaattggccgaacgtcttgaaggtaataataaaatccgagcggtggtggccgacccgggcggtgcgaagaccaatctgaacaaggacgaaccatcgcagaagtttttcctaacgcgttgg

SEQ ID NO: 90324 - DNA, 661 bp, Heterodera glycines
cttttgatcattttgccaaattccctcgcctccctttgccctttgatctgttcctttttgttttcaaatgtgcggttgtccaacttccgcaaatgtcgtccacagttcgcccgaaccaccaaccgaaaaaagtgccgagttggccaactcatcgatcagcagatcggtcggcaacatcagcacatcgcctgccaagggattggcctgctctctgtcggtcaaccaaacgttcaaattggtcggcatcggctgctgtttgacttgcattacgaactttcccagcgcatttatgcacacttcggtgaacactgccgtgatggagttgaactcgtacctgaacgagtcgtacacgaaccgcggcactcagctgaccgaccagcacttctcgctgctccgctcggccatcaacagctgctggtacgccggccaaattgtgggcgcactctgttcgccgcgtttgtgcgacaaatacggacggaagcccgctttacattttggccactgcgatgatgactttggcctgtgcccttgcaaatgtgggccaaacttttcccctaccccgaagtgatggtcctccgcccactgatggcctccgtcttttccccgatgggcgaaaccggttgccatccctttccttcaggaaatttcgccaaccattctg

SEQ ID NO: 90325 - DNA, 478 bp, Heterodera glycines
gagacaagacagcaaaagagcttaagagggcgtttagggattggtacttacgaattggcgacggatgaagcgccaattggcaataagaagagtggaagtgaaaggtgtggtggcatttgcattatcgacccaacggatctgttacccattgagcggtacattcgccttcccagtggcgtttttcggcctgtaaaagtgccaacaaatgcaattacccctcttcttacgagtgaagttaatgataattcagcagcagttgctacacttaccgatggacgacttgctctttttacgactgaccactttgattcgattgccgatgattcggctacatttctgccgttttccacgactttatccagtggaatgatgttagattgtgcaatgaattcggatgggcgactgctatgttctgacaaatagggcaatctttttggcctccgttttgctttgaatggttttcatccacccgattttc

SEQ ID NO: 90326 - DNA, 642 bp, Heterodera glycines
ccgtccttgaaaagtcgcctctcagcgacggttcctcttctcccaatggccctacgccgacgtgccgcgcttcgatggtcgactcaaaagcaattcgaaaggcgcactgtcaggtgtgcaatttggacatttgttcaaccgcacgacagcgacacgtttatatggtccatctgaagaagaaagatttgttcaaatgcccccactgcgaatacacaaattcgaattccgtgtgggaagtgcaaaagcacagccgcgtgcagcacggcaaagacgcgcgaccgatcagtcaggaggagaagcacaagttggaaattcagatgtggagccaactttgtttccccgaatggaaacagaaacggaaaattgagcacggcgactcgacggaagaggagacagcgctgaaacggcgcagagagggcgaaggcggcgctgaagtggacgacttgttggagggatttggcgaactgttggggcacattttgcagcagcaaaacgaagcgaaaaacaacggacaaatagcggaggaggagggagaagaggaggacgaacagcagcaggaaagcggaacaacggaggagcagacggaggaggacgaatggcgggacaacgcgtcaccaagtgacaaagcgccgacaacggcgg

SEQ ID NO: 90327 - DNA, 1288 bp, Heterodera glycines
  unsure (1)..(1288): unsure at all n locations
cctgcttcgaggaacaaacgttggaggcggtggtggaaatgcctcacgttcaatcggtgaagtgatcgtcccaagaacttcagtcggaataattatcggaaaaggaggagaaacaatcaaacgtttggctgctgagacgggtgcaaagattcaattccggcccgacgatccaaacctacaagaacgttgtgcggttatccaaggaacgccggaacagattaaccgtgctacgcagatgatctctgagctggtcactcgcagttccggtgggggaggacaacaggaaaccttttacatgcatgtgccggcgaacaaaaccggattagtcattgggaaaggaggtgacaccataaaacagattagcgcggagacgggggcccatgtcgaactgtcgcgagactcgccacccaattcgactgagaaaatattcgtcataaaagtgggcgatgttgcaccgggaacaccactaccatcttttcacggcaatgctggcattaccaatgccacaacgcctttggccgttggaaatccctacggacccacgccgcatcaagcttttagtgctgcgcctgctcagcaagacccttcggcttggactcagtattacaaccaacaacaagcgatggcaattgcggggggtccgccttcccaacctgcttcttttggtgccacgccggcacagcattaccaaacagtgcccgggactatgcaaactgctgtttcacaagcagcacagctccattcaacccaaatgcagcagcaacaaatccatcaacagcagcaagcgaccattgctcagcctcagcaagctgtttccgccggaatgggcgcagtttcttcttctggcggacctgcgattaatccgcaaactggacaaccggactacagtgcccagtgggccgaatactaccgcaccatgggaatgcatgaacaggccgcactcatcgaagctcagatgaagcaaacccacgccgccgctcaggcacaacgtcctcagcaacaactttacatgcaatgaaggcttgcagaactcgtcgaagaaagacaataatgtggctgaatttctggttatttggattgctttttctaatattatcagtttccgttcgatttcttttatatttaatcatcattacgaaccgttctttgactgatttatttgttttcagtttatatttctttcctttgattgagtttaactggttcgataccaatgttcgctgcttgcgtttcctttttcttgtctttttgctgtttatgcgttaaatgtgtttgttgaanannnaaa

SEQ ID NO: 90328 - DNA, 1163 bp, Heterodera glycines
gtttccgtcaagagcaaatcatggagaaatatccggcccgcaacaatctcgaacaccttgcgatgcttaagtgtaccgagaaaccgcacattgtgcgcaagacgggaatcatttgcacgatagggcccgtttgtcgttcggtggacatgttggtccaaatgatcgaaaatgggatgaacgtcgcccggatgaacttcagtcacggggaccacgaatatcacggcggtaccatcaaaaatgtgcgtgaagcagctgccaaatgcaccaagaagtacaacgtggctattgcactggacacgaaggggcccgagattcggacgggacttttggcagggggcggttcggctgaaattctgttggcgaaggacgcgtccattcgcctgaccaccgacccggcatttgagaagtcgggcaccgccgtcaacctctacgtggactacaagaacatcacgaaggttgtgaccaaagggtcgcgcgtgtacatcgacgacggattgctgtcgcttattgtggaagaaattttgggcgacgacgccgccatactgtgcaaagttgaaaacggagggaaattgggcagtcgcaagggcgtcaatttgccaggaatatcggtcgatttgccagccgtttccgagaaggacatcaaagacctgcgttttggtgttgagcagggcgtcgacatcattttcgcctcgttcattcgaaacgccaatggcatccgcaccatccgagaagtgctgggcgaggcgggcaaaaacatcaaaatcatcgcaaaaatcgagaaccaggaaggtgaggacaatgtggacgaaatcattgcggcgtcggacggcgtgatggtcgcccgtggcgacttgggcatcgaaatcccggcccagaaggtatttctggcgcagaagatgatgatcgcaaagtgcaacatggccgggaagccggtcatcaccgccacccatatgcttgagtcgatggtgaacaagccgcgaccgactcgtgccgaggtcaatgacgtggcgaacgcagtgctggacagctcggactgtgtaatgctttcaggcgaatcgaccaaaggcgattatccggggggatctctgaaaaccatgcaacaaaatttgtctggaaggacccaaacagccatttaccgctcccaaatacttcacaggagactg

SEQ ID NO: 90329 - DNA, 844 bp, Heterodera glycines
gcgcccttatttccgctgaagagattttggacacaaaaatatctttccaagaaagtgttcggaaaattaaaaaaacccatgaagaaattaatagagccttcgacatggagaaatttgacataattcaaagaacgatgcgaatgtattttgagtcggaagattcctcggatgtgtttgaaggctttttgaacgttgtcaaatatgtgaagtcacttaccactgagcaattggacatttcgctcgtcaaactcgctctgctcgcattttacgaatttcagaaactcggaatcgcgcaaggccaacaaatcccttttgaccttcacattgataagactcttctcttggatgcgctcgtcccgtgtttccgacttaaaaccaaatacatcgaagcgatcagttccgtattccatctgaaggacagggaaatggttgaagttgcgattgctcaaattaaaacccttttggagaacgaagtgccaaaggctgtcttttggatggaccatttgaatctgcgcgaccatttcccatttaacacaatcgtttgtaaacttattttggaaaaccaaactgctttgatttatcctttcgtcggtgaaagtcaatttcgacgtaataaactcattcattatttggacaatttgttgggccttgttttgcgcaacagacgagcggaggatgaatatgagcgggaaattatgaaaaaccaaaaacaattggagaaggttgggtaaggggccagagtacaaattggggcagtcaaaaatggcgattcttttcgtaaattttcagaaatgtcgctttctcacttttaattgttattgttacccttatactgttccgctta

SEQ ID NO: 90330 - DNA, 818 bp, Heterodera glycines
gtttgccttagagccggcaaaatatgttcaaacccaaatcgcttctccgccttttcctcattcggaaatgtgtcaattatcggtcaaagacttcattttctggttccgaatttattgaaaggcgagcccggctattggaattggttggaaaagcacggcccgactttgatggaaagaagcccttcgctttgctattggccaaacggagaagtttcagtgcccccgacgtgccccacgtttaccgccaatgttcccactttcgctacctttgcggcgttgacaggcctggctatcgactgctcatcggacccaaagagagcgtgctgttttgtgcccttcagtcggctcaccaaatcctatgggacggtgcgtcgccaagtgatgctcagctgatgtgtgcttccggtgtcgaccaagtcctcccgctcgacgagttcgacgcgtacatggcgggcacagttcgcaacggactgctcgccttggatttgccttcgatggccgatcacgctgccgatgcgcctgcacaaatgaagaaaatgtggaaaatgttgtcggacggcgtgtggacgcacgtctcactcaatgagcacgtggacacattgcggtggcgcaaatcagagacggaaaaggcgatgatgcgacggacatgcgcagtgggaggggaggcactgaacgcgatggtccgggaatgtcgtaaagcaaccaatgaatctcatattgtcggcttcctcgagttcgagtgccgtcgacgtggtgcccacttcctcgcctatccccccggcgttgccggtggttcaaatgcgaataccatccattac

SEQ ID NO: 90331 - DNA, 778 bp, Heterodera glycines
gtttcatttaattcaattactacaaatttctttttcaacttgaaaaaatcgccgctatggccactaaagcaggaattttcattgtgagtgcaaagcgctgcgctttcggtgcctttggcggctcactgaaaaatcacacagccaccgatttgggcgaaattgcggccgctgcggcgcttaaatcgtcctcaatcgcggctgagcacatcgatcacgttattttcggcaatgtcatccaatcatcgaaggacgcggcttatttggcccgtcacatcggcctccgagttggcgttcccgtccatgtccctgccgttactgttaacaggctttgcggctcgggcttcgaggcgattgcgcagggaggccaacaaatcctcgcgggtgactcaaaggttgttttggcgggtggaactgagtcgatgagtcaggcgccgttcgcagtgcgcggcgctcgcttcggcacacagctcggtgccaagattgagttcgaagacgtgctttggcaaggacttaccgacgcgcacgcgaacatgccgatgggaatcactgcagagaatttgggtgcgaaatacaatgtgacacgagaggaggccgacgcttatgccattcggtcgcaaaaccgctggagactcgcaaacaatgccggctatttcaagtccgaaattgtgccggtcaaattgcagggcaacgcgcgagggaaaactgtccaggggaccaacccccgggaaagcaccgccgacaaatggcagctgaaaccgttttaaaaaggaggcctctc

SEQ ID NO: 90332 - DNA, 953 bp, Heterodera glycines
gactgtctctgcaccgctgccttggggtctttttctaagggcttttaaggtggcgattgggaattctttgcacacacggtcgatgacctctatcaccgtgctgtgaagcatggtgatttcatcaatgatgatgagttgtgcctcacgaatccgtcggggaaagaacctctcaagcggaatgcttggaagcctgtccagtgacacatctctgaccagtctgaaggtggaatgggctgtcttcccatacggcagcaaaaaagctgcacacccagtggatgccttaaggataacgtccatcggaccacaagcagggctcggcttgtttccagcggaaacgctgatgcgaaagccttttttgaacacgcaaagaacgccctggtggcgttttcggcctgagaaatatctcatcgtcatgacaggagcccgccgctgggcatcttttaaccgcaactgttgaaaccgtataggaacggagccaattctccgtttttggcacacagaccattgttattgagctcaaacgtagccgaactgccctgaggagctcgtcctgggctgacctcatcagaaatgagttaaccggatcggatggcaacagagtcaggatcgtgcccgcggatcccgagcatttgagtcccgatggcgttcttgcgcagtcctccgagcgcagcatcaccgagatgggcctggatgaggacgaaatgccatgaagcaaagcagcggaagcaatgccattgcggcctcatgcatatgtgcccgtcctcgttcgggatttctccaggcccgggctgctgcgtgtgcccgtctcgccagctgtagtcgttcttggacctccctgatttcggcccggcatttctcgcgccctttttcactcggcttttcacctgatcagccgtcggctcgggaacatcccgccagtcaaacgattaaaaccctgaattggctaccgagtc

SEQ ID NO: 90333 - DNA, 745 bp, Heterodera glycines
  unsure (1)..(745): unsure at all n locations
aaaattcgattgtttctttgtagaatggaagctgtcgggatgaactttgatcatcatccgtttccgtttgaagctcaatttccgcacctttgcccatgaaaatgtggtgacacaattcatttggtggaacactntaatccccatatgcgccacagccaaagcgacttcagtgccttcgatatctctcgccgggtgcagccgaagtccgtagaaatcgcagcgccgtgccgtctccagcagaacaaagtccgcctcggccggctccatgccaatcagtcgccggtgctgctccaacacggcctgtgcaaaagtgggcgtttggtgcggcacgaaatgagtgccggccaaataggcgccggcgtccggatagtccaacggagagaagtcgccgcactccgactgcacaatcagtgccaccaacagtgcagcggtgttctcgttggtacagattagctcaccacgggacaaatcgcgacggatttgaagagcaaaaaggtagcgcgtgtactcctcctccaactcggccgggttcggcgtgtaaaatttcaccacaaagaaaaagcgggcgtccgattgggcgaccataatttgacgcaaaatgcttttgtccttgtcgagccaacatctgttcccatagctgtcgatgaactccaagccgaaatagtcactttccaacagattcaaatacctacaaagttcctcaaacagtgcttggcccgccgctttatgcctgaaagggaaaaac

SEQ ID NO: 90334 - DNA, 206 bp, Heterodera glycines
gagccaattagatgaagacaaataaaaggcaaaaagtttcttcatcagaagaagaattcgacccgaatcagaaggatgaggattatgacctgctcatggatgacgaagagcgagaaaaattcgacaaaatgactgaaaaggagcgagaaattgaaatttacaagcgactcgagcagcgtgaaatcatgaagacgagagagaaaata

SEQ ID NO: 90335 - DNA, 818 bp, Heterodera glycines
gtttgactttcattccaagaattccctccacctttttctccaatttcttaaatgatgtccaacgcaaccaaaaacattctcggcactccaacaatcgtcgacaatgttagtttcgaccccaaagtgagcgccaatttccttcacaaagccatcgaagagaagcgaaaggatgagattatccatttgctgtgcaccatttccaaccaacagcggcaagaattggcacgcgaattcaaacaattgttcggcgaagatttgtccgccaaactgaagaaggcactctctggcgactttgaggaactgattttggctttgttggaaccgccagctgtttacgatgcgcagcaaatgcaccgcgcgatgtccggcctcggcactctcgaggggcgagggcacggcatgacattgcttcaattggcttttgtttttcagatcggttctgattgagattttggtcacgcatagtaaccgacaaattgatgagatgaagcgcgtgtacgagcagctgtacggccatccgctggagaaggacatcgtcggggacaccagcggcgcattccaacgactgctcgtgtcgctgtgcaacgattcgcgcgacgaaagttggagctccgacccgatcagagcgaatatgacggcacgtgctctgttcaaagagagcgaggtggagagcggggtcaacgacgttctgttcaaccaagtgctggccaacgagaatttcattcagttgcatttgattttcgaggagtatcagaaggtcagcggtcatcccattgagcaggcaattcagcaacagttcagcggagacacgagggacg

SEQ ID NO: 90336 - DNA, 1008 bp, Heterodera glycines
ggcaactttaaggagccggtcgccgtattttactctgctgagatcgcctgcggattgttctacctgcattccaagggcatcatctacagggacttgaagctggacaacgtgatgttggagagggacggacacatcaaaatcaccgactttggcatgtgtaaggagggcattcagggcgacaccaccaccaaaacattctgtggcactccggattacatcgcaccggagataattctctatcaaccgtacggaaaatctgtcgattggtgggcttacggcgtccttctgttcgaaatgctcgctggacaaccgccgtttgacggggaggacgaggacgaattgttcacagcgatcaccgaacacaatgtctcttaccccaaatcgatgtcaaaggaatcggtgctgatttgtaaaggatttctgagcaaagcgccctccaaaaggttggggtgcagcgcggacggagaacggcaagtcaaagagcattgctttttccgtcggatcgattggcacaaaatcgaaactcgccaagtgcagccgccgttcaagcctaaaattcgatccgccgacgacacttccaatttcgactccgaattcactggcgaagcgcccaaattgacgccggtcgaccgattgttcctaatgaatttggaccaaaacgaattcaaagggttcacttttgtcaacgcggaatttaccccccagggcgaaaataaaacggcggacaaaacaatttgaaggggcggaggacgacgacgaaacgaaagatgacgaggacggaccaacagcagcgagtgttcattggcactgatcaccaaaatgccattggcagttccaaagtcgccctctctcttctcgcacattcactcacccaagcgaaatgttcgcattccctcaccactcgccatttcttcccaattagctgctttattattggaaagtttgtatttgtgttttagaaatgtctatgattaattgatacatttcatcattttaaaaaaaaaaaaa

SEQ ID NO: 90337 - DNA, 751 bp, Heterodera glycines
tgagaccctatcacttcactcttcttcaatttccaattccgatttttcctcgacttttttctccctccttttcatcactttttcgccatccttcccctcgtttgcgtcaaataatcccatcacgcaataaattgttgagaagaccctccttttggtcacaggaaaggatttgagggacggcaaggtgggaaacggcgggaactccgacccctctccaatccgatccatcgttcggcgtcatccgcccttctcggcgcgctcgaccactcctcctcccttttctcgtcgtctcggcttttcggcgtctccgctttttgagcgtgtctcgttcggtttcctccccccccccccagtttgtcccctcccttttcccgacaaactttttggtgccacgacccgggaacacaaacccttcgccgtccgccgaccatcttaagcctccggcactcaactcaagtcgccagccgccccctcttaggctcccgacaaaccctcaccgagtcgtcagccgcccctttcaggctttcgaccattcatcactcctctctgccgccagccgaccctttaggctcccggcaactcaacccttcgctgtccgctgaccatcttaggcctccggcactcatcactcaactcaagtcgccagccgcccttttaggctcccgacaaaccctcaccgagtcgtcagccgcccatttcaggctttcgaccattcatcactcttctcccagccgccagccgccctttcagg

SEQ ID NO: 90338 - DNA, 928 bp, Heterodera glycines
attaatcatcaaggtaaaaaatatggaccaaaatggagagggtggcgccttgttgggcactgataagcagagtgtttttcgcgatcgtgatgatgacaatattgcacagcagcaggattctactaatccaataagtcaaaatatggtttcaccaaaaaagcgttggacatcagcacttcgggttgtcacagcaatggcacgcttccgaaacatgccaaggcatcccaacaatcaacagccagcagatggtgccactgggaatatgaacagtgttgaaacgggcaaatgccgtaccgcttcgtcctcattttcgggctccagtgaatcggtgccaaacagtggtggccgaaattatgatgaagcacatgagaaagagtccgagtcaaacatcgatcccgtttatttggcattgaaagaagcaactgaaaaatatggaaataaagctggcaaaaatcgacgtttttcgcaaaacattggttgtggcggcgcaggcactggcgattcgaccacaacaccaagcagttgctcgcgcaacttgtctcaagcgtcgctgctcgactcgggcaccttttcggttagtggcgactatggcggcattggcatcagctccaacaatgccagcagcacgcgactgttcgtgagcggtggatcgacctcacaacttgaaggcggtcttttttcaagcgcaccaaataccgccagcggcagaggcgatcgcataaaactcactgaaaaaatgaaatcattctcattggattgtgccgaaccgccgtccgcagctgatcagcaccagcagaagcatggcattgccggtgtataccccaattacaggatgaagcaattgcgttctccacgaacacatgcggaaagttttgaccagtgcatgaagcggagctcgtcgcctgccgccgccacattttttgccggc

SEQ ID NO: 90339 - DNA, 657 bp, Heterodera glycines
ccaagcttgaggtatttattctcgagtataacttggattttacaatacctaattgactccaaaatggaatggtattctggtgacgttactactgctctgaacatttaccaagagaagaaaggcattcttatcgtctatgttttttctgatgatgtaaattccacaaaatttgaccaaatttgggattcgtttgaccattcaattctggatcgcgtcccttatgttgctattcgacttgctaaggacactgaaggcgcaaatcaattcgctcaattctttcccactccggtttttcctgtctgttactttctcgggctcaatgctcaaccgctcgaagttctgactgccgttgaacagatgaccattgaacgtttgaacagttcgctcgctaaggctatttcgctatacaatgaccaaatgaaggaacaaggcttcgccacagatgcagtttcatttcaatcgaaaagcagtgagaatgacagtggcaaaaatacttccgaaaatgttcccgagcctctcaatgccacttcgaatgacgagaaactcgaatattatcgcaaacggctcgaagaaaagcacaaagaagacgccatgaaaaaggagcaggaggagcgggagaaggagataatgcgcagaaatgaaggcaaagcactcgct

SEQ ID NO: 90340 - DNA, 730 bp, Heterodera glycines
  unsure (1)..(730): unsure at all n locations
gncattcctcagagcacccttttcatcgtncacgtggcttatgagttngcctaaaaagttcttccactttggccattctttcgtcgcccatccgaagggattgtctgaactcttcgaacttcgtccttagttgttcgcactgctccaagtcgttgccacattcttcgatgttcgtcgtttgcttctgttgctccatccattcctccaattccgctccgtccgccaaaaacgaacgcactgccaataccgacccggcaccccgtgccgcttccttggccatgccctccaatgcttttgcttggttctccacccgttccattcgctcggctacgctttcatgcccccttttggccagctgttcgccccgctgtctcagttcgccgaatgcctttctccacggcactatctcattttgcaaagtgtttgcgcatgccaacattttcttggccccctccgacgtcccaaggctctctctgcacaaaatcagatgtcgctgcttctcagtcagccaattttccgcttcggcagtgtcgaacagaaagtgttccctctgcaacgcttctccaattgcccgtcctctcagggcagcgcattttgtcagtttggcccattccctctccaattggtcgcatttttcgccaatttccttcgagcagatgtgtccggttccgatcagatgatgccctgttttgatcagattcggcacacgttccgaatgacagtccaactc

SEQ ID NO: 90341 - DNA, 1026 bp, Heterodera glycines
ctcagccgacgatcaccaaacggcttcggttttgccaaggctttttgtccttatggctaaatcggaagacccggcacatttggagcgggcgagtcgaatgatggaagtgggccaaagccattggaaggcacttttaaaaggcgaagaattgtccgttcgaaagtgccgccaaaggccaaccgcaaaaagcttctcccaattgtcctccgacagtctcaacacttctcagttttatcaactcattgcgaaacatttctgtgaagagtttccccagcaaatctgcttgggactgttcgttttggagaaaaatgcaattttggacatttttgcattgattggtgccgaatggcacattcgtcgtcctttctttcaaaatttgttttccgtgcttttcaatttgcaaaatgagggcgatcgacagcccatcgtcgatgctttggtcgaatttgaatttttcgcctcttccactggcggacattctccgtcagctgatgaattggttttcattctttctcttctctctgatttgtttcaacaatttgccacacttaaacctttacttttaccaagggaaaatgtcgaaaaattgtttaatttggtctttgtaagaatgctttttcaacttatttcgacacaaagaaaaattccttccgattatttcaaagcaatgaaattgttcttttctcttcaatcagttcgaaatttctactcggaaaatgatttatacactgtgcgaagtttgcagcaatttctgacggcattttgggaacatttggaaaagggcattccccgttggcatcgtttgcacatcgatcgtcagcattgggcagtgaaagtgcacaattcaaaagaattaggcgatgaattttaggaacaattgctgaagttattcaacgtcgtccaaaggataattttctccgcaaaaaacggacgcctcgcgggcgaagtgacagcaaaagcattgcgagcacttttgggagtttcccttttccaacggatggcactcgtgccggaaagcgctctgag

SEQ ID NO: 90342 - DNA, 880 bp, Heterodera glycines
attccccttttaatacacaacagcaaccacagcctaatgaagccgccgcgtccgaagaagccgacctgacaaatttggcatcacaggaagcttccgacaatgcgggtcaaatgactactgctgtttccaacaccaatgcacagcaacccaacgatgccaccgtgcccgaaggagtcgacccggcatttttggctgctctacccgaagatatgagacaagaggttatcagagatcatttacttcagcagcagatcagtcaggcggacaataccactgctcgggtggatgccgatgtgccaccagtggaacggatcgcagcaataatgggaatggagattcccgaaggaatggaccccgcatttttggctgcgctacccgacgacattttccacgaagttgttcgtgaccatcaacgacagcaggagctggcccgtcagcggagggcacagatccaagcacagcagcaagaagccaatcatgcaatggtccgtcaccctcacattcaccatcgacattttgcaatgcctcgtttcctgtctcggagtattcggcctcacactcatcgagagcttccgtccacttctgccgcagctgccacttcatccgtggaacgcactgtgccgctactggacaaggaatccataagcacacttctcgtcctgttcctgttggatcaggagaagttcgacacggtgcgtcttcagaaattgttgaaactgatctgcatacatccgggcacttgcgatttcaccatttgggcactgctgtcaatgttcgatgggctggacaagttcaaatcagtggacggttccgaggcacctgcggatggcggcaaattccaatttggatggatcaatgagcttcgtttacagaatgtttt

SEQ ID NO: 90343 - DNA, 1751 bp, Heterodera glycines
gtttcccttaaggctggaggggatttgtccgttgggtgccaatggccggggtcgaaagatgagtacgaacttcaggacgcaattggagttggtgccactgcgactgtgtttaaggcattctgcaagtcgaagaacgaaatgtgcgccataaaaagcataaatttggaaaagtgtcagacttcggtggacgaattgtcgcatgaaatacaggcgatgtcgctgtgttcgcatccaaatgtcgtcaattactacacttcctttgtcgtcggggaggaactttgggtggtgatgcgtttgttgaactgtggttcaatgttggacatattgaagagaaaaataaaggcaattggcaaagaccaggcggcctacggagtgctcgacgaagtgataattgcgacagttcttaaggaagtcctccggggcctcgagtacttccataattctggccaaatacacagggacatcaaagcgggcaacattttgttggccaacgatgggaccgtgcaaatcgctgacttcggagtgtccggttggctggcggccagtgggggagacctttcccgacagaaagttcggcacactttcgtcggcactccctgttggatggcccccgaagtgatggagcaggtgtccggttacgatttcaaagcggacatttggagctttggcattctgtgcattgagctcgccacaggcaccgccccttaccatcgctaccccccaatgaaagtgctgatgctgacccttcagaatgacccgccttcgcttgagacgaacgccgaccgaaaggagcagtacaaagcatacgggaagagcttcagaactgtgataaaggactgtctgcagaaagacccgtccaagcggcccactgcttcggaacttctcaaatactcctttttcaaaaaggccaaggacaaaagttggctggtccattcgctgattgagaatctcggctcggctccatcaatcccaaccattcccaaaaaggttgcaagtggcaagctgaagaaggacaaggatggaaattgggagttcgaatatgacacttcggacgaggaaaattcgccggaccccgaaaatgcgaccattcagcaaagcgcaagtggggaaagaccaactgtctccagggcatcgagcgaaggcaaaggggaggaacaaatgccgccgcttcaaacactgaacttggttttgcgggttcggaaccagcaaagggaactgaacgacatcaaattcgactactctccgaatgcggacagtgtggacggaattgctcacgaactcgtcaccgccgaactcatagatggccatgatctcgtcgtagtcgcggccaaccttcagaaactgatcgacttggcccagaaaaaggcggaaagaaggacgatcactttcgctctcaattccggcgttgcatccaatgaaattcccgacgaacgttctttgaccggttttgctcagctttcactgttagattaattggttcttccatcttctacaaccatccttttttcacaacaaatccatccgttaaaccaaccgatttcgcttgacttaaggaaaattaatcaccggcggaaaagtgcgattcgtttcgctttattttgctttctttttgctgatgccttacgaattccatttatttatgataacagtgattatttcgagttcgatgtttctggcccaattgttggttatcggaaaagtcactttttgggatttagcaaccgttagctgacaaataatcgcatccaaat

SEQ ID NO: 90344 - DNA, 1191 bp, Heterodera glycines
gaggccgtcgaaaccgtagggacggatggccaccgtacgagcccgccttcgtggcaggagccgagcgggcatcagccgacttcgtccgcgtccggcgccgcccatgcgttgcccccgtcttcctccaaccgacccatccgctcgcaacggacgccaatgaaggaaatcatcacgctggacgacccaaccgagctggacgagtttatggcccggggcgaggagcagtgcattcacgcgatgcgcgcgttcatcacgcaattctctctgcgacagaccacggtggccaccatgacgggcgtgtcgcagccgtacatctccaaactgctgaatggaaaccacagggagctgtcgctgcgctgtcgaaagaacatctactgctggtacttgaactgccgcagacaccccgagaaattggcgatgttcgtgcaagacccgtgcacgcggctggagacctctgccgagggcgagttggtcccgcaacgtcgcgagcgttacgtgttccgacccgtgcttctgcgcgttctcgagacgtacttccaaaaatgcccatttccggacatagcgaaacgcgttgagatcgcaaatgcctgcaacgcgcacttgcaggtggacaaaagaggtgtccaactgatgccgaaggaggtggtcactccacaagtaatcgccaattggttcgccaacaaacggaaggaaatgcgccgacgcatgggagggacggaagcgggacggagtcggctgaacagtttgtcggcgggccgctccaactcgccatcgtcgcccaactcagccgcacactctcgggagggccccttcgagttgcgccagaataaccaacagagtggcaacgtggacgaggcagtgctggcacattgtgagcagctgcaggcaatgccaatgtctgtccccactgcgtccaatcagcagcaaatgcttctgatcagtgatcagcccgagtcagtgccatccgcagccgacctggcccttgtgctgcccccgctggggccccctcaccacccaaactgctgcccacccgcaactccgctgctgcccccaaatgttgtgcagttctgcccttccgtggaccagcaactgctccatctgctccaggcccaacctgtggccaatcagctgctgttcctccagcaattgctggtcggcacttcgtcagcagacaacgactacctcaagcag

SEQ ID NO: 90345 - DNA, 793 bp, Heterodera glycines
acaatatcttttggctttattttttttataatccaagaaaaattttgaaaccatacaagctctaattgtccagtactatcctgaaaacaagctgttaatcttttttttccccttcctatcttttgtacatttctaatataaccctgcaatggtatacctgtagaagcaggagctgatgctattgtcgaaacagtaaataaagtctttttgtcctcataacgaaaaggataatactctaaaagatctttgaaagtatggatccccaactcctcttttaatagttgagccttatctaacccaataccttcaagaagcgttatttctttagataaaaaatcatccaccatgacaaaccatacctaatttttccttttctaatttatccataccttaaaatcttacctaatattaacaggtttagtttaatgaaattaaattagaatcttattattcttagttattctgtgaatttgtggaaaagaagaattaaaagccacgcaacaatagctgctatttaggtattttactgtgttttatagttaaaaatacacatgcttgtcggtaaacatagaagggaaaaaaaggaaacagttatttaataacttaagtatacattcggaataatcttgtggacaaacgtacatattaatatttaaccaatgttatccccttccagttagcttataaggcaataaaatgtggtttattagtggaaaatattttagtgtaaccaggtcttgtttggattgcgtgcttactgatgataatgaaatttgtatttttattgatttag

SEQ ID NO: 90346 - DNA, 808 bp, Heterodera glycines
gttttccttaatatgcattaccctgtaattactttgtacgatgatgatcatcggggaccagtacggtttctatcagttggtgttgcggaagcacgcgtgcagattgcgttacattctccaccagcttaatggcggtcagttgtcattggaagaccttaaacggaacatcgaatatgcggcgcttgtgctggagacggcgtacatggacgagacacggcggatttgcgacgaggacgacgacttggcggaggtcacgccagaggcggtgccggacgaagtgcgcgaatggctgacggcgacattcactcgccaaacggtgcaatcgcggaaggaaaagccaaaattcaaatcggtggccaatgccatacggacgggcatctttttcgaaaaaatttaccgtcggacgcagtccgttttggctcccattccccacgaatatttgccatttttgcggcaagtgaacaattggaacttcgactctttcgacctcaacgaggccaccaacggaaactctctcaagtacatcggcttcgagctgttcaaccgttacgggttctttgagcggttcaaagtaaatgtccaagtgctggagaactttctgctcgcgttggaattgggctactccaagcacaacaatccctaccacaacacgatccatgcggcggatgttactcaaacttcgcattggatgctttctcagacggggctcgcgagcactctgaccgacttggaaattctgggcgtgttgttcggcgcgctcatccacgactacgagcataccggacacaccaacaactttcacatccaa

SEQ ID NO: 90347 - DNA, 1005 bp, Heterodera glycines
gaccccttatcaaaaattttttgagtcatttctctgctaatgtttgttgcacttccaaactgttcttctcctcggaatcctttggccacttatccagattgcattgcttccttagacataaaccccgacagtcaaacttatggaaagctcatttctgtgcttgaaatgcccaatgagggtgacgaactgaacaatttgtgttgctgttcttccgatcgtttgattgtcacctcaattggcagtggtcggatttatgttgtggacacatccgacccaaaggaattgaaattggaaaagacaattgagccttcgacgctcacttcgcttggtgtcagttgtccgggcagagtttgctgtgcctccgattcagtgattgttggcacaatgggagacgatcggatggagaacaatggcaattttctgctgttggaccgtctcactttcgaaccaatcggattttgggcagagaaagaagggcaaaaaggcacaaaatttggcggaacagatttctgcattcaaaccaaacaaaatgttttgctgagcgtcgggtggggaacgccggccaaattccgcggcggacttcggccgagagacgtgacaaacggtcattacagcaacgaagtgaatgtttgggagtggcgccaacgccgactgatccaaaccatcgctttggaggccgactgcggatggatgccaatggccgtgcgctttttgcacaacgccgacaaatgccatgcttttgtgtgcactcttctcggctcggcaatttatcatttgtggagagaggagggcgaagaatccttccggcattgtttggccgctcatattccccctaagaaagtggacggttggcagtgtcccagtttcgtgccacaatttgttcaggatttgttggtttccatgaactgggccctgcccaaaatgcccgcgtttatttccgatttggtcatttcgtccgatgatcggtttttgttctcctcgaattggcttcatggcgatgttcgc

SEQ ID NO: 90348 - DNA, 723 bp, Heterodera glycines
tcctatagaattggaagagccaggttcgatgaagttttggtaagccaaaaaaaatcccaacatttaaaaatctataaaaaatttaaaaatgagaattcatgcgagattttctggaaataagcttaataggacctagttaagctgtaaaaaaaatttggggcgatttgaatgagaatagaaagagccaggttcgatgaagttttggtaagcctaaaaaaaatccaaacatttaaaaatctataaaaaatttaaaaatgagaattcatgcgagattttctggaaataagcttaatagggcctagttaagctgtaaaaaaaatttggggcgatttgaatgagaatagaaagagccaggttcgatgaagttttggtaagcctaaaaaaaatccaaacatttaaaaatctataaaaaatttaaaaatgagaattcatgcgagattttctggaaataagcttaatagggcctagttaagctgtaaaaaaaatttggggcgatttgaatgagaatagaaagagccaggttcgatgaagttttggtaagccaaaaaaaaaaatccaaacatttaaaaatctataaaaaatttaaaaatgagaattcatgcgagattttctggaaataagcttaatagggcctagttaagctgtaaaaaaaatttggagcgatttgaatgagaatagaaagagccaggttcgatgaagttttggtaagccaaaaaaaaatcc

SEQ ID NO: 90349 - DNA, 1185 bp, Heterodera glycines
tccactcctcctctccgaattcgctgataaaatgattattttatctttaaaactgctcacgttgcccgtcctcctctcaattttactttgcattgccaaagggcaaagcgtggaagaattgtgtgaaaagcatgaaaatgagttcaatgagttattcgtcgagaagaaaggtggtgccgtaccagaagtcttatgggaggaaagccttgaaaagaaagaggacaaagaggaggagaaggaaagactggaggagcaaaagaagacggagaaggcgaaggaaaaggatgcgaatgccaaaaatgtgtcatggctgcgcactttgctgggcaattatttgtgccaaaaattgaggaaaaaagatggagagcagaaaaagagtcaaaacgtgccgaagaaattgagttcgaaaacgcccaaagtgtctgtgccgttgatcacaaaaaaggacaccgacgacaaatcggacaaaagatatgaggcaaaatttgcggtgaaatcggaggaggaaattttcgaaaagatcagagacaaatttaacatcagtgatgagcagttgctgttgtcgctgtctgagcttgtgccgttgaatggccgcggagggagcggcggagttttttacaaaacgaaggacgacaaattcatcttgaagagtctgaacccggatcatgatgagcctgctaaaatagacgaggtgttggacaattattcgaagcatgtgcttggccagcagcccgagaagggcaagcagtccacggacagccgctccatgatgaacaccttcttcatgtacttcgaaatgaatgtttacgccaagctgaaggagggcaagggaaaagagaggaaaaagaaacttcggctgcacatgttacaatttgtggtactgaacaacgtatttgagggaatcgacgagcaaactctgctcaagttcgacatcaaaggcactttcgcgccgggcagtgccgtgcagcacgaccagaagcagaagtggtacacaggagagacgggttggcagaagagtttgtaccgcgagtacgacttcatcggcatctcccgcgaagggagagagatttccgcctttttcccggagggcattcagctgcttcctgaagcgtatagacaattggccgacggagtgaagaacgacacgagctaccttaccgagaacggagtcaatgactacagtct

SEQ ID NO: 90350 - DNA, 665 bp, Heterodera glycines
  unsure (1)..(665): unsure at all n locations
acacggagaaggctatgactaacaatttggacgagacaaatcctttggttgaacaggcattgaacgtgatcaaaatattacacgaactttctcgctcaattagcaacttcgaccaaattattggtgttgaagtcacttttccgactcttcctgaagaatcatttcatagtacaaaattgtcgcaaaaactttgccaagaactgactgatccattagtggtttctgcaaaggcgttgcctaattggtgcaactatttggtacacaatttcccatgtcttttttcgatggacatacgaacaagttttatgaacacgacagcttttgggacctcacgggcaattgcgtatttacaaagtcgacgcgatcacttacttgaccaaaatcgttctgctacttcttcagccgcttccaacatggcaggccttcgaagagaggaccattaccctgagtacagaataggacgagttaaacatgaacggataaaagtgcaccggtcggcagaactcttcctggaaaatgccgtcaaagtgctaaaatttcatgcgttgcgaaaggccattttggagattgaatatttcggcgaagagggcactggcctcggcccaacgctcgaattcttttctttggttgctgctgagttccaacgacggnacctttgcatgtgg

SEQ ID NO: 90351 - DNA, 797 bp, Heterodera glycines
tacgaggcgcgaatccatcaatttgcggtgaagaatttgattgcaacagcagacgttggttttcatatacgcttaggaccgctctctgactttctcggtgccaaatgttgctccttcacacctgaactattcccaggcctggtctacagaaaccaaaaccctaaaatatcgatcatagtgttttcaagcggtaaattaaacctaacaggctctagatcaaaagaagaaattgattttgtatttaatcaattttatcaaattatctgcaatttcaaatattcaccataaacgacaagaatcataataattgtcattatattttgaattattttcgtcaagtaaaggtatagactttgggaaattttgtcccaaataaatattgtttttgtctacgtatttcaatttaacaagctcaagtgggtagaatcgttcgtgtccatttctatgcttctcaatcacgcaaggattattagcgtagcgaagacaaatgcggtaccgtacataaaaatgctggtcgacggtcacattcttgaaaccattgtaagccatttgcttacgggcactttctcttgtaattccaccgtactcaaaatctttgtattcatctagttgatttttgtatgttgtctgtagagtttttcctttgaggtatttttctactttttgtatctcatccgggtgatttaagcggtcgcacaagttacgtgcggggacattcacaacagaagcaattattgtgtctaaacggaccatttttataaatgagttaatgaaaaattccttaaatactttttatc

SEQ ID NO: 90352 - DNA, 687 bp, Heterodera glycines
gtttccgtttggttaaacgttcccattgcctttccattaaaaatgtcggcgaaagttaaaacggaggcgtcgtcgccaaaacaaatgaacgaaaaggcggaagagaatgaattgacagagcgtttggagttagactttgtcgaagagtcagtcggcgacgattgggacggaaatgccatcatggaatgcgacgacactttagccaccgcagatgaagcggaggaggagggcccactcaaaccgtcgcccgactcgccacgttcgttgtctgccccgcgttcccccgaagacgaagtggagacaattgatgaagacaccgccgtggtggtgatggatgaggcggttgtccttcacacgggggaagaggacgaaatggcggagggcgacatcgtcgaggcggaggcgccctccgtacgaccgaaaggcggcggagggccgaaaacgccgccggagagcgatttgggggcgccggctgagcataagggaggctcttcccacgacgtcagccaggagagcagcatgagagagccgtcggccaaacgccggcggcgtcgtcggcgttcgtcctcccgctcctcctcctcagcatcgtcagaatcgcattcaagaaagggcgttaatggcggcggcaaaatccgagcggaggaagtttttgagcaggacgaggtggaggaggaccgtcattcg

SEQ ID NO: 90353 - DNA, 815 bp, Heterodera glycines
aggaacatcaaagttctgctcacaaacccttttacattaaaatttttctcatttagatcaaaacccaaaagggccatctgtccaatcgaggcttcggtttcatccaaatggccgatttggaggcacagaagcgagtgctcaaacacaaagtttgtgtttctattgcgttttttgacttaattattttgttgcaatttcctttgcagtcccacattattggagatcgcgaatgtcaagtgaaagtcccattttcaaagaatgcgctttcctcaaaaatatttgttggtcgactccaagaaggagtcacgcccattgaattgaaaaaacgctttatggaagaagcgcaaaggatcgaccccgactcatcggtcaccgacgtttacattccgcgtcctttccgttccttcgctttcgttactttttcgacgcctatcgttgccaaggaattgattaaaattggccaggtcgacttcaaagacacctccgtcagcatttcttccgcccacagcactcgtccccaggactcgaccgttcactctgtccaccatcactcttcctttattccgccccacccacacaatttcgtccctgaagatgatagttattcgacaagtgaactgtatagtaattatggcacaaacacaaaatgggaattcgatgaaatggcgtcgatggcaatgccaaagcatcagctgatcacatcgactcccggcattcagcaaagccgaaccgcgggcccaatgttttccggttcagtacagcaacatttaaatcagccattctctgctcacaatcaacagcacccgccgattgcg

SEQ ID NO: 90354 - DNA, 991 bp, Heterodera glycines
gccgtcgatctacggcataacggatgagacgtatcaactcatttttcaaccgattatgcgcaaagttatggaggttttccaaccgagtgccgttgttttgcagtgcggcgccgattctcttaacggagaccgactcggcccattcaatttgacgctgaagggacatggaaaatgcgtgaaatttttccgtgattgcaatttgccgttgatgttattaggcggcggcgggtacactcctcggaatgttgctcgatgttggacgtatgagacgtcgttggccgtggacattgacatatccgacgaacttccatacaacgattattttgaatattttgctccaaattatcgcctccatatcgacgcctctaatgaaaccaatcacaacacagaagagtatttaaggacggttcagaatagcgttttggagaatctcagcaatttgtctcatgttccaagcgttcaaatgcaaccaattcctcgcgatggcatgcaaatcgatgagtcagtggagcacgacagagcaaacccggacaggagacttccagccgaagtcagtgaccacatgacagcacatcctggagaattctacgaaggtgaaaatgaaggtgaagaccgcaggaacaggcaagaatacaagcggagaggagggaatacgacaggcgaaccgagcgattcgagggaggacaaacaggacaattcgaagcggatcaaaattgaaaaacaaccgaaggcagagcagcaagaagacggcgaactgcttgaggaagatgcaaacaccaactgacgatcagcaggaggaggaaaagcccttttaagcatcaattcgacttattttctcgtctgcgctttgaatttgtcgtccaccgtttcttattgtttcgacaatattattactcataccttttcacagcttatcaatagcgtacctccttcaaattccgaatcctcttacccgtttaaattgcttgggataaaaaaatccgattcaaaa

SEQ ID NO: 90355 - DNA, 1323 bp, Heterodera glycines
atcgttccgtcaattacattcattctctattattgttttcaacaaatattcttgcatttccatttcattgcctttaaaaaatttcaaggatggttcagagaaatttgaattgacccattctctcagaattttccaattgtttaaaatcgaatattaaagtgggtgatttgttggaaattatttcaactggtttcatgcctcgggatttgtgacacgtttctctcaattcgctcggtttattattaattaattctttcccagaatgtaaaagtgaaatttatataaatataccaacataagtaataataatcagtttatttagtttttgatttgtacattcttttgtttttctgtgtagaaaggtttgtgtgcattgcaagtgcgaccgaaacgaacacgagcccagcagcaaccaggcactgagtgtgtacgaaagactcggcctcaaaccctcgtcggacatggccaaagtgctgcagcagcgcaaactctcgccacaaaagcagcagcaaagcggcggcggtgcacaacaaccgaataataacaacaacgaagtgcaggccattggttcggtggggcacggctacgcgtgggttccaccgggcatcagcagaataaaaatcgaggaatacatgtctcaggttggcaatcactaatcgcattcggatttttaatcatttttgccgacttttttatcagctccctaatcatatgatcccgcgtctgaacagcatcggcgagaagaaccgggagaaacagttgatgatccaattgccgcgccaggacctgtccattgcgtattgcaaacacttgaagaccccgcaggagcgtcgtttatacgacgaatttgtgaatgctcgtaacgaagtggcactggacatcggctttataaattcgaatgtgccgaaagccatggagtgccgaaaatgccgaggagtcattgaacggaatgaaatggccataattgcgccaaagttgggcgagtccaccggatggcatgctgcctgttttacctgcaacacttgtgatcagttgctcgtcgacctcacttattgcgtgcgggacgagaaggtgttttgtgagcgccattttgcggagttgcacaagccgcgctgttcggcgtgcgatgagctgatttttgccggtgaatataccaaagcgatgaacaaagactggcacggtgaccacttctgttgttggcaatgcgacagccaactgacaggccaacggtacattctgcgagacgaccacccgtactgtatcaaatgctacgaagagatattcgccaatgtgtgcgacgagtgccaaaaacacattggcatc

SEQ ID NO: 90356 - DNA, 813 bp, Heterodera glycines
cttgagagattgttacgtgatttttctttccaaatttctttgccttgaaaatgacaaaaaaatttctgttaataatcgaagcttaccacaacagaatgacactttccttcaaattgagcaatgcgttagggaaatgctgttggaaaaagaaagcagaagagatttgtttcattgttcccttcgtccggcacttggtcatttcgtcgctcttttgcttcattcttttggcaatgattccgacgttaatttacggttgagaagtggcgaatttctgtgtttgcttactcagttggattttgccgatgaatccgctgattttgttgcttttgttcttcccggggttttttcgggctgtcgtcagattctcttaaatgttctgcccaatttgcattcaattgacctcgtaaggtgcgcttgtgaactggtcaccaactccatttgcatttccttctcaaaaatcaatgtcaccgattgtttgagtgtttccgttggaaagtgcgtaaaatcgccgtcctctgaaaatgtcctcagctttcgtcgcgactccaattggctccaaacggcggcccagcgaattctcccccagatttgttcacttttgtcacatctttccgcacattccgttgactccgttcgctatgagtcagccaatattttatcaaaaattcaacgacaaattccgtcggattactttggctcttcctttgtcaaaatgacaattgatgtctcccttttgctttacagtgacacaatgccaaagacacgccatttggcacatcggataattgacgacgtacggctccaacaaaagga

SEQ ID NO: 90357 - DNA, 671 bp, Heterodera glycines
agccatgaagtcgggctaccagcgagagctcacttaccggcgtcctgacaattcgttttccgccttcggtgagtccgatcaacatggctccacatggctgaccgcatttgtgctccgctccttcaagcaggcacaggcgtacatttttgtggacgaccgagtgctcgaggattcaattgccttcctgatttcgcaacaactggacaatggcgcttttgttgagcgtggcgaagtgcaccacaaattgatgcaaggcggcgcatcggagggcggcttcacattgactgcatatgtgctgattgcactggtggagaaccacgtgcagaataaagtgacggaattggcacgaagctatttggagtcacacctcaccgacttcaaggaggacccgtacgcgttggaggtgtgcacttacgtgctccatttgacgaacagtccgaagaagggtgacgtgctgaagatgctggaaggccttcaaatcaccggcgccacagatggcatggtccattggacgacgaaggtgtcaaacggtgccaaagatggcactggtggagcagctaaaaatggtggcggtgcggcccgggacaccaaccagtacttcttccaaccccagccggccgacgttgagatgagcgcttatgccctgctcacttacatgctgctggacaaca

SEQ ID NO: 90358 - DNA, 1090 bp, Heterodera glycines
caaatatatttagtaattaattagttaattacctaattaaattaatccttttatttttaatattaatgatttaattttaactatttctttatttacatttaaatttcattatttcattaaaatttgttttgctggtaaaaatgtttaataatatcatcggctcattgccaaaaaaacaactgttcgttctttgcttttgaaatgggtgactaatgagtgatgagtgaatgcttttgccaccgccactaataaatatttactttctttccacgccaaacgaaatgtgatcagcagcagaaagagcattcattcactcactcattcattctttcattgctgctgatcattcattagccaatcattttactgctaaataattcactaataatctgtgatcattagcaaatgatgggcccattaaagaaaatatttgtttaagaaatagaatttaagtattcaaagggctaaatcgaaagatagcaaagttaggcaaaccgcactttagtcatttctatgccctttatgaataattaatttctgtgttccttagctgaatcattaattattttctctcccaattattgtccctaattaactcatcaattaatttgttttcccctttttgcccatttgtcctttccattcatttttcgtccaaaatgtcaaaagtgttgtcccccgcattccgttggcggcacctttctctgatcactttcgcccttctcatcgcggcccattctctgctcgccttccgtactcagtcggccggcgctcgtggccaatagctttgcggcggacggccggcgcgtggcgtactggtcaaactgttcgacgaagatgacgggcccgacccggacgacgagttggacactgtgtacaccgatttggacggcagattcgaagtcagcgggtccaccatggagttgaccaacattgacccggaactgcgcatttaccacgactgcaacatgcacattccgttatgtaaacgccgaatgggtgattggcatttccggacaaatacatcgccagcggaacgctggccaaaaaactgatgaatttgggcagcgtggaattggaggctgagctc

SEQ ID NO: 90359 - DNA, 744 bp, Heterodera glycines
gtttgcgtgtaaatatcccatttcattcgcggccttttctcgccgtttcgtgcccaaatcactttttgtgtttcccttctcaaattgccaacttacaacaaaatgccaatgccatcgtttccctctgcttcttctccgtgtacttcttcctcttcttcttcccgttccgtcgatgaacatccgttgcagtcgtcctcttcgtctccgttgtcatctcctttttctgccactatgccgtccacgccttttaaacagtcaactttcggcacttcctacaaatcgacgacaaaagggcaaaatgccaaaaaagaaatgccattggcaaaagataaaaaagcagtcggaggggcggacaaagagagacaattggatgaacagagcgaattttgcggaattttttgtccgcgttcgtttggccgtgccattggcaaattcctcgacttcgttatgggttccgcgcactcttccgccaacccttcgtcttccgtctcttcttgctcatcgcccaccaattttcgggaaaagcacacgcccgactcgttggaggacaaaattgagctgatctttgaactgttggagaaaaagcccacccgattgggctacagcatccagtgggcagtgcagttgttggccaatgcaacagaagaagagaagttggagatgttgcggtgtcgtgtgctcagccgaatctgtgccttaatcacccgctacagtaacgtcgaagttgcggcgcccccgggcaca

SEQ ID NO: 90360 - DNA, 785 bp, Heterodera glycines
gtccttctactatgtgtgagaagcgttagccatcactttgaaatttaaattgaaatttccatttttctccacccatccaattcgaatggattcgctcaatcgtgagatcaaagatcgggtgcgcgattcgcattggctcggttcgtacggcgacagtccgcacgcgacatttagcgacattgtgatgagaagttttgatgaggtgaaaaagtctgggagaaatgccagtgcctgtcgcttctatgacatgtatcacccggaaattggcattcttcgcaagtcgaagagttacagcgcattggcaccgacaaacgcaatgcgattgaaggaccgtttggtggcacccgacctaagaccttttcatccgtacaaaccgaagcggaatgaatggaagacggagcttgaaaaattgcaccatggaacacatgcaaaactgaacattgcgccgtcgccgttccttccgccattgcctcccacttcgcgccgtcccttccaagtgccggccgatgcgactcgttttgagaatttctgtatgtattggggaggtcgggcgcgtggactcgactattcggagccatttttgtacgaaccgcagagagataactacagtattatggaggacagacggtaccatcgactgtactgggctcagcatatgattcccagccaaccgtcggcacggcatggacgacaaattatgctgagtgcttattgaaagaattggagggaaaacaatgatgcgctatgcgtagatagaagacacatcaaacaccgagcactaattt

SEQ ID NO: 90361 - DNA, 872 bp, Heterodera glycines
ggtgtcccaaggaaggccaaggactttggccttcggcttatcaagctgatcctcctgagggatttgtttcatcagcacttttgagttagagatgaattccctcaggttgaagcatccttgttgtaggaagtccttggaaaatttgtatttttctaaggcctcctgtaccgtctcgcactcgatgagtacattgtccacataaatggactccgaaatctccctggacagtggggagtcgaactgttgcaagtgatggcggagtgtcgccgccaaaatgaatggcgagctgacgacgcaacggaaccgaagaagcatgcctgccaaatctggcagaagcactgggcctcggaagaggcagctgttgaggcttgggcagcagcagaaatgaatgaatggaaatgtggaagtgagcatataatgaaaagggtgccctttttataggacgaaaatgtgagggcgggagtagtatatagccccaaaaggttgcgggttggttgcgggtgtttcccgcacgagcccgtgcctatgggaaggctgcagccctttgaagttgccgccccatcaaaaaatccacgatgggggaggggtgtttcaaaaccaaaacctattggaccactttgaagttgccgcctgaccaaatccgatttcccaaattgttgcgggtgtttttttcccgcgccgcgcagcgccgcgggaaggtcatcaatcatccacctgtcaccaaagtgacaggtgaaggaaattcaatttaacttttgcaaattttaatcttttgtttcaaaaccttttagcgttttattttctcaatcctgaaatttttttatgatgattttttcggatcctgaaattaaaaattctttttgaaaattagc

SEQ ID NO: 90362 - DNA, 1298 bp, Heterodera glycines
gaatgttttctcacaaaagcgccgctatgtccggaaatgagcatggagcagcaggacggcctttggccactctcttccacggaccgatgccaaagccgagcgaattgcaatgccatcggagaaaacggcggactcgtaacattgagcggagaagagacagacgaatcgcagtgtacgacgccaaccgaaacactttcaccaattgtacgacgtaaaacgacggattcaaaagaaggcaccaaaatcagagaggaaaagagagcggtggaaggaacacatggaaatgtaaaagtgacggacggaattatgattggaaaaaaggggcacacaaagggcgacggagcggcaaaacaacgacgaaagggagacggacaacagagcaccgctggacagtccccggaagcacaaccaacactgtacggatgtgctcatcccaacttcaaatcccattttcgctccgtgcgcccggcctttctttcacaacaaaatgccaatcttacgtccaaacaaaaaaaatggaccatcactggatgagttacacttggccgatgggattggggccgaatgttttgctgatggaactcatggggaacggaggcgcacttctcggcatcaaattccatccgtttcaatggaaaaatcgaatctccccagcaacaaaaacacgtggcgcactccgtccagattgatctgcaatttcgaggaaagcattctcaacggacgcatcccagcaaatagtgttgtcagcggtttccgtctccaacttacggtcatcggtaacggagtgtctacggacaatcgcctttcattcccggcaagcaaacgcctgacattgccagtgcttacttacttcttcaacgatttgatgtctcaacattcgggacggtttccagtggcggttccgccttcgccattgcatttggctcgctgcgagttggcggcggagacggtccccattccgaaacggtgcacactgcaaatagtgctcttacgtccgtgcggttcggtcgttaagctgttcatggtcgcggtgaatgtgctcgacatgccttccaattcgaggacgtttattcgtcaaagggttttcagtggtgacagtgccaaaggaacgggtgaaaaggaaaggagcggaaatgaaaacaaaacgggtgggtctaccaatgttccgaatgcaaagccttgctccaattcgttgcgctttctaatccatctgaggctggcttccgattcatcgggaaaagtctatttgcatagcgacatccgaatattattttcaaataaatcaaaagatttggaag

SEQ ID NO: 90363 - DNA, 771 bp, Heterodera glycines
aattaccattatcactcgtcgaaaattcattaaattgttttccaaatgcttagcacggcggacgatctgtccgcttcgtcctcctcctccgccgcttcgttggagagcaaagactattgggtgaaaaagtgccttgacctagccgcagctaaaaatgccgccgaggcccgtgttgaacagctgaagcaacggaacgccgagttggagttggagaacaggcaaattcgggagtccaaagtgcgcatgcaagtgcgggtggagcaggaggaggagtacatctccaacatgctgttgaagcgcatccaaaaattgaagacggacaaggaacagttggcccagaaatacgagcaggaggaggagtatctgatcaacgatttgatgcgaaaattgacacagttggaaggcgaacgggacgaattggccaatcggttgagcacggaccaaagctgggtggtggcaaatctgttgcagaaaatccgcaaattggaagccgaaatccagaacaaccacaaatctttggagcagttgcgccgcgaaaaggtggacttggagaattcgcttgagcatgaacaggaggcactgttcaacacattgggcaaacgaatggactcgctggaagcggagaagcgtcgcttgcagggtcgcctcgacgagttggaggggggcggaacggcggcgaccgttgcgacgacgacgacaacagtcgccgacggcggcggcggtgtgccgacgaatgccgcctaagcaccataaaagcacaacataaattca

SEQ ID NO: 90364 - DNA, 746 bp, Heterodera glycines
ccattgcttttaaagtttctcccactcgggttcatattcctcgcatatccttagcaaaaagtgccaccaacagcagcgactgttcgcctcgcggcaaaaatgccaatttgaacagcaaagggacggcccctcccccgccacgccctctctttcgttgccctcagctttgtttgttactcatcctccgtttgtgccctccacgccgcccccttcggcaccgttcccttccggcttttcctcttccccggcaccgttcccatccgacttttcttcctcttcgccgtccacttcggcaccgttcccttccggcttttcctcctccccggcaccgttcccctccggcttttcttcctcttcgccctcctcatcggcactttttccctccagcttttcttccttttcgtccttgccaatgcctctgacttttcttgaccagcttcgactttattaccaacagctacagtccgttttagcttccgcatctcttcagcaccaaatgtccactgcttcaacttttggcttgcagaattttttggctcaaactgcttttgctgctgctaccgccaccaacaaagagcactcttcgcagaaaagcgaagaggaggaggagaaaaacaattgctgtgacaaaaacaacgtgccaataattaatgacgcaaagtctgatgaaaaatcacttcagcaaaatttgaaatggcaaagccaacgaaacgacgaacagagaaaaaaagggacaaaagtgccga

SEQ ID NO: 90365 - DNA, 448 bp, Heterodera glycines
ggtccttgaaataatgcaaggatcatcggcacgttcatttttaaaccctaagaaaaaattgcaacgaaaagaagacttggagaaggaatttgtggagagtggtgagaaagaccgggtccaagaggttgtggaacgacgacttcacgagtcggggtgggcgaaacgagtggagagcatgtgcgaggagtacatcgcgaagaagggctatgaacgcgttgaactgcaagcgatggttgacgagctgaaggatgcctcgcgtcgaattgtgccggatgaagtgaagagagaactcatgcagctgattcaggaatttgtgaacagccgaacatcgacgggcgaagggtggtgataaaagacggaaactcattaattttttaattgttttgaaagacagacttgctttcaatttcttattacgaatcgtttaaatcaaaacatttaaaaaaaa

SEQ ID NO: 90366 - DNA, 325 bp, Heterodera glycines
ggccctaacagtgccattttatggacagtgcagcgacaaccctcatcatcagtcgtttggtggcggcacggcgccgacgagggcatcgacgggcggcggcattggcactgtttcacttggcaccgtcacgtacatttgcggcgattgccacaaggaaaacgaaatccggcccaaagacccgatccgttgccgggagtgtggttaccgtattctgtacaagaagcgcagccgcaaaatgatggtgtacgatgctcgataaagaaattcccagattggccattgatatttggtttgtgtcactgaatattgtttaagaaagaaaaaa

SEQ ID NO: 90367 - DNA, 473 bp, Heterodera glycines
caacctttgagaattaaataattcattcatttttctatctatcttgacttagaagaagaaaatggcttcaactggctttagtgtctacgttggaaacattccatacaatactactgaggctgacatcggaagtatgtttagttcatgcggagtggtcactaatgttcgcatcgtgtacgaccgtgaaaccaaccgtccaaagggattcgcgttttgtgaatttcaagaccagcagggagctcagaatgcagtcacgaatatgaacggaattgagcttaatggacgcccattgcgtgttaattgggccaacaccaacaaatagaaggaaggtgatggatggtatacttttgttgacagaccatttcgatcataaaatcaaaataaacagtttgttctttgattaaattgtttgcttttctaagttggaataaacaatttacaaattaaaaaaaaaaaaaaaaaaaaaaaaaaaa

SEQ ID NO: 90368 - DNA, 836 bp, Heterodera glycines
gatctttccctttctcggcagggcatccgtctgaagcttttcccttctacggccatcgtctggcgaatttgaccattgcgaccgggggatttctgtacgtcggcgatcaacgaacgtttagcaaattcccttctcgcctacgaaatggatgccgattcctttttgctattttacattaagcaaagaattgagaggggagaggacggtcttcagtggtacaatcccccctattgtggggaggacgaagaagggcacgtgccggacaattggcggacaattcaacaggccgtcctctattttgagaaggacaacagcgatgaaattgagcatcaactgattgaccaattggtccaacattcggccgtcaaattcagcgcctttaaatatctcgtggatgcttacttcggactgttgcagcggcgtattgagcgaaaagcggacaattttggttgcccttcggtaacaaatttgtgcgtgcctttcctggcgatgatcgcttttaccggactcttcgcgagacgattggccgaaatggacgcatccgcgcgagtgacggaagagcaacaagatcggagggatttccgacgcgaaatttaccaagtgtccatctacgggtcgaccatgttgcgctacaaactgtacacatttgcgaacaacgaagacagtacagcggcgtactcatgggatcgcttttgcgccgactctctccaattggttgagcacatttcatccctcaaagaacgggaaacttcgattgcccttccctcggcttctcccctcctcggcgtcgttttgtgcggaattgcagcagcggcggttgtctattttctcatcgc

SEQ ID NO: 90369 - DNA, 895 bp, Heterodera glycines
gtcaattaagatagttgtcaaagtttcagcggagtagaaaatgagtgcaaagcctttgctcgagttgtatgtgaaggcctcagggattgacagccgacgcatcggtgcatgcttattttgccaagaattttggatggaactctacgctctttacgaagtgggctgtgttcgtgttgaggtaaaaactgtgaatgtcaattcggaaggatacaaaaagcacttttcgggagcacagccgccaataatggtggaacaagacaaaggcacggcaaatgcggacaacactgacatcgagcgacgcattttccaactttgcaacgaattccatgtgccattgttcgagaaggatccggaagtggcaaagaccatccaggatttgtacaggaacttcaaaatatttctccaagccaaaacgaatttggacaaaggcaagcagcaacccagctccattgaaggactgccgccccaagtcgcctcatcgcacagcaaattggtagaacagctggcgaatataaatcagttgttggccgagcgtggcaacacacgctaccttctcggcgagacgatgacggaatacgactgcgagttgatgccacgccttcatcacctgcgcgtggtcggggagcgactgctcggcttcaccattccgcaccaactcactcacctgtggaactatgtgctgacctcgtacagaaccgcggccttcatcgagtcgtgtcccgctgaccaggacattctccaccattacaaggagcaactaaaccttagcatcgacgtccgcgtcactttggaagctgccacaaaaacacttaccattccagaaggtgtcttaaatgatattcgtcgcattacaaatggaaactgacagaaaaagaacaaatcattactaattatc

SEQ ID NO: 90370 - DNA, 821 bp, Heterodera glycines
gctcctaacgcaactttgcttaccccactctccaccttatcccatttacatccgtcaagatgtcgcaaggcaagccccatctttcgatcgtcatctgcggtcacgtcgattccggcaagtcgaccaccaccggtcgtcttctcttcgagctcggtggtatccccgagcgtgagatggaaaagctccgcgctgaggccgatgccctcggcaagtcgtcgttcgcctttgccttctacatggatcgtcaaaaggaggagcgtgcccgtggtgtcaccattgcctgcaccaccaaggagttcttcaccgacaagtggcactacaccatcattgacgcccccggccatcgtgatttcatcaagaacatgatttccggcgccgcccaggccgatgttgccctcctcatggtccccgccgacggtaacttcaccaccgccatccagaagggtgaccacaaggccggtgaaatccagggccagacccgccagcacgcccgtctcctcaacctcctcggtgtcaagcagctcatcgttggtgtcaacaagatggattccgaccccgctggtccctacaagaaggagcgttacgacgaaatctcggccgagatgaaggacatgctcatcaagaccggttggaagaaggagttcgttgagcagtcggtgcccgtcatccccatctccggctggatgggcgacaacttgctcaagcagtccaccaacatgacctggtggaagggtcaggaggtcgttcaccccaacggctccaagcacaccattgtcaccctcctcaacgctctcaacgagttcgccgacctcccctcccgc

SEQ ID NO: 90371 - DNA, 838 bp, Heterodera glycines
gttcgtagaagggagctgcaccacctgtggttacacatcctaccacctcgagagggcggctcccgctcccccgccaccaccgccgcctccgcctccgcctgcgcccgtctacagccagtcttcctactcctcctgctccacctgcgggggcagctcctactcctcttacccgtcttcctcttactcctcttatcccgcttcttcctcttcctattcgtcctaccccgcttcttcctcttcctactcctcttaccccgcttcttcctcctcctactcgtcctacccgtcctactcctcctcttcctcctgctccacgtgcggcttgagcggctacagcaacagctggaacaacggtggcagctcgtccaacacgtggagcagcggcggctcgtccatgtcggcgggcaacggcggtggctacggctacggcggtggcagctgctcggtgtgcggaaagcgcaagtgagcgatgcgcagcgcgcgcagcgctgtttcggcacggacgcaacagcggcgagggcgcgcggacacggagaatgaactgacggaagaccattgaaattctcccaaaaatcttggacccatccccaaccacaatacccatccaatccgtcccacattttgttaggctcagaaagcacacattttaaatggcataattattttaaaaattttaatttaccaattggcacccaaaacagcaccagcacactttgtttatttaattgtttaaattaatttttgtttcaataatgttattttttgtttgtgtgatcacaattctccaccaccccaataaatgataaagattcgaaaaaaaaaaaaaaaaaaaaaaaaa

SEQ ID NO: 90372 - DNA, 635 bp, Heterodera glycines
tgctcatttgaattgaggagcgggggaacaaactccaatattaccgcttttcagcgcttatgtcttatggaggtcggaattgaacggatggaaagcgatgagaatttggaaaatttaccaaaagtggattggacgataacaccagaaccaattgtcatccgtggagttggacacctaaccctgtttggccttaactcgcattttccaacggaatttccgagcgctctgataggaaaattggcaccggaagagtttgacgacacattgcgacgtgtgaattacgttcttcagaggaatgttagcagaaacttgcgctggttgatctgcggattgcttttttgctgctgcagcttcggtatttcgttatggccggtggtctgtctgaacagaaggactatttccgctctcgagaaaacgctggaccatgaaaatcaacaattgtacgacaaactcggcttgcattggaagttggccaggctgcccgttgagccgtccaatcgcctgacagaatatgtccttctgcttgaaacgctgccacgaattcccctttccatgccggattagcacgcgaaacttttattacccactttgggaatgataaagaagtttagatttcactgcgatgtctctttctg

SEQ ID NO: 90373 - DNA, 967 bp, Heterodera glycines
ggtttcgttgcaggcggagcgcgaatacatcacacgacgggtgctgacttttgtggaactgaaggagacggtctgtgccggtggagatcaaggatttgtggtgattaatcaaaagggcattgatccgccgtcgttggatttgttggcacagcacggcattttggccctgcgacgtgccaagcgtcggaacatggaacggctgcagttggcctgcggcggcgaggcggtcaattcggtggacgacctgacgcccgatgtgctcggctgggcaggcagtgtttatgagcatgtgctgggcgaggacaaatacacttttgtggaggagtgcaccaatgcgttgaaagacggtgccgttttgcccggcgccggtgcatttgaaattgcgggatattgtgcactgaaaaagcttgccgacaatgtgaaagggcgtgccaaactcggcgttttggtgccgtaattctttctttctttcttaatccctttcaattattgtcatcattctcattcccaggcttttgctgaggctttgctggttattccgaaaactttggcggtcaatgccggattcgacgcccaggaggtgagggaaaagcatgaaaaaaaattatttatttactcctttcaattgccaggccattgtcaagctggtggagacgttcagtgctgctggtgagctggtcgtattggacttggagagcggagagccgtgtgttcctcaggtgtgtcatcagaaatggacggggacaaatgggtcgggccataaaaagcgaacactcattgattcccttcccccgtttagagcgtttgggacaatgtgtgcgtgaagcaggcgagtctgaacgcctgtcagaacatcgcctccaatctgctggaggtggacgaggtgatgcgtgccggcatgcgcgacttgaaggggggacagtgaaaatgaacggaacggaaatgaaggagcaacaccaataaatca

SEQ ID NO: 90374 - DNA, 718 bp, Heterodera glycines
  unsure (1)..(718): unsure at all n locations
ttcgtaaaaggagcaggctcgctgatggctttggcaaagtgtcccttataagacagttcaaattttgggggctgagaaagcgctcttccgagcactcaaaactaaaaaggatacgccaaaatatggaataatttatcacgcgcaattggtcactcaagccggacaaaagtcaaagggaaagatagcacgaaaattggcagcaaaagtttcacttgcgacgcgagtggacgcactttgcgacgaatcattgggcaacggacagggaattgaggcgagggtgtacatagagcaggcgataaaaaaggcggacgcgcggggagggcccaaaaaacaacgcttttctggcgtgaaacaggcaccgaagggcgcgtacactttcaaaaagggggaggtgcatcattatgacgcaaagttcgacatgacgctaaaaaagggaactgaacaggccgaagaaccgcaacaggaagaacaacagagtggaaaaagcaaaaaaggggaccaaaccaaatggcgaagcgaaggagaaactggagggaggggaggaagaaacgggaaaaacacccagcaaaagggaaaaggggcaaaaagaaggtcaaattggaaaaaaaccgcaggggggagagggggaacccaaccgcgaaaaaggcaaggaaaaaaaagngcgggacccacaccgcagaaaagcaggcaggagggcccaaaaaacaaaacaacaaaa

SEQ ID NO: 90375 - DNA, 847 bp, Heterodera glycines
ccacttatggcacttgcaaatggcttcggttgctaactccaccaactctctctgctcacaaagcctcgcccttcctcaaaaaattcgcatttctgcccatggaaaggaagaccagcagcaaaagcggcagcaaatccctcccagcggacccgtcgaagacggagcgtataaaatctctcagcagcagcacttcgtattgcatttgccagcggagagcgcttcttttgattccacgggccaacaaaccctcgccgtcgacgcttcttcctccgattcggtccctctcttttatctcttcgaccagcagcaaaaccaccctcttttctctgctggtatctcctcgccttctgccgttcaacattcccaaacagttcctgtccaattgctcgatgtcaacgatgaaaccgttgttccggtcaatggcgctgtgattccgtccccctcattcatccagctaagcaatgacaatcgaccccttttgcaaatgtccaatggccaaaccatcgaattggtgtcggccaatgggtttcacttctcggacggagtccaaaatgtggaagaagtctcttctgaagggacttcttcctcttgcggaggctctcgactcactcacaattatccaccaacgactttgctttcgacggcaaaagtattttcgccccaacaaagtgagcctgtgtacgtgaatgagaagcagtacgcgcggattttgaaacggagggcagcgcgagcaaaattagaaatggaaggccgaattccgaaacaaagacggaaatatttgcacgaatcgcggcatcggcatgctcaaaatagggccagacgtgctggaggaaagtttgactcggga

SEQ ID NO: 90376 - DNA, 718 bp, Heterodera glycines
gcccttggacgcctttagcattcccataaacaatggcattgtcaattttggcacttctttgcttggcgcttgcacactttggcaccggtcaggagaaaaaaactgagccattggaccacaaatggacatgtggcaccacgtggaaatatgaaaacactggacttacggtttcgtggagccttcccgagttcctcgccgaaacttcggtggatgtcgattgtccatcgcgaaagaaccgaatgaacaattgttgttttgatcatgacgattgttattcaaagcaattgggacaaacgaagtgcgacgacgttttttgtgattgcttagaaagagcaactaaaggatcatcacgctgcgaaacttatgagggaccaggcttttgtcatcttgtccgcacgtatggcgcgtcggcctaccgcgcgtcggcccccccgttttggagcagttgtggcactgtgttgaacagcgcgaaatatttgggatgtccttgcggcacgtacaaaacatgggaacgctgcggttttctgtatatgggctaccgttacctgtgctatgcgtgctgatgaatttttttttaattgaatttggcatattttcagttatggcggaatgattcaattttcatgatatgcttagataattttgtgggcttttttctatatattcatagtatatgcatatttcttatattctaaaataaacattttctggcaaaaaa

SEQ ID NO: 90377 - DNA, 756 bp, Heterodera glycines
cttgcctctgagctttgcatccgacttttccaaccccgagcattccactctgctgtctactctccgccatgtccatgtcatcaacctctgctgcctcggcctcggccaccgacgccgaagctcaagtggaattccccattgtctgcgaaccctgtctcggtaccaacccgtacatgcgcatgacccgccagccccaaggcgcgcaatgcaaatcgtgctcgcggccgttcaccaccttccgctggtcgcccggcccgggccagcgcactcgccgcaccgaaatctgcacctcgtgcgcaaagctcaagaacgcctgccagtcgtgcatcctcgacctcgaatttggcctctcgacccgcgtacgtgacgctgtgctcgggttggattccggcgcaaacacgagcaacgatcataatcggcaatggttgttgcgggccgccgagcagaatttggcaaagacgggttcgggcatggtggattacggtaaggtcgagagtgtggcaaaggagacgatgcgcaagatggcaaaggaggcggccagtccgtatggcggcgggtcgggcgggagtaagcggccgcccatttgcagtttgtggttgaagggcaagtgtccgaggggcaaggagtgttcttatcgtcacgagctgcccaaaaacaaggaaaaactcgccgaattcctcgccaaacaccaatctacctcgcccgcctccaccccggccccactcgcgcccgcggcccccggcgcacgcgccattc

SEQ ID NO: 90378 - DNA, 476 bp, Heterodera glycines
agccattcaaattacaagtgaccaaatgattgcgtcgaattcggctggcgcgccgtaccgcggcgatccgatggcatccgctgcactcggtttttcaaattttgtgaatggtgccctcatccgacaccctttcgttgtgctgcggcgccagtgccaagtgcatgaccacgcgacacccaaacatttgacgcccattactcttttgccggttgtggtcaacttggccgggaaagatggtactttttcgcttttggaaaggtgccattggcagcggcgttctttgggtggtttcgcatgcgtcggaatttttgattgcccagctttttaacctaccaaaatcatttgtaccccaaggcagctcagaacgcttttggcgccatgtttttctcaaaaccgcctctttcctcgcctgcactcctttcattggctcctctttcatcgaaactgtccgcagtggtggaaggttatcggatgaa

SEQ ID NO: 90379 - DNA, 703 bp, Heterodera glycines
gttccatattcaccttcaaaaagagcgttcctttgccgaaccccgcccccgaggttacgccgcccaagtcgcaagtgctctcggctatttgcacgccaaggatatcatttacagggatttgaagcctgagaatttgctgctggacagaaatgggcacgtcattctgacggacttcggcctgtgcaaagagcacgtcaaaatgcggcagaccaccagcactttctgcggcacccccgaatatttggcgcccgaagtgattcagaaaaagccgtacgatcggacggtcgattggtggtgtttgggctgcgttctgttcgaaatgctcttcggattgccacctttctacagtaagaatcagaatgaaatgtaccacaagacgctcacccaaccgttgtgcgttccctcgtccgcttcgactttagtgcgcaaattactcgtcgaaatactgcacaaagaccgttcggaacgattgggcgcaaaatccgattttgaggaaatacgaagccatccctttttcgcaccaatcgattgggacaaactgctaaacaaagaagtgaaggcgccgtttgtgccgaaagtgcgtgccgaaacggacactttgaacatcgcgcgcgaattcactgacattgagccgaaccctgcttctttggtgcctttgcaaacattcgtcaacagagaaacggaattcgccggattcacttac

SEQ ID NO: 90380 - DNA, 706 bp, Heterodera glycines
gaccgtttgattatttttgtcagagagcatctgcggaatggctgacgaatttgccaagccgaaatttgacggcaaaatcttccaaaaccccgacagcttcacaacatggaaaaacccgccttcggcaggagacccgagaagttggcgggacttcattaaatggaaatgggatgcaaagagcacgaaactgcccaatttgaaagtgcttgaccagactttgccggtgttaaagcctcggttccaaacggattctcggctttcggccacttggctcggccatgccacactttttgtgcgcattgacggcatttcagtgctcacagacccagtttgggcgatgtttgccactccttcgttccttcccttcttcaaattttgcccgcgttttcgtccaccgccgtgtaaaattgaggaattgccaaagattgacattgtcctcatctcccacaaccattacgaccatttggacgtcgtcgccgtccgtgagttggcacaacactttcctcacatcatttgggttgtgccgttggggcttaagcaattggtgcaacacgagacgaactcaaaagcagtgcacgaaatgaattggggtgaccgtctggaactgcaattaaacgagagaacctttgaagtgttcagtgtgccggcacagcattggtcacagcgaaacttaattgaccgaaacacgtcattgtggagtggttgg

SEQ ID NO: 90381 - DNA, 224 bp, Heterodera glycines
gtccaaataaggaaattctctctaacttggattttgagccatcgcgttgaaaagacagatgatgaaaaacgactgggacccattaaaaacgaagtcggacattaaacagcggctcaaccgtctcttcgggcggttcgaccagtactcagaatttgcagccaaacctcggactcctgaccatgcattaacagagcatgtaacgacacccgtaacaaatatccctc

SEQ ID NO: 90382 - DNA, 1042 bp, Heterodera glycines
  unsure (1)..(1042): unsure at all n locations
ctacattatacattcgcctaaaacatacttttggtcattagcaaactttcctaattatttgactatggcaaatttcggctacggccagcagcagggccaagcctaccatccccagggggccaacccataccaacaacagccgggttggaatgtgccgccaccgccccaaggacaacagccgtataatgcgcaacatttcgcggagcaaggccaggccgggatgccgaagaacgagttgggcttcaacgaccagacaattcgttcacaatttgtgcgcaaagtgttctccaccgtgggcattatgttggccgttgtcgctgtgatgagtgctttcccgttcatgcatccgcccatgatggcatttgtgcggcacaatgtcggactttatttgttgggatacatcactttcttcgtcgtttacattgcattgatctgttgcgagggcgtccgtcgatcattcccggccaatatcattttgcttggcattttgactttgtccatcggcttcatgaccatgatgatcactgcgcagtacgccgtccattccgtgttcatggctttcgccatcacttccctttcgtgcttcggcgtggcacttttcgccacaatcaccaaaagggacctgaccagtatgcttggcattgtgttcatcgccacaatgtgtttggcgttgttcggcttggttgtgatcattgtcggaatgttcaccaatgtgcgcattcttttcgttgtttacgccgcgattggggcatttctgttcatgatttggttggccattgacattcagatgggtatgggcggtcgtacctacgaaatttccccggaagagcacattttcgcgtcgattactttgtttcttgacatcattcagattttctggtttcttcttgcaatttttggagatcgcagaaactgaccttggcatcgcgacatttgcaacacataaacaaatatntgttgatgcttttcagttntacattcttatccgatatttacgcaatttaattgtgatctgaaaatattaatcacttgagaaatatat

SEQ ID NO: 90383 - DNA, 427 bp, Heterodera glycines
  unsure (1)..(427): unsure at all n locations
gtcgttagaatggcttctgcggttaatccattaaaggcatttggacaaattggtgcgcggctcgggattcgcgagaagaagaaccaatttgtgcagaaggcgtggccatacattgaccctggcacgcattttggcaagaagaatttcggctatttggtcagtgctgtttcgtttttggttttctacaaagtctccagcaatatcaagtcgaagaaggcaatagaagcgaaacagaaattggaaatgaagccgtacgttgttcaggacgcgatgacgcgcagcggaatttaaagaaacaatgcgttctaataggcgggaggcaaagtgtcttcgaattcattagttttaaactcagaatggcgtatttgttgtaactgttcccaagagtaaagtaattctatgactannaaaaaaaaaaaaaaaaaaa

SEQ ID NO: 90384 - DNA, 484 bp, Heterodera glycines
atcaatcatacaaagaagtgcgtgaaaaagagaaaatgagctagctatgaatgatgagaaggtatggagaggtatgtactgtactgtagactgcacacacttttgaagtgcacgtttgtgttgtgtcgctgtccttcaccaaacacaccgtttcaacctaaccaaaaaccatattaatcggttatcacgtgattaaccaacggttttgtttttgtaactgaatcacgtgactacttcttgtctccagccgttccaaccgaaccgtaccggttattttcagccgcaagtgcctgactagttgggtctcaaattttggatataaaacggagtgaatagtgaaagcccagcccaccaagtggcataatacattcaatataaactttatatagtaggccttaccaaagtatcgataagtgctatcacgaccttgcataagtttctggtagataaatccctggaatgcccattccaccagtagtagaca

SEQ ID NO: 90385 - DNA, 1139 bp, Heterodera glycines
ttcgttgatgactttttttctacaatacaatttttacctaatctggcagagcgatggagaaaaaaatatgaacaaaagtcaattggacccatcacaacggaagggactcgacattgatggtcactcatacggagttcatttttactcgctgcccggaatgtcgtctttgacctcattcgactggcacccgaccatcagtgatcggttggcacttttacctgtccaagaaaagccaatggcttttgcacattcgattgcctccacgaaacgaattgccataattaaacttcgtgatgacgtcaattccgtcatcggtccttccggtgacttttgcatttcggcggggccgcagctgaactttgaaaacggcgagaaattgttggccaaacccaactgcacttctgacatagacactgaaacactgttcaaacgacgggtgctcgccggctacggctacggaaattcactgaacgcattggcaacactgctcgaatattcgaagaaggccattgagagggaccaattcgcttcggatgatttacgcttttgctgggattggctttggatgcaattccaatcggcagatgctaacgaaattaagaagaattacggaaccatgttcgctggcgttaaacacattttgaaaggcacaaagtccaattcgaccatcaaacaggacgaaattacttacagaaaccgaatttttgtcaacgaaaaacgactcaaaattttgcgtatgtgcaattggcccaactgcgccgtgagggacgagtgcaaggcgcggcttgacgaaatcgcggctcaaaacggagtcttcggtatcactcgcgcggcggcgttggcacttttttcagtgcatggaatgctcagcaaagagtatttgactcatttgagcgagttcactcattcgcgcgaatttgccgaaacatggtgccgttccccctcctttgtgaccaattatcaacgaatggccgatacggtgctgaacattttgcagaagtacgacggagttcgggtaccgaactatgaaagtgtgtgcgagggactgacaggggacgattatttgctggcaattgttaagttcctcgccagacgtgacaaaatttacaatcggatttacaacgaaatcttcgaaagta

SEQ ID NO: 90386 - DNA, 797 bp, Heterodera glycines
aattcatttgctataagagccatcccctttgattgaaagccgcctttacccatcgaatgctacacccttcaacccattgcgcgcgcaaaatctcacgcaagcagtacagcaacgcgccggacggagcggaagagtgtggcggcaacgcggacgcgcttttgcgcaaagcgagccgaaagctgtcacaactaagcgagctgggcgacttccagcagcgctgcaataccgccaccagtcgccgtcgctgttcatcgacggaatccttgctggcggcgctgaatggtcacggctctgtggtgtccgcaggcgccgactcgtccaccgccagccatcgttcatctacggacgacctgaccgtgctcgactgctccaaccttagccttggtcagttgcccattgaattgctcactgaacactctgaggaaattgagcatttgattctggacgagaacgagcttgacgagcaggccttggaggacatccctcgcctggacaagctggagacgctgagtttgaatgggaacaagatcaagaacatcggtgtgttcctgcagtatctgaagcgcaagtgcccgaacctgaagttcttgagtctgatcggaaatccgggctggccccacccaattctgaacaacaacttgcaactctaccgcacttatgctctttccgccgtccgtcttttcccctccttgcaatttcttgacaccgcccgtgtctcatcgccagcatccatcgccattttgggcgaacagtgccaacagcgccaccaccagcagccaaatgccggcaacaaaaag

SEQ ID NO: 90387 - DNA, 748 bp, Heterodera glycines
  unsure (1)..(748): unsure at all n locations
gnnccccagagagtgattctgaaagttgttcagcagaacaggcttctactgccgatgaggttgagtcgtccagtaggaggtccagcacagataacttgggaggtgattccgactacggcgatgactcggtgtctgacacagattcggatgacgaaaatgaaaagagcaaaagttcgacgctgagagaacgcatgaaatatacggactcgaaanatacacgacggaaaaacaaatacacaaagtgacactgagacgaaaaatttgctggatgacatgggcgaggaaatggacgacgatttgtcgatattgcacgagatgaattgtcgtagtaaacagaatgggtcgtcagagttagactcaaaactctttgagctctccgatgaacagttgaattattacaccaattgctttctttttcttatgcagaaatcgcaggggttcttttctctgcaaggggcgctccaaggcaatgacagaacaattcttgacttcttccgcaaaagttccctcgacgattcaattctttccaaaatttggtctctcagcgatgtgaacgaggacggatttttgaatttgacggagtttattttggccatgcatttggtcgttttgcacaccaaaggttctgttcctatcccaagtaggctcccttcctccgtccttccccccaccactccgacacgtactttggtccatgctgaggatgattttgcagcttctctgtccaaccattccttgagcaattctt

SEQ ID NO: 90388 - DNA, 630 bp, Heterodera glycines
cgcccttaaaataaaatattaaaagatccgaaaaaatgccaaacaccttcaaaatccttctgattgtgcttttggccgtcgtctcattccgtctctcggcttctactggtgacaaaaaaactgctaatgatgggagtggaaacaactcatcagctgggattggtacgaagatcaaaagaattgtcaccgctggactgctcttcacttccctggcgacgggtggggcggaagcgattgggcgaagcaatgctcagggaggaaatgccgccggattggtgccatcgcatgtgaccaatcgctcaatggctccaccacctcctcctgtgcaatttgaaatgggggcaaatcgattagaaaaaatgagggcacacctacgcgaacttgctgagaaaatgccggtcaatgaatcgaagcgtctgtcaccgagtggacccgacccacatcatcattagggccatggatggatctaacggaggaagaaagaatggatgcttagttttcagattttattctatcctcttttatttattagtttttcaaaacaaatttcttccacaactttttaaactatttgttgttttgaatctttttagataaatctaaacccctaaataaattataattttataa

SEQ ID NO: 90389 - DNA, 472 bp, Heterodera glycines
gttcataaaagcagcaatttcactattttttttttgtttgattactttctgatctgcaaaagttgagtggtgccgatcggctgctgctgtgccgtcgatatttccatgtgggcttcgtctgtctccctcttctctgggcggtgaatgccatttggttttttcgttacgcctttccttccggtgcaaatgccaccgccgagacggcacaaattcggcgctacgtttgttggtcggcgaccggcgctttgtgctgggggctccttttgacaggttggcttttattctacaacatccagcgcagctacggactgttcgaatgggcccgagaaaatcaccgccgtttttcccctgggctatgtctgattcggatgaaaaaaaacacaatgttttttctcattcttattgtatatggaattttccaaaatactgaaaattggcagcaaagcaaaaagggcaatgataaaaaaaaaaa

SEQ ID NO: 90390 - DNA, 821 bp, Heterodera glycines
gttcaataaagtcaaaaccttcaaaatgagttcaaggattaacgtcgtcagtgtgcagttgttggagaacccggccactccgagtgaccacatcaaactcgaaattgttttcgaaatattcgaaaacattaaggaagacgtcgaatgggaattggttttcgtgggcactgatggccgagaagaacacgaccaagtgctcgactcagttctcatcggaccgattcaggagggacgacacaaatttttgtttgaggcgccacctccacaaattcacaaccttcgacccgaagattttatggatgtcactcttttactgctcaagtgcaaatatcgtgaacagcttttcatgaaaatcggttggttcgtcacgcacacttacactgacccggaactcgtcgaaaaccctccttctcagcccgtcatcgaaaagctcaagcgaacgattgtcggcgaggatgtgcgcgtgacgagttacccgatcaaatgggacgaggaggcggaacagccgatggatgacgatgaagagccaaacgccgggaatgaggtttcctacggagtggcggccattgaattaacatcgaacggcaacagtcaacaaatgaacatgtcacaacaggaacagacgccgatggcggctgttaactaagcggatgaaagttgcgagcgttaaaaggacagaacggactcgatgttttatgggtacaaaaaacggatttgatcttcaaatttgcatttatcactttaacccaatgttttgttcgacaagctcatcataaatgtatgcggcaaagccgcccaacttgaaaaaaaccaagctatcc

SEQ ID NO: 90391 - DNA, 698 bp, Heterodera glycines
attcgttaaaaacagtttttataatgaagccagacttaaaagacccttactttatgtacaaattaattgttggccaactcttttacgatggtcatcaacaattggcactgaacttggcacaaacgcttggtctttcgctacgaccgcctcctccatctgacaaactttttcgtcttgtggcaatagctaaacaatttgtggaagatcccgagtataaagaacgggagacaatcttgcaggtcggtgggtttgagtctgctgggcttgacttggaattcgatgctgatgttgtcccgacaagccctgaaccaagtttgtacgaaactgtgtacctcaccacacacaaggccccgtgtcgggcggctgctttctctccagatggagctcttgtcgccacggcctccaatgattgttcaattaaaattttggatgtcgataaaatcatttccaggattgacgtgactctgagtgagtccggccccgacgcccatcacccggtcattcggaccctttatgaccacctcgatgaaaccacttgcgttgctttccatccccgcgagtccgtcctcctttcgggcagcaacgattttacgctgaaaatgttcgattattcaaaaactgcgggtaaaagggcaatgaaaaccatcacggaggtcaaggcgatccctgcggtcagttttcatccgagcggagagttt

SEQ ID NO: 90392 - DNA, 542 bp, Heterodera glycines
  unsure (1)..(542): unsure at all n locations
ggtcgtanaaggcgactctgtcagttccaatgcccattcttcccccttcaaagtaatcgtcatccttcctcgcgtactacttcctccgctgctctgctgatgttcccctacaattccttctccaccgtgcgtccccactccatctcttcccaaagttcaaccactttctcctcccggaatttcacccaatcggacaccgaagcggaagaggagaagaagtttcagaagcgaatcgtccaccgaagagaagtgctgacaccgtcgagaatgaaatgggactgggacagaagagaaatgttggcctcgtgttccacgccaaagtcaagtcaagaggatttgctctgtcactttcgccttttagacaaaacttcagtgtattttcgacctaagcccagcgatgataaccaacagcaacggcatgggaataataaacagcgccaaaaacgggcaaaatgccaacagaaacagcagcaacttcaaattgacgattattttaacgcaatccgtcggccaaagcatttgcgcggagcgaaacggcacag

SEQ ID NO: 90393 - DNA, 382 bp, Heterodera glycines
  unsure (1)..(382): unsure at all n locations
gagcctcnatataaaattcatttgattttttaaacatttttaattcccatcgttccttaaaatggcctgtgaatgttcctgctgcaaaaacaaccaatgttgtaccactaactgctgcggagattcttgttcatcatgccaatgccccaactgcgagtgccaaaagcaaaagggacagtgccaaccccaggggaagggatgctgtgcttagagaagcgaacggaaaggacggagagaggggagagggtgaagcaaagagagagagagggagagagagaaaaaagggaccacagtgatcggaatgaccaatttgtgtgccaatgataagagcaaatgacaaacataattactaattgtnaaaaaaaaaaaaaaaaaaaaaaaa

SEQ ID NO: 90394 - DNA, 287 bp, Heterodera glycines
  unsure (1)..(287): unsure at all n locations
atcctcaaggggtttcactcacccattgccgtgtcttatttttcttaggagcgcatctctcaatctctaggctagggctcaatacatacacacctatttattgatttgtttttctttctgaatgacctcccccacccctcccgaaaattgttttttcttccgccgtcggttaacctttaccctttacacattttcccaatacttgtgacattggtacgttcaattcaacagcaatgttttttgatatcttaaatttgtcatttcnnaaaaaaaaaaaaaaaaaaaaa

SEQ ID NO: 90395 - DNA, 752 bp, Heterodera glycines
ggtccatagaaatttttaacttttttttcctactggatcttttgcgctatcgggagtccagaggatacctttcttttttataaaaattttcgtttcatttttatttttagaaaagataaatttgacttctttacaatgactgcttcatcccgtcgtttgcaaaaggaactttccgaaatgcgtgggaacaattcgggcgctgttcgtgttcttgaggttgatgagtctaatttgcttcgctggagccttatgctttatccggaccgtgaaccatacaacaaaggtgcttttcgtgtgaatgttgattttccaactgagtacccattcaaaccgccatccgtgacattcgcaaccaaaatttaccatcctaacatcgacgataagggccaagtctgtctcggcatcattctcgcggagaattggaagccggcaacgcgtgcagagcaagtgatgaacgcgctgctgtcgctgattgccgagccggaaattgctcatccgttgcgctccgatcttgccgaggaattccaacgggacaagaagaagttcttcaaaaatgcagaagactacacgaaaaagtatgccgaacgtcgcgactgagtttgtttggacagatggagttatttgtgcatgaaagtcccgctggtatctacgaataatctctcgccactcaaattgttcaatttataaattattgtgttttgtctgtcgttgattattttgacttttttgtatcgatttaaacttgaagaaaa

SEQ ID NO: 90396 - DNA, 428 bp, Heterodera glycines
ccactattgagattttcttgctaaatttgtgccgaataaacgcaccttgggaatattttaccggattaaataaaaaaaaagatggccgagacaattaaggatgccacccatcgcatgggccgaatgcttccggcagaggctggcccgcgttatgggctttacgcggcactggcggcaattgccggattggcctattgttaccgcgaccgtcttggatttaaaaagtgaatggacggacggcggaacggattggtcacccaccattttgatgagagagggggcaattttgaattcggattgttccaaggtccacaaattttatggccaatggtcggatcttttttcatttgatgctttttggtttcttttcactgtaaaataaatactatttcaataaaaaaaaaaaaaaaaaaaaaaaaaaaaaaaaa

SEQ ID NO: 90397 - DNA, 334 bp, Heterodera glycines
gggcctttaggatattcggcataaatttgcgctcgtccatttgccctgagaggagaatgacgcaatttggagagcaattgacgggcgaccttaaagaagaactgcacgacgcatcaacaaatattgcaggagacaaacgaatggattgaattggctgtgttggaggaaattgtgcaccaaagggtgaagacgaaaccgaaaggcagcgaagtgatcagaacattcatcgaaagtgacaacatccgcacttttgtcgagcagggaattggcctaattgggcagtgattgtaaatttgaaaatcccgaaaaaaaagaatgcacataaaacaaagct

SEQ ID NO: 90398 - DNA, 762 bp, Heterodera glycines
gtccataaaaggttacggaaattgtggcctatccgaaaaacaacttccataaaaaacgaaacttggcttattgtcatagagagagaattctttgctttgcttttccgatgcttcttcgtccgtgcccttctcttccgctcctttcaaatgcgctttctttcgttgtccatttgccttttcatcagcaaaagacaatttccacttcggtctttgccctcacagtgtttgaccctcgaattttcaccgagcccatcgtttctactgaggagttgaataaaccacttccgccaaatgacaagcgcaattatatgtatctgaaaccaatgttatttgaccaaactcctgttttctacagggatgaaattgtggacaaaatggtgcgcgtatttttgatggagggcaaaaaggaattgtcacgcgtaaatgttctttcggcactggaaattgtcaaacgaacgcaatacgaaaaatggcttaatgaaaaagacgagaaaagacgtgccgaaatcattttggaccccatcgaagttgcgaaccgcgccattctcaattgtcgtcctttgatgaagttggaaaagacgatcaaagccggcaccctttacttagtgccaatgccaatcagcgaaaaggtcgccattttcaaagcgataaaaacaatgcgcgacatttgccggctaaaggcgggaaagaagcgcaatgagaaaaggccacactacccgcactttaaggatgtgctcgcgtccgaattgctcgccgcgatgg

SEQ ID NO: 90399 - DNA, 1037 bp, Heterodera glycines
  unsure (1)..(1037): unsure at all n locations
cttcatanaaggtgaaaatggacgaatcacttggaaataaacggcctttnaacagcacagtcaaagaggatgattcagtttcattgtgcggaagtgtcgcaacaacggccgccggggatggctctctgttggactttgggcttgacgaagaaacattggcggtcgaatccgacacggaattcgagcgaaaattcttcgtaatgaaagagggctcttttccggggaaggtttttgctttgcctcaccccgcctcgagggaacgcgcgttgtatttgttgaatgaacatggcgaactctttgaactgctccgacttgacaatggaaagcgttcttttttcttttttgattccgtcgtggccaatggctccgttcatttgtttttccctgtccatccttttttcttggccattgaatgtctccagcggaatgcatctgaacattttttgactgcttctgaactgctcgaagatgacgactttccgtcattgaaagaattggcaaagagtgtcaaactgatcgacacactgaaaattgctgccaattttgagaatgacaattctacggattcgcccacaaaaaacttcaaattccgacacaacgaacaacgccttttcatttggctggaggaacgatttcgcattttgaaggagtccttagcagcgaattgtgatgaaaatgataattgtgccgaagatgaacaatgttttggcattttggctgattatttgccggaattggtggcgcaacggctgaaggagcgattgggcataaaaatgccaaagaataaaaaccagcagaaaacgaagaggattttggccgaaccgatcaaagggacggaggcgaaaggcgcgcggacttttaaaagaaaattaaccaaagtgttagccgaagcaagcaaagggagtcactcaatcgcctcattattcggttcaaacaaaacggacaaaaagtgatcggtggcgattcgaaaactaaccaacgattgttgctatgcccctttttattttgttttttttaatattattctatttttaaaa

SEQ ID NO: 90400 - DNA, 632 bp, Heterodera glycines
gacggtgcaaactcaattcttcctcgaacgccaccggcactgtgctggattttgttgagaatccgacggtcaatatggggctgatgttctgcaaagggccgacgatgggcgtcaacggcagcgcatcggccgacggtgcgtcggtggcgcacaacgaaaaggaattggtggatgtgtgcaaggaatggttcctgaataaacccgactgggagaaattcgttgtcggtgcgatggtcgtctctttggttttggcctgcctcgcgttcatttggaatttggtcactttctgcgcctgcttttgccactcccacgtgatgaaaccgttgcccgggttggccggactcaccgccatgtgtttggcagtggcactcactgttttctacatgaaaaaccagcaatacatcccgatgatgaaggacaaacagttcgacaacactgaagaatttcggaagttcatccaaaaactcgacaatgatggaaaccatgtcggctattccttttacatgggctgtggcgcggccatcgtcgctttggcgaattcggtcgttggtgcctttatggtgtgtctcgctgacaaatatctctgatgcgcgcgagggttgccaacgttctgacgcattttgacttttctc

SEQ ID NO: 90401 - DNA, 637 bp, Heterodera glycines
ggctttgaccaccgccaacacccgcacgacaatttcttctgctgatgtttcgaaggctggcaaagtgacagacaaaggcggcgattcagacgacgaagcggccgaagaatttgttccgacgggcacttttaagccgattgttccgttgccctcaaaagtcgatgtgaaaagcggcgaagaaaatgaggaggttcttttcagtgctcgttgtaaattgtttcgctacgacccaatggacaaaaagaacaaagaacggggaattggggagcttaaactgttgcacaacaaagagacgggccgttatcgctgcgtcattcgcagtgatgaccaactttgcaaattgttcgctaattttcccgtcttggccacaatgataagccgtatcactggtcagaagccgaacgttcgaactttgcagtgccgagacttcagcgaaagctccgagggaattgacgaagtgtttttgcttaaatttcgtgaccaaacgaccgctgaagaatttgctaacaaattggaggagacaggcaaaagattaggagagacgccgaaggaaaaggaagcggccgagaaagagccaagacaatgaacggagttgaaaagaaacggaaatgaaattcaattgtttccccctgttgct

SEQ ID NO: 90402 - DNA, 451 bp, Heterodera glycines
aacactacaaataattttccgcttttaataatttcaaataattttccgctttttccaaatgttccatttgcgtttcgttgtgcttcttctgctggtaattgtcggccttttcattggccccaattttgtttctgctgattgggataaaaaggtggccggttgggacgacaagaaagtgaacaaaggctgggaggaagccgaagcaccgctcaacatccgtgcccgtcgcggcggatgggatgagcgcattttgggcggtcgtgaacaatgaatggagagaatgagtgaagaagaagaagaagaagaattcgggatggatgccaaaaaagtaaacattcattttcaattcaaactattgaacatacacaaaacaatgaatttctttcctggtcattttccaattaaataaattgaaatatttaccaaaaaaaaaaaaaaaaaaaaaaaaaaa

SEQ ID NO: 90403 - DNA, 684 bp, Heterodera glycines
ttcgtagaatgatccctaaatttgttaatgaaatttaaatttacctttaccactaaaatcgttagatgttttttaattagccatttttgtcctgttttctattttcggcacttttagggacagtttgaatacgggggcggctgttgtacgacatgcacaagcgatgctgattgtacgggcgggaagacggcatttactcggtgctgcgcggctgtctcagcgactttttcgacttcccaccctccaacggagaggagggctgcacctgggggctgtcttcggagaatgcgctgatcgccaccagcgaaaagggcgaattggtgcaaaatgtgcgagtgggcgttaatctgtgcccggcaaaagaaggcactcaatgcaattcgttgttgagaccctccgtggaatacgcccagggcaaacagcaaacggacgcttcgacgagcgccgccggcaacgcttggccgtacagctgccgaaaatcgacatcaatggttcaatgcttacaatgctcgcgctatgattgggacggcgactgtcactggaactaccgggagtactgtaccggggcatggtgcacaaaaacaattggatatgttaacggtcgttggcttgagcagcgcggctgtgccccattcaatccgttgaacagccaaatttgcacaaaagtcgagacgaatgccgcgt

SEQ ID NO: 90404 - DNA, 665 bp, Heterodera glycines
ggtccttagagaggttttaaattattttgtttttgataaatggcaacgacatcacaaatggcattggaaccacccattatggtcacccaagacacgggcatgaaagttactgttttcatctgtattccgggtatgcggaagaagggcggccttattgttcttctgaagcggctatttcgagtcaaatcccgggaccctttcacgctcgtttctaatgtcaagtttggacagtacatgttgacggatcagagcattagcctgctggccgaagtgtacacggacaaaacggcaatggacaaacggtccgaggaccgcaagagatacgagtggagcgttacgaaatttccgtcacaaatcaattctgaaagtgccgaattcactgtggagcaaaatggtgacaactgctacattgtgatgtcctgcatgaagacagacaattattcgactaattggaaggattttttgtctgccaatggcactctggacatgacaaaggcataattcggttaaaagtgaacggattgattgattgatttgaccatcgttttaatttaagcctatgtgtgatttcattgatggtttaaaataaattatctcatgattaatgctgattttatgaatcgaggcattgtaattatttaaaacaataaagcaattttcgatta

SEQ ID NO: 90405 - DNA, 650 bp, Heterodera glycines
cctcttgccgaattcggcacgagggtccttaaggttgaaatgcctttctccgctcctcgtcaagtgctcaaatatttctataaacggacaaacgcattttgggacaaatcgatgctccacaaggagcgagtcgcatatgcaaagctccggctgaagctgtacggcgcgttggtgctttccatgtggtatatgtatgaattcgccactcctccgcccgacgtgcgctttgacatacggtggttcttcagcagctcatttgccaattatgtgcagacaaagggtgccggtggcttggacattgcggatgagaccatgtacaaacagttctcattttcgaagggcagattgttggagaatgcgctcgaaacgccggagggacaagcgatgggattgtccgaaaggtttcactcatgagagggacaagcaacgaagaagaagaggaggaggaggaaaagcgacgatcacagaagaatggcactttaaaagcaaaccgagaacagtcacacattctataggccactttcatttcattttgtccaatcctatttattaaatgaaataatatttctatttttttgtttgattgccatttctctttcttcggattgtttttcatttgtttcgtctgctgatgaatgccttttttgcta

SEQ ID NO: 90406 - DNA, 644 bp, Heterodera glycines
  unsure (1)..(644): unsure at all n locations
gttcagttaagccattctttcacttttgctcactctcatttttcactgaaaaaaaccatcgccaaaaagtaacatggaaaccaagcgcaacaactacaacaacatcgactcgttgtggagcactttgtgtgacctcggctaccaaacctcgcagggattggcctactccgtcggcatgcccaacttctcattcggcgccttcattttgctgtccgtcatgacttggtgctgctttttcatgccgcccgtggctgtgttcttccgcggctatctgcgcgacgggaacgcgtgcactgagcatgtcatttacaacatcattttgtgctttttcctgtgggtgcccggcatggtgcacgccttttggtactgcttcagcgacatgttcagcgggccgaagaaggagggcgccgggtacagcaaaaatgcctgagcagaagagcactggcgagcggacgaacgcagaaatgagcattttttgaaaaatgacgtcatcgatcttattaatttttgacacctaattaagcgataattaattatctctctcacccttttttcatcttgtaaaagtttcaccattaacctatcttttggttgagaaaaattaatgaaaaaatcaatggtcnaaaaaaaaaaaaaaaaaaaaa

SEQ ID NO: 90407 - DNA, 562 bp, Heterodera glycines
gttcgtagaagagttccgttattcaagtgaagcaaattattagttcaagtcgaaatggctgagtctgagatggaaataccggatacgatgggcgaacgtatggaaaagcacaagaattcaggccagccgatgatgttgcaccccgaccacccggacaattgggaccctcgctatcacgaaaaggcggcgcatcttctctggtcagctccatatgatgcacgttatccacaagtacggaagcagcgtcagtgtttcgaatattatgtggatttctttcgctgcaaggagctgatgggcgaagactacaaaccgtgcaaattcttccagaatgtctacaaagacatttgcccatcattttggaccgagaaatgggatgagctccgtgaggagggacgttttcctgcgaagttcgaccgttaaattttcggcgattatttaggacacttttgatgtgatggtgacattcattgttagttgtattcattaatacaaattcgtgtgtcaataaattggcgatgtaaattaaaaaaaagaattaaaaaaaaaaaaaaaacaatcatca

SEQ ID NO: 90408 - DNA, 483 bp, Heterodera glycines
accattagttcatgcggctgggcattttactttttgtttttcgcttttcattaaatttaattgcaaaaacaaatgccacttatttttatgtacgcggtgaattgtggtgccaaggagagccttacgttggcgccaaaatcttcctgatggaggctgacacgcttgatccggatgatttgttgggcgaagaacgatcggcgcccgacgggcgctttgaagtgcgcggaggtgagagcgaaattggcgacgaagaaccgtatttgatggttgggcacacctgtccacagcgaggtgtcccacctgacccggcctgccattttttgactcgcgttgatttgccaaatttcctcactcacattgaagtgccgccaattcatttggacggacaatacgaatttcagcatatttgtggcgaggatgatgtttaaaaaatatgaatgatggatgaataagataataaacagttcatttgcccatcttttt

SEQ ID NO: 90409 - DNA, 509 bp, Heterodera glycines
ctctgtgccgaattcggcacgaggattttaattaaaattatccgaaaatctccatactaaaaaaatgaattctgcgacaatgttcactctgctgttgatcattggcactgttcttgcactgacaattggcatgccaacccccggcggatctgatgaaagtgtctcatcgatgcgccaaaagcgcggctacggaatgagcaacggaggcggaatgggcaatggatttggaggcggaatgggcaacggatttggaggcggaatgggcaacggatttggaggcggaatgggcaacggttttggaggcggaatgggcaatggttttggaggcggaatgggcggcggaagcggcggtggctatgggtacggtaaacgtcgctgatgaattactgtgttttacattatgacgacgacatttgatatgctcagatttatggaaatttttattcatttgtatttataaataattttaagtttaaaaaaaaaaaaaaaaaaaaaaaaaaaaaaaaaaa

SEQ ID NO: 90410 - DNA, 799 bp, Heterodera glycines
caccgtcaaggaggtacggggcaaagaagggcggtggaaagagccttgaggatgccacgaaggcggctggagaatttttggaggagcattggaatgcattcgagaagcgccaaacgacagcagtgcgttcgggtggctgaacagcgcattgtccggatcgctcaatcaatgcactttttggtgttcccaacaacaaacgctgaacaaacggcggttgacaaaatgggcgaagtgcaattgagcaaatgcgctgaacaaacagcgaagattgttgaccgtgttcgtgtccatcgccattcgttgtgtgctggtggtgctgctggtccttcttctttctgttgcccatcatcattttcatcgttatccatttccaatccgccgattgctcataatcataatcatcatcaacaaccgaaacaacattttcatcagcagcaacagcagcagttgtccttcatctcggccccgtgtgcgttgcattcttcgcatggcccttcaacaacaacggcaaatgccattccggcccagttgtttatgctctcaaaaaatggtcgcgaatgttccaaactccgtgagatggtctcttctctcggcgaacaattgaatgtgccgtcgacaacaaaaatttcttaaatttacctatgcttcaaactcgttaactgtctgttgatgatctgctgtttctctctcttatggaattttaaaaatttcttttttgtcttcttttttttctttattcactttgatcaaagtgctgctatgtcttttttattcgtcagttggtcaaatatttgtttca

SEQ ID NO: 90411 - DNA, 736 bp, Heterodera glycines
ggactgtaggatgaaagaccaggcatatttggtgggagcgttggacaaagtggagaaattggctgtccgggccaatgacaaaacgaagaagttggagcacgacactttgttgaaggtcaaagagttgctggagacaaagtttgtacggcaacacgaatggaatgagaaggaaattgaagtgctcaacaaacaccttttcctcaccgcaaagccaatcgtttatcttgtgaatttgagcgaacaagacttcatcaaaaagaagaacaaatggcttccgaaaatcaaagcgtggatcgatgagaatgacccgggcgctgtattaatccccttttcgggtgcctttgagttgaagtcggttgaactggaccccgaggcgagggcccaattcttcaaagatacgggtgcttgcagcgcacttgacaagatcattaagactggctacaagaccctttgcctcgagtatttcttcacagccggcaaagacgaagtcagagcatggaccatccaaaaagggaccaaagcgccgcagggggctggacgaattcataccgattttgagaagggattcataatggccgaagtaatgaaagtggccgatttggtcgaattgggcaacgaaaatgcagtcaaaggagcggggaaatacagacaacaagggaggaactatgtggtggaagacggggacatcatcttcttcaagttcaacgctggtgctggtttgactgctgccaaaaag

SEQ ID NO: 90412 - DNA, 887 bp, Heterodera glycines
accatagacgctggttgacggatttggcttcggccaaaaattctgtatcacaacaatgacaatctgattaccttcacacatttcgatgtggacatggctttgttggtgttttcggaggctgtcgacgcaacttcggttatgtccctaattggaacaacggcgcattcgttgcttgcgatctctccgttttccatggctcctcagtcgtccaaatggtgccgtgccaaagtttggcttgcctctggcggcatttccttttctccgtccgccggtgtttttcgtgccggcagtcctcgctttgtgaacactgattttctgaccaagtacttttcgtcgtctccaagctgtactcggacattgccaagaaaagcactcacttcgttagtgtcaatgtgcgaggaattaattgcggaggagaacaatccgtgggaagtgtcggcactgacgagtgcccgtttagcacttgacggaattacgcaggaaaccttcaaattgacggaacaaaattgcgagaaattgaagcagttcgacccgcaacgttcggcaatgtatgacgaaatgtttgacaaagtccgaattatccacgaactgaccaaaaacacttccgacacacccgagcaaagccaattggatttgcttatggaggcgaaaagcgatcggcttaatctgaatggaattggactgatcagcctgctccatcttcggcctctgtccggcttagtccaggaactcaatctgcagaacaaccgggtcacttctgatcagatcactcaactctgctcatttgctgcgctcacttccctcactttggatggcaatcccatcgacagactccctctgatcaatccccgttggttccctcgcttggaattcctttctttggctca

SEQ ID NO: 90413 - DNA, 790 bp, Heterodera glycines
  unsure (1)..(790): unsure at all n locations
tcgtagaggcgttgaccgctcatttgttttgtgttgtgctgccagcgccgaccattcgtctcagcccttcccatcatttcaaattccattattcccgtgattgtccaaaatgatcggcggaatcctggaagatatctggacgagatttatcgacttggtggaggacatctctgatcagtacgacgattctgagcaaccaacaatcatccaccacgaaccggcaacaccaacaacaatgtttgacaactatggtccgattgagaagattgttgtggtcggcaccggcctcatgggcagtggcattgcgcaaattgcggtcgagtcgggcgtcaaagtgtgcctggtgggccgtagtcaagagaagtgtgatcagacccggctgaagatcaacacgggagtgcaaaagtcgatcaagaagcgcatggcaaatgaaactgccgaggcacaacagcagttggtcgaggcgacaatggaaagccttgagctggtgaccaacttggatgaagcgggcttgtcagatgccgacattgtcattgaggcggtggttgaaaatctgaaggtgaagcagaagctgttcacggaattggaagctaaggtcagcgagaagtgtctattggtcaccaacacttcgtcctttctgctcgaagacgtatcgtgcaaaatgggcgccgccaagcgcgagcagttcggcgggttgcatttcttcaacccggtgccggccatgaagctggtggaggtggtgcccggcaatggcaccagcgacgcggcgnacgaagtgctggccaacttt

SEQ ID NO: 90414 - DNA, 735 bp, Heterodera glycines
gttgccccaggtgttacaattaattttttaattaatttgacaatgacctatgacgaggattacatgtcaagtgctttcttggcaaaagtggaagatgttaagccaggtgtcggcaccggaagagaggggcgtcgaattttgcgaattaatgccaaccgagaagaggcgattgaaagacagcgggtggagaagccaaagtcaaaagccgaacttgaaagggacagactaatggagggactaaacaatccgatccgagcggagtcaaaaggctttcaattgttggccaaaatgggctacaaagagggcatgcgtatgggaaggagcgcagcggacgaacagcagatggacagtcggacgaaggagcccattctgatccaactcaggattgatcggtcgggcgtagggatggacgagcaccgaaaggagaagcagagggatttgtgtgaagcgcacatggagcgaatgaagcgacaggcggacaatgaggaagaattggccatcgatttccgaagacgcaaaagggcagcaatggaaatgaagcaactgatctcggagatccaaaaactgagaaagacgtgccaagagatggacatgcgaatgggcaaaacaattccagacgaattttggttttggccgatttattcgaacaataatgaattggtcgacatggtggaagtggtcgacaaatcaaaccaatcgatggatgaaaacaaacggacaaaacgagagccttca

SEQ ID NO: 90415 - DNA, 1019 bp, Heterodera glycines
tcctcaaaagcttcaattggccaacaaataccgtcgaccggtgctttcattgcggaggatgtggacggcgaggcacttaccacgctggtgttgaaccgtttgaaagttggtcttcaagtgtgcgctgtgaaggcgcccggctttggcgacaaccgaaagaacacgctgaaggacatggcggtttcaactggtggcactgtgtttggtgaggaagcatcgctgatcaaacttgaggacatccaaattcaggactttggcgaggccgatgaagtcacggtgaccaaggatgacacgctgattttgcgcggcaaaggctctcaggaggacgttgagaaacgcattgcatcaatccaggatgaattggatgcttccacatcggactacgaaaaggaaaagctgaatgaacgtctcgccaagctgtccactggtgttgcactgctcaagattggaggtgccagcgaagtggaagtcaacgagaagaaggaccgtgtgacggacgctctgtgcgcaactcgtgcagcggttgaggagggaattgtgcccggtggtggtgttgcattgcttcgcgccttgaaaaagttggacacactgaaaccggacaatgatgaccagaagagcggcatcaaaatcgtccaaaaggcgattcgccagccaatttccaccataatcgccaatgcagggcttgagccctcggccattgtggagaaagtgttggccaatgcggagaccaactacggctacgatgccatgaatgacaaatttgtcaacatgttggaagcgggcatcattgacccaacaaaggtcgtccggacggcgttgcaggacgcggccggcgtggcctcgttgatggcgacgacggagtgcgttgtcaccgaaatcccgaaggaagagccgccgatgccagccggtggtggaatgggtggcatgggcggtggaatgggtggagggatgttctgagacctctcatttgtcattgttttattgttacgttttttcactttaataaaattttgacattg

SEQ ID NO: 90416 - DNA, 387 bp, Heterodera glycines
aatccctctgactaataatgtcgctgcttttttcgcttttcagttctctcgtgtcggatttgttgaagggtctgatgaaattattacttttcttcgagcagtgggcagggcagtgccaatatggtgccgagaaaacagtgaccttcgtgggcgtgtcactccgctcatttgtatgtccatcgaacaaccgttgggtgagcattttagaaagaagagagctgaaaacccgacgaaataatcttctcattttttcaattgtattgctgctttggacatttcagtctttttgctacgattcctttcaaatatcaaaattgtcacccaaaattctcaaacataaactgttttcaaactgcacactaacccaaataaactaaaagaattgtc

SEQ ID NO: 90417 - DNA, 1158 bp, Heterodera glycines
ctctattacaaattcacaaaattctcctgcttattgtgtgcttgcctatgaccacggggatggtgtgttgcgcgagataattgaccatcttggtctcttggaaagtggcgggcttggagcccagcaaaagaaaattggttccgaaactttgccatgccacacgctccatttggacacaaagtattacacatgcgatgtgcctttgctcagttgtcactcatttgtgcgtctcaaatcaatttgtgcagctgaacgacgtagcaatttgtcagtgttcgctgtgctcttttgtgtcactcggcaacagttgacagaagactttctggcattggtatcacaatactcggccagtttggagaaggcggaagtgaaggcacttgttttgcgtgatgatcaaactgaagaagcaaccacctcaatgaacaccaatgatgaagtgttgaacaaatttgctctgtcacgacgcatcgaaatcatcaaaatcggacggaaaacgacaaatgttgtggacgatgatgaggaggagggcttggttggcattccgcgaattgtggaatccattgaaactgtctgttggccgaacatgaaactgaagccgaacccggtgaagcagcgcgagcatcccactcgtcttgaaaaatacatcaactccgaggcgtgcgctgatgacactgcggtttttgacatgttcccccattgtgctgatgattttgctccgggaattgcatctcacagagtcaatcaaatgccaccggagaaggataaagcggccaacattgagccgacgggttccgattaccctgacagtgaagatgaaatggcaattttggaatggtttgacaagccgatcagcgaagacattttgaacctttctaacattccaccgccacaaaacaaaatcaccaatctgcaaccggctcgcgaaaatgatgatgatgatttggatatcaatgcatatatctgcaaaaacatgaacgagttacgcatcggcaacacccaacggcccttaatggcgcgagtcgatgtcaacgagggaatcacttacgaccttttgaaggccatttcctcttcatgcaacaacaacaaacggggcgatagtaataaataattgtttttgctcaatttccatttgcctttttgtgttttaaatttttactt

SEQ ID NO: 90418 - DNA, 1074 bp, Heterodera glycines
ttctttataagaaagtgcatttgcgccatttgattttaaatattctgctgaaaacaatgtcaaacattcatactctcggcggtgacgacgataacaaatctcgacaaaggtccaactcaagtgacgatgaaaacagcgatgaggggaggcagggcttttttgttggcggaagtgatcacagtggacaggaagtgctggggccgaaccgcaacgaaaacatttctgctgaccatttctttgatgcaattcggcgggctggagcggaacgaattacgcaggaacagaacgaggcactgaacatgccgagacaaaccggcggaggtgctggccagtcgcaggtggcatttcgactgggcggacacggaatggagagcgaacgaatcggagggacgtcggcgaccgcggggggtaccactcgccagcaggctccggttgttgttcgtctcgtgttttggaacaatggctttaccgttgacgatgggccgctccgacaatttcaagacccacagaaccgggaatttcttcaggccgttgtgacaaagcgtattcctgctgagctgacaatggctgcgccgggccgtgaaattgacttgcgaatcgaaaagaaaggcacggaatatgaacagccaaagacgaaggcattctcgggccagggaaaccaactcggcacaatcacgccgaacgtgggagggtcggcggacgttgtttttgttgatgcgccgccgaagctttcggcagaggaaactgccaaattggtggaacaagctcaggccgaactgaaggtggatgacaatttgccaaccactcgcattcaaattcgaattccggacacggcacggcccatcgtcgcgcgccttaaccaagggcacacagtgaatcagctgcgcattttcattgtcactgccgacccgagtttggcctaccgtcccttccgccttatgacttcgtaccccactcaaccgattgacgacgagggactcagcgtcaaagacgccggactgctcaatgcgacggtgttggtcaaatttgaatgaatgagtgcctgacgaatgattgaattaccaacttcaacgg

SEQ ID NO: 90419 - DNA, 387 bp, Heterodera glycines
cttcaatcgctcataactccgtttatatagaactttgaggttctccacagtgttcgaaactcacaggtgccaacgcgccgaacacgcctgagaaatcggccacggcgcctgaaaaatgaaggctccgcgccgacttggccgcaaaaaattgactcccccctaaaaaaaaaaaaaataatttttctgttagatgagttttttaaatttcgacgcacggcaccggattctcacttttcactgaatgcgccgtgatatataggcaaaaagtcaatttgcccactaaaaaatcttctatggcccctaaaaatcgagcttcatgggccacatgactccttaaactcgaaagttagtttcgaacactggttttaaaagtggttcaattggttt

SEQ ID NO: 90420 - DNA, 742 bp, Heterodera glycines
cgcatagatgtttcggcaattatttgaagcaaagtcattcactcctcctatttgctgggatgcacaaagacgagacaggctctggtcatcgatccagtgatcgaaacggttgagagggatgcctcattagtccacgagttgggactcgaccttaaatatgtggtcaacacacacatccatgcagaccatgtgacgggttctggcgaactcaagcgcaacaaatactttccaaaagcaatttcgattttatctggaaaagcgggtggaagggctgatttgcttgtcaaacactccgatttaattcgttggggggatggactcgaattggaagtcagagaaacgcccggacacacaaatggctgtgttactttagtatgccattccaaccaaatggcattcactggcgatgctcttttgatcagaggctgaggaaggactgactttcagcatggaaacgctcggactcttttccgatctgtgaaatcgcaaattttcactcttccccccgattatcttatctatccggcgcatgattatgccggcagaatggtttcatcggtttgggaagaaaagaaattcaatccccgtcttacaaaatcggaggaagaatttgcggcgataatggaaaaccttgggttgccttatcccaaacaaatcgagaaatctgagccggccaatttgctttgtggaatttccgaattgatggacgatgcgttgagaaggaaagtttttggagaaaaga

SEQ ID NO: 90421 - DNA, 630 bp, Heterodera glycines
gccatataaggaaaccttttcatccattccccttcaatgatctcctttcgtcattcggtcaacaaatgtttgctgccacaaattacaaatcggttgacttccaatttgtccgccatgtgtctttcaacggctgcagctgacaataaagttgtttcaaaatatgacgactatcagaaggaaatgcgtcttaagcaaatcgaacgcgcttttgacgaggcgatgcctaaactgttgcacggctcctacaacaatttgatggcgttcctcgacacgaattccttccgttttgaagacaaagtttggctctttgagtcagatagcattcacaagacggtttttcgcatggcaaaagtccgtttgtatttggccttcaaatctccgcacaatcgttttgagacattgggcacacatatttgcctcgacgagaatttggtgacattaatttggcagctttcctggccaaaagatgcaaagtctgcctatctattgtctccaaagtcactggctgccaacttttctgctacgtttaccggcggccctcgctcccaaattggacgcattgagcacaaattggccacgagtgagtcttctgatcgcccgccctccaacgcgacaacccaaaatggccga

SEQ ID NO: 90422 - DNA, 648 bp, Heterodera glycines
gtcctttaaggctgtttcttcatgtatccaccgaaagacagcgacagcaacttcttcccgaatcgaatgttgagtgtggacagaagccggagcagcagctcccatctcgtcggtctcaatgctgctctgcaaggctgccgttcggacattccgttcatgttgcagcgtgtctcattttccaaggacatcaaattgcatcggatgcttcgctatctgcgcgcttgcttcgtccgtgacatccgtgaacacaaccgtggcttcaacaatgggacccaacaaaccacaaaatgccaaccggagatgatcgaccaaacgaatggcgtgttgaacaagcgaagctggctggagcagaacgcctactttgccgagaacaattgcttctacccattctacggccaagcagtgttttacgcatcgtttggccagcacagtgagggacgggtggtgtgctgcagcgatggacgcattgatgaggaagagagcttcaaggaaaattgcaagaaaatgacggatcacatttacgcagccaaagctggatggcgcaagggaaaggatgcccaatgaaggaacgaaccgacgatgattgatgatgatgtgattgatgaatgtcaatttctatgcatattcatttagcaaaatattgcggtt

SEQ ID NO: 90423 - DNA, 806 bp, Heterodera glycines
taaaaataattggaacattgagcggtattcaaaagtggtgcggtgtaaaaggcataatggaattattttacacccaaagtgatcaaagacaaacgaatgaatggattagaattctttctctctcttcgatcagctgaagatgaatcttgtcggcaccgacgcattggcgtcaaaagaatagccgccgccctgcgccaagcgctttgacctctccaaattttcctctctcgtgcaaatttccatcaaatggttaagctttgcaactcgtgcctcgccaattcgttgctgatcagaaatgctgaccaaaagaggcgaattgcgggtattcatttctgaaattgttaattaaagttttcaatcagtcaaagaatgacaaaggaccttccaatgtgtgtttgaacaaaacaaacacattcagacatggtttattgtcgccttggtcgtccaatggtgtagaaaatgcctcaaggtcagtctcttcctaaaaatgccgaattaattgaaaaggatatttctgtgctttttttgcgttgaataaacacacctcaaaatggtggtgctcttccgagtcggtggtttccgatgcaagggaaaggatgtcgcccggtgctccctctgtctgatcgtccatgcttttgttggtgctcgacttccttcgcgtcctccgttcttttcgctcatttcgttcgtgctccaatgccatcagatattgcgagttctcttgaaatttgacgtttctcttttgctaagggtttcctcaatgtgctcaccttcgtccacatcgtcgtctgagtctttcaactctc

SEQ ID NO: 90424 - DNA, 941 bp, Heterodera glycines
cacttatgaaagtactcaatgacccgtaaaaggaatcgtttaaaacgtaaaagcaaaagtgttgccgattattccggatctaacggatttgtcccagcgaatggcggtggcgcagtgcagaaaaaccgaccggaccggcgacaaattctgttttggaggagcccgttcaggacactgctgtatttcgtgttggaacttgtgcacatcgtttgggatttcggcggaagattgttcgtccttcgctttctcctcccctttctgctcgccttcggctcccttctcttccttttcttcgtccccggtgcgcacagttcgtatgtgaggcatttcgagaagaaacttctttggtgtttctattggctcggattgggcgttctctcctcaattggacttggcacgggtcttcacacatttctcctttatttgggaccgcacatcgcccgagtgactctcgccgccttcgagtgcaattctttggactttcccgaaccgccttatcccgacgatgtcacttgttccacagatgcgatgggtcattcttcgttggttacgctttggacaatcattgcgaaggtgcgcttggagtcactcatgtggggcgcgggcaccgcactgggcgaattgccgccctttttcatggcgagagcggcgcgactgtcgggacacgagccggacagcgaggaatatcgagaattcatcgcaattgtcgaacgcgatgcgactaatcaaatgaatttgatggaacggataaaactttggatggaaagggccgtgacgcggatgggctttcctgccattttgttgttcgcttccatccccaatccgttcttcgacttggctggcatcacttgtggtcactttctcatccctttttggacatttttcggcgcgactttaatcggaaaggcactcgtaaaaatgcacatgcagatgttgttcgt

SEQ ID NO: 90425 - DNA, 803 bp, Heterodera glycines
ttcatacatttttcatttattcgcctgttttgtgaatgactacttttttgtccttttctgttgaccttgaacagttggaaaaggagatccaggcgaaagaagccgcttctaaaagggacaatgtgacggacacaaaagtgcagcccgacttaaaagggaacattggcagcggaacttcggcacaaacaaaacggaagagcaatgtggtgggattggaggaggacttcgacacgttggacgagccaatttgggaaacaattaatcgggacttgaaaatactgtacggaaagttctcgcaagtgcttttcccggccaagagtgaacaaaatgtgctgaccgactgggacttgtggggccctctgttcatttgtgttgccctttcgatacttttgcaaggcgcggacagaggggcgcaattcacgcaaatattctccttggccttcttcgttcctttttccaagctttgtgtgtcattggctattgccttttgccgtacgttttcgcgtccgttgccatcaaaagtctgtcgcttcttttctggcacaaatcttccgccaatttgcttcttcgtgcacttgccactgtttctggtttcgcttgggctctctacgcttcaactttgtttttggccggctccgaaccaccgaaccgacggtttctgttctattatccgcttgtgctgttttactttgtcttttcttggcttgtcatttcttttgcgtaatatttttgctgaagaattacctaagtttttgttggtattaaaatattatttattaacatatcataattagaattagtgt

SEQ ID NO: 90426 - DNA, 936 bp, Heterodera glycines
gccatgaggcgttatttggacaccgaaaaggccgttgaggaatttggacttcgggaggatttaagagctgctttggagaatttcctagtcgagtccgacattcgttctgaccattctctgttcactttcctccacaatctcctcccttacattatgcttctcaatgtcattcttcttatacccgcggcgctgttttttctccgctcgacagtttccactcgaaaattggtcacatttcttttgctgagcactttttgttggtcatgttacgcaacttacatgcgaaaataccaggaaattttggctgaacgttttctgcgcactgacgctgtgtttcgtcgagggggaggcgtttgttctcctcaaggcttgttaagcgaggcgtttgatgtgatgctaagttatgtgagaataaaacaaaagagcgagtgtctgaaggcgtatgaggacgaactaattgctcccctctggcaagtcgacccgttgcaggtgatcgccgaagtgttgtccaactttttcctgggcggtcttcccgcttccggcacccatctgaaccttttcttcaataatttcttcgtcgacacgccctttcatttggcattggtcaaaatgcttttcgccattgcctttccgttggccattgcttatgccatttatttatatgcaaattgctacacacgaaaacagcaaaagaactcagaaaaagaacagcgacggattaagccaaaagagacgacgaggacagcgataagcagaagcaacagccaagcggaacttattgtgagcagtgtttagtcggaaacatcgcaaaactcaaagtgatttgacaagttacaaaacattgttgactgatctcaacccattttagtcattttttattgacatttttaaaaatttataaattctgttttataaaaaaaaaaaaaaaaaaaaaaa

SEQ ID NO: 90427 - DNA, 618 bp, Heterodera glycines
tccatgatatggttagccatgccaaaaatggacatgaccttccccttccataccagtgagttcattctcctcaaagaatggcttcctcagagtattttcgcttatctcttttctttgcttgctgtgctcgccctttcggtggcttatgaattgctgcgtgtgttcagagccatccttttccaaatcgctgaaagacgtcagagtgaagagtgttgttcgccggtggcgagtgctgccccatcctccggtgccattaccgcctcctcctcatccgtcgccgcctgcaactgcttgtctccccaactcttttacaatgtcccccaatggtccttctcctcccaattggtctcccatttccatctcttccaatctctgctccatttcattcagttttttttgggtttctctctgatgcttgttgccatgacttacaatgtgcccatctttgtcgccctcctcttgggccattcgctcggttactttctcaccgcccctctctatcgccatggattggctgaagaaaatcggactggcggagattgctgctgttcataaacttcactttttgtttgcataaattcattagcaattaagttagagcgttttaatggtccaaaa

SEQ ID NO: 90428 - DNA, 928 bp, Heterodera glycines
caccttagagcattaattcccacttatgttctgctattttctcatttttatcttttgctcgttttggcaaagggattcgaaggctacactttcagttgtttggacgggtgcgaatgtgacactgatgacgaggccatccattgtcacaatcgtcccgatcggcactttgtccaattgcccccgtcgcgtctccgcggtttcactgtgctcgcgctcacccgcaataacatcgatgtgctgcccagcgaagaagtactgctcgagaaactgcccgacctgaaggccgttgacgtcgaagggaatgaacatttcgactgttccacgctcgaccattatcggacattgatggtgatgagcgattgcggaaagactcccgaacaattggaggccgaccgggccaaactgccgacggacacacagccaaatgaggattgcgacttcgaatgcgtggcgaaccgacgcagtcgcgagttgcgcgagtacgtcaaacacttgtgggagatggtcaaagagaaggtgagccgactggccaagaagcacggattggacaaagtggtggacgacgtgggcaatttcttcaacgacgtgggcgaacgcatctccaacatcaaactgaagaagaagaaatgagacggacggaaggaacaaaagagaaaaacaccaaaaaaaattggaaaggaaattgaaagattgccatttaaatcgacgagttcagaacttcctgtccattttgcttcgttatctctaaatcattaacacaaatctcccccatccaatcccatcataacgagttcatttctttttttcttgccttaactttttatataaatctcttgcattttaatttgtgatttcaatttcatatgcattcataatcctgtaaaatatgcataatgtgtcattcgagctcaaataaattctttctttt

SEQ ID NO: 90429 - DNA, 616 bp, Heterodera glycines
atcaaaacacccaacaacttgcacaaattgccttcctttgcttctaatccgtcccagcggtgatcagagcctcgagaagtttggtggacattagcattctgacaacagaagaaaagggtgaggaattgacggacaaaacaatgctacatctgaacacggaattcacatggaaacggcagaaattcaaagtgatgttgccccttccgagcaaaccgcaggaaaaggaggcggaagcgacatgcaacacagtgcaacaggacagaaaatattacacggaatgtgccattgtgcgaataatgaaatccaggaaagtgatgaagcacggtgcactcgtggaataggtcataaagcagtcgcagctgagatttgttcccgatgttcagttcatcaaaaagaacatcgaatcgctgattgacaaatactacctacaacgaacagaccaaaacgacgaatacgaatacatttcttaagtgcaatattgaaaatctaacaagatatttccattatgattgtcctcccttttaacttgtccagccggagattagtccatttcctctaagccaaacaattgctaatgctcaaaatattcgatgatgaagagaaagaaaacccacta

SEQ ID NO: 90430 - DNA, 1258 bp, Heterodera glycines
attctttcgtatacctaattcctttttaaccacactgtctcggttcttataatttgttagtttgtttgcccttattgtcctcttttcccctccttttccctatttccgttgggcgaatgcttcatttcattcaatttagcagatggctttccatcaataatgttttaggaagatggggacaaactttgcttgggttttgcttatgctcggcgagggaaaaagaatgcatgggaagggagtggaagagcggcagagattgccttgggcatggcaatggaatggccagagggaataatgggcggctcttctcttttgttgggccgtgcctttttgagaatttggtaaaatgccgggaagaaaagagagtgtttaacggaggcaatgagagagttttcatctcaccataaaaacattctatgcccaaaaggatggaattttcatcttagatttctctcccatcaaaattaaatcagaaaaaatctgaaaaagtcgtagtttcttctgttcgaatggatcgtctctcgtggtatcagacgggcgagtcgatggaggaaattctctgccaagcgggcagtgttggcatttacgacggggacctcaaacagacgtcgttcgaacagggcaccgcttcactgacttatcagcgaatcatttgggccgattcgactgatccggattgtcgccttgttcttcaccattcgatggtccacaaaatagaaaaacagcacaaaacaatgtttggacgtggcggcaaaatcattgtgacggtaaaacccgtgacgcctggccacgcgcaagggccaatcgcggcgagcggcacaaattcactgcgattcgtcttcagaaatgggggcgaggaggaattttacaaacgttttcttgatgcgctcaacaagcaaatgtggcagcgcacttcgtccacttcaagctccgccagttcgtcgcgaaacagtgcccagcagacgcaaacgatcgtcggaagtgccggcggaacggtcgcacctccgcggagtgttggcattttgggcattgaaaagcgactggctgaacaacaccaacggacacatgaacacatcagcgaggcttttgaagacatgagcaaactgatggagcaggccagggaaatggtcgtgttgtcgaagaatatcaccgaaagattgcgacaaaaaaagggcgaaataacggaggacgagactgtccaacttaagtcttatttgctctcgttgggtgttaatgaccccgtcacaaagtcatcttt

SEQ ID NO: 90431 - DNA, 800 bp, Heterodera glycines
cctaattaaggcttttcacctgctgatctcattgccgatgtgcgcttccgctgctctttccgcttttgcttttttggatgattctgaggccgaaatcgactgggacgaacgatgtccaattgtttattccgaggattacaacatctcctttttcggcattgagaagtgtcaccccttcgactccaataaatggggcaatgtcttccgctttttgatagcaagtggtgccctcgtcgaaagtgccgtcctccgaccaatcgaagccaaaaaggagcatcttttgctggtccactccaaaaaataccttcgctcgctgaatggccgcttcactttgactcgcattttggaagtgggcctcgtcctcctttttcccatttgcctaatcgaccgtcgcatccttcgtccaatgcgaattcaaacgggaggaacggtgttagccgcgagagtcagcctaattaggggctgggccattaacatcggtggcggctttcaccacgcctcagagggaaaaggcggcggattttgcgtttatgctgacgtcactttggcaattaaacttttgttcgctaatgaattgatcaaaagtgcaatgatcgttgatgttgatgctcatcagggaaatggccatgagactgattttgcctctgacagtcgcgtgtatatcctcgaccttttcaacgcgtccatttaccccggtgactccgatgcactgaagtccgtttcgcgcgctgttccgctcccttttggcgctgaggatgatttttacctccgtcgactcgaaatggaattggacgccgcct

SEQ ID NO: 90432 - DNA, 844 bp, Heterodera glycines
caactttgagtccataaaatcttccaaatttactctaaaaatgccgttgagccctcgcattggccacaacccgtcgtaccatgttgtcaaggaggtggagatcattcgtgaagtgatcacctccggtgggccaaccattcaacacgataaaatcattcatctgctcacttcgccaaataatgcccagcgccaagaactgctccacaactaccgtactaagtacggtggtgctgatctggcccaagcgctgaaggaaaagttgccgccaagtgaagtggcgaccaacagcctgtatttggcactgttggacacaccggctgagcatgacgccaaatacttggccaaggcgatgaagggattgggcaccaacgaagacatgcttattgagattttggtgacccgcagcaatgcccaactgcgtgccatcaaggcggcctaccagaagttgtacggtcatgggttggagaaggacctggcggccgagacaagcggcagctttaagactctgctgctcgacttggtcgaagcgaaccgggatgagtcgtaccgtactgatctggccaaggcgaagacggatgccgagaaactttacaaagccggggaaggcaaatggggcactgacgaagatgcgttcatcaaagtgttggccaaccaaaacttgagtcagcttcagctgatgttcaacgagtatgaaaagcttggcaagaagcacaccattgaacaggcaatcaaagctgaattcagtggagacgagctcagtgctctgttggcaattgtcagctttgtgcgcaatgggccaattggcgaaatggcggaaatgctgcacaaaagtttgacgaaaggt

SEQ ID NO: 90433 - DNA, 374 bp, Heterodera glycines
gaccttacttacttctatcaaaatgcaaaacgacgcgggagatttcgttgatttatatgtcccgaggaaatgttcgtcgtcttctcgaatcatttcggctaaagaccacgcttctattcaattggaggttgtcgaggtggaccaggcgactgggcgaatgattaccggcaaaacgacgaagtacgccatttgtggaaagttgcgcttcatgggcgagtcggatgattgcattctgcgcttggctcagagggatggaataattccgcaaaatttgtgaacgttgattcttcacagggatgcggcgttcttttgttgattttgttgcctgcagaatgataaacactgttaaaaaaaaaaaaaaaaaaaaaaaaaaa

SEQ ID NO: 90434 - DNA, 322 bp, Heterodera glycines
acatttagccagaaaaccattgtttttcttaatatttctccatcatatttattcgtcatatggcgtacgcaaattacggctacggatcctatggctatggtggtgaagatttttccgctggtgcccataatccgcgctaccattatgcggctgcccaaaacgcaggctttgatctgaagaccgatgatggacttccgaggaccatatatgttggaaatcttgacgtgtccgtaaccgaggacttcatcgccactttatttggccaaatcggaccagtcaccaagaccaaagtgatcttcgattcgggctctgagccttttaa

SEQ ID NO: 90435 - DNA, 1124 bp, Heterodera glycines
gtctttagctgatcagtgatcactgtcatatagagatacagtgatattttcgtttgttatgagtccgattgaccctgacaaaatggcattgctaaagcgccttttccccgtcctcggcaaacaccttcgcaagggcgactgtggcaaaatcggagtgatcggcggttcgcccgactacaccggtgcgccttatttcgcttcgatcaccccaatgaaaatcggtgccgatttggcctttgtttacgcccattccgacgctgctccggtgatcaaaagttacagtccggaactgatcgtttaccccagcaccgatttcgccacgaatagacacagcattgagcggttggacgcgctggtgttcgggccggggcttggccgacagaaacacacacaaaatttgctggcggacgtcgtaaatttcgtcaggagcaaacaaaatctttgtttggtcattgacgcggacggtctgttcttcgtcaaagaatgttcgcaactgttcaaagggtgcacagacaaagtgatcattacgccaaaccacagagaatttgttcggctttatacccaaatgttccctaaccagcagaagggagaggacacggacgaattgaaaattcaatgcgaaatggcggaacaattggcaaagcatttggaagtgactgtgatgagaaagggagagattgacataatctccaacggttccgccgcccaaacgcgaattgtccaagcggaaacttcgatgcgccgttgcggtggccaaggcgacattctcagcggcgcgacggcacttttcgcattttgggcaaggaaagcctcagatgccgacatttattcctccgagcatttgctggacggggcggaagccgcttcgcttttggtgcgcaacgcatcgctacggacctttcagtctgtcggccgatcgatgaacgctgccgacgtcattgaccacattgtgcccgttgtccgcgacattgactcggaactttcagcaaaagctgcgacaattacaacacgttgatttgtgtacgaaatcttttcaaaatttatttactttcctttaataaattctttttattttgactattgtgacccgatttatgcaaaaataaaaaagtttgctgtccaaa

SEQ ID NO: 90436 - DNA, 680 bp, Heterodera glycines
cccgttagagattaaatgagcgacgatttgcgcaaagaattggagggactgaatttgtgcgctgggagaggccgacgacagcgggcgacagtcgtcaccgagtcgatgatcgacgacttttgtaaaattgtctataaggcgatgctcgtcacgcccgagggatacctttacacgtcggacattgcgaataatatttatgatgacattggcatcgacccgtacagaagggccttggacctcggcttcaattcgttcaacgccttcttacattcggaacacatgaaaaagtacatcgaaattgactcgacgggaaacgttctcagttaccatgctattttaacgccggagttgctcctcacaattggtcacattcagagggagcggcagacttttttgagtatgaagcgcatttacccctcgcgtcgtacaaatggattcaatcaatcgcaagaaatgggtcctttgcagtttttgaaggagcgcatgcaaaagagggaattacaagcgcaaatgggtggacagacgcaagaggaagagactcaatcggaaacggtgcaggaaccgtcgtttgtgatgaatgagggccaatacggaatcgaagaagagttttttgaagagattggcgaaaatgagcagttgggactcgaccggatcaaatgggttcagaacgattccgacga

SEQ ID NO: 90437 - DNA, 570 bp, Heterodera glycines
actccttacataggtgttatatttttgttttatttttatttttctacttaaagaattaaatgttttcaaccaaaatcattgtgcgctccttatcaagcagtgcccgaatgtcccaatcgcatctcggtgacttcggtggcggtgccggcaaaggcggcggtagtggcggtgccgtgcgcgacgcgggcggaaccttcggaaaaatggaggcggcgcgtgaggaggagtacttccataaacttaagcaacaacagctcaagctgcttaagctacagctcaagcgcgagcaggaccaccacgaggagcaagccaagcaccaccatgacgtggtggaacgccacaagaagcgcattcaagaactggaagaagaggcgaaggacgacgcaaaatccaaatgaagggatggcaaagaattagaagaatcggatgttttatgagtcctctaccctaggcgaaaaatgacaagactttaatgctcatgacccgtttgtgaaggtgatatcaaaatagtaaaactcggaataattcatttcaataattttatcaaggttcaaaatacaatgaaaaatc

SEQ ID NO: 90438 - DNA, 347 bp, Heterodera glycines
  unsure (1)..(347): unsure at all n locations
gttcattaaaggaattcctttgttttcgttctttcttttcatttgcacagaacgacggattggaaaatgatcaccgatatgcaattgggtatcatggccaatgttctcggcgtctccattttcattttggtcattttctaccattacatcgtcgccaaccaaaagaaacagtcgccgcagtgagcgaaagaagcgaagaaaacgccgaagaaagtcaaatgattggatgggttatgattaattaattaatttatgtattaattgagagggacggcgcataaatttgtaattgattcattgtaaagagaaaacaaagttaattacncnnaaaaaaaaaaaaaaaaaaa

SEQ ID NO: 90439 - DNA, 652 bp, Heterodera glycines
  unsure (1)..(652): unsure at all n locations
atctttcaggtctcgttgtgagtgattcgtctgacaaggaccacaaatatagacaaaagtggtcctttgttggtcgaacttctgcagaattcacttttaatcagaagagggcaaaaagtgaccgttgcaaattacacaatagtgccggacgagaaaagcaaaatcggtgaatatctacgtgaatattccaccaaagttgactgcattttgaccagcggcggaacagggttctcaaaaagggatgtgacgcccgaagcgaccaaagaagtcattgagagggaatgcccaggaatcgctgtggcacttctgaagaaagggcttgacattacgccattcgctgctctcacccgtctcaccgcgggaattgctgccaattgtctgattatcaatttgccgggaagcccaaaagcagtgagagagggatttgaagtgattgagccgattctgagccatgcgattgccattgtgaagggggatgagagcgaaacttcagttttgcacaagagaacggctttataagacagaagagactgtctgtcgataagcatttgatatcctatgtatgtgagaggcaattttaaactttacttcattactatgtaccattttgaaaaataaatttttaaggtgaaanaaaaaaaaaaaaaaaaaa

SEQ ID NO: 90440 - DNA, 935 bp, Heterodera glycines
attcgtttatatataaatgaacgagaaaccgtcacatcttttcattttcccatcgaaatacgaatcttctctgtttctctctcacatatccacaaaattgttccccaatgctgcaagctcatcagtaccaacttcagcaaggtcatcgtcgcgtttctgctcgcagcattttggcccatttcggtttcgaattctcgaacgactaccgacttggctgcggacattacagtaaagtgtacaaaggctatttcaaggaagcgcaacgcacttttgccatcaaagtcaccgacttggaaagcgtttccgagaagttcaagcaaaagtttctgccacgtgagctggaagtttggcgggaattggaccacccgaacctcgtctacttgtacaacgatttccagtggagcgactatcagttcgtagtgatggaattggctgttggtggtgacttgctttcgttcctccaaaaatgtggccccgtcagcgaaacgacctgtcacaattggatgctccaaattgttgctgctttggattatctccaccgtaagggaatcgctcatcgcgatctgaagctgaaaaacgtccttctttgtgaaaacggcgtcatcaaagtcactgactacggattctctaaacaaagttctgatttgtcttcaacattttgcgggtcgcgttcctattcgtcaccggagattttgcttggcatcgcttatgacatgttcaaatcggacatttggtcattaggcgtcaccgcgttcatcatgatcacaaacacaatgcctttccatgaagacttgcccaaccagcaaatcgttgactcgcagcggaagcgccgttacaaatacccgtcatggcttaacattacgaagcaatgccgcactgccatcgatgccttgctgacttaccaacccgcttttcgtccgaacatttccgaatgt

SEQ ID NO: 90441 - DNA, 684 bp, Heterodera glycines
gtcaattaagccattctttttattttacaaaaaaattgtatccgacttaaaatggctggttgtttggatgcgctcccacatcaggcacacttcgactgggataccaaacggaacacatattcagccgttgcatctgggtttctgttctttttggcttggtggcttatgattgacacagcggtcactgcgcaaaaagcacattggacaaattggtattttgcgcttactgtggcctgcaccattgcgatgtttatggttaattctgtctccaacagcgcaatccaaggcaattaccttgacgagggagtcctcggagtgaaaggtgctcgcctttggcttatgttcggttttatcggatcgttcgcctgtattgtggccggcgtttgggtcatgttcggtgacttcgtacttaaagaaggacaaaatgacaattggccgggaatcgcgctttttctccacacattctttatttttgtggcttcattggtttacaaatttggacgcaccgaagaattgtgggagtgaaaaagaaaagaaggaagacgtcttcagaccatttcgactttttccctgtaaacgatgtactcttgtaatttcccattgatttccaacttttacacttgtcaaattttctttaatcaaggaatgacattcaaattagttctgcataaaacaatttctttg

SEQ ID NO: 90442 - DNA, 774 bp, Heterodera glycines
ctccagtcaacggttttaatccgccatttgttgctcaaatccccttcgcatgacctttgttttgtggtcccttcgtccttttccgatccgtgtccctttttcggcgattaccaatgccccgagggctttcactgtgcatttgacaaatgccaagatgagcaggggatggagccaccgggcgattgtgccaaaatcagatgtggcaaggaatcggagtgtcggcaaggcaaatgcgttctttatgtggggcgaccgtgcggaaggaatgttttggtggcggagggattggcccgtgcggtggtatccgattgtgggccccaaggcaaatgcattggcgggcgatgtgccattgacagatgtgcggacacagtctgtgaggagatgagcgagctttgccgggatgggatgtgcatgcaattgtcctccatgttctgcttctcgcccttcgattgcggccctccgtcacttttcgagtgccatcaaaacaaatgccaacggcgtcgcgacacaattgttccagttttttcaccatcggcacaaaaatgtgaccccggagaaactctcagcggtgataaatgtgtgactcaggaaggatgtgctcaattggtttgctcatccggccaaagctgtttcaatggcttttgcgtcccgacaagcaattccaattgcgctaattccggtgaatgtgccgaaatgaatatttgtcgcgaaggaccctgtgtggcggacatttgcaaagcaaatggtggcaaatgtctgccggagaatgcctgc

SEQ ID NO: 90443 - DNA, 995 bp, Heterodera glycines
atgccatccgcgcacggcgggcccacctttttgctgtggcatcgtgaatacctcaaacgcatggaaatcgctctccgtgccatcgacccatcggtggccatcccattttgggactcggcaatggaccagcgactgcccaatccggccgactccgtcatttggagcagttcgttcatgggcgcactttcggccgccggtacggtggcggacggccccgtcgccggttggattacgcccagcggtggtccgattcgacgcagtctcggcacccgtgggggaaatctgttgaccgaacaggaagtggccagtctgatcggacagccccaaattgagaacgttttggcatttacgtcgagggcacggagcggcgcctgtacgcaaccgacgccaaacccgctcagtgtgctcgagttcatccacaacggagtgcacgcctgggttggaggggacatgttgccgttgaccacctcgccacaggaccccgttttcttccttcaccattccttcattgattacatttgggaacagtggcgactgctccaccaaaatcggcagcagcgcgagacgcaatttccgcccgactcgcaaattgtgccgtgcgctggctcccagaattacctgctcagtgcgacaatgttcccttttcaagaccccgtcgtgctcaaccgagctgggttgagcaactcctacacggacagtctgtacacttacgcgccgaggcccacctgccgtgccgcaggcgactgtcgttcgcgttacttgttctgtgacacgaccagcggccgtccattgtgcacttcccggattaaacccggcggcaattgtgcctcatttgtgcaaaacgctgaccagccctgtttcgcctccacttgtgtgaatgggttttgccaagcggcgggcggtgccgccgttgcagcgcaaccgcagcagcagcaaaggattgtccgctcgactgtttctgttccgaatgggacggcgccagcagcagcggcagt

SEQ ID NO: 90444 - DNA, 604 bp, Heterodera glycines
ctcctgtaagtcaattgattttggacgaggcccggctttttctttcaatggacgacagcttcctttggggactgaacattctgagcatcttcttgccaacttccctcagtccggcgcaacacgatgaatttggcgctaaactgagtgaataaattgtggttttgttgtgcagcccaggcatggaactgaaagctttcgtgcgtgcttttccatactcggtgctcgactttttgccagacgtgttgatggcttgtttattgcatttcaaagaaaaaataaaaatgatcatttataattaattaatggtttgtttgtcctccttccaattgtaccaccatttcctcatccttccgttccaataaagcttcatatgctcgccatgaaacacaacaccaacaaaagtgaacaaacaaaggccgagaccaagttgagggccaaaccgataaaaattcatgtattggtctctgaataaaacagaatttggacgtgatttgttaatctattcgtttacgcatccaatcaacgaccatactcagtttcttaggtcaaacattttccttacttgatcaaggcctacattcttggcatcaataaaagcttaggt

SEQ ID NO: 90445 - DNA, 687 bp, Heterodera glycines
cacccatcgacaaatgacacaggctatgatggttattcgtgaaaccagcgagaaaatcaacttgacccggacaatccaagacagagcggctaaactgtacaaggaggtcctcgagtcgaaagccctccgcggaaagaacaacgaggcacaggcggccgcttgcctttacatcgcatgtcgtcaagagggggttcccagaacgttcaaggaaatttgtgcggtgtcaaaagtgtcgaagaaggaaattggacgctgtttcaagctcatccagaagaccatggagaccaacttggaccacataaccagtgccgatttcatgtcccgtttctgtggcaatctcagcctgccttaccccgtccaagtcgctgccactcgaattgcgaaaaaatctgttgaacatgacctcgttgctggtcggagtccaatttccatcgccgccgccgcaatttatatggcatcgcaagcgagcaatgacaaacgcacggcgaaagagatcggtgaaattgccggcgctgccgaagtgaccgttcggcaaacgtaccgtctcctcctgcccaaggcttttggagctgtttccgcctgactttcgcttcgagacgcccatagatcagttgcccacttcctgaaaaggcgcaatttgggcttttcttttgaatgcgtgtcaattcgttcattttttccgttcat

SEQ ID NO: 90446 - DNA, 496 bp, Heterodera glycines
gacctaaaactccccatccttttttgcactgtttttgtgacatttcctgcttaaatgcttttcaaacgttttgttgtccccgttgcgacgcgttctgtgcgcgcggtgcatttgcccggcactcccggcatttacaacaccaaacccgtggaaatccccaattgggagccggcaacaccgaccggcccaatccgtgacggatggccgaaccaccttgcgcctttcatgcaaatcaaaagttggcgttggttcatcggcgcttttctttatttggcgagcggattcggcattccgttctttgctgccgagttccaactcaagaagcaaaaccaatgagctgagggagaggaagacgatggttagatgaagtgatgttattgcaaaaagatcagttacagacagccgtatttcaaatgtatgtttaatgttaggaaaaacgaataaaaacaaggcataataaaaaaaaaaaaaaaaaaaaaaaaaaaaaaaaaaaaaa

SEQ ID NO: 90447 - DNA, 471 bp, Heterodera glycines
ttttttttttttttttttttttttttttttttcaaattttcattcttttacttttgcttatcaaattggcaatgactgatcagcagaattcaattgtcgggggatggacagagcaaaatgtgaacgacgaaaaaatcaaggcaatgaaaaggaaatttggctaactgttcataaatgccaattacaaattcaaatgtccgttcgcttctgctcaattctctcgctttgttcagtctctcgcttctcgctcagtggccaaaataaactccgagtcaaacgatcgcttcagtcttttccccttggaggttctcagtgccaagtcacaagtcgtggcgggcattcagtaccaattgcgcattaaggccgaaaggtcgaactgttcgaagaatgtaagtgaaagggcaaattcagcaacccacgttctagagttcccttccaataataaatatttttattttttctattaaggac

SEQ ID NO: 90448 - DNA, 700 bp, Heterodera glycines
gttcctttaaagggacaattggctatggtcatcgatcaatcgctgctttgattggttaattaattcaaaaaataaattgttttctgtctgtttgatgaatttcttcggtcgaaagggcaaaaagggccccgtcgttgggaaggagggcaaagagaagggggagagaccgtcacatcgtcggctgcgcgttttgggcgtccctttggcccaggcgctgcgcaacgacccaagccacgacggagtgccggtgcccgcggtggtgcgcgagtgcctcgacttcatttcgctctatggccttcaggtggagggcgttttccgcgtgtcgtccccaaagtcgcggctcgacgaattggaacggatggcgaacgaaggcaggacagacgaaattgtgttccaagatgcgcacgaagcagcgggccttttgaaacgctttttacgccaattgccggagaatgttttaaccactcaactcaaaggacgattcgaaaacgaagcgaatgtttgccgatgcgtcgccctctgtcgctgttctgcggtcattaaactcaaagaattgcttctccaattgccccccgaaaattttcatcttttggcctttgttttccgaaatgttcaattggctatccaaaaggagagtgccaacaaaatgaatttgcctgccatgggtgttctcctccatacgattttggaaatgccaaga

SEQ ID NO: 90449 - DNA, 854 bp, Heterodera glycines
aagccattggcaaggcggccattccgcttccatgccccgagtcgtcgttgatgaagaaactgactgtgcaccccgacattatggacattgtgagggagttggacgacaaatgccttcgatctattgaagattcttattttgacagaatgggtcaaggcccaacctatcacactgacgaaaatgcccaacgtcctgaacttctcgacgagaatggccatcgttacgtcggcctcttcaaccaagcgatgacttgctatctcaattcgctgattcaaacattgtacatgacccctgagtttagaaataaagtttacagttggaaattcgtcgacacgccgacgaatgaggacaataaaaacattccttaccaattgcaaagactgttcttgttgctgcagaccagtgagaaagcgtcgctggagaccaaggagttgaccaccagttttggatgggtgtcaaacgaagcgtttgaacagcacgacgtacaggaactgtgccggattatgttcgatgcattgcagcaacgatggcgcaaaacggagaacgacgaatcggctgtccataaactttacaaaggcactatggaagactatgtgaaatgtttgcattgcaaaagagaaaatgtgcgaaaggacgactttttggatttgtctttggccgtcagaccgttcggcgccagcgaatcgtttaaatccatcgaggaggctttgagtgcgtttattaaacccgaaatactcaacggaaacaaccaataccaatgcgaagtgtgcgcatcaccgcaagacgctgagaagggcttgcgcatcgtcgaatttccgtatttgttgaccattcaattgaaacggttcgacttt

SEQ ID NO: 90450 - DNA, 766 bp, Heterodera glycines
agcatcatcatattcgtaatttgcggcattcattagcatgttttcgctttgttatcgccgcgcgattcgcaaaagcctcgcaaatcctcagacaattgaagtgtcgtcttttcatttttctcgtgttcttgaacagaatttggacgccgcaagcaaaagggacgaaaagggggaggaagtgccattatggaaagacccgtacaaacatgcaatgccggaacaaaagaatactttttcggaatttcgagaggccaatgtgcattgggaatacgttcgacgactgctgccgcgccgtttgattccagaaataccgcaaaatgccgctgagggcgtaacaccgagcggatggagggcaccaccggaaaaagcaccgaaccttccctattacatcagaagaaaggccaaccatttgcctagcatttttttggaacggcgacgcgacgaactgaacccaaagacaatggacttcgaatatgtggaattggtcattctgacgggcatcgacggcgacgtatttgcgtgcgagagggaccttcgcgcgtattgtgaaaagcgattgggccacccaatcgccacccacgtcgacgaactcaaaggaaagatcaaaataagcggcgccgatcgcaccatcgccgagcagttcgtctacgactatgaaacggagttcagtctgtgcagaggataaggaacagatcgaatggagaagcacaaacactgttttggcattttgtttattgagcaaactatatataaacaatgcatgaaa

SEQ ID NO: 90451 - DNA, 653 bp, Heterodera glycines
ccactattacccatcaccgctggagttgctccgtccgccatgcgacaacaacacggcccgggccaaaaacgtgtgtcacgcgttccaatcataattatccctgccggtgcaagttcactcatcacaatttacaatgcgcaggaaattttgcaggatttgcgttacgtaagcacagaagaaaaaaagcaatttagcagtaaacgagagaatgagctgttactgcaaatcccaaagaatggcgtcactgttccgtaccgagtcgtagacaatccaacacgattgaaggacgaggaatgggaccgagtggtcgcagtgtttgtgcagggtccggcctggcaatttaaaaattggaaatggaatggcaatccggttgagatatttgccaacattgctgcgtttcacttgcaattcgacgaacttccaaccgatccaaatgtgaaaaagtggagtgtgcatgtgttgaaattgtcctgtacgaaaaggcatttggaccgggcggagctgcacaaattttgggaaatgctcgacaggcacatttcgaagagcaacaaaagggaatggctcagatattagcgaagtcggcacattacatttgaaaatttacaaacgattttttgtttgagttttttttgtataataatttaccaacttcc

SEQ ID NO: 90452 - DNA, 794 bp, Heterodera glycines
gtccgttatctcgcaatttttgcaaaaatgaataatgcgatggactcggtccccgcgcggattgtcataattgggacaagtaaaatgcgcctttccgaaagattcaacaaattgcaaaaggctcccccgcctcctcttcctcaagctcagcaacagaaagtgtttttgaagagggagggtatcaatggggtcgcaattggccccgtaatttcacggcctcgggttattgatgaacgggacagaccagataatcggattcaaagcagcaaatcttttcttcacgacgattacatggacaatgatttatatggcgattttgtggagccgttccttcgacggcctcaaatgggtggttttcgcagtgcaaatttatacgagggatttcaaccggcgccagacccactgaagttgacattggatgcctatgatcagtattcgcggttccgtccgtctcatcgccggtccattcattctcgcataactgaaacgtcaatgagccgttttcggaatttgcctgtctatgatgagtccgaagacgcactttacggagattatgatgagccgccacgatcaagaatgtacaaccaaaacgactacaacagacgaccgattcaccagcggctcagtttcaagccaatgaggctttccggttacgattttctgcgtcgtcctctccatcgccatacgacgcaattcaaacggcctttttacaaccgcggaagtcatttcagtttcaacagatggcgcacgaacgattggaatcggaggggtgcgtcgatgccttttggacgccg

SEQ ID NO: 90453 - DNA, 894 bp, Heterodera glycines
gtcccattaaggttaattaaatcaaatggcttcgtccgattctgactcttcttcgttcgcattccctcagaattcgaagtgcggcgccacggcgagcggacagaaaacaacggccaatgcttcgtcctctctggcgatgcgagtgcagcggaaagtgttgtccaaattgtccaagcggggaatggtgcgacttttgggcgacaatcgtttgattgctttgatggacgcattgtacgaaatgctcagagaattttatgactcaaagaccgctgaaaaggttgtgaaaaacgggatcaaacttatcgtcaaagtggggttgctctgtcgggagaacaaattgagcgaagaacagcagcgccttttgtcagcggtcgaaagtgaatttggccgattggcgctgaccattcaatcgtttcgtaaagtccaattctcttacaatcggacatttctgctctcttctatcgacgcaattcatcggtcaattctcaaaatcgtcgagcaaacgcttagcgaaaagtcagccaaacgggtggagaatgtattcggccatttttccaacggtgaattcctcgattttgttttcacttcgtccggcgctattcacactgaaatggtgcgacaatttgctgcggaattggacaatttgttggccattggaacggaagaggatggcggagagacggcgagggatgaaaatagcacaccgtagggagagacgaacagacggagggaaatgtcaaaacgaatgactctttaaaagaccagcgaatgtgagctggcaaaatgtatcattttttgtttgctctgtctgcattaaaactttatctgtatcttattttttgcacacaataaaggaaattgagacgtcataacgaattccatttggaacaacag

SEQ ID NO: 90454 - DNA, 821 bp, Heterodera glycines
gaacgcattaagagacggcaaatccataatataatgaagtttcatttcaacggaggccttgactgtcccgaatggatactgtcgcaaattccagaaattgcaaaaactgacacaaaaatgttgcaaacacttggcagcacaatcattgaaatggccaaagtcaaacagacggaatggcatgagacggacatcaaaaaattttgcttcgctgaaatgagcgttgatggtctcagggcattgaaggccaaaactgctgcattgtgtttcatttttgagaagacaaccaaaaatgattgttcatgcaaagatttggagaaggaactgctccaacttgggctgccctccgaccatgtcagtgtactggttgaactctacaattcaaacagggccgcattgtgtgacagtttggcagggcctgcaatcaaagccccttcactaacagtggtgtgcaaagagcaggttccaacggctgccgacccgtcagtgaaaagtgactattttcgcttggacacaacaagttcggacgggtcaacagcaaccctgctcatccaccgagatgagttggtacagttgagaacctgcatggaagatgccgtgaaagtgctcgagtcgttggtggtcaacaaagaatgatgcccgcttattggagacacgccccatgtccaatttttcaatttgtgacttgccacttaaactaaagcatggcacttacaactagtgccattccaaattctgccattcatttcttccgcgcagcacattttatttaatttaaaatattttattgtcaaaaaaaaaaaaaaaaaaaaaaaaaaaaaaaa

SEQ ID NO: 90455 - DNA, 652 bp, Heterodera glycines
ggccctttggatgttgagtgccatgctccgacaccctctacttcgccctcaaatgtgaatgaacccgaaatactagccaatttggcagcttttgaatccaattttgtttccgtcatctctgaacaactcggcacggacattttgccatccagcagcagtgccgtcgctttgcatgtctcttcccttattcgtaacgtcctgcgattggctcggaagttccaacggagtgcccgacggaaatggctttcttcggaggacgtcgaggcggcgttggcttattacggacacacctcacttatcggctatgaaggcgttgacgacgttaaatttcgacatgttgagaaaatgggcagggatgtcttcgttagggaagaccccgagttggacttgaacgcggtgataaacacaccgccgcctaaattgacacttgaggtcactgtcaaagcccattggttggccatcaacggcgttcagcctgccgtacccgaaaatccgttgccaccaacgccgaaggatgcacttccgttggccaatgaggaggactccgcgagcacttccgcagggccgaccagcaggacgctgttgctgaaccaatacgcgaagagcatgcgcaagacggagcaagtgcagatcaagtcgaccaccacacact

SEQ ID NO: 90456 - DNA, 591 bp, Heterodera glycines
gttccctttaaaatccaaatctttcaaccaaatctcttttcgtcaaaatgctttctccattcacctacgatccgttcaatcgccgttcgttgtggcctatgaccactattgttggcaacgtcctttcgccattccgccaattggagcgcgaactcgaccacttcttcgacgggatgcagcccatgcttcgtgaccatgttgctcagttgaacgtctcgaacaagggcgacttcacttacaaggtcgatgtcagcggcttccgccccgaggagatcaacgtggaggtggttggcaatgagtttattgtcaatggggagcaccgcgagcagaacgacagcgagttcgtccaccgtcagttcttgcgccgtgtgctcattccggagggcatccaaaaggagagcatcaagtgcgagctggacggcggtcgtttgctcatcagcggaaccaaaacggctggcaaaggcggacgtaccattccaattgaaatgaagaaggcggccgtggaacagcagaaagaggaggagaagaagcagtaggaaaaaagacggcggaagtggagacggaccgatcagtcgaatgatccattgacat

SEQ ID NO: 90457 - DNA, 1327 bp, Heterodera glycines
tgcaccttctatcagacatactgtagcaaactgaagccgtacctgacgcagaacctggactttgtgcagcagagattggccaactcagcggccgatgacccctattggcaaggggtaaagcgggcctatctgcaaatgaccggcgtttggcatggctttagcgatgcgcagtttaacgtgtccattgacttttcactaaacccaattttgatgcttaatgcgcatggcgatttctacgagttggagaccaaattcaacagaagcaaagacccgcgagacgaagccactggcggaagatgctcgggactggtcaaaattgcgcctaacaatgccgacattctgttctcccaagtcacaatgtgcggctttgaaagccttcttcgtgtgctaaaactgtacaaatttggttacgaccgcgcactgtaccctggccacacgactaccatatccagctacccaggcctattgtattcagccgacgattttgcactgatgagctccggattggctatccttgagacgacaatgaaaattttcaacaacacacttttgaacgaaataaaaccagacggagtgcttcattgttgggtacgagcaattgttgccaatcaaatggcacggacagcgcgcgagtggtgccacattttcaagcggttcaattcgggcacgtacaacaaccagtggctgatcgttgactacaacaagttcaaaccgtacaccgaattgcctgaccatggcctattttatgtgctcgagcaaatgcccacaattgttctataccaggacatgacccagtggctaaaacagaatgggtattttgccagctacaacatcccattcttcaagaagaccagcctaattagtggctttgagcaaaaaggcaacgaattttattggttcagctggaaaagttgtccacgcgcaaaaatttttgccagggaccaacacaaagtggtggacttggacagtctgaccaaactgatgcgttataacgattacacccgcgacccgtacagccgttgcaattgcacgcctccgtacactgcagaggcggcaatttctgcccgaggcgatttgaacccggcaaatggcaccttcgaaatacccggcatgggacacgtcaaccacgcggcacttgattataaaggcaccggctacaaaatgttcaaaaaattgcaattccgcgcatggagcggaccaacttatgacgatgtgcccgtgtttgattggcttgaaagcgacttggcacctacggtaaagcattacggtcacccattacggtgggaatttttgccagtggaatacgaatgggagacggtgctgaatt

SEQ ID NO: 90458 - DNA, 270 bp, Heterodera glycines
gcaccttgtagtgccatgcaaattggcgatcaattagtggaaatcgacggcgaaagttgcattgggatgagtcacgagcgagccattggcatgatcaaggagaggcaatgcgtgaggctcacattgagccgacaaaagctgtaacatttgccggacaaagaaagaaaggatggatgaatcgacgaatcatcaatcacgcgaacactcaattttaataataatttatataaataaatcattaattttcgaaaaaaaaaaaaaaaaaaaaaa

SEQ ID NO: 90459 - DNA, 469 bp, Heterodera glycines
aaccatttcagcttttcaacaacaaccccaacacacgtattctaccatggctgactccactggcaacgctgcattcatcaaggccgccgatgaggccaagactctgtcgtaccagccgtccaacgacgagctcctcgagctgtacgcgctcttcaagcagggcaccgtgggcgacaacgacacccctcgtcccggcatgtttgacatcaagggcaaggcaaagtgggatgcctggaccgccaagaagggcaccaccaaggaggatgcccagcaaaagtacattgaccttgtcgaggccctcaagaagaagtaagtctgttgtatcataaaaatatgcttgtgatggctgcacctggctgcacactggctgtactcgtcgcgagtgaccgagtgagtgagtgagttcttgttgtttgtatgtgatgaatgcatttctttattttgttgaaaaaaaaaaaaaaaaaaaaaa

SEQ ID NO: 90460 - DNA, 624 bp, Heterodera glycines
gttcatatttaccatattcctcagttgattatgaacaaaatatttgccaacgattctaaggctgtttttgaggatgatatgcatatcggcgaagccttcgatgaagttttcaaacagatatacgagcaggaaaacgagatgccattcgacagatctagagaaatctggaaagaagttgaacattctgaaaaaacgcttgtccatgaaaccaatcatttgttgaaaaatcaaggtcttcaaaattccatcgaaaccgaaatgaaaatgctcaaggatgctgaggcttctttggatgctttgaagaaacgtgaattggagttggttcgccattacaaagacaaacaaagcaaaatcctgtcttcgctggaccatgttgagcatttaacccagatggttgacactgacatcgaaaacgaccagaaaacattgaatgacatcttgaggagctatgaagatgagctgcaagagatgaagaacttaattatggcgaaaaaacgattgctttccgactaaactagaacgtgtgtcattcattgatccttactttcattgtgtcctcattgtataacgtaaactgaatcaatgcgggtaaatatgcttagattgaggtcataaaaggtttcc

SEQ ID NO: 90461 - DNA, 470 bp, Heterodera glycines
actctccacttctatgcgtccagtcactttgttgatggacttggcaataagcttaagaccgccgtaaataagggtcttccggtgttcgtcactgagtacggtacatgcgaagcgtctggcaacggtaatctgaactccggctcaatgtcaagctggtggagcctgttggaccaactgaaaatttcgtacgtcaattggtcaatcactgacaaaagcgaagcttgtgcagcgctcactggcggaacatcggctgccaatgttggcacttcctcccgctggacgcagtctggcaatatggtagcttcgcaacacaagaaaaaatccaccggtgtgaaatgctaaataaagtctgaagtccggatgatcaactgaaactgaagaaaatggaaaatgtgaagattgcgaaaaataaatatatataaaatttgcatgcgaatgtttatcgaaattccgattaaattgttttttga

SEQ ID NO: 90462 - DNA, 800 bp, Heterodera glycines
ttttggagaaggacttgtggatttttttcgtccattagaactcatccaaattctgttggcctgcccacaatcatgcacatgtctcaagaataattttggcatacatttggaaggattttttgagtctctgtgcgtcatccgatgcaaatttggcgaactgttaatgaacaatgggtgggaaacaaaatttgatccccgaacactgatttgtgcctatgaaacgttcaacatcgtggcactgatcactaagagaattgaacaacctcgtcgcaacagtcaaggcgaagaaattggtgtaaatgaagcagagcgggggttatccctgacagatcgaattttgtacaatgaaatgaaatggttcgcaactgtcctcaacgagcgcactccttccttctccatcattcagatgtttcttcgctgcctcagtctccacctgtgcgcttctcagctgagtgccgtggtccttaacgaaacggcctctttgctgaacgaacttcgatatcggctggaaaatgtgtacgacgcgcgtccagtgatgtcggcactcaaaaaatgtgtgaatcatttgaacgaggcattggaggggtgcgaagagcgcgaccaagcagaaagaataattgagcacaaagtcagaccgatggaggaatattttgaggcggaggaacggggcgacacgacgcaaatggcagcggaagagaacgacgcttaccacgagattgatgacggagaattataaacactcgtcaaaatgcgtctaactttttcccaaatttttcataagaaatttattcattatgacc

SEQ ID NO: 90463 - DNA, 520 bp, Heterodera glycines
cttgcgaccgacgaatttgtctgttgccttagatcaccaaattcgtgagggaacactcagcgaaatgaagcagcagtcggtggattcgttcattccctcgagcaattcgctgcaaatttgcgggggctgtgaaatgcgaattgaggaaaggcattcgctttgtgtgcatcgcccgcgacattttgcaaatttcgacagagaaacggaggccgaatactggcacgagaattgcctaaaatgttgccaatgcgagcggcgattgggcacgggggagaaacgttttgtaagggacggacgcgtttattgtcgcgaagaccattcgaaatctttcggcacttcgtcgtgccagcctaactgcgcccgctgtgccattccaatcgaaccggccgaactcgtcttccgcagcggactgttcaacgtgttccacacgcactgcttcaaatgttcgtgctgcggaaatgcacttgcaaaaggcgaccaatacaccaacacggggggagcactcatctgtcaacgcgac

SEQ ID NO: 90464 - DNA, 775 bp, Heterodera glycines
tctcaattcagtaacatcggctaataattttgaaatgtccgcttgcatctgtccgctgtgtgatacgtcgcttgcggcgggcttggccaagtaggcaaagtgccaacacattggccatggcccgtgtccttctgcccatgtcagcaagcatggcttttgcccatttttcaattgcgcaatgccgacgacggaggacgaagtgttgctcattacgcacaccgagggaaaacaatccaacaattttgctggcctgaaagatgccaaaaatgtacgcgaagtgatcgatgtgatcctccaacatttgcccgggtctccggcaatgtgcggaagcgaaggacggcgaattggagaaaacggcggacatttttgaacgtttgaccgaaaatgcgccgccgggcgcaaatggtgccgaaatggccgcggcacgaaaaagcgcgtgggacgaattggtggcatttctatggaaggcatctccctacattctcttcgtcactttcgctttgatttgctggtgtttcgtgccttcgctcgtcgctggcagtacaatgctcgagggcgtaataatgtaaaatattttagaatagattggaaatgtcgtttttcttcttgtcggacctctgattaacctgtgccggggtatagcattcgctacaatgttcgagatctccttggttgactgcgatgagtttggaggctaagatgtgcgcgtatcagacatggccttacaaataaaatcgctcggaggtgctacgtatcgactgctgcgatcccagcg

SEQ ID NO: 90465 - DNA, 452 bp, Heterodera glycines
  unsure (1)..(452): unsure at all n locations
aaaccaaacaaatcatctttttttttgccgtccctgtgccaatgtcggtccctgccaaactcattttgctgctggtagctgcttcgttagttgcggactttgtcttgggtatggacgaacaaaacggagctgccgctggaaaatcttcgaaaacaccgacagatccaaacgataaattgcncgaaaaacacagtaaaaatcgaatgcaccgatgaagctcacaaatacaaagaagatagaccaagacaagcttaagggggtgagcaaagaaatcaaatttggcgacactccaccagcagcagccactggtgtaccatcgaaaaagccgaattcaaacaaaaatcagagaggagggagctgaagacaggcaaagaacaagcagtaccacaaccgattgactgatttgaaacggattttgatcaaaagcttttttggcgaaatttttgggaaaa

SEQ ID NO: 90466 - DNA, 557 bp, Heterodera glycines
  unsure (1)..(557): unsure at all n locations
gcaacaggaacaatgctttgtttaatgtgggaaacttttccatttttgtcttggacaacgccaattgctatgtttgacacgtgccttgttgcgatcgagtcgcattttgattttggatgaagcaacggcttcggtcgacatggaaactgatgcgcttgtccaggaaacaattcgtcgtgagttcagcgattacaccgttctgacaattgctcataggcttgagacaattcttgacagtgaccgtgtcatggtccttcaacaaggaaaagtggaggaattcgattctcccaaagatttgtcggatgatttgaactcggcattctctgccatgttagccggcgccaaacttaccaaatcccatgaaaacgcataatgactgacagaacttatcgtactgaaattttcaaaatttcccaaaagttcacatttgcataatttatcttctctcatctgattacttgcaacaatctctatttgttttctttgaattgttaattttttttaatagctttaaaaaataaaagttgaagcngcnnaaaaaaaaaaaaaaaaaaaaa

SEQ ID NO: 90467 - DNA, 635 bp, Heterodera glycines
  unsure (1)..(635): unsure at all n locations
cacaaatgttgaaaaacccgtgggctcaatcgccgactacgaccctttggctgccgaaaagcagcaacagaaggccccagccgctggcgctgcggcgcctaaagcgaatgggggcggtttcactgtgaaggcattgtacgattacacggccgcggacaaagacgaagtcagcttcaaggagggcgacgtcattgtgaactgccaaaaagtggacgacggatggatgacagggacagtgcagaggaccttactctggggaatgctaccggcaaattacgtggaacaagtcaaacagcccgtgggacagtttaaattgaaatgaaggatttttagtcctttttgttagcgtccgtccgattgtttcatttcttttctctttaccgattttcttttgtggcctttgatttttcagtttttctttaaacaaatgtgccagaatgttcgtcagcaatatttatttctgtttagcactcttagcaatcattttcattgtaagcatttattttctcaaattcacagttatgtatggttttaatttttgtcacatggctgctaatttcctttttatcgtaaccaagtatttgcttcgttcaataaaaattttctgtttcnggaaaaccacaaaaaacaaaaaa

SEQ ID NO: 90468 - DNA, 566 bp, Heterodera glycines
tacgacgagttggacgaactgaacaaaaatggggcggacggaacgcgcgcgaaattggaatattcgatgcgcgacgcattcggcggattggacgcgcaaacattggacgcgcacattcaaaaggcgaaacggaacggcacagtgttcgacgcattgatacggcacaaccacgtgatgtacgaggcgaacaacaattggcgactgaacgccattcgcaacgtgctgttcacctttgtgccttggaatttgttgactacaaaatgtttgagcagtgtttggccaacgacgccaacaccaatgaccaaattcccgcggcaattccgttggccatcggcggtttcgctgtcccatttttggtcacattgtcttcaattctaaccttacttttgccattttgacttggtttctgatcggctattcctttttaaatattattgtttaatgagattaatttcactaattgctcaaagaagaaattaggacaaaaataaataggaattatttaacccataaattttatttataaatgctaatattaaaaaaaaaaaaaaaaaaaaaaaaaaaaa

SEQ ID NO: 90469 - DNA, 539 bp, Heterodera glycines
tgtcggcaccgcttatgtgacgcggggcggcacagtgatacgaccggacgaattggagcgggcgatgcgcaagtcgggggtggagtcgtcggcggacactttgtcgcccgcttcatcaagtgccgaattgtcttcgcgtttgctcaatgcgaaccccgtttggtcggtgtattcgtcctccaacccgtattcctactggccctaccgctaccttaccgatccgaattcgcacgaggtgttttggcacgacgtgcacagccaattctcggcattgcgccgcctcgatttgttcggcaagcacaaacccccagtggattacatggccaacaaccatttctggacttacccctacccgtattgggctcgtcaccggggatatctcttcgactatgcaaatccgtcgttttactcgaaggaattcgatttgcattactacgaacattgattgaccggcggaaaaacaatggcggagcataccgtagcatactgtagagaaacgcatttatagaacaagcaacgcgaaataataataataaaaa

SEQ ID NO: 90470 - DNA, 971 bp, Heterodera glycines
cgcagcgggactcaacgcggttcagctgtacatcccatggaacttccacgagcaggaaatcggaagattcaattttggaggcgaccggaacatttctcgattcatacgcatagctaaacaaaatgagctgtacgttctgatcagaatggggccctatgtttgtgctgagctcgaattcgggggacttccatggtggctgatcaaagaccaggccaaagtcaggctcagatcatcggagacaacttaccttcgccatgtccaccgttggctcgccgcccttttgtccgttcttcggccgttactgtacaaaaacggaggtcccattctgatggttcagttggaaaaggaatacggaagtgtgtccgtttgcgaccacgattacatgcgatggcttcgcgacttcgtcagagaaacactcggcgaagacgtcgtattgtacacaaccgatggacccactgagaaaatgctcagctgcggagccatcgaaagcactttcgccactgtcgactttggcactcaacagacagaagcaaacgtaaaggaaatgttcgaattgcagcgcaaatactccaaaggaggtcctcccgtcaattccgagttttacaccacgtggttttccatgtggggcgaaaaatcgatggttcgccaggaaatcggtcctgttctgaaaacaatggattacatgtgggcggaaaacgcttcgttcagtctgtacatgattcatggagggacgagctttggtttttggagcggaagagaaacgaatgggcctgtgatcacttcgtacgattacgctgcccccattgatgaagcgggtcaaatcaccccactttacggagccattcgaaattggatcggcgccaaaaaggattggtccaatccgccgttgccactgcccaagaacagaactggcgtttccatccaaaatgtttttgccgttaaattgggcgatttcatcgctctgaccaatt

SEQ ID NO: 90471 - DNA, 538 bp, Heterodera glycines
aaggcacaagttgccatttttactacgtattattttatttgttgatgaataatgtcttctcgaagaaatgaatatctcgatgcgaagatttatgttggtggtttacctgaggatgcaacttctgaagagttggacgatgcgtttcatcgctttggacgcatacgaaaaatctgggttgctcgtcgtcctcctggctttgcttttgtcgagtttgaggatgcacgagacgctgaagatgctgtgcgtgcactcgacggaacgaggatttgtggcgtcaaggcccgcgtagagctttctcatgggaacggaagagggggcggacgcggttttcgaggcggagggggacgttatgacgaccgttatggtcgtgatcgttatgaccgtgatcgcgaccgtcgttatcgttcaaggtcgcgttctcgcactcctcgccgttcccgaagccgctctcctccgcttcgtgagcgcagccgatctccgagctacagccgtcgttctcgctctcgttaaaggaaagaaatgctcgatgatgctatca

SEQ ID NO: 90472 - DNA, 433 bp, Heterodera glycines
tcagcagtgtgccctccttgataatgctcggcattttcgttgccactttcttttcatcgatgagcaatttaatcggcgcctcgcgcgtactcactcgatttgcacaggacaaacttttcggcgctttgctcagaccggcgaccatcgaagtgggctccaaacggaatcccatcatttccgtcattatctcgtggatttgtgtcgtgatggttttgatgatcggagcgatgaatcgaatcgccaaattatcattcccaacaaacacaggaataattagcggaaaaatgtaaaagaaaagctgtgcgatgattaagggaattgtgaaagaaaaacgttttattccgtaatgagtcatttgggcgaaaaattgagtttatttttgtattgttttggatcaaaaaaatttatatgaaaacaaacaaaggaaaaattc

SEQ ID NO: 90473 - DNA, 393 bp, Heterodera glycines
aactgtgaaataaaatatgcgtcaccaatttccaattatttttgccctttttctcattttaccaattttaattggaaagacggagtgccaaagtgacttttgggcctctctttcccagcctttggtttccgtgggcagtgatgcgaaaatgccactgaaggacttcggcatggacttcagcagactgaacgattacagctcattgtttggacgaagaaagaaaagggcgcactgattgtaagactaaaaggaaaggacgaaggaagacgaaacaaaacaaaacgggcccaattattacactaattagacaattaattaattacacatgttgtacgtaaataaaattattattgtaataaatttcattttttcaaaaaaaaaaaaaaaaaaaaa

SEQ ID NO: 90474 - DNA, 135 bp, Heterodera glycines
  unsure (1)..(135): unsure at all n locations
atcagaaggagcaaaaattggaatgatcagagagacaataaaagaagtgatcaaaagcaggaggaggagagaaggtgatcaaaaaagagataaggaganaaggagaaaaaaaggaatgatcagagagggcaaaaa

SEQ ID NO: 90475 - DNA, 1060 bp, Heterodera glycines
aatttcttcatttcctttcttttcaattccaaaatcaatcctcctgtttcccagcgtcgctggtatgagcaaaaaaaaaaagatcgttccgtacttctcgagggttggaattccgtgctgaacgaatgttttctgccgttattcaatcagaaaatgaatatggccgagtcggccgacagcaaacagttcagacagttgcgcggccttttgttcggtcgattttcggagagtggccgttgcgatgtcattgttgctcaagcaaagagcgagaaccacttactctgacgacaataggtaaatgtgcgacatgaggcggagattatgcgtcaaattgagcgattggaggaggaaatcatccatctgagggccattcttcagacttagcgatattggaatatttttaaatattcattatatggatccactctttaaaatggtctctaaatggaaatgacaatccaaatatatttccgcttttgccaatttcctttcatttatcttttcaaattgcataatgtctcctttccctccgagtgccaccgatatcttcagtcttctggatgccattgacaaattaaaacatttaaagcggactggttgggttctcgtcggcatttcggagcccgaaacagtcgcttcccatatgtatccgatggcaactttggcaatgactttgtcggcgcaccgaactgatttggacgtcaacaaatgcattcgaatggcattggtccacgacataggcgaagcgattattggggatattaccccccactgcggcgtatcgaatgaagaaaaattcaaaattgaaaaagaggctgttgagactatttcgaattggttgcccgaaacggtgggcgacgaatggaaaaacctatggagagaatacgacgagggaaaaagtgcggaagcaaaggcagtgaaacaattggacaaattggtaaatggatatgttggcccaagccttttcctacgaagaaaggctctccatcgatttgactgagttttttgatgcgacttcgaatgccttctccgaagagccctttgcaagttgggcagctca

SEQ ID NO: 90476 - DNA, 425 bp, Heterodera glycines
caaacaaagatgagattatcaaagttctccgtgaagaaattgatgagcagcaccgagtgcacggaacgcgtgtcaaagtgtggcgtgaacgcattgacagcctcgagcaaatgctgatttcacagcaagagcgtgcggaggtcaataattgcggctgataagtggtcacaaaatgggcagatgaaggaggaaggaattaaaaacagagaaaagcaacagtccgaaaaagttctcttcatctgcgagaagtgtctgaatgccttcccccgatatggatatttatatgcgcattattcaaattgtaactgatcgttgcgtatcgcaaattctttgtcaaattataattattcacgtagagaaaaaaaagaacaatgtaaaatcaaacgtttgtgcttccacatcattgaataaattaaagtaaaagc

SEQ ID NO: 90477 - DNA, 384 bp, Heterodera glycines
ggacaattcaatggccgtattttcaacaataaattgaacaatttgggattccccactttcatcacttttgcgcaattaatggacccaagcagaggattttatgacaaagacggggacaaagtgacattggccgttgatgtcgctgtgaagagcaaaaagggacgaagcgcaaattatcggatgagtaaaagtcatcatatttggtaattattcactgaattatcaaaattgtgttcattttaacattctttcactcccgaaattcatttcctcaacactttttactctcaggttccctgtctcttctgaagatatcagattattatccaccatttttgttttgctttttgattattaaatgactacatttcaaaaaaaaaaaaa

SEQ ID NO: 90478 - DNA, 542 bp, Heterodera glycines
actgactaatcattccattttcatgtcaattacatattaaccataaaaaccgaaaatgtcgatggttttcattcctatgttcaccctttaaaatttaccaaatcttacaacattaaacttctattttaatttaaagtaattaactgttattatacccatgtactaataataattagtcaaaaaatttaattgtttaaaccacttttgaattagtggaataaaaatataataattagttttaaaattaatccgatgaagctgtgggtggaggacacgacggatgaggaccttttcccgcactttgacatcgtggcagatcagatccatgccgtcatccaagaccgtggtgccgttctggtgcactgcgtcgccggcgtttcccgatccgccgccatctgcttggcctatctgctcaagtatcggactcggtctctgagagccgcctaccatttgatgtgctcaaagcgtccgatggtccgtcccaatcttagcttttggcgccagctcatccactacgagcaggtcactcgctcaatttgcca

SEQ ID NO: 90479 - DNA, 419 bp, Heterodera glycines
ctaatttactattttaattgcttttttaattccaaaaaaccctaaataaaatgaaaaatttctcactgatttttgccgtgattttgttggccaccatcatcaccatgaacatgttcatgatggcaaatggccaatgtggaggtgcgtgtactcctaatggtgacggatgtgacaatgatgggtcatgtttcttaggttgcattcggcttggcgatgagtgttgttgcgtggcccgatctccaactgcctgagaaggacacgttcaaatgggatgaatgaagcgagttgaatgccgttgaacagatagaaaattacaaaagaaattgctagaattaaattggatatgatgttagttttgaaaaatggatagaaaattacctaaattcctagaattatatatgaataaatgacaatttctc

SEQ ID NO: 90480 - DNA, 521 bp, Heterodera glycines
ctatcacaacggaaactcggaaccgcgtggattcggtcacattggcattgctgtgcccgacgtggactcggcttgcgcgcggtttgagcaattgggcgtaaagtttgtcaaaaaaccgaacgaggggcgcatgaggggcttggcattcatcacggacccggacggctattggattgagatcttcaatccaaacaacatgtgaaaaacgaacccaaaagattgagaattggattttcccattggcgaagcaatcaatttcgaaaaatcacaatagagcctgggtacgacgagcgtggtgttggaaaagtattcgttgaattccaatctaaagaagaatgccagaaagctcaggccgcattgactggacgcaaatttgatagccgagtagtggtcacgagttacttcgaccccgatttataccatcgcagacaattctgagacattggacggagagaaggatgatggtattaccaaacgatcatgttgggaagtttcggactcattttattttgtgtacgaat

SEQ ID NO: 90481 - DNA, 701 bp, Heterodera glycines
gttcattgagctgaaaacacagctcaaattcgtcggtttcggcaagtacttctctttcaaagcacttagttggtatttccaatcatttttgatcggcattgacactttggtcgtcggaattcgcagccgtaaaaaatgttcaacgaacgaccctcgacaatgagattggctttgaatattccgtcgagctcggggttcggatccacaggtgccgctgtgtcgggctcgcctccctcgggtccgtccgctgtattcttttcctttttattaaattgttttgttccaataaaaagtttattcattttcatgcggaaactaaaatttgcgggcgatgagtaattttaatgagcgaattgaaattgacgaaatcggatgccatcggcaaagaatgcaaaacaaaatggaaagtggcgaattgttcaccttcgcttttggcgcctttgccatcgctttgattgccctcgtcattatttattacaaatgcatcgaccgaccgccaaaaaaacgattttattaaatgggcacaaaagagagaaaattgaagaaaaagccgacgaacagaaaaaaggaaaagcgacgagcaaagaaagaaagaaaaagcaaagtgaaattggaaatcaaaagaatcaaatgccatttttgttaaaatattttgaatatgttattaaatactatttaattaaaaaaaaaaaaaaaaaaaa

SEQ ID NO: 90482 - DNA, 311 bp, Heterodera glycines
  unsure (1)..(311): unsure at all n locations
tgtacaacagcaaaaaccaatgcgtggacagtgtggtgctaatggacgaagtcaactcgagggaccaatttgaggaggtcgaacggcaccagctgagcttcatggaacaggttctgcaactgaaagtgcttttcaacttgttgccaaaagatgcgcgttttcgtgagaggaatttgatggtggaagtgttcacacggctcaaacctttcctttgattttattttcgttttccatttcaaaattttttgtttttctttgttcgtcattaaaaagaaagttgtgaaaaannnnannnnanaaaaaaaaaaaaa

SEQ ID NO: 90483 - DNA, 540 bp, Heterodera glycines
  unsure (1)..(540): unsure at all n locations
ctcattgctggtaaaagtgccaatgcctcgtcttctctcttccttcgcctttttcgttttgtcaattatttgttcgattgtcttcttcgaacccatccatggccaggacgtgtgtcgacatcagggcaaagagtaccgaaatggggacgaatggattgtttccaactctttcattatgaattgcatcgtccattacaaccgatgggaaacaaagatcatcgcctgtctgtcaatgttaggcgagagaatccccgtaaacggacagatcagtgatcagcacggagtgtggaaatgcgagcagaagccgaacggaagcacacgattggtgcagcagaagcagtgaagggaggaaaagtgatcagtgatgggagagacgaagcaaagcattgattggcagaggaaaagccatcacagcaaatcaaagactgttccacacactttttaataccctgttaattactcactaattaatgtccattttgaccctggaaaaattagtaaatgcattggttgcttcaaaaaaaaaaaannanaaaaaaa

SEQ ID NO: 90484 - DNA, 339 bp, Heterodera glycines
  unsure (1)..(339): unsure at all n locations
cccctcgcctccatgtatttctacggatatatgctctattttgtgttgtggccagtacttttccactccgttttgcgtccgatgataaaaaagacggcctaatggaagaagggatcattcgtccgtttagtctttttgattcgattgaaaatctccctttaaacaattgaaatttcgtcgtaattgttcattattggtgttaatttcttaattaagcctcaaatttgtttcctttttatggtaataatcgtttaaagcactgtttggtcnaaaaaaaaaaaaaaaaaaaaagaggaaaaaaaaaaaaaaaaaaaaaaaaaaaaaaaaaaaaaaaaaaaa

SEQ ID NO: 90485 - DNA, 443 bp, Heterodera glycines
aataaaattatcccttttcccgtccgacaaattgtgaaattaaaaaaacaaaaataaatgacgactcaacaacgaatatttgggaatcagctgctttttctttgcatttttcttattggagttgttttttttcctcttttctgctgctgttgcaaatggtgctcatttagttgactcaagcgttgatcaaattggtcgtgcacagcacaatcataacggcgacataaacatacgcagaggaattgaacgcttcaacgacaatcggatggcacaaaatgaattggactttttgcacatctgaccagcgaaacgccaccagcacacaaagattaagacgcattaaacactaattacaaaaattgattttttacttccgttatttatttttccttcattttattttcacatgaccggaaaagtgtaataaacaaataaatgtaaaa

SEQ ID NO: 90486 - DNA, 559 bp, Heterodera glycines
cgaacatttcgtttccttctcccttgtttgagtcattctctaagataagatcattagcttaacaaaatgcccggcttcgtaccgccagtccaatcaaagtgcccaaaatgtgggaaatcggtttatgcagcggaaaaaatggttgctggcggatatgactggcacaaattctgcttcaagtgcgaaatgtgtaacaaattgctggacagcactaacgcgtgtccccacgaggctcaattgtattgcaaacagtgccatgggagaaagtacgggccaaagggcgttggcttcggaattggggcgggctgtctgacgacggacagcggggagaagttcggcaacaaacgcgtcgagaaccgaccccttatggccgaggcgttcaccgctccgatcaatccgcaacaacaatgaaaaatggacggacatgcgaaggaagggaaggaagagcacggacactcccatcgattgaattaccaaataaatttaaaatacaagcgaattgttgtattaagacaataaaagtgtaaagcgggaaaaaaaaaaaaaaaaaaaaaaaaaa

SEQ ID NO: 90487 - DNA, 506 bp, Heterodera glycines
caaaatatgctcaaaaaggcaatcaaaagcggattgccggtgtttgtcactgagagcggcgccggctcaggcggaagcaatgcgcccgttaatttgccagtaatgaaccaatggtggtcccttttggagcagctcaaaatatcccaaatcatttgggcagtgcgcggagagggaaatttacaaaatccgctgaataaaaacacggcacccgcaaacattggacagaattgggcactaacggaatacggaaatgtggtgaagaatgtgttcacgaagaacgcaaagccgattgggtgttaaggggagagaatgaaaggaaaggaaacgaattacgaaaaagggacgaaaggaaaagccaaagggacgatggaaattaacagaaatgagctaattacaataacaaatgtcacattaacgcatcaagaaataaaaatagccaattgaaaaaaaaaaaaaaaaaaaaaaaaaaaaaaaaaaaaaaaaatttttttttttaaaaaaaaaaa

SEQ ID NO: 90488 - DNA, 492 bp, Heterodera glycines
  unsure (1)..(492): unsure at all n locations
ctcacccgtttcccttctcccttttcctccgtttccttttcattccttttcctcctctttttctttctcttccgtttcccttcttccttttcctccggttccatttcattccatttcttcctctttttctttctcttccgtttcccttcttcttctgcttctgtccgtgtctctttgctccgcgggggtcttcgctccgctgcgtatgaagcgccaattcgattggtttggcaattcgatgggtgcgcgtggcgccggcttcggaggcggatgggtgttcggcagaagacgaaccgttaaaggcgccaaccaattaataaaataataatgcacaataataataatatttatttcatttgcccccaattccccattttcaaatgaataaattatatattcnnaaaatttttttttcccacccccccgaagaaaaaaaaaaaaaaaaaaaaaaaaaaaaaacgacaaaaaaaaaaaaaaaaaaaaaacaaaaaa

SEQ ID NO: 90489 - DNA, 661 bp, Heterodera glycines
ccctaccgtcaattccctaccagccaattccctaccgccaattccctactaaggcatttgatttccataccaaaagtgttgaatattgataaacattgagattaaaacacacaagaaaatttattcactgccttttagacagctcgtcaagagctttcggatgataccaaatttatcaagattcgatcgttttaaaaaagttagaagtgtcaaatctctcaaaatacggatagaggaaataaagccggaatattttacagaaatgacttcgacttctgctgatatttcaagtgattttgatcagacgaatcaaaaacaaaaaccaacaaatccctcaaaaaacaaaaatgtctcctttccgcttcctgatgatgttgctggttgcgctggtcgctgccatggccatgggcagtggtgttgaggccgctgcgccagccaaaggaaaagcgccggcggcagcagcaaaagctgctccggccaagggagccaagaagccctaggcaggcaccagcagcaggtgtagcagaacaactgcggacatgtgtgaagaatgatttagaatagatgaatgttgatgaaaaattcggtgattgttttttagaaagaacaaaggcattggaaattttttgggttttgcggaagtaaagaattcattcaaaaa

SEQ ID NO: 90490 - DNA, 410 bp, Heterodera glycines
cctgcattgctacgtacgaaacggacggacaagcccaattggcccgtgaacggcttcacaacgtcgtatggcccgtggcgagcgatttggcactttgtgtggaattttcaactgaggaaaagctgaaccgacgaaaggcggaagaagagcaggaagcatcggcgaacaattcggcactcggcggaggattgggattgacaattgtggtggataacaggggccgtgggcctgaaactgtgcccaactcgggtcccacggtgctcattcagcacgacaaaaagcgacaaaaggacgcggaaaatagaaaaagaaaagttgaggaattggaaaagtcacagaaaactctcgacgaagtgttcaagaagacaaagactctgccggccatttactttttgcctttgtctgacgaa

SEQ ID NO: 90491 - DNA, 740 bp, Heterodera glycines
attatttaatattggctaaatatatttcttctattttaaattcaaaaatcatcaaatatattgggcgagaatgagggtcccgttctctcgcttttgcttgaatgtacagttttgttcggaaacgaataatgcgggatttccgcaggggattcccttaccgcgatttcttaattccattttccgcttctgcatacgtttttaatttattccagcttcttttcttgaaaagcagtcaatgaatttgcgcaagaagactaaggtcgaaccaatagaagatgagattcctgagaatgagcagcaaataaacatctctacccgttcacataactcttcttataactctgatcgtgtcaatgaaaatgatttggttaaatcgctgtctcaatgtcttctggcaaacgtttctaaacgagggtttgttcgtgatgccgacattggagaaatgttctcagaccgaagagaacgcgagttgcgagcgaatgttctgaagaagagtgagaaattgctgatggatgttcttggataccgattagatcgagatgaggaagggaagcgtttttacctctcgacaaatttatgtaaaggcattgcaatggctatggagatatctgacgacacacaccgaggacttaacgaattcgcagatgaagatgcgtttgaggaagaatcaactcaaactgaacaatttacaaattgtcttcttgaaatggcgttaatgttcattttcatgtcgaagcgac

SEQ ID NO: 90492 - DNA, 388 bp, Heterodera glycines
cactttcatcggcaattcaacagccattcaggagctttttaaaagggtcactgagcagtttaacgcaatgttccgccgaaaggcttttctccattggtacacgggggaaggcatggaggagatcgaattcacagaagcggagtcgaacattggcgatctgatcagcgaatatcagcagtatcaggacgccactgctgacgaagacgtaatggaagaagaaaaaagcgaaacggaaggagaaaaagcggacgaagcgaattgagggaggacaattcatttcatttgtcaatttaacattggacaaaatgccaatgaaaactgtgccgatcatttcgtcactgagaattaattttaaaataatataatggaaatcttgaaaaaaaaaaaa

SEQ ID NO: 90493 - DNA, 513 bp, Heterodera glycines
atttacgcattaccggaggacatcgttgaggtggattgatgatggatcacgggtttacgcattaccggaggacatcgttgaggtcaaatccaaaatggtgatgacggtgttcgcgtgtatgatggcccttgactttatgccgaatatgaaggaagtgaccaacggaaattgactgactgtgaggcacaattacaataataaattaatttattttccctgttattctgttttattacgttgttcattcccggcttttgaatcgttgctcttttccggatctttctttccgaattttcaaagatatcctttcccctcgcgtattaaattattcgcttttaatttgctttatttgttttgctctttcgtacgttgtttctctgaagcgctcaaagcgtacaattttccctcatcgtcagctattacatatgtattacgaataccgatgaaaatattattgaaaattatatttatttaaataacagaaatataaaaggaaaatgttattaaaaaaaa

SEQ ID NO: 90494 - DNA, 525 bp, Heterodera glycines
tgagcccaccgagcaaacttctgaagcaaatgaacaaaacatcggttggaaggggaggagggaaaacttcgaccgatgcgaccactgagacgtcggaggacgacgaatgctttgaaggtacgcatagcgtcagtatgcattcaatgaggcaacgcgtcctgcaaagaatggaagatgagcatttattcgacagctattcatttgtcggattgtcagaattagacgacgaattggagaaatgtgcggatgacccggatgagcaagtgcgtcttatcgagagtcgaatgcgcgaactgagtgaaatttttcacaaatacaaaggaaaattggcggatttggagaaagagcataagaaacgatcacggcaagagaagaaacggaaaatgatgacggataaataattgaataacgacgagaaatcattttcttttcaattttattcacatgaaaattaatacactttgactttgcaatttatttgtccatcactctttttaaaaataattaaataaaaaatgatttcct

SEQ ID NO: 90495 - DNA, 683 bp, Heterodera glycines
agagtaattaaagttctgcttcttcacacccagagaactgatggcaaattcattcatgcaaattatcattgttccttcataatatttgagcaaatctaatacatattatcttaaaatttatgcatttttaaattcgaaaatgggacagaaggaatcccgtcatgcgtttgtcaattgtgccttgataaggcgagaagaatttgaagacaaaattcaggaactcaacaaaaaatgtgctgagtgttttgaagaaagtactttaaatatgctctttgctacaaaatccacagaagaacgagggattttatggcagcgttctgtcagaattcactgctttacggttttcgatgaaaaaatttaccgaaaggtctacagtctttttcagtttttgaaattctacgaatcattcatccaaattttggaagcatcggaggcatctaaacaccgtgaaaactccctaaacaataaggatttaatgagcatgtcgatatttaagggaaagttgttgtgaatattctgaagacggaaggtgcataatttgttttgactctttccccgactccgttttgccttgtgcccatgcttattgttcaaaatgtgtcgacccttttcctgctgtccaccaaccttgttgtccgttgtgtcggcacccgctcaaaagggatggccaagaccaaacatgg

SEQ ID NO: 90496 - DNA, 232 bp, Heterodera glycines
  unsure (1)..(232): unsure at all n locations
cgctcgtcctccgcctcgggcgattaatgtggtggcgaacaaagaatggatggatggaagggttttgattgctttggttgaaatgatcgcttatggaacgattaatttgttatttttcatcagttcaatcccttcaaaggtattgagtctcaaggcgcttttttgcctgcttttggttaataaatttcatttctgaaannaaaaaaaaaaaaaaaaaaaaaaaaaagaagaa

SEQ ID NO: 90497 - DNA, 499 bp, Heterodera glycines
aattaattattcacaaattaatcacacactcattaccacttccatcatttggccttttttaaaacaaaaaaaaaatgagaaatcttcttctcgcagcgttggcaattgcggtaatgcttttgtgttgtgcggaagccgttccaatggaaaacgaaaatcaacttgttcgccataagcgttggggttacggttacggtggtggttggggcggcggatggggccgcggcggatggggcggtggatggggtggccgcggatggggcggcggctacggttacggatggggccgatgatgatcagactgatcagagacagctacttgagcaaagatcgcattaaacgacaattcaagttcactgaaatttactcattttttatgttcaacgaattaaaatattaattaattttttgtttgtgaatattccaacctctctgcatcaatgcaccaatcatcattctttgcattttaaaaatttatctacataaaaataatcactgg

SEQ ID NO: 90498 - DNA, 327 bp, Heterodera glycines
ttcccttattgcctccatctttgaacaaattcaaacgtccaatgactgaaagttattttggagagagacaatccgggaaaagagacggggcggacagagtgacaggcgatggagaagaaaccgtggcatgtcaatcctcgactcaccaagaataatattaaacggaaaaacaaaccaatttaatgttctaaaatttgtcatgtactttcatcattccttcactttcattttattttgtcaccattatcaggcttattcctacatcagtggttcgtgtaaatgatctcatggattatttgtacatctgaaaaaaagtgatttgaaaaa

SEQ ID NO: 90499 - DNA, 513 bp, Heterodera glycines
caacaattacaacgtgatcaagtcgggaaacgtgaaaatgacgacaacaaatccaaattatgacaagccgctttgcttgaatgggctcagtcaatacgaggcgttgccctcctcgttgtgcaatctcaatttatgcaatttcatcggccgcaatttgtgcgaattgttgcaacagccaggcaatcacacggtgcgcgagatggagcagaaagcggcttggaatgccacagttgtcatgcccgattcaccaagaatattcggcatcccttttgtggacctttttgctggagagttcaattttgaatttctgttggaaacggagggcaaagagattgcgcatttggaagtgccgacgaatttggcatttgtgccaatcggaatgcaaaatgaggaggacgaagacggagaagggcaatgttagcaaaaaaaaaataaacgaaaattattgtaaagcgttgaattatttactagaattaatgtgttgataaatgaattttttgaccaaaaaaaaaa

SEQ ID NO: 90500 - DNA, 550 bp, Heterodera glycines
aatttatcggatggcttacgattatttggacagattgggcaaagtggacggcctcgactttgacgcgttcactaggcaattattcgaccgatggttcggcgcgtacacgcgctgcggcacatgcaaaaatggcaaatgcagcagacacgggggaccgttgggaagttcagggtgggagcacgtgttcagcggagagtggcgaggagaaattgtggacggacaccacagttgggtgaggttttacctgcaggagaaggcgggagacatcgaataccacggatattacgtgaaaccacggcacggccaattcattggcaccattcagtacaaatggaagcagtacttgaaaaggatcggcggtttcatgataggcacgtcgccagcttttgacttttctctgctcaccgtttgcattttgactgaaccgggcgaccggaagtgcaaattccaactgaaagaaactcctatgttcgtctcctccttcctcgaggattgtgtcatcgacggatccttcagacacaacttttgcattgcgaccgcttatccgggc

SEQ ID NO: 90501 - DNA, 587 bp, Heterodera glycines
aagacattgtttgtatggcaaacatttgtgtacaaaaacaggaattcactgaagcgaccagtgggcctggcctcaccttcgtggctgcgaaatttgatggcattcttggcatgggattttcggaaatttctgtccaaaaattgccgaccgtgttcgacaacatggtcacgcaacagaaagtgccggagccggtgttcgcattttggcttaaccgtgacccgacctctgaatttggtggtgagatcaccattggcggcactgatcagcgacgatttgtggccccaatcacttacacaccggtcacacacaaagcctactggcaattcaagatggattcgatcagtggaggtaatggcaaacttgcgtgccaaaatgggtgccaagccattgcggacaccggcacctccctgcttgctgggcccaaaaatgacattgaaaagattcagaaacacattggagcaattccgctcttccatggcgagtatatgatatcatgtgaacgtattcccacactgcccgatgtgacgatcaacatcggtgggcaggcgtacacgttgaaaggccaagactatgtgctgaaaatgaca

SEQ ID NO: 90502 - DNA, 462 bp, Heterodera glycines
aattagtgatgtacatccgagagttagaatctccagatgagcactccctggttttattcaatccgcttcgttcttgctttcgtcctactagagatgaattgttttcggcaattgcctgtcagcgacgctctatcgttcgtctgaacactgaaagggcccgatttgtgcgtcagaacggggctttgctacggatgatcgtgcgattgacaggtggcatcccgccaaattttaatcatgctcattttgctgctgctgcacagccggcggtcaatgtgactgcggttatcaccaatgccaatcccaatggacagaattataaccgccttcagcgtttgcatgcggaattatcggagaccattgaccgttttacggaggaaaattcccttttgggatatatgaacgatcaattgacggaacaacttgaacctctgacagaagtgcctccgaatgcgaattttaatc

SEQ ID NO: 90503 - DNA, 246 bp, Heterodera glycines
agtggtgagagaattaactttcccatcatccccaactcatcatcgctgaatgtattgactaactggtttttctacgtaaatcgttacagcgaatgtctcaacattatctccaactcagcatagagatcactaattgccgtgttcatctactatatccgatccatttgttttttcatttcattaaaacataaaatgtacataatttttgtttcaattaaaattgaggtttagaaaaaaaaaaaaaaa

SEQ ID NO: 90504 - DNA, 794 bp, Heterodera glycines
ttaattaattgaataaaaattatttcatcaatgtcctttttactttttgtgactattgcttttgccaatttggcaccaaatgcttttggccagcaatggccaaaagcaacaagtgatgaaacggtttcggcaaccatcaaagtgtcgggcggcaccaaagactttggctacaaacgattgaccgcctcttcggcgttgggcaccggtgatcagtcggagggccaaaaagcgctgatccgtgccgaaaagggcgcagtgatcaaaaatttgatcatcggccaaaacggggcggacggcattcactgctatgacgggtgcacgctgcaaaatgtgtggtgggagaaggtgggcgaagacgcggccactttccggagcagcagcggatgcaaggagtacaattttcttgtgaccggcggcggtgtgaaaaatgccaaggacaaagtgttccaaatgaacggcggtggcacgttgacaatcaaagattttgtggccgaaaacattggcaaattggcgcgctcatgtggcaactgcaaatcgcaatgccaaaagcgcaaattcgtggtggagaatgtcaaagtgactgggctgaaaacgctattgtgtggcctcaacgagaattatggcgacgtggcgaccatcaaaaatgtgcaagtcagcggaccatcgaagaaagtgtgtgccgaatttgagggcaacgacaagcaaaaggagccgccgatgctgcgcagtttcgacgtcgggtcgagcggagacggcaaaaattgcataatttcgagcaccacaagcggctgatc

SEQ ID NO: 90505 - DNA, 97 bp, Heterodera glycines
atttattctcacaaaagcagtttttgtatgattggaatcaaacacttttgcttgactttatcatgtaatttgattccaaaaataaacaaatacgtca

SEQ ID NO: 90506 - DNA, 485 bp, Heterodera glycines
aaaaaattaattgcgaaaagctgaaaattaaaatggacggactaaaaaataaaagagcaatatggtaaatatatgtattggtaagctgtgtgtgtgtgcgctaaataatatgttgtttttgttgttgctgctttatgacatacatattgagattaattaaaggaaaaagtcaaaattatcgattgatcgctgctatggttaataatcaataaattatcgatcgattgattggcgctcatctgtcagttcatgaacattgagtgcacaaactgttcaaaatcgagcgcattttcaatggtacggccggacgccgcgtccacgtagggcttcatgcgctgtttgcagtattgcgcttgttcctgggtcaaattcgcgaacagttcttccgcgaacacataggggcggtactctttgctgagtgcgcggaatgccatctcaatttcgtcactggaccgcacattctccgtctccttgttgatcatgaa

SEQ ID NO: 90507 - DNA, 512 bp, Heterodera glycines
ctctcgcttgtcactcaaaaatgaatgttaaaggtggtggtatctctcaagtgaatgattccacttctgatgaaatgaggctcttcagaggaggtcttagacatgctggccaaaccccaagcagattgatctacgacactacttcatgcattagaaactatcacgataagtacagctacgaaagaggtttcattgcccactctcgttcaccatccaatcaataccttaacttccacttcatgtacggaggtttcaagaagttcgccctcgagagacacgtttaccagaactggtacagaaagaacattagaaactggtggctccctgctatcatctgctacactgctggttgcctcaccatgagaatgtacgacaatgctgcttatgactatttctatttctctgattaaaagccttggatacacgcgatggttcataaagcttatggaaaaggtctatggtttctatatatgagaaaatagtagattgacttaaagcaaaaacgcttcaaa

SEQ ID NO: 90508 - DNA, 383 bp, Heterodera glycines
ttcgctgttctgttgatcctttccctccaaattgcggagatcattgccaaaaagcccaaatattgtggtgaacgctttgccaaaatgcgggataaggtttgtcgctggcccggcgaacagcagccgtgtcttcaactgcaccacagcatcaaagagcgtgttcgtacgaagtgctgtgcggagggctgctccctggaggaaatgaaggaggaaatgtgctgcatgacggacgcatgcctacggaggtgctacccgggaaaaggctaccgactgggctccgtttactgaatttggcacaaagggccaacagataaaatgacaaagatgaaattcacggcactatccagaaatcatttcttaacaagaaaggctatatccaaaaa

SEQ ID NO: 90509 - DNA, 509 bp, Heterodera glycines
tttctccatgctgtgttcgatgagccttgaatggtttttcagctcgtctatccgattctgccagcctttgccaaacccgcgtggaatcacccagcagggccaaaaacggtgttcttttggtcccccacaataaaatgggtcctcgtcggcgctggactctctgatctagctcggcctgcaaataagctgagcatttaccagaacaccgccctaatggccaccggaatgatttggacccgttactgttttgtgatagtgcctaagaattactacttggccagcgtcaacttctttgtcggatgtaccggactcgctcagatattgcggattgcgcactatcagtacattcattctgaggaaacaagcaaatgaatgatgagaatggatggacctcttaaatagattgtcttctcatgcgtgttttttgcgggttaacggctcaaaactcggtttttctgatcaaatagtattggttatttagtatgttgtgatcgtaaaatttgtattgg

SEQ ID NO: 90510 - DNA, 497 bp, Heterodera glycines
gctgaaaacacagctcaaattcgtcggtttcggcaagtacttctctttcaaagcacttagttggtatttccaatcatttttgatcggcattgacactttggtcgtcggaattcgagacgacaattttaagctgactcatgttgaatattacccacttgagaatttgcaaagttttttcaagaaaagtgggttcgacacgaacaaatgtctgctcttcctgcaccgttttctctctactgtcaaaaatgagctcaacggagtgccagaagggtcaattttagtgacggagcgtctcaaaaacaccgaccagttcgtgttcactaccatcgatgttgaggatgagatgggacaagcggagtatgcggtgatcagcaaagaattccgtgaccacaactggacccattgaaacttttttgcacttgaatcattgtattccatggttttcaaattcaaatttttttgcgattcgtaaaatgcttttttagttttcaataaac

SEQ ID NO: 90511 - DNA, 484 bp, Heterodera glycines
gccaaaaaacgaattcaaagcgttggatgccttcgctttgtccgctcacttaaggccgggccgtcatcgatgcgattgtcaggcgcgtctccattctttggtgcgcaattgcattggctgtggacgcattgtttgtgcccaggagggaagcggacggtgcttttactgcggccgtttggtgtgcacgagggaggaaaagacgataattgagaggaaggacggtgagggtttgcgactgttgagatgccttttgaacgacttgcaagcggactacttcagtttggagcataatccatacttgacagcagccgaaagagaggcaattggcaatcggaaggaggaattgagacagctcagtttgagtgtcaaaaggaatattctcgtcgatttggacatttctaacggagcaatgcatcagcaaaagcaaaaacccatcgaaacggtggacgaccccatcctccaggcgattctcctcaattcggcg

SEQ ID NO: 90512 - DNA, 539 bp, Heterodera glycines
cggtctccccacaaatctgggcgcatcggttcggggggactgccccgaaaacaaaaaaatcgattttttcaagtgtccgtttggggtactcaaacaattatggggagcaaaaatccaacgcagaattaaagtacaggctatagggaagctactcccgaaggattcggtctccccataaatctgggcgcatcggttcggggggactgccccgaaaacaaaaaaatcgattttttcaagtgtccgtttggggtactcaaacaattatggggagcaaaaatccaacgcagaattaaagtacaggctatagggaagctactcccgaaggattcggtctccccataaatctgggcgcatcggttcggggggactgccccgaaaacaaaaaaaatcgattttttcaagtgtccgtttggggtactcaaacaattatggggagcaaaaatccaacgcagaattaaagtacaggctatagggaagctattcccgaaggattcggtctccccataaatctgggcgcatcggttcggggggactgcccc

SEQ ID NO: 90513 - DNA, 572 bp, Heterodera glycines
acaatttcttctttctcgatatttttccgtctcaaatttggcaatgcaaaaaattcgagtcgccaatccggtggtggatttggatggagacgaaatgacgaggataatttgggctggcatcaaagagaagctgatcctgccctatctcgacatcgacatcaaatattacgacttgagcatcgaaaatcgagacgccactgacgatgaagtgacagtggacgcagcggaagccatcaaaaaaatacaatgtgggcataaaatgtgcgacaattacggcggacgaggcgcgcgtgaaagaatttggccttaaaaaaatgtggttgagtccgaacggaacaatccgaaacattctcggggggacagtgttccgtgagccgatcatttgcaagaacattccccgagttgtgcccgggtggaagaaggaaattgtgatcggacgccacgcatttggtgaccaatacaaagcgacggatattgtggtgccgaaggggtccaaatttgaaataaacatcattaaaagtgacggaccagttgagagggactcggtgttcaactttgccgatacgggcggt

SEQ ID NO: 90514 - DNA, 480 bp, Heterodera glycines
attttccttttcagccctttgactttctgtgtccctccctattccattttctgtgccgtcggctgtcagtgctgccaattcaaccacgcggatgaccacctcttctcaatgccagtgctcgagtttctgctatgaaaattgaatgctttcctattgggttcgacgatggcgtttcaaaattcctgagataaagaaaccaaaatgcgaacgaattagcaaagaacggcgtcaaacaatcaaatgtatcagtccgaacacaaaagtcagcttatatgagcggacaggactattcattgaatttggtttaccaacaatttttgtttgaagaagcacaacgatttcaaggacattttcctactccttgtcatttcccgcaatgtaatcggaagcccagcagatgcccaactccgtcgctgctgctccttgcgccccaacccgttcacaacaatcacttcctccaatcagaataagaaaagcaca

SEQ ID NO: 90515 - DNA, 545 bp, Heterodera glycines
cgggtgaatgcacaccaaatgcacaatctgtgcatggcaaacgacagagaggggaggaggaggaagaagaggtggaagtgatctcggcaaaaagtttagttcgaagttcggctttaacgcagaggacattggcggaggtcgagagtatccccgaagagctttcaatggcttcacattcggcgaaatccttgccaaactcctccgtttccaccatgtcatctgggaaggggatggtggtcgccgtggaacccgtcgctgaacaccagcaacaacaacagacggacgattcgattgcggaagaagtgttttcggaggacatcgtttccaccttcaaaccgtcggagaagtcgctgcactccattctgtcattgcgtagcaattcgatgagcaccagtgcgcgggacagcatgggcaaactgaggagggactcggccagcgaagcgctgctcaaactgagaacgatgaattgcgtgccggagctgagaagtcctcgcgagtccaaaagtccacccaaacccctgaggtcgccacgtggcattgaccgt

SEQ ID NO: 90516 - DNA, 556 bp, Heterodera glycines
ctctacgaattccaagcactaaacccgggcgaactcgactttaaggagggccaaatcattcagctcgattcgcaaattgacgagcattggtttgagggcacagtggacggccggaccggctttttccccatcacttacgtggaggtgatcgtaccaatcccttcttcttccacgacggcacaacaataaactttgtagaacaccgaacagatgacacaaactgtgctttgggatggtcaacagaacaagtcaaacaaactcacctaaatttgctaataattccttaattttcactgtttgtttttcgacccgagattctcttcttacaatagaaaatggcaaatttctaaaccattaacttctcagataatttgttttatttcttttcctatttctgaaattatgtccgcggagattgttatagctaatcaatctaattgtaaagccatttattcgagcgaccgttacttataattcatcctatgacactttcatcaacattcacataatttcaattataaaatttaataaaaaaataaagaaaataaaattgaaa

SEQ ID NO: 90517 - DNA, 562 bp, Heterodera glycines
aattaattggaaatccaattcaatttttgagtataaaatgaactgctccttcttcctctgtctcttcactgttcagctgattctgctcaatttcgcagtcgaaggaagagaagacgatgaactgaagagaaagaaacgcaacacggacgtggacgtgctcggcctggtaaatattcacgcgccgtcgcgaaagaatgtgaacgtcgacgttggcggagaagaaagagaccgaaatgacaaattggtcaatgtgaatgtgcagggacacaggaaaaatgtgaacgtcgacgtgggaggagggcattataatgagggaaaagtcgtaaaatacgaaagggacggagagaggggaagggaagtgaacgtggacgtacgagtgccgaaagtgaaggtggatgtggaccgagaagacggatatccgaagaagaagcgagtccatctgaaggtgctggacaaactgaggaaatacgacagcgaagaaagcggcgaacggagacggcaccgcgtggtcaaaatcgaacgggacgggggacgacggcacaaaacggtgtacatcgagagg

SEQ ID NO: 90518 - DNA, 492 bp, Heterodera glycines
gtttcatctccgccgattgttggctttcggtgttcgatttgctcccaccttctcaacttggcctcggaattgcgctgatcagccaccgatttgacttttacatcgacgaacacttcaagactcgcaaatggacattgaaatctataccgcaacatttgtgccttggaattgtacgccaaatttttccgccgtttgcgtaaattcgtcccgtcaattctcaacgatttccatcaattcactttctctttttctatgccgacaatttcttgatcgaatttccggccgatgacaatgccatggcatcggatggacaagcggtggcaaaatggcttttcactccacgtccggacaatgtgccgaagctgttcaaatgctggttgtgtaaagatgatccaaattggcgtcgaaaattgaagcgttcaaagcggcatttgccaatgcttcttaccacgccaatttcattgtcgtcaagtgacgacgactgtcttctga

SEQ ID NO: 90519 - DNA, 791 bp, Heterodera glycines
tttatgagtcgtttttcggcatttgggatagaatttttatttcatgaaaaaaaaaattcttgaaatttttttcagcaataaaaattctgttactaatttatcatgaaatttttgagaaaatcgcttaaaaattttcaaaaatatttatcttgaaattttattataaaaagtgctatatccattccttttaccgtagcccataccgtaacccgtgattacggtgctgttgcactcataacctatgttctctatatcctgtaaattttgtccaggctggttcctctccctgtcctccatgctttgcattccaatctatgccatttatttgtgggtggtcaccgatggcaccgtgtcggagaaattcaaaaaactgtttcgacccgacgtgaatttggtgccaaaatcggacaaagaccgggaggaggagaaggaactgaaaagggcggcaaaattggccggcgttggcaccgccaaatgaacggcacggcacgaaaccgggcaaccataagataaatgatgatgatgatctcggcaaatgcatagaatggaggggcatagatgaatttgtggttaaattttgtaaattcccggatttccaacccccacaaaaaaaaaactggggcataattcgaataataatacttattttcctaggctacgcctgattttcaatttatttgtacccttacttatgtagaagaattttatttttgaaaacgcctccctcaaagccattgtttctggaatttttgattttaaatttgtttaaaaaattttcaaatgaaataaaa

SEQ ID NO: 90520 - DNA, 536 bp, Heterodera glycines
ctctcactaattgttgcacattccccaattttatttcttccttagtaagtagtattggtgcacaatgcgcacttttctgttcatagccgtagtcgggttgatgttggccgtcatcttggagaatgtaaatgcgactgggaaaaattcgccgacaaagggaaaacagtcgctagacagtccaaaccatgaaaaagaccataaaaatgagcatgaaaagtatgaagcagcttacatttatcgtggcgactttttccatgactcaaagaatgagccgcatgtggaggagcaattagttgccgcaatttatgatctgatctccaagtacaaagttgatctgtacgaaattgtcatttttgtgtccaagagtccatgctttcaccaggattgtgagcccaaatgtgaggtggtggacgaatgcaaatgcaataaagcttgtgctaaactgttgggattgcttttgtcaaaggtgcgcaaggagttgagcaaagtggatgtgcgaatgacagtcaaatttctgtatccgcatttgaaccgtg

SEQ ID NO: 90521 - DNA, 554 bp, Heterodera glycines
tggttttccccaacctcatgtgcccagcgatcacattccgatcatgtcgcaatatgccgtcattccaccaaacttccagagatctttgccgcccattcaccattacggaggctccgcacattccggtggttttggtgcgatcggacggtaacgacggcaattttacaacacatgtgacagttttcatttttaaacgttgtcaattatgtaaattcatctcttatcactcataaaccaaaagacatgttttatgtatgtttgttgatgatgctcttccacacagactaatggtattgacacgttttgtgtacatactttttcttctttcctcgattctttctcctcaacagaataatatatataaaacagttaattaggagatggttgatgggttgggatttattgtaactccgagaaatttttgccatctcaaaagaatccgtttttcttatcccctcctcatcttcttctgctgctgatcgtactcaaagtccattcacctcatatgtgttccattcgtttgtgcttttccatgtaaaaaacggatgataatt

SEQ ID NO: 90522 - DNA, 553 bp, Heterodera glycines
gttttttaaattgtctttagttccatccgatgaagaaatgccacattttgtgcattcgatgagcggcggattggtgctgataaacgcaaccgaaacgatggacggcacttacgaatgcgcgacggaagaaagtgcaaatggaaaagtgccattggccatttactcactgagagtggacggcgctgactgcgcccgtcccaaaagtgtggaacagttccgatcggctcaaagggagtggtgccgtcggatggacacttataggagcaatttgtcaaaatgggaaagcattcgcgatgccaatggacaaggcaaaggcctttgtgacacaaatgccgaaacggaaaggaggacggactcggggaattttgttgcctaactttggcattttcacacccacaaaatcagaggcttaaattggccctaagacaaacccaaggcaaaacattccatcgtaattctctacttccgattgctcactcatttattatctttctacgcctttcttttgtctgtgtttttaattattttgtgcataaatatgcttttcagaaaa

SEQ ID NO: 90523 - DNA, 552 bp, Heterodera glycines
tcgcttttcactaaaatttacaaattctgctgtaactcaaaaagctttattccttcctggatatagcatatattttgtatgagtgcgcctaacaacagtccctcgagcatttcttctacaggaacaaacggaattcgtataacacgacagaggagcagtgctcgcattaattggctgaccgaactcaccacgcgcgattcaactccagttacaaccacccaaacttcaaaggatttttctgaaatcagcaaacatttagcgctcgttgaggacgaagacaatattaaaaggattcaagcaaaacgagaaaaagaagcccacgaacgcgcgttggcttttgtcaagaatcagttattgaactcgcggaaagacgactggctccatcaaccaatcgaagaattgcttggctacgcaccgaaatactaacggaatggcgaagcaatgctttgttactgttggcagtacgcgttttgacgctttggtcgaatctctgttccgtagcgatgttctcgatgctttaaagaaactgaaagttgaatgtgtgacaattca

SEQ ID NO: 90524 - DNA, 375 bp, Heterodera glycines
agcaaattccatctcgaaaattcaattaattccattctaaaatggcttcatcatcgattaaattggtttcggtttcaatgtttctgctcgtcctttgcattggcatggccattgagcagacccaagcttattatggctggggtggctacggctatgtctatccttacggattttatggcaaacggcaagccggttttggcccatccgaaaatgctggcacttttggtggcggtggagaaggaaattccaacggaggaggaagaagaggaggaggaccatcatcaccaaacaatttttgagagaaaaaaggaattacaaaaccaaaattgagcttttcccattttgtaattgatgatcaatcggataaaaaaagtg

SEQ ID NO: 90525 - DNA, 464 bp, Heterodera glycines
tgtgaaataaaatatgcgtcaccaatttccaattatttttgccctttttctcattttaccaattttaattggaaaggtaatttcaaattaattttaaatgttgaaaaatgcaattttgaaaatgtttctgccgataattgcatttgcttcagacggagtgccaaagtgacttttgggcctctctttcccagcctttggtttccgtgggcagtgatgcgaaaatgccactgaaggacttcggcatggacttcagcagactgaacgattacagctcattgtttggacgaagaaagaaaagggcgcactgattgtaagactaaaaggaaaggacgaaggaagacgaaacaaaacaaaacgggcccaattattacactaattagacaattaattaattacacatgttgtacgtaaataaaattattattgtaataaatttcattttttcaaaaaaaaaaaaaaaaaaa

SEQ ID NO: 90526 - DNA, 362 bp, Heterodera glycines
ccaaaatcattcattaactaatcaatcaattggtcagtccctctcacaatgctcttctccactccaatgccactctttctcgtctcttctgtctttctcttcgtttttcttctcgtcgccatgtttttggccaatccgtccgatgcgcggcctcaatttggctcatttgccgattcgatgaccagcggaacgattttgagtaatatgtggggaaaaaagcgatgagaagcggccaacagcagacggagaaagaaagaaaattaaagaaaactgaagagaacaattggaaataatcaacaattaataaataattgttaattttgtataatcaatcatcaattataaatggttggtaattaaaa

SEQ ID NO: 90527 - DNA, 498 bp, Heterodera glycines
aattaatttaattggcttttttctctcttaaatgcgctcccttctgttcctcgctttcgtggcacttttcgtcgtcaaatgttcggccgatgagtcaatgcaaaatgatgaaaatgatgagcaattccctcccggaccaccgccaagcaatgaaatgtcggaagaatcaaacgatcgccgcaagcgaagccctttcttcaactttttcgggggcttcaaaaagggaggacgaggaggacggcaaaaaggggaaaagccgaacggagtgccgcccacgggaagtccacccgcggagcgggagaagcgtagcctgagcagaggaaatgccaaaatgggaggacgaggaccaatggggggacgaggaggacaaaagggaggaagaggaggacaaaagggaggaagaggaggacggccaaagggacccccgccgacttcgcccgccccaacggaataaaaagaggagaaaaaagatgaagcaaaagaagcgattagtttgaa

SEQ ID NO: 90528 - DNA, 528 bp, Heterodera glycines
tgaggtttgatttgagcatgatcttagtaactgccacgctagcaagtgatagtacacccggtactcacgtcttagacaattcagacgtagggttcctcagtaacggcaacgccaattgtacactgtttgaaagatgggctagttacgtgggtaacatgaacagcgtgtctattatggattgtgtggccgcagctaggcagggagatatgggacaagacattcccaatacggcccttggtctattcaagtggtgtacggcgtgtttcggcaagagcgtcggacctggccacagtgcgggaacagctacggcaggcaggaagttagcagacgccgcgtacgctgatgaagcagccatcaatgagcatcgcgtcggcaaacacttattgaagcgcgtgcacctgacacccaggagtgtggttaaacagctcgtggcaacgacagtcaggggcacatggaaaatgtacgtagtatgtgtgtccgcagtgtttgatctggacgacccgaacgggtcttggaactggcgacaag

SEQ ID NO: 90529 - DNA, 443 bp, Heterodera glycines
gacggaagaagtctttgaggtggattgaatccggtgatcttttcattccccaattttgtgctatatgttggttttaaaaaccagtgttgttatttattattttttgtctgtttgtctctctcttaaatcccaaatgctttttgtcatggaatgaaattgttgatcaccaccaataaattattacttctttccaattttgtggtggagatcaaaagtggtggaccaaagtaattgtacctcgatcccactcgcccccaaatttcttttccattttggccctttttaccgtatgattcatttatgtttagttttcttgctcaagtcaaactgattctcggttccattttcgctttgttttcactgttgtgccaatttttgttattgttttgtgtcttcgtttttgccttttatcaaaagccagccatggacagtaaaaaagtata

SEQ ID NO: 90530 - DNA, 512 bp, Heterodera glycines
ccatccatcgggcggcgggtccacaattgttggaggaatgccgaacactgaaagggtgcgaagtcggcgaagcgaagatcacaaaagcgtataatttgatgccaaacatcaaagctatcattcacaccgtcgggcctcaaattgggactgaagtgtcggacgaacagtgccgacagttgcgcgactgctacgccaactcgctaagcctggctcgcgacaacaaattgagatccatcgcttttccatgcatttcgaccggagtttacaacttcccaaaaaaggaagcctctgaaattgcgattaaaactgtgagagattggctgaccgaaggccaaaacaatgaaaagctcgacactgtgattttctgcgtgttcggcgatgatgaccttggattttacgaaaaaaacattcctcaatttatcctatgaagattcaattgaaagaagggatgaaaaactcagtaaaataatttattactagtaattttctaaaataaaattctgaatttctta

SEQ ID NO: 90531 - DNA, 414 bp, Heterodera glycines
caacgaaaactgacgggaatggtgcgggacggagtcaattcggcctcgcgctattactactcacaaatatgcgacgcgaacaaacaaaacgtaatagacatccttttgggacaacagagaacagcggaataacgcagaaaggcacaacccacttcaaaatgttgtaattattccaattttttactattttgccctcattccaaagatattttcattctgtaagatacttgtgttaattatggcaaatgctttatctgtgcctgtgatactttcccgataaaccgtcattttgtggccagttgctatcagctttaacctttcatttaaaacatgttctctttgttttgtcttgcataattgccaaagtataaatggtggaaagaaaaaaaaaaaaaaaaaaaaaaaaaaaaaaaa

SEQ ID NO: 90532 - DNA, 587 bp, Heterodera glycines
tctttgagcaaagggagcctcggagtggagggattggccggattactaatggacacggcgaaaaaaagtacaaaagtgccgtacgaagagaaaacggacgaatcgacgcaaaaagggcagacgcaaattgggacatcaaacgaaggcgacgaaggggcgaaggaaggcaaaacgaacggacgaagcataagtgggaagaagacgacagccaaggaacattatttgtccaaatcgagatacatgccagggctaagaagcaacggctcgtccagtctctcggcgggcatcaatcgaaaggcaatcgcacaaccgtcgcaacagagcggcgccaaacaaacgacgggcggcggaatcctttcgtcggttcaggttacgtcccttcttttggtgcgcctcgccaacaaccgccgaatgccaattcaaatgcgaactcactgggcaattcgtcgtcctcaatttcaatcggtggcggaccggcggacaatgccaaaacaaacaacgccttctcaaccatcggaggacggacgaattgggcggcaaaatatcagcgaaaaaaaaaaaaaaaaaactcgagactagttctctct

SEQ ID NO: 90533 - DNA, 301 bp, Heterodera glycines
aaaatgacatcaatttatgctattggaatccgaatgtacagtatccggatagacggattggccaatgcgagccatctcaatataccaagttagaatattcgaacgtgaagatagagaagaaccggaactgaaactgagaaacgacgaagctgcaaaaccatttgctttagacaccggcacaaaaagctgttaagaaacgccgaccttatttaaaaaagagacaatataatcttacattcaccttggaattttgaagaacccagtataggaatgaataattaaaatttcaaattgttaaaaa

SEQ ID NO: 90534 - DNA, 538 bp, Heterodera glycines
caccaaaaagaccctgaagtttcttggagaaatgacgcaactgagggtgtgctgggcaagctcaccacgacgatgggcccttgtttctgcaaaggaacagcttacttaatacattcgttcctcaacgcttcacacacgggaggtatcgcactgattcagtcgatatgtcgccaaattgaccaaaaaaaagtctcccatcacaaccagcgagtgtgaaaaatttgaatcaaatcttttcggttccaccatcaaaatggctatcgaattaaccggggatgatgtcatgtgcgagctggttgctggaccatggtcaatgtctacttttttcctttttttaaagtagtgaccgacaaatggggttttggaatttttttaaattgaacggcgccgatcactaaattgagaaaaatcagtattaacaaaaagaatttaagtgaccagccatcaaacattacggtcgacaacacaatgccattcacttgctcattctgtcagttgctccacaaaaaagcctcaactattgctcacaacttcgtca

SEQ ID NO: 90535 - DNA, 476 bp, Heterodera glycines
ccattttcaccgataagaagggacaaatgcgttgatgaaatggatgatggagagattgttggtgataatcaaaatgacagcggtggtgataatgaatgtgatcggagagcgattgtcagccagcagcagaaatcgaaagaattttcgtcagtgcaagcggaagaaagtgagggaaacgacgacgacgcttttgtgcctgagccaatgactccgcctcgtccgaccaccccggcagactgtgagacgggcattccttcaccaaagacgccgccaccggtcgcttcctcccacccgacacgcatcaaagaagttatcgaaatgcgggagaatgaacggaccgtgcgcttgttggacattataacactggattgtgacgatgaatggtgatgctccctatttcatacattgttttccaaacattttcatacggttatgcttatttgtcgacatttctattttttcggaaattgatgctg

SEQ ID NO: 90536 - DNA, 534 bp, Heterodera glycines
aattacgaattggcaactgctttgcttcgtcgtgccactacgcctccaccagtgcgtcgtgacagttactttgatgattcggccaaagtgcaaaaccgcgtgttccgatccctgaagttgtggtcgttgtacgccgacattgaagagtcgatgggctcactggaaagttgcaaggcaatttatgagcggatgttggagttgcgaattgcaacaccacaaatcgtgataaattatgcactgtttttggaggacaaccaatactttgaggatgctttcaaggcgttcgagaagggaattgggcttttccggtggccgctcgtatttgacatttggaacgtttatctgaccaaattcatccaacgatatggtggcaaaaagctggaaagagctcgcgatttgtttgagcaatgcttggacaaatgcccacccaaatatgccaaaaatatttatctgctttacgcaaaactggaggaagagcatggattggcacggcacgccatggatatttacaatcgggcaaacggagcagtcgaa

SEQ ID NO: 90537 - DNA, 558 bp, Heterodera glycines
tacacaatcatcgtttccgccactgcttcggatgctgcgccgctgcagtttttggccccctattctggcgccgccatgggcgagttttttcgcgataacggcaaacacgcgttgattatctacgacgatctctccaaacaagcggtcgcttaccgtcaaatgtctctgctgttgcgccgtccacccggtcgtgaagcttacccaggtgatgtcttctacctccactcgcgtctgctcgaacgtgcggccaaaatgaatgagactcatggcggcggctcaatgaccgctctgccgatcattgagacacaggcaggggatgtgtccgcctacattcctacaaacgttatctccatcaccgatggccaaatcttccttgaaaccgagttgttctacaagggagttcgtcctgcgattaacgttgggctttccgtgtcacgtgtgggttccgcagcacagacaaagtcgatgaagcaggtcgccggttcgatgaagctcgagcttgctcaataccgcgaagtggcagcctttgcccagttcggatccgacttggatgcctcc

SEQ ID NO: 90538 - DNA, 533 bp, Heterodera glycines
  unsure (1)..(533): unsure at all n locations
ccatttattgtctgttacttttagcccagaatttagttaagcaaaaccaagttttcacttgataccataataaactgagattgtcattgtttgaacgcgtgaactcgaacattgtttaaaatgatcatttctctggaatttttcagttatatattttttgtttattaaagtctcgtaaaattgccaaaacaattcttttcatgtttaagtccattcttcgcaaccgaaacgaacggtcgccaattaacaacgaagaattgcagaaaatgtgcaaaagagatattgtggagtttcttcctactccgaaggagattttgggtgatttcgttttcgagaggagcgccgggaacaacagagagaaaaggaagccgaggaaagggaggccaatgtcagcgtggaaaagtaggaaaatggacttgtcgagcagtgacgaggagagaatttaattcgcgaaatatttattgtatttgtttttgttatcacccattttgcaattacngaaaaccataccaatgaatacaccaaataaaact

SEQ ID NO: 90539 - DNA, 532 bp, Heterodera glycines
gtctgatcgtttggcgactgatcgcgcgttcattgggctgcttttcaaaaaagttggaacgaaagttgacgatagagcccaaagataacaacgaagacgaaattgaaactgagacgagggcaagccgagaaacactttccacggagtcggacgaaggaaatgatgaactgttgcagttcccagtttggtttctgatcgcggtgaccatcatctggatcctgctctgcgcttatttgtttcttctctgggaggatacgtgggattacggtctttccctctatttcgtgctagtctccttcctcaccattggattcggcgatgtgatcccctccaagcccgattacatcattctcgtcggcattatgattctgatcggattggccctcgtttccactgttctaaccatcatacagaagcaaattcacgcgttggcagacaatatgaaaagcacaatcgacaaggattaccaagcagcattagaagaattggacgaggaccaaatcgaacccatcgatgggcagagaaaggaaat

SEQ ID NO: 90540 - DNA, 394 bp, Heterodera glycines
ccaaacaactccatggccaattactgttcatttaaaaaattttcccgatgaactcattcgatgtcggacgaaagaaacgctaaaattttgctttttgcaatctctgaaagaggcgtgccaactcaaacttggttctaacattgctgcgtcgatgactaaggatgagcatggtcgactatttgacggcttatgcaacgacagatttaacgacttttggatggtcaacgacaaactgatgggactccgttcatcatcaggcgaagaacagtttagcactattcccgcccgattttatgaggtgctaatttattgagccaaatttacttggaatgatcttttggaccgatactcatgatatacaatttatcttttcgtctagtcattaattttttac

SEQ ID NO: 90541 - DNA, 322 bp, Heterodera glycines
  unsure (1)..(322): unsure at all n locations
ccgttctttaggcaattgctaattatgccgggcacatgtcgttcaatttggtgacgcaaaaggtggacgagcggagaatggcaccgcaagcaccgctgtttaacaaattcaacggacacaatttgaaacagcaggacacaatgttttttgcatttgtttgcagttgtccctttgcgttgaaaagcatgcgtgacccaacgatgagttcttgcccatgaacacattcttaaagaattaattttaattttaaaattttattgggtaaataaatgcattaccaatcnnnnnnnaaaaaaaaaaaaaaaaaaaaaaaaaataaaaa

SEQ ID NO: 90542 - DNA, 532 bp, Heterodera glycines
gccatccatcgggcggcgggtccacagttgttggaggaatgccgaacactgaaagggtgcgaagtcggcgaagcgaagatcacaaaagcgtataatttgatgccaaacatcaaagctatcattcacaccgtcgggcctcaaattgggactgaagtgtcggacgaacagtgccgacagttgcgcgactgctacgccaactcgctaagcctggctcgcgacaacaaattgagatccatcgtaacttacaaggggttttccttctactcgtattttaggcttttccatgcatttcgaccggagtttacaacttcccaaaaaaggaagcctctgaaattgcgattaaaactgtgagagattggctgaccgaaggccaaaacaatgaaaagctcgacactgtgattttctgcgtgttcggcgatgatgaccttggattttacgaaaaaaacattcctcaatttatcctatgaagattcaattgaaagaagggatgaaaaactcagtaaaataatttattactagtaattgtctaaaa

SEQ ID NO: 90543 - DNA, 556 bp, Heterodera glycines
cggcgacaatgggatgtacctgaacatcattttgggctccaacctgaacatcaccttgcccagtccggacgagcgttaccgctacaaaaaggagtacgagtcgttcaagctgtccgtcgcttttgtcattctcgcagtgtttttcgtcgtcatttggctgcctccgactctacgcccattggacgccctttgcaactttctgttggtttggtactactgcactttgaccattcgcgagtccattcttcgcctgaacgggtcgcgcatcaaaggatggtgggtgttgcaccattacatcacctgcgttctgtgctgcatcactttgacgtggagcggcggcgactgctacgagcacatgcgtccgacctttgttgtgctcgtgtgctatgtgagcagtgtgcagataatccagtacaaataccaaacgggctgtttgcgcagactccatgccttgggacagcgtcactcaatggacattaccgttgaaggtttcagcaattggatgttcaaaggattgacatttcttatgccctttctgatcatcggatattttctc

SEQ ID NO: 90544 - DNA, 532 bp, Heterodera glycines
taccctaaaaaaaataaaaaaacaaatttctaaagacttctcttggtattataaaaaaaaataatttttaattttttaataaattattaaaaaaaataaaaaaaaaaaataaaaaaaaacattcatcctcgaatccattaaaaaaactaattaatttgctaccttagaccaatcacgctaaaggtgcctttaaaattaataatcaagaggcagtttaaaaaaattaaaaaaaaaattaccaattattctaaaaaaaaactttaagaaaaaaaaaattaataaaaaaaattagaaaaataaaaaaaattaaaaaaaataataatagaaaaattttttttttcttaataaattaaaaaaaaaataaaaaaaattaaaaaaaaataaaaaaaaaaactttaaactttcaaaacattttttcaaaaataaaaaaaattttctattataattttaacttataattttaaaaattttttaattttaaatttaaattataattaattaaaaataaaaaacttaccctgaaatacaaaac

SEQ ID NO: 90545 - DNA, 526 bp, Heterodera glycines
ctgcgcggtggttacgtccagtttgacaacattgacccgacggtgtacgtccatttcaagaaaatgatctccgccaaactgtgctccaccgtcctgggacaggtggccatggactgtgtggttgaccatccgaagccgggcgacccgtcctacgaccagtggcttaaggaaaaaaacggctgtgctcgactcgttgcacaagcgtgcacagctggtcaccaaggcgtacaaccaagtggagggtgtgcactgtcaacaggtgcagggcgccatgtatgcatttccacgctttttgctgcccgacaaagcaattgcggaggcaaaggccagcggagtgcagcccgactttttctacgtgaagcagctgcttgaggaaactggggtttgtgtcgtgcccggctccgggtttggccagcgtcctggcactttccatttccgcaccaccattttgccgcccattgacattttcgaggacatgctcaaccgtttcggcgccttccacaaacgctttttggccaagtacaaa

SEQ ID NO: 90546 - DNA, 539 bp, Heterodera glycines
gaggaaaatcaacgaaaatagtgaactccactcgaagttattcgacgttgaaaggcgttttgacgaagctgtgacggcattcactcgtcggattgatgaattggagaaggaaaatgacgccctgaaaagtctcgtttccattccattcgatgccgaacagcgaaaagaatttggcgaatcggaaaacactgccccggggcaaacacttcagcagacggaggcaaattcggaggagaaaaatgcgccgtcggcggttgtgccgaagaccgactcggccgatgaccttttgggctgttcctctgcttttgcgaatgaatccgccgatttatgcagcagaaaaccatcggcaattgcaaaagacgaagcggtggaggaaatggcagccgaaaaatattccacggagagaattgccaccctcggagaatcgctgcggcacgcaaaaggacgtgcgacctattacaagcaggaatgtgaggaattgctcagaaaggcaatctgtgaccagcagcgcatcgaagcattggagcagaacattttcg

SEQ ID NO: 90547 - DNA, 547 bp, Heterodera glycines
taaattctttctttttaaaaatgctttccgctgctttttttatgcctttgtttttcattgccattggccaattcctccaaatttctgatgccattgactgtttttcttgcgcatcgccggcacttcacaaccaatgggaggcaactggacttcccgaaattccgccgcccgaccgtttcgcgttccacgcgtgcgatgggacgggcactgactataaaccgtgtgccgatgtttgcatggaaatgcttgttgctgctggcaatgagtacggtgttgtgcgcgggtgcatgtccgacttttaccatggtcaaacaacgtcgacaaacactgacaagtgttactttggtggatacccacacaatgtgaccatttacgacccaaccaatggtgccaagacgtacagtcagctgtacgtgggcgtgcgctactgctccaccgtgaatggcgcgtgcaacaacaaattcatgccaaagaaagaagcggccgaaggaagcgggcttttgccgaaacattttgtcgtcagacccaacaaatgccaacaacggct

SEQ ID NO: 90548 - DNA, 519 bp, Heterodera glycines
atataattatcaaaaatgaaactattctcaatgtttcttctcctgactttggcattcgccgcttttgctgagagcagcagcagtagcagcagcgaatcgtccgaatcatcggaggaatgttcttcagaagaaggcaatcccggcacagaaccggagacgacaactgttgttgattcagacgaaaattgcaacgcgacatcagatagtccaaacgacgagtcatctcctgtgccatcgtcggacagtccaaatgacgagtcatctcctgtgccatcgtcggacagtccaaatgacgagtcatcgcctgtgccatcgtcggacagtccaaatgatgagtcatcgcctgtgccatcgtcggacagtccaaatgatgagtcatcgcctgtgccatcgtcagacagtccaaatgacgagtcatcgtctgtgccatcgtcggacagtccaaatgatgagtcatcgcctgtgccatcgtcagacagtccaaatgacgagtcatcgtctgcgccatcgtcggacagt

SEQ ID NO: 90549 - DNA, 500 bp, Heterodera glycines
  unsure (1)..(500): unsure at all n locations
tagattaaccccctcctcgtttggctatgatgatgatgatctgttcgacattggcactgctcagtccgttgcagtcaccggcattttgacgtgcaacggacggccaagtggcggcacaaaagtgaaactgtacgacgtggacacttttgacccggacgatttgatggccgaaggctttacggacgaaaagggacactttctgctggagggattcgaaatggaaataagcgacatcgacccaaagctgaacatttaccataattgtaacgacgaacactttccatgtctgcagaagttctccattgaggtccccgacaattacataaccgaaggaaaacgaccacaaaagatttttgacattgggaaattgaatttggaaggcaaattctcgggccaacatcgagattgtattaattaatcggacattttgttgaatcccatttaatttataaatttatcaaatacaaattaaattttgaaaaanaaaaaaaaaaaaaaaa

SEQ ID NO: 90550 - DNA, 492 bp, Heterodera glycines
tcactgtcgcccaaagttggcacttttgtttgcgggaagaaatgctcaaaaataaggttggcccgttttcttctcaaatggtgtactgcttgaagttgttgctgctgcgcgctttctgagtcctgccggatgccaaactccgcgtcaaagtcgggaaatttagggaatatgggcttcgccgttgccattggccgatggttttctgccccgctgggccgaccgacctgatcctctgtttccgcttgcctccttgggccaattgcggtggggccaaataacggaagcaaatgtgcgtgctgttgctgacgttgaactcgttgcagcactgcacttcgccatcggaaggagcctgccaaaaaatgttcatcgaattactcaattcgctcgcaaatggcaccaaagattggcacacgaaacgccttttgattctaatgaatgcatttcatcatccccaaaaaaattctacaaatagaaattactcccaaaaaattc

SEQ ID NO: 90551 - DNA, 474 bp, Heterodera glycines
caaatcacgtgatggatgtctcggtcataaactattgccctaaaaatgcgacgactatcgtattagcacataatccaagtgccgccaggaaaatttttgagttttcgcaatcaaatgaccatcctgttgatttgattttgtcaggacacactcacaatgcccagtatttggttctgatgcctttcgcttacttcatcctcccttatctctatggcctctatgtgttgtcggatggcgcgactaaattatttgtttcggccggcactctcttccaaaatgcgccgatgaaaattccgtttatgtcggaaatttggtctattgaaattgaacccagaaaacaatgatagatctctattttgcgaaatttacttcaaattagtttattttacaattcggtaaaaatgtatcaaatttatatttatttttttatctcattatcaatgtaaagaaatatgcaaataaacatgaattata

SEQ ID NO: 90552 - DNA, 547 bp, Heterodera glycines
taacctatgcgtttggactcagcgacaattatcaggtcacgtttcagatcaaacatgtgaagttgtggtaatgcttctcgttctttccgtcaacctgtcaagcgaaagcaaataaaatattgtaaaattgggtagcgccgatgcatatattgaaattcattaaaaatccaattattaaatttgtccatcaaaattttggcgaaacaatataagccctgaattttacacattttcctgtggcggtatcaattttaacaattgcaaaatctgatgctcgacgttcatttttattttcctaactctttattaattctattttcttctctctcactctcttgctttctctctctctcctctcacttctttctcgttgatctcagtctttctctttctctttgtttttattttgtttcggcataatatttcggattgagcacgagaaacggcagcagcctcatgttgaaggagaaaagaccaagaaaaaggatggttgttccgaggcgattgtgcatcaggaaattacatcactcactggagtgcaggtgac

SEQ ID NO: 90553 - DNA, 1048 bp, Heterodera glycines
caaaaaagccttattgtactccggattactaatttatggaaaacgatcaacaacaatctccggaagaccaaatttcagcggaagcggcaatcaatttgttggccgttaccaccactcaccagcacatttttgggggcagaaatggtgcactttttgtggaaatacggcgaattgcggagcaacaactggaacacgcgttggcaccagtcgatgttgctggcggaaaatgggagctgtttgtgaaggacggcgaactgcgcatgtacagccgcgagttggaagtggagaatggcattgcggctgacccgttgaaagcgcttcatgtcattgatggtgtgtcggctcacgaattcatcgacctgttctttcgacctgaactcaaaaaggaatgggatgatactcttgaactgggtaaagttgtggagactctttcgccgcacactgccgtcatccatcaaatccatcgccgggtttggcctgccgcacaacgcgagtcacttttttggtcccaacggttgaatgtgttgtcggaatgcagctctgtgactgaccatgtgccgggtgaacttcttggcgcttggatggtatgcaaccaatcggtggaacgcgacgatgttccgctttccgacccatccgcggtccgtgtccgtctcacaattgcgatgttatgccgcacagtgttgaagcccggggcggacagaacgaagccccgtgaacaaatcacacgggaggacatccgttgcaaaatcacttatgtggcacaaattcacccgggcggttgggtgcccaaaattgggattcgtcaaatctacaagcgtgaatatcccaaatttctgcgctccttcagcaaatatgtgctggacaaagcgaacggtacggcattggcacttccgttgtgaatggacaaatgattttgatggcattgtgtaaacagtcaaattatgccaacccgagaaaaagtactgaattccatttcaaatttctgtgccttctttatctcgcttattcgttttcattttatattgcttttgatgtaaaaataattttt

SEQ ID NO: 90554 - DNA, 782 bp, Heterodera glycines
cgtaatcacgcggtggcggcatccttttcatcgattacgacattcatttaccgtagcaatttatgtcaatgaactcgctgaatatgggcaaagaagtggccaaacggtggatgggcatcaacaacagaagaatggcgcccttttccctttcgcccgtcgaccgaatgcgtcaaagtgtgttccgagttcgaagtcgtcttgcggtcaatttgttgtcggaagggttggccacctttctgctgctgctggtcggcaatggcattggggcacaacacattttgggaggggggaagctggacaattacatgcaggtgtgcttcggctggggcatgctaatcgctcttttggtgttcgccacttaccacacatccggtggccatttgaacccggccgtgtccctcgccttcgttagccttggcaaattgccattcgcccattttttgctgtattccctcgtccaaactgtcggcgccttttttggctccgccctttgcttacacatctacagagaatccttcgagaaattcgacgcgggcattcgaacggtgggagggcccagcggaacagacacaattatctgttccttcccggacgaacacatcggacatttaccagcttttgtggatgaaattgtcgggactgggctgctcctcctttttgccatgcgctgatcggtcccgcgaatcaaccgccaaaatgggtgcctccgatccggtttggggttgcaatcgttccgacaactccctccttcggctgaatgccgccctctccgaacaatgggg

SEQ ID NO: 90555 - DNA, 816 bp, Heterodera glycines
gtaattctacgtgtgtggttttttatgaatttaacctcactcatttgcttctttgactttttgccctgaaaaaatgagtcaaatttaaaagttgttttcggtcaatcatgatgagatacctatatatgaaattatgctcaaaagcaacattctttgtgttgaagtttttaaagttaaattttgttgccgaatggacattggcaactgttgcatttgcctgggcgggttcggcgttgcacagatgggcgtgctgccgtgcctgcacactttccaccactcatgcattcagcgcgcactgggccaaaatgcgcagtgtccgctttgccgtcggcacgccatcgacacgcaaattgtgagaccgaaatacgaaggaagctgccgcgaggcgggcgatttgccaagaaaggccatgcgtgccgcgttagctttttacgaccgcaccgttcgccaccgcttcgccgatggttcgtcgggaggcgaagcacagcgcgaggaattgaaactttgtctcaattcattggtcagcactttggagagcgctgacgcggagagagaggcgaaatgggaacggctgaagcaatttttgagggtgtgcggaacggccgcaatttttgccgttttggcatttctgttcactttgtattggccgttgatctcttctctggcggttggcgttgtgcgcaccgtttggactctgatcagttctctgcgcgatctgttggtcgcccattggcccgatttgctcttcggcggtttgctcctcagcactttcgtcgacatggaatcctccgactcgcagcaacagcaggcggaaac

SEQ ID NO: 90556 - DNA, 485 bp, Heterodera glycines
tgagacaggttagttttaccctactgatgacctcaccgcaatggtaattgagcttagtacgagaggaaccgctcattcacataattggtttttgcggctgtccgaccgggcagtgccgcgaagctaccatgtgctggataatggctgaacgcctctaagtcagaatccatgccagaacgcggtgataccacccgcacgtatagatggactttttggaggctgttaaggacaagtttaacaaactgctcactgcttgaagaacaaattgggaaccatttacggcaatctcttatttaattcgatatttttttttgaacattttccgtctcataatcagattttgtccgttttgtctgttccttgcccatttctcatcaatttattgtgcattattcgtttgtcgttctaacattttttaaacatacgagattcttcgttttcaaaattaaaatttattttaaaaagcataaataaatgaatgctaa

SEQ ID NO: 90557 - DNA, 555 bp, Heterodera glycines
catactcagccgaatgaattgccgcaactgtcgccgcaggacataacaatgcattcgaaaatcattcaccagaaccagtgggatggtgagaggagtgtgatcatcacctgcagttttacgcctggctctgtctctctgacttcttaccgtctgacgcctagcggctatgaatgggggcgaaataacactgacaaaggcaataaccctaaaggttatttgccgtcccattacgaaaaagtgcaaatgcttctttccgaccgctttttgggctactttatggttccgtcggcgggtgtttggaattacaatttcatgggtgttcgacatgatgcaaatatgcagtatgatgtttgtttatcggctccaaaggagttttaccatgaggatcatcgcccacttcatttccacaatttcaatgtgttcgaagatccactcggtgtatccacagccgacagagaggatatatttgagtgaataatcaaagatggatgggactgacaatcagtgtgacaactgtcatatttattttcattctttgcagtttgtaccaccatt

SEQ ID NO: 90558 - DNA, 688 bp, Heterodera glycines
caaagagccacggccattgtcaaaggtccgcgggagggcgcggcacagcgcaaacactcgcggcatttgcttttcactctcggaaatattcactttcctttccaatcgcttgtctcatttcgattcaaagtttctttttgggatgaaattgctgaaatccctcccttaatttaaagaaagagtcggtactgaaaaagacattttcagttgaagcgggcgacagtttgaccaatgccattctgggcattttgccccaacaatcggccgacaacgccgaggctgacagcactgggaacggaccaatgcattcagcggaacatcaccagcacgagacggaccagcaacagcagatgatctcttcagggacgggtgccgcgtcggtggaaggaaatgccatcgccgcgggggttcggcgccattctctgctgggaccgattccaatacgttcacagcaacagcaatccgtcgaaggccaacagtcgaccattggccagccgatggtgcgcaatttgccacctgcgactgttcgcactgcgaattttgcgcaaaatcatccgcaatcgctcgtcaattcgcagcatccgaccgtggccaacaattgccattccgagcagcacttcgccggtcgcaagaggcgggcattccctcccgccgccgcagtcgtcggcactgccgctgaacggcttct

SEQ ID NO: 90559 - DNA, 669 bp, Heterodera glycines
tccaattccgtccccaaaacgatgggtttttctcggaagatgaacagcaaaaatgggtcaaagaacatattggagaggctgagataatttacacgatgggaccaataaaagtggacgcatcgcttttggtagttgccaaagcgttaaaagcagtggtgaccatatctgcgggccatgaaaacatcgacaccgtggaatgtgccagaaggggcatccgaatgggctttggcggtgccattctcactgaagcaactgccgaaacggcgatggcacttttacttacggtttcacgccgccttgtcgaagcagtacaaatagccaaagaaggaaaatggccgaacaattggtcaccaaagttttgtgttgggaaagcattggaagggtcgacggttggtatttttggaatggggcgcattggacgaagcattgccgataaactaagcgcatttcgcccgcttgaaatcatttatcacaaccgtaaagccaattctgaatatggtcggattgatggaagattaaacgattttgctaattaaatgaattatgttaattaatcagagggtcgcttccgttatgtgccatttgaagaactcatcgaaagaagcgactttttgattctgtcggcgagtgtcaatgatcagacgaagggactgttcgacaaagaaaagt

SEQ ID NO: 90560 - DNA, 519 bp, Heterodera glycines
  unsure (1)..(519): unsure at all n locations
cccatcattttaaaatattccccaaaatgcgtgttctcccccttctcttttctgccctcctcctcctctctgttggcctttgctttgcccagtttgatcagtctccgtccgctgctctgaatcatgtgcgggccaaaagaggctacaagccgtggaagaagcaatccttctcctcttcttcaagcgaaatgtacagaaggagaagacccagtggtaacggtcattacagggattacaacggctacggtagcaatggatactatcgacgaaaacccggcattttagaacgggcgctgggaaaaattacgcggagctattaacggacgagcagaagaagagaagcaaaaagccaaacaatgggcgtaacacttttaattgatcaaacgatattacagtatccaacaccaaaattacagtaaccaaacatccaatggaacgaatgactcatttaattcagcaaatttgctggaattgccgataaagaaacttagcaataaanaaaaaaaaaaaaaaaaaaaa

SEQ ID NO: 90561 - DNA, 537 bp, Heterodera glycines
accgtggcaccggcacaatgttcggcgccggtccgccatccgcccaaccgtcggacattgttaaatttcccactgtgactgttgttgaggcggcaaagaatgaacacgacgatgctgtggagccaattcccacctcgttgggcactgaacagccggcggcaccacccgctcagcccacgccagctgcggcaacacctcaagttcaagcagcgggtgcagctgtggctccctcccaaactgagcaccagcaggagaagaaggagcagtccgccgatgagttggttgaggtggacgcaccgccgcagccgattgtgccacaacagaacaatcagccggcgcaaccacagcaacaacagccgcagcagcagcaacaggaggagatgaccaagacggagcaggaacaaccgcagctgaaccagcaacagcagccatccccgcccggcatttcgccattccaacagaaatggttcccggaagtgccgtccgtgtttctccaggttgatgacccaaacggtggcaacgccggtggcactgacg

SEQ ID NO: 90562 - DNA, 953 bp, Heterodera glycines
aaaagataagcacaaagagttaaccagcagaggaacaagaactcatggtaaataaaaataaaggaatcaaaaaattatatagctatctaactataaataggaaaatttaaatggaatacaaattaattaatttttgacagtaatccggtggcctttccgccgctaacgtctctaccgtttgccataataatcgtagttcccttcaaggaatttcctacttcaactttcccaatgtatcattaccaatatcgcatcatagtaattggtgattcgactgtcggaaaaagcagcttacttcgttatttcactgaaggcaaaaatgctgaaataagtgatccgacagttggagttgatttttacgctcgaatgattgagatcaaaccaaattatcgcatcaaattgcaactatgggacacagccgggcaggaaaagtttcgttcgataacaaggtcgtattatcgaaattccgtcggagttattgtcgtctacgatatcacgaacagacgcacttttgagcatgttgttgattggatgactgaagcagaggcaaatttaggagggcctgaccctgcgcaattggtttttttactggtcggacacaaagcagacttagaggagcagcgcgaggttctctacgaggagggcgaatactttgcaaagcacagacgaattaaattcattgaaacatcggctctgacgggagaaaatgttaatgaggcatttttgattgtatcgcgggagatcaacgccagattcgaaactggtgcactgcgcatatgcgacggttgggatggaatcaaaagtggactgttgcggacgcaatccatcactctatcagacattcaagagacaacgaaagaaaattctcagtgttattgctgataaaaaagttgccttcatttttacacttaaaccgctggcaatgtacaaacagcataaaacttattcctttt

SEQ ID NO: 90563 - DNA, 511 bp, Heterodera glycines
acggggacaacgacggacggagggggaggaggaacaacgacaatcagttcagaagcggaagagggagggacagcaccagcggagacggagacggaactgtacgacgcagaattggtggaacggaaagtcagagagatcgaaggcaaatggaaggtggaggtggagaagtcggaaaacgaaaacaaggagaagctgaagcggacgacgtggaaatggaaggggggcaaatccacggggacaacgacggacggagggggaggaggaacaacgacaatcagttcagaagcggaagagggagggacagcaccagcggagacggagacggaactgtacgacgcagaattggtggaacggaaagtcagagagatcgaaggcaaatggaaggtggaggtggagaagttggaaaacgaaaaggaaatattggaaagaaatatacgcgaattggaggaaaagcttgcccaaatggacagaggcgatcaaagggcaaaggaagagattgaggacaccaaaa

SEQ ID NO: 90564 - DNA, 620 bp, Heterodera glycines
gtggcattttccacaatgctaaaaagacctttttggtgtgggttaatgaagaggaccatttgcgcattatctccatgcagaaagggggcgatgttggcaacgttttgaaacgattgatccgcggtgtgaaaggtatcgagaagcaagttccatttgcgcgtgatgatcgactcggctatctgacgttttgcccctccaatctgggcacgaccatccgtgctagtgtgcacatccgtttgcctaaaataagcgcaaagcctgaattcaaaaagatctgcgaggacctcaagttgcaagttcgcggcattcacggagaacactcggaaagtgaaggcggggtttacgacgtgtcgaacaaggctcggcttggacttaccgaatttgaggcggtcaagcaaatgtatgacggtgttaagaaactcattgaacttgagaaggcgtcgaagtgaatgaattaaatatctatatccatttgacgcctcgtaattgcattgctttaatcacaatattgtatttttgtataggtctatagggtcagaaaatgtattgcattatgaaattgtatggacaagtaaaatggttaattgactaaaaaaaaaaaaaaaaaaaaaaaaaaaaaa

SEQ ID NO: 90565 - DNA, 338 bp, Heterodera glycines
  unsure (1)..(338): unsure at all n locations
ggggaagggaaatgtcggaaaaagcgaaggacaaaaggacgacgtatccctcgccattctcacaaaacaactcattcattctgctgaatacgtgtatcatctgtcccctgtcccccctcccttttttgacttttccattcgtcgctttgtctttttttcgttttttaattttgacttttccgctttttgttttccttacttttcgcccatttttcagcttcgcattttctcgaattcgttcgcaaattttgtttgttttttcaccaatctgcatgcactttctgtcaatctcttgccggaagcaaataaataataaaatttgtcgatannaaaaaaaa

SEQ ID NO: 90566 - DNA, 387 bp, Heterodera glycines
  unsure (1)..(387): unsure at all n locations
ccgtgaaagtgatcagctgaaacagcattctcagctgaaggaactgatcggacaaaatcattgaattgcgaaattggccactctttcgttattttgatatttcattttttttacctttggccattctcagaaaatacccaaaatttaattgatttaatcaaaaagtaaaattaaaaactaaaataaaaaaaaacaattctttcattgtttttcctcaaaatgtttttaattaattctttgctaaatgttcctattcaatcaattcttcctcctcaaaaatgtttaccttttctcacaattttgatcactttttcgataaaagcgaagtttggttaaannnnaanaaaaaaaaaaaaaaaaaaaaaaaaaaaaaaaaaaaaaaaaaaa

SEQ ID NO: 90567 - DNA, 434 bp, Heterodera glycines
attaaaaaaagtaaatcctctttaaaaatgaaactttcaataattttattgctttccttggccttttgtgcgttaatcatcgatgcatatccatcgggaaatggtaaagatcttgaagctgacaacgaaaaaacggaagtgaaggaagagaagatggaaaaaagagaagcggaagtggaggaagggaagaaggaaaagaaagcagcagaagaggaggtagggaacaaggaaaagagagacacggaggaggaaatgacagcagcggcggaggtgatgattagaagccatagctaaaaagaagaagcataatatggaactaagaaaagaacgagcacacaatgcttttagtcgcttattttttgctgcatttaaaatgttaaattttaaaaataaaaataaatttttttgaattttcaaaaaaaagaaaaaaaaaa

SEQ ID NO: 90568 - DNA, 552 bp, Heterodera glycines
aaaaataattgttcagccaaaagccctaaaatgagtacacgtgaagaaattcaagcagtttgtgtgcagtccttaaaacagttgaaaatcggtgtgggtgaagaggagttgcagaatgggaaggacttttacaaattttttttcaccaactatccaacccttcgcgtgtattttaagggagcagaaaaatacgaagcggaggatgtgcaaaagtcggaacgttttgaaaaacaaggacaacgtattcttgttgccatgcatttgattgccaatgtctacagcaatgagatgcttttcaatgcgtatgtgcgcgagaccgtgaatcgtcatcgccagttcaaaatggagccatcattatggaaggcattttggacagtttggaccggctttctggaaacaaaagttgatctgacggaacaggccaagtcggcctggatgtcattgggtgaggattttgccaaggaagcgcttgcacatttgaaacgccttggcatcccgcattgattcaacaaattaatgaactccgaataatgtcccaccaattattaaaca

SEQ ID NO: 90569 - DNA, 579 bp, Heterodera glycines
gacgagtgctgcgagcagtgtgttcaacgacgcgtcctccgtcagcagcggagggattgtcgagcgtttgtggggcgacacggagactcccgaagagggggccgggacttcgtcgccagagactttggcgacgatggcgatggaattccgcagagacattgtcatgggtgccattgttcgtctgatacttcgcgctttttgcgattttgtgcgtgtgcagaaattttcacgacacggttttgagcagctccaagttgactttgcttatgtccgtcaaaagctttggtatttcgtggccgatgagcacatgttgaacacgtgcattgaggacattgtcacggctgcggtgaaccaatgtgcccagcccaaattgttggatccatcggtagttaggagaatttgtgaagaaatgcagtgatctatttgtatgtacaattaaaattaaattaattaattgttcactttgttttttattttgcttacattaaagttgacaaggatttaaaaaaaaaaaaaaaaaaaaaaaaaaaaaaaaaaaaaaaaaaagaaaaaaaaaaaaaaaaaaaaaaaaaaaaaaag

SEQ ID NO: 90570 - DNA, 199 bp, Heterodera glycines
caaatgcaaaataacacaaacatcaaatagaaataactaactcatggtcctttcttttttaatataattttaatgccttttcattttgcaagtattttcctgtgataaattttttatgttcgaaaaaaaaaaaaaaaaaaaaaaaaaaaaaaaaaaaaaaaaaataaaaaaaaaaaaaaaaaaaaaaaaaaattaaaaa

SEQ ID NO: 90571 - DNA, 203 bp, Heterodera glycines
  unsure (1)..(203): unsure at all n locations
gcgccgacaaaacattttgatgatgcaacttaggaaaatcagcagacaaaaccgggaaatgagggaggtcattgcgaaataccagcagattcccaacctcttgcaagcaataaagtcagtattttatttaccaacaaatttcataaacaaatttaaaattaaaataatttaaattcntaaaaaaaaaaaaaaaaaaaaaaaaa

SEQ ID NO: 90572 - DNA, 831 bp, Heterodera glycines
tgactcgcccctacaaggaattcctcgttcacggacaataattgcaatgtccgatcccaatcacggcaaattttcaccggtttaccaacccctttcggggaaggacaagcacgctgattttgccagtgtagcgcgcgtgcagccccggacatctaagggcatcacagacctgttattgctcaatttcgtgcggctgaacaccgaaaatccctctaagaagttgtgcccacagaagcaatgagccaactatttagtaggctatgagtctcgctcgccattttttattctgccgttttttctgcaattggtgcgccagtcgaaccgagcacaaaagaaagggaaaagcatggtgttgctgctcactatttgaaggcggaagatgaaaaattggaaaagattaaacaaatgttggaagaacaatcgccaaaaatgtcgcccaagggaaaacaaatcgccacaaaatttgttgaaattttgctcaacaaaaaattgacatacgaagaatttcggaaggaaattttaaaacttgacaacgaaacggacgcgaaaacgaacgacgaatttgcaaaatcggaatttgcaaagcaaatgagtttaattgagaaacacagttaaaaatgatgaaaatgaattcaaaatcattaaatgtttatttaaaatttcattgtgattattagaagtccgggaaaattaaaaatattcgttaattttcataattttaatttggcatttacactgttgattgacctcagctcgactttacattatacaatattttaatccatgttcaatgtgcttacccattcatcatagattaccgtaatttgaaaa

SEQ ID NO: 90573 - DNA, 948 bp, Heterodera glycines
atgaattttttgattttaaattatttttcattgggtattaatttcaaaatattcaaaatggatttaaatttattcatttaaacattttttaatctgctggtaaagtccctgaaaaagatacatttagtgtggaattttagaaataaaaactgtgagaaatgagaaatgattaaatttaagaaaaataaattcttgaaaatttattttaaatttttggttccattttttgggattttttttattgtcaaggaattccgtgtttttcgtgcctagcctggacctgaattttttcatatttgacctgggcctgcatttcctggataaacatacaagtccagtaaaatccaaattcaagcattgcattttattttactaaaattttttaaaatttagcctttcaaagcattcaaatgggctgttatagctgcgttgacaaatggatgtgttgttgcggctttcacatgacagccgctgcactggtaattgcatggatttggctaatttctgccatctctatggtgccatccgtgttaatttcaatatattatcaagcatttaattggtttgcctttgtttcgatgattttgttattcgctcaaagtgttccaataattgagggcgaaatgagtggcaaaagaacacatcaaatgtacttgccattcttggtcattagttgtatccaattggcattcacaatgattggaggagttgtgatgttctttacgctggaccaaatgcgtcaacaaatgggcgggtattcaactggaataattctcggctatttgtttggacttctgttgccgctgttcattttcttctggtgctactccatcgtttttcgagcctacaaatttgtgaaggaaaaaaatgacgagaaaaaccggcacaacgccaagaaggacattcaaatttgatggtgtagagaatttgttaattaaatgttttcta

SEQ ID NO: 90574 - DNA, 862 bp, Heterodera glycines
atcacaacatttggtgcaacaatttgaccaaacgatgttaagcgaaaccgtgaaaatcggatttatcggagccgggaaaatggcacaggcattggcgagaggacttatcaattcggggcgttatccagcagagaatttgatggcgagttgtccaaagacagatgagtcactattggagcaatgcaaaaaattggggattggaacgacgagtgacaacacgagaatcgctcgagagaatgacgtcatcattttggcggtcaaaccgatgaatattagcaaagtgacgtccgaaattgcacccaatttccgaagggagcatttgctaatttcaattgccttagggattacacttcgctacatcgaacaacttttgccttcaaagtcccgcgttgttcgcgtgatgccgaatacccccgccgttgtcggggccggtgcctcggcttattccatgggctcggcgtgccaagatggcgactcaaaagtggtccaagatttgttctccaccgttggatattctgttgaggtgcccgaaattcacttggacccaatcaccggattaagcggcagcggaccatcttatggcttttcaatgatcgaagggttggcggacggaggcgtaaaaatgggccttccgcgagaattgtccttaaagttggccgccatgtctctctacggcgctgcgaaaatgtttctcgagacgggggagcacccggccgtcctcaaagaggcggtgcagagcccgggtgggtcgaccagtgtcgacatccacgaattggagaagggcggcatgcgcgggttgctgatcaacgcggtggaggcggcctctgagcgctcccggcgaacgggcgaagcggcgctgccc

SEQ ID NO: 90575 - DNA, 667 bp, Heterodera glycines
tcaaacatatttcacgcgttgcccgaatggcaaaggaggaattcggtttcgagcaggttttggtttggaatgacatgttcgagaaaatccctgttgcgctgctggaggaatataaactcggctctctgattgtccccgttgtttgggggtataagactgacgtggctcggccagggtatttccccgacggactttttgaacgtttcagccaagtttttgacaacatttattttgccggtgccttcaaaggcgccgacggaatttcccaacaattcgtgcacattgagcgatacatgcaaaatttgcgttcttaccaaaagctttaccatcagaatgaaatgtatttgaaagaccgcttgactgggcttattttgacgggatggcaaaggtattcccacactacgcctttgtgtgaacttctccccgccggcattccatcgttggcacggcaagcgatttttgtttcgcaatggatgaacaaaagagaagaacggaccgaccaattcatgcaggagtttctgaactgttccggacgtcactcgacttcggccaccaaatttgtccgcaaaggattcacttttccattcgtctttgaattcaaattctgcgattgtcaattccccgggtgttgaactttacagtgagattgaagaactgaatttgttgc

SEQ ID NO: 90576 - DNA, 513 bp, Heterodera glycines
cttcagctcacttacttcaggaaccaaggttctttttcgctgacttacgaggcgtccatcacgcgtttattccgtgagggtcgcacggaaacgattcgctcgtgtactaacgaatcgtgtgattttgtcagggcgatgttggacccccagcagaagaatgaggaacgtttgcgcttacttcgactcgcggcagaacgccaccagaatttgacacgggatgcgatgtgtgggaagggcgtggacaggcatcttttcgccttgtacgttgtcatgcgccatttggaagagagttcaccgttcttcgacaagattttcccgcctcaatatttgctgtcaacttcacaaaccccactcaaccaattcgattccgagcaggaaggcatttccatggcacagaaattgaagctggtgagtgctggcggcggtcatggccgttatttaacagtcgcggcgatgttccgcgggcgaatgtcaatgcgcgaagtggacgatcaaatgatgtcggtgcagaac

SEQ ID NO: 90577 - DNA, 409 bp, Heterodera glycines
ttaatcaactgttgttgtattggtaattgacccctctccgcccccgtccccttaagagaggtcagcggcaacaagaagtgcacttgcactaaaaattgctaatcaattgtttgcggtgtttttaaaaaaatgagcagcggtgccgatagaatttttcgacatatcgttaatcgattttcaccaaaaattgctattttatgggcgttcgcaaaaatttcgcgttattttttggaatttttgtgagattggatgtggaggggtatcaacaacaacaaaaaaaccgagatttttagctgctatttctctttaaaatttcaagtgcggataggtcttggggttgatagtcttgttggtctaactaacaatgaatgttatgggaaagtcaaaacgggtggaaaggcacattttt

SEQ ID NO: 90578 - DNA, 745 bp, Heterodera glycines
ccaggttcctttgctttccctctccatttgcaattccacttgcaatgagcagtttgcccaatttgaaccatttgcacgtgtcggatgcctatcggtcgtcaactttgtacaaataccgaagagattgggatttgttggactcggccatctccgaccattctcatcgtggtcccggcttccattgggtggatcgtcgctttcgagcccgtcgctttatgaacaccgacccaattcccgactcgctcgggttggactaccccaacttctggtcccgttacaaatggtactccgactatttggagccgcgtcattggcgtcgtcatcgagacccaaattatgaccgtcccctttggaactcgtggaaaccgtacattttggacggaaagaatcagaagcaagccatcgacatgtaccggcaaggactcgtctcttttgcctatttggacaagaattggataacaccgtgggcgttgggtcggaaggaaaaagactgggccgacatttacccaccggccggaaagtacggctcacgccggtacatgtactcatgggcatgaacaaaggcggaaaacgggcagaaagaacggatggacggattgagaagagaagtggcgtcggaaaaagggaccgatcggaggaaaatttggcaaagtgatcactgatcagtcagccattctttggacgatgtgacaaaatgtagacagacacaagtggtgattaagtgactaaccatatttacccgtcg

SEQ ID NO: 90579 - DNA, 492 bp, Heterodera glycines
gttgtaaaattttgttaaataccacgagggttggcaaaaatctggatataaaatcgcaaaaatgtggccataaaatcctttaaatttaaaaccaagataaaaactatttttttatttcgtgcctttcacaccctcccagtgtccaggaaaaaaataatggattgctgccatataattaattgccaaccatataaatcacatttttttaaagaggaaatggaccgcgacgatgataagacagtggaacgcgcggtccgcgagtcaccaatcgttgtttcggaatccagcgccacggatggtaaaattttcaaatcttttaaatttttgaaaattttcaaaaattatacaaaaaatgtttgaaaatttctaacattaattttatacaaacagaggatgattctgctgccgtttcggcttacaacaaaaacaaccgcccggcaagttttactgaaatttatggaaatgaactgaaaggcataaaattgcaattca

SEQ ID NO: 90580 - DNA, 574 bp, Heterodera glycines
gtttaatggataatagcgttgcttcgtctgctggagattcgccgtatgatacgccgctcgaaccatttttggtcaacgggccgatgagtctttctcagttcgtccaaacaatggaggaccatcataagcagtgtgttcgtaagctgtatgctggaaaacaccgtggctatctgctaatgcctgtcgaactccctaatccaaatgatccaaatggggatcgttttagtggccaggggcatgttttgatggaggatttggtgtggcaactgagaggcaaaacacgcaacgcaacccatgggattattatgttctacgtaatcagaaatttataacctttactttatgaaattgtatccaaggtgcaatacgcgaattggacgctgtataacgtcaaatataacttttagtggattcatagtgcgatccggtcgatgaacaacactccaattgctgatggctgagtaaaagtgtattttctcaaattaacatcgaatgttattaaatccccaaattatgttttttgcgcttttattattgatcattttcaatatgcaaataaagtgtgagacgctga

SEQ ID NO: 90581 - DNA, 544 bp, Heterodera glycines
tactaattattttaataaaaataaacaatcgtttatttttaccgtcacccggcggtgatcgaggcgaatggatgatggaatgtgaccgactgctgcgcatcaatgccgtcgatgcgtctgagaaggaagcggcattcgcaggaaaacggctcacacgtctcatcaggccgcggatggaccagcgtcgccggctcttccgctgctccggcgtcgtcgcttccgcgagtggcgtcgtctcctcgtctttgcgcttcacaatgcgcgttggtccgaacggtgttgtgacggatggttgtacagtgatggtattgtacaatcgggaggaggtcgatacggtgcggatacggtatgatagtggtggtggtccgggagaggaggaataactaaaatatatactaattattttaataaaaataaacaatcgtttatttttaccgtcacccggcggtgatcgaggcgaatggatgatggaatgtgaccgactgctgcgcatcttccgtcgctgccgcttctccaaccaacgggcaaacagtgccgtacaaaa

SEQ ID NO: 90582 - DNA, 328 bp, Heterodera glycines
  unsure (1)..(328): unsure at all n locations
caaatcacttggcactgctccaccaacgacattggccatgtgtttgtgttggaagagcaaaccctttaaagcgaaagacgacaattgcattttaaaaagcgatgggcggagatcaaacggagacggccaaaattaattttcaattcccatttcaatgcattcattcatttctattttctttaatattttgcaacaaaagttcaaattagcaaaattgtttgcccattccttttcttctttttaatggcgtaatttattaattttcaaatatttatttttggccaaataataagcgatcgatggtttcaaaaaaaaaaaaaanaaaaaa

SEQ ID NO: 90583 - DNA, 552 bp, Heterodera glycines
tttgcattttcccctttaaatttcttatggtcctttcggatcgaatggctcttcgtattgtcaatgttttgctgttcgccgtcacttattttgcttggttttgtgcatttatcgcagcctttcacaattccaatgcttttttgagtgcttctcaaagtgattagtccgtccgttcgttgttcgatggctccgctggtcgtcgttcacactgaacctctcctcgaagaattccgtgctcccttttgttccgccgctaatttctggcgctttttgtcgatttttttctcgatttccttatcacttttgctatgttttgcaagccaggccagaaaaaatgaaatctctaaggattttaagcttttagggtctttggcgtcggtccaacacttttcttgagaagccaaatgtccaattcaatgaacacactttgttcacctttgaatcactctcacaaaatgagaaaaaaatatttttttggagtccaatggccaaagtgaatgaaaatgtgacagatcaatttgagttacttgtgccaataattgaaactattca

SEQ ID NO: 90584 - DNA, 468 bp, Heterodera glycines
ccgttcggtcccttttggcgttacgcaggcacacattttgtgggcgaagaatattttggggtgaagacgggcggattcgacacgcaaagggagacaatcagagaaaaatgggcgacggaattccccgcccattcttcgcctgtcctcgctttttcttctgcccccgccgcttttcccgtccgccccgaccaccgtttcatccagcgattcgtccagtggaatgatcgaattaagcaaaaagcgattgaatttgcctcccgcaactttggccacggaaaggcattcgttggcattcatttgagaaatggcagagattgggaaaatgtgtgccaatttctccgggaagaaaatgtaatgggaaaacgacaactgtttgccagtggccaatgcacggggccggaagaagagaatgggccattgacggcggacgcatgcgacccgtcgatggacatcattttggaggaggtc

SEQ ID NO: 90585 - DNA, 61 bp, Heterodera glycines
tttattattgtatttgcttagtgcgtaaaatgtagatataataaatttgaactgctaaaaa

SEQ ID NO: 90586 - DNA, 710 bp, Heterodera glycines
aaatttattatggctgccgctaaagctgggataacaaaatatgaattggcaagtagttttaatctttttttattaatcgaatttctaccaaatattttctcatttacaacttatttttaaagacaaaattatgtgtacgctgctactaaaagattttttaatgcttctggaaaatatttccgttttttcatattttaaataaattgtcatttcaatggagtgattattatccatttaccaaattaggaaaaacttttaatttgaataaatatttgtcccagttttgacaatagttggacaaaacatatttggcccatccccaatttccacaaaatccctaaattgccgtattcccacagatcgcgagagggcattttactttttacattactaattacaaaaaataccgtagtccattggaatttaaattattaattttcttagattggcgtctcatcactaagttttctcgccgtttttgtggcaattttgattttgcttgtacaaatgctttttcacaaagccaaaatgcaaacagaggaagctgaatgtgtgcacattgaccatcagttgcaacagaagaagaagaagaatgagagattttaaggaataaaaaaagcaaaaagaaaaaaattaataaaaaaaaattaaattaaaatttctctttgtacaatacatttttcggttattaaaatgtcgtgttttaaaaa

SEQ ID NO: 90587 - DNA, 406 bp, Heterodera glycines
actctccacttctatgcgtccagtcactttgttgatggacttggcaataagcttaagaccgccgtaaacaagggtaatcatatgatactgtatcgtccaaaaccattactgtttgcaaccgtactttaaggtcttccggtgttcgtcactgagtacggtacatgcgaagcgtctggcaacggtaatctgaactccggctcaatgtcaagctggttggagcctgttggaccaactgaaaatttcgtacgtcaattggtcaatcactgacaaaagcgaagcttgtgcagcgctcactggcggaacatcggctgccaatgttggcacttcctcccgctggacgcagtctggcaatatggtagcttcgcaacacaagaaaaaatccaccggtttgtctgaccaattaaac

SEQ ID NO: 90588 - DNA, 401 bp, Heterodera glycines
ctctcactaattgttgcacattccccaattttatttcttccttagtaagtagtattggtgcacaatgcgcacttttctgttcatagccgtagtcgggttgatgttggccgtcatcttggagaatgtaaatgcgactgggaaaaattcgccgtcaaagggaaaaccgtcgccagacagtacaaaccataaaaaagaccataaaaatgagcatccaaagtatgaagcagaacttatatatgagcaaggtaacctacagaaccatgctaccggtaacacatttattcagcaatcacaaaatttttatctaaaattaacatgaaaattagaaaattttataaatatatttaattattttatataacatatatatttatcagaatggcataacagtaaaatttctg

SEQ ID NO: 90589 - DNA, 540 bp, Heterodera glycines
aattaaaacggttcaatgtttacggggggaaaaatcgtcttgatgtgaggccgaagccaagagtggatttgactcaatacacaatgaagaaggagtccatcatttacgatttgaatgggatcattgagcatatcggtggtgggattaattttggacattacatttgtgcaatgcgcggattcaaagggaattggttcaaatttgacgattctgagagaagacgcgtaagtctgaatgatgttgtgcaaaacatggacccttacattctcttctacacaaagatttctccctctcccatcaaccaacaacctcatcagcgacgatcctttggtggatttgctccttcgacacctaagcaagctcggctcaacagtttcccttcccacaacggagggacgtcccttcctaagcggttcaacaacacatttcatcgctcgttcattagttgacttagaagatctctcccccttcgttcctccactatctgtccatgttatttatcatttgttgtttcgaaaatgaactcctctttccattttt

SEQ ID NO: 90590 - DNA, 68 bp, Heterodera glycines
gtttatatggttccacatttattgttgattttgatgtttgttgataataaatgttttaatttgaaaaa

SEQ ID NO: 90591 - DNA, 354 bp, Heterodera glycines
ttcgttcattccttccattttcctgtgtcctaaaccttcatcaattaaaaacaatgcctttcctccgctcgcttcttctcccttccgttttgcttcttcttcttctgcttctgtccgtgtctctttgctccgcgggggtcttcgctccgctgcgtatgaagcgccaattcgattggtttggcaattcgatgggtgcgcgtggcgccggcttcggaggcggatgggtgttcggcagaagatgaaccgttaaaggcgccaaccaattaataaaataataatgcacaataataataatatttatttcatttgcccccgattccccattttcaaatgaataaattatatattcaaaaa

SEQ ID NO: 90592 - DNA, 598 bp, Heterodera glycines
tttaaataaaaatttccttggaccgacaaaaatggcaaaattcgttgccattgctcttctctcgctgaccattgtttcgatggcacttgcaaaaactggcaaaagtcaaacggcagacgaagttgagggatttcgcaatatgaacatcggcgacaacaataaggttgacgccggaaaggagcccgcggctgataaagcaaccaaaaagggaaaagctcagaaagccggaacgaaaccggcggcggccactaatgagcccgcggctgctaaaggaactaaaaatggaaaagccccgaaaaccaaagcgaagcaagaggtggccactaatgagcccgcggctgctaatgaatggaacgaccaattgatgggcatgagcgttgagaaatttaacgaggagcttgctgtgttgttgccaaaagccaacacttttatggaaaatgctttgagcttcatcaatgaacaaatggaaaaaaatggtattgcaactggcgctgccggggactcgtgctcgaccgggatcccggccaactaggagaccaatgccacaggacggcaccggaggagggaagaaaggatgacgagctctttggatgatgaa

SEQ ID NO: 90593 - DNA, 466 bp, Heterodera glycines
cgtagtgaataaagccgaggctcattcaaaccaattaggtaattagctgacaattagccatcaacaaattggggccaaaaaacgaggatgccatccaaacgcatcactgtgccgctgtttctgctgttgactgtgctcgtcttggcactccgtgcctcggagacaaagattaaggcgatggaggagaaagtgatggaggaacaggacaagaaagaaaatgctgagatgaaaaaatttttgagagaacagaaaaaggaggagcagaaggggacaaacataatcggacaaaaagttggaccaaaacgtaattttggaggttttttgttttgagaactttaagcttttcacatataccaattctgtttttattttacaaaattttgtctacaaaactcacaaaattgttacgcactgtttatgtaaagttagcattactttttttaatgtagtaaagattgttgcctgt

SEQ ID NO: 90594 - DNA, 325 bp, Heterodera glycines
  unsure (1)..(325): unsure at all n locations
ggaagggaagaaggaaaagaaagcagcagaagaggaggtagggaagaaggaaaagagaggaagtggaggcggaacatggggcaacggaggaagaggaaacggaggaggaggacacggaggaggaggacatggaggaggacacggaggaggaaatgacagcagcggcggaggtgatgattagaagccatagctaaaaagaagaagcataatatggaactaagaaaagaacgagcacacaatgcttttagtcgcttattttttgctgcatttaaaatgttaaattttaaaaataaaaataaatttttgtattttttaaaaanaaaaa

SEQ ID NO: 90595 - DNA, 519 bp, Heterodera glycines
atttttaagccaaatatttaaaatggaaaatatcgaaattacgcacgaatggagcggccaacaatgggattggcccctgcagcataatgacggggtggtgaaggttcacaacactccggaaaaatgggaagttgggttggacgtggcattcttcacgccaaacgaaattgaggtgaaagtggtcgcggaccatctgaacatccattgcaaacacgaggctcggagcgatgtgcacggctcagtgagtcgagagattaaccgctcgtataaattgccgaacgatgtgaacacaggcacaatcaaatcgcatttgactcagaacggcgttcttcgcgtctctgcgcagaaaaaatgagaggaaatggcgaaccatggaagaagagaagagacaaagtgttctgtttcacaaccaataataatcctgtttatttactttgctttttactttgtaatttatcgccgtttcgcgaataattaaaaattgcgtccaaaaaacaaggagcccctggacaaactggt

SEQ ID NO: 90596 - DNA, 746 bp, Heterodera glycines
gacctaaaaacggcaaaattttttattttttgttgcaaaattccgtaaaaagaaagatgagttttcagggcggcactgcgtgtatgccggattccagagatcactacataaaaatagagcaccattcctaacctttcattttgatgattaaaataattattcatttatttagaagcgatttactagcaaatttgcgcaatgaatggccaaattattaattcggacgaattaaagattgttttcacacataaggcgcttcatactttgattgcatattattcggacgtcgcagtaccaactggaacaacagttaacagggacggatgtgggctgacaaaacggcgattcttgtgcccgtcggtcaagaccaaagaacagatgatcttcgagatagatttccgaatttcggcgacaattggcgaaaaaattatgtttggtaaaaaacatgacggttcaaccgatgatcttcgcgaggcaacgaggatgatcttagacatggtaaacagcggaatgttttacgacgaattgggcctgcgcgaatttactgttgccccaccaggaccggcactgaaaaacaaattggacaaatttgtggaccggaaattgaatgaatgtgtggcacgaggggagaaattagtgaataacaaaaaggacgaagtgaaagacctggccgagcatttggaggcaagcgacgggtggcacttgaacgaggaacagatccatcaattcttcaaacgcagaaacgc

SEQ ID NO: 90597 - DNA, 566 bp, Heterodera glycines
acgaccattggtacggcgaaagggcgcggatgatcaacgggacggacgcggaactgtttggaccgaatttgatggatgcgccgaaattgcaaatattcattggccaactttgccgttccttcgatttggaagttcgtcagcccgctctcaccgccggtctccccgtcttccgatacgcccaacccgactcggcgttggacatcgctgtgcagcggtcgcaaggcttttgcaacccgaattccccgcttttcttcaacgagagcgtccaaccggttggctgtgctccgtccggtcttctcgacatgtcctcctgtttccccggctctccccccattttcttttcggcctcccattttcgaaatgcccacgcggcccttcgccattccctcgcgggaaatttctcgtccccaacagattcggatgatctcagcttttttgacattgaaccgattgttggggcagtggtcggagtgcagcagcgctatcagctcaatttgggaatgcaacgagggaatttcaggatgaccaaaaatatgagcaatttggtcgtccccatggtttggctc

SEQ ID NO: 90598 - DNA, 1187 bp, Heterodera glycines
tcaaatgtgccgactccaagcaactcatctgctcgctcgactctttctgcttcttgcgctttgcactgctctcgttagctctctcactgctgttgccccgccattcggccaattgtccgtttccggcaccaatttggtcggcgccaacggacaacccgtacagctgatcggcaactcactgttctggcaccaatggtacccgcagttttggaacgctgacacagtgaaggcactcaaatgcaattggaatgccaatgtcatccggggggccatgggcgtggacgagggcggctatctgagtgacgcgaacacggcttacaatctgatggtggcagtgatcgaagcggccatttccaatggcatttacgtgatcgtcgattggcatgcccacaatccacatccggacgaagcggtcaaattcttcacccgaattgctcaagcgtacggctcctaccctcacattttgtacgaggatttcaacgagccgctgagcgtttcgtggaccgatgtgctggtgccataccacaaaaaggtcattgctgccatccgagctattgacaagaaaaatgtgatcattctcggcactccaacatggtcccaagacgtggatgtggcatcacagaacccaatcaaagactaccaaaatctgatgtacactctccacttttacgcgtccagtcacttcacgaatgatcttggtgccaagctcaaaacagccgtgaacaacggtttgcctgtgttcgtcactgagtacggcacatgcgaagcgtcgggcaacggcaacttgaacactgactcgatgtccagctggtggactctgctggacagcttgaagatttcatacgccaactgggcaatctccgacaaaagtgaggcctgctcagcactgagccccggtacaactgctgccaatgtcggtgtttcgtcccgttggacatcctccggaaatatggttgcttcgtactacaagaaaaaatccaccggcgtaagctgtagcggctcaagttccggcagctcttcgggctcgagttctggctcttccggttcaagttccggcagctcttccggctcaagttccggcagctcttccggctcaagttcgggctcctctggttcgagctcagggtccagctcgggttcgggatccgccagcatctctgtagtcccatccaacacgtggaatggcg

SEQ ID NO: 90599 - DNA, 513 bp, Heterodera glycines
ttctctctctctctcccattggaattattcattgagatgggtttttcaaaaactatcgctttcctttcgcttttggcacttttttgcgcaacaattgctgaagaaaatggggcgacagaaggcacagaagcggaggcgacgacagtgccaacactcaccgcagcggcggagggaggcaaagggggcgaagaggaagtgaccacggcgaagccgacggagacgagcgaaacggcacgggaggagggggaggagaagcacaaggcgaacgaggggaaagcgattgagggaagtggaaccagatcgttgttgcaaaaagtcacctgtatgttgttcggctttttcccatttcgcgccggctgtccgggcaaaaacgatataaaagcggagtcatcatcacatgtgagcagcacaattatgataattgaggaaaaagaggacagcgaatcggacgaacaaatggacggcgctggaggggacgaggagaaaggtgccgcaagggacaaccaaatggaa

SEQ ID NO: 90600 - DNA, 892 bp, Heterodera glycines
ccgcgtgttggacagttctgaggccgactgcatatttttggttggcggtgatggcactttgagtagggcactcgtcggattgagccaaaacagtgcgccattgccaattggtttattccctggtggtcgaaaaaacattgcattttggagaatttttcaatcaaaaaaccagagcagaggtatattactatacatacaaagcgaatttcatttttgttttcttttcttgattcgatggatttgaatgaccaagactcaaaatcagtgcgaatgttttgcgaaagtgcaatggcactgattgagggtgaaaatcgactcgtttatccagtcaaatgctcaataactgaagaaatgaatgactcgccttccgaccatcaaacggtcaacactcccaacactttttggctgctttccgacctttgtgcgggatggttcgaacattgtgaacaaaaggcacccaaactttggtggtgggggcctctgcgctacaaatttgtgtatttttgggaatttttaaagcgaaaaccaatccctttggaccttcgaatttcttacgaagagttttgccccggttgtaatcgttgcgtgacgcccgtaaaacagaaaaacttgacaactttgtggtcatttttctctcatcttctgtggtcatctcctaacgacagcacaaaaatcaaagtaaattcggactttgcgttggttgaaaatccaaactgtggccagagacgggaggccaatgtcagtggtgccaatgttcgtctgaacgtcgaacagaccgaaaatggcagcaaactcaaactgcgagttggcggcgcgggggacgcattcggacgatgggcggcaatgcgtttcggatggaattccgtgggagtcgcaaacggagagagtaaac

SEQ ID NO: 90601 - DNA, 416 bp, Heterodera glycines
gtttcactggcgaacacgcaattgcccgccgagaagatgaagtgtttggtggagcattcgctccgagattatcttatggtctctctgctggccaatttggccaagactcagttggccctgcaggaaaaagtcacttcctcgtaaagttttgaccagtcaaaccgttgcggaaagagggaaagcgaaccaataaacgtgattcgagattattgctttgtgtccattctgtcattgttttgttactccattttcgttattcgcagaactgttatcagaaattcatgtatcatatatcatcattttgacaaaaattgcctaaggacaaaccgccaaaaaccccactaatttaaaaattttgccgatattttcccttgtaaaaactgaagagtcgatctcgagttaaaaagcattttgac

SEQ ID NO: 90602 - DNA, 529 bp, Heterodera glycines
tgccaatgatgcagaggttttgacttcgctcattcaggaacttgcggattctttaaaaatgcctaatggaccaaaactcaacgccgaccatttgcgaattttccttaaagatggagcaacacgagcgctaattgctactgcaacgaaagatggcgaaacgaccgtggcgggttatgccatttattttatcgctccatcgactgagtttggaaaagtcttttttctcgaggatttgtacatccgtccggacttccgtcgccaaaaattaggatctcagttcatgaccgaattaaagaagttttctaacgaaatggcttgtgatgtgtttcaatggaatgtgcttgccaataacgttaacgcaattcgcttttacacttcgttgggtgctcgtaaccttacgaacgtcgatggggagacgggcttctcgtgttggcgcattgagtccaaccaatttgaagcaatcatacgcaattctaaggagtgtttgccgcatattaaatttgctgttttttcgctggacgctgaaaac

SEQ ID NO: 90603 - DNA, 400 bp, Heterodera glycines
  unsure (1)..(400): unsure at all n locations
ttcctttctgcgccaacgccccccgtcccttccggcgacgattctctccaagtctctccacaccaaaccgtttcttctcactccgactgtcaccaaattcagcaaacgcaattggaagaacattcgactaataaggagcaattggcgcattttggagcatttgaggagatgcaagacctttctctctccggcgatgacttcaccgatgaatttggcttgtttttcagtgccttttgtccaaattcgtcgtctaattggacacaaaattgtaacaaacaataatttattttctttcattcattttcgaaaattgttttcactgtaaattacgatatgattaacaatgttaaaaaanannaaaaaaaaaaaaaaaaaaaaaaaaaaaaaaaaaaaaaaaaaa

SEQ ID NO: 90604 - DNA, 557 bp, Heterodera glycines
tacaacaccaaagcgaacagtgtgggaccaatggaaggacactgacaaatgaagaagaaaagacgcaaaaaatgagcaaaatatgcaacagtgaaaactaattcagtgcataataataaatattataacaaataataattcatttaaaaatatttttataaattaaagtgaaaaaaagaagagtttaattattcgtggacactttcaaattgcaaatagacaaaaaagtgaagaagttaattgagaccatttaatcccttagaaaggttaaaatgactaaatgctctcctaattttcaattgccaaaagtgactaaattcaattattttgagtcaaatttttattttttgcccacctgataataggccacccttttctgtcccctcatttcgtgttcaattggaattgattcgtccgtacttaaaatttggaagcatctataaggaaaattacatggaaaattaccgcaggtaataagtgctttcgacaaggcaataatcgtgcgcatattgaacccatccggcacggaattcagctttggcaaaacaatttatggc

SEQ ID NO: 90605 - DNA, 361 bp, Heterodera glycines
  unsure (1)..(361): unsure at all n locations
ttttatggaggcggtatgcaaaatttacgaggaacatctgaagaagctgaaccccgacgtcccctgcatacagtacgacatatccgcactgttcaagttcatcgaccgattggctgatttgagctgcatggtgttggacaaaagtgtatatgtgccaaagggcgaggatttcatcaaagagcagattttcattttgctccgtggccaagcggcgtcgaacgcggcgaagaagtgcccggctgaaggatcgctctgatttttgatcgcattccttttatttgtaattaactttcatacaaataaaagtacaattctttaaaaaanaaaaaaaaaaaaaaaaaaaaaaaaaaaaaaaaaaaaa

SEQ ID NO: 90606 - DNA, 89 bp, Heterodera glycines
cattagcgaagaacggacttcacaattaatattgtcagggtttttattctttggaaattttatgtaaataaatttgatgaatggaaaaa

SEQ ID NO: 90607 - DNA, 414 bp, Heterodera glycines
atttttcagttgcaattcagatttgacgaccaatacccattctcatcgccagaagttatgtttatgggtgaaaacattccggcgcatccccacgtgtactccaacgggcacatttgcctgtcaattctcagtgacgattggacacccgctctcagcgtctcttccgtttgtttgtccattcagtcgatgctgtccagttgcaaagagaagaaacggccgccagacaacgacttatacgtgcggacttgcagcaaaaacccgaacaaaacgcgttggtggttccacgatgacaaagtttgaacggatgattcgccctttcttttcttctcaccgatgatcaaatgactattgctttttattttaaaagaaatgcgatgcgtttctctttttttgtgcattttatttcaatttttt

SEQ ID NO: 90608 - DNA, 425 bp, Heterodera glycines
acgactgctccgcctgccgtcgcttatcagcgcgttgctggcgttctcgccgtccttgctgaactgctgcaaccaattaaggtcaaagacacacacattgagggcatcacaacggagcccaacccgaatttgaacgcattggaagggggcggggacagcgacgggggaggcgactcgaacggagccgaaggcaatggcgaagaagccggaggaccaatgaaaggcagctcttccggtggtttcaaatccgctggcgctccgcatgttcgtggcggatcgtttatgcgtggcggtcgtggaggaagcgggccgcctggaggtcgtggtggaatggccaatcgtggcggttttggaagcggccgtggacgtgggacgcctggcggaagtcgcggtggtggcagccgaggaggcggacagaggggctt

SEQ ID NO: 90609 - DNA, 640 bp, Heterodera glycines
ctttggcattttgtttctataattattcaattctctaaaaaaagtagctaaaattgatgaaatcgtcctgagccttgttctcccatttcaattttgtgatactttgacgcgtttctgtcaagggatgaccatctataacctctatttcttcaaccggcacggcgtttgtttggcctacaaagaatggtgccgtgaaaaaaagtcgggcatttcaccggacgaagagcttaaactcgtaaatggcatgttgctttcgttgcgttctttctcgcataaattggcaactcgggcggaccaagtgccaatgatttcctgcttccgaacttcgtcctacaaaatgaattacatggagacggccactggacttaaaatgatattgaacactgaccctgacgccgtttcaattcccgaacttctacagtccatcttttgcgtgtttgttgagactgttctcaaaaacccattcgtggacacatccaaaagaatcgactcagaactgttcaacaaaagggtcgacgaattggtgcgggctcatttttgtttcacataaaatacatattcgatttagcacaaattgcttttatttccattgacttttttctgcataaaatttcgacaaaaaaaaaaaaaaaaaaaaaaa

SEQ ID NO: 90610 - DNA, 486 bp, Heterodera glycines
ctctctcactaattgttgcacattccccaattttatttcttccttagtaagtagtattggtgcacaatgcgcacttttctgttcatagccgtagtcgggttgatgttggccgtcatcttggagaatgtaaatgcgactgggaaaaattcgccgacaaagggaaaacagtcgctagacagtccaaaccatgaaaaagaccataaaaatgagcatgaaaagtatgaagcagcttactttcaaagtttgttgtttttttatatgagcaaggtaacatacagaaccatgctaccggtaacacatttattcagcaatcataaaatttttatctaaaattaacatgaaaattagaaaattttataaatatatttaattattttatataacatatatatttatcagaatggcataacattttactcaaataaaagtaaaatttctgttatttttttttgtttcgctccaaatgtgtccatgaccaaaatggcg

SEQ ID NO: 90611 - DNA, 1264 bp, Heterodera glycines
tgccgagggcgacgttttccgaggcttacaggtggtcgaattcgcatgcaatgcggcgagtttgctgttgggcgaacatttgccaaacatagccaaagacatggaaacgtacagcttgcgactgccattgggcgtaacggccggcatttgcccgttcaatttccccgcaatgattcctctttggatgttccctttggcactggtttctggcaacacgatgcttatgaagccgtctgagcaagaccctggcgcgacaatgatgctaatggagttggccaaggaggccggcattccggacggttgtgtcaacgtcatccacggcacacgatccgctgtcactttcatttgcgaacagcccgacatcaaagcaatttcttttgttggcagtgaccaggccggcaaatacatttacgagcacgggtctaagtttgggaaaagagttcagtcgaatatgggcgctaagaatcacggagtcatccttcctgacgcgaaccgagaacacacgttgaatcaggtcgctgccgcggcattcggtgctgcggggcaacgatgtatggcactctctacggccatttttgtgggtgatgcgcgcggatgggtttctgatttggtggaacgagcccggaaattgcgcgtccgcccgggatgggaggcggagacggacattgggccggtgatttcacaaaaagcgaaggagcgcatttgcgagttggtcgaatcggcgctggaagaaggagccgatgtgccattggatggcaccaatgtgacagtgaaaggctttgagaagggaaactttgtcggaccgacggtgatcactggagtaaagcccgaaatgctctgttataaggaagaaatctttgggcccgttttgtgtgtgctcgaaacggaaacacttgacgaagcgatggatttgataaacaaaaatccctacggaaatggcactgcccttttcactcggtcgggaattgccgcgcaccgtttcgtctcggagattgatgtgggccaagtgggcataaatgtgccaatccctgtgccacttccgatgttctctttcaccggttcgcgtggaagttttcttggcgatgcaaatttctatggaaaggctggtcttaatttctacacccaaattcgaactgtgacccagttgtggcgttctgaggatgcctcgacagaagccaaaccacaactatcttttccacaattcaaatagtgccattttatgcattttaagacagacactgttttatcctctttaattccttaa

SEQ ID NO: 90612 - DNA, 168 bp, Heterodera glycines
caaattggcacgcactcatttcacttaaccgaccggtagcaataattcacaccccgggatttcgataacaatcacaaaaaatagaaaaaaacaacaaataatttaggttaatttatgtaaaaaaaattaacttttgcgaagataaaaaaaagtttaatgaaaaaaaaa

SEQ ID NO: 90613 - DNA, 477 bp, Heterodera glycines
tcaaactactctctctcactaactgttgcacatcccaattttatttcttccttagtaagtagtattggtgcacaatgcgcacttttctgttcatagctgtagtcgggttggtgttggctgtcatcatggagagagtaaatgcgactgggaataattcgccgacaaagggacaaactccgcctggcagtccgaaaggtgggcacggcaacaacaaatcgccaacgacgccgcacagtgccggttcgccacacggcacgcagcatggtaaccaacagaaaaatgctaccggacaaacgccgcctggcagtccgaaaggtgggcacggcaacaacaaatcgccaacgacgccgcacagtacaaaacgggaaacagaacttataattgagaaaggaaaaccgtcgccagacagtccaaaccataaaaatgaccatgaaaatgagattagtaacctacagaaccgtgctaccggacaatcgc

SEQ ID NO: 90614 - DNA, 555 bp, Heterodera glycines
gcgggtagtgaacgccaagccaaaataaatgccactggcgaccgactaaaggaggcgtcgaagatcaatttgtccctctcgacgcttggcaatgtgattagtgcgttggcggacgcgaaagtccgcacattccgtaccgaaattcgaagctgaatcgcattttgcaagaattgctgggcggcactgcaggcccaactgttggagcagagcaaccgttgggcaaagacgacaaaataaatgtgagcttgaacgcgttcgtcgggagttggcaatggagacgcgcttcagaacacagcaagcagaacagtgcgacattgaggagcagtacagcacactgcaggaggagtcccaggggatgggcaaatggttgagaaaggggggcaattttaaaaaagaatataatttctccacattttcccgttaaacggtgcaatggatccaacggcaactactaacaataatcaaaggtgccgcaagatgaacagaaatataaaatatcagaaataaaagacactctttaacaatgcgagccatacatacgtcaattttgtttta

SEQ ID NO: 90615 - DNA, 250 bp, Heterodera glycines; identical to SEQ ID NO: 65261

SEQ ID NO: 90616 - DNA, 513 bp, Heterodera glycines
gaatttcgagttgccattgaaaagggcgacgcggcaaagtttgacggattgttgcgcgagagtccacgctttctcgtcaacacatccaacgatttgcccacaattttgcacattggcatgcgctgcaatgccatgcacatcgcctgccgttcctcaaatgttcacgctgtccgacaaatgttggcccttgttcaaagtggcgaatggttgcgcgatgcgtatgggacggatgcatgtgttaaggaacgcagtgataatttgctggacgctctgctgaatacgccagacaaaattgagaacaacacgccgttgcactacgcatgtcgacaattgtgcgagcccatctttagagaattgattggacacgaacagtgccatcgaagtccggtgaacagtcacaacgagcggcccatcgacgtgttgggacgggggacgcgaggcagcggcggtgcgggtcggcaagagaacaaaaaggtctttgatcggatgtacgttgcgctggagggcagtctg

SEQ ID NO: 90617 - DNA, 286 bp, Heterodera glycines
ttaattgagtcaagactctcgagccaagggtgtaacactacagaatgatggtctatcccccatccgaactgatcgacatccttctggccaacagccgaggcggattggaacgaaatgtgaacaatgccgaccgcgcacagcaattgttaaaacgttgcagtggaatttcagcttaaagaataaaaatgatttaaacggacgaatgaagacactgaaaataattaaaaaattcatattaaatatttaaataatttcattaattttttgataaatttaaaaaaactaa

SEQ ID NO: 90618 - DNA, 531 bp, Heterodera glycines
gcaccgatttgctggcggatccgcgcagcaaattggctgattggtttcgcccgggcactaatcgcccgcgtgggttttgcgttatttggcaaatcaagtgttaattgatatgctaattttcctttctgttaagcaattcctaccgacaaaggggggaatctctttttggacagagaccccaaaatgttccgtcatatcattggttatctccgcctgaaaaaggagcgatgcgccgcctctttggcacttccagcaaagccagacgatttggccaaactaatcggcgaatgtgaggcgcttaatttggtcgaattgcgcgaattggcgttggaaatgcttcaaaaatacgtcagaacggaggaacagcattatgtcacttcgtacgttcaaatggcactgcgcgactacgaagcgtggcaatttgagcaggaacagaagaacgaaaacggaacggacgacggagaaaagccgaagagatcggaatttgacgaatgggtggaataaaagaggagaagacaaacgagagaaaga

SEQ ID NO: 90619 - DNA, 504 bp, Heterodera glycines
taagcattttaaatttaaatttatttaagaattaaatggatttaagagtgttttttaaatagttaatcgatttccaagagtttttttatatgctattttagaatatattaaactaaaataattcattttgaaagacggaaaatcaattagatcttattttacaaattccgataaaaacttactcaaaaatggaatgaaactgagaaagtgtgggttggcaaaaggcaaaaaaaaaattcaaatgcgatcggaattcaatttgctgattgccgaattttttgagagtgtcggcattatccctggtgtataccgaaaaggtgaagcccgtaacattttttacacaaatactatacattaaattaataatggcaaatatttaaattttattgaaggttaattgcattaatttaaaaataattttccaaaaaaaaatgaacggctacagcattctgtgtgtcatgctgctcgtcgagctggtgtcatgctgccaattgtcaatgggtc

SEQ ID NO: 90620 - DNA, 376 bp, Heterodera glycines
ttgcttgtctgtaaaaccattcagtttcaaatcgtattttaattccaaaaatcaacaaattcacctcccatttttacaaaatgtcccccctccgtttcttcgtcgccctttttctgatcactttggcaattttggccgggacccacggcactgttgagaactcagtggatggtgggccaaacatggcatcgccgattatccgtgaacgccgttggggccatggcggcggaggccattggggctgaagaaaatggtgggagagataatggaaaatggagaacggaagaagcgataaacgatgaaaaacaagaaaaaataatttgtggtagaagaaaaaatgctgaactcttaggtcgaataaagtttcaatgaaaaa

SEQ ID NO: 90621 - DNA, 448 bp, Heterodera glycines
agttttgtttaacaaggaccaattgctggcccaaatggaatatttccttgtgtgaaccgaccgggtatcaagtgcgacatggacgccgcatacattgcagcggaggcgatagtttgtttcatcgaagacgccggccaaacctacgtggaattttccttcgaaagacggtgccccgttcaacagagaaaatgggctcaaccggatgccgaacaagctgaatgccgacggtactttgcctatttacttcatggcccgcaaaaaatggagactccaaaaactgggaagtgaacccttaatgatttcagttttgatttctagtctttttaagacaattatattgtctcattttgtgtcatattaatgttatatgtccattccatgctgtaatgttgttgccgaatctggtgtcgtttcgagcgcggttttcacgaccattcggatgtggaga

SEQ ID NO: 90622 - DNA, 355 bp, Heterodera glycines
aggggcgtacggcgcagtaggaaaagcgacggatgacgcggcatttacaaccggcgcattgcgacggacctttccgatgttttgccaatttcaattttaaaatcgcttacattcccttttcctttcaaatgatttgtttatcttttttgattctaattttttgctttctctcttcctgaaaagcttttttcctttacggatttttgattttttttttacctgatgaaaagtttattttgtgctggcaaacaaacagatggatattattgtaaatttaatgctacttttaagcattgcattcgttcaggtcttttctttaattaaaaatgaattggataaataattattgtgtaaa

SEQ ID NO: 90623 - DNA, 528 bp, Heterodera glycines
taccgtccaatcaggggatgaatcaattagcactcccacgaaaagctaaaaaaacgaacaaaacaaatgccattgtgccagttcaaaatgcggcctcatttggcgaccgaggatatataccatcgagtgaaatcatactaaaaacaaaacaaaaacgaagaccagaagcatcagctgaggaatacatcaaattcgtaaaaaatgccgtaaattcgctcaacaaaagtgacaatgtacatttcttaacaaatggcttctcattggtaggaaaaaatgctcagcaggaactacaaagatatcatatttatccaaggaatagactaatgattggaggacttatggaattaattgcgaacagaaaaatgaaaagcgccgatgaactggaatatatggtgcttgaaaaagtgcacatgatggaggtggagctaaatggcgggcgattgcaattggagcctttgggtgtcacatttgtaactggtgtgcagatttatataaatctacaaacaatggagcaacagtttgcttctg

SEQ ID NO: 90624 - DNA, 751 bp, Heterodera glycines
agcgaagagctgatcgtcatggaacactttgtagagctgaaggataaaacaatagcagtatacccataaaagtaaaattatgaaatttttaataaattttaatatgaataattgtgacaagtcttactttttgatgaatttcgaaattgtcggcccgaagaaggggagttaatggaaattcgatttggtggcaacagcgaagtcttgtgcctttcgttgcgtccaaaatatccattcgacgaaccattgtccgctcggtgtacagccaccgaatcgtccatggacactgacgccagcatttgagagtccggtgaccaggagattccggtcacatcaccgtcatgtcgtatcggacttcgaaacgcccttgcccaattctccttgttcggcggaatgtccatttcggggtcggcgtcacgttgtcggacagtcgccggctcttccagcatttgcacttcgcattccaaaacttcttgttccaatttccatacaaaaagaaagccgtccgcatccccagaagcgatataagttccatttggcgaaaatcgaacaatatttgttgttccccggtggccttcaatgttggctaagaattcgactgacagctgattttggggaactgcgattgatctcttcccagcattgttctgttcaacttctttttgcttcctttcatcttctaattccacctttttagcttcagcttcgcaatttttcgttccgttttccttctccttatcatccagaaaca

SEQ ID NO: 90625 - DNA, 553 bp, Heterodera glycines
aaaaaccgaaacgggtcaactccgtctggccaactccgtcttggggccaactccgtctcgccaactccgtcttggggccaactccgtctgagccaactccgtctcgccaactccgtctggccaactccgtcttagtgcctaaggggccaactccgtctcagataaaaaaaaaatataagaaatttttcaacgaattttaaaatacatccctaagaaattaaaaattttctcaaaaactcatccgttaaatctacttatttattttcatgataagaattattcattaaaatagtgtatgacctaacattttaaagtaccattaatattttagcactgcgaaaatggaaaatgctgaaattaaatctcaacgagaaaataaaaaactcgaacacaaatgtcatcgcacaaaaaatcaccaccggcattaaacgacgtgccgctgaaacgatggaaacgccagcagcaatcagggcacacacgcttaagcaaattccaacgccagtaatggcgaacattccgacaaagaacgcgacaaaaaaattatgaagcgagt

SEQ ID NO: 90626 - DNA, 177 bp, Heterodera glycines
attgctgagaatgccaaatagcgaattggcgtaattttacgcgctatttcaaaaaatacactggtaatgccttttttgtatggtttattatgagcctccataactcgcatgcatttccaactaatccgaacattttgttatctaaaaaaagattttgaaaaggagaaaaaaaaaaaa

SEQ ID NO: 90627 - DNA, 608 bp, Heterodera glycines
acaccaattttgagcctaacagaacatacacattgactggaatatatgaacaaagcacaaaaattgacccgccacagttcgaaacaaactttgtgattatgcacaaatccgagcaaacgcggcaaataatgaaatgggctttgctttgtgccgccgagcccgactgtatggtgccaattggacagacgaaggcgtgcatttacacggcaactgctccaaatttgacttgccatcgacaggatcagggtctgatggaaattctccgctacaacatggaatatcgacaagaaattgagaacccatcatttttgacccaactgaaccctgcccacccgcgcagttcaaacagaccgttgcaatcgtcgggaatcagcggattttttgatttgctccgtggtaagcattttggcggttctcaaagtgaatggcttcaaagagttcaatgttgctgatgaacatcatcattatcttttgttttttattcatttcgtataaatttgggcataaatggaaaatcgttaaatgattgccaatttgggaaattaacatttaaataagattttttcattttgtctccatttgttaaaaaaaaaaaaaaaaaaaaaaaa

SEQ ID NO: 90628 - DNA, 531 bp, Heterodera glycines
aagagaggcgcgaatgcaatcggtttcagatgttccgctgaatctgaccaaggaggaaatgcaaatggccaaagaacgttttaaccagttggacaaggacaaaaagggacacattacggtcaatgacatccgccgacactttcgggaacacaacaacaaaattgacgagcgtttgctgcacgagttgttgaacgaggtcgacctgaacaagaacggcgagttggagttggctgagttcttccagctttatagcggactgaaaagtggtcaaatcactcagaatcgtttggtccgttatttggacgaattgggcggcgaaaaggacaaaacaaagcccgtgttggatgtggtcaggtccggtggaggattttgagcttttcaccctcgtgataacctcggatggatgttttttctcgtgcattttatttgtacgcccataggactgcccacttaatcctttaaaattattgtttcatttaagcccatcaattaattaattacagtatttttgtgcttcttatttgtcctgtt

SEQ ID NO: 90629 - DNA, 502 bp, Heterodera glycines
tgtgccgactccaagcaactcatctgctcgctcgactctttctgctttttgcgctttgcactgctttcgttagctctctcactgctgttgccccgccattcggccaattgtccgtttccgacaccaatttggtcggcgccaacggacaacccgtacagctgatcggcaactcactgttctggcaccaatggtacccgcagttttggaacgctgacacagtgaaggcactcaaatgcaattggaatgccaatgtcatccggggggccatgggcgtggatgtggcatcacagaacccaatcaaagactaccaaaatctgatgtacactctccacttttacgcgtccagtcacttcacgaatgatcttggtgccaagctcaaaacagccgtgaacaacggtttgcctgtgttcgtcactgagtacggcacatgcgaagcgtcgggcaacggcaacttgaacactgactcgatgtccagctggtggactctgctggacagcttgaa

SEQ ID NO: 90630 - DNA, 811 bp, Heterodera glycines
ggacctccgtgaagggatggcccttcagaatgtccaggcccgtgctcggatggtcctcgcctatttgcacgcgcaactgacgctgaccaaagagcggcggaaagggtctttgttgatcttgggcgcctcaaatgtcgacgaaagtttggttggctatgtcaccaaatacgattgttcctctgccgacattaacccaattggtgctacctcaaaggatgatttacgtgagtttctgtgccatgcgaatgctaatcataaattcccacacttacaaagtgtcatccattcggtgccaaccgctgaattgcgtccactgaaggacggccaaattgtgcagacggacgaagccgaaatcgggctcacctatcgggaattgtccacttttggcaaattacgtcgtccaggctgttccgggccgtacagaatgttccaagaactcgtccacatttggcatcccgcgcgcagctatgacgaaatagcggacaaagtgcgcattttcttccgccgttatgctatgaatcggcacaaggcgacagttgcaacacccgcttaccatgccaacacttacagcaacgaggaacaccgaaatgaccatcggtcgtttctttacccggacatggcccaccaattccatcgcatttcggaattggtggaaatgttgaagaagcgcgaccaaacattgcaacagaaaaacagtaatggccaaagaacaaccgctgactgactgactgatcaattcagttttggcctgctttttcattttttcgaattcccaccgaaatcattcatcaaaaacaactcaaattgaaga

SEQ ID NO: 90631 - DNA, 493 bp, Heterodera glycines
ctctctcactaattgttgcacattccccaattttatttcttccttagtaagtagtattggtgcacaatgcgcacttttctgttcatagccgtagtcgggttgatgttggccgtcatcttggagaatgtaaatgcgactgggaaaaattcgccgtcaaagggaaaaccgtcgccagacagtacaaaccataaaaaagaccataaaaatgagcatccaaagtatgaagcagaacttatatatgagcaaggaaaaccgtcgccagacagtccaaagtatgattccccaattttagccggttcatctggcagtccgaaaaaaggaaaatcgccgaatgccgatccgaaaaaagctgcttcacaccttgtgccagtaacaccagggaaagtatgatgagcaaaggtaaccaacagaaccatgctaccggttgccaaattttgtaatcattagtcttaaaatggtgaagaaactgtgtggaacgatgatgccaaccatg

SEQ ID NO: 90632 - DNA, 291 bp, Heterodera glycines
  unsure (1)..(291): unsure at all n locations
caaagctgcgtgaagtcggcctgcaaaagcacttgcggcgacaatttgtcggaaccgaagtgcacggaatgttacgacaaaccgcacgaatgtgcgccaaaataacagaggacggaatgccaaaacttgaaatggaaacgaatgacaattaattgaggatgaggaaaaggaaaaggagcaaattaatcggaattaaatttaattatttttcgtattttaatttgtggaattcaaagaaaatgattaaacaanaaaaaaaaaaaaaaaaaaaaaaaaaaaaaaaaaaaaaaa

SEQ ID NO: 90633 - DNA, 542 bp, Heterodera glycines
  unsure (1)..(542): unsure at all n locations
ttctgcaagaaacggtgtccagaaacgtaccgtctcgccatcaaatagtgttggctcttctaacgggagtgggtctgtctcgtctaaattccaaagccaagatttgatcagcgaactgtccgatcgactaagcaagcggaaaatgactgtggaagcttcgtcaaatgcaaatggcaccccaaatcaaccgaattcacagactcttcccgtgaacaatgcgaaaggctcagcgaatccttatggaagaattcccagtgtttcgtcgttgtccagccaagatgatgccaccgccggcggagggactccggcgacagcgggcgcagcctccgctgctcaagactcacaattaacttgcgaaacggtggtgaaaggcccaacacaattaacttgcgaaccgatggtgaaaggcccaacttcatcagctcataatgacattgccaattccgaggctcgaccaaaggcgacgactacgagcagcgatttcgagcggatganaggcgaactcctggaactgttctcgaacgaactgcagaacctcaagc

SEQ ID NO: 90634 - DNA, 334 bp, Heterodera glycines
ttaggacaattaattgcaaatttttacattcatttcaggaatactttgtacgacagtgaaatttttcagttgcaattcagatttgacgaccaatacccattctcatcgccagaagtatgtgcgatttgaagaaccaattatttataaattttcaaatcactcacaataagtccttttttgccctttaggttatgtttatgggtgaaaacattccggtgcatccccacgtgtactccaacgggcacatttgcctgtcaattctcagtgacgattggacacccgtaactttggcagttcacaaaatgaccgacaatcctcaaactggcactctttt

SEQ ID NO: 90635 - DNA, 661 bp, Heterodera glycines
ttgtgactctactataattccgtccgtccctttccttttaacttccaccaaatgcccctcgtgcacaattgcatcgctggcactcgccattccctcttaattgttttgggcctcattatgataatggccaattgtggacaagcgatgcggcagcaggcggtggccgtacgtggccaactccgttgtgggaacagacccgcctcgggggtcaaagtgaagttgtgggacgaggacgacgggcccgaccccgacgacgtgcttgacgaggcgtttaccgactcttctggctccttccaaatgagagggtcgacacgcgaactgacaaacattgaccccgtgctgaagatttatcacgactgtgacgatgggataatgccaggacaacgcaaagtgaaactgcgcatccccagccaatacatcacaaacggagggttggccagacgaacttttgaagtcggagtacttaatttggagacagtctttgctggggaggaaagggacttcatttgaacatggaggggaagaagaactggcgaaatgaaagctgatttattatcacatacagtataaccagccattccatttggtattctttgtataccacattcgtattcagcaaaagaatgtagaaacaataataaactatacaatttgtcaaaaa

SEQ ID NO: 90636 - DNA, 706 bp, Heterodera glycines
agaatcagaaagggaaaggaagcgatcaaatagcgaccgatcaaagagggagcgatcagaaagaatggactgatcaaagagggatcttcataaattgtgaaccggggctagcagaatattacgatcaatccactatcaaatttgggtttaaaccttgtcaatcgcaaaagacattttccattgacccaaattatttgccgctgtttaacggaaatttgcttcaaatgatggaaatggaacggaagcaaagggatagaagtgccgatgaccatgactttgtcacggtgcaaacaattcgacacattttggagaacaacagagaagctgaaaacattgtttttgttacacacatgcaaaacagtggccttctgctcgaactgatgggcgccgaatgggcggcggttggccaagcaacgattagtaaattggtcaaatacgaagagaatgtcggcatcggtaaaccgtcggatgtgttgcaacaatttcggttggaatacgccagcggagtcacccatttgaccgaacgcaaagatttgcgcccgcgctgattttaaaccgaatgaatgcctttcggattgaggcatttgattgatgatgatgattgtggaaggtgaggctcaaaacgatgtgtaggaaatttgttattcttcagtttgttatcgtttcataggtattttggtataaacttttgaaaaaaaaaacaaaa

SEQ ID NO: 90637 - DNA, 942 bp, Heterodera glycines
tttgtcttttgctcgattttcctttactagctgtgattctgattttacagactttctttttctcgccatttcttcatggactccgaaaatgcgttgcaatcattcaaagaattcaccggtccaattttgtgttgaattgatcgttttccaatttaattctcttaggctgcactgacgatgacagcgcacgtcggctgttgtccaaatgcgcatggaatttggagagagccattgactttttcttctcgggacgaagggaagagggggatggggaagtgatgtgggacgagcagcagccgatgacgagccaaggaacacgacgacgaatttcgctaattactattaatgacttcaaattagcgttcttccatccttccattccctttgcaggtgtattactctctcttcacttcactgctttctgtttttctcgcaaagacgagcatcaacggattgttgcacaggggtcgcatgttcatcttctcccactcccatctgaaagtgttcctccccattcccgacgatgggtcccccatcgggttgtcaattgctcgacattggggcccgtgacggcgcagtgacggcgaaggtcacttccatttgtgttgttgaagcatccaaagtgatggagtggcggttggccaggcgcggcttcaccgttctgccgatggacaagtggcaacggagtggaccatattcgttgataacggcactgaatctgctcgaccgacaccatgacccaaaaaaattgctgaattctttgcacgaattggccatcgagcacaattgtcccattttactttctgtcgtgctccctattcgacaatttgtcgaattcgacgataaaattgtctccgctggaagaaaacttccggcttcagacattccaacggaaggaacgaccttcgaagcccaagtgaattcgattatccaaattggagc

SEQ ID NO: 90638 - DNA, 918 bp, Heterodera glycines
gcaaactatctgaaaaacccttacaaactctgcggagattattacttccagccttgcacgtttgttttccgttgtgatatttgttgggcaattgtgactaatttaggcaggacgttttggagccaactatgctgtcatacaaaatgagctggattttggacaaagttaagaagaaccgttcaaaaccaccatctacgattttcatcattcgcgatggtgttagtgagggaatggttccgaacgttagttggactggaagaatcacgacggattgtaaaagtgtgctttagaacattcacgacgaatttccttcctatgtgaaggcgtgtaagaaatatgacccgaattgggagcccaaattcgtctattgcatcgtcgacaagaatcacaacaaacgtttcttcgttaaggggcagcaacaagtcgagaacactgctccaggggcggttattgattcgaaagtggtacgcgtcgacatccacgagttttggatgcagtcacatgttccgctcaaggggacatcaaaaatgccacaatacatttttcccgtcaatgatcccaaggccaacaacaacgaattgcagggtttcttgcttgctctctgctgcagctggcaaattgttacgctggctccggctttgccaactcctgttcgtcaggctaaagaattggctaagcgtggtcgtgccaattttggggaattgaagcgcactccacaatatatcccgcgcgccgagaaccagcaaatcgactaccagcagttgaacagacgcctctgctacaatggacatattttcgcggacactcgctttaatgcatgaaggatgggatgatctcgggtaatttggtttgatttgatctgacataatcttgatccatgcctttcgacaacttttatttattctttcacacttaatt

SEQ ID NO: 90639 - DNA, 602 bp, Heterodera glycines
  unsure (1)..(602): unsure at all n locations
attcaaactcatcaaattcactcaacatcatcaccaaccgtgaacattatgctgaggattgctctactgatctccattttggcactgtttggtgattgcatggacaagggaaaaagaaaattaggaggaataagtattaatgagccaagtgaatatagaaccaaagaaaaagaagccatcgcaacaagcagggcatggcaaagaaaatagcaaaaatctcgattgagtgcaaattggaactggacgaggaaaagtacgtggagtcgttctgtcccgcgatgatgaccgttgtctccaagtggtgttcaggcgccacattcgccgaaattctagaaacgtccgatatattcgagggcagtataatcagatgcatgcgacgtcttgaagaattactgcaagaaatggtgaacgcagcccggtccatgggtgaccggccactggaacaaaagtttgagcaggcccgatctctgcttaagagggacatcgttttctcagcgtcactttatctctaatttgcgatcctttttttgttaatacatttaacatgttgcgcaaaaataaatattcattantttanaaaaaaaaaaaaaaaaaaaaaaaaa

SEQ ID NO: 90640 - DNA, 214 bp, Heterodera glycines
  unsure (1)..(214): unsure at all n locations
cgggggagtctccggccggcggttttcaagaggcttttgagcccggcgttggcccattcaaaccggcgggacgaaggcgacgagcgacggcacaattagcgagacaaatcaattgaaaaattgggatattaaaacccgaattgtaaaatacaataataaaaattaaaaaattgtanaaaaaaaaaaaaaaaaaaaaaaaaaaaaaaaaattgta

SEQ ID NO: 90641 - DNA, 547 bp, Heterodera glycines
gttcgtgctcattccgctgttacccggcttcgagggcgacatcggcgccacttcgtattcggcgctgctcgccgtgctccactggacaatgctttccatcgccaagggcgaccactcgctcatccaaaatctgcagagggcgggcgttgaaaatgtgcagaattacatcactttttgttcacttcgaacgcattctcaactctacggcaaatcggtcaccgagttggtttacatccactcaaaactgatgattgtggacgatgtgcacacaatcatcggaagtgcgaacatcaacgaccgttctcaggcggggaaccgcgactcggaggtctgtttgctgatcaccgatcacgaatttgtcgacggccgaatgaatggccaaccgttccgtgcgggcaaattcgcgtcctctctccgaatgcgactgatgcgtgaacacttgggtctgttggagcaatcgcttccgaagacttcgccggagagagcagccgaaattgacgtcatcgatccgacatgtccatctttttacgaggaccaatggtgtcaa

SEQ ID NO: 90642 - DNA, 306 bp, Heterodera glycines
tttcttttattttcataaatgaaatcgtttattctcgctgttcttttctcatttctcttcatggctttaatgatgccacttgtcagttcagaggaatcggaaacaaaaatgaaatcgccgattatggaaaaacatggtaacggaggcgacagactaagcgattatctgttgaaactgtgaagattcacgccgtggattgtattgctttgaggatgacgaatccaaaacgatttatccgtttgatacaacaattattgaatgactttcatttgtaatcgattaaaagtaataaatgacttggaaaaa

SEQ ID NO: 90643 - DNA, 586 bp, Heterodera glycines
ttactatgaagacgcggacggactgaacggaaatttgagctacggagggacgaaagggcgcaaagaatgggaagaaaacgccgacccgcactcatccgatttgtctttgtataatattgccgacgggaacaagagcagttcgggcatctccagctgttgtacgacttcttcgagaagctgtgagccgccagagaccaatcgctttgtgttggccaaaaaacaaagacatttcaaagcgggggatgaagctgacccaaaaatgccaactcatcgggcacagttcccttttatgccgagacattccgaacagatcgaactgcaaaaaggtgacgcaattcgcattttggagaagtacgaagaccactggtgccatggaatcaatttacggagcggaaaaaagggaattttccccgaggcccatgtcgtggagattgaccttgtggatgaaatttgccgaagtgttcttccggatggcactaatcatgccaacaaaatcgaacgggacaccttttacttgaccatgttggcctccattgagggcgcccatcacaggggaaacgatgtggtaatgcaggcaattaacaag

SEQ ID NO: 90644 - DNA, 511 bp, Heterodera glycines
aatttatcggatggcttacgattatctggacagattgggtgagttgggaaggaaagcacggcgaaatcgccaaatttggtgtattcacgatatccgatggggacaagtttaacccgaattattaacagttgctaaacaacccaaacagtgcggacatttccaatttaaataattaaatcttttcataaaccctaaattaccatcaaatcacttgtgaaacaatccaattgtcatcaaaggtaattttcctcaaaagtccggcccagaatctgctgaagtccctctgaatttgagtcattttctttctcgaccctaaggcaaagtggacggcctcgactttgacgcgttcactaggcaattattcgaccgatggttcggcgcgtacacgcgctgcggcacatgcaaaaatggcaaatgcagcagacacgggggaccgttgggaagttcagggtgggagcacgtgttcagcggagagtggcgaggagaaattgtggacggacaccacagttgg

SEQ ID NO: 90645 - DNA, 544 bp, Heterodera glycines
  unsure (1)..(544): unsure at all n locations
aggggatcataaattaaaaaaaatgtttttttcttcaaaatccgttcttctccttttagtggtaatcgcattggacacttttacttcttcgcaacctattggagagggaaatggaaatgctgacaaagcagtaaagaagaagtcctcttcaaaaggcagagttgggactgtcgccaaaggagtttttactggaacattattggctacgacaggatcctttgcccaagtggcagatgcgcgacccgtagtgcagatcaatcatgttattgctaccccgtcggtgccaccaccgccatccgcccgaatgacacctcccgtgcaagaaagcgcaatgcgtcgtagagccaatgtggtgagaaaagatggcgtgccggatccaaatgctccgtctactggctttgaagtacctcctctgcctcccggcggctttaaccgcagcgcctcatgcggtacaaatggcgatggtacgccgatgggcccgtgcggttacgttcctattggcacgacgggcctgccagatgagtacaaagtgaatgangacgaa

SEQ ID NO: 90646 - DNA, 740 bp, Heterodera glycines
atcatgtcagattcggcagcaaatatgaaaagggctttcgtcgagagggatgaaaatgaaaatcgcattttgccaatcccgaacggaccttgcgctgctcatttattgaatttggctgtacaggaggcgttcaagagagatgaatcaatcagcagtttattggccaaaactcgtcatattgttggccgtttcaaacacagtaacactgccttcagcgaattgaaaaaaattcaaaaattactcgatgccccttctcatactcttttgcagatggtatatgtccggtggaacagtgcgcttacaatgtgtgagaggctgacagaacaaaggacggcaatcacacaatatgcagtcgacaacaacgaattcgagcttttattgaagaatgatgagtgggagcaaattgaagagctggttggggtattgaaatgtgctgaagaagcaacaaaaaggttcaccgcagagccaatttcatttgtcattcctcaagcaagagcattacatgatgagttgtacgaaatgaaaattgttaaccggactgtggagacaatcagaacaaccctttattttgcggtcgagcgacgcttttttgggctagcgaatttgaaggaatatgcgctagcgactttttttgatgtgcgattcaaggacaaagtgctgactgaaaattccgcaacttttcgcgctcgagtcactgtctggatcaaaaatgaattgaaggaatgggaaaatgataatga

SEQ ID NO: 90647 - DNA, 485 bp, Heterodera glycines
gtactattccaaaacaacacacattgggcccagcaccgaaatggagaaaaggaaacgtgccgaacggctattcgccacttccggcggcagcaatatcgtttttgaggatgggacgctgcagacgcaagtttaagaggaatgtcgaccaccaaccgaacgaaggcattcaaattccattcacttttgcttgttcaaacaaaagctttaataaatggaggacgttgggtttcggttttaatgttttaaatttaagtcctccattcgatgtccatttattttttgtattcagcagaaattcctctcctactgctatttcacttttcatattatatgtatgagcaattttgtctgttttggcccccaaacactcgtttccttcagaaagtcactttgtcagtctctcacagtcagtatgtgacgtcattcgttgtgtgtacttatacctaacaatggttttatgttgataatcaatcagtatcgatact

SEQ ID NO: 90648 - DNA, 480 bp, Heterodera glycines
  unsure (1)..(480): unsure at all n locations
taatttaatttttttttttttgcttcccttcgtcacaaatttaactttcgtttcgtttccttttccaaaatgaattggtgcgccgttttgtgctttttgcttctcatcgaagtcgcctttgtgccaattgtgaacagtgcgccacttgagcgggaaaaacggctgactgccagccaattgggcaaaggcgccgtcgtcggtgccggcgtcggcttagtcggcgccgcactttacgccggcggcaaaaagttttggaacaaccgaaaagcaaatgctgcggcagccgacgcaggcggagccgacgcggccaatttaaaaacaaagggccgaaaatgaaaggatgccaaagaaagacagaaaacggagagaattttaaatgaaatttatgaaaggacagataaaattttaaaggtgcaaaagttgagaatgttttaaaataagaaataaaaaaatanaaagaaaaaaaaaaaaaaaaaaaaa

SEQ ID NO: 90649 - DNA, 925 bp, Heterodera glycines
  unsure (1)..(925): unsure at all n locations
ttcggccgttttctgttggatgttattgggcgttgtgggttttcattggatttggacacttttgacgaggaaaacatttttgtgaagcaggcgcgaacaatttttgactttacgcggaagggacaaaaattgcgaatgattctcggggtgtttttcccatgcgtctcacttttatacgaaaatatcactggcaaatcattcgcttttgccatggatgaagagtttttcatggaaatgatgagcgacctttacgaaaagcgccgtgccgaccccgaggcaaaagaaaaatacgccgacattttccaacttttgatgaatgcggtggacgacgaggaatttacaatttcagcagacgacgccgaaataattcacagcgaattgagaagcaatgagcagcagcagaaacaacaggggaaagcatnctgaccaggaaaccgaacttttcgcgcaaagtttcatcattttaattgccggtttcgaaaccactggcgccactctttcatttgccgcttatatgttggcgattgagtcagaaattcaagaaaaactcagagaggaagtgatcgacgtgctgggagagaatgaaatgatcacttacgagcatttgaaacgaatgaattacctccgcgcctttgtccaagaaacgctccgaatgtttccggtggcgcccaagatgaaccgcgtgtgcaactccgactgtgtcataaacggcgtgccattcgaaaggggcgatttgataactntgccaatttacgtcattcagcacgacgaaacctttttcccagaccccttcaaatttgaccccacgagattgttgccggagtgaaaagcggaaattgattcgttggcatttttaacttttgggcttggccctcgcaattgcattggcatgccgtgtgccgagttccaaatgcaaggtgccgtg

SEQ ID NO: 90650 - DNA, 788 bp, Heterodera glycines
ttttccataatccgtttttgtttttgctttttcccgaacgatcattgatcaaattaatacacttttagtattaactaaggcaatgtcatctgattttggaaaccctctgaagaagttcaaactcgtgtttcttggtgaacaaagcgttggaaagacttctcttatcaccagatttatgtatgacagctttgacaatacgtaccaggccacaattgggatagattttctgagcaaaactatgtatcttgaggacagaacggtcagacttcaactttgggatactgctggtcaagaacgctttcgttcgctcattccgtcgtacattagggactccacagttgctgttgttgtttacgacattacaaatgcgaattcctttcatcaaacgtccaaatggattgacgacgtgcgcaccgaacggggcagtgacgtcatcatcatgctcgtgggcaataaaactgatctcgcggacaaaagacaagtttcaacggaagagggcgagcagaaggcgaaggagctgaatgtgatgttcatcgagacatcggcaaaggctggttacaacgtgaagcagcttttccgacgaattgccagcgcacttcccggcattgaggtggaaaaggctgcggacgcaaaacaagtcgttgacattggcccgattaagccccgtcagattgtcactgaagagggttcctgttggtgttaatatgtgactttgtgttctgttgggttcccgttaattattgtcgttatttattcacattgtattaaatttctcgaatttaaaaaaa

SEQ ID NO: 90651 - DNA, 549 bp, Heterodera glycines
accgagtctcagaaagcgcttgaggatttggacaaagtgcagacggaacttgacactttaaatgaaacagccagcgacgaaatattaaaagtcgagcagaaatacaatcagatgcgaaagcccttcttcgaaaaacggacacacttcatcaaacagataccaaatttttgggtgacagtgttcataaaccatccacaaatcagcaatatcctcgaggaagaagaggaagaatgcttgcactatttgacgaaagtcgagattgaggaaaatgaagacatcaaggccggttataagttgaaattttctttcgacccaaatccattcttcgagaactctgaaatagtcaaagaattcaattggactgcagcagaaccgaacagtgtgacaactgaaatcaaatggaagcaaggaaaaaataaattggctaatgggactggaagcgaggaacaaaccttcttcaagtggctttgccagaacattgaacccgtttctgatgaaattgccgaggtgatcaaagacgacatttggccaaatccgctgcaatatttt

SEQ ID NO: 90652 - DNA, 510 bp, Heterodera glycines
tggcatttagaaaccagtaaacaaaatgcgaacccaaagcattttctcaattttcttccttctgcttatatttgaagtgatcaactcattcccatcaaagtcgagtgaaagcggcgaaccgcctgcaaatggagcagaagtggcgcaaagtcgcaagaaacgtcaggccgaagaagtgaccactgaagagccaccatcagaaacaaacgatgccgaaggtgccgaggatcaccaatctgcggcagcgggaaatggaaaagcaccaaaaaataagggcaaaaagaacaagagcgacagcagcgactcgtcaagttcgtcgagttcgtcgagcgaaagtgacgagaagaagaagctgaagaagaagaacaagcactgagcatcggtcgactcactaatgaggccgcttaattggattggggtcattagcgaagagtggactgtcacaattaatgttgtcaaaattgtaaagcttttattctttgatgggaataaattttattagtggaaaaa

SEQ ID NO: 90653 - DNA, 639 bp, Heterodera glycines
gagtttcgaagccccagagaaagagttcgacattttgaaaaaagcttggcctagacttggttccatgttggactggacaaaaatccagttcaggaaaaacccggccccccggggtccgggtccaaccaagcctgggacccaagtccaggtcgaaaactgtactaagaaccgtttgacaagattgtttgctttttcgaaaataattggtttgcatgcattatcacttttgtaatccaagtgcgcttaaggccttccaatgtttgtgactgagtacggttgctactcggctgacggcaatgaaaaagcaaatttggaagagttgaaaaagtggatggaacttttggacggctatggcatttcctacgccgcgtggcacgtggcagacattggcgaacagtcgtccatactgacaaagacttccgaagtgaacaacatctgtgacccggcccatttgaccaactacggaaaagccatcattaacaaattgaaatcgcaaaacaatggtgtgaaatgcagtggttaaccaaccaattccaatgaatcggcggatgttatcgaaaatgtattcaaaagttgaatattcaaaaaagtttactaacccaattattgttagtaatttcggtgtcaataattgtaatt

SEQ ID NO: 90654 - DNA, 406 bp, Heterodera glycines
gggagaggcaactgatttcgctgcttcggttggctttgtccaacccgcgaattattctcatcgacgaggccaccgcgcacatggacgagaacaatcacaagctgatcagtcaattaatcgcgaggatgggctgtacggtgttggccattttacatcggacgaccggactggcggaatttgactggatcatcgaaatgagcaacggacaaatcgcaaggcaaggacatccgtcggagttctttgaaagcgaggcacaataaacaaacattttagatctttttttcatttttctaattttttcattctttcaattctttttattgtaatgatttgttggtcctaaaatgggtgtatttatttcattcttaaaattttggaatgattcatgggaataatgccactcgac

SEQ ID NO: 90655 - DNA, 564 bp, Heterodera glycines
  unsure (1)..(564): unsure at all n locations
cgttgttcgtcaattcaattagtgcagttagcgaacggaatatggagtatgtggtgcagttccgcttccaacaagaatggcttgacgatcggttggcctacagcagactcggtgacgagcgcagctttgcccacctttttgtggcacgtgatcagacaatttggatcccggatagcttttttcaaaacgaacgaagtggccattatcatatgcttgaccaggaaaatcgttttgttaaaattcgtgcggatggtcgagtcacttacaaccggcggctgacactgaccttggcctgcaacatgaacttgctcagatatccgatggacgtgcagtcgtgtctgatcgatttcgccagctatgcctacacaaccaatgacatcatttacaagtngggaccaagtgggcgtggagatcgctccgaccgctaacggagcattgccaaactttgaaattgcctcgctggaaaataacacatgtgactcggtgacaaacactggcacttattcttgtctgagagtgaatttgagtctccgtcgcgtgttctctttcttcctcctccagctg

SEQ ID NO: 90656 - DNA, 534 bp, Heterodera glycines
ggaccaaacagaacgaacgaaccgaacactctcaacccaaccgcttctcttggcccatcctcacaaaatgtcttctcttcagcctctctttttcgccgctctctttttggcagtcttttgtctctgcgccattgcaatgccggcacagcccgaagggccaatgttcgaaggcgggcaacatcaagccgaggcggggcgtgccaaacgttggagtccgtattactacggcgcatacggcggatggggcggcgcttacccttacgcctcgtcgtactacggccacgcttacccgtactattcgggatattggtggtgaaagacggacggacggacgaacaaatcggaaggacgaaaagaaaggaatgaacgaaagacggatgaatgacgagaaaagcacaatttaatcttacaacgcaaagaaatgccaacgaacgttcgcgcgaaataaattcttttgcattgaaaaaaaaaaaaaaaaaaaaaaaaaaattatataaaaaaaaaaaaaaaaaaaaaaaaaaaaaaaaaaaaaaa

SEQ ID NO: 90657 - DNA, 504 bp, Heterodera glycines
atgttacaaaaatcttgagttaaaattacgggattttgtataggctcaccctaaatcatctcgtcttttttacttcaagcggcaatgacccaatcgccccgtcctgcttatgtcagttctttgctgttgctcttccccatctttttgcttccctatgccgtcatatttttcatcgtcctttccttctttttgttcctccattttcgtaaccttccttcacctgcgaacaatgtggccaatttcttccgcggttttcacctcggagggcatcccgcaagtcccacaaatgctccccaaaatacaattgcttctttcaaacaggcactggcggaaggcctcaatttccttgagttcgacatcggtctaacggctgacggagtgcctgttctaatgcatgaccacactttggagagaacgaccaatatgacgggccttcttcgggactacaatttcccagacttagtcgctcaatgcgattgtggggcaaagttcaagcgggtgagc

SEQ ID NO: 90658 - DNA, 447 bp, Heterodera glycines
ttttcttataattgggggttttctttctattggctattttgaggcttcaacatcgaaacacttgagttcatgggttggaaattgaactgttgggatgttggcggtcaaaaaagtctccgtacgtattggcgtaattattttgaacgaactgacgctgtgatttgggtggttgatgcttgcgatgtctgtcggttggatgactgtttcaatgaattgcattcactgatcaacgaggaatgtctgcatggagttactctcttagtactcgcaaacaaacgcgatttacccggctcgataaatgctcatgaaatagaaaagattctccggttggaaaagataaaacaccactggcgcgtatatgaaacgagcgcttacactggccacggactgctcgaatctctggaatggatggttcaagatgtaaattcaagggttctcgtcccggat

SEQ ID NO: 90659 - DNA, 343 bp, Heterodera glycines
aacaacaacttacatcccgaaattcaattaattccattctaaaatggcttcatcattgattaaattgctttcactgtttctgctcgtcctttgcattggcatggccattgagcagacccaagcttattatggctggggtggctacggctatggctatccctacgggttttatggcaaacggcaagccggttttggtccatccggaaatgttggaatttttggtggcggtggagaaggaaatgctaacggaggaggagaaggaagaggagggccatcgtcaccaaacaatttttgagagagaaaaacaattaccaaaaatggagatattcttgatttccaaaac

SEQ ID NO: 90660 - DNA, 523 bp, Heterodera glycines
attggaagtgctttcgcttgacaaatgcgacttaaaagagttggaggaggacatttttgagaatttaacatctctccgtgccctgtccctctctggcaatcccttggaccgaatccccgctgctctctctccgctccattcgctgacgcacctcgccatgtcgtccaccaatctcaaggagttaaaggagggcgactttcaaaagacagtgcctgggctggagaaactttacatgcgaaaaatgaaatatttgtggaaaattggagaaaacactttcaacggactggcaaatttgaagttcatcgatttttccacctcggccaaattgcgtttattggagccaaatgttttcgggaaggacccgccacagaatttaagcgaattgcacttacagcagtgcaatttcagcactttgagtgccaaaactttgcctcaaatttattggaagagtttggacgtgttaaaactgaacggaaatccttttttgtgcgattgcaaattgaaatggatggtggacatgaaa

SEQ ID NO: 90661 - DNA, 388 bp, Heterodera glycines
ttttctgtgtcaaattttcttaaaatgccatctttttcgtctgtttttgtcctttttgccatcgtcgttatttcgctgggaaaggaacagcaaaagggggacgaactgagggcgaaacgacaaatttgccaaggcttttccgcccaatacggcgcatgcattgcacagaaatactcacagtgtgtttggtgtaacgatgcggattacagagggccacaccgatgcgatgagaaatcatcgatgaaaggctgtgttcaaattgtgcagtgaaatcggcacaattaatgacggaacggaggaaatggaacaattaattagcgaaaggaaaaacacaaaagcatcatttattgtttctcgacacgtattggcatagattattgtctgtcca

SEQ ID NO: 90662 - DNA, 532 bp, Heterodera glycines
tcacacacgcattacttcagttgtacgctgctttacctgttcttgggtgccaattccaagcacattcaggagcagatcactcggtaaagagtggcttttataagacctaaaagtcagtcctcacagtcccgatttaaatgtgatttaaattgtctcacaatttgttgtggtaatctctccccccaccctcttcgtattttccgtccctgtagatagataacttttacacatttaaaacaatatagaagggggttttaccatgcaagacgaatttttaattttttgtttttccatagtattctttttgaacgtttggttgctctccgtccgcacccgtggggtttgttgatcacattcatcgaactgatccgcaaccagcgttacggcttttggaagcacgaatttgtttattgtgccacagaaattgaacgtttgttcctcagcgttgctaattcttgcagtgtaagcggcccgaaagtcatcactcaaacgggatttaaattattgctttaatatattttatcaatgacgc

SEQ ID NO: 90663 - DNA, 497 bp, Heterodera glycines
ccggcagtggcttcaaccaatgccatcatagcgggaagctgtgctcttgaggcattgaaactggcatcaaacatctcatgttctctgaacaattacttgaacttcgctaacgtggaaggtatctgtttcaacgttgttgcattggaacgtgatcccgaatgtttggtctgcggtcagaaatctgtccaaatgtattccgtgcgcgaggactgtacactctcaggctttttagatgacttgaaagacaaataccaactccagaatccttccattcgagcgggtagcactttcctgtatgaaatcaacactcttatgccagaaatggagacagcaagtcggaagaatttgtgtaaaacgctcaaggaacttcatgtcaccgaggatagcgaactgcttgtagcggatgaagcattaacgagatctattgtttttcggatcaaatattccaaataaattttattcgaatgtccgataaaatatctctgaaaaaaaaaaaa

SEQ ID NO: 90664 - DNA, 333 bp, Heterodera glycines
  unsure (1)..(333): unsure at all n locations
attgctgctgttgcgcaagggtttaaggttttcgtcgacggagcgtccgtttgcgacttcacttttcgtgcttcagctccgccaccaacagaagcaaaccgactgacaattgttggtgatgttggggtacaaaaattcatttttcgtaaccaaaaaaaattaattttctcagttcatacaattggaaaaacttttcactttcgaatttggttagatcatccaattccctgctttgttttatgcacattgtgacattttcgggtacttatttattaaagtgaatttgtaattagataaaaaggcagtgataaaatgcnnnnaatnnnaaaaaaa

SEQ ID NO: 90665 - DNA, 400 bp, Heterodera glycines
tcattaattaaattaaatatatttttgccatgtcttctctgctgctctccatcttcccaattgtgtttttggtctgttgcaatgcaatgccaaatttcccgtgctgcccgggcagtcagcaagtggttgctgtgatgtccaaatacattgacactttctcttctgctgctgactagtctacagtatgctcaaccgctaaaagtactgtggatggaataaaaaatgaactgtcctctcgcggcggatgccaaaacggaggagaagcgcagattgtggatggaatcgatcgacagctgaagaacattgcgaaaatggaaatcaattatgaggacgagtgcccgtacaatttgggctttgcccgtgccatgttcgacttggccgctgctgctgctggccatgc

SEQ ID NO: 90666 - DNA, 504 bp, Heterodera glycines
gttgtggcacaaataatcttgatgttgtggaagagaagacattttcgctcataccagttcgccactttggtcggtctttggctaatcccttttatggtgtcacttaaaaatggctggtggcgattcattctttcctggactgtgttcacttcttcaatattttacgtttggcggagggtcaatcagccggcaatttccggatcaactcccaggctcgtctacaaatactttttgttcatgcataaactcagttacatttttggtattgtcggttacttttcactcgtctttactgtcattggaataaattcggtgttcggaattagcagtaatctgagcttggattttggcgtgcatttgttgttttatggcctttattacggtgtgcttggacgtgatttggcacattctctgaccgacagattggcctgcaaaatcgggtattttactcatgacggattgccaaaacgggttctcgagtcggatatgtgcgccgtctgcggg

SEQ ID NO: 90667 - DNA, 517 bp, Heterodera glycines
gaacgaaggccgaattccaaactgaaggtaaatttggaaaataaatgctgttccccatttataccgtttcaaatactcgcggtgccacaaaggaaaggtcggaccgccgtgggcggacggcattttgtcaatgccgctgtggagaaaggcgaagcgatcgtactcggagcagccgttgtacagatgcttcagtttcaagagagcggaatgctttaagggtggtaagaggttttgaaatttcacaattaaatttaattgcttacgaatcggtcccgttgctcatcactgagcattcggtattccatgcgcaatgccttcccataacttttcccattgattgagcactgagcaggcgaagaggaaattcctgaaattggaattgaattagaatttaaccattaattagcttagttaaacaattgtatttgtttattattaccatcaacatatgagcagaagcaagtgaggttaagacaagcgagcttttcggcctgtaatttggcgggggtttctcatc

SEQ ID NO: 90668 - DNA, 649 bp, Heterodera glycines
tttcggcctaaaccacaaaactaattaacattaagctggaagcaaacaaaggaatttaaataaatgaaagacattgccactgaagaaagtattgcacagaggcggcttaacctaaaagcgaatttcatgcggcagctacaaattcggcgtggtgttcttcccagcgaaattcccccggttggagtcgccacaaacgcagtgcccacaatgggaagaaagtttcgaaagcctttggaaagtcgctttccaccagccaaaccccgttttggccttggaatgacagccgccgatttcgaagacaaaacggacaactgttcttcattagccaaagggccttcactgacagaaacaaatgccccaaaaggaaggaatgttcgtccaaaagcaattaactgttacatcaatccgtcgcaatccgtctccacttggccaacttcgaatgacacggactccgatggacaaagtccctctccgacgagttcggcttccgtcacgtctttcggttcttcgctgaccaccgccactgatcccctcgtcgcgcaacacgtggaccaaaatgggaccatctttttccccacttcctccactccgtcggaccatggacaaagttacgacgagacgccggcttcttcagtgctcactttcgact

SEQ ID NO: 90669 - DNA, 749 bp, Heterodera glycines
aatgataaaatatcttatccaattatattattaatcttatttcaaataaatattgtcgctttagtcaagcggtggtcgcttgtactgccgaagacccgcaagcgcaactcgtcagtatttgggatgaggccgaaaatcggcttatttcacaaattattacccggccgcttgcacgttcacttcagacctataatttggcatcaccaattttcaacactttttggatcggtcttcgccgtgtccttgtcggaaatcgctaccaaagcacatggacaaacggttcggcagcaatatttggcaatgttcccgaaattacaactgctgcgtcaagaaacacatcgccatgggcagcaggacaaccctcgggcaccaacaaatacactgacccaaccggcgcaaaagaggagtgcgtgcacatgctaaatgcagaaggccgatggaacgacgcgcgctgcgaaattcaaatgacaggcgcgatttgcaaaaaagcagctcagtcggttggaagcagcggcacggtcgtgtcgagtgccgtcgttttcccgtcttcggccttcgatttgtgcaatccgagtgtttcgcaatgcaatggttttggatggaccatttccagtggcaaatgctacaaagtgatcgagggactgatgaatgggactcaagcggtggtcgcttgtactgccgaagacccgcaagcgcaactcgtcagtatttgggatgaggccgaaaatcggcttatttcacaaattatt

SEQ ID NO: 90670 - DNA, 569 bp, Heterodera glycines
ttcattttcaaactactctctctcactaactgttgcacatcccaattttatttcttccttagtaagtagtattggtgcacaatgcgcacttttctgttcatagctgtagtcgggttggtgttggctgtcatcatggagagtgtaaatgcgactgggaataattcgccgacaaagggacaaactccgcctggcagtccgaaaggtgggcacggcagcaacaaatcgccaacgacgccgcacagtgccggttcgccacacggcacgcagcatggtaaccaacagaaccatgctaccggacaaacgccgcctggcagtccgaaaggtgggcacggcaacaacaaatcgccaacgacgccgcacagtgccggttcgccacacggcacgcagcatggtaaccaacagaaaaatgctaccggacaaacgccgcctggcagtccgaaaggtgggcacggcaacaacaaatcgccaacgacgccgcacagtgccggttcgccacacggcacgcagcatggtaaccaacagaaaaatgctaccggacaaacgccgcctggcagtccgaaaggtgggca

SEQ ID NO: 90671 - DNA, 555 bp, Heterodera glycines
ctgcaaaaatatttgccatttttattgaaagaaatttcaagagaggaggggaggcgacaatttttgttccttcatgcgttgaaagaggtgattaacagcgaatgcggagaatgtggcactgtcggagacgctgacgaaatattcaaaaagggcgttgaacaaatttgggagcttttgatgaaatactgcgactcggctgaggagagcatcagaaatgtcgtcgccgagtgcatcggtcggcttatcatggtcaacccgcaaaaatacgtcgaagaacttttgcgacattctgccgattcacaagcaaatgttcgtgccactgttgtcacagctttgcgttttattatcgttgagcagcctcggcccgtcgatgattttcttcgtccggttattggcaaatttttggccacagttagagactcggatatgactgtgcgccgtgtggcaatcgttacgctgaattcggtggcacataacaaaccaaaattgatcaaagaatgtctcccaaatttgctaccggccctttatgaagagactaaggtcaagcaggaactt

SEQ ID NO: 90672 - DNA, 88 bp, Heterodera glycines
ttagcgaagagtggactgtcacaattaatgttgtcaaaattgtaaagcttttattctttgatgggaataaattttattagtggaaaaa

SEQ ID NO: 90673 - DNA, 589 bp, Heterodera glycines
aaaaaataagctaatttgcgtttggagcccaaaattgaatctctgtgtgctgttaataatccgctcctgctctgattatttacaaatttggtgatatttgtcattttctcaaattttcaatgagcggttacgtcggcatcaaattttgccccgaatgcaataacatgctttacccgcgtgaagacaaacaaaatcggcagcttatgtacgtttgtcggaattgtgagcacagcgaaccggcggacaatccgtgcatttatgtgaacaaactgactcacgaagtcgatgagctgacacaaattgtggcagatgttattcacgacccgactctgcccaagacggaggagcacccgtgccccaaatgcaaaaacgccgagtcggtgttcttccaggcgcagtcgcggcgagcggaggaagaaatgcgtttgtattacgtgtgcactaactcacagtgtactcatcggtggaccgactgaacgaacggaaaagaaaaaagggacagcggacggtctgagtcctttttctgtttcgatctcagcgaattgcgacggcggaacatttctattcaccaaataaacttaaagccgaa

SEQ ID NO: 90674 - DNA, 594 bp, Heterodera glycines
gctccattttttcctaactgaaaaaaaactaggtaaataattaaaattatgcttatatgaaaaacagaggaaaaagcaaccaaagattttaaatctctttgtattaaacaaattaaagaacaaaaaaaaagtccaataatagcaataaacaaaaaaaaaaaagaattactaaataaaaaactaattaaaaatcgactaaaaccatgaaccccaaattttaataaaatcccagctaataatatactagcaacagtagaagcttcaacatgtattttaggtaatcaaaaatgtaaaaaaaaaactggaaattttattaaaaaaaccaaaaccataaaaaaaaatatttttttatttaataaagaatcaaaataaactagaaatttaataaaatttaggttaaaatcatttaaaaaaataaaaagaaaaaaaataacccaaaaaaaaagaataaaaaaataaaaaaaaaatagaaataattttttcaatttggactccaaaaaataaagtcaaaaaaactaccgggattatagaaaagtcaaaaataataaaaaaaaaaataaaccttaaaataaaaaaaaaaaaaaccttaaaaaa

SEQ ID NO: 90675 - DNA, 168 bp, Heterodera glycines
gaatgtcagtgaactcggaatggtcacacagggcggcaaagtggtgtgggcaaaatacgctcaagtgactaaccatcccgagaacgacggatgcatcaacgctgtccttttgttgtagagcgaccttttttgttatttttttctttttaaaaagaatttgtttaaaaa

SEQ ID NO: 90676 - DNA, 552 bp, Heterodera glycines
ggcattggctgtgtgccgttgtacaatttgatggaggacgcggccaccgccgagaacagccgcacccaattgtggcaatgggcgcgccatgaagcgcgccttgaggatggacgtacagttgatcctcagctggtcaaaatgacaatcgcttctgaaactgagcggcgcctcgtccgtgccggctctgtggtcaatcgcatcccggaggcctcggaactgctcgagaaattcgtgttggagcccgagttgagcgactttctcacattggatgcttacgacaagctcgtctcggaaggcaagtgaacaacgaacgggggacggacacttctgtaaaatctaagtgaaacagcgtcaaaatacctaaaaaaaactttctttctaaaaattcctcaaattgccataggcaataaattgattttaaatattttcctaattgatcatttattttatcagaaattcattcactttttattttattattattacgtctttttcttatttcgttctcctcaatataagcagttttcataataaattatctaacttaaaaaa

SEQ ID NO: 90677 - DNA, 184 bp, Heterodera glycines
agatacggccacattccttattatttattttttgatttcattataccctctatcactttactctgtgagaaaaatttaattgtttgctaaatttttggcaagacttccttgaaaaaataaataaaacaaacgaaaaaaaaaaaaaaaaaaaaaaaaaaaaaaaaaaaaggaaaaaaaataaaaa

SEQ ID NO: 90678 - DNA, 359 bp, Heterodera glycines
tacagtccatgcagtaccgtatcatggcccaattattcaccgtagtgtcgctggttgttggcacgatgtatttgtcgagtaaagacagcgcaaaatgagagggacagaagagagagagagagacaaaaatgaaaacaaataaatgcatttacagtacctattgttttaaggtagtcaatcgtttactgtagattctgattgctctttttaattgtctatttatttgcattaaaacagaggaccaccaaaccgtagataattagtgttgtaaaagtgctaatttaaggaattcgtagctgtacactagaattcaatttttgtttttaaaattttaattatgttcataaaaaatgtcgaag

SEQ ID NO: 90679 - DNA, 407 bp, Heterodera glycines
atcatccaccaacattcactttcgatcggaatgttttggaacaaaatgaattggacggcgatgacgaaagggcgaaaaaatgaaagattatctcctttcgattgatggacggagatcgattgatcactcggtatggagtagtgatcaatcgatttaccaatcgattgatcactcattttgatccgttggattaaatcgaaaggatttaacggacaaaacattaaaatgaccagcacagaaaaaagaccgaataattaatgaactgggctttgtctggtcacatcgttcgaatttgtgctttgatctcagccgccagatgacataaattaaaccggggaaaaaagcgattctttcaaaaaatttccatgtgtcgttttttgctcaagaaaataaataaaaatcgtttc

SEQ ID NO: 90680 - DNA, 474 bp, Heterodera glycines
aatgtggaaagaggactcggaagcgtcagaagattctcacccgctgctgtggcgtcccgaaatactcaaaaaacagcgtttttaatcctgttgttttaattttgcattatacatgtttttaattataaatgaacaaacccaaaaattacaaacgcacaaataaataaatatggacaaagaaaaaaaaaaaaaaaaaaaaaaaaaaaaaaaaaaccaaaaaaaaaaaaaaaaaaaaaaaaaaaaaaaaaaaaaaaaacaccacaaccctgtgccctccgccttgttaccactgctttattagaaataggggacccttcttaaggacccaagctaagtaacgcgggcatgctacgccatagtccttctataggggcacctaaattcaatcctcgggccgtcgttttacaacaacgggacggggaaaacccggtcggcacccaactatatccccctccagcacacccccctttcgca

SEQ ID NO: 90681 - DNA, 484 bp, Heterodera glycines
cctcgttttcttcaattttacactcgacctgtaattttcaattttgaaatgttcacgaagctcttcttcgctgttctgcttcttctttccgtgctcctctcatttgagcatccttcccaaattgccgtggccaatgcttttccttcggaagtcaacggccgaatgaatgagcacaggcgaatcaaacgcctcagctgcaccaacgacaaatgtttcaagaattgtgcaacggaaccgggctcgcagaaggaatgcgcgagtatttgcgaatgcaattttagcagcgggtcgattaaggcaaaacaaaatgattgaaacaaatgatggagaaagaaaagtgaaatggggagaaaaaggagcgaaaagtggtaggaaaaggaacgaaaagagggaagaaaaggagcgaaaaaaggtagaaaagggagcggaacgatggagaaaaaggagcggaatgagggagaaaaaggagcgaaaagcgaatgag

SEQ ID NO: 90682 - DNA, 505 bp, Heterodera glycines
caagttttttacaaccacttattgccaatttaatttcttgcagatttaaagccatccattgcctgccggttctcggcacagcaaagcactaatacggtgtttgactcacttcaaaaaaataattcattacccaaaagttttttacaaccacttattgccaatataatttcttgcagatttaaagctatccattgcctgccggttctcggcacagcaaagcactaatacggtgtttgactcacttcaaaaaataattcaacacccaaaagttttttacaaccacatattgccaatctaatttcttgcagattgaaagccatccattgcctgccggttctcggcacagcaaagcactaatagggtgtttgactcacttcaaaaaaataattcaatacccaaaagttttttacaaccacatattgccaatctaatttcttgcagattgaaagccatccattgcctgccggttctcggcacagcaaagcactaatagggtgtttgactc

SEQ ID NO: 90683 - DNA, 350 bp, Heterodera glycines
cagcgctcagttagcggcggagatgcggcgcagtcgcggatggacaaatgggtaccgaatcggacagtgacaaaaggccaaaacgaaacgaaaaaaaagacacttcggcaacgccataaaaaaacaaaggcgcatcgaacagttgaaaagccaggcaattagcggaaagcaaacaattaattaatggctaattttgttttttgtaaatacccatccaaaacaacccccggggcattcgttcttcactcatttatttgtttaacggcgcattgaatctcagtgattttaaacacataatttatttctcacgaattgaaatgataaagtcggtttgatacccaaaaaaaaaa

SEQ ID NO: 90684 - DNA, 875 bp, Heterodera glycines
agtgcggaagaaatcgcacgaaaaattggaaaagtaagggcgaaaaggggatggaggagaagccatttaccaaataaagcacaatcacaaaaaacacatttcaataatcagaaccgtcgaccctccggcgacgtcgtcgtcctttcgcttcattggggcggcaattggggctacgaaatatcgaagacggagagagactttgctcatcagctgatcgacagtgggacggtggacattttgtacggtcactcatcacatcacccgaaagcgattgaggcgcataaagggaaattgattctttacggatgcggtgactttctcaatgactacgagggcatttcgggccataatgaattccatgacgagctcactttgatgtacttcccagttgtcgatggcaaaaatggcataattattcggttagatgctgtgccaatgaaaataaacaaaatgcgcctgaaccgtgcaaatgccgaggattctttatggctttatcggacgatggcacgcgaatgtgccaaattcggtgtccgcgtacaacgcgatgagaagacaaatgttttatcatttctttggtgaaacgaaaggcaatcagtttcatttggatatgaatattctaattttatttaattaattaatttattttttacgactatttattaaacgatggaattattctatttattcaaaggcattatcatttcacccttttgtcatttttctccattataaatttacagcttttgccttttctaatgcccagaaatgtaacggtccaacaaattttggtaggcgaagtgaaaacggcgaacgatgctcaatttgtgagtgcgaattgttcagtcacctttggtggaagagaaaacgagcaacga

SEQ ID NO: 90685 - DNA, 121 bp, Heterodera glycines
  unsure (1)..(121): unsure at all n locations
atgttataatgatacattattgaaactgtttaaaattgtgtcaaaaattattttttcttcaaatttttgttgtcgtaaacttaattgtttttttatnnnannnaaaaaaaaaaaaaaaaaa

SEQ ID NO: 90686 - DNA, 490 bp, Heterodera glycines
tgatgaacaaaatttatgccaccattcatttcttattgcttttgactgtcattgctaacaaatcgactaactgtgctacaaatggtcaaggaactcaaactgttaaaacagcagatgcaacccatgatgaagctggaaaaatttcgcgtgattcatcatcaagttccgatgaagatgactcaacaactgcagcctcaaaaatgctactgaatgaagcaaataacgctttctccaaagataatgatgagccgattaaccagcagcagaaaatgaggcctgaagctaattttagcgttaaatatcttcccccgagactgaacgctgcacaaattgacaacattgcacaacaagcatcatccatgatcacattacgcacattaaaacatgtgaaagaagttttttcaaaatttgcgccagattcatggctggaagcactggaagatattccactgccgactattcgctgcactgtcaaagtgagcgccaaagt

SEQ ID NO: 90687 - DNA, 396 bp, Heterodera glycines
acagaaattaacacgactcattgtcacttttgcagagattccctcattcgtccgtcccttctcacttcccaggacttggattggtttttacattacagaccatcgataagaaatacctaaaatatatgtttaatctactaaattgattgcatcatcctcttttacagaaatttacttctttttttagtagaatattaccacatatgttttggtcattcttttataaccaatggcttcgtttctcccagcaaaagtttcatttgcttttgcacgatgaaaggctttttctgtttttggccgattttatgttggcttctgcgctgattacatttgtgactttcacattttttggaatgcgtgcttcttacggaagatatgcagctttgtctttctttt

SEQ ID NO: 90688 - DNA, 562 bp, Heterodera glycines
  unsure (1)..(562): unsure at all n locations
tctgctgagattcccccggcaaaaagtgcgattaatggcaatgataatgcaaaaagaaaacacaaattancggaccaccgaccgaccaaagacaaagcaaaacaatcgccgcattctttgctttccatttaattccaatttagttcaacaaaatttgaatggataccgctgngaaagacaatcaaatgccgagcagcggtcgcttgggagccgaaaaagccattggttatcgaacaaatcgaagtggcgccgccaaaagagggcgaagttcggattaagataatgttcacggccatctgtcacaccgatgtttttcaagtcagtggcattaatccaaacgtcaaatttccaacgattgtcggccacgagggtgccggcgtggtcgaatcggttgggccgggcgttgaaagtgttcgggccggcgatcatgtcattccaatgccgttgtgccagtgccggaagtgcgaggagtgcgctgacccgaggacaaatctttgccaaaaatttttatatttgtaaaaatagtattttttaaattaattaatttaattgtcataaaaaa

SEQ ID NO: 90689 - DNA, 589 bp, Heterodera glycines
ttttattatttctgataaattttgagaatggagaaaaacaccgaaagcctttccaagttggatcctagcgaaactttgggaaccgatgccctcttacaattgatggaactgatcaaactgaggcctaaacagaagcagggggaagtcgagtcggaaaaaagggaaatggaaaaaccaattgcggactttcaccaccgcaaaacggatcagataaacccggacagcagtgaactgaagaaggaactgcgtgaaaaagggaaattggaaagttacggacgaatcactgatgaaaagggggaggagaaagattcttggggccatgcgcttcagaaggaattggacgaaaaggtgcgaaaattcagagagctcaaccgaaagaaatgaacgagaatttaattgattttaccggcattttcactttttcacaatgttagaaatttatagcattattcattttgtttgattcgttcattcggcacaacaactcaaaaccagaaaatccagggattatgccacacagaaaattgttattaatataacactttaatatccaattttgtttcctatgacgaataaagctctgactgtg

SEQ ID NO: 90690 - DNA, 480 bp, Heterodera glycines
tttgtacgctttgttcgatgggcatgccgggcgacgtgcggctgattattgtgccgagcatttcgctcgattgttcgttgctgttttcaagaaatgtgggaaaatttctatgaaacattattttttatatatacagatgtgcccccaaagagtgctatgtcagtattcgagaaatccattcgtaaagtatttgtcgatacttataagggtatcgatgatggtttccttgttgaagcaagacgacagaaaccaacgctgaaagatggtacaacggcgacaaccatttttttattggataaaacgctttactgtgctaatattggcgactcgaaggctattgtttgtcgacacaaatctgaaaagagcacaaatattccgctgcaaatcactgtggaccacaaccctcttgttttgacgaacgaatgcgtattcaaaagtccggcggaacagtcaaggatggccgagtttttggcattttag

SEQ ID NO: 90691 - DNA, 610 bp, Heterodera glycines
ggacttcattttcaaactactctctctcactaattgttgcacattccccaattttatttcttccttagtaagtagtattggtgcacaatgcgcacttttctgttcatagccgtagtcgggttgatgttggccgtcatcttggagaatgtaaatgcgactgggaaaaattcgccgacaaagggaaaacagtcgctagacagtccaaaccatgaaaaagaccataaaaatgagcatgaaaagtatgaagcagcttactttcaaaaaaaaccgtcgccagacagtccaaagtatgattccccaattttagccggttcatctggcagtccgaaaaaaggaaaatcgccacatgccgatccgaaaaaagctgcttcacaccttgtgccagtaacaccagggaaagtatgatgagcaagccttaaaatggtgaagaaactgtgtggaacgatgatgccaaccatgaacaaacccaaagctgttgtagtagatgtagaaaaaaaactgtggtatcatcacgctattattgttgtgtaaaaaacgatccgtttttacctcttttcgggaaaaaaaactgcaaaaaattcacaaaaaaaaaaaaatctcacattgtgca

SEQ ID NO: 90692 - DNA, 544 bp, Heterodera glycines
aacatttccgaagcatttcccatgaccgattcaatcggcggcatttgccgaagtcacctgtgccgcagtcagtcggccacaaatgtgcccgaaagttgggccgaccgcccgtatccgaagatgacgcgggtccattccacgacggacatcgcacagcgatacgcggagatcaattcgcccacgagatactggcccaaaaacaagccctattactggccgatgaccagcaacttgtgcaacatcgtctccaattacaacttttacccattgttccgttcttattggccttcctatcgcagttatttgttggacaccaattgggacaatcgccgcttcgaccgtttccaatttttgccacccgattcttattatagctattggccaatgtcctgcagttatcactattggtaccattatccatatttcaaacgatggtatctcggaggcctcggtggagtttcgcaattccacaaacaatgaaagtgaaaacggatgtatagcacagaaacacaatgacgcgtaccgtaccctttaccgtagttcg

SEQ ID NO: 90693 - DNA, 171 bp, Heterodera glycines
gatgtgctcgcgtccgaattgctcgccgcgatggaaaacgaaggactgaccattcaggcgaagcaggagctgcacaaaatgtgcgagcagaacagaagttactcgagcatgaagaaattctgactgtttttctttgttttgtgatttggtctaaatttgatccgttaaaaa

SEQ ID NO: 90694 - DNA, 402 bp, Heterodera glycines
tattttcagcattactctcacaatggcgtcaaaaattaaaccattaatttgtccgtcgatattaaatactgatctgtcagatttggctgatgaggtgaagctgttctaatagcatattataatattcattatgtgaaattcaaatgctttgctttagtgtcgaagacttatggccgctggtgcggattatttgcatttggatattatggacggtaaacggacaaaagcaacaaaaagactcgaaaattaactccctattaaagggcaaacaattgcgacttatttgagtcctttgccatcatttcccttccctcgcattctttcgttttgctttaggccatttcgtgccgaatttgacgttcggacatccgctcattgaatgtctgaggaataaactgggaa

SEQ ID NO: 90695 - DNA, 674 bp, Heterodera glycines
aataaaaaatcgaaaaaatgaaaaatttccttacatttttggcttttttcttaatagtgccatgtttcaaggctgacaatgagaaaaacaaagcggcaccacgagtgtttgctgaacatccggggccaaaattggtggacgaaaccacgcgatggagcaaatgccaagcggaccaaaacctgaccatttatgacttcgaagtggaaacacttgacggcaaattcaccaacttggagaagtacaaaggacaaattgtactgctaattaatgtggcaacattttgcgcgtttacccaacaatatttggacttcaatccaatgctggagcgtaaccgtgccaacggcgtcccattgacaattttggcatttccatgcaaccaattccatttgcaagagccggccgagaaccatgaaattctcaacggggttatgcatgttcggcccggagacgggtggaaaccgcactccaacctgcacatccatggcaaattggaggtgaacggcgccaacgcacatccgttgttcgactttttgcgcgactcgtgccctcaaacggtccctgtgcttgggatcaaggaatcaatgttctataatccgatcacggtcagtgacatcacttggaattttgaaaagtttatgatcgacgctaacgggattcctcgttttcgtattcac

SEQ ID NO: 90696 - DNA, 134 bp, Heterodera glycines
ggttcaatgtttacggagggaatctccgaaggggtgataatccgaaagatattcataaatgaattaaaaataaattaacaaggaaatacgaaataacgttcaatgaaataataaaattcacttttatttaaaaa

SEQ ID NO: 90697 - DNA, 657 bp, Heterodera glycines
ggacacttcattttcaaactactctctctcactaattgttgcacattccccaattttatttcttccttagtaagtagtattggtgcacaatgcgcacttttctgttcatagccgtagtcgggttgatgttggccgtcatcttggagaatgtaaatgcgactgggaaaaattcgccgtcaaagggaaaaccgtcgccagacagtacaaaccataaaaaagaccataaaaatgagcatccaaagtatgaagcagaacttatatatgagcaaggaaaaccgtcgccagacagtccaaagtatgattccccaattttagccggttcatctggcagtccgaaaaaaggaaaatcgccgaatgccgatccgaaaaaagctgcttcacaccttgtgccagtaacaccagggaaagtatgatgagcaaagtcttaaaatggtgaagaaactgtgtggaacgatgatgccaaccatgaacaaacccaaagctgttgtagtagatgtagaaaaaaaactgtggtatcatcacgcttttattgttgtgtaaaaaacgatccgtttttacctcttttcgggaaaaaaaactggaaaaaattcacaaaaaaaaaatctcacattgtgcacccttttctatcatttgtggagtaaagaattttctggaaaa

SEQ ID NO: 90698 - DNA, 723 bp, Heterodera glycines
gcattgttgtgatcggcttcaaaccgttgcatttgctgaaggattcgcatcggatgggcgccgccgtttttgtctatcccatcgaatcggtaatctccggcagttccgccctttaccgtgcccttctgaagcgctgtatggacaaacaattgtttgtcctcgtccgttatacgcataaaacgaacactcctccaaagctttgtgcgctcgtcccccaatcggccgaccgaattccgagtggttgtgtgagcagttccatccgaatggatggtcactctcatcagatgcattttttagacactcgcgcgcgaatatttctacgacggctttcatttggttgaaattcccttcgcggaaaagtcgcgatcgatggaaaagcgccttctaccgccagatggcggaattgggacatggcaattggccaatccggaccaagtggaggcggccaagcagttcgtcaaaaaattgaccaacaccaaattctctccggacgattttgcaaatcccgtgcttcaacagcattacaaagctgtcgaaatggtagcattggatttgccatttgacagcgaacagttcaaaaaagaggcagcggaaaatgacaaattaattccgtacttcaaaaatccaacttttgagcagagagttgccaaagaattggaagaattcgcagggatttgtgagacaattgcagaaacaagggagaaagggaagaggaaaagtgca

SEQ ID NO: 90699 - DNA, 867 bp, Heterodera glycines
cggaaaacaatttcactgacaacacaacgtgggacagccgacttttggactgcggctcgatgatgacgcggtccatttcgcctcttaagggccaatcggcaatgttcaggggcgggtcaactgtaccaatgcttcaatgccgtgccgtggacattcacacgtcctcaccgctggcggggctgggacagcgcgcaattgccgtaatggacgacggggactttggcagtgtggacgacgtgcagcagaaataccgcaggacgggaagtgccggcacaaacattctctaccgtatccgtcgagaagagcttgcccaaggcaaacatccgacagttcgtcaaatggcccgcgcttttgaatcatttgaaaaactccaacaaaaggggaacagcagtgaggagccaaaacggaaaagaataaaaccgacaaagggcggactattcggactgttgggcaagtcgagttcgatggaagtcagctcaatgtcggaaaagaatttgaaaactccaaaggcatttcgaaagggcgaacacgtgcccagtgaaaaaatgcccggttcaaacgaacggacccgcggaggcggcggcagtccttccccgtttccgtcgtcgtcgcttccgcgcggggggcgcaatccgttcaaagggatcagttcgcgcatcgtggaacgcgtgcgcaggtcgctgtcgcgcagtaaaaagaatttaagccgcgatggaggacaaagtcgggacggaacgccctcacagaacaccatcggcataaaagcaggtggggaagtaagagaagaagtggactgatcagtgaggaacaaaaatggggaaggaaaagattgatcaatggagggatggggataagtgaactgatcag

SEQ ID NO: 90700 - DNA, 531 bp, Heterodera glycines
  unsure (1)..(531): unsure at all n locations
ggaccattcaatttaattatacccaattaaaaaaagtaaatcctctttaaaaatgaaactttcaataattttattgctttccttggccttttgtgcgttaatcatcgatgcatatccatcgggaaatggtaaagatcttgaagctgacaacgaaaaaacggaagtgaaggaagagaagatggaaaaaagagaagcggaagtggaggaagggaagaaggaaaagaaagcagcagaagaggaggtagggaagaaggaaaagagaggaagtggaggtggaacatggggcaacggaggaagaggaaacgaagaaggaaacggaggagngaggacacggaggaggaggacatggaggaggacacggaggaggaaatgacagcagcggcggaggtgatgattagaagccatagctaaaaagaaggagcataatatggaactaagaaaagaacgagcacaaaatgcttttagtcgcttattttttgctgcatttaaaatgttaaattttaaaaataaaaataaatttttgtattttta

SEQ ID NO: 90701 - DNA, 736 bp, Heterodera glycines
atttgaaccgggcaatgcttacaatccgcaagttgtgtgtgaggcgaaggtcaaaggacagcgtttgtttgattggtgcgagacggaagagcggaagaaacggatcaatgggcagattgacctggtccaggctgaaattgaagcagtgactcgtctacggcgttccttgcccaataaatccggtgttgattttgaacgcatcgaacatcgtcttcagtcgaatggaaacggtccaacgtggaggacaatgccgaaggggacattagcaaatatggcgaactgtgtttctcactttcgaaggaccattcatccgtcgcttttgctgttcctgttcaaaaagcaatgcattgacccattctgtcgctgaacgggtggttggcctcctctcctggcatgatcgtgaacaaatttccggcctctttttgacattgaacaaactttttggacgccatttcatgcgccgttctgttgctgcccgcttacaacaccgttcatcacaaacgaccctcaatgttcaaacagtgaatgaagaaggactgggcgaagccattgacattgattgttcgccaattaccaaccccgtgccgtccacttcccgtgcccatgctcaaattgattgcaatgccggactcttgggaattttgaaccgattggaccgtttgagcgaaacagtcgaggcgatgcgcacttaccagttctcgttgctgacgactcaaaaactgaacgaatgggacat

SEQ ID NO: 90702 - DNA, 209 bp, Heterodera glycines
ggcagtgagaacaagcggagaaatggggagatggacggagagtgctttgtggacaaaatgagtggcaaatgggatagtagccaacaataaattcttttgctgtgtaaaaggtgttcgttttcaaaatctgcctcattttatttgcctactgtatgtatttaccccttctttctgctgttacggtgtgttttgttgtgtattttgttttt

SEQ ID NO: 90703 - DNA, 56 bp, Heterodera glycines
ttcatttgctggtaaccaatttcagaatgtgtgtaattaataaataatttggtgca

SEQ ID NO: 90704 - DNA, 408 bp, Heterodera glycines
gactcactatagggggcacaattagtgagttaaacattgaatttgccgggggttggccctcgcacacaaaatgccccaaaaatgccggcactttgggcattttccaaagtcactgattgatttgccattcctttctccaaattatcccaacggaagtctaacacaacgaattattacgatgccaataacagaaaaaagagtgccgttgaggatgaaacgccgaaaatcgaaaatacattctcgaaatgtgttccgaacgccgctgataattcccgaattggaactgatgaaaaagtggcgaaacagtcgaagaaatgacgaaaagccaaggggagaattaccaagccaaggggaagatgaagcaataaaattattgctgctgaatgatattgggcaaagtgcggaaga

SEQ ID NO: 90705 - DNA, 631 bp, Heterodera glycines
tgccgaaaaaataaactgaattaaattggatttatttttgaagctcttagtttgccatgaaaaagcttcttctctgtgtgtttctgctgcttcagtttctgctcgccaccgatgcgatttcagtgcaaagcgaagttggccaaccattttttgaccaacagagcgaatttggcacagtgccattgagcgaaatggaaaaacgtcgccgtaggcgcttttccaaactaaaagccgccgccttgggagcagctgccggattgggagccgccgtcattgccaaacacgcgggatgaagcggaacgacggaagggagtaaaagaaaggagccgaagatcaaaaaaataaattttattttgtaaattagatggatttgtaaatttgtttaaaattgcttaaatgagaatcttgagaaataacttcctcatttttggggtgctctcgtctcgcgtagtcaattaattctcgaactcaatcttgacttggtttgctttttgcctatgactccctctcgccgttttccgtaacccttcgttagcaaatgatccaatcttttgcggaattgtcgtcctcgtgtttcttgctcatctaattgctttgtttaattgctctaattaattaattgactatgaaa

SEQ ID NO: 90706 - DNA, 559 bp, Heterodera glycines
ttcacatttatttccatcgccttgctgtgcaaacaccaccgcagcaaacatcatataaatgctggaccattggacgctgaaaaatcgccttcaaatggtgaaggaatccacaaatatgaagcggagaaattgaaaattggagaagttgcaaaattgaatcatggtgaaacaaaaactgaaatggatgaagcagatggccatagacattcattgccaaaagatcgtggcgatattgtgcatccaaaatctcaggacggagtgtgcaagattcatgaggatgtgaagcttgatttcaatgatgacattttcggccaacatgttagtggagaagaacgtccgccagtggccgagccaatgccaatgtcagcttaaattggtggcattttgagaggacacagatgagagtgtgttgttgttttttttgggatttatttagttatttatcattgttagtctcttttttatgttagcttttgtagtcatttttttattagctttaccacaaccttttttaaatgtcatcatatatatacctcaggttctttatggatattactat

SEQ ID NO: 90707 - DNA, 420 bp, Heterodera glycines
  unsure (1)..(420): unsure at all n locations
tcgggtgggttggcttaactggtcctctgtacttttccgcatagtcaattcggtttgcacgcgggtgaaaacattgccggatctgtggcagtgaaagacaaacgatgttttgatcgcctcgtcgtgcaaattgagcgcaaatcgaccaccgaaaagttcgatgttctccaatgccgaaagtgtgtgttcaactcgtgttggcttggctcgcgcactttgcacgaccaacgcacttatctgaccaacctccgatcgtattgaccaaagaatatacggataacaaacaatgataacaactaaattattgacaattaaaatgtccaaaatgcattttgatcggatgaaaaaagactttccgccaaaaannnnnannnnanaaaaaaaaaaaaaaaaaaaaaaaaaaaaaaaaaaaaaaaaaaa

SEQ ID NO: 90708 - DNA, 812 bp, Heterodera glycines
aactgttgcatatttttttcccaaaaatcttatttcaaactgttaattaatcatataataattaggcaatttgtaattgaatgcaaagtgttctcaaaagatttctgtcaactgaagcgccaacaacaaaagaacgtttaccatccaaatacgcgtggttatttaacattgtcttcagcgaaatcattatatttggcggcacttatttgtctctattggagttgcgcaaaaacaaacaggcacgacttaaactccacaaatattggccgagtgcattgaaacatttctattgggctgaagaccaattgtccggcggtcagctcaccggcgaaaaacttaaagtcgctgatttgaagagttggaatatcgaaggcaaagtcaaaacccagcagaaggaagacgccatttacacgtgcgagtgaacgacgcaaaaacaaatggttcgccagtcctccttttattacatgatggcgggcaacatgatcgttattgcgattttcgcggacagggccttaacgagacggtactttggcaagaagatggagccgatggcactgccctcgtggaatgcttttgtgaaaacggagttgaaagaaggcagggaactgacgatgccaattagcgacgacgaaaaattaattaattaacggacgattggttttgttcctgcacattttacaacttattatttcttttttgctggtttgttctgcacatttattcaagctgttctattgaatttaggctttcaacaaaaatttatggaaaaataaaatgaaatattaaaaaaaaaaaaaaaaaaaaaaaaaaaa

SEQ ID NO: 90709 - DNA, 1188 bp, Heterodera glycines
tcgacaaagggcacagaaaggcggagttggcaaacgcgcaaagaattgctgagctggagcaacagttggtcacacaaaaaggaatggaaaagcaaaaaattgcacaagcggtcgaagaacagcggaaattggacgaaagtctttccaaaatggcgttggaaattgagcggagacggaacagagaaatgaccactggcgcaacacaaactgatcacctcgtcggctcaacgcgcaatgagtcggatgaagccgaattggacgcgcaactgaagcgggcggcgcttgcacacgccgaacatttggagcgagtgatcaggacacagaagcaaatccacgacatggagactcagcagattgtgcaggagacaattgccattgagcgggacaaatttggcaaacaaattgaaaatggactcgtaaagttggcggccattgaagaaatgctgaaaagtcgcgcaacaaaagatttggagaaccgaagggccaaaatctattggacaatttgccattcgctgacggacgcattggccaatggcggcacggcacagagccaaaaaacgacttactataaaacccaactgctggaacagattgctgttctcaaaaaactcgtccaaaatgacgcttttgctcagtccgtttgcgcccatttcccatcggacgatgccattggacggggtgtgccgacagagcagggattggtcaaacgcttcgacggggtgtacaaattggcccgctgcacggcacagattggcgacgagggcggcactctgtggcgctacatcacctcctggctccagtcgctgttcaccttcgagctgccctacgcgtactccgccgacgaccggctcgacctgaacagatacgacccgtacgagctgttggcccgctgccggcactttgtgcagcagagggacctgctgaacgcagtgcgggtggccaatctgatcagaggcaagtcggcccgcattttcagcgattggctcaaggacgccaaattccatctcgaagtgcgactgctggttgagctgctcttggcacattcccaggcttcgggaattaggacgacatattgaaaataggcggaaacgaaacaagaccagtttaatttgtccaaaaaatattgattggaatgataaagtttagacgacccatttcggacaacccgcaaagcccaccgacaaaaga

SEQ ID NO: 90710 - DNA, 55 bp, Heterodera glycines
cgagaagcaaaccgagcccaacgcatccaatggcattgacaaaaaaaaaaaaaaa

SEQ ID NO: 90711 - DNA, 184 bp, Heterodera glycines
gattgtgacgctggccaaagaagcggcggtcgacgtgaaatttgaactgtcaatttgattaggctttatttgaccgactgacgacgtgtagaaagaaatggacacagagaaagaaagagatgtagaaattcgtaaatttgtaagataaaaaaaacgatatttaaaaaaaaaaaaaaaaaaaaaa

SEQ ID NO: 90712 - DNA, 670 bp, Heterodera glycines
ctaatctaaggttaagaaaccaactattgcgatggctgctaatgaaaatatgcaaacagaagacaataaaaaaggaaaagtgaccaatgatgagcgtaacttggtcgtctcatttattcagtttttgcgtcacaaagtctcatcgaaccaatgcactgatgaacagattgaaggccttgaagttgctattcaatgccttgagaccgccttctttgtttctgacagaaactatgcgttccaaccgtccaaacctctcatcgaaattttcaaagcagctgaaggacttcccgatggggatcaagagtttcctaagccgactcaaacggacgttgagaagtcaaacgcattgaaggaagaaggcaacgaactcgtgaagtcgaacaagttcgaagaagccatcctcaaatacaacgaagcaattaagttgaatcgcgaccctattttcttctgcaacagagcggctgcttattgtcgtctggagcaatatgatctcgcaatccaagactgccgtacggcattggcattggacccgaaatatgcgaaggcttacgggagaatgggcgttgcactttcatgtcagaatcgttacgatcacgcggttgaagcgtacaaaaaggcattggaattggatcctggaaacgaaagctacaaaaacaatttgtccatcggc

SEQ ID NO: 90713 - DNA, 428 bp, Heterodera glycines
tcaaagattattcccagaattgcaaactctctcaagactttctgatcctttcgaaagcgagttcagatcactgcgccagttctcgcaactgcctgccattgatgtaaacgaaaccaaggaagcgtttgtagtccatgccgatatcccaggcttcacacgtgaagaaatcgacatctccctcaacggtccagtcctagcttttgaaaggaaacaaggaaaagaaggaagaaaagaaggatgaaacccagcacatccaagaaagaatccagagctcgttctacagaagcattacattgccagaaacttttgcacctgaaaatgtaaaggcttcattgaaggatggcatcttggaaatcacaattccaaagaacgctgtaaccaaaaagattaccatttcataaataaattattgcctctgaaaaaaaaaa

SEQ ID NO: 90714 - DNA, 544 bp, Heterodera glycines
ctttttattttatcccaatttttagttttatttatttttaaatagcgcataaaaaatgacgacaaattgggagaaacttagaaaggaattaaacgaaacggaagaaaagggaaaaggaaattcgaagaaaagaaagcgaaaagtgagtgaaaattgtaacaacaaatggaagaaaatgcgagaagaaattgagaagaatgaccagcagaagccggaaaaggcaattgaaacgacaattagcgcaaagaaaattttgatggccatcgattgcgaatatgttggagttggactgaatggagcggagaatatgttggccagggtatcaattgtcgacgccgaaggaatcgctgtctatgacaaatacgtcaaaccgaccgaagaagtggtcgattaccggaccaaagtgagtggcattaggcccggccatttgctccgtggcgttccctttgtccaagtccaaagcgaagtgaggaagctgctctcagacaacattctgatcggacactcacttcgaaacgatttgactgttcttggcctcactcat

SEQ ID NO: 90715 - DNA, 304 bp, Heterodera glycines
actggcgaacacgcaattgcccgccgagaagatgaagtgtttggtggagcattcgctccgagattatcttatggtctctctgctggccaatttggccaagactcagttggccctgcaggaaaaagtcacttcctcgtaaagttttgaccagtcaaaccgttgcggaaagagggaaagcgaaccaataaacgtgattcgagattattgctttgtgtccattctgtcattgttttgttactccattttcgttattcgcagaactgttatcagaaattcatgtatcatatatcatcattttgaaaaa

SEQ ID NO: 90716 - DNA, 531 bp, Heterodera glycines
taagatacaaagcgaaggatggccaatgctgaagaggtttgcccaacgtattctgaggccttttcccatgggaatgacgacggttcgttttgcactatcactgagtttaaacggaataaactcgaaaccgaagctcgcaagaattgggatcgcttctacaaaagaaattcggacaatttcttcaaggaccgaaattggacaaagcgagagattgagcaaatgtgcgcaaaagacatggaactgagtgctcctttgactttgcttgacgccggttgcggctgtggcaacactttattcccattggccaaattcttccccaattggactttctgtggcgtcgatttttcctcaaatgccctctctttgcttcagcaaagggctgtacaaattggaactaacattcataccgaattggtggatctgtcgggcgataccctcggcaatttctcttcgcttcctaaagctgatctgatcactctgatcttcgttctctcctccatttccttggagcatcattcaaaagttgtccat

SEQ ID NO: 90717 - DNA, 674 bp, Heterodera glycines
ttcagcagctgaatgtaaattgcataaatacgacataacataatgacgggtgtttgtgagttatcggaaaaacattccaaagttcggttacatttgccgctggaattgcattgtgagctgctttctgcgcttccctttgaacatgccgctcgtctgcttttactttctaaagcaattgccaaaaattgcaattctctcgtgcaaaaacaaaaaaaagggtggaaggtcttttccaaaaattgtatcgacaaaattatgaaagtttatcacccgctcgtctctccaacactgaaaagcattgaagaggaacatcattcacttgagcattcggaagcgcaccagcaagacacatatcttaataagcgtattcaagattctcgtgccgaactttcctttttcgttggtgccaatttggtgcggcgtttggcaaaatatgaaacggcaggccaagtgatgaccgaactgttgaacagcgtcgttaacatgcaccaattcattgaaaactttaagaagcgaatgaaagaaatggacgagcgattcaacgaagtcaaaaggcttgccgaccgaataaagtccgatttcctaccgcgcgacattccgtcccaaatgtttccgacggccaccgtttggtccgctgaacgtcttcggcgcgattacactgaccatttgcgtgc

SEQ ID NO: 90718 - DNA, 287 bp, Heterodera glycines
gcaaagtcagcagcacaattgggaggaagagtccaaaggcgatggaaatgaaaggaaaaattggacgaagaaaaagcaaccgacgaaggaagagaaaaagaggaaatgatcagacagactcactctgctgtgatggcatttcctataaatatcctaattacccctccccgcttttctatggaatgccctcaaccgaccgacactttgtgcataattttttcactttcactatgaaatatacacatatacagtacatatgtattcaaaataaacagagaatcgaaaaa

SEQ ID NO: 90719 - DNA, 701 bp, Heterodera glycines
gcgattgtaataggagggccaatcgtagtcggacaaatagcttctgtagcggtacagctggttgtagttgatggtcccttgacgatactgtgccaatcccttcgacaggctgtcctccatactgtctagtagccaagagcggtaacggtaggtgcgcgaatacgaatcgtagtaggggtcgtacctttaccaataatagtaccagcgattgtaataggagggccaatcgtagtcggacaaatagcttctgtagcggccccaataggagtacgaagacgaccaatagtacgggttgctgatgtagtcgctgtaatagtatcgacggtaagggaacagcgaacggctcgtctcgatttggcgtggcggtggaggaggacgaataattaagtggatggaatgaatgaacggaatgaacgtggaaaagcaaaatgcaattcatcttcatcaatcatcccttctctgtgtacaacgaaaacgacgacaattgagcaatgtcggaccatccaaatgttgcgctggccgacctcagctgcgtggcaaacgacgtttggctggacactctgttttggattgaccgcgtggaggtgggcacgaagtttgcactgatcgacgcacgtttcggcaagctggtggccacgcatttcaacctgcgcaagtggaggctgggcgagctgggcgttcatcgtgcaccaagcggatgg

SEQ ID NO: 90720 - DNA, 580 bp, Heterodera glycines
gacaaatgctaaacgaatggcttcaaaaaaagggagtgccatcggatgaggcggctttttttcttgaaacttattttcatgaggtcacagaaaaactttctaaacaaatcacagcaatggaaatattttatcagaacgagaaacaaatattaaacaacttcggaagagcattcattgcttgtcatgaaacttatggaacaaattttacggaaaaattggcacaaattggcattactgagaaaaagttagtgcaaatttgtcagtttttagggtatgatgacaaaatatttgatatacaaccaatcgacagtgatgtgaactttgggcttccggattggaaagaattttgcccaaaattaatggccaataaaattccaaaaaattcagtggttgtaatggacaaattaaattcagtggaaaccgtcggcatgaacaaaggtcaaaatattttaccaaaacttttggcgaagcaaagccgtggcactggtgtttttttgccgaaaaatgcctaacaacgcgtggcactgctttacagtatacgtcgaaggcgaagatggaagaactttgaaaaactgtaaca

SEQ ID NO: 90721 - DNA, 393 bp, Heterodera glycines
gtgaattggcatttctctgtttaaaatgcgcttcgttctgtccctcgcccttttggcacttttcgtcgtccaatgctccgccgacgactcatcgccgtcctcagaggcagctgatgagaatccctctgctgcccttgccgctgctgaaccatcagcggcaggcgacggagtgccgccgccaccgccgtcggccgaaggggcggcagccgaacgaaagaagcgcagcggagggaaagtcgcaccggcactaatcctttgaagaagccgaagaagaagagaagaagaagcggaagaacggaaggaagaagaaactttgaaaatttggtagtgatttatgacattatgtgaaaaatcattttgcaataaactgtgaaaagaaaaaaaaaaaaaaaa

SEQ ID NO: 90722 - DNA, 495 bp, Heterodera glycines
cggcggattcagcggacgattcgctgtggagccgataccatgatcaaaatgcaatggaagagttgttggagaaggtgcacagcaaatgccccaatgtcactcgtctgtacagcgtcggccgatcagtccaaggccgcgatttggcggtcattgaattttccctccatcccggacggcatcaaattttgaagcccgaaatggtcagcgatgcacgtaacggtgaaccaattgcaaatgccgtggtgtgggtgagaaatgtgaccgacggagacggacaaacggccatcaaacacccggtgaccacgtggatcactggcgattatttccgtccgttggtctccggctgttaccaaatcgcggtggaagcggacggttatgaaattggcatcaaaacgctaaacatcagtcagaaggacgtgaaggaacgacgtccacacattgtgaacttccaattgcgtccgatcgaagttgaagtgccggaggcgcaaattggaa

SEQ ID NO: 90723 - DNA, 759 bp, Heterodera glycines
gactctttataccgcggaatccaataaaatttctcttaataaaaaaatactcttcaaataaataatcattcctagctgcttttggtttgatcacaaatgttcgtccaactcgtcctccttgccatcgttggcattacttttgtcgatgctgccgcaccgccgttcggccaattgtccgtcaaaggcaccaatttggtcggctcaaacggcaaaccggtgcagctgatcggcaattcgttgttctggcaccagtggtacccacaattttggaatgcccaaacagtgaaggcactcaaatgcaattggaattccaatgtcgtgcgcaccgcaatgggcgtggaacagggcggctatctgagtgacgcgaacaccgcctaccgactgacggcagctgtgattgaggcggccattgcacagggcatttacgtgatcgtcgattggcacgcgcatgagccgaacgcggacaaggcgattgaattcttcaccaaaattgcgaaagcgtacggctccaaccctcacttgctttacgaaacgtttaacgagccattggatgtgtcttggaacgatgtgcttgtcccttaccataaaaaggttatttctgcaattcgtgccatcgacaaaaagaatgtgatcattctcggcactcccaaatggtctcaagatgttgacgtggcggcccaaaatcccgatcaaggattcagtaatttgatgtacactctccacttctatgcgtccagtcactttggtgatggacttgcc

SEQ ID NO: 90724 - DNA, 449 bp, Heterodera glycines
aacaaatgcttgaggtcagagcagtcggaacaaatatcggaaaagagcaggatgggccgtcatacgaaatgcttttccgtttaacaacgacaaatagaagcaaatctgctccttttctggccaaaataccgacaaaaactttgaaaagggaagtcgcaatcgaagcaaaaacgaataattcaacaaatgatgacgagaggaaggaggaggagcaattcgcatctctgaaaaaccgttgccatacaatcgcatcgacaagcgcaccttttgcttcgacaaaagtgcaacagaacggcgtggacagcaatcattctccgtctgcaaaacagtcttcgtcctcttctcccgttgcatccacaaaaacttttcgacggcggactgcctttgaaacttcggaagcaatgcgtgaaattttcggtgcatattctcctttctcatcacagaaaaaa

SEQ ID NO: 90725 - DNA, 946 bp, Heterodera glycines
tcccgattttatttgcattaaacataaaacaatttgccaaataacaattgcttttctgtttctccgagatttttttttagatttagggatttgtgaaattcaaagcaaaacgaaaagcaatgaattttgattgtatggtgaattaaatcaatttccctctccaaatatgaacactcattttattgcctgacgcgattcatttgttttgataaatttatcaaaaaaagtattgtttatgttttctttgtcttgttttcaactacttttaatttgtacattgttcaactctactgtttaattgggtcatgcgtcaagcctcgttttatgctgtcgcgcggggaagggctgtcggcgtattcaacacctggcaaaagtgtaatgacagcatcaatgggttttcgggggcaaagtttaagaagtttccaactttggagcaggctaatgacttcattgggaagcatcgtgaaactctgaattctggcggcaaagtgatttcgaagaaagggccccccgttcgtacaatgattgtaaaatcggctgctacgacctttgctgagagacgtttgacacgtaatacggcaatgtttggggttgaggcatcgaactcattggcagcatccaacttggtttccgtggacgatggatttacgactgttgtctatacggacggcgcttgtagtcggaatggatttgtcggtgcaaaagctggcttcggcgttttttggtctgatggacaccccgacaatgtctcagctccggtcaatggcccagccacaaataatcgtgccgaatatttagccgtaatttctgcgttggaaaaggcaaccgcgcgaaacattcggcgtctggtgatccgaactgactctgctcttctgatccaatcgatgactaaatggctgcccaaatggcgaaccaatggatgggaaaccatcaatggaacggatgt

SEQ ID NO: 90726 - DNA, 621 bp, Heterodera glycines
tgaaggaaaatttaaaaaaaacgaagggaatttatagcaaatcaaaaaaagagaattatattattataaatgtgtaaattcgacaacgatttttaaagccaaatttaattttatttcaaaaaataatttaaaatataatgttggaaattttttaggaaatttaatttgaatcgataaaaaattataacttaaaaaataattattaattcaaaaatgttttcttggctcaaattcatggataaaaatttcgacgacccatagtcgagagggccgttgcaatgaaactgatcactttcgtctggacggcaaaatgtggacgcgattatctacgacagaatcggcgaattggaaacacgtcaaaatgtgttcgtcgtggaaagggaagtgaagagcgccctgttcaagtcgccccgcacttcaccttctctgtcgcgagcaaattcactgtttcgcaacagtcaaagcccgacgatgccggtggaagagccaaggcggtcaccctccgccagaagaatgttggccaacggatttgcccggcaaatgacaattgccgacactgactttttcccgaccaaatgagtgaaaaatcttatgtttccttttccgaagaatatccaactg

SEQ ID NO: 90727 - DNA, 515 bp, Heterodera glycines
tgggggtaataagtcgcgaatttggcaattggggagcatggatccgagtggacaaagattggaccaactcctcggcaaagagtcaaaaagcaatgagcagaaacaacgcatttcttccctcttcacttccgtccatcttttcatgccaaaacccgtcgtcgttctctacggcgaagagcttggcctgttaagtggaaaaccgacagccaacaaattggccaaccgaattgtctatccgtggagtaacgaaacattcggcaatcagtcgcaaggatttttcgttttcccccaacgtacaaaaaacggagacttcgagagccagaaaaatgacaaacattcgccgctggcgttgttcaaagaaatcgcaaagctacgcgagcattccgatttcttctctggcgttttgtcgcattcgtcctcctccgatggcctcgacttttacaaaataaaacgcagtcaagggggattttttgtgttggtcgtaaattggggcgagaagcaaaaagcactcgaca

SEQ ID NO: 90728 - DNA, 812 bp, Heterodera glycines
aatttgttaaagaattcaacagagatgaacccaaattggacattctgataaataacgcgggcataatgttttatccacgcttcaccaaaactgtcgatggccatgagctgacttggcagtccaactttttaggccattttctgttgaccgaattgctcctgccaaagttggagcgcagtgaggaaggcggtcgcattgtgaatgtgagcagcagtgtccatctccatgccgattcggtcgatccggaggtggtggagtcgcctcgtcgatttgggataatcgcgacatacgctcgctcgaagctagccaatgttatgcatgttgttgccctcaccaaacgcatccgtaccaatgacagcggttcaaaagtcagcgcaaacgcgtgccatcctggcagtgtcaacaccgaactcattcggaacaattttttcagaaaatacattaaaaaggcatttgctccaattatatggttcgttctggtaagtatttccgcataaattcatttctcttaaattttttattgtacgaattgccattgacccggggtgccaagcggaaatcctgggccttccctgatttaaaagaataaatttacagaaaactgatcgggacggagcacagacaccgttgtttttagcgctaagtagacaaattaacggcgtttccggaaaatattacagcgactgcaaagaggccaaagtgcaccaattcgcagaagacgaaatcgcgtgtgaaattctgtacaacaacagtttggagcagtgcgggttggaccattctgccatttgaagatgggaacaaaagctactttc

SEQ ID NO: 90729 - DNA, 383 bp, Heterodera glycines
attcaaaatcaataaaaatgtccgcttggatttgtcctgggtttttgctgttttttgtgctcattctgatcactgatcactgtccgatgacccaagctgtcactcaaccgccctatggtcaattggctgtcagtggaaaaaatctagtacaaaaaagtacgaataaaagccgtggcattgcacggcctgtcaatgtactgtagccaatgcccccccaacttttgggtgaaacagaccgtcaacaaattaaaatgttcagtgcaatgacaacgatgtacgcgcagcaatggcatccagctttggcggttacatttcaaacccaactgccgaatataaaaaaatgactgcaatcattgatggggcaattgaccaaggcctttacg

SEQ ID NO: 90730 - DNA, 621 bp, Heterodera glycines
tttttggcccattttcagctccctacaaaagtttttcctactccgacatttatctttttaaaaagcatttggccaaattcaaaatgttcggcacattgcgattcattgcgacactttttgctgttactgcactttttcttgatgacgcattggcatttggtccccgcgcgtttctgaagcgccaagcgcctcccagcgcagaaatggcaccaccaaaagcggccatggaccagcaagttgcgatggagctacagcagcagcagaaacattttgagcgctttgtgatggagccgcagcgtgtggtcccattcgtgccgtcgccagctactgcttactacggtggcggtgttggtggtgtatcgtatagcggcgccgcattcgcgccccaacaactgcagcagaagcggttcgattacgtaccgacagacccctacagctatgagagcttctaccctcttgtgccggccaaacgctttgatgccggcggctttggcgccgcttacggatcgcgcggacgcttttccggctttctttaagccctttacatgggatgatgaaaaaatgtgttatgataaaaacgatagacgacattttcaattattttctcgatcgaaaaataaa

SEQ ID NO: 90731 - DNA, 481 bp, Heterodera glycines
ttcattttccaccttttcgcttttcatcgtcaaaatgtgccaaaattacttttgctgcgttttcacattgtttttttttctgtgtgtccttttttcattggtcgattcgcgtcctcagctgctcaattcggtcagtacctcgggccttttgatcggaaaaggaagcgaagtcaaatcggcttcggtcccccttctgtcggagccaatgattgaaatccattcgcattcggcgccagtgtcgccttcggagttgaacttcagcagaagacgaaggaagcgcataagcaacaacaaatccaattgaacaagaaaatttataatacgtatcgcaaacttaaaaatcaaagaagtaaatcgtcaatgaattcgtcaaattcgtcagtggctgttttttctgcctccaaaactgccgttttctttgaccaaatttcagatgcttgttcctaaaacatcgaaatgtataaacagaaagtgccaaaaa

SEQ ID NO: 90732 - DNA, 454 bp, Heterodera glycines
  unsure (1)..(454): unsure at all n locations
gtgaggcccggcaacgggtggaagccgcacccgcggctgcacatcttcggcaagttggaggtcaacggcgccaaccagcacccgctgtacgaattccttaaggattcgtgccctcaaacggtcattcaaatcggaaagagggaggaanctgatgtacaancccgatcagaaccaacgacatcacatggaacttcgagaaatttctcatcgattccgaaggccgtccgcgcttccgtttccatccgaccgcgtggtcccacggcgaagttgtgcagaaattctccgaacaaatggcagccgaacaagtgaaagaagtgcaaggagaagtgaaaaagtcataaacagaaagaaaaggaaggaattgcaaaacaatgagcaaattgcttaatcaattatttaaaatgaataaaaaatgagtaaaaatgaaaataaaagttaaaatttgactaaaaaa

SEQ ID NO: 90733 - DNA, 645 bp, Heterodera glycines
  unsure (1)..(645): unsure at all n locations
ctgcctttcgacaactttttcttcctaacaatggtccaaatgtggtgcatggagacctacccgtgtggtgatccgcgtcttccgcaccactgtttcccaccaaaattggtgaatccggacgaattgaccaaacggacgggcgccctctattataagttggatttggaagaccaagtggcattatcaaaacgaattgcaattatgaaattggagcgcaacttcaccaaggaggacacgtacacattggacgcacagacaacgaacgattttaaggaaaagatcgcagaacttttcgaagagacggaaagtgacgaggatcaagcacggatggttttggaagggtcggcgtattacgacgtcgaagccaaagacggagtttggatacgcatcttttgtgagtatggcgacttactcatcatccctaagggcatcgcacatcgaatgaccacaacgccgaagaattatgtgaaagtgcgccgctttttcaagtcgagcgatagcgacgaggactgaacaaaaggacgaagaacgaagtcgaagaacagcataagtaatcaccanctgaaaagcttgccctattcaaatggtttaaaatgttcaaatttgaatgacattttgtcaattgtaaacaaaanagaaaaaaaa

SEQ ID NO: 90734 - DNA, 209 bp, Heterodera glycines
tcaaaagttggccttgtgccgataaattacataaaactgattggaaaatgcaacgacagaaatgcgcaaatcatatgaccagtccgaacattggattaacggacaattcaattctctttcattttgtcatttcatttaaatgtttccaaattttattactgtaaaactttgtatccgaatttaataaaaataaacgaaaatggcaaaaa

SEQ ID NO: 90735 - DNA, 527 bp, Heterodera glycines
catttcgtccgtctcccaaaagcaccaccaatcattcacaagccaagcacaaacaacaacaatatggaaattccatcaagcaattaccccccgccacctccctatgactcatcggtgctcattcagcagcccaacaacccgtcgccgaacagtccgatgatggagaagggtccactgccacaacagcaggcatatgcccagccacaggttcaacaccaacaggccgagcggagaatggtcagggacctggtcaccatgttcttctgtttcgttataccgccgattgccatcgctttgcagaacgggccttcaatgaagctgcacatactgctcagcgttctgttgtgcattctgggctgggttccagcggttttgcatgccgtttggtactgtttctttgccatgagacactacaaccattgattaattgatccccccgatttgcgtgatctatgtgatctgcaaatatttgataaaacactaattgatgcatattaacacgcgaaagcattggactaatctcattt

SEQ ID NO: 90736 - DNA, 358 bp, Heterodera glycines
cgccttttctcccgccactcattcactcacttctcagttcattctcgtcaaaaatggcaacctccgcaaaaatttttgttctcctcttcgtccttcttacggtcgctttactcgtcgaacaagccacggcacagtggggctactactacccgtactacggcaaacgcgaggccgggttcgccccccagggcaatgccaacggaaacgccgaagggcccgcggccggcggagggcacgcgatgttcagattctgaagaagggaggaaggaagaaacgatcaaagagtgatcggattgactgatcagcaagcaaatggtccatttcaaaacatgcgataaataaacggaatgcttaaaaa

SEQ ID NO: 90737 - DNA, 487 bp, Heterodera glycines
tttgtcgcgtccgtccatttctttgctcttcccatttctatggagtcccgcacctcaaatttgtcagcttccatccatcgccacggcgattatcagctgcgattggcccgctcttcggcctatgtgcgggcgaaagtggcgccaaatttgacgaaaaattttcaaaaatgtccaaaatgtctggtgatggtggacattcgactgcacgccaaatgcccagcggatgcaatttaccaaccgtaccaatgggttttggacccggaaagatggtatgtgtgaagaggaagcggacgaggcaaagccggacggacggaagagggaggtgaaaagaaggggaagaaggagaaggagaagaagcagcagacgatgtttgattactttttgggataatcaataaaaaaacacactgatcactcttggcattatgttttattgccaataataaacattcattcaaatttcccacctgcgacttattacacaagga

SEQ ID NO: 90738 - DNA, 792 bp, Heterodera glycines
taacatcaattaataaattgaataaaaattaattcatcaatgcattcctttcttgtactgaccattctttttgccaatttggcaacaaatgcttttgggcaacaatggccaaaagcgactagtgaagaaactgttaaggcaacaattaaagtgtcaggaggcgtcaaagattttggcttcaaacggttgaccgcctcttcggcattgggcaccggtgatcagtcggagggccaaaaagcactgatccgtgccgaaaagaatgcagtgatcaaaaatttgatcattggccaaaacggggcggacggcattcattgctatgacgggtgcaccctgcaaaatgtgtggtgggaaaaggttggcgaagacgcggccactttccggagcagcagcgggtgcaaggagtacagtttcacggtcacgggcggcggtgtgaaaaatgccaaggacaaagtgttccaaatgaacggcggtggcactttgacgatcaaaaattttgtggcggaaggcattggcaaattggcgcgcgcatgcggcaactgcaaaacgcaatgccaaaaacgaaagtttgtgctggagaacattaaagtgactgggctgaaaacgctgttgtgtggcctcaacgagaattatggtgatgtggcaaccatcaaaaatgtgcaaatcaccgggtcgaagaaagtgtgtgccgaattccaaggcaacgaccagcaaaaggagccgccaatgttgcgcagtttcgacatcggatcgaaaggcgatggcaaaaattgcatcatttcgggcaccaccagc

SEQ ID NO: 90739 - DNA, 409 bp, Heterodera glycines
attttttaccaaattattaaattaacaaaatgtcccctcttcgttttctcgccgttctgctgctgatctgtgccatgttcagcttcaacaatttggggctggccaatggcgaggaaagcaaagacagccaagtcgctctccgtcccgatgttgctgctgttcagcctgacctcgtcgttgttcgcgctcgccgtggttactatggaggtggtggaggctgttgcggtggcggttggggaaaaaagaaataagcagccaaagaagaaaggaaggatgccgacaaagattaattatctttaattagtaaatgatccattcgtccattttgtaattggccaaatttagtaaaagacaaaatacaatgataaattttgtatattttaaaaaaaaaaaaaaaaaaaaaaaaaaa

SEQ ID NO: 90740 - DNA, 508 bp, Heterodera glycines
cctttaaattctgccgctgatcaccgccgaagacaaagaaagcaaaatgcgcttttcctttccgctgctggcaatttccttcctaatgcttctcctcgtggcaccaattcaaattcatggaatgtttggaagcaatgggagaggcagacaaatgagcgggggaaggggccaaatgggaagcaacggcatgggaccaggaatgggaggcggtggtggcagcattagaagaatgcaacaaggccaaggaatgggaggcaatggtggcggtggtggcggcatgttctgaccgcaattttgaaagacgacggaggacggcggagcgtagcagaagcaataattggtaaagactgactgatcagcaagcagatgaaccaaccaaaacggcacgacgattagtgaccgaccgtactgtgtagtcaatttacgctttaaaaaactcaaaaattgtctcatttctcaactcactcgtgctgataaagaaacattttgttaaaaaaaaaaaaaaaaa

SEQ ID NO: 90741 - DNA, 354 bp, Heterodera glycines
  unsure (1)..(354): unsure at all n locations
gtttcgattgttccaattaatttgacaatgtctccccatttgcttcatctttttctcattgttttgctcattttggccctttcgtttgtccttttcggcggaacggacgcaaaagaattgtttaagcgaaaaatgcctcaaatgagtcaaatggggccgatgggaccaatgggcggcggcggtggttatggatacggaaaatgaataaaaggacaaacggacggaatgcgcatttgagaaaggaacgaaaagagaaaaagcattcattcattaaccatgttaatgtgaactaaatataatcggattggaccttattaaatctaaattggtataaaannnnnnaanannnaaaaa

SEQ ID NO: 90742 - DNA, 530 bp, Heterodera glycines
attattgcttcgaaatgatcaaattcgttttggtttgcttttccctttacattttcgtcgctttgacttttggccatccttcgctgggctcccgtgggtccgtccagcagcaaaatgggaatggcaattcagcgcaacaacagcaggcccaattcggccaaatgagtgtcagcgacaatggcacggcttctcccccgcccgccggcaacggatcctaccgggccaagcgaagtccttgctgcgattttggctcttaccctttcatggagccaccatcgcgttacggcggtttccgctaccctttcatgggcccaccaccgcgtcgcggcggtttccgtcgcggtggtcggcgacgcggaccgaccggtagcaccgcttctccgtcgtctaccaacagtgcagcattggcggaccagttcatcgtaaacaacgaaacggagacgaccccaacgccaacggaggggacggaaagcagcagaagtacggacggaacaaccgcaacgaatacggacggaacaaccgcagcgaat

SEQ ID NO: 90743 - DNA, 790 bp, Heterodera glycines
atcaaatcgtttaaaatcaaaacaaatgcctcaaaacgagcatattgaactacacagaaaacgccatgggcgaaaattggatcacgaagagcgcacgcgaaagaaactggccagagctgttcatgaccgttcaaaagtggccaagaaattgcggaaagggaaggcgaagttgtaccacaagaagagatatgcggagaaggtccaaatgcgaaaattgatcaaacaacacgaggagaagaagcaaaaggggacgacggacactcaaacggagggagcagtccccgcctatttgttggaccggcaaaaggaaacggcggggaaggcactttcgactgccatcaaacagaaacggaaggaaaaagcggcaaagtaccaagtgccattgccaaaagtgagggcggtcagcgacgcggaggccttcaaagttgtcaatacgggaaaaactagacgaaaagggtggaaaaggatggtcaccaaagtcactttcgtcggcgaaacattcacacggaaaccggcaaaattcgaacgattcattcgtccgatgggtctccgtttttaaaaggcacatgtcacccatcctgaactgaagaccactttgtgccttccgttggttggcgtcaaaaagaactcttcttctcaattgtacactttgcctcgcgtcatcacttaagggacaattattcgaatgaatgtagtggaatcggaatggtcacacaaggccggcaagtggtggggcaagataccgctcagtgacttaccatgcgagaaacgacgatgcatcacgcttgtc

SEQ ID NO: 90744 - DNA, 599 bp, Heterodera glycines
ttaaagcccttttacaaatcggaaatgaatcccaacggttttttctttgttttagcggtactttttcttgtgaaagtcgactttttacatggcgtttacaatgaaccaatggcacgacaggtgctgcaaaagcatgcatcacaatttcagcagcattgtaaaaatgcccgcagaggaagtgccgtggccaaatgttgcagtgccatcagaagcataatgggccgattcacaagccaaaaaaaggcaatgaaccaaatgctggccaagtgtaaagcgggcacaacgccaagcgaagcacagcaaatgcgaagaaaattggaaggatcgaataaactgaaggattgtggccagtttaaaagccaaattcagcacaagttcagcgagttgaagcagtactgcaacaatggggcagaaaatgaggaggaaaacgacgaatgatcagagagggagagagaagaggagagagtagagagagagaggaacagcaaaattctaatcactagtgatcactgataattgccgattgattgaccggtacgactcatttggctgatttttttttttttatggcataaagagttgcggcaaatttttttttt

SEQ ID NO: 90745 - DNA, 526 bp, Heterodera glycines
atctgatgacattttgttggatggaatgtctcacaaccaacgtggcaatgcgaatgctaacatgggacctcctcaaggggttggttctggctcttctgctgagaattccgactcatctgcggataatcaaccttcaaatgagcaatgggaagcagcattcaatagcatcggcgatttttcacattttgttcggcaagtttttcattcggtcgttcatgggatggctgtgaatgacagcagcatattcccgccgaattctgcacaggccagaaacggcttcaccgccaactcgcgagtcaccggttttaccccttcaattgttaatcctccgctgtcgcatgagtctgatgagttgttcatgaacatcggcgcagttcaaggcctaattgccatgccaatgcctcccagggaaaatgcgccgcagaatcagcaccatccatagccacgaactgagccaatttcggacttgcccattgaattggtggccttaaactctcaaaatttgatttgtccttgtagcttattc

SEQ ID NO: 90746 - DNA, 550 bp, Heterodera glycines
tgctttggcagttgatccaagtcgaagcagtcgagctcgacaaatttctcgatctcttgcaaaggttgaattatgcacaacaccccgaggcaactgcagcgattctcgtcattatacggaatatggaacccgacccggacccggctgttatgcgttccctgttgaggaacttgtttcttagacagccggacagggatttgttcacagttgatgctcttaaattgatcgttgattacagtgacaatattccaccaatgagcgattgcatcagcaaaatggtcaaacacgccattcacaatgacgaaattattgcgccatttggacaaacgaaattgggcaaggcacgtccaagggtgccggtggtggagaacattcttgaccatttggatcgttttcgaaggcattgtatcgacagagagtcaaaaggtgtcgaaaatttgttgaacaatgcgctcactctcgaattgttccgctcgctaaaaagtcatccgaaactggcggatattcgctctcgattcactgaattgttcgcactctttgacattttatt

SEQ ID NO: 90747 - DNA, 663 bp, Heterodera glycines
gataacgaaaaaacagttggaggagaaggcgcagcgattggagcgcgaaatgagcgaatttgtggaagtggcggaaagggcgggtagtcgtggcgacttggacaaatctcagaaatatgtgaaacgggcggaggaagtcaacgcggagttggagaacgtccggaaattgcttgacccggaagcgagacaacgcgaggtttaccaggccggctacaaagacccgaacgcgccgaaaccgatgcgcgtgtgcgaagtgtgcggaagttttttgatcattggcgatgttcagcagcgcattgatgaccacatgcaggggagacaacacctcggatatgcaaaaatcactgccactttggcggaattgaagttgaaattgcgcgatgaagttacgcccgaacggacggtgtccagtcgcagtccgatgtcggcaaccagcggaggagggcagcgccgccagcgtcggtcgcgttctaagtcacacgagcgtaaagcgaacaggaaaaggtcgcgcagcaataacagccgagccgaaggaggtggtcgtcgacgtatgaaaaggtcccactcgcgccaccgcgacgatgccaataacaacgaaaaacactccgcccacggcgatgcgtctgacgaccaccgccgtcgtcgtgtccgcaactcggcttc

SEQ ID NO: 90748 - DNA, 857 bp, Heterodera glycines
ttttttttttttttggattcgtttgtttggcataatccgaaaataaaagtcattaatttactcttatgtggctctttggcttttaacagaacattcagcacaatgacagattccgtgttaggtcaaaaagaatgtttgttaaacagtgtcaattcggagggtcgggtgagcggtcgcatcggatgcctttctcttcttggccaggctgacgttgccgttcttcttcagcccattcagcaattgttgcttcacatgattatactcaacgacacaagttcggcacaacgctctgtacaattcttgacctccgatcatttctaactcgtgcattccgacattcgaaatgtgaatgaggcggactgtccacagcggcaaactgcgcttagtttctcaattttctcagccaaaggaatgagcatcgccacattttggaagggctggtaaaatcaaaagtgcgtcttcggtgaacctcctgccggtaatcgccattcagtgcagcaatgatcactgttttgccattgtttgccaattcttgcgcgtatttgacgatgtctttgaactaacacaaatggaaatgccaaatttcctcgaatgcgtcttccattttcgtcgcactaatcgcctccattttgcgtttgtcgtgtgtgcatgcgtgcgactcgtcgtaacgcgtgtcgagcgcatatttaaccactgcgactttccgtccggcaagaatgtaccgctgagccaatcggaacaattcagtcctgggaatatcattgttaggagggagagaaaccaaaatcattttgtatccaattacaattactcacgtttttccgctgaacatgggtccttaaattaaaatattgaag

SEQ ID NO: 90749 - DNA, 157 bp, Heterodera glycines
aggaccaatggaaccaattggaactgatcggaaggaaatgccaacatcgggcagagatcaattgcattttaacactttgataattcttctgattactttatgattttattttcctttaatttgataggtttaccaaatagaaaaccattgctaaaaa

SEQ ID NO: 90750 - DNA, 550 bp, Heterodera glycines
ggagaggtccatgaaggcgttgattggcaccgtcgacgaactgaacaaagcggtgaatgcctacggcaaatacacggtggaaaagcaaaagtacgacacaatgtacaacaatctgatgcagaagagacaaacggagaacgaagcgcggcaatcgcgcggagaaccgccgctgacaatggaggacataaagcggcagctgaagcagccgcaaatgcagacaaagtacggaatgttggacttgctgctgaacgcgctggacaccgacgcattcacgacgtaccaaattcagacgaccaacgaaaacgtggccaaattgcacctttcccaagcggtctctgctcagcccgtcgtcgccgcctcttccgctgccattggcacttccgccgcaaatgcgcccaatttggaaaggaaataaaaacatggaaattggggcggagagagaagggaaatgcgaacggagcaacaaaaagattggattattattttgttttccctgttgctcttaattgtatggacacacacaaattgttgctgtttttattttgtttcg

SEQ ID NO: 90751 - DNA, 747 bp, Heterodera glycines
catttaccgatatctgccaccgaatgctcaggttgtgcttttgagtgcgactttgcctcacgatgttcttgagatgaccagcaaatttatgacagatcccattcgtgtgcttgtcaaacgtgatgaattgacattggagggcatcaaacaattttttgttgcggttgaacgcgaagaatggaaatttgacacactctgcgacctttatgacacattgacaattactcaggcggtcattttttgcaacactcgtcgaaaggttgactggttggcggacaaaatgcgagaggcaaatttcactgtttcttcgatgcattcggacatggaacaaaaggatcgcgacgctattatgaaatcattccgtgcaggggaaagtcgtgtattgattagtaccgacgtgtgggcccgtgggttggatgtgccgcaggtttcgcttgtcattaactacgacttgcccaacaatcgtgagttgtacatccatcgcattggccgttcgggtcgttatggacgcaagggagtggcgatcaacttcgtaaagaacgacgacattcgaattttacgcgacattgaacagtactactccacccaaattgatgaaatgccaatgaatgtcagcgaattgatctgagagttggtatgaaaccacacaaggaattggatcctaaacgtatttgtgttttacttttctcacgtttattgtttttgataaatggatactttggtgaaaaaaaaaaaaaaaaaaaaaaa

SEQ ID NO: 90752 - DNA, 482 bp, Heterodera glycines
cccggcagtggcttcaaccaatgccatcatagcgggaagctgtgctcttgaggcattgaaactggcatcaaagtatctgtttcaacgttgttgcattggaacgtgatcccgaatgtttggtctgcggtcagaaatctgtccaaatgtattccgtgcgcgaggactgtacactctcaggctttttagatgacttgaaagacaaataccaacttcagaatccttccattcgagcgggtagcactttcctgtatgaaatcaacactcttatgccagaaatggagacagcaagtcggaagaatttgtgtaagacgctcaaggaacttcatgtcaccgaggatagcgaactgcttgtagcggatgaagcattaacgagatctattgtttttcggatcaaatattccaaataaattttattcgaatgtccgataaatatctctgaaggaaaaaaaaaaaaaaaaaaaaaaaaaaaaaggaaaaaaaaa

SEQ ID NO: 90753 - DNA, 516 bp, Heterodera glycines
ccactgaaattcgaatcccttccaccgcaatgagttcattttcatttccgtgggcgacttttctgtttttctccctaatttcttgcctaatttcgctgacagaggccaacccgaagtttctcttgtcctgcaaagtaatcgacggcatttgccaaaatgacgaactttgcctggaagaaatgggcattcgtttccccgactgttatttggagcgcaaaattgattttctccaaccccaaaaaagcgcactaaatccacgccattcactgaaggggcaaatggaccacaacgatttctgaaaaggactccagcgatgaaactgatgaaggtgctaatgatgaaagatcggattccggtgggtcggagatgagcggagaatgccaaacgaataaaagtgaggatgagacgagcaaagacaaacaaataataatcagaaattgccacctcaaacagtccattcattctgtgcaaaaagacatttagaggcgaatgtttaataaatggaagaatcaaaaa

SEQ ID NO: 90754 - DNA, 529 bp, Heterodera glycines
atatgccatgttggagaacgaaataggtgtcaaaatggacgaactgcagggactgataatggcactttcgtattcccatcagattgtcaacatggcggtctcaatgcccgagcccgtgtaccaagcggacgaattggccaagcgagggaaaaataattttgccgcattaaaacggttcaaaccgaaccaagtgccgaaaaaggagcaccgacttttggcgaaaaaaggcgcaaagcgacagaccatttcgctggttgaccaccacgaattgaacagaattctttcatattggggcgacggaactttcgtattgtctaatcgtttcacggcttaaattctaacgacgagtaattaaaggaataattttaatatttctgtatttgttcattcattcataatttttgacagatcattttgttgtttttaattctcactaaaagagcgtatcataatgttctattattcattctcacattgctttaatccattgttttgcattttgacatccgaaataaaaattgtccaagaa

SEQ ID NO: 90755 - DNA, 520 bp, Heterodera glycines
tcgggcacaaacgctacactggtgaagtgatgaacggaatgggcatggaccggcacctgttgggcatccgtttgttggctgccgaacatggcgtgccgttgcctgaactgctcggctccgacatttaccaacgattgctgcacttccgtctgagcacctctcaactgcccacgtcccatgtttggcccatgggttttggcccgtccgcgcccgactgttacggagtgtgctacaacccgcaggagaaccacatcttcttcatcatcacggcgttcaacgactgcgcagaaacgagcgccgaacgatttgccaatgcgttggaacgtgccctgctggacatgcgcgacttggtcgactgggccgggcgattgaagggacgggcaaagctttgatcggcaaagtctctccaccacgtcatctaactaaatctaaagccatttatttttgccttaatttctaccctcaaattgcccaattgctatataattataaaatgtaattttaaattatgtataaattt

SEQ ID NO: 90756 - DNA, 217 bp, Heterodera glycines
atgtgcccaactttttctccacgttgcataacgccatgcgtctttccgcactgctcaacgttcatccgtcgctttgccagtgaaaggacgagaatgggatgagtcagacccatccgactttaattgattctcaatttgacttaaatgatctgtttatcttttactgttttgttgttgtaaaaaaaaaaaaaaaaaaaactcgagactagttctctct

SEQ ID NO: 90757 - DNA, 74 bp, Heterodera glycines
gtcctgcccataatatctgtggcatggaataaattttggaactgcgctgcctaacggcggtgcttaaaaaaaaa

SEQ ID NO: 90758 - DNA, 306 bp, Heterodera glycines
  unsure (1)..(306): unsure at all n locations
tcccccccccccccccccggggtgtgtgggaggtagacgacctcagaaancntcaaaaatttaaaacttgatgctttattcaaagttttggctccaccagacgaagaattcgaagaatggctcagagatcttaagcttctacacaccactcgtttttgtgactgtggcaacgaaatgcgctacaaatggattaaggaggaccggatattttttataatttgtggacccaaatcgcggaattgtacccaataagcacataaatcaccttctgtttgttacttaaagcaattctgataataaaaaaaa

SEQ ID NO: 90759 - DNA, 544 bp, Heterodera glycines
  unsure (1)..(544): unsure at all n locations
aacattctcaaacaaaatgactgagtttctatacattcgcatgaaagccaacgactgtccgttggtcgctcttatccgattcggcggttgtgccacctcattcacttctgaatctttcgcgcggaaggccaaccttttgggcaacattgaccgttccaattgcgagacaatttatgtgccgatttttggaggtgccaaagtgcttggctgggctaacgatgttcaaattcgaattgatgagctggattatcaatttgtgtaccgtttgggggtgatggaggacaaacatttgccgatgtattgcaagaagaagttcgacatgcttattgcaaccgattgctgtttcaaaattggatttaccatcgattgtggcaaaaaagtggtctcccgcaagggcaaagtggtcaaaattttgaccgaggaacaaattcagagcgaaatggaggacacctattgaagaaatggaagaatgagtgaatgaatggaccaaagtgatcggagaaacagaaaaatcagcattgttcggcgcaattttgtggaatan

SEQ ID NO: 90760 - DNA, 1221 bp, Heterodera glycines
agagagaactagtctcgagttttttttttttttttttttttgacttcttttctgtttcttttcccttactttctcctttcctttccctctctctttgctcctcctttcttccctttctcccatttgtgcatcaatgaccatcgatgtttggtgctttctttctctttgtctgtgagtccatgcgttttcactataaaaggcaacttcatatattcgtttcatcattcttttcaacatttttctgattgttttcgtcgtccgtttgttttccctttttctctctttttcattttccctttccatttacattccaagaattccctccacctttttctccaatttcttaaatgatgtccaacgcaaccaaaaacattctcggcactccaacaatcgtcgacaatgttagtttcgaccccaaagtgagcgccaatttccttcacaaagccatcgaagagaagcgaaaggtgagaaaggaaatagtgcgggaaaagaagagagagagaaagagaaattcaggatgagattatccatttgctgtgcaccatttccaaccaacagcggcaagaattggcacgcgaattcaaacaattgttcggcgaagatttgtcccccaaactgaagaaggcactctctggcgactttgaggaactgattttggctttgttggaaccgccagctgtttacgatgcgcagcaaatgcaccgcgcgatgtccggcctcggcactcgcgaatcggttctgattgagattttggccacgcatagtaaccgacaaattgatgagatgaaacgcgtgtacgagcagctgtacggccatccgctggagaaggacatcttctgggacaccagcggcgcattccaacgactgctcacgtcgctgtgcaacgattctcgcgacgaaagttggagctctgacccgatctgagcgaatatgacggcacatgatctgttctaagagagcgaggaggagagcggggtcaacgactttctgttctaccaagtgctggccaacgagaatttcattcagttgcatttgattttcaatgagtatcacaaggtcagctgtcatcccatatgacacgcaattcagcaacagttcgacggatacaccaaggacggttatttggcggcggtggaatgtgtgctcaatcggcactccttcttcaccaaagtgctccaaaactcgacccagagcttcctcggcattggcaggcgcgactcg

SEQ ID NO: 90761 - DNA, 405 bp, Heterodera glycines
gtcgctccgcctcagccagttttacacacagaaaacgtctcttccttcttggatttgcaaaccgagttcatcaaacgtcgcgatgccgccattgcggggaagtcgcagtcattcgccacggagccgacgcaccggcgcactccacgaaataacattttggccataagcaaagaggaaaagaaagcaaaaagcgaagtttcaacgctaagagtttttctaattcgacaaaatgaggaagcaatcagaaaagaggagcaacagagggccaagcagcagcaaatccttcagcaaaaggcggcaatttatgaacgaatggcaaagggcgaacgattggtttacgacgacggaaaagaggccgaatttttggtcgattttcacacgaaaaaaaaggaattggaggaagaa

SEQ ID NO: 90762 - DNA, 147 bp, Heterodera glycines
tctttttgtgtcgtacttttccgtctttgagttttggtgcgcagttcaacaaaaatctgttcgccgcttcacaaaaaaatgctgctctaacgaaacatttgcacgtctctcctttccgttacgccgattcttcggacgatggcaaaa

SEQ ID NO: 90763 - DNA, 221 bp, Heterodera glycines
ggtagtatcgttacagtacacgcaaattaccattgttattttcgtattattattattctcatcattctcagcatcatcatcgtcatcaattattattattcttttttcgcttcaattcctttgattttgccctcccttttcgtcacccatcaattaattaattgatccctaattagtattcaaagaaaaaaaaaaaaaaaaactcgagactagttctctct

SEQ ID NO: 90764 - DNA, 94 bp, Heterodera glycines
tcacttttttatctgcggtttgctacttcctttttctggccaaccatttccaaagtgtcgctgctgcttcaacgaacgtgttcgttcagggaaa

SEQ ID NO: 90765 - DNA, 193 bp, Heterodera glycines
ctcagcatctgagttgccatattactctaaacatatttttgaatagctaaaaacccataaaagcctttaaatttaacgaagactccaaaaacaacaataaattgccaaaacttgcaaccatctcctccaagttacgaggagtctgacaaacgacagcgagagcttttgctgaactaccaagaattttccaaaa

SEQ ID NO: 90766 - DNA, 838 bp, Heterodera glycines
aaaaaatttcaacggaggataaggaggacgttgtatcttgcgcacaattgtggtaagcatccattgatggctcacatgacgaagaaagcttcgaatttcttaattggtgatttcaactctgttgactttgacaatatggcggatcaacttggcaaccatggatatgtttcgccttgcaacatgctcactgcattggtatacattatgcggctaaaagaatcaaacgaaagagattttctcgccttcaatccaactgaactcttcgtttcttcgttggtgttggcaaccaaataccttaacgatggcactttgcaggaatttgtttggaacgacgaatgggcatcagtttcgggccttgcattacccaaactaaacgagttggaaattcgcctgctcacttctttacgttgggatgtttcaattcaatccgaagattttgaaaaagttttggcgagattagaagggttcgttgccagcgaaatggcccagcaaaatggcgttatgagctacaatgaactttgcattctgtccaacacacatggcttcaaccgttccattctctgtttgctcacagttctactgaagtttttgtttgtgttattggcttttcatctcgctttgttagccggtttatccgtgctgaatatggcagtctcgcgaaaacaggaattggcggcgagtgacgcgtgcatttatcatcacggatgggatgattgttcgcatccaccaattcttttagcaaatgaacgaaaaatcgatgcgaacttgacgaaagttgttcacaaggatgatttttttgcatttgttcatgcctttagcatcagttgatttttatttt

SEQ ID NO: 90767 - DNA, 845 bp, Heterodera glycines
  unsure (1)..(845): unsure at all n locations
acaatggcgaagagccgggcttataaaagcgcttttgtgcggagaggaattgacgtggactatccccgacgaacgtgagcgcgagctcatggcttggcacgaggttggacacggagcattcgccgctaaagacaaagacgcgattccacttcgctacttgtccattttgccgatgtacgattccatcggacagacgtattgtatgcccaagtcagatgcacaaacaatgtcagtggcgcaagtgcgggcggaaatcaacggatttttggccggaacgatagctgaaagaatgagttatgggagtaataaagttacgacctcatgttcttcggacttgaaaagcgcctatcagtgctcccgaaatcattctcggcctgcccttccgcgaggccatcgacatgtggacgttaggctttgtgattgccgagttgttcctcggttggccgttttaccccggctcttacgagtacgactaaattcgcttcatcgttcaaacccaagggcttccgccccagcaaatgctggccgaggcggccaagacgcatcgcttcttcaaaatgatcaaagacatggcctcctattggcgtctgaaaagcattgagtacgagttggaaatgtccacgaaaagcaaggagacacgtcgctatgtgttcaactgtttggacgacattggccaagtgcaccttccgtccgacttggacgacatcgaccgaatgtgcgagcggaatgaccggcttgaatttgtcgacattctgaagcaaatgctgagcatggaccangaccgtcgtctgacaccgacccgcaagttgcaacataaatttgtaaaaatgacgcatatgatcgag

SEQ ID NO: 90768 - DNA, 614 bp, Heterodera glycines
gccaccttcaaaacagctcctctcatcgctgtcgctcttctgatccattttggatgcttaatgtttttgatggaagtgaacggtgaagtccatgttcaaagctctctggcaccaagtcatcaagtggtaaagcgtcattgctcctgtggtggcagttggggcggctggggtggcggcggtggagcatgtaaaacaaattttttatgaaactaaaactcaaattatggtctggaacagaccgggccgggattggatttgagaaatttagggtttcacaaaatccaattctaagggaataaaaaattgaaatggctaaattaggacgaaatctcattgtttttctacggcataaattatttcggggttttttaggatgcacttggcactcacaatttaaggacaccgagcatatgggttgttgctataatttcaggcggtgaattcggttctggaatagaccgtctgaagtatgcgagcctgaattttcaaaatttgtggctttggagatgcccaatcccctttggtatataaattgaaacggctcagatggctaaattttttgaaatccccgtgatttccaaggacgtccttggcactaacaatttaagggcgcc

SEQ ID NO: 90769 - DNA, 524 bp, Heterodera glycines
aaaattccacgccattttcatcatcttggaattgctgttggattgagtgacggaaatgggaagtgttggcgtcatctttgtcaaaaatgtggccatggttttgatgctgcttttcggacggacgatgatggccccgtttgcgattgctggcatcgtgagcgacaacgttgaggtcggctactacccgtcacgcgaaaaggggaagggcatttatgaatggatccaagtcatcaaaccattggtacagggccgagtaatgttgacattgacgattgccaattcggttttgttcattgccacgtgcattctgctcatatacctcctcgtttttgcggtactgcttagcacgtcgaaccaccagttggaggaactgcgtggaaaaatcaatacggtggattactgttcggtgctgcaccctctgtcggctgctctccaaaatgccagggagtcggcgacgactcgacgatgtgactggcaaatgtcctgaagatttcaacaaggccccggcgcagattaagtacagt

SEQ ID NO: 90770 - DNA, 538 bp, Heterodera glycines
cgctacttttgctgttgacgttgaggaaattgcggctgggcatcacgttacgcctgtggacatgacaacagctaccagcaaacttcagcttgaggctgccgaagtgcgaaatccggcgaataaaccgaattggtcatcgtatttgcgctctcaattggtgcctcaaaatgagtacaatttcattattgaattggaaaaggccaaaaacaagcaggagagggacgaagcgttagccaaggacaagacgaattcggcacggagtattatcaatttgatcaccgaagttgcgaaggatcagctgatccgttacgttctcacccttttcgacgaccttttgcaggaggacaaatcccgggtagagattttccatgattatgcaagacggcaaaaacgaactatttggtcgtggttccaagggattttaacgcgaaatgacagtttcattgtcaaccaaatgtctgcaatattctcaaaattgccttgctatggctctgtgcttatggatggacaagaactgcaagcttatttcaatttcctt

SEQ ID NO: 90771 - DNA, 552 bp, Heterodera glycines
atttaaaagcaaaaagacaattcttttgtgccaatgccctcctccgattacgcggacaatgaggcggacgatcgaatcaaagcgccgccgagtgaacgctttctgaactattcgctgtttcacaattactctccgtacggaatgcgttcgttggcctacgattatgccaaatacgcggagcggaccaaatggccggtgaagaatccgtgcggcaccatccaattcgaggacgagccgcgcacgccgcgctttcaattttggagtccgttgacggcacgatacgagtgcagttacacacagaacgtatgaggaggacgaaagcagaggatatgagcggactgattgatcacttaccgatcaatcattcccggattcgcatcataatccaatacagaaaaccgacgaaacatcccgtggaggacaaaacagcgaaaacaattgcaataattaatccggtggaggccaaaaactggaatttggctgcttgttgctaaaaaatgtttgataatcaacaaccaattgtgactcaataaaataaatgttttgaaaaaa

SEQ ID NO: 90772 - DNA, 341 bp, Heterodera glycines
aaggtgacagccgctaccaagaattgaaggacggaatttaccatggctaccagccgttgcgtgctcgcaaaacgttcacttacacttacacacaaagtgaatagggccccaaagcccgaagatccgtacgcgtggctccaaccgcaggccccaaaacagcagcaacaacagcaggaggaagtgacggaagaagcatagaggaagaagaagaaagtcagcactaaagcactgattagaggtgataagtgataatgacaatgataaatgataatgctggcgatggtgataaagttaattgtcaaaaaaaaaaaaaaaaaaaaaataaaaaaaaaaaaaaaaaa

SEQ ID NO: 90773 - DNA, 343 bp, Heterodera glycines
caccgttcccgtccgtctgatcggaatccgagtacgatcaccacccgcctcgtcttctttgaatttccaaaattcgcgagaatccaccaggataatgttcggcacattgtacattcaattcgcagtgtttcgcccagccatcgattaacgctcatttccaactcattttgtctattgtttgcttcagtgtccgccattatccaacagtgacgtggaagaagattagaaatatacaagaaaaatttcaatgcaaaaatacattttatttagtgataatcgcaattggtgacaatttttattaaaatataagcgttttctttaaacaaattttcattggtcaaaa

SEQ ID NO: 90774 - DNA, 367 bp, Heterodera glycines
ttttctgtttttttcgtttctccatgtccatgtgttgggcagagccatggaattcggctccaatttggccaacactcgtccaatcttttccgtctcctctttcaacaatgactataaaatggacagagaacatccgttcgtgaacgatttgtggagtttctacagcccaccgggcggcaacggcgaactgagcgatgagaatttgtggagcagtgccctcagccgacacctccttttccatatgaacagaaaaccgaaaaaatggtgaaaaaatgaaatttccaacaattgttgcaatttgagaagcgaaaaatgtcctaattaattgctgttaaattaatgaaagaaaagaggcaaaaagaaaaca

SEQ ID NO: 90775 - DNA, 322 bp, Heterodera glycines
caccggagatgctgcaatttcggggtcatctgcacaacaggcaaaaacgggcaccgaatcgagcacgagcaagccaaaggcgtgctgcgtctgcaaggagacaaaagggaagcgggacgaatgtattattctgaacggtgaagagaattgtggtcaactgatcgaagcacacaaaaaatgcatgagagaatatggatttgaagtgtgatgagagaatatggatttgaagtgtgatagctgatatacgtttcttgttttaatgttttagtattattgtagtaatctagtataaatggttgactaaaaaaaaaaaaaaaaaaaa

SEQ ID NO: 90776 - DNA, 641 bp, Heterodera glycines
  unsure (1)..(641): unsure at all n locations
ttttgcttatcaaattggcaatgactgatcagcagaattcaattgacgggggatggacagagcaaaatgtgaacgacgaaaaaatcaagtctctcgcttctcgctcagtggccaaaataaactccgagtcaaacgatcgcttcagtcttttccccttggaggtcggaaggtcgaactgttcgaagaatcagccaaacttggctgaccacgcaaactgtgcaacggaggatgatcagacagcgcgaaagacttttttggcaacgatttgggagaaaccgtgggaacaattcgagcagatcacttacaaactcgaataagaggaaacccgaagaaagaaagcgagcaaacagaagggggcggggaagtgattgatcacatcgcaataatcctgttcaaacatttaattatttccaatcggtaaaaaatggcgaaattatcacaatgtcctccttcccagctgatctgtcaatcgatggacgaaagattttcttgtcccgcattgatcacttttattgtcttccactgctgatcagtctgttttccatgtccctttccgttgggtacattatgttcaaaaattacaatttcaagacttacacttgataaaaatgaaaaattcnaaaaaaaaaaaaaaaaaaaaa

SEQ ID NO: 90777 - DNA, 496 bp, Heterodera glycines
tctttgtccgtgtcggcgttgcaccattctccaccgttgcccgagcgcaactaccgtattacgtcaatggacgatgttagcgggtcgccgaaattctgctacttctattactatcccttttaccgtaaccgatatccgtcctaccaatacaatcggtgtcgaacttatgcttctccctacgacaaacactcctcaaattggcccgagcatcatttcaattaccctttttcgttgagtgggtataagccgtgctcattctatggctcttacacttatgcgccgtatcgaccgaataagagcccatctgggtactattatggatggtacaatggcatctcgggattctgagcaaataaattctcaaggcacaaaaaatgaaaaataaatgcttatgattttttctttaaataatgtaaatttaatgactttgaagagattcgtttaattttcactccaatattttttaaactctcttaaagaatttaatttaaaaaaa

SEQ ID NO: 90778 - DNA, 526 bp, Heterodera glycines
tgtaaaatgagtcaacaaaatgaagaagcacttggcaaggatcaaaaggaacttcgagcagttcaacacgacatggaacgccttttcaaagcacgagacgcgaaaggactttccgagctgtacactgtcgacgccatcttcgcgagcaatttaaatttttaaattaaatttttacaataattgggtttaatgtttgttaaaatgatttgtttaggcccatccgccgatcaaaagtcgtgcagagattgaaaagctatggatcaaattccttgacacagactctgccgaattgcatgtaacttttgacgaagtttacttttgcggcgatttgggcgtcgaaaatggcacttataaatttacgaacaacgacggcacagtgacacagaacggacttttcatccaaacttttaagcgcggttcggacggaaaatggcttatccacaacgatttttacacatgttgaaaaagaatgaatcacaatgaaggcatcagaagaaaaagaaaaaacatttatgtgtgaaattag

SEQ ID NO: 90779 - DNA, 436 bp, Heterodera glycines
tttctaatcttcttccacgtcactgttggataatggcggacactgaagcaaacaatagacaaaatgagttggaaatgagcgttaatcgatggctgggcgaaacactgcgaattgaattgactgacggacgcgtcatctatggtcagttggtttgcactgacaatgtgccgaacattatcctggtggattctcgcgaattttggaaattcaaagaagacgaggcgggtggtgatcgtactcggattccgatcagacggacgggaacggttttgatcaaaggagagtatatcaaacgaatctttcaaattgtgttgccagaagaagaaatgaattcgattagaagaaaagaggaagaaacaaccgaaatgtgaactcaaatgtttgaattgtttttccacatttcataaatgaaaacacagcagacagaacattggcg

SEQ ID NO: 90780 - DNA, 599 bp, Heterodera glycines
cagtttaacaattgtccgtttcccttttgtctttttgctccatgtcttcctcccgcttctttgtcctccttcctctcctctttttcctcctcctttcgttcgaatgcgttcttttggctcccaatttgttctcctccaaaatcgtcgcttttggtgagagtggcgatgcgtttgattcgccgtcattcgccgatggcacatcgacggaacgcttttcggcaacggaaagcgacggaagggcaatggccaaacggaacagtcggatggtcaacgcattgagcaccattctgaacaaacggaaagaattgggcaccaatgatgcttttcgagttcgaatccgatcattggaccaaatgggcaatacgaattgctacttttcgccggttcagtgttatttctttgaggaacggtaggaaaaagtgaaccgacgatggaagagaagaaaagaattggaacagacaaaatgaaatgattgttttgggaatgagaagcgatgccctttttgtgatttgccaattaaattgcgactcaacgaattttcccgcgttaaacgcccattttttatcaattcgataatttaaacgatttcatcgaaaaaa

SEQ ID NO: 90781 - DNA, 490 bp, Heterodera glycines
gtttgccacactgaagacaacaagttcaagcagacatttgctgccaattctgttcatcttctgctgttgctaccgcgccttttcaaattttggtgatgcggccattgtgccattgtcagccctgggccgctacaaggtgtcacttggcgagctgaacgaattgctgacagaacaacaacgctcggctgacgcagtgccaagcactggcgacaaattgccaaattatgccaaaattccatacggagccaaacacgaagataagaggagagagtttgaacacggctgggagcaatgtgaattctcaccaatttcgtgcatgttgcgacgtcggaagcgataaatgtgcggacaacgcaaaaaaacgataatgataataacccatgatgattggttaattaataatggtgatgaaaggtgtggattacacttattaaatgatgaaaaacaaacacacgatttgtctctgtcgcttggttccagtaaataatcg

SEQ ID NO: 90782 - DNA, 636 bp, Heterodera glycines
gtggattaagaccatagcatcttgctgcacgtccttttttctcctaattattacaaagttttacacacatttttttaatgagttttccttgcggagacggatggcggcagcaaatccatccggaggaacagctaccacaatacgagcagaaatgtgacattgaaatgcaactggacactctcaaacaaacggtgaaggcaaacacaaaagcatgtgcagagtcggcacaacgaatcgaagacttgcaaagttttcgtttttattacatcaccttggcattcttcgcattcttcatcctcaccatgtctgcaatgttcctttatacacgaattagcttactaagtgaccggatttatacccaaattggcaatgtcgacaacagaattcgagatcatcttgacaccaaatctgagcgtctttatgccaaaattgacgctttatctgcccaagttcaacgacttgggctggcaatggctacgcttccgaatggaagccacaccacaacttgatgaaagaggacaacgaacgacagaagaagagaaggcattttgcacacacacattagcctcccgtgatctcctcctcaacaatgttattgataaaagcgggacgaaggatagaaaataaatttaaaat

SEQ ID NO: 90783 - DNA, 663 bp, Heterodera glycines
  unsure (1)..(663): unsure at all n locations
ggggtgagtaagccnaaaangcgactgcattatcntaacctattagactgaaaatggctactgcaaaaaagaagacgcgaaagcttcgaggacacgtttctcatggtcacggtcgggtgggcaagcaccgcaaacatccgggcggtcgtggtaacgccggtggacagcaccaccaccggatcaacttcgacaaataccaccctggctattttggcaaggtcggtatgcgaaactttcatgtgcgaaagaaccattactactctccaagcatcaatttggacaaactgtggactctgtgcacagaacggacgcgcaaacaatatgcagaagtgaaggacaaagcgccggtgatcgacgtggtccgggccggctatcacaaagtgttgggcaaagggttgttgccgaaacagccgctgattgtaaaggccaaatgcttctcgcactctgccgaggaaaagattcggaaagtgggcggcgcatgtgttctggtcacataaatggaagaaagggcttgagaagaatgatgatgatggcgccccttgacgaggaacacctttttatgttgttgtctttgttaaagttattcctttcgaatttcttttttttgtgcaagtgtagtgggagccaataaaccgtgcacactggccatttcttatttgaatc

SEQ ID NO: 90784 - DNA, 116 bp, Heterodera glycines
acggacgaaaaatatatggcaagaaaaaattcacagattgttcaagcaggcagtagaagaaggagtgcagaacgacccgtcacctcgttgcacgaggcctcgcacgttattgcaaa

SEQ ID NO: 90785 - DNA, 575 bp, Heterodera glycines
accccgcatatttcgggctgtttttcccactccgtcgccatgttctgtcgctgctttccccactcctttcttctgctgctgcctgtactgcttgcacttctctcgctgttcaaatgcatttcggcttcaaatcaccaaccgcaagcagagaatgtactgctcgaagaactcatccaagaaattcgaaaactcaacgaccgtatggaaccggcccttgggagagaagggaatgctgaggaggagcaaatgttagaaataaaacggtcccaaggaatggtgccttccgaactttggaacagagccggggacaaaagagcgcagctgcctttttccggtggcatttatggcaaacggtcgccactgccattctctggcggcatctacggaaaacggagcgcacgcaatctgcacagttcgtcactgattattccgacgctcaatcggcaggcgcgtgcgatgcctgtcaacgacggaatgtacggcaaatgaaacagaaagaaaaaaagaaagacgcacaacggagaaaaagatgggagagagagagagagagagaaatgaattcaatggcaaacatt

SEQ ID NO: 90786 - DNA, 543 bp, Heterodera glycines
tgcaaagtgccaatttttaatgtttagaatagagtgccacgggaccgggaattttgggcaaaaccaggaccttttcgggttcaaaaattaaaatgaaacaacaacaacagcacagtccccccgaaaacagcagtgacagtgactcaccacccgacccatttaagatcaatcaaggctcgctgacccttgcccagttggtggaatttttagaggtggagcatgccgaaaccgttgaattgatgcaagctgtctggcgtcgtcgtcgcttgtacaaaatgcctgttcggcctccgaacccaaacaaccaaaatgatgaccgttttttcggatatggggaccatttggcggaagatgttttctacaatttggtggaaaaaacgcgaaattccatccatggaattatccagctcaaagtgctgcatgttggagcgtggaagtcagttgacgtcgaataccacttttaatgagcttaaagagatctctttcaaaattgcctttgttttcacaatcacttaatctgacaataaatgtggtctccaaaaa

SEQ ID NO: 90787 - DNA, 285 bp, Heterodera glycines
aaatgcatcgtttctccttctcgtaaatattttgctttgttcaattgtgttgctacatttattgtcaaatgaaaatggattggtcaatgccatgccggcattgaacggaggcgacgagttgttgttgagaaagaaacgccaagacgaaggtgatgaagcggaagaaaatgccggaggcgagaatgcggaaaatggaaatgaagaaaataacggagaaggacaaaatgaagaaaataacaatggggaagaaaaaaaaaaaaaaaaaactcgagactagttctctct

SEQ ID NO: 90788 - DNA, 459 bp, Heterodera glycines
aagggccaaaacggaggcgcagctgaactattggccgtattattcgtcgcccgtttattcccacgccgcttcttacgaccattacaaattgggctcaatgtaccaatggtttttacgttcggccgcccatcagaacagcccaaaccgaagggcacgttattactgctacagtccgtacacaaaacagcacgagcacagcttcttcccctactttaccaaccactgaaaaagagggaaaagcaaaggaaaggaaaagcaaaggaaagacgaaacgcgaagaattctgatgattgtgctgcatgaacgaaaatattagcgcaatctgtggttcagcaacaacagaaacatcaaaaattcacctttatttcactcacataataataattatattgtaattgaacaattaatttgaaaaaaaaaaaaaaaaaaaaaaaaaaaaaaaaaaaaaaaaaggaaaaa

SEQ ID NO: 90789 - DNA, 330 bp, Heterodera glycines
aaattgctaattttgtcattttttattctttttgccttctttggcttcgctgatgttgtcggaacaccgatacaagaacaagaatttgcaaaaatggtggcaaagcgtgccgatgggtttgatgagtgcttgttggcagcaggtgctacaaattgtgctggtcgtttagcttgttgtgaaaagtatggacaacaaagttgcatttgttgaaaagaaaagaaaatggaacaattttatcagcagattatgatgcttttggctttttagcaaaacatttcgatgcgattttaaaaaagaaaatataaaatttttgtccacttaaaaaaaaaa

SEQ ID NO: 90790 - DNA, 448 bp, Heterodera glycines
  unsure (1)..(448): unsure at all n locations
attgtcgtcaattgtttaatttttgatgactaattccatgccgaaaatcctcttcacaatcatcgctttcgtcaacatctcacaaattttattcgctactgctatgtataagggcaaagaaatttgcggtaaaaccgtggaagagtgtcaagcggcactgattgcttttatgaaggatagcggaagtaatcagaactatcacgcgagcgaaaacggtccaatacagcttgctaatgataagtggtgtatttgggtgcaaagctatgtaacaagtggggccccaagatcaaaatggtgaagccatgaaaattgaaggcggacgaaagaatgatgaatgctaattgaccccatttgcttgttgttgttgttgtttntttttcntcgggtcntttgtttgtccgcacttttttgggattagatatgtagattaaactttttgctatcaaaa

SEQ ID NO: 90791 - DNA, 510 bp, Heterodera glycines
gcatcgcttcggctgatggaaatgcgttgcgttccctcccgtcgcccctttcgtctcatcgccccgctgttcaacgcaattcctaccttttacctcattctcacccttattttctgcattctctccccctgggctgactctgcagatgcggacgaatggtatggcgcgagacaattacgcgcaccgaaacccaaatttatccgatttggacgttccggacaaaaaatgatacctttcagcagaagtttttcaacagaaactcagtacggcgacgaagggatcaaccaattggacgcgttggttgatgcggtcgataagctgtatcaatcatcgccagaaattagggcattcaaaactgcgccaaaaagggcacaaaagttcatacgattcggctgatgagagagaatttgacgaggaaaagcggacaatctcagaaaaagttaccagcagacgatctcacaatcccttctcttttctgaacaaataaaataagttgtattcgttaaaaaa

SEQ ID NO: 90792 - DNA, 490 bp, Heterodera glycines
atgaacacgacgtcccttattcgtcttctgttcgcggttttctgcgtttttttggccaatttcccccaaagtgcgcaggcagaaacaaagaaagtgtatttcgtttatggtactcaggtcacagttacagctgtacataacggacgcggaattaatcttggagcaaccacgggagaaggtgttgaatcgaaacaatatttggagattgatacaaatgtgtggaacggaatgaatgacaatgatcagattgttttccatgttcgcacaccgcatagcgtgacttcatacgacaaaactacagttggtaaattacgtaataccagtgaattagactttgctgatcaaacaatccgagcagtttaatgatgaagatgagtaggaagcaaaccagcagaagaacggctttatgtatttgacttcatcagatgtcattttcattgctttgttgatgccatttttggcttgttgaaaaaaacatttttttaaaaaa

SEQ ID NO: 90793 - DNA, 432 bp, Heterodera glycines
attttgccaatgcaagtcagtcaaatgagaacaatgtccttgtcggtggcaagtcttgttgcattgctcgttttacttgccatctccagccatccaacctttgccagtcctatttcttcaagagacttaaatgatgctgctgaagcaggtccactccaagcagttgaaaagcgtcggaatgcagaattcataaatggcttactgacaatggagcgtctgaatgcgatgggcaaaaggtctccagtcccagcatcatcagatgatggagtcgtgccgatgacactctggcgttcccagcacccgttcttctggacagagtgaaagcaaaaaatgaagcaaaactgcggattatttgtcggcttaaaaaacaattataatatgaatgacgcatcatttaatttgtgaataaataaagcggttaatccaggaaaa

SEQ ID NO: 90794 - DNA, 524 bp, Heterodera glycines
taatagttttgcgttacattacacaaaaatgtcgtcaaatggcatcatcacaattgtggcgctattccttgtgttgtttggcactcacataacaacacaaattggggcaatgaatcgtcatcgccagcagcgctcacttggccatccgtttacggtggataagcagcagcatacggcacagaacgaaaatttggtcggcgcctatttgtctcggggaatgttcagctgcggcgccaaatatgttggcacattgcaaagactgaaaagaatcattgaggaagtgcatgccgactattcggaatgccaaaaatcgatgaagcaaatggacgagaacgagcaaatggcattcggaaaagggcacggcacagagcgatttgcgatgattgacgaactgatcaattgagcccagggggacaatttgtggcaaaatcacaaaattcgaagcataaccatttgaaaaacattgaaatgatttttcattgtttgtgataaagcgaaacagcaatttgttaataaaatgccaa

SEQ ID NO: 90795 - DNA, 516 bp, Heterodera glycines
catatcccaatttgatgaagttcgttttatctgataaaattcgttcgcagcgcattcgcggctttcttgttgacataaatggcgtactctttgacacttctttggacggaggcaaggccattcctgggtcgattgaagcagttaaaagactttacgagctaagttgtgttcgttttgtaagcaatgaaagtagtgggacacgaggagcaatttgtcaaaaattacaccgtctcggattcgttgggcctcagcctgagcacattttcacaccggcaccggttgctgtcaaataccttcgacagcatggactacgaccaaaattgatagtgcacaaaggtttaaaagttggactttgagttgatataattatttggcgaaccaactgaaccgactaaaaccatgaaggacacttaatttaagactcctcgaacttcagatgtacttcccgattttgaagaatttctcaacgtcgaaaacccaaattgtgtggtgttaggcgacgcagaacacgagcta

SEQ ID NO: 90796 - DNA, 586 bp, Heterodera glycines
ggttgtattatttttgttcggtattttgttggccgttcaattcaactcggaaatcgttatggccaagagtagcggcaagcaatcaaaagcatcgaattcaaaatcaaaaccaaaaccaaatcaatcaaaatcaaataagccaccatcatcaccgtcttcatcatcttcatcatgcatgggctgtctgtcgaacaccaaaacggccgggcccattgattcatacttgggcaagccggtcaagaacagcattttcactttctacggtgccggcggacgcggcgcgtgcggtctaaacgccggagtgccaaaaatgtcagctgccggctccggccaattgttcaagtcggacgggcagtggaaagacgcatgccgagccgacaaacagtacatgttggacgacccgatttgcaagaacatttgtatcaaagttgattacaatgggaaaactttgaccgtcccaatcaataacaaatgcccggagtgcccgcccaaccacgtggacttgtccattgatgcgtttaactctttggagccacgccggggtctcgtgggcatagcgaatggtgccacgctcacttacatgaga

SEQ ID NO: 90797 - DNA, 697 bp, Heterodera glycines
ctctcaggccggaaaaggaaaaaagccacgaggagggggagaatgattttattcgttttgctgcgacatccatgcaagggaagagttcgttgaaattggtccattcgcatttaaattggcaactatttaaggatggcgaacccatcaggaggatgcgcataattgtatcctcagttttggagatgagtgctctttttttgcagtttatgatgggcacggcggttctgacgttagctcctacctgaagaaaaacttccccgacttcttgaaagagcacaatttgttgctccacaccactgacgaaggtctcagcgcggcattgcacaaattatttgtgaaatttgacgagactctgcgccacgacgatacggtcaaagcaatggtagagctgaagacagcactttcaacaacatcggaccaacaacagcaggcagaagagcaaaaggcaaacgaaggctgtgacccgggggagaaggagcgcaaggaacgtgagagtttgatcgatgcaaaaaaatagacgccgatttgcggcgagtagctgtggtacagctactattattgagccttttggctcaattttcggtgaattgggctcgacgatagccgagccaagaaaatcgccaggaacagccggacaaaaggggaggatgaaactcatcacaaacgtttgtcgttcggaccggaagttttgcgtttc

SEQ ID NO: 90798 - DNA, 503 bp, Heterodera glycines
gtcccttattcgtcttctgttcgcggttttctgcgtttttttggccaattttccccaaggtgcgcaggcagcaaaaaagaaagtgtatttcgtttatggtactcgggtcacagttaaagctgtatataacggaggcgaaattaatcttggaaaaaccacgggagaaggtgttgaattgaaaacaatatttggagattgatacagaaaaatggacgggaatgaatggcaatgatctgattactttccatgttcacacatccgatggcgtgactaaatgtgacaaagctacagtacgcgaattacgtcaaactgatcaaccgaaagactttgctgatcaaacaatccgaacagtttaatgatgaagatgagtaggaagcaaaccagcagaagaacggctttatgtatttgacttcatcagatgtcattttcattgctttgttgatgccatttttggcttgttgaaaaaaaacattttttaaaaaaaaaaaaaaaaaaaaaaaaaa

SEQ ID NO: 90799 - DNA, 511 bp, Heterodera glycines
  unsure (1)..(511): unsure at all n locations
tgaaatggtggacaaaggcgaaggtgacagccgctaccaagaattgaaggacggaatttaccatggctaccagccgttgcgtgctcgcaaaacgttcacttacacttacacacccgaatttgtgccgggagcattgaacattgcggttgcccgtgacctcgactccatcccatcggggccaaaggacgacggcgcacattaccaaatggtcacggcacacaaagtgaatagggccccaaagcccgaagatccgtacgcgtggctccaaccgcaggccccaaaacagcagcaacaacagcaggaggaagtgacggaagaagcatagaggaagaagaagaaagtcagcactaaagcactgattagaggtgataagtgataatgacaatgataaatgataatgctggcgatggtgataaagttaattgtcaaattaattgtctattaacgatggaattaacaaatattcacaaagaattgagtaaatgtgaatggtagtccaaannnnnaaaaa

SEQ ID NO: 90800 - DNA, 604 bp, Heterodera glycines
aaataccctaaaattcaacaccctcaaaaactttgagagggaattcgaagcgcgataacgggaacaaataaaccaatgaaataagataatttgatgattttcaacaaatatttttaatttttgggaatttgtaagcctacatttaggccctattttccatattttatatcttaaaaatagagcaccctcccccgtcattattagtgccaaaatgcgttccaaatgtgtttttctcgtcatttttgccaccatttttttgctgttaaacggcggcacttcatccaaacacaaaatcgccaaaatcaggagtgtcgttggtgcaaaaaagcgttactttggcttcacttcttcgccaaccgagtcagacggaggtggtcacccgcacaatgtcacaacagtgggaagtacagcatgatatgtatgattatgatcattaccctaaagacgatggaccaaaagaaaaaggctccaaaaactgctgcactataatgtaggaaatttggacaaatttcagacgctttttcgagtttggcgatcttagaaaattgtgtaatccgcttttttgaattgtcgaattgttgagtaaaatcttgttgttgctaaa

SEQ ID NO: 90801 - DNA, 907 bp, Heterodera glycines
acacttcaatagaaagtgtaaaatggcacaaattcatttcaaaattttccttatcttttctctcattactttttcacaatgccgaatcaattcagaaccgagtgaaaaagaaggcccttcttcaattggtggaattcaaaatgcaacaagcgatcatcggtctgctgctgctgctgcttctgattaccatgcttcttcatgcgatggttttggttggacactgaacaagggaaaatgctataaagtgatcgaaggattgatggattggaatcacatgatcgccgcttgcaaaagtgagggtgcaattctcgtgtgcattcaaagtgaggacgaaaatcattttgtcgggaaaatgatcgcaaagccaattgagcgttccctgggcaattaccgcttggagacaactcttttcaacacattttggattggacttaaccgtgtcaaaaacggcgaaaaatacgacagcacgtgggtaaatgggaagaaagcaatgtttggaaatctgcccgagattaccaccgaattgtcaacagcaaatggcaagaacaaatacccatggggggagggcgaaccgtccggcaccaacaaattcacggacccaaccggagtcaaggaggagtgcgttcacatgttcagtgccgatggcagctggaatgatgctgagtgccgtgtgcaaatgagcggcggtgtgtgccaaaaaatgccgaaatattgatttaatgtcttaattaataattcaaaatatttaactcaaatatcgttcatttattattttttgtcttcaacgtttagaaaatatattatcatttatcaataaggatgggattttaggaaaaataaaattcacgaatttatttgcttaaaaatcccatcccgtattatcatctataataaaataatattttga

SEQ ID NO: 90802 - DNA, 702 bp, Heterodera glycines
attatcaggaaattggtcgccgatggggatggcactggggatgaccggcgaattgtccaattattccaattgataattatgttgagcaaatcaaacgctgatacgaaaagtattactaacaaaattctaatcaacttggaccaaattgaactttctttccaaaaacaagcacagatttccgccataaccgaaattgaaattgcaaattatgaacaactttgcaccgaaattgatgaaatgatcacccaaaataacaacaaaatggatgcagtgaaaagggaattggcagaggcaaaacaaatccgaaaaaaccgacaggaatatgacgcactcgctaaacttatcaaagaaaagccgagcagagtcgaaacttcgaaaaggctgaaactgcttcaggatgagttggaagaagcatacgccaaacaaaagatgctcgaacaacggttgattgaaaagaggaagaatatgtacactcttgctgttctgctggacaacctcgaggaaatgaacaaagaatccgaagacgtgcccatgtcggaaggtgacgatgccagtccggccggagcagtcccatcgtcgtccgctgggtctttaaagtgaaagtcgatggctcgatctgatcacctattttctttctttcaaatttatgttcttttaaaaagatgttcgcgaattaagcgaataaagccaattctcggtaaa

SEQ ID NO: 90803 - DNA, 734 bp, Heterodera glycines
ccccccccccccatgagattgaatgcggtagatattcgctcatatcgtatcttaaactcaccatcaaattataatgaaactggtcttgaacgggcgttattcttctcggcaccctgctgtgccagtgccattctgactcggtggctgttgaacagtcaaaagtggatgccgtcgatgttggagacgcgccgcacatgatgttgacgcgggcaaagcgtgccagcggcggcagatggaccacgcagcagatcatcgagtgcattttcgcaatttttatcccgcccgtggctgtgctgatccatggcggccacgaatgggtgctccatctgatcatcaacatcgttctctggattctcggctggattcccggcaccatccacgccttctggtactgtttcttccgctagatcgatgaaggatgtgatgatcaacaccgatcgagacccccatcattgttgaagaaccggcccaagaaatgagaatcctgccgccttatttttccgatcattttatgctttttatacatcaaccacaaaacacaacaacaaatcgccaacatattttccatatttggataacaaaaaaaaagcccgatgatgatttcgatcagccccatcaattttttaattgtttttttctccaatttttaaatttgttcaaacaatttgcttgctttttcgcacctccctcgtcgccccccccccccactcatttatttggtttatatgctttta

SEQ ID NO: 90804 - DNA, 132 bp, Heterodera glycines
cctaattattacagttaaaaaaaaatattttggcgaaaatatatttaaattatcctcctattcactaaaacaaagttttttttcaatggcgctatcccccgccgggcttcatctttccaaaagtatgtaaaa

SEQ ID NO: 90805 - DNA, 485 bp, Heterodera glycines
  unsure (1)..(485): unsure at all n locations
canaaattggtcgataagggcgaaggctacaccggctatcaagagctgaaggacggagtgtaccacggctatcagccgttgaagccgcgcaaaacgcccaaattcaccgcagaatttggactgagctcgggcatgctgaacattgcggttgcccgcgacattgactcaattccgaagggggacaaccaggacggaagccaataccagtacttgtcggcacacaacgtggccagaggccagtacattcctccgaccaacccgaacctgccgaacttggacattcctgttcaacaacagcagcaggaagtggccgaagaataactggataattcagaatccaattggtgatgaagatggaaaagaatgttcaatttaatatgtttgaatggttaaaaaaattggattaaaattacgataaaattaaaatttaataaaacaaatcatctgaatgaacaaattttaataccaaaaaaaaaaaaaaaaaa

SEQ ID NO: 90806 - DNA, 633 bp, Heterodera glycines
  unsure (1)..(633): unsure at all n locations
agtaatgaacaatattcggccgggactttgtggcctttttttttcactgtcgatggagatgaaaaacgtgcagtgcgagaagcatttaatgtgattgaccgttttatctctgtcgaggaatgttctacggataagttcgacgatgagtgtgccaaaaaagagggcgcactgacggatggacaaaaagacgtttcggactcactcgcctcggagtgtcaacaaattcgtcagaataagcgccaatttgcttcaaatgccgtccgacaatacatgaccggtgcgcgctgctctctattttttgcgtctccgatgattcgtccgtacaatgtgtataaaattgctgagcaaatggtcgaccaaagtcagaaggaaagtctcacccgtttcctggcacgggttatccccgtggaagagacgtgccatgctaatttggacgaaattaagacattgctgtcagaaatggtcgtcaaacatttgaagggagagaagaaggacactccgccaacttacgcagtcgaattcaaagcgagcaacaccaaactgttgagcagacagcanatntacgatntggttgcgcaactgatgaacgaactgtcaccggaaagtgccgtcaacctcacccagcctgatctg

SEQ ID NO: 90807 - DNA, 607 bp, Heterodera glycines
ttccctcttctctctaattgccattattattatttctttatcttcctcggctctttccatggatggacgccaaaagaagctgaaaactgttgactttgaaattttgacgcgagaacagctgtgcgtactttgccaagcggtgctgaacaaatggaagggacaagcgaacaaaaatgagcaacactttagggaggaaattctcgactcctgctcgctgatagaaaacccttccgaagcgaaaaagtgccgtgatggagtgaccgatgccaaagtggcgagactgaggaaggaaggaacggaggaaatgtgcgtggcggagggattttgcggaaagggcgagatgaaagagttggagaagaagatggagcggatggagaagagaatcgacgacaggaagcaaaagttcgagaagggactgcgcataattccgcccgtcgacttgagcccggtaaagtcagtcccaggggacaaagcgacgaacacaacgaatcaaacgatgggcggaggataaacgatcaaccgaccgactgaattgattgatcaatcaaaaagggagacgcacttattctgatcagtaatcacttgtccaatcacattgcctacgttt

SEQ ID NO: 90808 - DNA, 350 bp, Heterodera glycines
cttaaaaatgctccgttttttgcacgccggctgtgtgccccattgtcgcatcaaagcgtccatttcgacggtaggcgagcgaaagtatcatttgttggactcggtgaagcgggacacactgtctcaaaaaggctcagggacattaacatctccaaagaccagatgctggacgtgcgaaaagatgtgggagaaccagtgacggattgatcgcccttttggagattattgaatggacaattgatctcttctcgttaatttgatgtttctttccgacgaaaatatttatttgtttgttttgccttcagtcggtataaaattgaaattcaaaaaaaaaaaaaaaaaaaaaaaaa

SEQ ID NO: 90809 - DNA, 720 bp, Heterodera glycines
gaattatcagcccaaatctgtgtcacagttcagtgccaacccatgcgaagtgattccgtgtcggatttggattccaatggccgccactttccgattctcacccacccaaacgcctgggttttgagtgcgtccaatcccgttcattccaaagtcacattctaatgtttggatcaccgtctcctccaccaattcaacaaatcgctttacaccaatcccattcattttaccatccgcagacaatttgcgtaaattgaaaaccggataaacgataagttggcctggtccatggaaagttacaaggccgccccgctttattctgtgaaattcggcgccgagaaggcgcaatcgctgggcaaattcatcagaatattcgtcctgtcgaatgccaacggtgtaagtgggcggatgctccaaaagacaaaggaaatggccactgaaagagaacgaaagaagcaattaaccaatgctaatgatttaaaattggacaacattttgctggactcggacggtcacattcacttggccgacttcggaatgtgcaaaaccgactcgaacagagagaacggcatggcctccaccttttgcggcacacccgattatatcgcgccggaaatcatcaaaggacaattgtacaaccaagcggtggacttttggagcctgggtgttttgatgtacgaaatgctaatcggacagtcgccgttccacggagacggtgaggac

SEQ ID NO: 90810 - DNA, 270 bp, Heterodera glycines
atggccgtcgatgctcagcaaataatcgaactcattctttgcctcattttgccgcctttggccatttttatccatgctaattccgactgtaatgtccacgttcttatttccatcgttcttcgttttctcctctttttccctgctgttcttcatgctctgtggtactgcttttttgcgtgagctgtcaaagggactgtccaacaaaaataaatcaacgaacgattgaaatttgaaattgatttctcattttggcatatttatgtttatgtt

SEQ ID NO: 90811 - DNA, 410 bp, Heterodera glycines
taaaaccctgttcttggtcgctttcatggcactgttcttcaccggatatcctgctgatgttgctggtgctgttagttcatcaggcaacagacgaaatgttaaatacattgattatgggccgcttattcgacaatcccggaaaaaccaaaaccgtaataaaaactcgagaccgataaagacacggccgtcgccgagacgaggcgattgatgaccagcacagaagaaagaataatcgagagaaagctgatgaaaaattgagaaactaaggatgattaaaactgagtcgaaagtatggaaaatggatgaatgcattgtttttttgggaataaatcatattaaagtgaaaaaaaaaaaaaaacaaaaaaaaaaaaaaaaaaaaaaaaaaaaccaaaaaaaaaaaaaaagaaaaa

SEQ ID NO: 90812 - DNA, 840 bp, Heterodera glycines
attttaaaggtggaaaattcatacaattcttcattttgttcctcatcaatatgcttgggttgttgaacgtgcgggaaaattccatcgcattcttgagccgggggtgcatatcgtataccctctcatcgacgagatacggtatcggcactgtttgaaggaaatgtgcattgaaattccacaacaagaagcaattaccaaggacaatgttcagctggatttggatgccatcctttacgtccaagtggtcgacccgtataaggcgtcttacggtgtgcaagaacctgaatatgcgatcagtcaacttgcacaaactgtaatgcgtgctgaggttggcaaactgatgttggacaacgttttccatgaacgggccaatctcaatagggcaattgtcggaggtataaaagaatcgtgtgctccgtggggcctcatttgccttcgctatgaaattcgcacaatgaatatgcctccggaaattcagcgcgccatgaagatgcaagtggaagcggaacggaaaaagcgtgccgcaattttggagtcggagggcatttgcgaggcggaaaagaaccgagcggagggcgagaagcaggcgcgaattctgcgctccgaagcacaaatgcaagagcagatgaacaaatcgatgggtttggcaaaagcggccgaagcagagaaaatccaacgcattttgcaatctgaggcggaaatgcaaatgaaagttaacatggccattggacttgccaagtcggccgaaagtgaaaaagagtcgcgcgtcatattagcggaagcggaggagcaggagcaagtgattgtcagccgtgggttggcgtgtgccatcgaaacgga

SEQ ID NO: 90813 - DNA, 82 bp, Heterodera glycines
ttgttgcctcgcccaccataaaaatggaattaacgccaaaatcagaaaaaaaaaaaaaaaaaactcgagactagttctctct

SEQ ID NO: 90814 - DNA, 279 bp, Heterodera glycines
gacaatcttcttcactttcaatgtctttgtggcgttcaattgggttgacttacacgcgttactcgcaggttgctgctgcgtcattgcgcgaatgcgtgaagaaaggcacttcgggcgaggcaaaaactgcggaaccgataaaaatcacttcatgggaaggaggcaaagcgaagaagcccgaataaggaagcattgaccttttaggaccaaattgtttttttgtagactccgttattgctattgtcagataaaaacgagatttaaaaaaaaaaaaaaaaa

SEQ ID NO: 90815 - DNA, 477 bp, Heterodera glycines
aggatctaaaaagtcatcgaacaaagaatcgaaaaagtctgcaaatatttcgcctgactcttctgaagacgatttggagaaagacgaactcttggaaaagaatgctgataaacgagagcgtgaccaccagggaaatgaaattgttccaattggaggaaatcgttttatttctatggatagattcaaaggacgtattttgattgggataagagaatactatcaaaaggacggcaaatggctccctgggaagaaagggatcagtcttaatcacgaccagttcaatggcttattgaagattctccctgatgtgaagaagatgatcagttccgcctgaatgaagtgcacacgacacaatgatctttgtttagatttttagacaaatttgcttgttttgaaatatatttttatcacatcttgctggcattttcatttttctgaaataaaaattggacactgaaaaaaaaaaaaaaaaaaaaa

SEQ ID NO: 90816 - DNA, 453 bp, Heterodera glycines
aacatttctgacaaatcagaacagatcgcatccctggtttaatttaataaaaatgaatggcgaagttcgtagaccaaataaaattgtcaggtataagccaattgatccgatggtacagccagtgacagcggaagacagcattccggagtatatgaacgtgttggggatggtcttttcgatgatgggtcttatgatgagactcaaatggtgttcttgggtggctcttatttgctcttgcgttagttttgccaatatgcgcgcgtccgatgacactaaacaggtggtcagctcgttcatgctcagcatttcggccgtggtgatgtcctatctgcacaatccaacgccaattgtgccgccatgggcgtaaaaaataaatgcattgaattgttcagttcaaattatgttattctatcggtttcatttacatctcttattatttgcctgaaatacccg

SEQ ID NO: 90817 - DNA, 571 bp, Heterodera glycines
ttctttttcgctgacgcgacttttccccactttggtcttccaccgtcatggtaacattcaactgctgcaaattgcggcttaccatgagaaagtcattgaccattacgaaaacccaagaaatgtgggctctttggacaaaaatgatccgtctgttggcacagggattgtcggggcaccggcttgcagagatgtaatgaaacttcaaataatggttgacggaaacggacaaataattgacgcaaaattcaagacgtttgggtgtgggtcagcaattgcgagttcttcgttggccactgaatggataaaggggcagaatttggaatatgcgcgcaaaataaagaaccaacaaatcgcaaaggagctttcactgcctccagttaagctgcactgctcgatgttggctcaagacgcaatccaagcagcgctaagcgattatcagaagaagcaagaagctcgcaatgagaaaacttgaacgttgtgactatgattatcgcacaaaatacaaaagcccggcggatttatattttcattaaatatttgcgcaattatttctgttcgatatttctcctga

SEQ ID NO: 90818 - DNA, 419 bp, Heterodera glycines
gaaaatcgaagcgaaaagcgccgaccaaagcgaagtcaattgtggcattggagacgcagttcaattgtccgttttgcaaccacgagaatgtgtgcgaggtgaaaatggaccgtgaaaggaatgtcgggttcattcaatgccgcgtttgcatggaagacttccagtccaacatcaccgctttgtccgagccaattgacgtgtactctgattggattgacgcgtgcgaggcggccaatcagtgaaaaacaaaagtggacaaatcaccaacagagaacggacattgtgtgcacagaccagggatcaccttattattcactgatcatattggcattattttccaacgcatttttttttttgatttcctttttccattaaaagtcgtctcgtaaaaaaaaaaaaaaaaaaaaaaaaaaaaaaaa

SEQ ID NO: 90819 - DNA, 419 bp, Heterodera glycines
cttcgcttctacaatttttctgttcatcgttttgcaattaacggatgctgaaatgtcaaacgaatacaaagaagcgtgcaatgacacatgtgctgctttaccaaagcagacttgcggtcgtggaaggccacaaagtaacagtaactcacagataacttgctactgtaaatggaagaccagcggatgctgtttcggagaagggtgtgtaccacgtgaacaaaccgcagatgaaattacgctttacggtcgcaccggaatatgaagaaaacaacagcagaagcaacaggcaaagaaacctgaacacttccactgaccaagatgatattttgacattttcggaatgcaaaatttgttgcgatgttatgccatttatgttacatttgttagcggataaaaattgttgtcttaaaaaaaaaaaa

SEQ ID NO: 90820 - DNA, 369 bp, Heterodera glycines
gggcacaaatggcggcaaaactggcgttttgcagatgttcgggcggcaatttcacattgtgatggctgacaattccgtggcagttttgaagtacaagagagtgccaaatcgacgaatattggacttttaccacactgaagtgccgcccgatttccgtggccaaggctttgctgaacaattggttcgggctggatttcgccattgtttggacacgcgtttctccgtgtacccgtcctgtacatatgtgcaaaaatacatcagagatttggccacggaagaagagaagaaaattgttgtagaaaaatatcattaaatttgctgctgctgttttttttgaattttgctcattttgaaacaaatatttaaaaa

SEQ ID NO: 90821 - DNA, 813 bp, Heterodera glycines
cccccccggtttgaggaaagtgcttaattcgcaaagggataccaactgcttaggagatgccatcgtccagcgggtcggaaaagggtaatggacgcaatggcgttcgtggcgaggaagaagtgaagggaggaaaagaaattgctagcaagacacttaatattcaatcgaagcgtttttatttggacgtcaagcaaaatgatcgtggacgtttcgtcaaattggctgaggttgctatgaatggtcgaaagaatcgtttgttcatgtcaatgcgaatttgcaagaatattaaggaattgttggggaagtttgaggggcacgtgccagcgtcggaggaagtgaatgggaaagcggagaatgtgaccattcaatctgaatctatcgtgaccgagagacgtcgatattacatcgaccttcgcgaaaatcggcgtggttcctttttgcggattactcagctcgagacgcattccgggattcgcaactcagtggcattgccatttgaggggatcggccaattgcacgatgcactggactcaattctggaggaatatggcgaagggttcattgaggaggaagccgaacttccccattctcagatgattcgtactgatgggaaaagctttttttttgatcctggccacaattctcgcggggactttctgaaaatcaccgagttgaagtcattcatgggagtgcgcaattccggcgtactttcaatcagagcaattccgcaattcactcaagtcctctccaagctctacgatgactttcaggagctcagagccgtagaggaagtgaacgtgaacaatgtgctta

SEQ ID NO: 90822 - DNA, 622 bp, Heterodera glycines
ttttgaatttgcgcaaaaaatgccaccgccaagcattcacggacagcccaaaattcggcatgacgaacaaagcaattcagtgttcctggaggtgtcggtgcagggcgcggacgcgccaaagaccaaatggtatttggaggagaaggaaatcgcatcgggcaccggcgcgtatcggatgagcacagcggagcaggagggcggacgcaagttgctgatctgcgagatcaagaattatgacaaggcgttacaaggcaattacaaagcggtgtttatcagcgcagatggcaaagaaaattatgccactttcactgtgaaatctggaagtgcacctgagttttatgagaagccaaaaattgtccaaaaggataatggaaaaataattcagataaaagttagggtcaaatcgcacattgaaatgacttcggaatggtttaaagacgacaagcccctgaagggatcagaccgattaaaaatcagcagccaaaaggacgaaaaagatccgcagggaatggtgttgttgttggacattcacgaaccacagaaggaggaccaggccaagtacaaatgcgtggtgaaaaacgcggagggtcgcaatgaacagtcgctgaacctgcagtttgaa

SEQ ID NO: 90823 - DNA, 457 bp, Heterodera glycines
tgtcgtcaattgtttaatttttgatgactaattccatgccgaaaatcctcttcacaatcatcgctttcgtcaacatctcacaaattttattcgctactgctatgtataatggcgaagatatttgcggtaaaaccaaggaagattgtcaagcggcactgattgcttttatgaacggacgcggaaataaccagaactatcacccgagcgaaaacggtccaagaaaggttgataatgagtggtgtatttgggtgcaaagctatgtaacaagtggggccccaaagatcaaaatggtgaagccatgaaaattgaaggcggacgaaagaatgatgaatgctaattgaccccatttgcttgttgttgttgttgtttcttttccgtcgggtcaattgtttgtccgcacttttttgggattagatatgtagattaaactttttgctatccaaaaaaaaaaaaaaaa

SEQ ID NO: 90824 - DNA, 533 bp, Heterodera glycines
aatgaatccctcaaaaatgtttgctgtacatttcgccggtgttctccttcccctcttcgctttggcatttcttctcaacgccggcggtgcttttgcctattacgcgcaacacttttatttgccgagcagcgaattcgccgacacttttggaaaaagaatcggtgcgcaatcattgccaatgggtgccaacgaatgggcggcacagccaaaaatggcaatggaaagagaggaagaggaagggacggaggagggacagcagcaggggggagccgaagtgatggcggagagtggggagggaaaagcgaaggtcgcgccgatggcgaggggaaatccaacgaaagcaccaatgattccccgccgtacacttcgccatttattcgacgactttggaagtggccaaatggggcgacaatacaaacgaatgaagccgtgcttttactctccaatccaatgtctgatgaagcgatcttcggcttaacccgaccgaacaatgccaaacaaagggaccattctcaaaatacccaatttctatg

SEQ ID NO: 90825 - DNA, 573 bp, Heterodera glycines
tttttttattcgtaaattactactaccaaagagaaaatgggccaagctctaagtgaaccgatcacaaccaaaaacagcgcctcttgttccaatgatcgttattttgtcggttcgtcttcgatgcaaggatggcgaataagcatggaagatgcccacacgcatttgctcgaactgcccgaagatccgagcacagcttttttcgccgtttttgatggacatggtggcgctcaaattgcgaaatacgccagtgaaaatttgcatacgcaaattgcccaatcgaatacattccgtgagggcagaatatccgatgcattagttgaggcatttttagaattggacgagcaaatgatggccagtgaacagatcagagaggaaatgtccgggagtacggctgttgcggtgctaatcaaagacaattttatttattgcgcaaatgctggtgattcgagggctgtcgcttctgttgatggcagggcaattcctttaagcattgaccacaaaccaaacaatgaggaagaaagtcgaaagatattcgcagccggcggatatgtggaatttggctgtgacaatggg

SEQ ID NO: 90826 - DNA, 472 bp, Heterodera glycines
atttactttcctttcgccgaaaaatgtccttctatactgtacatcgtgatcagctgccattgcgtgcattgttcaatcaacatggactaagctttcaacagcgttggcattcacctcactacaaatacagtgaggtgctcggcggcacttaccatatcccgcacagccgttacccaccccatgacgtgtacaaaacaccgtggctgtgccacctccatccaactcatttgacgccgggcgagcccgattggtggtactgaaagatgaacatgtgtaaagcaaagagaaatattaatgagtgaaaaacggtcattaacaaaaatgatattaattatactaaccgagaacgattaggagaagccataaattctccgtccgaaaattggccaatttatttttgattttattgtatatgctttctgtatactgtagtattgtacaacacaaaataaatgctaattgattttaaaaa

SEQ ID NO: 90827 - DNA, 439 bp, Heterodera glycines
aaactttctcctgtaaacatcgactctaaaggcgtttttaagtacattctcataaaggcttctgatggcgcaactgaaagatttttggttcgtggttatggtcgttgtaaatttcacgcggatattttggaggaagtgcaggcaagcgaaggagagaaggccattgaattttcttgtgttggcggaggccggataaaacatgagccggaagccaaacgtatcttcgtctacggatattcccaggggtttggccgtgctgaccatgcgaaatctgtcgaaatcctgagggaacgttatccaaactacacaatcgaatggtccaacgaaggatattagggcagtaaatctagtatacaatattgtaacgttttttgttttctatatttaaaaataaaattgggttctcggaaaaaaaaaaaaaaaaaaaaaaaaaaaaaaa

SEQ ID NO: 90828 - DNA, 377 bp, Heterodera glycines
tgtaattagtaacagttaattgcctttgtctaatccttttgccattcatttggctttgaatgctttccttttgtcccccctttttttgctcgtcggttgttcagcgttatttctaagaataaagcgattggcccttttctcacgcaaacgttcgatgctttttgttggtcctggggaactttgtccgattcccggccccgcctcaacgaaaagcggacacatggccaaaggaaggaaagcgaagtcggcccagaaccaaccatcgaattgagctaatagaataaccaaattctgatgcaattttgatttgtgcctaatgaatgtttttacccttttcataaaataggttaacgataaatgagcttaattatcaaaaa

SEQ ID NO: 90829 - DNA, 288 bp, Heterodera glycines
gcgcaaaaaattcttcgcttttacaatttttctgttcatcgttttgcaattaacggatgctaaaatgtcaaaaaacgattatgaaaatacgtgcggaaacacatgtggtcgtttcgcgaaaaaaggtgattgtgctggtaaaagtccgataaatacgtgtgtaacggaaggagattgctactgtaaatgggaaggatgcagagcagactacgaagagtatgttagtaatccctgatctgatgtcatttttgttacatttgttagcggaaaaaaaatttgttgtcaaaa

SEQ ID NO: 90830 - DNA, 826 bp, Heterodera glycines
ttatactggctggtgaagagaagcgtattacttgggttccgcttgagtcaaaccctgaagcatttaataagtacatcgaaaaaatgggcgtgaaaggagttgagtgccacgaacttttcggttttgagcctgacttggtcagcttcgtgccgggacctcacttggcgctaattttctgctacccttaccaagacaaagcaaatgactatcagaagggaatttacggacaattgacggcttcagacaaaggaggcgtgccggaatgggccttcttcatgaagcagaaaatacacaacgcttgcggcacttttgctctttttcatgctctgacgaataacaccgaccgaattgacattggaaacggcgtcttctatgattggtttaaggcggcaaaacaactcaatgttgaacaacgctcggaccttttggcaaacgattcggagttggctcatttgcatgaacactgtgctttgagggaatcggagacagatgtcccaaggaatgttgctcaccacttcatctcatactttacacatggaggacgtcttttcgaatttgactcgggacaggaatttccgcgcgactgtggaccttccagcgaggagactcttttaactgatgctgggaagatttgcaaagagctaatgggccaattggaggacatttcatgcaatgcaattgcactctgtgccaaaaacaattaaattgatgaaatgacaaagaaaatattacgatattcccgtgttttctgagttcaataaatttgacaagctttggtcataattttattaaataaaccaattgaaaaaaaaaaaaaaaaaaaaaa

SEQ ID NO: 90831 - DNA, 445 bp, Heterodera glycines
aaatacgacatttacggctgctttgattagcgatggacgtgctgaaaatcagttggagcaaaagaaacccagccaattgcattccctcccattttccatggattttaatgggccggcattggtctccaaattcttccagactgaggatggcgctaatgggctcaaagcagcactgttccgaggacatttgcttttgggcaaaacggtcagagcgccggagggttttgcgttttatgcagtcaaagagagtgaacattcacaatcagaagaagggagagatgagcacgtacaatgttgtggactctgttccgtcgatggatgtttgggagtacgacgaaccaccagaaagtcgtaagaaatgcctgcagaatgcattggttgctctgcaagttgcgaatgatctcgccagctgaattgttgttaattgtataaattttcaccaaaa

SEQ ID NO: 90832 - DNA, 563 bp, Heterodera glycines
  unsure (1)..(563): unsure at all n locations
taaattttgcaagcaagcgagaccagtgtggcatgcgcaattacatcgaacattcgttgactaaaatttgcgacggagaacccatactgtgcccattacgttgtgccgggaaggaacgcgacgccagtgctaagggcggaatattcaaatgggcgactagtccacgtgaacgcaaaggctttcagcacggagcgagtntgtttgcatatgaacaaccttaggacgcgcagtggaattccaatttataaatttgaaaactcccatttttctcacaataaatctgtgcaagggatgtggacaccgtcaaaatggagagacactcgtcagaatttgcacatacttcccaaacccgaattttcgccgttgttgacaagtgctacatctgccactaaatttctgtgggagaactctgttccgccgacagcggaggaagtgaaagacgaaacaaaatgattttgtttatttatttcgatcttttggtttatgaggacagatcacacatttatcccttttcgcgcttctgataataaaaagcgatgtaaaaaaaaaaaaaaaaaaaaaaa

SEQ ID NO: 90833 - DNA, 638 bp, Heterodera glycines
aaatgaatgctttccgcttaatcgctgatctttcccacctttttgcaattcttattttgctgtggaagatatggaaaacgcgttcttgtgccggactcagcggaaagtctcaagtgctttttgctttggtgttcacctgccgttacttggacatccttcactttatctccatttacaacaccttaatgaaggttctgttcatcggttctctcttcgccacctgttatttcatgttcgtcaaattccgtgccacttacaataaagacgaggacactttccgcgtcgaacttctcgtcctcccgtgcattgtgctggcgctgtttgtcaacgccgatttcactgcgttggaagttctgtggaccttcagcatttacctcgaggctgtcgcgattttgccccaacttttcatgcttcaaaaacgcggcgaagcggagacaatcactgcccattatctgtttctgcttgacatttaccgcgctttatacattttcaattgggtctatcgctattacactgaggcgttctacgacccaattgtgatcgtctcgggcattgatcaaactgttctgtacgccgatctcttctatctttacgtcactcgagtagtcaaagatggagccaaattggaattgccgatc

SEQ ID NO: 90834 - DNA, 722 bp, Heterodera glycines
atgccattggaggattattggtccaaagaacgtagtggcaaaagggttctgtcaatccaaagtcacgtcgttttccggctttgtcgggcaataaatgcgccgtttttcctttacagctgcacgggttcgaagtggacgccattaactcagttcaattctccaaccacacgcagtatcccaatgtgaagggccagcggctgaacgaacgcgacttggccgaattgttcgacggaattcggaacgccgatttgcctgccaaatattcgcacattcttaccggctattgcggcgacgcctctttcctccgtcaaattgcttcgatcgttcgcgagtgtcgtcagcacaacccaaaactgacttatgtttgtgacccggtgatgggcgacaatggcaaatatgtgagcagaattaggcatttttgaaaagcatttatgtcaaagtacaacggaattccgcgcgaactgtgctcaatttaccgtgacgaacttctgccattgtccgatgtgatcactccgaacgcattcgaactgaggacattgccatagccaacgaaagggactgtcttcgtgccatggaacatttccaccgagtcaaacggattcgcatcgttgtggtgacttcgggggtgcctgacgaaacgacaaaaaacaaatcgatgatgcattgctacgcatcggaagccattccatccgccgtcgacaccatccgagtgcgctattttc

SEQ ID NO: 90835 - DNA, 340 bp, Heterodera glycines
gccttttcgtcagtcgaaaactgatgatggaatgtttgcggggtgccggactgattttagaaaggtcggcacaattcgaaatgaaaggggaaaaccccggaacaaaacagagaccaattggacaacgaattgttttatgaattggacggaatgtacattttggtagcgaggaaaatggccgagtgaaaggaatggaaaaggatttaatggattttaaaatttgttaatacatttattatttttgattgtttcacaacaattgttgaaacttttcaacagttaatttggcagtttttgaaaaatacaattattttttggcaaaaaaaaaaaaaaaaaaaaa

SEQ ID NO: 90836 - DNA, 232 bp, Heterodera glycines
aattgcattggtgcgaaacgcgagcgccgaaacacgagcgccgaaacgggagcgccgaaacgcgtgggtccccaattcttatgcttaatttttaaacgatgcaaataaccaaattaccaaatttgcaacaagagtatatgtaaattactgtaattcatgaataataaagatttgttaatggtcaaaaaaaaaaaaaaaaaactcgagactagttctctctctctctctctct

SEQ ID NO: 90837 - DNA, 482 bp, Heterodera glycines
aggggcgttggcgagaatgagtttcaagtggacagcattttggcacggcgcgtgttgcgggatgggcgcgtggagtatttgctgaagtggaagggctgttccgatagtgagaacagctgggaaccggagcagaatctgaactgtgctgacttgatggccaaattcaacacgcaaaatcaaaaagtcgaaccgatggatgtggagggcgcaccctcccaggacgaagtcgaagagattttgggggcagcgcggatgaatagcgaaatcttctatctcgtcaagttgaagggcgattccttggctcagttcttctcgtcccgaatcgcctctgaaaaattccccaaattggtcatagatttctacgagcagcgtgctgacatgcagtgaacgaaggcggggaggaaaagaatcccattgcaattgaccaaatgtttcattttatatattccaaaatttacaaggaataaaatatttgcttgaaa

SEQ ID NO: 90838 - DNA, 473 bp, Heterodera glycines
aattgataacctctcctctacaaattacacacaacaaatatggttgttgacatttcaaagatggagcctttttcaccaccagtgagtcacgcgttgttcccccatttgaccactgttttgctttccatcgggctcatcttcaccgcgtggttttttgtgcatggggtgaccagtacgaagaaaacgcgaaaccttgtcaaggagttgttcatcggcacattggcgtacctttttcttggcttcggcaccctttttctgatgctttgggtcggcatttatgtttagagttgaaaggaggaagaacacagggatttttgtcttatttttggggactttttttttctaatttatttgtattttttttattcctctgctaattgttattgagtgagtctgcccttttttgtttgtttcttcccaatttggaaactgttgaatgttgtgtaattgtttgtccctttaatatttttatt

SEQ ID NO: 90839 - DNA, 538 bp, Heterodera glycines
ttttacaatgtacaacaacgtaggactaccaactgctcgtggttctggcacgaatgcatatatccaagcaaatttgtccaatttgggattctccagaaataaactgcaatataatgcagaggaggatattgctaaggcagaggcagaagttaacaagactccaaacatcgaattactcgaccatgagtacaagcggctaatcgaaattaaatgtgtcgaatttgaggatcttatggaaggaaagggctttagtgagagtgaaatcacttcaaaagttaacgaatatcgtaaacttttgtttaccgagtttgagaacggtcgattggatatggacaccgaattggatcttcggaacactcattcgagggctaaagttgccaaagataacagagataagtggcgatcagcacttagaattgacgcagcttttgttgacggctcttcgctggaaaaattgaaaaaagccagcgaatcggtggttgaaatggccaagaatgtcgataagaaggcgcttgaacaagaaatggaaaaatcgctt

SEQ ID NO: 90840 - DNA, 498 bp, Heterodera glycines
cggcactccaaatttaaacaccgtcttcatgctgattgtgttggccacttcgcttctgctgttgatgccgtccagcagcaatgccaaagtgatgccccaacttggcttcgcgaatgcagaacaactgatgaatgacaacagcagtccaatgggcgccggagttgagggtgaagtcatggacaaagtggaggcccgacttttgggtgcactggaacttcttcaaagctataaagaagtcccaattgtgcccaaattcacggaaaagcggaagaacaaattcgagttcatccgattcgggaagagaagacgatgatcaacaagagagagagagagtggaaggacagacagtcagacaaaaccatttgagtgatcagagagcggtgatcaatgatacatttttaacaaatacacgtacaattttggtaatattatcgctggcaatgggacattttttgcttttttgatgggcattgaataaagagaaacactgtgaaaaaa

SEQ ID NO: 90841 - DNA, 613 bp, Heterodera glycines
attgcaccgtttccgcactttcccctaaatcctttgaacttacattctcatggtcgtggcgaagaatatttgccggacgaaaaggccattttcggatttaaatctgttgttgtttctgagttttgtcctctgttctgagtttatcccggcaacgaatgcgaacgaaaacggcagaagcgcgccgtggggacggagaggagccttcaaagtcatcgcctttcgtccaaggcgtgccttggacattttggaatcggatggttttggcggatttcggaaaagagcattggatgtgatggacggcgatgggttcggttcatttcaaaagagagcgttggattcactcgaaggcgacgatttcatggggctgaagaaaaagaaggctttgactacagcggacggggacggcttcactgatttgggcaaaagagcattggatgttcttgacggagatgattttgttggcttcaaaaaacgcagcgaaatgcaaaagaaactcgcactgttagaccaaattcagcaccgacaaatgagggcgagaagagcattggacgccctagaaggaaacgctttcggctttcggcgattagcaaaaagcctaagaaaaaagggcttt

SEQ ID NO: 90842 - DNA, 397 bp, Heterodera glycines
gccacagtctttgtggaaattcgtgacaagaaggccgcctttgtgctgttcggaagcgcaatgaaacactttgacaaggacattgtgccaacatcggatggggcaaggaggaggaggaaaagcgaacagaagctcagactggagacggacgaacagagaatgaggctggagatggagaggcggacgaagacgcgcaagcaaataggagagaagaaacgcagaagattgagcaccgatgataattgggaataggaaaatgccaatttccgttttatttttattcattttaataatttcaaaaagcaaaaaaaaaatgacaaaaaaattgtttatatattgtgtatgatcagtgtgaataaattagcagcgataaaaaaaaaaaaaaaaaaaaaaaaaa

SEQ ID NO: 90843 - DNA, 460 bp, Heterodera glycines
gcaatgcattttgggacggcgcaggattatgaaatgaaagattgtgccatttgcaacgagggagtgccattgggggagaaattggtggtggagaaagagacgatccacttgggctgcttcaaatgcgcttactgcggcacgcgtctgcaagtgggcaattgtgccatggaattgtccttttacaaccgatacggcccgtgctggtactgctcgctgatctgtgcccatctgccgaccggggaaaaggaggcaaagctcaaagcgttgggcaagcaggtgagacagccgaagaagaagcagaactgatgagatgacctaccgatggaatgacattgatcagagggcgagtgatcggaaggccaaacggagacattggcatggaaaagtgatcagttcgagcagaaaatgtgcaatttcgaaattacacaataaaaaactgatgaaaaaaaaaaaaaaaaaa

SEQ ID NO: 90844 - DNA, 632 bp, Heterodera glycines
cttctcttcctcctcctccgtctgcgttcctttctcacttggacacaaattgtttctgtttcttttgccaattttgttcgccgtccaacaattcgggatgacagaagccagcccattaatccaacaaaaagatgattccatccccatgccattggtgttcgaccggccatggcaaccaccgatttcgttggtgccaaaccctcccccagcctatttcgtgatccctgcaaatgtgccattggagcggcccatttacgatcaaaatgatagtgccattgaggacgaattggcggaggaagcgaaggcgaagcgagcgcaaacgttcgtccgattcggcaaaagggcacaaacatttgtgcggttcggaaagcgggcacaaacattcgttcgcttcggaagggatgcgcaaaggcagcaagaaatggcaaatgagcaggcgcagaaaaaggagtgaaagggacggcggcgaagtgggagaagcaaaagaataatcatttgaaagaagaaaggatgaaaagtgacatgacccttttgatcagagaatgttgcacctttacccaaccgaattgataaaatgtaaatgaaaaaaaaaaaaaaaaaaaaaaaaaaaaaaaaaaactcgagactagttc

SEQ ID NO: 90845 - DNA, 668 bp, Heterodera glycines
catacattgactttcttcgcagatgctgacgtggaatgggaggggaagggaaaaatgatttacccaaaaatgtttgcaaagaatcaaaactaaatccttcttgtccctcacgacagagaaagctttttttcaaaacctatttctaatttgcgaatgttgagtttattagttgcattattatcgtttaaaaaatttagccgaaaatgaatgtgtttcgactttcggccgatttagctcatctcgttgcgattttcatccttttgtggaaaatatggaagacccgcagtgtcgcgggcatctcgggtcgatctcaagtcattttcctcctcgttttcatttgccgttatcttgacttgttcacaaattttgtgtccatttacaacagcgttatgaaagtcttcttcatcggttcttccatcgcgacggtctttttcatttacttcaagttcaaggcgacatatgacaggaaccacgacactctccgaattgaatttctcgttttgccgtgcctttgtctggcactcctcatcaatcacgagttctctctatttgaaattctctggactttcagtatttatttggaatctgtcgccataatgccacaattgtttatgctttccaagaccggttcagcggagacgatcactgcccattattattccgccttg

SEQ ID NO: 90846 - DNA, 797 bp, Heterodera glycines
ttgtcaattaatgaatcgattgccaacagattttgtttccgatttgcctatggaagttctgcctgccttttaccctctgccaactttttggatgcctcaaattgaaatcccaccattgagaaaatacgaagtttctaaaaaggaagtgttctaaaatgacatatctttcagtacacattcgaacatgaaaaggcagccatcttcagatgggaaaaagaaagacgaagcgaacgggtcgaagaagagacagagcaaactcagcagatgagaaaacaacggcaaaggcacatggaagagaaagggacgaaaaaggacggggagagggaaagagcggaggagggacagagacggacagaaaggcgaagggataacacattgaataaccctgagtatcgaaacggagaatgtttcaaaattgaatcgcactccttgccctcttccaatgtttcaaagcccaaccaaccgccacattttgcctcttcgtcacttctaaagccagtcccaatgtcgaagagttcgtccaattctttgcacgttggcatcgcatcaactcaaaatggaaatatgttgcaaaaatcgaccaataacaatacattgaacgggttagaggaatttgagccccgacgcgacctttttgacctattagaattgcggtcgttagacgcccgaaaagaattggagaagttctttgacttgtgatacgattattttgaccaactatcatcatgttgtttttatgtaaattttattatacctaaataatatggaatcttttgcctttttaatgtaaattttaa

SEQ ID NO: 90847 - DNA, 389 bp, Heterodera glycines
ccaatattctgtctttattttgctgtgcctttttctgattgccgaatttggccacacttccgcagagtgccaaaaggacaaaaccgaagcgacaaaagaagcattattgcttcaatacttttttgctcgtggtttcccttttctgtccgactccgacgatttaccaacagcagcagcagatgaagtcaaacaaaaattgacaaataaatgtgattgatgatggtgatcggcagtgatcggttgagaaaatttaaaaagaaaattttaccaaaaatgtaatttcattaatgatttttaattggtgattggagtttgaaaatgagaatcgcagatcatctcttcatttttggttaatcaaatgaaataaaaattgaaaaaaaattgtaaaa

SEQ ID NO: 90848 - DNA, 475 bp, Heterodera glycines
tctcccgcgctttccttctcttttgtcttatttttgtcgtcgcattaaactcttttaacgaagcgagtttaatcatcgacgaatgcaaaagtgtgtgcccaaagacgaacaataaatgcgcgacggattgtgtgaaatgcgcgagtggcaagtgcaaaaaagaatgcaaaaagccagcggcaccaaagtgcgcggagtgcggaaagaaagcggtgaatgaatgtaaagcgatgggaaagtgagggaaggaaaggaaaagcgaagggaaaaagtgaaagagagagtgaagaaatgggagagggagacagacggacaaagtcaaagagagagagagaagaaatgggagagggagacagacgaatgaaacgaaatgaatgaatggcatttgtacattttttaatgaaacgatataaccgaacattaccatttttatgtcaaattgataaatttgatgggaaaaaaaaaaaaaaaaaaa

SEQ ID NO: 90849 - DNA, 440 bp, Heterodera glycines
ttacaaattaatttgttcaatatacacacataaacgatggagcttggtgatatggttttggcaattttggagttgatctgttgcttcttcgtgccgcccattgccattctgctgaagtcgggcgagtgcaaccaacaagtgctgatttcggtcgttctttgcattttgttgtggatccctgccgtcatccatgccatttggtactgtttcattcgctgaatgccatggcgaacaatggcattgaaatgattcgattggaccgtttcttattcataaaaaactattccgattttgggatttgttacatatccaattctcatcattttcaccttttctcatcaacatttcaaaaataaaatcgatcatggttgaaaaaattcaaatacaaaattaaaagaaaagtaaatttcaacccgaaaaaaaaaaaaaaaaaaaaaaaa

SEQ ID NO: 90850 - DNA, 592 bp, Heterodera glycines
ggaatttggcatcggtgaccgatttttgcttgtcctaattagctcagcaattgtttacaaaatcttcccattctccgtttttgttgcccttttctcttttatcgtcgcttcgtggatttactttcaataccgccaaaaacaacattggcataatgtcggagtgccgggaccaaatacaaacattttatttggcaacacattgaaacaatttcgcactggcgtaattgaggttgacgaagaaatgttcaaaaaatatgggaattcatatggctcgtttttatttgagcgacgcgaattttgcaccaaagacccgaaaatgttacgacaaatgttcatcaaagaattctcgcactttcagaaccgttataatgccattcccgaacgcgaacacgcgccaaaatcactgatgcgcaatattctcactgtgctgcgcgacgacgattggagacgcgtgcgaaatcgcataacgccggcatttacgacgggataactgaaaaaattaattccgattttatgcgaaggcaccgaaaaactgtgtaaagtgttagaaacggaaaacgcactgaaggggaaggaagtgccgttgaaagag

SEQ ID NO: 90851 - DNA, 567 bp, Heterodera glycines
tcctgatttccctgattgtgcttggcattctgctgaccaatttggaggcatttcgccaacaaactgttggcatcagaggccgtctgatgtgtggcaatcagccgttgaaggacgcgaacgtgaaattgtggaacaaaaacacgctcggttccgatgaccaactggcggctaacaggacagacaatcatggcaattatgagttgcaaggaggcgttggacagctcaccaagatgaatgtgcatttcaaggtgtaccacgactgtgacgacggaatcaagccatgccagcgccaaagtgaattttggcgttccggatcattacgttgaacgctcagggtccaccaagaaatggtttgaggctggcacaatgaacatggaattcaaatacccagatgaggaccgcagttgcatcaattgaattgaagattaactgaggcaatttgatgttgagaaaaacaaaatttttgatagtaaaatgcgaattttccgctgttcgttcgacgattatttaaaacagttgtgcttttcacattttttaaaaatttttgaataaaaaaaattaattttt

SEQ ID NO: 90852 - DNA, 583 bp, Heterodera glycines
  unsure (1)..(583): unsure at all n locations
acaaatacagtgaaaattggtgtgatgaatgacgacattcgagatcagcccgggacgtgttcaagaattttccctctaattggcatcaaatatcagtattatttggacagactgacgccgtacactgcggtccgatggacaattgcaattacgcttattgtttttttcgtgtggaggattgtcgctatacaggggttttacattgtgacgtacgccttgttcatttactatttgaatctcttcttggcatttctcacacccaaaattgatcccgcagttgagtattgacaaagatgacgatggtccggtcttgccaagttcaaccaacgaggagttccgaccgttcatgcgtcgtcttccggagtttaaaatttggttgtccaccatgaagtccactcttgtcgcctttggctgcactttcttcgaaatgttcgacataccggtggtttggccaattttggtgacgtactttatcgtgctcaccactctgacgatgaagcgacagattatgcatatgattcggtaccgntacattccgatgtcgtgcggcagaccgcgccctcagggcgaggaggagaccggc

SEQ ID NO: 90853 - DNA, 588 bp, Heterodera glycines
tgaaaaactaataactaattcgaatgtcaaccatcccaatgccaccaccaccaacacaagacgaaaaggaccaacaaaagaaatcccaatggaaaccgctggagataggaacaacgaaaattccggacccagaagaattgcctttcggaattgtacagactgcattccgagcttcagatcggatgcgcacgacctcagaagattcggccgagtcttttgacgcctatggaccggattcgccaaatatgaccagttcggggagacgaatgagcatcacagaacgcttatttggacgtccagtgccccaagaacgaagaaactcattgggagaggaacaaatggggcaggaaaagccgaaaagcatcgcggagaacaaagacttcaaagaattaatgaagcgtcagcgaaaaattttgggcgatgatgagtggcaataaagaaaggcaaaagaaaagaagccattagaggaaaacaaagtcggaatggatcaaagggtagaaaagggaatgacaatttatttatttgtttattttatttaacacttcttctgatttttcaataatgaaataaagacaaacccaccaaaaa

SEQ ID NO: 90854 - DNA, 589 bp, Heterodera glycines
tatgaagccaacttttctcatgctcatttcaacttgtattattgcgttggtttacgcatctgcggagtatgatgaatgtgaagtttgcactgatctgtttacggaggtgatgaaaaaggttgatgagtctggtgaaaagggagagccggcagtgaagaaaatgattattgagcattgcaagtctgtcaaaggtgtggatgataagaaagaaaaattgtgcttctttattggcgctcatcctgactcgtccacttcagtcctgggcgatattgcgaaaccattgagcttccataaaccgccgaataaagtatgctctcaactcaaggaaagggattctcagatctgcgcactgaaatatggtaaacatatcataaataaaataaaaataataagactggcaacgagttcacatttttgtctaaaattcaacctaaaacttcactattaaaataatttgcatttttcgtaacgtgaatttggatgataattgtttatttttgtcccctaaaatcgggtggatctttttgtaaaaactgttaaaatgattaaaaaatttctaatctgtccaatttaaatcactttcagataa

SEQ ID NO: 90855 - DNA, 531 bp, Heterodera glycines
tttttcatccatcgcttcccccattaaaatggtcgtcgttctgtcggcactttcctccggcacttttccccctcatttttcactgcgttggcattccctctcatttttgctggtgttcattctgcttacagttcgcttctccgccgacttcaccaattgtcattccgtgccgtctttaatggcatttgaccccacaaaattgcgacgacttatgccaattcgggaatttttgagcgacgatcaattggcattcgaacgcgcaattcggcaacccgcgggcggcgtcaaatggatgcgctttgggaaaaggacgccccagggcaaatggatgcgattcggaaagcggaaaatggcaatcgaagggggcaagtgggtacggtttgggaagagagcggaagagatgcagggagaggagtgaacggacaaaatgtaagaggaaaaaggaagagatgagagagtggaggggacgagacactgtgaatagggagagaacggcagacgaacagacagacagaaaatcactgctgacga

SEQ ID NO: 90856 - DNA, 577 bp, Heterodera glycines
  unsure (1)..(577): unsure at all n locations
tgaatcaaattaaagtagatcaggaagaaagcaccaaactttgggattggccattgcaatcccatgacgaacttgtgtcaatctacgatggtcgtgacagatgggaagttggcttggacaccggatttttcacgcccaacgaaatcgaagtgaatgccaagtgcaatgtgttgacgatcctcgaacggcacttggttcacatcgtagctgcagttgtacaattgttgataccggtcggcatggaacagatacaaatccatgttgaaaaaattgtaaaaaaatagttttccctgaatttttaaaagtttttaaatatttacaaaaattcctacgaatcgaatccatccgagtcgtgaaatttactgtttttcccaaaccatggccttatgaccctttgtccttttcaattccccgacaattcatacttaatttttgggcactgaaattcatcaccgacttaggtactcagttattgtgaatctctgtatccattcccaaaccgaagaaatttntcgagatttttgtgaaaaatttttggtcttatgtacgaaaatgtcataaaacataatgtaacaga

SEQ ID NO: 90857 - DNA, 299 bp, Heterodera glycines
tttctttgtgtctctgagcaacaaaatggcaaaaaaaacgaaatatttgattgtaaggctcgcgagtgttatttcgggcactaaacaaatttgggttagggagagagcagcagccgaagcggcggccattctttacgacccggcgattggcaaaaatgtgctgttcaaagaagttgagcaggtgaaaggaaaggattcttttcccgacagagtgaagaaaatgtacaatatcagttgatcgaatttcaaatgcaaatggatttgataaatttgtccgtttttaaaaaaaaaaaaaaaaa

SEQ ID NO: 90858 - DNA, 508 bp, Heterodera glycines
cccccccccccccccccccgtgaattgatctcatcgacaggctgcaagtgagatgaattttggaacaggcccaacaaaaaaattttgccaaatttgtagaacatggatcgatattttcgaagagaaggtccaagtggaaaaatttacgatgcacaaaagctgcttcatctgtgcaatctgtgactgtccgctgcagccgggcagctgttcccgcgacgacggattgatgtacatgcagttcatggccggccatcgcattccgatgtggctctgcagcgcgcacatgcacatggggtcgggcgagaaatacgaattgctgaaaaagaagtaccaacagtaccaacagtaccagcaacaacagcaacaacaacagcagcagcactgatcaacagaaagcagatcagcagcaaacaagtggaagcattgatcggaaagtcaaccaataaattagtggatttattgaccgattaaattaatttactgtgacataaaaaaggcaaattataaa

SEQ ID NO: 90859 - DNA, 365 bp, Heterodera glycines
aaacggatgattcttgccgaggcggaacagagagcatttgcgcccattccggagtgctttttcgagctgtccaacctgttgatgctcaacgtgcgggaggatgtcgagcagtatgagcagcacaatactgtgccgaaatggttgaaacacttctcgggaaaatgtcggacaaggacgcgttccatttgcgcaaggagatgaatgatgttttgacgaaatacgcggccgccgccatcgacgacaaatgagaagagagggattgattgattgtctgccagtgatttattacgcttgcgcatattcatttgatcacaaattgtcactgcttttccgtttctgaccatttgttgagttagttattaccc

SEQ ID NO: 90860 - DNA, 485 bp, Heterodera glycines
  unsure (1)..(485): unsure at all n locations
agcgatcattcgaacataatcaaaagtaacgaaaccacccgagcatattcattcctcaacccgccggacgagttcgatgagaagccgaagcacaacctgtaccgttggctgcacacaccgcgcaaggatggccgtccgaaaattgtgacaattcgcaagcggcgcaaactgcaatgggcttcgtttatgccaagcttgatcacgtttttcaacgcttcgagtactgtccctgtcaacttcctcgtcatttgtcacattgcatgccataccaacttccagaagtgaacgcgtgggagaaggaggcaaaccaaatgttggacaatttgctgtgcttcaccatcaaggacagtgacattgggcccgcactgctcgccgaactgatggccaacgaatgaggagggatgagaaggaagtgtgcgcantccaagcggaagatgaaaatattgtggatgaaataaatattcattgtaaatgtgccgatgggc

SEQ ID NO: 90861 - DNA, 662 bp, Heterodera glycines
gccttgtccccgtgctggtactgcttgcactgcttggtgggctcttgcacaccggtgcgcaggagtccatttccacgcgctcaacacgtgcggagggcacactgatgtgcggaaaggtgccggcctcaaaggtgtacgtgcggctgttcaagaccaactccgatgaaatcagcaatgcgttggcaacagcggtgaccaatgatcagggcaaattcatcattgaagggaacaccgccaattaccaaggctcggaagcaaatattgacccgttcctgaagatctaccacaaatgcgatcagaaggaaggcaaaaaaggctaccgacggatcacacttcgttacccgagggaatacgtcacaattggacgcgttccacgacgaaattacagtgtcggaaatttgaatttggtgctccaatatccaaatgaagctcacatcgacgagctcaaaggcatttgaatgaatgaggaattttttgaaaaaaaaacgatggaaccgttaattgacaaacaattgaaatgcgtaaaaaacagcttgggaataaatgaaaattttatttgattataattccttaccgtcgattcattttgactttttcccaattaattaatgatacaaaatgcagaataaatacttaattgtcaaaaaaaaaaaaaaaaaaaa

SEQ ID NO: 90862 - DNA, 643 bp, Heterodera glycines
tgccaaaagaaggaaatcgctttaaaaagcacttcgacccattgactaccaaagaagcaaagtcttctgtcacttttcgatccaccgaaattactgcccatgaatatttggatttttcattgtttcgtttggtgccaccgcatttggtggaccctggcacaattgtggtaaaaactgtgcgacagccaaatgttcttgaatagcacaattatcacaagcggccaattatcaaaaccctggtcagaaaacggttgtattggctgcgttctccctccccaacttttgctgattctgatcactcgcaaaacaatgaatcgtcgatagaatcagcggcgaatttgcatgagaatacggcgacggaggagagaccgcgcgcagaaagcacatcacaaaatgttggcgccgatgccaccgcgtgtatgacgacgcgtccctctgacgataacgagtcatatttggatgaacagggcctccgttggcatcgacttttcgccgtgcccgacaatgatttgtcgacactcctgcgcatttgcattgaatttggcggtggcacggcacagaattggtcaaatggcaacaaatgcattgttttcggttgcgcatttgcacaacaaaaaaatgccgacgctttgtgcccttttcg

SEQ ID NO: 90863 - DNA, 639 bp, Heterodera glycines
agagagaactagtctcgagtttttttttttttttttttttttttttttttaaaatttagtcggggcttcttaagcctcgcatggaacatgcacatagaactaccaaaatcgatctgataaaattatcgcttttcttgtgcccgtttctttaattcagtgcactgctccatttatgctaagtcacgttccccgggttgttgcgagccaagttaagcattgagtaggctgactccatagttatctcacgatcaatttcgagaaaatcgggcaaacgcggctcaggatcaccaatagggcgcgtggtgtatgtctcgaggatcatcagctgttcttcattgtacatcaaagctggaggaagaggtgcaatgtaaatgtccaggttaaaatacacatttccgaagagaaaacacacacgtttcttgcgaattgcttgatagtctttgtcaagaagtttcaagtagatctgatactcatgccagtccaactgcttccgtgtttcaaccggttggggaagtttcttgccatcagcgtcttcaatggttcgggtcgtatgtgtgtacgtgtactttccattttggctacgcgagcgaagtcgaacctgactcgaaccctccatatggaggtaagcatcctcaatta

SEQ ID NO: 90864 - DNA, 538 bp, Heterodera glycines
aatgtcaaccatcccaatgccaccaccaccaacacaagacgaaaaggaccaacaaaaatcccaatggaaaccgctggagataggaaatcggatgcgcacgacctcagaagattcggccgagtcttttgacgcctatggaccggagtgggaagggaagggacggggaattgggaacagaagggaactcagttcgccaaatatgaccagttcggggagacgaatgagcatcacagaacgcttatttggacgtccagtgccccaagaacgaagaaactcattgggagaggaacaaatggggcaggaaaagccgaaaagcatcgcggagaacaaagacttcaaagaattaatgaagcgtcagcgaaaaattttgggcgatgatgagtggcaataaagaaaggcaaaagaaaagaagccattagaggaaaacaaagtcggaatggatcaaagggtagaaaagggaatgacaatttatttatttgtttattttatttaacacttcttctgatttttcaataatgaaataaagacaaacccacca

SEQ ID NO: 90865 - DNA, 379 bp, Heterodera glycines
tacttttagcctaatcgtttacaatgttgattttcccgcacatcaaattttcgacactccttaaacgcgcgactgtcaacagctcctattatgtctcatacgctgcctatggtgcctctgcttttcttgtgttggtttacgttacggaatggaagcgtttcgcccgttatattcccggactccgttcgcagatcaaatcggacgaatgaatgaatgtctcgtggggtgtgcggaacggtcgactaattaggcaatgatgatgacaatggctgctgttgttgtgtttaagcatagaattctgacaaaagcacgtgtataaatcacaaatccctttttttctcgaatatttgttgagtgatcaaatgatatttaatcaaaa

SEQ ID NO: 90866 - DNA, 383 bp, Heterodera glycines
agctaccaaattaaattatcccaaaaatgatttcttcccaaatgttctttttggccctgcttttcatttgtgcttcgcttctttgcttatttactgcttcatctgctgcttcagatgatgggcttgaaaatgaaaacccgagcaaaaatgtgcgcaattttttggccgaatttggagataatggtcattagaagattttaggaggtttttcttcagtctcagatgttggatgagaagatgttatggcttttgggcgatgatgcacattttatgccttttccgactgattacaacaaacatttccattttatcactttccgtagagaatagttattttttattgtcaattagttatactgtagttaaaaatccacatgaaaaaa

SEQ ID NO: 90867 - DNA, 338 bp, Heterodera glycines
ggtggacaaacatgaaaaatctgaagcggtgccaaccgaagcaaaaaatgagtcagaactgatcaaatcaactaaattggaggacgaagaggaatccgaggagtttcctgtttacaacaaaggcgaaggaatcgacacggtcgaagcacaggcggcgattaatgtttgggaggacaattgggacgacgaaacgcaagagacggacttccatattcaattgcaggaggagctgaagaagtgcggatacaaaccatccgcgtgattgcttttttgcccaattgttaccattcggatgaatgttttaaccatcagaaggaaaaaattgaaaatgaattaaa

SEQ ID NO: 90868 - DNA, 531 bp, Heterodera glycines
gacatggaggaattatggaaacaatcgcaaaaaatacaaacggacaatcacgaattgtccgaaagagtgtcttctttaactcgagagaacaacactcttcgcaccgaacatgaacgaattcttggcgatcacaacactcttcgcaccgaacatgaacgaattcttgtcgatcacaacactcttcgcaccgaacatgaacgaattcttgtcgatcacaacactcttcgcaccgagtatgaacgaattcttcagcgacagcttgacgatttccactattggattctttgtttcgccttctttatcccgccgctgtcaatattagccaccgcgcgtaacaatgggctctcatttccggtaactgttctgtccgcactcgccgcgacaattttctgtgcctttctgtggatccccggcattctcttcgccttggcattttattttggtttgaggaagaacgcgaagaaagagtgatctgtacgaattggaattcccagtctttcagtctgagtgtatttaaaaaaaaagaaggac

SEQ ID NO: 90869 - DNA, 627 bp, Heterodera glycines
gaaaaagcttgtgaagttgtcttacacagaaactgataaaaccttattgagaccatagatgggctcgtggtattgtctagtttattaccgcgtatgtaagtttagaacaaacctgtggcaacatattcaggagctgcatatccatgagtaccaatgacctttgttgacacatgtgtattatcaccagtaggacctgcttttgccaatccgaaatctgaaagcttagcattgaagtcctgcatttagacacagtttcaaacagttaggaatcagaagcaaatcccgaaagtggttatagagagtatatgctcgggtttattacagcgtcgagtagaatgttagcagctttaaagtctctgtatatcacttgtgactttgcttcatgaagaaaagttagccctttagctgcacctaccgccactttcatccttattgcccatgtaagtggctgcgccccacctgcaagtaacattgaccggatgattataagaaaactgaaaaacaaagaaacatgtaagattcttcttgaattcaagattgttgagttgctgaaaacatacgtctaaaaagatgattctccaagcttccttttggcatgaattcatatacaagaagccggttttcgcc

SEQ ID NO: 90870 - DNA, 634 bp, Heterodera glycines
atttgccctaatttttcaaaaatataacaaacatttttttttcaaaaaatgagtcaagcatttggccaccaattgctgcaccgttttcgtcgtccagcattatttgcattatcatcatcaaagttttgtccattgtttcgtgccaccgccgccttcgcaacggatggagcagcaacaaaacaaccaactgcaagtgctgctgcacaacaccaacatcaacaagttgaacagcaacaaccgtcgacgacaaagacggaatggcacctgggcaaccgggtggcaaggctggttatggacgacaagcgggtcaattcgctgtccttgtccgccatggaaatgttgcacgacacactgcgcgagttggacgctcggccggaggtccgggtggtgatcctcgccgcctcggggcctgcctactccggtggacaccatctaccggaattgacggccgaatccggcacagaaatgcaccgcaaagtgttcaacaaatgcttggaactgatgacattcattcgacaaatgcaattgcccgtcatcgccgaggttgacggcctcgtcgctgcggccggcacgcagctggtcgcagcctgtgacattgtcattgcgtccggtcgtgccagctttaatgtcgccg

SEQ ID NO: 90871 - DNA, 378 bp, Heterodera glycines
  unsure (1)..(378): unsure at all n locations
actctctcatgaaatccttggagaactattcgaatgttgccaatatcgccatcgggcacttacgtgatacggttttggagagagacaatgaacttgcggacaagaacaaccagctgcgcgactattcgaactacattgagcagctgaaggcatacattacgcgatgcggtggccaagtgcctgcctatgttggaggtgcccaaatgcgcgggggaggcggacagtgagtgataaatgggtaatgtgggagtttgagaattgggtcgagcgcgaacagagacaatacaaacggacgattattctgtgcccgaatgttttttttctcatgttttcatctaaaataaatgacttctgaccnanaaaaaaaaaaaaaaaaaa

SEQ ID NO: 90872 - DNA, 641 bp, Heterodera glycines
aagaatcaaatcacaataattttcaataaatgacttcgcagaaaccggcggaagacgatccgattggtgctgaagaaacagttacgacagctgcagattgtgtcaatgaactgctggaaacaacagaaattcaagcggaagttgatgaattggtaaagagtgtcgttgaatttgtttcggaagcggcctcagcagcggcggatgatgttgaccatcagcagcagcggaatgcggcggatgagtcggcaaagagtcgttttggcatttcgtcacatgaaattgccattccctgcaaggaattcgaccgtctgttgcgtaaaatcggtttaaaatcgggggcaaagaggcaatgccctgggaagaggatgtgccctccgcgcaaagtgaaggcatcggcatcggacggagtcagtgcgaaaatcccaaaactgagtgagaatggcacagctggtgggaagcagaagaagaagaaaatgcaaaacattgtggaatttgaccaagtgatggcttcccttttgggcaacttcgaagatgacccaatctttctgaagtgcaaagaagttcagggaatgaccaaagacttggctcaactcacctttcaaatcaaccaatttttgtgccatttcattacgttcataccc

SEQ ID NO: 90873 - DNA, 136 bp, Heterodera glycines
attcgatggcaaacattccgacgacgagttccagcgtcagtgcactcaccgccatattcgaagcgcatcagcaacggctcaataacaatggtggaccagctcgaccgcccacggcaatgcgttatcgttctctgac

SEQ ID NO: 90874 - DNA, 612 bp, Heterodera glycines
ctcatttttcactacaactcccaccgattctctgtttccatgcgtttctttgtggactggcgacaaaattgaggccaattttgggccaagtttcaaatttaatttggccactctttgaagaaagccgaagaaacgacggaaaggcgattaatcatttaattaattatttcttttttcatttatttttaattttgcatttgttttcattatgttatgtttgttgcttatttgtcaatgaataaaatttactgttttattttagtcttattatttgttttccttttttcatttaaaaattaggtaaaaagggtccaccgaataaatgctaagaaatcagcacgttgaatggaccttttaaattttttttcgcacttacagaggcaacaaataaatgttataataaagaagcatagatttttcacaaaatactaagttattgaaaaaagttatgagataaattaaacaaaaaataaattatttttcattacaaataaaaattaagacgaaaaaatttaaaaagcttacaacacctccgattcccaggacgtctcagttcctagtactaagaaggcctaacgttgcttaacttgccagatcggacgggatggcgtg

SEQ ID NO: 90875 - DNA, 247 bp, Heterodera glycines
gcacatccaatggtttacggttgtcataattgatgaaaaattgcggaaatttctgttcggagcgtccggcgcattctaatagactcagttcaatggagttctttttaacttcctttgaatccataaaatgttggaccaccgaacgacaacacaaacacgctactcttccagctccgttcaatgtgcaaatgcattcatcgacaatcttccggcacgtctcatctgtgtaccaaaattggctcaactg

SEQ ID NO: 90876 - DNA, 475 bp, Heterodera glycines
gccgcacatcactgactgggccgccgcttcgtcggattggaacgcgccgcccgcggagcagcagccgccgcaagcgcagcaaatggttgtgccgtcgcagccagccgctcaggcgccgtccgctgtgcctccgtcggcgattgcaccgccacaggccgccgctgttgcaccgccgccgccacagccgattcagcagcaccaaccgatgccgactcagcagcaggaaccgccgaaacagcaggacgactggggaggcaatgccaccggatggtaaatgacgacgacgacgaattggagacggacggagaaagaagagaagcgagagacggaagaattgttaattgaaaacaaaaatagtaatttgttggattgattgggttttgacgttttttatttctgttaccgattgatcatttgggtttttgagtgtcacaggaaaaaattgttgttgttaaaaaaaaaaaaaaaaaaaaaa

SEQ ID NO: 90877 - DNA, 611 bp, Heterodera glycines
attgattccaacaaacaaagcgagcagaatgactactgaacagggaaagaacgaacaacagcagggaaagggcatttacgagagcaccaaggaaagtctgtcgaacgtggcggaggggacgaaggaatggctgacgagtgccaaggacaaagtggccgattcgctgacttctacgaaggacactgtgaccggcaagtcggcggagatgcgcgacagggcgtccgacagttacgaggatgctaagcagggggcgcaggaccgttacgagcgtgccaaggagtacggcagtgagaagacggagcaactgaaggactatgccaccgacaagaaggaggaagcgggcgagaagatggagcagaacagggagaaggctgctgagaagtgggacgagacgaaggaggctggaggcgagcgtatgcagcgcgccggtgacaaaatcaggggcaaatagaaaggatgtccaacagaatgaagagcaaatttatctgatctgatcggactctgtgagcccaatttaactgctctttttattggaatatttgttgtccatctcatataaaaatttttgtgaatgaaaacaattcactataaaaaaaaaaaaaaaaaaaaaa

SEQ ID NO: 90878 - DNA, 481 bp, Heterodera glycines
gtttagatttataaattcaatgacacttaaattcgtaggaaatttatttttgggggcttgcattggacaagtctttggccaaaggattggcgcattcattcgatgccaaggtgattccatgctgccgactttctataatggcgacattctatgggctcgagtttgggacccaaacgatggtttacgcccgggagacgtcgtgtgtttagttgaccccacaaatgcaaatcagtatgtcttaaaacgtgtttccgctgttcatgaaaacagtcgtccctccgacccgttggccggtcgtatcgaagttcgcggcgacaatgcgacaaattcggtggattcgcgcgactatgggcccgtgccggctggacttgtctgctaccgcgtgtctgtgcgactcttccctttgaatcggaggaggaaaattgaaacagcgataatttaatatgaatgttttttgtatgtaaataatgaagaccggtgc

SEQ ID NO: 90879 - DNA, 631 bp, Heterodera glycines
gaaaatccataaaattaatttggaatttggcccacctttgtttggttcaaaaatgccaatgttatcaacaaaatcagtgccaatcccaaatagttggctttgtgcacttcaacatcgacggatcgctgttgcggccgcggaataagcctgaacaattaaacaattaataattaaagccaattaagaaatatcaatggttggcattgattacctgacaaaagtgaaaagagagtcggcgaagaattcttcataaatgggctcaattttcagcttttttgcctcactccgaccaatttcaatggcataatgctatgagcaataaagcgggtaatgtgaaaaagaatacggtgcccggcacattttgttcctgaattattttgccggtggcactgtccttcaaaagcacacgaaaagtgctgctgctgacgcccccgccaatggtggcatttgccggaagttccaattcgctgacaaccgtcgccgcgggcaattcgttggggaacacgacaaagtgcacgtcacgcctgtcctcattgcccgtcttgacaatgacagaattcaattgaaaatgtcggtaataaataattaattaattgtctttatataatttttgatttgcccccgtccacct

SEQ ID NO: 90880 - DNA, 627 bp, Heterodera glycines
gattaccgagattcttgtgcttcaacagatgaagaagatgatttattttttcaccgcgtttcttcaaatcaagcacaggaaaataacgatgatgattctgagtccgaatttatcaaaatcttggaaatgtgtcgaaagcatcgtgaattttctgctgctaaaatgggagaagacagtcaaaataagccgcgttctttaaataagcgtgataaggtctttgattccgagtattattctttacctgcgatcgaccaacttaatatacaagtcaaagaggagactgaattcaaaagatttggtgttgttgattcgcacataaattttttagcgaagataaagcctgacaaggatacgccacatcttggatatgagacaattctattcaatcacgacaaaaagccaattggagagatttttgaaatattcgggacagttactgatactttatatgcattgcgattcaatgacgaaagtgacgctgtagcgaaactcccctgttgggtaaagtaatttattatagcaaatttcagacaatggccgtgaacaaaaccccggtcctttcccaaagggaatttgtcataagcctaaaaagaaattaggggaagaaccccacatacaatattttct

SEQ ID NO: 90881 - DNA, 600 bp, Heterodera glycines
tcggatggaagatgagcacagcttctccaggcagaacaacatgagatcgccttcgaagtcagcttcaacaccaacgatggcggaagagccaaagaaaggcgaattaatggcggaaaacaacggaacaaaagggcaactgaacagccacaaactgttaccggtgaagaacagtttgtccgcaactgaacttttcgccactgcaaatccaatgcatcggaatggcagcacaaattcaaaattgaccaacgaatttgaccaatcggagaaacaacagccacaagctcctcatgatgacatatacaccaaattctaccaaccggagccaggaacagtcttcgggagacggctgctcaactgcgaagaattttatggcaatttcaggcgatgcgcggaccgaaaagcgaaacactcgaacattctcctctccattgaaagggatttgcattccgtacaaacgttgtcgaaagtggccgagttccgttcccaattggtaaaacagcgaattgcagcgacatcgaagagaatccaggaattggagtcgaaaagccaatgactatcaaaaattagcagtactcaatttactttccattatttctgtct

SEQ ID NO: 90882 - DNA, 615 bp, Heterodera glycines
gaatcagaaaaagcacttctttccattgtcaagcgcaatgttgaccgtcttcatcaattatgcaatgaatggataaataccggacacttctcatctattcccgaccattaccggttattgtacgcattttgctgtgccgttcgtgccaaactcattcgatcagttgtctctccgacattgtgacgatgggttgctgaagggcaatgatttggaggatgaaagtctgtccaaattcgcttctttcttgtgccgcaaatttcttcctccgccctcagaagtgccggaacatcagaccgataattgccttcgctcgaatatttcttcaacaatttttataagcttcaagtccccgtcatcattcgtggaatggtgaatgggtggccggcatttgaaaaatggagcttttcttatttgaactcgatttgtgggcatcgtttggtccctgttgaattgggtagtaaatacacggatgacgactggcgccagcagatgatgagtttcaaccaatatttggacgattttgtttttcccactaccaatccgtcccagtccggctacatggcccagcaccgactgctcgaccaaattcccgaactgctcgcggatgtgcctgtg

SEQ ID NO: 90883 - DNA, 200 bp, Heterodera glycines
ctggcgaagaactttcgtcgcattgtcaggctgttcaacggggctaacgagttgaggcagtaaggaggagagtcggttgctgcacgactgcaaatgttttttggtgatttctcgtacaaaacatgattattattatttgtttatgtaaattatgcgtttaaatgaaacaatccggtcaaaaaaaaaaaaaaaaaaaaaaa

SEQ ID NO: 90884 - DNA, 607 bp, Heterodera glycines
aaattctcacattttgtggcacaatttccaaagtgctgagcaaatcgccacctttttggcctgttgttcgccccttatgctccacgaccttttcaaagagttttgtacaaatttcaaagaaagtcgtagcggatttcccgatttggtcgtttggaatgaaaacgtggcgaaaatggcggtggtggaagtgaaggggcccaacgacagtttgtccgccaaacaacagcttcggctgcatttcttccgaacccacggcgtccgctccgttgtttgtcacgttgtcgcacgcaacgatcggatgctttgaacaaacgactttctgctgctggacaaacacaatgccaaaatgcttcccatttcgtgctaattcgcaacactaactgttactacacccacccactacggtactccctcccctctgttacggtactcctccgacttgcattttccattctcacaattgtagtcagttctctttccatttgtctgatgctccttttgccgcatttgactttcctcccttttcgttatttttgtgatttttgttgcctttgttttacttcaattgtttcatcactcccagaatatccgcattcttttttaagtt

SEQ ID NO: 90885 - DNA, 526 bp, Heterodera glycines
gaagcattgtgtgctgtcattgaacggctgccaaaggaaatgcagctgttgatggcgcggaacattgtgctgaccggcgggaacgccctcttcccgggctatcgcaaaagaattgagcaggaattgcgttccatgatgccggagcagttcacgcttggtgttcagcagccgtccgacccgatttgccacgcgtgggaatgtgcacgcgacgcaatccaacaacaacagcacgatgccgagacttctgcatcatccgctgctgatgttggtgctgccacacaattctcgcctcggttgaccgccaaatttgtgagtcgcgcagaatatgaggagaacgggccgaacatttgtcggcgacggtttgccaacgtgtacaacaacagaaatgtcgaagacgacgacgacgaaggcacgaacagcggcacgcaaaattgaaacgaagaaagaaaagcatcgataataaaagcaatagcatttctcaaattatatattttttgggttttattaaattttgaaatttcaaaaa

SEQ ID NO: 90886 - DNA, 574 bp, Heterodera glycines
cttctcatcatttttcaaagcaaactcaaaaaatggacaatctttcggtttatgacagttggcccatgtcacagcgcaactctccgcgtaatcactcctcaaattcgacctgttcctctgacgataccgcgcaagccgaagatcaaccactcaacataggaggaacaattcgagaccgactcgcctccacttctctgtccatcgcgtcctttgacgtgatcagcgccggcggcggtttgaacggtggcggaggcgccgccgaacattttggcaattcaacgccatttactatctcttctcacaatcaacaacaaccgcagcaacaaagcaattcatttgcagcctattttagtgagctcaaccgcttacccatcgaccattggcttaagtcgacttccgctgcaaatggtccgaaaaaggcttttccatccgtcacaccgtcaatgccagtcacacaacatccgatcattcccaataacatttccgaaatgttttcaaaaatgcacatgaacaccagcgaaacgcaaaagaagcatcagctgaccacttccacacccatcgggttgcactgtca

SEQ ID NO: 90887 - DNA, 613 bp, Heterodera glycines
agaaatggaaaatgctgcgaccggtggaaagagagtcccccgtttctctcacagcgcggggacagagggcgccgagggggagaaggagccccaggcggaggagccgccctccgccggcaccgccggcgccgatagacctgccgaagaccattccctgctgctcgcccagctgctcgccgccttcgccctgttcggtcttgtcactgcgctgctcttccaattgcccgccttccgcgtgcgaagtcgcattggcacggacggacccgtgccaatccatcagttggacccgcaaatggccgaatgtgcgaagacatgcagaatcgaattggtcgagagcattccccaaaacgtgtcttttcacctttccctcggcaattcgcccgctttggccatcccaacattctccgcttggatgcaactgatcagcgaggccaaacattcgctggccattgcggcttataagacgagtcttcgcgggaaacacgtgctgggggaggaccaaggcaattactcgacccaaggggagacggttttcgatgctctactcgatgccggactgaggaggggcgtcggcattcgaatggtcgaaaatgccgtggccaaagacaaaggt

SEQ ID NO: 90888 - DNA, 196 bp, Heterodera glycines
tcgagcccatactgtgttggtctctggcgcctgcggctccgttgcctcaaattttgtgaattacgcctttgaaaagcggccgcctagcaattatgtgaacttggacgagttgatactgaacagtgactggaattacttggcaccgaaagtgcgcaattctgcgcggtactgaagcgaattggccgacattcacaac

SEQ ID NO: 90889 - DNA, 614 bp, Heterodera glycines
  unsure (1)..(614): unsure at all n locations
gccgtctcttttcccttttgcttttcccttccgccaattcgtcccccactcctttcccaatgttcgacttcccagctttgcatagcagtgcttcgtttgcactcagttcgccagttgcccaattgtcccattcgaacgccgtcctcgtccaggagaatgaacgactgaacgacagagtcggggagttggaactgatgttgcgtgaccatgtggcccacatcaactccatttaccactctctgcactctttgcacggtttccatgcgcttcaattgcccgacggggaattggtccatctgtcccaattccacggctttcctttgcgtttcatttgcaccaaaacgaccgaaagtgaagcgattgtggccgatgaggagcagcaccgtattctcgaacaggcgacggacaaccggcatacggtgggccaagcacggcgctttatgctgcagcagcgacaaaggcatcgtcagcagcaggggagcgtgaatgagtcgttgtcctccggctcctnctcctccttcacctcctcctcgtccaccttcgactcttcgtttgctgctgatccgactgacttttccctggcgatgatgcgacgtttgtgcattcgcccggtg

SEQ ID NO: 90890 - DNA, 616 bp, Heterodera glycines
ttctgctcctcgctagcgcaatggtctcaatgctttgcctcatctccgggctgttccttctcccgccggacattcactctttcagcagcacaccttcagagcaagatgccaaccgccaaattccgctgacaaccgtcggccgattgtcctgtgtcactgaggcgggatgcgttttgtctgacacctcgcaactgaattttttggtggtcggcgacatcggaggccttcccgtctttccgtattattcgtacgcgcagacaaaagtggcacgggcaatggccaaaattggcagaagacaccggactcattttgtggtgaatgtcggcgacaatttttactttaacggagtccaaaatgcctttgatgggcgtttcgaggattcctttgaagagatttacgaccagcccgaacttttggtcccgtggtacacaatcgcgggtaaccacgaccatttgggcaatgtgacgggccaattggcacgcaccgatttcagcagccgatgctcaggacgttcccccgtctgttctacaaagtgcgtttgtccttcgacggtctctcccctccctccgccgtccgtgtcgatttgctaatgttggacaccgtcgttctgtgcggg

SEQ ID NO: 90891 - DNA, 409 bp, Heterodera glycines
gtgccacaaaacaaacgcaatggtggtgctggtgccgcgtcgttcattcgtggcggcaacctgatcatgcgcaacgcgtacattggtggtggtgcggctgcgcaccatgccagcattggcatgggcggtggcggcggttcaatgcgaggttcttctcatcatcacccgcagcagcaaatgcccatgtattcaaatgcgtctgccgcggcatacgcccaatggtactacaacgcggcggccgctgctgcatacggggccggaggatatctgtcataagacatattagtctaatttatgatttcgacccatcaacgattgatttttcttttcatcaagtgcttcattttcacccgcgtattgatgagaataaaaaagttatttgtgaaaaaaaaaaaaaaaaaaaaaaaaa

SEQ ID NO: 90892 - DNA, 635 bp, Heterodera glycines
gctttttctgccaatcaaaacaatgtgaagccaaaaagcaacaaaaagcacggaagaagcaaaagcggcggagttttactcgtaaaatcggcgggcgttcattgggaagaaacaaacagcacaacaaacggacaaatggaagacgaaataaaaaagaggaagaaaaacggaaggacacatcgccgagccaaaagtcacggggccgtacgaccgattttccatccgccgacggagacaatgaaagggtgggacaaaacggcgacggacaaatggacaattgggaaggaggagaggagggcacaaaatgccgaagagcctaccattcattcgtccgcaattaaaactcagaagaacaaaatcacggtagcgaaacgacggtattccgtttttcgacacgattcgctgatgtgggaagagatgccgcaattcacagaaagtgatcgccgactgcgcaaatccgtgccgagttccccgcagacaattctcgttttggccggcctttttgtgtgcggcctcatccttctgatcagtggtcttattgttctaataacgaattggcaaaacgcaaaagcaattcaaaacggatggtattaccacgtggctggctgtacaatgcttcttcttggcttttctgg

SEQ ID NO: 90893 - DNA, 570 bp, Heterodera glycines
tcaatcaaagggttgtaaaaaacctgtgagaagcaacctccgttgtccaacctgtgtcaagatgggactaccccatgcattcttttgctcacaaacatgttttaaagcttcttggatggaacataaattgtgccataaagacgattcatccaatatcaacgagtacaacccgtggcctttgtatcaattcactggaacgcttatgcccgccccacaaagtgcgcgccgcgctgtcccggaacatattccttggcctgattatgcattgcatccggaatgcgtttcattggaggaacaaaacgcactaaacagtggacaaattcaggtgttgaactacgaggaacagttgagaatgcgtttggccgccaaattgggacgccaggtgctcgacgaggccgcacgtgccattgagcctggcatgaccaccgatgagattgaccgtgttgtgcacgaagcctgcattgagcgtgagtgctatccgagcccactgggctactacaaattcccaaagagttgttgtacgtcagacaacgaggtcatttgccatggcatcccggataaacgggcact

SEQ ID NO: 90894 - DNA, 329 bp, Heterodera glycines
cgcttttttgcaatcgacggaccaaaaactgttggttctgctgaccgcacttaccagtgtccagggccaaaccgtgcggttggttgatcggctgaatgtgctcgcccgtgatcggcttcagcatgagcgttcctcgtttattcagcatcgccattgctccaatttgttcccgggcttatttggacgcttctaaattaaggcacagcaaattacctatttccttttgtctattgcttctgtttttgttgctttaatgtgtgtattttacgatttctgtctgaaattttacgataaattgaattttaaaaaaaaaaaaaaaaaaaaaaaaa

SEQ ID NO: 90895 - DNA, 329 bp, Heterodera glycines
cttcaacgaatcgctgctgcgtcagctggaggccaacgccaacgccaacggccagacacaatcagttcaacatgacgctgtcgccgcccatcctcaagaccaatctgtaacacctgccgaatccgccgtcacgggcccatccccgacccagctcgaggccctcatccaggacgaagtcaaccgccgcgtggccgcccagctcgagcagtcccagctcacgcagggcgtgcgcgccgaccaccgcgccgacttggactcgcagacggcgctcagggaggccgacgacttgttgcaccggttgggcagggtctcgttgcccacgcccgagc

SEQ ID NO: 90896 - DNA, 574 bp, Heterodera glycines
gcgcaatggtgcgcgacataatattgttctgctggaggggagggattaacgtttacgacatttaccgcgactgctttccgcagcacagtaaaatggccgcaattcgacggggaattctccgtgcaaaagcatttcattcaaacgacacgaatctttgggagccattggaggagattaatttccgcggaggtgccccgtgtttggacgaccacgcgataaccaactacctgaacactccacgggtgcgtgaaacgcttcacattccgccgaatgtcccaaattgggaaagttgcaacgattgggttggcatactgtacacgacagaatactccgacatgtcaccttttgtgaggaaggcgatcaatgccaatttgcgggtgctgctttactccggagacactgacatggcctgcaactttctgtcgggccaacacttttcagcgcaacttggccttgcgacaatcgcaaagaaaaagccgtggtattttagaggacaaatcgcgggcttcagaacggagtacgcgcgaaatctcaccttcatcaccgttcgcggcgcgggtcacatgggtccccc

SEQ ID NO: 90897 - DNA, 401 bp, Heterodera glycines
gttttctctaaaaattgtccaaatttcttgaatttcgttttctctgcccctccgtttttcttcttcgccagttcggtttcaacaacatttcggccactaccgatggctttgccgcccgctgattccttcgcttcgctttcggttccgtgcggcgctgcggtttccgttcaaatgcagtcgctgttttgtttgtgcgcacggcgcgtgtcgcagttgtgcacgccgtcgcgcatgtgcgagttgcgcgacgcactgcccccggcggtgttcgacacgctcactgcgctgcaggcggacatcgaatgcctgaggcactatttcccgaattctcgcaaaaactctgctgatgaaggctctccccaaagtcacttctttctgcccgagcgctgttttgtgctgaa

SEQ ID NO: 90898 - DNA, 612 bp, Heterodera glycines
gtccaattaagaatttcgccggtacttgttggactgtgccgtcaatatttaattctccccatatacttttcgacttttttgccctcctttgcctcatccatatgatagactttaaacgagaatgtaatggtcgacttggctacactcttgttgaggatgattcttcactgttgggtggcatcacttttcgctcaattgtgtccggtgacaaattgccgttgttgcgcgattcaccgcccgagtcgcatgttgagccggtggcgcaactgttgcgatctccacgtgaccacatggacaacatcttcaacccagcggacaacaacattgtggacaacaccaatggcttcgctttggcgccttacaccgaacagcgacgtgcgcccagcggagtgttggcacagcaaacgatgcaacggttcggcaatgcgtatttcatgggtaatagtaataatagcactaacaacaccaccacttcctccgcctattcattggcaacaattggcaccaatacgacgacgtacagtggcggggcctgcaacggcagcggcggcacattggtcacaaacgcaactggcacaacaggcggacgtcgtaaagaggtgtacactgacg

SEQ ID NO: 90899 - DNA, 608 bp, Heterodera glycines
cgaatgttgttgggtcgcgtgtgcattgtgacaggtgccagcgagggcattggtgaggcggtcgcgcgcactttggcattggacggaggggcgaccgttgtgttggtggcgaggagaattgatcggttggaggcgctgacacagcaattaaatgctttgggagtgccttctgaacgcttaatggcagtgaaatgcgacgtcgcaagcagcgaaaacgtacgggcgatggtcgcacagacaatggaacggttcggccgagtggacgtgctggtgaattgtgccggggttatgttcttcattcagtccagcaaaggatacaccgaagaatggacgcggcaaatcgatgtgaatgtacacggaacaacaaatgttgttgggtttgtccttccgttgatggtcgagcgtaagaatggtcacatcttgacaattacttcggacgccggacggagagcttttcccggcttggcggtgtatagcggcacaaaattttacctggaagcatttatcagcgcactacgacaagaaaacgtggagaatggcattcgattcacaaatatacagcctggtgacgtggctacttctctggcgaggcgttcaacggacaccga

SEQ ID NO: 90900 - DNA, 605 bp, Heterodera glycines
acccttccaaaacgtctagccctaccggaagtttgcttctcagcgaaggcgagcattccactgcgtctgggtctcttgttaacgttcgaatgccgaacataaaagtcttttctgggtcttcacatagcgatttggcacaacgaatttgcgacagacttcagcttgaagttgcaaaagccgctttaaagaaattcagcaataaggaaacaaatgtcgaaataatcgaatctgttagaggcgaagatgtctacataattcagagcgggtgtggagaaatcaacgaccacctgatggagctgttgatcatgatcagtgcatgtaaaattgcttcagcttgccgcgtcactgccgtcattccgtgctttccatatgccaggcaggacaagaaggacaagtcacgggccccaatcacagcaaaattggtggctaatatgctttccatctccggtgctgaccacatcatcaccatggacctacacgcttcgcagatccaagggtttttcgatattcctgtggacaatttgtatgctgagccggccatcctgaagtacatacgggagacaatcccgcactggcaggaatcggtcattgtgtcgcctgatgcc

SEQ ID NO: 90901 - DNA, 621 bp, Heterodera glycines
gcttcacaatttggttcgaggaacatttcccaagcggaaaacaaaaacatttttgtcaatttctttataaaatttgcacaacttattgcttggtgaatgcctacaaaaatgatgatcgcctgatgaaactgtggctaaaattgacagaaaattttcccgagagtggcttcgctataatggaattcgcattttccaaggggtcttgtcgccaattggccaagttctacatacattggagcaccatgtatcagtccattagttggtggaacaaagcacgggagaagttgcagttgggccaaaaaatgtgtgcaatgccattagatttgttgcatcgggcggttgacgaattggaagcttcagtgatgaaagtgacgcgaagcggggagaacagcgaagagactgaagcggacgagatggttgctgtatctttggagcagtcacgcgaaactctcggcaaactccgtggccttggacggcgccatttcgctccaatcattcgcactgcgcaaggccctcccgggactctttccaccagcaaaagaaacacctcgtcaaaaaatgccaaaaacaacgaacactttgaaattcttgccgatgaattcacggaatgtgtttctttga

SEQ ID NO: 90902 - DNA, 640 bp, Heterodera glycines
gagattctcaaattataataaaaaaaatgaacaacgagaatggaactcttccgagtgtcagtaccattaaaaagaaagccaatgccacggggggaggttatggcgtcgtaattcattccttcgattcgcaaaacaaaaacagtgcacaaagcattgtctacgtggaccacaatcgacctctttatgttgtgccacgctatctcttcgacgtcacttatctgaccaaccaaggcttctccaagtcgcaagtgaacaaacggtccatcgaactcggattcggagctaacatccaatttgaatcccggggcaaccaaattgtctatttcgaccgatgttccaagggacaggactggatcaagattggtgaacaactgctcttacaggacaaggacaggcgattcttttttgaagacaagttcattgatgcaaaaaatgcgaatattttgcttcgtgcccacgggtgtgtgtcggatgaagaagtgcgtcgctttttctgccattccttccattccgttgattcgtttcgcgtgccttacgctgaactacaaaaagtgattccgaatgttctgtacgatttgtttgtgaacatcgacttggacatgcacggctacgaaccaaacatggaaagcgcccattgtca

SEQ ID NO: 90903 - DNA, 612 bp, Heterodera glycines
ggataatgaatttacggccaaaagcagtcaattttgacgatgtgtggtcaaagctacgtgaaactctcgaggcgatcatttctctcaagccaattgagcgtattacctgggaccataattttagcgatatatactttgtttgtgtgagcgttcccgaggcccaatctcgacgactttatacggcggtcaaaaactcgttagaactacacactatttcaatccgagagtctttgctccgtttgtccggtgaccaattgctcagtgcgtacaacagcgaatgggaaaaatttcacaaaggcgccatttatttgcataatctttacggttatctgaacaaacaattggtcaaggaaaaaatggacgcggagtcgcagcatccttttgtggtggataatgacagcgacggtttataccctcatttgggagttggcgaccttgccttttcaatttggcgaaatgagttgctcatgccgttggctgctcagcttgtggcccatatcattgagctgctcggtcggattcgaaatggtatctctgcttcatttggcattcgaatttcggacctccggggcgccgtcctctcctttgtcgatgtcaatgaatccatccatc

SEQ ID NO: 90904 - DNA, 319 bp, Heterodera glycines
gtccaattaagcttttgtctcattttcgctttaatctcttctatttcctccttcaaattgccccattatccgccattaattaatgtcttctcccccctcgccaaaagcctcgctcattttggaggcacaggccgattttgcgttgaaattgctgcgcgaagtgtccacggacgaccgttcgtgcattgtttcgccgttttctgccgccgtcactttgtccatggtttacgcgggcgccaagggaaaagacggcgaagaaaggggcaactgcttgcaaagggtgggcccaaatcgaagggcacaaatcttcggggctttt

SEQ ID NO: 90905 - DNA, 628 bp, Heterodera glycines
atttcacaacaaatggctaaaataaaaataaagtggggtaccaaagaacttaatgttgacgccaatcccgaagaacctcccctattgctcaaggcgcaactattcgggttgacaaatgttccacctgaacgacaaaagttgatagttaagggcaagacgatatctgacgaagcatggaacggaatcaaaataaaagatggaactgttataatgcttattggaagcactgaatcgatgttgataaaggcagaaaatgctgagtcgtccggccatacaaattcgacagagacggaaccgcgccaacagttccccattggtctacgaaatttgggcaacacttgttacatgaactcgagtttgcagtgtttgaagattgtgccggaatttgaaaccgccttgaagcaatacaatcccaaccaatctgttgacgggtcgaaccaacgcataaaactcttcaccaattctatgaagaagctttacaacgagatgaatgttttggcgaaggaccaaacggcggactctcccgaagtcattccgttgtttcttgtgcatgtcctccgccaaacctttccacaattcgacactcaagatgaacggggcaaccaccagcaacaggacgccaacgaat

SEQ ID NO: 90906 - DNA, 262 bp, Heterodera glycines
tgttctcgggattgcctcggtgtgctctctgttgtctatcatcgccaccgtcctttctctgccttctcggtactcgtagatgagccaaatgctgcgttgagtgcgctacggagttgaggccttccgcgtcaacaccgactctctctgcactgacttgatggacgtgccagtggtcgtgacgcctccgtgaaagccccctggtaaccgcttcgactgcatcttccgtgccaaacgtcaactgcccggacgctggcagtgcgct

SEQ ID NO: 90907 - DNA, 417 bp, Heterodera glycines
gatgcgtttcgcttccattcgtttcgctttgtttttatttctctttttggcacattttggcgccaacgaaacgacggaaaatggcgaaggacaattggaatcagaggaggagaaccgaaacgaactgcgcaaaatgccatttgaggagcaggaaaaagcgtatgacagagcgctgaaaaagaaccgatgccaaaacagcggacaatgctaaaaaaaacagggtttcatttgcccatgcgaagataatcgaagaacattttgtgctgctttcgatgctctgaattaaaaatttataaagtaccaattacgaaaagtcaaatgtttttacaaataaaaaatattttcgaaatttttatttgtacaaataaaagtgtaattgttaaaaaaaataacaaataactggacaatcgtttaaaa

SEQ ID NO: 90908 - DNA, 365 bp, Heterodera glycines
ggatgcggcggggcgttgcagatttaaggcgctgcaaaaagatcagacacaatgtgtggcaagttgcgcgtagggggtttcattttcacttgtgagaacacggtttgtgccagcccatcaactcattttgaagaattttccgtttgacatatgccgtttgtccaaccttcaagtgctttacttgggtggaaatgcgttaatcgacgtgccggacacaatcgggcagctgtcagaattaacttctcttggtttggcggacaatcggctggagcaaataccaaccgcaattgccagctatcgcaatttgcgaaatttggcacttcataacaatcgactgaaaaaaaaaaaaaaaaaaaaaaaaaaaa

SEQ ID NO: 90909 - DNA, 620 bp, Heterodera glycines
gagcaacaaaaaatggcaccgcctctgccgactgtttctgctgccacggtggcaccaacgccggcagcgctggccattgacgacttccgactgattgcggtgcttggccgaggtcattttggcaaagtcatattgtcgcaatacaggaggaccaacgcgtactttgccctaaaaattctgaaaaagggcgacattttggccagggatgaggtggaatcgttgatggtcgaaaagcgcatcttggaaattgcgagctccagcaagcacccgtttctgatcaatttgcacgccacttttcaaacgcatgaccatgtgttcttcgtcatggagtacgcaatgggcggcgatctgatgaggcacatccatgacgacattttcgcggaggaccgtgcctgcttctacgccgcgtgcattctgctcggattggaatttttgcacgccaacaacattgtgtacagggacctgaagttggacaatttgattctggaccgggaaggatatgtgaagttggccgactttggactttgcaaggagggcatgggcccattcgacaaaacgtcaaccttttgcggaacgcccgaatttttggcccccgaggtgctgacggagaacagttacac

SEQ ID NO: 90910 - DNA, 320 bp, Heterodera glycines
tcatcattgtatttcccttccacgtcaatcatttcacttattacacatttcgactgtttgcctttctctcattccgtcaaatttcaccaaattttcccagaatttgtgatgattgtgattgatccatccaaagcaatgcttcgcttcaacaaatgtttgtttttgccaaacattttttttctccttttgattgtgtattgatgtgtcaccatttttatgtgccgccgacaaaattgccggacatttttactattttggtgtcgttttacgagtaatataaaacaatatggagcgaaaaaaaaaaaaaaaaaaaaaaaaaa

SEQ ID NO: 90911 - DNA, 606 bp, Heterodera glycines
gatatttcgacttccgacatacgtccaaggcttccgtctgcatcaatgtatcaatttcctaccaagattggctcaacgtcgacgaaattttccacgtcgacgcttcctccaacgccttcgcctttttctcgaccaatgcataattcgttaaagcccttacaaccacggccaacgacgagtgatgcacagcattcattcagagaaaaatccgctgctaatgatggggagttaatgctgaaacaacattctcggagttcacaagttccttgtcttaaaggactgaccaaccacggaaacacttgttacttcagtgctatcattcaatgtttggcttcttgtgaacaatttgtcaaattttttgtttgcaatcattcggaagagacaaccgatggttcttccactgatcagtcttccaccaattttatgccgttgctcactaatgcgctatcggcaactttgtgttgtttatggttcaacaacagcttagcggattcttcttgttaccgactcttgcaacttatttcaaaggccaatccgcaatttgtgttttcccagcagcaggatgcccatgagtgtttgatttggcttttgaatcgtctccatgat

SEQ ID NO: 90912 - DNA, 600 bp, Heterodera glycines
ctcgttcagctgatctctcaaattccttccctcagccatttggctttggatgtcgcctttttaaatgcccattttctccgccgtctcttcgccggcggcgttcattctccgggtgctggtctccgttccctcagactttgccgacttcgcatcacttaccgggcactgttttcgattggccgatgggcccgttcgcttgtcgacttggaaacttcgcatatgccagcggtggacgaccgttttttggttttgttgggaaagaattgcaaatatttgcaaaatgttaatttcaacggatgcaaatgggtgacagacaaaggagtggcgagtttggccaggaattgcaagcttcgagaagtgcggataagagggacttcctgcaccgataagtccgtctacgcatttgcacagttctgtccaactctcgaatggatagcacatgccgatttcagtggaaggccaaatttcagtgacaaagcattgaaatgccttcgcgactcgtgcattcagagagtcatttgctgattgacattcattcattggcaaatgtccaaattttcaacccaatttgatggaattccttcttcacatactgtaaat

SEQ ID NO: 90913 - DNA, 607 bp, Heterodera glycines
gatcgactggtccagtgggcaccaattcattgtcacggaccctaacaacggcgaattgttgtgcgatgtctcgaattgtgggcctttggaagcgcaattggcggttgctgccgccagacgaaagtttccgcgttgggcgttcgaatatacggccaaagaacggggcgccgttttgcgcaaatggtgcgaattgctcggaaaaagggaaaagcaattggccgaactactgaccagggaacagggtaagccgttggccgagtcgcgtggcgaaatccaatacgccgcctcctacttggattggtacgcggccgaagcgcgtcgctgctatggccaagtggtgcccgcgtcgaaaccgttccgttctcacgtccatttgcgtgagccgtgcggcgtctgtcttctgatcactccgtggaattttccggcggcgatgattattcacaaagcggcggacgcgctggcagtctgctgtacggtggtggtgaaaccggcggaggacactccgctgacagcactcacacttgcgcatacttcccatgaggcgggcgttccctccggcgttttcaatgtcattccgtccgaccgagacgagactgccgaagtttcc

SEQ ID NO: 90914 - DNA, 157 bp, Heterodera glycines
cgccgaaaaaggcactcgttttgggcccctctctctgaaacttccgaaggaattgttccccgtagcgggtgtgccactgattgagcatgagatttcttggctttgcgaacagttggaaaacctccacaatgttgatattgatggattttacgccggc

SEQ ID NO: 90915 - DNA, 444 bp, Heterodera glycines
attttattgaagcttttcctaaaattcaatttacaaaaatggttgccaagcttcttccggtcattctctgctgcttgtttttggcttccttcggcctcactgctgatgtgctgaaattcaaacgagaagcggcgatcagcagttgtggagctggacagtttgaatacgggggcggctgctgtacgacatgcacaagcgatgctgattgtacgggcgggaagctttgtgtgccaattctcaacttgctcagcgtcagtctgtgctttgccccatgcggaaattaagacagaaaacacagagaaagaaagcagtagcaaaagagggcgctgataatgtgataaagtgataggattaaatgaaagattgggagttaattagttaaatgcatttaaatagtgtttgatcaatgaatatttttcggagaaaaaaaaaaaaaaaaaaaaa

SEQ ID NO: 90916 - DNA, 614 bp, Heterodera glycines
gacagacccaacatattcgcttctgacaccttccttcccatgccatcagctaattagccactaattaaccccaattaacaaaactgtcccctgcttctcccgataatggccccaaaatgccttccgcccgaacttttgttcgaacttgtgcctttattccctgtcgaggaaactcttccgaatgtgtttttatcctgtcggctgcttcacaattttttgcttccacgtgttgacaaatggaaagaggaaatgcaacgaaatacagaagaaatggaccgaaagttcgaggaaatggaaaaaagactcaccacaaagtttgaacaatttcgcgaggacacatttgaattgctcgacacgattgttgagcgtatcgaagacggcaacaaggaaattgcccacttttgtcgacacacagcccaaacgatggacttactagcacttaacatcaccaccagtgtgtcggccttcaaaaggcgcaaacaacagtgcggacaggacactgattcagccatgaccgctgaacgaacgttcggcggcggtcaactgaccgccgctgctccgtctgccgccacatcggctgcatgcggcggcgaattcggtgcgaaagtaaataa

SEQ ID NO: 90917 - DNA, 166 bp, Heterodera glycines
aactgaggctgaaaaggcgcacaaagcgaagccgggcggagacacgatcttcgggaagataatccgcaaggaaatgccttcgacgattctgtatgaagatgacaaggtgctcacgtttaaagacatagaccccgaggcacccatcaatgttacggtcattcctaag

SEQ ID NO: 90918 - DNA, 318 bp, Heterodera glycines
gaaatcgctagcgccggaaaagttggaattctggcgccagctcagtgccgactttccctacgacatcattgagggcaccaaacgcgagacgcaccaaacaaaggacgaactctgatcagtggcgaaggaaggatgatcagagataaaggcaaacattatgccaaaaaaggcaaacatgccaaatcaattaatttaatcaattattttgtagcaatccaacagtatttgtatttaaatttcatctcaaatgtcaattatgtaacaaacaaaatgaatgtaaacacataaaaaaaaaaaaaaaaaaaaaaaaaaaaaaaa

SEQ ID NO: 90919 - DNA, 225 bp, Heterodera glycines
cgtgtgttttcgccttcgcatcactccggcactgagttcgaccctgaagaagatgaccccgttctcgaaccctcttggcctcatttgcaactcgtctacgatttccttctgcgttttgtcgaatccgctgattttgactgtcgcattgcagaaaaatttgtcgaccacaaattcatagtcaatgtaaaataatgttgattaaaaaaaaaaaaaaaaaaaaaaaaa

SEQ ID NO: 90920 - DNA, 634 bp, Heterodera glycines
ataatatggaggaatatgaagcttcatcagtgagacaacgggccaaaattgaagaaagggatggcaaaagggcaaaagcgaatgcacaaaaggcaccaaaaaatggcgaaaaaagtctccaaatcggatggattgtttgctttgtgctcttcacttttgcaattggaatcttgttaatgtatcaaagtcgtgaaacaccgacaaattatcaaaaggaggtgaaccgagaatgtgacgaagggacagggcaatgtattgcaatagcagattatacacgggattctggtaagacatggcatcgaggcattttttatgtcaatgaaacgacattcgattttgagaaaatgctcgagaaaaaaatcggagcagaagcaattctcaaatgtcctgcaaatgcagatgcccccgaggggtgtgtgcctgaccacggtcgtttgtcttggccttacgttgccaccatggccattatgccatttgtggtcggaacactgcaccatcccacacaaatgcagcagcgaacgcagtcggcgctggttattgggatgggcggcggcactttggacatgtttttgcacagaaaaacgcccagtttaaatatcaccatttacgagttggacccaatggtcgtacaaat

SEQ ID NO: 90921 - DNA, 629 bp, Heterodera glycines
caagtttgagatcgtttgtccatttctgctgtcctcgtttgaatggactccgtccttccctcctccactgatcagttcgcttccgctgcgtctgatcaccaaactctgccgatgtatgcccaaaccactcgtcctctctacgtgcttttcgtcttctccgttctcgccgttctctctctgctttcgctgttcgcctttcttcgccttcacatgcaaaggcagcgccgaattgccgactcaacgccaaaactgcggtatcgccggcaccacagactttggataatcgccgcaggggcaaaccgaaggccaacaacggagcaacaacagcagcggggaatggtcgaattggaaaccatcgtcagcaccggcggcagtgggggaggacaatgaacgagaagggacgcaattcggaatgtgttacttcattattcacaacaattgaacgaaggttcaactatgaaaaaccccggtcacggcgagcgccaagccacatgaggaatggaagcggcggtacgagcgactgcgccagcaagcacagaaaatgaagcatgagctgcgcaggtgagggcgggcgacacagtgagcgaggcggacttatcagcgaacatgcagcagacggactgaaaaaa

SEQ ID NO: 90922 - DNA, 641 bp, Heterodera glycines
gtctaataaaaagctgaaaaatgttggcaaatctttctttgccaatggttttgcttgctttttattccatcaacagcaaacttttgattgtgtcatgccaacaaagttcgaacttttcggaatgcggcatttccgacttcgaacctcaattggccaatgtgtcaaaaatggcaatcggcacaaatcatgtgtataaagggcaagaagttggtgatgacaaggcacttccatggatcgcccgactgatttttggaaagtcgtattgcagcggaacaattgtcggtccccgacatattttgaccgcattgcattgtaccgagcacaatgttgcagaaaatcaaattgtcattgcgtatggttccgcaaatttgaaacaacagcaacaactcacgggcgttgcggccgttaaattgcacccaaagggcaccgacacgcaacgcaatcaaattaatgatgctaaagcagataaaaacgtcattataaaagcgcagggattgcaaccgaatccatatgacatggcaataattgaattgaagaacccacttgcattcacagcaaatgctcgtcccatttgtttaatggaatatggcaccaatgatcagtcaacctttgttgttgctggttggggccgtacttcacca

SEQ ID NO: 90923 - DNA, 349 bp, Heterodera glycines
tgcattcaggatcatgcccagctctagtgctaacaggccgcactcttggacctcatggcgacaccgcacagacaatcgacctgcgataattcttatgctatattgcatcgtggacctggatgtttgcctaattccgctagagatgaactgttacgggggcagtggacaaggcttcaccagttggatcctattccgactgacccttctgttgatggcacgaatgacgtgcgcactcactacggccatgtattcgggacaccgtgtagaaactttccgctccctcgaatgtccgcctcgaatggttatcacccacacaattattatacctgagtacccctccaagtcactt

SEQ ID NO: 90924 - DNA, 627 bp, Heterodera glycines
cttttttcttctagttcatgtgtctttccaattctgtcataatgctgagccgcacttggatcgtcgcaatttgtttttatattttctttggcacgattttaccattctctgaagcaattcgtttttatgtggcttctaacgataagaaatgtctgaaggaagaaattcacaaaaatatcgtgttgacgggcgaatatgaattaagcgattctgttgggcacacaacgacagttcatgtcactgatactcgtggtcacactctgtacaagcgtgaaaacttcccagaggcccgtggaaaatttgcatttactgcggacgaatacgacattttcgaaatttgcttccaaatgcatggcccgactcaccaacaaaagttaaacagagaagtccatttggtgctaaaacatggagtggaggccaaaaactacgaagacttggccaaagcagaaaaactgaaacccctcgaggtggagctccgtcgtctggaggatttgtcggattcgattgtgcaggactttgcttacatgcgtcagcgggaggaagaaatgcgggacaccaatgaatcaaccaacagtcgtgtgctctacctcagcatcttctcaatgttgtgtcttctcgggctcgcca

SEQ ID NO: 90925 - DNA, 631 bp, Heterodera glycines
tgaagtaccacgttatctactaaaatgttcatttgaagaaataccacgccctaactactatgaatgaataccttactttttaaatagggctcgcttctatatagaggttgcttttgaaaaagttgaggaagaatttagacttcaagctaaaaatcagaacgaaccagcctgtatcaaataagctgatctgctagtatttcagatctcttttttaggaactactctttccaagggcgcttttttttttgtatcttaaatccttcgaaaaaataggttgtttttctcatttaacgatcaatcttgattcccgaactatatggttccgaatgtatatatagttaaatactatcagtaggcgatatagttttggttaccggtctctccatcaagtaagttaagcacctaagccaacctgattaaattctataaaaagaggtgctcttgcactgagccttgcgtttattatctgtcattttagttatgtattgatttttataacagctattactataactggagatggcagtgtagtaaaaggctatttaagtcttttgctgtatgaccagtgggcattgttatggcaaaagattgtgcatcacaaaacacattgtgtaggttattaggaaaaaga

SEQ ID NO: 90926 - DNA, 284 bp, Heterodera glycines
attagcatcagacaccgagtcagagctgccttgagaccacccgaggaggatgaacttcattttctgatgtcaccgagcccaatgagcggattgacacctggagaaccgtcctcaacttgcggttcggcgacatccaatgaaccagctgatagtgaaaagaatcatatggaggaagacaacagaagtgatgttgcggaaagcgactcaaatttcttaaaatctaatttgtatttatttttgtcgataatgtttctctcgttcaaaaaaaaaaaaaaaaaaaaaaa

SEQ ID NO: 90927 - DNA, 626 bp, Heterodera glycines
tgaatataacgttcaccccatttaaacgaatacaaaaaatgcaaccaaattattacgttgctttgtatggaaatggaaaagaaccgcaaaattcagccaaaaattatcgattattaaacccaacagtggatttaattgacataattggtgaggaaacaaattgtgctgaatttacgacggacaaaagttgtaaacgtatcaaaaatgataattcaatcatcttggacggattggtcagaaacaaattatacggagttttactctgttctgtcattgatcctcacaacacaaactatcccgttaatgacacaaaacaatattcaaaaccacttgtttatcgtctgtttttgcaagcacgcgaatctgttttgaatggatcaatggaaaatgtgaacaaagagcgagaaaactacattttttggattgttggcggctccggcattctgtgcgcatttttactgattttgattgtcacaatattttttgcatattgtcgtcaacgtgacaaaaatcgtaaaaaccaggccaacatggaacatttgcgtcggaatcgtgaccaacgctacacagattttcctgcccgaagtcgtgaagaccaatgggagttggaaaggcgaaatttgatc

SEQ ID NO: 90928 - DNA, 613 bp, Heterodera glycines
aatcgaacgctaacggacgacctaatggaaaaaaatccacgaaggagagaatttaattaaatccattcctcgggtgccgcggggtaagcagtgctggttcgtttcatcacggcaccgaaccttttggctagtcagcaatcgttgcttaacttgccagatcggacgggtgcgcatgattccactgttccaagcaccccaccaaaagcaaaacgatataccaaaatataaggaaaaattttttatccatctttctttttgatactaaagcatcagagtgctaaaattaacttgtaaataaaatttggtgcgctttagagcaatttctgaaaaatatttatgaaataaaaaaatcgattttttcaagtgtccgtttggggtactcaaacaattatggggagcaaaaatccaacgcagaattaaagtacagactatagggaagctattcccaaaggattcggtctctccataaatctgggcgcatcggttcggggggactgccccgaaaacaaaaaaatcgattttttcaagtgtccgtttggggtactcaaacaattatggggagcaaaaatccaacgcagaattaaagtacagactatagggaagctattcccga

SEQ ID NO: 90929 - DNA, 215 bp, Heterodera glycines
atttggttgaccccaacctgcattttttatatatcaactttctgctcactccaattttacattcattgtgattgtcctttactgtctgttaaatcgattcacagctcactcactataaaacattattccccgcttttgtgatcaaatttgtttaaattcattttaataaaaataacgagtgaaaaaaaaaaaaaaaaaaaaaaaaaaaaaaaaaa

SEQ ID NO: 90930 - DNA, 632 bp, Heterodera glycines
caggcgttggtgtgccgcggcatcgcttcggcaccgttggcgattgggtgcccttcgggcaaatcgttcgacccgaaaacgctgaattgtatcgctgccccggagcaatgcgcagtgctcgcatctgctcaaaggcccatccgacagctgttgctccatttgtactgctccaaagcgcacccaccgaagaaagacattccgaatgacgaagatggaattcggatgcgatcagaaggcgacgagccgtcgcagcagcaaaagccagcgattgtccaagtgtcgtcggacgcgcaacagaatcggtgccgaaattggtacgtggtctgtgagtcagttgaagagcctgaattggtcttttgcgacaatggcaaaatgtttgacttgtcgaaacgcatctgtcggcgcattttgcccggggatcggtgtccgttcaatggcgtttgccggggttgggagtggcgaatgagccccgtgggcgaatgtcgccgcgactttttgttttgcaacggcatccgtccgcaactgttccaatgcgagaaggagcaggaagtgttccgggacggcgagtgcaccgccgcgagttccgcttgcgacgtgtgccaaccgggggaaagcaaaaggtcgacagacaa

SEQ ID NO: 90931 - DNA, 633 bp, Heterodera glycines
  unsure (1)..(633): unsure at all n locations
tgaatgctgttcaagatttgcgtctgaaaatttttcacatactccgcaacaaattcggcatcaataactttaaacacaaacaggagcaggcaattgccgctgctatgctcggttttgatgcgtttgtgcgaatgccaacgggtggaggtaaaagcctatgctttcaaataccagctcttgaggacagaggtgtaactgtggtgatttcgccattaatttcacttattcgggaccaaacgatgaaattgaggaatggcactacaacaattccgtgcgctgtttttgatgccgaacgaatggcaagagatgtatacattaatcgaattcccaccttcaaattgctttatgttacccccgaaagggcggtaaaaaatcgacaattccttaaatatctgaggtatttgcatcgcatgaatttattggctcgttttgtggtcgatgaagcgcattgtgtcacccaatggggcaattctttccgtcccgacttccttcagctgggcgacctcatgaagaaattcagggaaaatgccgagaagaaagtgccgataatggctttaactgcgtccacctctgaaagcgattgccgaanagcattcgaatatttgggcatggactgtgaaagtgctctttggt

SEQ ID NO: 90932 - DNA, 636 bp, Heterodera glycines
gtccaattcactcgcacattgtgcaggctgtgcttacgatgctggagaaggggctgaacccggcagacatcagccaacttcaccaggcttattccgatgcttccaattcgcctcctccgccgatggaactcatccggcacaatgccttcctcgaccttctcatcgatgccctttttagcgccaacggacaacgaattcacgcggagcaccgtcccaaatacattttcttgctcgctttctcatgctctgttgccgaagtgaggggtgaacaaggcgaaaggacgcgtgaactgggcgaacttcgcgagatcgaacaacagttggaacaattggccaacattctgcactcacccgaagacattttgctttccctcgaggcgctgttaagactttgtcagactccggtggttgctgttggcattttgcactatttgaagacgcttttgcttagggaggaccttttggctgagccgagttccctccattttgcgctaatcgaccaaattgcgcgtgttcaccccaatttgcactcgagagtgttcaatttgctttgcgatctctacgatcaccagtcgaaccgcaacgaagtggccgaagtagtcatggaaaggcaacggcacgtcgtggagagatttg

SEQ ID NO: 90933 - DNA, 573 bp, Heterodera glycines
gtcgctcttccctaatgggttgggcagcggcggcgacgggcgcaatgctgttgatgtccttcacctcaattaccctgttaatagagcgcgtacaggcgaagccgagcacacctgttggcggaccgtattcggagcatggttcacagtgcaatgaaacatggcgcccaaatctaattgagcctttacaaaaatgttcttcaacccaagcaaaaaacgagtgccaaaagggttaccattgtaatggcgccggattttgctgcccggaaaaaggcacgatttgtcgaatggagacagactctggccatgagtcgaaggacgaaccatacaagcatatccgacgatatgcttacgatgtgaatttggggggttgcacaattttctcgtattttggtgccggaggcaatttcaataatttcaaaaagttttatgaatgtaaaaaattttgtgatggaattaaaaaaactaaataaaaacagaagatatttcccgatgaatatttttttttgttattcattttattaaattatgttaaaattttaaatagacttttccaggaataaaattcatttttta

SEQ ID NO: 90934 - DNA, 420 bp, Heterodera glycines
gaactgatgtgttcatttcaaagattaagccatgcatgtgtaagtttaacctgccagacagggaaactgcgtacggctcattacaatgcagcaacaacagcccgttccgaagtgtggcaatgtgaaatgcccctgtggagacgcgtgccagtgcggcactgactgcaaatgcggtgcgaaggaggccagcaactgcgcgaacgagaagtgcgtttgtgagaattgcaagtgcggcgccgactgcaagtgtggccagtaaacgacaccgaagaatgggccggagggttgtgataagaagagcaaaaaacagttaccttatttaatttgatcgtgaccgaccataattttgacatgtttattttaaaatgctgattgatacaataaatattataagaatgaaaaaaaaaaaaaaaaaaaaaa

SEQ ID NO: 90935 - DNA, 636 bp, Heterodera glycines
gtccatttaagaaaaacttaaaaaatgtttttttcctacagtattttggtgtcaaaaaattccaacttcgctgtcatatggaagtatatgcatgaccgccatggtattgtcaaagtatccaagcgcgaattgctttccattgacattgcaagagcatgcgaagatttgcaaaattacatcccaacgggtgtgctgctgaagtctgaattgcgcgacaaaatgtcactttatctgctcgcccaattgtcgtacggaatcactttggtgttccaagcgcatgtcaactatttaatcaccgaccttgaatcagccatcaaatcatttgctcggtttccggaggaaaacaagcgagaaaaaactccgcgcaagtccacgggccgtaagcgtagacttgccgaacttgacggagtggtggaagcagtgatggcagtgccacggggcatggagcaggaggatatggaagaagaggacgacgaaggggcgaaacgccgacgcatttcggcgccacggaaggcatcaaaattggacttggcagatccgagtgcttatgtggaccagcaacttcctgctgctcgcgatgtgaacgaccagtcgatgctaatggatgagagcagccgcttggacgacatgttcatg

SEQ ID NO: 90936 - DNA, 500 bp, Heterodera glycines
caatcggattttccagtccgaattgatcacttttacttcggtttgatcagtttcaccaccgtcggctttggcgattattttccctcaactgatggcaattttcttcgtttgcttttgcatcttttcgtcctttgcgtgggaatgatttcgatgggcctttggttttcttttgtccgcgaccttttcatgggctttttctgtttccaccggcgccattttcgccactttcgcgacgtttccgtgaccaaacgaatttccaacaacggcccattgtaacgaccaaatcaaaggcttcgccaacccaaattcatcaagttttggacgaattggactttctgatttcggatgcccttttggaagtgcaaagcaacaaaaagtcgttggccatggcaaattcgcaacggaaagaagaaattgtggcacaataagaaaagcccgttagatcatttgtgtttattttaatttttcattcaaacaatatgccataaattttcgctgtt

SEQ ID NO: 90937 - DNA, 171 bp, Heterodera glycines
gcatttcgccattttggccattcgtccatcggatgtccgaatttgcgcgttatgcctctctctctctctgaccaacccaataatctgtagctaattacccccaatactgttttatacgtaaatttccgccgaataaatgacgaattaaaaaaaaaaaaaaaaaaaaaaaaa

SEQ ID NO: 90938 - DNA, 620 bp, Heterodera glycines
aaagaactctatcctctttatccatccaattcacgggttattgacctgagaagtaaaataactcctgcgcctatgtcaaaaaccaagcagttttttaatgagttgcaaagaattgctggatcatcgccaacaaagtcatcatcgtcgctacacatgaaaagggcttacgaaagtgagcgttggtttagcccacgggtcgattctgaccaggcagacacttcgggaccgcctcgtcgttcaattttaacacaatcaagacttcaattattgtcggcacagcgaggacgtgaaacgagaaaaccatattggcgttgtccgatgccatcagcaagatccatcgatacggaaattacgcagccttcacttgttgacattattgctacgccgttagcgcgacagggaccgattaagccatttcgacaccgagagccggagacaggcagaaaaacgaattcgtttgctgtggatgaagatatcttaactgttgaggaaaaagaaaaggagttgatgagcaaagtgcaacctctggaagcaccgaaagctggttttctcggaacgcctcctcctcttgtggatttgttcgaattttcggacattattgtgcgtggacctcaacttga

SEQ ID NO: 90939 - DNA, 185 bp, Heterodera glycines
ctcatttcttccaatttgaaaagccttttttctttgttccgtttgacacgggagtaatcccgaaaaatcacaacgataatcgccttcagaggaaactttgaaggtttggcaggtttcgtcaacagattttgtcaattaaattagtccttaaattttctcgatgaaaaaaaaaaaaaaaaaaaaaa

SEQ ID NO: 90940 - DNA, 159 bp, Heterodera glycines
aatccaaaaatggttgctaaaaatgggaaaataggtgctaaaagtttcgaatttaggggggtgtaaaatcgaaaattttatccaaaaaggtaacaaaattaaaccaaatcagtattgagacaaataataaaaatcctcgtcaaaaaaaataaaaaaaaa

SEQ ID NO: 90941 - DNA, 628 bp, Heterodera glycines
gttattggaagttttgccttttattcgcaatgaaggaaacaaattcaaaaaatagtgaatctgctgacatttgcatcactgatcagcctgataatgagaggcgtgaaattgctgaactgttcccaaacatggacctcaccgaagtctttgctgagtatggacatctcagttccgaagctatcattggactgatactcgaaaaacgacaccaaattccgttgaaagggagaaaggcgtgttccttcttcgtcggtctttcggtgtggtggcctcgttggctgggcggccgtgttgtccgcaagttgctctcttccttcggtgcacgggtcaccggtattccgaccgattcgctgctcgatcaattagaaacagaaagcggtgaccacccgcggcgacagtcggtgaaagagtgcatggaatgctccgtctgctgggagacgaccaccgtggacgaactgtgcttttgtgacgggacgacaatgacagcgacaagcagcagctcagctaaactgaccaccgaaactcacgctttttgtcgtcaatgtttggaacgccacgcgcgcgccgctgttgaggaaatgccattggcaaagggcggactcggcctccgatgcatggccgccgattg

SEQ ID NO: 90942 - DNA, 635 bp, Heterodera glycines
gtcgattccgatgatgagcaaggcgatacgctggccattggcgggcccgattcttggtatgcgttggcacttcgtgataccggcacggtgctgaagaaggacaccggtggcactggcaaaggcaaaaagcagggcaaagagagggacccgaacgcaccgaagcggcgccggacaaagaagccgaaactgtcctcgggacccaagttaaacaccgcgcaaaaaatcgctgccgcgaatttggcgggagtgctcagtgatcagctgtcggtgcagaatgacaaaaacgatgaggccactttggcatcacaggaacatgtccaaatccgcggcaacgacgctcgccatttgctcatccaaaaactgatgcgcaccaatcgttcctctgtcgtggtcctgcgcaacatggtgacgcccgagggcattgacgagtatttggaggacgaaattcgggaggaatgctccaaatacggccgagtgaccgatgttgtaattgtgcaggaacaagagacacacagcgtgaaaatatttgtgcgctttgccgagccgttgcaggcggaggaggcacgaaaagcaattgacgggcgcttcttcgatgggcgcaccgtggcggctcagtcctatgatcagattctgtt

SEQ ID NO: 90943 - DNA, 626 bp, Heterodera glycines
ccacaattttccatttctcccttcctgcaaaagaaatgtcgaaagaatttcgtcgattcgatgatgtacaacttcgacttcgttcatttgatgaacgaatgtccaaagtcggcaccttggatgtacctcccgcacaaattgtctcctccactgtccgtccaatctctgccaaatcgacaaatggcgacagtgccgttttggtgccctccacaacaatggcaccaccgtttgtctccagcacagccgcaacatccgttgagagacactcggcggaatcatcggaagaagaggagacggacaaacgccacagaaagggcaaaacgccattgagaggcaatggcggactgagcatcagtgccgtttgggagggagtgaagcgaatgatgggcttcaccgccgactgccataacggcggttacaaaaccatcggcggcgattgcatttgcccccaatttttcgagggccgtgcctgcgagcgcattgtctgcgccaacaacggcacgcgcgtgcgagtggccgcgttcggcggggaggaggtgtgcaagtgcactcatccccagtacatttcgggcaaacactgcgaagtggtgcactgccaaaacggggggcgccttctcaacgatggc

SEQ ID NO: 90944 - DNA, 156 bp, Heterodera glycines
aaaatcgcagctgacggtgaccaatgaggacaagctgtgtgtgatgcgcaaaatttgtggcaaggacggtgaactgcgtcagaattgcccgtaagtcagtcgatgatgtattactggcatgagcgtgcatgtataaatttgcaacaaaaaaaaatc

SEQ ID NO: 90945 - DNA, 629 bp, Heterodera glycines
aaagagcggaagtatgctcagaccatcctgcaagtgcgcaagtccggcaaccggttgctgtgctcgctgctcatcggcaatgtttgcgtcaactctgccatatcaattctcttcgacgatttgaccaatggcacaattgccatgatcgtttcgacgaccggcattgttgttttcggcggaatcttccctcaggcgctgtgtgtgaagaagggcttggctgtgggtgcctgtaccatatgggtcactcgtttcttcatgatgctcacttttatagtatcctacccgatcagcctcattttggacaagctgttgggggaacaagtcgagtcatatgaccgcgagcgcctcatcgagctcatcaaacaacagaaacgcgtggaaaaggcatcgcgcacgggaagcaacgcgtcaacgaaaagtggtgggagcggtgccggtctttacaacggtgtacaaacgtcgttagcggctgttagttcggacgaggcatcgcgcacgggaagcaaagggtctttaaaaataaagtttactatgcatacggacgggtcacgtgtcggagagccgacgtagaggcaaattcaatcgaagggtccgtcgtccgattacctgcccttctccaattatcaacg

SEQ ID NO: 90946 - DNA, 628 bp, Heterodera glycines
gtcaaaccttatccaagatgcggtcctggacactaacttttatcgctgcagccttattggttgggtcacaggcacagcaggcaggatttaatgtaaacgggatggttgacactttgctaagcagagcagaggaccatattttgccgtccatcgatatccctgatgtttcagtctcggagttgttcaaagtcctctttttcaacgttaaggccagtcttgacgtgagcaaaggatggctacttggtccaaaatcagtgcggaggttcgatgactcaaagctgacgatggaggatcaatatacgtttagtgtagacattccagttggtgtcaacgaaataaactttgggtacaactacaagaccaaggttgcgggcatttccgggccacgtggaaactttacggcaacagtgggtgccacagccgtaaccgtccgggctagtgtcactatttacgatgagttttgctacgcaaagttcgaatcattggatctcacgcagctaggcaacgtcacggtgagtgctactggcttgggcgtggcaaactccatctattcaaagatgctcacaaagtttgcggagagtcagcgggacaaagttcaggcacagattgccgaggacttcgaagaagc

SEQ ID NO: 90947 - DNA, 623 bp, Heterodera glycines
ggacaatggaacgggaatgcgatttctttgccttttacatggatccgagtgattgcccaaaagaacttttgccgcccaaatttggaggcatttcgatgagtatcagcatcaatcggtgcaaagaagtgttccgctcaataaaacgagcattgcaacgggacaaactccgttccgaaatcaccaagctcagactgttgtccaccttcgattttgatgaaaagtccgcgcagattttactcactcaaatcgaacgcattcgcagcactttgccaaaagtgcgttcactgaacatcgaactgagagcagtcgaattcaatccgaaccaggacctttattcgaacgacgacttcgccgactccaatctgatcccatcctccgcttccgcttgttcacatgtagcacttttctttttgaattggatgcggaaaatgaaaatgggcgacattgaaatcgatggatgtgttcggttggacgtggactatcactgcggcgaataaggagagactgatgacgaagcgagagacattttgttggagagggctctgcgagaaaccattacgcgtgcagctgaccaactttgggtgcagcagctgcaaaactcagtgactgctcggaatggctgt

SEQ ID NO: 90948 - DNA, 351 bp, Heterodera glycines
ctctttatctgctctttcctctctccctcctgtctctctctctctgctgattattctctctccctcccactctttctctctctctgtctctctctgctggtcattctctctctccccctcccccaaggtcattaatccgtcgttgcgctctttgggctctttcagcgaggcgatgcttaactttttgcaatcgcttaaccaaacatttgctcaacagcaacaaaaggcgccggacgatgaagcggaggaaggagaggaaatgaaagagcaattggccgagccaacaatcgacgcattggtggaggaacggatgaaagtcaattgaggggagggggggggatgatcaaaatt

SEQ ID NO: 90949 - DNA, 629 bp, Heterodera glycines
cattgattcttcaaatgggtccagcaaattccaagtggatttgctccgctggatcaaatccgaatttcccgaatggccacaagtgattgccggcaatgtggtgaccatgcgacaggcgaagttgctcattgaaaacggagccgacgcattgcgcgttggcatgggcagtgggagcatttgcatcactcaggaggtttgtgcagttggccgtgctcagggctccgctgtgtataatgttgcgcgctttgccaaaaccttcggtgtgccggtgatcgccgatggcggcattcgcgacgtcggttacatcaccaaggcgttggcattgggtgcttccactgttatgatgggcggtcttttggctgggactaatgaggcgcctggtgagtatttctggggtccgtcgggcgtccgtctgaagaaataccgcggcatgggctcattggacgcgatggaagccaacgagtgcagccaggacagatacttcacttgcgaagatggaaatatcaaagtggcccaaggcgtaactgctgcccaacgcgaccgcggaagtgttttcaaattcgtcccttacattctccgcggcattcagcacggacttcaggacatcggagttcgatccatcgccgagc

SEQ ID NO: 90950 - DNA, 445 bp, Heterodera glycines
  unsure (1)..(445): unsure at all n locations
gccaaacgcacacagataaactccgttttagtcaagatctgtctgttcgtcgttctcctcccaatcggttccgctttgtccgttctctcgctgtttccaatcactttcatttggctcttttatttggccctttctttcgtcaaactcattcccattgttggccagatttcgatgctcttcgagttcgccgaatacatcaccggcttcttcggctacggggattggttcggttcctacaaacgcgctgaggagggccgacgtgcggagagagcgcggaacagactgcaccgccttgaacaacgcaagcgacggattaaaacaccataattttatattgttgttgttgatatctttgtttatacacaatattggcttttttcgcatttgcttttcccattgatagatattttacgggtgaaaaanannaaaaaaaaaaaaaaaaaaa

SEQ ID NO: 90951 - DNA, 639 bp, Heterodera glycines
cctcctatcagcgcgactcggacaatgccgagcgacagttccgtgccgctctgaagctgaagggacccaacgacgacgccgaactgagcacattggccaacctcggcctggcactgattttcctttcctccggccgagaggcccaattctacgaactgttcgactcactttcgccctcgcgcatcccttcccaagcgaattcactccgttccgcggcccatctcatccacggctttcactactttctgcacgcgcgacacaacgagtgcaagaaacagctgatggactccattgccatctccaaggaggaggacatggcccggcttcagagcattgcgttgcttctgctcgcaaaactcctttcctccaaggatgtgctaaaagctgcttccgaatgggccacaaaaagtgccgacgttggccttttgctgtgggccaattcggtgattcgttcggtcggtgacgcgagcgactcgaaaaaagcggaggaggaaatctgtgcaaaacggcgacaatttgacacggcacgggaagaaagtgcccgaggaaatgcacacgcccttctcaagtgggtcgacagggaaatgccaagcgcagcaacttttcgacaataagccaaagaatctcccagataattaa

SEQ ID NO: 90952 - DNA, 607 bp, Heterodera glycines
attgaattgtttttacatttgaattttttataaatgtcatcaccgtcgttgccagctcattggccagccaggacagcgaaagacatcgaaataatacttttacacgaggcggcgcaagccaccgtttgtcacgcgcttggatgggcagtaactggtatgcgttttacggcgcaaggcggagtggtggattggcacagaaccaccaccttgaataaaatcgagacgcttgaggatttaatgaagcggatttgtattcacatgagtggtaaaatagctgaggaacaattacttaaaagcaacaacactgggtctgagacagacattaaccgaataagcgaagagatggagaaaattgtagagaatggtatgttgccaggcctaccgaaatggaacattacgtcaggttatcatggaccaaaattgttggctgaatatgaaaaagccaaaagggcgttgctccaagaatgcaaaaaacgaacggagagaatcgtaatagagcaaaaagatgtaattgaggatcttgcgaaaaagtttggagcatcaactgagttgaatgaagagcaagtgcagaattttttcgcggcgaactcgccgagacactctccat

SEQ ID NO: 90953 - DNA, 607 bp, Heterodera glycines
atttgaaaccgaacaaacgaaatgccaagttcctcgactcttttctctctgatcttctctccgtccattcttcgatcgtttcccgtcaaggcgaccccggcccagtgcttcaactcttccgattgcttctcaacgaccgccaattgcaagaaattgaagaaaatccggacggatatttcgaatttacggcactttgtgagctgccgattaaactgtccgtggggaagggaaggccaaaagttaaaactttggccgtctctgtgctcggctcgctgcttcaactgaataagcaaagtcaaatgtaccgccgcgtgcttcgcctgcttatttctctgttggattcgccatacgcgtcgctgagggaacaagcagccgaacagctcttcgagtttttcagttgcgaatccgacgacagcgaacatgggactgaaatggcattgaaattgctgacagagaccgactggggccgagggagggagggcctaggagagaacagacgccggatcagtgccattctgttggccaatgcgagatgaaagtgacgcaaacagcgaatcaatttcatatttccattctttttattattgaaatcattccgagggggagg

SEQ ID NO: 90954 - DNA, 628 bp, Heterodera glycines
gtccaaataagcatttgtctgtcatattcgttcggcgagtgaacacacaacaaacataggtcgttaaatcagtaacacatgtcgaaaccgaaaacattggtggaacgtatgagactgttgttcagcaccagcaatggggcggacattcaatttttggttggggaaagcgacgaaaaagaactaattcccgcccataaaacaattctggcctcggcctccgacgtgttcgaagcaatgttccgatttgacgccggaaatactggtcgaaaaacctcctcggcgatggtgccaagccccgtggtggtgcccgatgttgaggcggatgcattcaggacgatgttgggcttcatttacacggacgatttgagtgggatggacggcgacaatttgttcgacgttctttacgcggctaaaaagtacaacattgtcggcctggtcagtgcctacttggactttcccatcccttcgctgcccaacgttttcttcgcctttgcccaggcgcgttttctcgaagaaaaggattttgctcgccgttgcatggaatacattgaacaaaacatggacactttgcaccaatcggacgcctttttggaaatcggccaaagtttgctgtgcgaagttttggacc

SEQ ID NO: 90955 - DNA, 536 bp, Heterodera glycines
cagtctgactaaatatgtggacactttcatcggtgttgcgggacccaaccacggcatttcgctgcagttgggtgccctttccgtgcccggctgtcttctgtccgtgttgcccgtgtgcaatgctcagactggcctatattccggcttctgtccggccgaaagcgcttttctccaggacatcaacaggcagcaggcatacgagggacagaacaggttttccatctacagcaccagggaccaggtggtcggccacaaagtgtgtggtcgggtcacttcgcaactgccgggccaacatggcgaaaaagtgtacgacaacgcggaccatgacggcgcatttctacactcattccccgtccaacatgccatggtgttgaaccacgcgctcatttgagggaaggaaaggacgggcaagcggacgaccgaaattcaaaattcatttattctttcgttcgttcattttgacatttctccgtttaaaaaatccactttattttattttaatcttatttttgttaaaatattaataatttcaaaaa

SEQ ID NO: 90956 - DNA, 635 bp, Heterodera glycines
tataaaatttccccaatgccaagcatcatcattacggccacttttgtagcggtggtacttttcacttgcgcttttttggacctttgccatgcattgacttgcaaaagccgttcgataacggagaaaaatggcaggcaaccaaaagattctgttctttgtgagaatggccaagacgtttgtcgtgcgttcttctgcgtagcgaaccattcccttttattcatccaatgggattgtgcgacattcagcaaaaaggacaaatgcccacaaaaagatggccccaacacggcaaatagcgtaagagtggaccatgggcttcctcagtcggatgattggcattgcgtgtgcgaatttggccaagttggggaggaaatgggcaacgaacacatttccaagatggacccgacggaaccaacgccaatggccgattcggatgttcgcgcttctgtcagtccactttttgtcctttcgtttctctattgggtcattttgccattggcaactgctctttatcgtcagttgctgacctgggctgattagcaggtggccaagagtacaacgttgtgatatgagagaagagtgccaatggacaaaggatggatgtgaagagaaataagaaaagaatttcaaatttcaat

SEQ ID NO: 90957 - DNA, 499 bp, Heterodera glycines
  unsure (1)..(499): unsure at all n locations
cctcgtgccgaattcggcacgaggctcaaaagtgccatcgatttcctccccacaaaaagcatcaaattctcgattctcggaaaaatgaagccaacattcaacttcaacctttttgcatccgtctttcttgtgctttgtgtggcctcgtttgtcctctgtgagcataagcgagcagccgcagcagaagcatgtaatcaccccaaaagcgttggaactggcaacttgtcactcaaacgatggtggtgggacggtcgtcattgtaagcaattcacctacaaagggcagggcggcaacacaaacaatttcccgtcaaagaagctttgtgatcaagtgtgcaagccatgaaatgtgccgtggaatgatggtatgaagcgtgaagagacatgcaaagaagaaaagcgaagaaaatttaatgaaatttttcattaatcaccaataactaaagatttgattgaataaataaaattttatcgttcannagggacattttgccattaaa

SEQ ID NO: 90958 - DNA, 350 bp, Heterodera glycines
tagattaattgcggtgccgaggcgggcgcccgacggtacgtggacctaatggcactgatcgaattcgtcttcaactcgggcgccaggcatcgcgaactgctcacttacggttccaatgtgttggacccgcagttcgatttggtgatgccccccgtgctggcgccaaaatgtccaccaaaggacccgtcgaattgcaccaattgttgccctattaaaaggaatttgaaaatcactataatttatcgaatttatccttattcattcgattatccaatctcgtttatcctatagtctaatcaacaacctaactcttctttaaaaaaaaaaaaaaaaaaaaaaaaaaaaaaaaa

SEQ ID NO: 90959 - DNA, 629 bp, Heterodera glycines
caagtttgagctgttatccatctaaaaatacaatgtccgccattcgtaaaaagttggttattgtcggggacggcgcttgtggtaagacatgtttgctgattgtgttcagcaaagaccagttcccagatgtttatgtgccaacggtttttgaaaattatgtcgcggacatcgaagtggatgggaaacaggtcgaacttgcgttgtgggacacggccgggcaggaggactacgaccgactccgaccgctcagctacccggatactgacgtgattttgatgtgctttagcattgactcgcccgactcgttggataacattccagaaaagtggacacccgaagtaagcgattgggcggaactttcacgaccgtatttcacacttaaggtgcgccatttttgtccaaatgtgcctatcattttggttggaaacaagaaagacttgcgcaatgaccagcagaccattcgcgacctttcacggaacaaacaggaaccggtgaagtcggagcagggaaaggcaattgcagaacaaattggtgcatatgcttatttggagtgcagtgcgaagaccaaggagggaatccgagaagtatttgagaaggcaactcaggcagcacttcagcagaagaaaaag

SEQ ID NO: 90960 - DNA, 343 bp, Heterodera glycines
attttcttcggcttctgtctctccgcttgacaccttcccaagcaaaagcaacaagaattgttcatccaaaaatctaattgactaattcgccgtccattagacgagtttaattcgaagaaaaaaaacaactaattgtatttgaagatattattattatgggagatgaatgaactgaagacaattttgtgctgctgctgctgtactctgatatgataaacaaaatgtacccaattcggcaaattgtttgttctgctaattgatttgtttgatttattaattgcagcagtaatttatacagacaaagaatattaacaaaaatgaaaacagacactaaaacacacaa

SEQ ID NO: 90961 - DNA, 374 bp, Heterodera glycines
gaatatcacaccgtacccattggaccgtagtctttcctacactcactttatactgtaacgaatccgctccatccaatcgttcgattttctgctctaatgcgccctcttttctcagggaaaccccagggagaaaaagtcttttccgattaatttaaatatcccattcattctttttgttttttggacaattggacctcgaaaagcctcaattatcaacaactataaagctaatttaacaaatcatcgattccatccattcttcaaaatgtctttcactcttcgccatgtgaaaatgttaatgatgataatttgcttttcatctgataaataatttttgatgttaaaaaaaaaaaaaaaaaaaaaaaaaaaaaaaa

SEQ ID NO: 90962 - DNA, 289 bp, Heterodera glycines
ctgcgaattagcctggcgcaacaattaccggatgttggaacttagcaggacatgtcaagcggctgtgatctcaatcacctgtgtcattatgaggctgaccggcactttgggctttctgttctatttccgttgtgttttcttacaggcttttgtctggcaatacaagacgggctttcgatggagtgcgtttttcacgagtcgttcgcttttcctcacccattcagtcgttagtggccttttcacttatgtccttttttgggtgtatgtctacggacttgtccatgtctat

SEQ ID NO: 90963 - DNA, 289 bp, Heterodera glycines
cagaagcgaatgccgagtgtgaggaatgaatgaatggaatgtacgcctccccccacccccgcccatttccctgtcgttttgctgccgtcgcgcgactccgtttttcttttaatgagagaattgaaaccgaaagagagagatagagaaaacatacggataatatcgagataaagcaacaaaatatttatcctctgagactgttgtctttattgttcgttgttttgacgctgcttcttttttttgttgttaaaaaatggatggagaaaaaaaaaaaaaaaaaaaaaaaaaa

SEQ ID NO: 90964 - DNA, 465 bp, Heterodera glycines
  unsure (1)..(465): unsure at all n locations
cttaagtttttctaaatgatcgacgaatcgtgtcttttcgactcggaagaggaggatgaagaagcgaagaaaaagacgccggaggagcgcaaatatttgttcagaaaggagctgcggtcgatgctattcggttttggggacgaaagaaacccaaacgacgacactttggaggcacttgagcaaattgtggtcgaatatgtgaaggaggtgtgccgcaaagcgttggaggttggcaagccgaaccgagtgaacttggaggacattcattacttgattcggagggaccagaaaaagttttcgcgcgtcaaagaactgttgtcgctcagcgaggaactgaaaaaggcgcgcaaggcttttgacgacgcgaaagatttgtgattgatgaaccaacaaagaacaaataatgtaaaaaaggaacaaatttaaatacaattaaacacatcnnanannaaaaaaaaaaaaaaa

SEQ ID NO: 90965 - DNA, 424 bp, Heterodera glycines
tcgtaaagatgccggccaaaaattggctaaagctttagcccatattttgcctcaacgtgataacattgtggttttggcacttccgcgtggcggagttgcagtggcttgtgaagtcgctgatgcctttcaggctcctctcgatcttctgatggtaagaaagataggtgctcctggccatgaataatatggaattggtgctgttgtggaaggaaatccgcccgagctcgccattaatgacgaagctcgtcacaattacacgaccatctgaagcatatgtgccaaagacaaatgcattaatcaactcgaagaaaaggacagacggccaataacatatttgggcgacaaaccgccggtgtcgctggaagggcgaattgccattgtcgtggacgacggagttgcgacgggtggcactgctcgagttgcg

SEQ ID NO: 90966 - DNA, 400 bp, Heterodera glycines
cacggagatcgctggactaaagcccgaaatgctctgtcatactgaacacatccttgggcacgctttgtgtgtgctccactcgaaaactcttgatcaatccctagaattgatccacccaagtcccttatcgcgaaatggcaccgcgcttttcactccgtcgggaattgccccgcgccgtctcctcgcgtagagtgatgtgcgccgagcgggcctacatgtgccaatccctgggccgcgtccgatgtactctttcccccgttcacgtgcaagttctcctggccatgccgattactatggaaaagctggtcataattcctacacccaacctcgaaatgtgacacatctgagacgctctgaggatgcctcgactgcaaccagaccacatctatctcttccacaa

SEQ ID NO: 90967 - DNA, 481 bp, Heterodera glycines
  unsure (1)..(481): unsure at all n locations
tacaatccaaggatcatcatcaatctcatcttttccttatgggcgttgattctgctgatgatgactcagtgcctgatccaattgtgattaagcagggcgagtcattgagcctttctcagcttgtgcaaaaaattgaacatttacaaaaccgaactgttcaagagttgactgccaccctacgtcgtcgcacgtacaaaatgcctgttgggcctcccgacccaaatggagatcgctttttccaaaatgggcatctcctggtagaagatgttgtgtacaaggtggcaagaaaaacgcgtaactccatccacggaattgtccagcttcatgcgtatatgggaattccattgcttgatgaagtcaattatcacttttagtgattggttaaagaaaatttttgtaaatttgtttgtcttaatattttgtacgctatgcgaatttgacaataaatttgttccaatgannaanaaaaaaaaaaaaaaaa

SEQ ID NO: 90968 - DNA, 465 bp, Heterodera glycines
gtttgaggcctaatcttaaaaacctgctcattggtaaaaaatgaaatccttctttaatttcccatttgtcttttgtgttcttttgctcattggctgcgttgacaaatgcgtcggaggagtcgcggcattgccgccaaaatatttgggcattgaaaaccatgacaaatgcttaaccgacgagccaataggctcttcgcgtcggctttgtttgccagcgcagaaaaaaatcgaatgccaagatgaaacgttgaaagcgcttaatgatttggaagaaggccaacatccgccgacttgcgcatgaatccgaagacagaagcgaaagaagcaaatgaagggattgaagaatgacagggaaaagcctggctgaacaaaattttgtctacaaaaatgaaataaaaagttattgaaaataaaaaaatttattgaaaaaaaaaaaaaaaaaaaaaaaaaaaaaaaaaaaaaaaa

SEQ ID NO: 90969 - DNA, 322 bp, Heterodera glycines
  unsure (1)..(322): unsure at all n locations
gacaagcagaatatacagcaaaaagaaagaagatgagaagataattgggggcaccgaaatgtgggaaaacgcccaagtgacaaatgagcgatgcccaagttgttctcatgacaaggcctacttccagcagatacagacgaggagtgccgacgaaccgatgaccattttttatcgatgtgccaattgtggacaccgatggaaggagtaacggatgaaatccgaatttaagtccatgttttttagttagctgcttgttgatcaaatcaaataatattgctataaagggaaatccnatttaaaaaaaaaaaaaaaaaaaaaaaaa

SEQ ID NO: 90970 - DNA, 597 bp, Heterodera glycines
agaccattgaaaatattcttttgattctcctgtttttgtcgtccttttgtccatttgttttggcttggctctctctttgcctatgacttcctttgcctctcaaaattccgtttctttggcggttcaaaatgcgctgcatcaaattttgacacttcctttgccatctccgcaagtgccagcggcgcaaaacgaacagagccgacgggaggaggaggacgaagcgtcggcgcaaatggacttttggacggctgcgagtttaaacacggagaacattcgggattacaattttgaagatgagataaacgtcaaaaatgctgcaggttggactcctttgatgtacgccgcctatttgggccatcgcgaactgtgccaactgttggttctgaggggggccgacgtggaggcagccaacgagcgcaatcaaacggggattatgttggcagcctcttgtggtgccattgacgtggttcgaattttgttggacttttctgccgattgcaacagacaagaccaatacggacggagcagtctccattatgctgtaaaatattatcatgccccggtggtacagttactgcttgaaaacggcgcagaccc

SEQ ID NO: 90971 - DNA, 619 bp, Heterodera glycines
gtccaattaagtttctctgatttttgccatgaaatttgtcacttcgttcgcccgtcgttggcccctttcgctttctgtcgccgcttcgtttggccgcgtcggtgcgacgcgcgccgcctcgacgctgacaattcgcgacgcattaaaccagcagcagtgtctcaatccgtctccactgatcgctcccatcgatcgtcggcgatttgcgacagtcaaaaagaaacggcaatggaacagaacggcacaacaatcggaggatgaggaggacgacgaagcagaggaggaggaggaggaagaagaagatgaggaggacgaaggaatgccaaccgattgccggaacaaagaattcacaatgctttcgcggagattggacactgtggtcggagtggcactcaaaacgagcataagcgcacttggcaattggattttgcagggccgcgttcgggtcaatgaaacggtggtcatcaaaaaggcgcacgagatagagcagggcgacttggtggaagtgtgggacgcgccgtacgaggaaaacgcgcggcttgccacggtgcaccgtctgcgcattgtgcggtgtcgttttgaccaacgcaaaggctatgtgatcaaaacgaagtgttgg

SEQ ID NO: 90972 - DNA, 365 bp, Heterodera glycines
attcacataaaatgttatcttttgacttccattctataacaattcaccaaaatcgtgtccgtcctcgccatacattgtggcatagccggcggcggaaaaattacgccacgcgaaagggtaaacttcgtcaacaaaactggcacttcgataacgtttcctcgtcaacggctaaatgcttttgaatgatcaaattattaaaagaagacaaaatgccctaaccaattcctcctccgtttgtgccgtcaaaattggaataaatgcctgtggtgtgccatcgccgacaatattataacctggaagaaaaactgtagcttgattggactattttaaaaaataccattaaaaacaacagatttcatttcatt

SEQ ID NO: 90973 - DNA, 627 bp, Heterodera glycines
gtccatttaaggcatttcgtgcattttttgtacaaatttttgggcatgagtacagtcccttccacctcatcggtcattggcactcagctaagcgatttcaatcagcatgccctgaagggaatggccgctggcgcatttgcggctgccatttccaaaacaacagtggcaccgatggacagagtcaaattgtgccttcagttgcaaaatgccgctgtttccaccccccatatgcccgttgttcgcctcccctccgcccattcgctcccttaccgcggcatcgtcgattgtttgcggcgtttgtgcgccgacgaaggcatccgttcgctgtggcgaggaaattcagcagctgttattcgctgctttccgcacaatgcgctcaatttggccttccgcgattggttccgtgtcgcctttttggatggcatcgaacgtcgcaaaaggcccattcgctttgtggcaggcaatgtcgctgcgggcggtgcgggtgccgctttgaccctcgtcttctgttacccgttggacctcgcgcgcacccgacttgccgttgacggaggtgtgcaccgcggcttgtttcactgcttttcggtgatacgctcccgcgaaggcactgctgggctttaccgcggc

SEQ ID NO: 90974 - DNA, 625 bp, Heterodera glycines
gtccaattaagcttcgtttactccattcgttaccttttcccaatgctttcgtcccatcatcgcgaatcacttctcctccaatacggtcgttcgcaagtgctttactcggacgaattctgcaaattgaccgacgaaattctgatcatcaaaaagttcttttttggcactctccggccaaaggttgtgctgctgaaggacattcgcgtggtgtacttcgacgagcaaaagaatcagcagaagaaatacgcacatcgccgtgtgtgggggcgggcgccgaattcgctttattgggctgccgacttcaaacggtgtttgcctggcgttgacaagtgcaaccgcagtgacgtcatcatcgacatggaagacggactgctcaaagggttcaccgtggccgatgcccagtcatttctgagcgtaattcgccttttcgcgccgatgtcgacgataattgtggacaatttggacattgcttaaggcacttttcgcctttaatttcggccatttcactcattccattggatttcattgttcgggcgacgtttgttaattaccaagtccaatttgtaaagttgtcaatgtttcaattcataaaaaacacataatttgaaaaaaaaaaaaaaaaaaa

SEQ ID NO: 90975 - DNA, 400 bp, Heterodera glycines
tgcctctgtgtgctttttgcctcctatagtcggcacagtcgtcactctggaatgtctgtactctgggatgagccgaatgaaccgcctagggcgacagcgagctgacgccttccgcgtcaatagcgactcggcctgtactgatttgatttacgtacatgtgggcttgacgcctgcgttaaggccacgtgcaaacccctacaactcgatcttccacgcgtttcatctacggcccagacactgcctgtgcactagcctcgaagatatcagctgatccccttgaccgcccgggaagacccgaacatctggacaactgtcattgcctggaggatcaagactactcggacagacatggaggactgcccgacccgatcctccttgcccgttatcgaagatcacctgc

SEQ ID NO: 90976 - DNA, 625 bp, Heterodera glycines
ggctcacgggcatggacattctgtggcacagcggaatatgtggcacccgaagtgattctcaacaaggggcaagacagtgcggtggacctttggtccctcggcatttttatgttcgaacttctctccggcagtccgccctttgcgtccaccgacccaatgcacacgtacaatgccattctgaggggtgtccaattgttggcttggccccggtacatgggggacaacgcgcgcaatttgatctgcaagttctgccgacgcgatcccacgcaacgattgggctatgctcggatagaggatgtcaggcaggacatttggttcaaaaacttcgatttcgcctcctttcgcaaccactcaatgcgtccgcccatccgaccgaaggttcgcagtttgacggacactcagaatttcgaccgctatccgtcgactgataatttcgcctgtggctccgatgaaagcggatgggacgacgatttctaatcactcactaattagccttctgtgaaggcacccgtttttatcatttgctgtatgtaaaattgagcatctttcatttccttttttcatcttactcatgtcaacttaatttttgtggagataaaaaagacattataaaaaaaaaaaaaaa

SEQ ID NO: 90977 - DNA, 625 bp, Heterodera glycines
gtaaaacataagaatagacaaataatctatcatcgagaattatgtcgaagttctttcgaggtgctatttcaagctccgagtcatcagaaagcgaggagtctgccgatgagcaaatcgttcaaacccgtacgatagctcgcgatttcgcatatccgagtgattctgaggacgaaggcccaaaacgaattgtgcgcacccaaaaggacaaaacttatgccgaactcaaagaacagatccgttcttcacgaaatgctcgaaatatcaaggatattgctaaacttcaaacagtgtttgaggctcaactgaaattatgggaaaaggcaaaaacgtttattgtacgcgaaaatctgagcattcctcgcttttacattcgctatttggccgaacttgaggacttcatcaacgaacaatgggaggacaaagaaggaagaaaaataatgtcaaaagcgaattcgaaggcattggcctcactaagacagaagttgaagaagtacaacaaggactttgaggaggatttgggcacttaccgaacggagcccgacccaatgggttattccagcggcgctgctgaagacgacgaggacgaggagatccctacagcgccggccattgcaacaaatgacgt

SEQ ID NO: 90978 - DNA, 527 bp, Heterodera glycines
ccctctcaaatccattccgactttttttcctgcgcaataagcaaatgccctccctccttctcctcccaacattttgcttcttcgcctttgccgtcgtagtggcccattcccagatgactttctccgatggttggggaaaacgttcagcggttgcgccattcgcattgcttgcggacagacatatggcgggaaacaaacggcacgaaaagccgagggcggcggccaatctgttcatcagtccgacggatgaggacgcactggcgatgagcccggcaatggaagcgtgtcaagtgggatacgcgcaaagactgatgcaactgcacgagcaaatgctgactttgttcagcacgtaccaacaatgtcagacaaaagcgacgatgatggagacgaagaaagcgtagagaacgacgagagaaagaaagggacgaaaagcaaaacgaagccaaaagcgaaaagacaccaaaggaaaagccagtgtcactcaaaagtaattcattgtgtttaaagctaaattagtcattcgttga

SEQ ID NO: 90979 - DNA, 609 bp, Heterodera glycines
ctgatgtacagttgagggcccaagaagaaattgataccgtatgctcgagcgaaaatccgacatacgaagagctgagccaattgaaatatatggaagcggttataaaagagacacttcgactggttccagtcgctgcaaccgttgtgacgcgtgtttgttcacagacgacgacattgggccaaattttggtggaaaaagggaccggagtgacaattgacttgtacacttttcatcgaaataaggagttatggggtgacgatgctgacgaatttcgaccggaaagatggcttgacatagatcctcctccggcctcagcctattattacgcatttggcggcggtcctcgcatttgcattggcatgcgatttgcacttttggaggagaaaatggcacttgtgcgactgttgcggcgctattcactggccaaaaatgagcaaacggagaaattgctaaaggtcaattcgcaagttgtgcttaatcctggcgcagtgatggtacaattgaatttgagagaagagaatttttaagaaaatcaaattgactgaatttgaggaaaatttgtaacaaatttattaaaatatttcacccaaatatgttttatgtaaaaga

SEQ ID NO: 90980 - DNA, 265 bp, Heterodera glycines
tcaactttcactcaaatgctcttatgggaagttggagttcgagaagaacagctgcgttgagtcgtcctattacatgagaaaccctttcgagccacccaatttccacaagtcccaccgcgactattccctcgacgactttgtcatcgtcggctcccgttgctttatttgcgaacagcacatttgtgtggacgaacagcgttctctgttctacagacacacgttctggttgcgctgtgtgtggagagaacggcacaccttccccagc

SEQ ID NO: 90981 - DNA, 591 bp, Heterodera glycines
gaccaacctgttgctggacccggccatccgcacatgggtgttcgtgcccattgtgttaatcacttttttggttggcattgtccggcactacatgttcctgttgctggtcaccaagaagagtgctgacctgcactcagtgccggacagccattgtctgctgaaggcgcgtctgttgcgtgagaatgggcgctttttgcccgccgattcgtttgcccagctgcgctggctgctgtgtgacaagcagcatggacatctggtcaagcggcaagacaaacataacactcagacgaacccgatgatggacccgtccacgatgaccgagatggtccagggcaacatgctaaacatggtgcccatgctggtcatctgcgggtggatcaactggaccttttccagcttcatcaccactcggatgcccttccctttgacacttcgcttcgaacccatgcttcaccgaggcgtctatttgcagactttggacacatcatgaggttcctccgcttcatggtacttcctgaacgtgttcagactcctctcggtgtacgcgctagtgttgggcagcgagaatcaagtctacatgatggacgagca

SEQ ID NO: 90982 - DNA, 512 bp, Heterodera glycines
gtccaattaagatttattgtttttttgtttctatataatgtacggaaataatctcttcccattagtcaaaaggaagcagacaaatgcggagttggaagctttgaagaaattgaagctgaactcaccaaggatgaaatttcgcttcaggttggaagcatttcgctttgctttatacgtgttttggccgattaccatcgtttggatcttcaatagtccattcttccaacaaaaatcggaagaattcattcaacgatttggaagacaatttggcataacggaggaatttatccgctccaactcgcaacgaatgaaggagttcaagcagcaagtcaccgagggaaaacagcgcgaggaatatgccaaattgctgcacgagcaaatggaatttgagtcggcgcgccgtttcagagagaaatatggactctgatctgatctgctttattaaatcaactccgtttattgtctattaaaattgtgtttccaacttttttctgaaacaaaaatagggaatt

SEQ ID NO: 90983 - DNA, 624 bp, Heterodera glycines
aaaccatttttattagcagatttagccattttttaaaacttttgcccaattttaataatttttgcagattaaaaattgtttgactacgaatggatatttatctgaagaagaaatgcgcaaaaaaggacaaataatgggcgaattgacaaaaattattaaagaatgggtaagaggaaaattgggaatagagatagaaaattcaaatttacgaatcccgcgcgggattgtaaatcaaaactttttgcagtacgagatcccactggataatcccgcaagtcccgaagttaaatttgcgggaatcagcgcgggattgtgagcttattgaaatttgaaaaaatatcgatttcaactaaaaattcttcaaaataataataataaacatgaccaattttgtcaaggtttttgctaaaataagtacaaaagaggtaaaagctatgaagtttcctaaaagaattttaataacatttcttctaggttaaccttttttcttctttatccatttaatttctcatcacgcctctttcaaaaaatttctggttggggacggaatgacgataattcttagcagattttgtcaaaaaatacaagggattagccctgaaaaattcccaaaaaatcttgcaa

SEQ ID NO: 90984 - DNA, 587 bp, Heterodera glycines
acaaagttacgattgtttgcgtcggacaggttggcatggcttgtgcctatagcattctccaacagaacattgcgtccgaaatcactctctgcgatgtacaaaaggacaaattgctgggcgaagtgatggacttgcagcacggcgttgcgttcactcgccaaggggtcgtagtgaatgccagcattgatggttattcgggcactgtcggctctaaagtgttttttatcaccgccgggtgtcgtcagcgtgagggcgaatcgcggctcaatctgatcaaacgcaacgtggagatcttcaagggcattgtgccggaactcgtccgttactctcccgacactatcattttggtcgtttctaatccggttgatgtgctcacttacgtcacttggaaactctctgggctgcctcgtgagcgtgtgttcggttccggcactaatctcgactcggctcgtttccgctctttgctgtctgagcgtctcaacatcgcccctttcaattgccatgcctatgttattggggagcacggagactccagcgttgccgtgtggagcggaatgaatgtggcgggcgtcagtttgtctctgttg

SEQ ID NO: 90985 - DNA, 172 bp, Heterodera glycines
gtgcccgggccgtggtaaagtggaactccacttcagcggttcggcacgcaattagtacaatgcatgcaaaaaaaacaaccattttttgttttgttcaattatgtttggtgtacttttacaatttgcaggctcaattaaagtgcgctcaccaaaaaaaaaaaaaaaaaaaaaa

SEQ ID NO: 90986 - DNA, 475 bp, Heterodera glycines
  unsure (1)..(475): unsure at all n locations
caataattgcatcttctttatttctgctcgtaattttatttttacttcacatcactgagctttttgcttcactttcatcaacccatgagacaaatgtgccggttataattgacacgcccaatggtcgcctgcgcggttttgaatccatttttttgcacagtcgggtcagctcattccttggcgttccgtttgctgagcaaccgattggcgaccttcggtttcggcctccacaaccaaaaaggtcatggaatggaaccattgatgcgatgaccctttcgcccacatgttaccaaggccgtgacacctataatgaatctttttgggggtccgaaatgtggaatgcgaacactccaatcagtgaagattgtctgtacatgaacatatgggcaccagtagatgccaagtaaatatagtgtgatcttcattaaaatttgtattggaaaaaagaattacntnaaataaacttaaatctaaa

SEQ ID NO: 90987 - DNA, 525 bp, Heterodera glycines
cccgttaatcttttgattgtttctgaaaccaaaatgacttcaacaaaaaataatagcaaactgaacgaattgttacaagctggtggttatgatgcttctgatggaattgacagtctcatccccagtcatcttaaacaactttctcgcccggtcattcgtcgtgttcgaatgctgaagaaaattcaggcacaatctttggaaattgaaagccagttttacaaggagttgcacgagcttgagattatgtaccaaccgttgtacgatgctgtgaatgccaagaggactgccattgttcgtggcgagatggaacttacggacgcggacggtgaacttccgccgcttgttagtgaactcgagccacagactttggagaaattggaagaaaatgcgcctgtggagggaggtgaaccgtcgaagggcattccgggcttttggttcaacactttgaacatgaacgcatcgataagtgacattatcaaagaatacgacgagcccgatcctcaaggtaatttggtggacatcaca

SEQ ID NO: 90988 - DNA, 639 bp, Heterodera glycines
gtcgttcatcataatttttaatggctaatacaattttacaaactcttgcatttgaacatcaaaaacatttacaacttcaacaacaacagcaaatgcaacaggaagatgatggggaattcggtgcacaacagagaaaacgcaagaccagttgtcgggcgagtattgcattgaatatggagcagaaaatgcgactgatcgattacatccacgaaaggccacaaatttgggactgcaatgttgagggattccgcagcaatcagtcgcgtcagtccgccttcaatgaggtcgccgtacttctttcggatgacattgaaacattttcgaggatacaaatccaagaggaatggggcaaattgcgctactgtttcacgcgcattatgaagaaattgttggaggaaggaggcgggagaacggtcgacgaggggcagctgaacaccatttcatggccttattggaagcgaatggagtttttgctgcccggcgttcgggcacaactcgcgcaccaaccgacatcgacggagagtgaatgtggcaatcaagagcagggttcaccaggaaaagaatcgaatgtgtccgtcacggcgttgccgaaagtccgtaggaagcgcagtgtccggaagaatagcgtagcaatggctg

SEQ ID NO: 90989 - DNA, 631 bp, Heterodera glycines
gtttgaggtaaattttttttaaaaattatttctcactgactaaatcaactactgacgaaatcacttactgacgaaatcactcactgacgaaatcaatcactgacgaaatcaaccactgacgatatcaccggggacgcacgccattccctttcatcatttaacctcttcattcgcgacttcgtctcttggcaaccaaaaccaaagatttgccccatcaatttgaatgctgtaaatacgaagagccctcctttggatgtatacacttgtcatctcctcctctatttaatgttcggaaatcattgaccacttcatttctctccgagctccgaacttatgatgtgtggcgttgcgaagacggaaacgaatgtgcaagtggctgttgtgaatgtgaactcgggcgtcattggggccaatgggaacggcgtgttattggcggaaagggaaaccaactcgcgaaatggcgccgattttacaccaaactttgacaacactcaccagggcaatttgttgccctcctcgttttctgcctgcggtgcttccaccccgagcactttgttgtcgatgccattcgagtgcagccatgacttggacacgaattcactgcaggcactgcaccacgacgatgatgaag

SEQ ID NO: 90990 - DNA, 122 bp, Heterodera glycines
ggccgtcgatcttggacaccatcccttgcgcatgttcggttattttgccatttaaccggttcaccacaaatttatagtaaaacggataaacattaaattggaaaaaaaaaaaaaaaaaaaaa

SEQ ID NO: 90991 - DNA, 642 bp, Heterodera glycines
gcccagtgaaaaatgttctctgagaaattctaggggttgaccccgatttctattgcatttccataagcgacagaggtcgagagttccttctccgaatccgatatgtcattcttgacgaagtttactgtataaggttcatgacatcatactgtctgattgggttcgcttttgaatcaaaagggccaccattcagaggcgtgcgaaaaccaaaaaaataacttccgaaaagaaacgaaaaaatatttatttttactaaaacgaaataaaatttaaaattttagaatccgaaaacgaaagttttttgttggacgaaaacgaaacacgaaaacaaaaaaaaataatagtttttgtacgaaaagaaaacgaaaacacgaaaaaattttgttaatttcagccataatcaagaaacataaaactttaaattgtattaccaaattgaagaaattgaaatccaagattttttggaaaagagtaaaaatgaataaatcaagaattcttagcaaggtcataatccggaaaaaccggtcaaaaattcgccggatcggaccggattggcattttcaaaaatgaccgatttccggacccggaactctaatcgtctccctaatcctgagcccaattccgtccgcgtccgaactagtc

SEQ ID NO: 90992 - DNA, 628 bp, Heterodera glycines
cccatgagagcgaacggactcaattttggccaaatagcatcggaaaaaacaacaacaaatacgccatcgtcggcccgtccctgcctgctcgtcgtctgtcgatgaactcaacgcttataatcagccgaacaaagtcacgtccatttgtccttctctcgtccccgtctttttgtcctctcgacttcgcaatttggcacacgaacatcccggagaagaggacccagcaaaagtcatccagtgatatgttgaagacctttccaaggatgaccaaactcttttcgaggccgctttgcatcagttcatcgaatgcactttgctttccaaggagaaggatccgtacgtggtcattcggcgagtgcgacagttcatcaccgggatgaagaattatttgatgaaaatcggtgaggccgatttgcatccgatcattaagcgggagagaagtcgactgaacatcgacgaattcctcaacatcgatgcgatcctcgaagaagttctggtcaagattctgttgtccaaattgaaggcccatttgtaccgtctgatgattttggagagcaccagcaacggcgagctgagaaggctgtctgagaacattgcgcaagtgcgtgcgatgagtgcggctgaattg

SEQ ID NO: 90993 - DNA, 404 bp, Heterodera glycines
cattagtgctggtatgatcgcattcgttagtatatgcaatgcaatcgtatatattcttttttgaagacttgatgaaccattcgccgtgggtcccacccgctatgtagggataccccatctagtcttaacgagctttgatgcatgaaaaaattcgaaaacaatgcttgaacaagtaattttgggtccgtaatatagcccaaataacgaaaattcccgaaaaagaacttaaaggtcaaaatttagggtcgacaaaacgtcaatggagaagttccattgtcctgcttctttcgtcggagggctgtctttgggcttgctgaaaaggtatcacatgccaagtttggcctcacggtctaaaagttatggagtcataaagttttaaccaaaaaaaaaaaaaaaaaaaaaaa

SEQ ID NO: 90994 - DNA, 509 bp, Heterodera glycines
gtcgcattccatttttgaacaaaacgctcgactgggccttcaaatcggcgaagggaaagcccgaaatgttgagggcatgcgcacttctgcagaggaaatttggcgatgttttcttcagcgaaggacaggaagaacaagcggaacgttatgctcgctctgctgaatatttgcttgacgaagccgaccgaatcgaagggattccaattggtggagaagggagcagtggcgaaaaccgcgaaacggacaatgccgacgacgcggcgcagaaaatcgactccgaactcgaattggactaatttccatgacgcagacatatcgaaaacggtggttttggcatcgcaaaggatttacatgattagtttcgattatttttgtgatgtccaatctctctccccacggttttcccaatgattggccggtcataatcacctctaattcccatcctattccaaattaacttgtttatttgatttgtctatttgttgtttcttgtaaaacaaagatttatg

SEQ ID NO: 90995 - DNA, 312 bp, Heterodera glycines
  unsure (1)..(312): unsure at all n locations
gttcagggaggaagattgggcagcactgaagaggaaagggaggaagagaagcaaagagacacgagagagaattgaagacggagagagcggagagagaagctaagagacatgagagagaactgaagacggagagagcggagagagaagctaagagacttgagagagaactgaagacggaaagagcggagagaagctaaggggagaaaaagaacgaaaaagtgcaaaaaggaagagaagaacaaatattaattattgtaatttgttgctaatttaaattagtttccttnnaaaaaaaaaaaaaaaaaaaaaaaa

SEQ ID NO: 90996 - DNA, 548 bp, Heterodera glycines
  unsure (1)..(548): unsure at all n locations
atataagcacttctgctgcattgcatcgcgaactgagaaatttgagtttccgtaacccgggctatcgttgcacattgcccgaaccttcacgcgctaagcgaactgtcgtcatttctgcgcaacaaccaaaaacatcttccgaaccttcggccgatcgacggagcatgagaaaacgtacggccaagaaggacgggtcaaattctgatgtacaaactcgctctgccaaatccaaactccgctacaacaataaggggcgactcgtcctgccgagtcgtacagaagtggacctttgcgattgcttggatcaaaagtgcaatggatgccaatatcagtgcaaaaaatgtgggggcaataaatgcagctacgcctgtcgcgttaatcggaccacttttattgagcacatcgacacacttggcggaggtcggaccaataacccgtttttgtgaatgaaaagcatgcaagacattctcttttttcataaaacattttttatttgacaaatttctttcgctataaatgcttttaaannnnannnnnaaaaaaanaaa

SEQ ID NO: 90997 - DNA, 619 bp, Heterodera glycines
ctcagttgtcggggcacgtttctttgacgaatacaatttattttgcgttgacaaaatcggaagttgcagcatttgggagagttcgcataggccggaacagataataacgcggacgaaggaacgaaagcgaatggcaattgccgaattggagtcggaaagactttcctttgcccgaaagaaaagagtcaatttgagcaaaaatgccaatccgacttcgtcccattccgttgaactcaccgcaatttccctgcacaaagccaaaaagtttttggtaaccgccttcaacaacggcgtcttttgcatttttgagcttcctgaattggttttgctgcaaaactttcgcatcagtgaggtgcgcatcaacagcgtcgacatcaattcggccggcggttggttggccattggctgtggccaaggcagcgagtcgcaactgctcgtctgggagtggcagagcgagtcgtacttgctcaggcagcagtcgcaccgtcagaacgtcactgtcgccgcctattcgcccgacggtgcactgctcgcgacgggcgcggaggacgggaaggtcaaaatatgggactgctcctcctcgttttgcaccgtcacattctctgaccacggcaccggc

SEQ ID NO: 90998 - DNA, 635 bp, Heterodera glycines
gtttgaggttgcaattttttaaatgccaaaaaaagcaaaatatgcgaaaagtgagtggcgcgactccgactttgtctcattttgggaacactacgcaaaggtgcaagaatgggtgcacattgagagcgaatgtcgtcaaaatgccatggatgactgggagtggcgtcgggccgagaaacaatgcatttccctgctgtcccttgctgctgctcacctcggcagcgaacttgacaccgccgcggacgaaagtgccaattccaccgacgacggcggcccaaaaaatggcaaccgaatgccaaagagaggggcggacagccacggccaggaggaggacggccagcaccaaactttgcaagacgctgctccactgaacgaattggacgcctccgccgtttatttgccgtcgtcggccaagcgcaaaaaatgccacaaaaaggcgaaacaacggcaggagcaaaaatggccaaggaaaacgaattggaatcagcagcaaatggaggacaatgagcagggggaggaggaaaatgaagacggaaacgagtcgatggacgaacaaatgaaggcattccgaaagaccacgttggaccatcgcaaacaatgggagcagaaaaaacgtgaggagcagcaaaaggcga

SEQ ID NO: 90999 - DNA, 161 bp, Heterodera glycines
atctatataagcgtagtgctggttcagtcggaattcactgttcagttattaacgcactagaatttcgtattttttagattaaagattgcctttgaaagtacgaaacacatgtgataacaatttatttttgacataaatttaaaaaaaaaaaaaaaaaaaaa

SEQ ID NO: 91000 - DNA, 634 bp, Heterodera glycines
gaggagaagcgcaagagcgacattctgctcaatcggatgctgccgcggcaggtggcggataaactgaagctgggtgaggcggtggagcccgagtccttccaaatggccaccattttcttctcggacgtcgtctccttcaccactttggccggcaaatgcacgccattacaggtggtgaatttgctgaacggactgtacaccgcctttgacggcatcatcgacacccacgactgctacaaaattgaaacaatcggcgacggttatttggtgtgttccggcattccgaagcgcaacggcgaccaacacgcgaaggaaattgcggaactttcgttcgctttcctccgcacggtgtccaacttccgcgtcgaccacctcccctccgaacgcgtcaatctgcgcatcggcttccattccgggccagcagtcgctggcgttgtcggtctgaccatgccgcgctattgcctttttggggattcggtgaacaccgccatgccgaatggaatccaacggaaaggccggcaaaattcacatttcatctcgttcgaatcgcttcttgaccagcgtaatcggaggatatgtgacggagccaaggggcgaagtgattataaagagcaaaggtgtgatggagacattt

SEQ ID NO: 91001 - DNA, 595 bp, Heterodera glycines
gctaatttacttttttattattcataatgaaactattcaatagtttaccatttgtaatggtaatgggctttctgttactgaccttacgctgataccaggaccagaagaaagcacagaaccaagagtatatattcctcctgaaccaccaatcccaatcatttttataactcttcctccctcagaaggaaccatatcgtttccagcaattcaaatgcctactaaaaaagaaggagaaaaatatttagaaggacacataaaaaggatagctgctttattaggtatgactccaaaagaagctgaagaattgaaagaaggagctcaaagaatgaaaaaatggattaaaaatgagatagattcttgtataaattttattttccccaaaaaagcaaaagaagaagcagcaagaagaacagcagaagaagaaagaaggaaggcagcgttttgggaagaatataggagggaaagagcggcgatagcaaaagaagaaacaatggactagttctgtgcgggaatgggcatggttaaatataagattttaaaacagcttatcattaggaaagacccttttattttttgtagccttaagatgagaaaa

SEQ ID NO: 91002 - DNA, 624 bp, Heterodera glycines
gcgattttcttctcgtcagcactccttctcccttctgcttttgttcgcctttctcgtcattcttccgcctgtttgctcccgttatgaagatcggtacaacatgaacatgcttccctgggacctgaagccggtccaagacttcatcggcctttggcaaatggaccgcagcagcggaaacttcaaagaattgccgccaccaaatttaattgacttggccatcaatccaatcccgaaatttggagcacggacaatgaacattacgcacacttacttggactcggcccgaaatgtcatccgaagtgattacggctttatgccagtgaaaaatgccacccgaagggacccgcgggtgcacgtggcatatctgacgacgagcagcgaaggatggtcgatgatggagcaaggcttcttcaaggacggcaaattgattttccacctcaaacaattcttgaaacgctcattcggtgccgggagcaatttggacatcagagaatttgagcgtcaatttgaactgtccggcttccactcgatgacactcaaagtgcgcgccgaaacatcttttcagacggaggcttacacagcttggtacacaaagattctcttctgagtgagcaaatttaaaat

SEQ ID NO: 91003 - DNA, 618 bp, Heterodera glycines
gtttgaatagcgaccgaatatgctcaggaaaaccataaaaacacttcaaccgatatataacgccagaacagcattccgttttcagaccggaggttatgctgcgcctggtactgaagcacaagcacaggaagtaaaaaaacagacaagcacaaaatacgtgattgatgaacaaaagcgggagaagctgactctcttcggtcaatatgtagccgcatgtatgcccaaattcgtccagcaagttcagtttgctggtggggatgaattggaagttctgatccacccaactggtgtcctgcccgttatggccttcctcaaagggcatcactcggcccaattcacaaattttattttcgcttgtggcttggacgttcctacgcttcggacatacactgacgaagttgctccaatcgattccatcactccagtcttttccggtgctgaatggtatgaacgtgaaatctacgacatgtacggggtttggttcaacaaccacccagacttaagacgtattttgaccgattacgggtttgaaggtcatccccagcgaaaagacttcccattgtccggatacgtcgaactgcgttgggaccacgagctgaaccgagtgatttatgagcc

SEQ ID NO: 91004 - DNA, 625 bp, Heterodera glycines
ccgaaatctaagaactgaataacaaatcgcccctcccccattcattcgtaattttgatcttcactcaactttccccaattattgcattttctcggctttcatcttttcaccccgataaatgttgctgttggatgattgtgactaaatttacaaaaaatctttacaaattttaaagtttgcgtgataagaacatttgctttatgtgatggtgagtcatgactggcaaatgtcgctagcctcattattaatcgtctcattctttcaactttacttttctcttaccaacaaatcattgttctccggtgatttttctatctgtccagacgataccaaaacaaaagctcatcgatcgaccttaaacacacaaaagccgttgattataccgttgtttaccttcccaattcctattaaatcggccatctgcgtttaatgtcacgatgagacaacataatggagtaacgactcaattaaatcgcgctgagggcacaaacaaagcgggacgggagctcatctgtacacttgaggagagaatttggaaagaaagtgagacgaccaatgctgggcaaagcccatctgttgacagcccaaaatcaaccaaaacacgacatttttgtcaacaaagacc

SEQ ID NO: 91005 - DNA, 629 bp, Heterodera glycines
cgagcacgatgatgcgcctactcctcgcacttgctgccattgcggccagccctgctatcggcggtttgcttgatgcgggtaccgtaggaaacaagttcatggtcacgtacagcatcatccccgaccccttccaccagttcagcttctactccatgccccgcaccgtcagcgaggccaagaaggactcgttctcccaggtcaccagcaacgacgaggacaagacgaccgtgtggtgccgcaagaacgactaccgcgtgtgcgtgctcttcgaccagcagggcagcgtcgcgggaatccaagtgtcgataagggaggctgagctgacctcgaaggactctgctagctttggtggtctgagcacgctgctcacacccgagtggcgccgccagctcttcctcggcaaggacgtgtggaccgctacggcctacttcgtgtcgaaagaggtgctgctgagcggaggccgaaagatggacaaaaacacaccaaccgcacccgagggtatcttcgtccagcaggtggacattgacaacaaggaaacgggccgcctcgcggtatccagcactgaagcccaggccactgctgccggtttcaccgaacaggcttgcttctacggcatgggaaaacactat

SEQ ID NO: 91006 - DNA, 551 bp, Heterodera glycines
ctctctgcacagcaacaccacatcgacccaccctaggcattcgcttcccaccgccaccgcccgtttccgccaccgatccatccccgccgtcgtcaaaaggcaaccacgctgccctcccttgaacccaattccaattcccaccatgcaactcgcaaaacaactcaagaagcgtgcccagctcgcctactaccgctacgagctcaccacggcgctctacatgctcgacttttgggaaaagtgcatcttcaactcgctcgtcctcctcggcttcatcctctttgtctacacgtccatcaactacactccggactacattctccacggagtcgatggcatgtccgagtacttcccggccgttagccccatgtttgatggcgttagagcgtggattgccccgcccattcatgacgagttgtgagcaggttgcccgcggatactctcgaggattggggcgagggtttgagcgagggatcgtgtgtggcgacagctgattcgggtagttgatgggccgatttggtttatttgtgtatagatgctccactttcttgttc

SEQ ID NO: 91007 - DNA, 114 bp, Heterodera glycines
gctaaattgccattttttggacaaaataggtaaacaaatccaccaaaaattggctaaatgaacgaattctaccatcccacacgaaaagaaatttcaaaaaaaaaaaaaaaaaaa

SEQ ID NO: 91008 - DNA, 626 bp, Heterodera glycines
attttatttttcgttttcgtatcgaaatgccctttttcgttttcgtatacgaaattttttttaaagttttcgtgcagtcctgccccccacccctctcttccctttttggccctaaatgcttttcccgttttattccattttaaaaataaaattaattttcttccttgattgtccaataaaattatttgaaagtgttcaaagaatgcatttccttcccctaaacttaccttaatttccgattccttttttggggtgcaattctccgccgtctttgagttgttttttggttttgtttgttttttgttcctccccaaatcaggccgaaacgagtgcaatattacaaattgtgccgcttttcaaatatggcaaacgtcacagcctgactgagaggaggaagcactttggaggagtgaataagagaataaaataataataacaataaatatgattaaaaggaaataatgttggcggctttgaatttttctgatcgaattttgggcggaattcgtcatccatcgcccgcattcattcgttgccacaatttggccgtggcctctccaccccttttttcgcgtcttttgtccgtccgtccgcccacttttctccgattggaacttttgagggtc

SEQ ID NO: 91009 - DNA, 307 bp, Heterodera glycines
tgtattagcgccgatatctatggagaattatcctcgcgagaggccaatttggttctgtgagtctgaagatgacaccgttttggcactgcacgagaagatcaccggccaagttgaggaagaccccgatcattacctgctacatttactggtctcctgactttgttccgtgcacaatgtgagcatctctgcagagctttccgcaattgcacctcctaacgcttgtgatgaacgcgatgagggaaacggaagcgaattggatagtgcggtggacgacgacgagactgaggaagacttggagatggaagac

SEQ ID NO: 91010 - DNA, 279 bp, Heterodera glycines
gtcgggacttatgggtttaaagggggcttaacgcctaagtaaaaaaacaaaaattgggtgggaacgaaagagacgaatgaaacggaaaagcatcagaatggctaaaaaaaaataaaaattttaaaagccgccttcgttttctctcagatggccccacaaatttcgaattgaaacatcggcacaaccaaagcatcgatttgtcctcttcactttcgctgttttctatgcccaaaattccgtttaacaacagcagacaaatgcccatttgtgcgcagtgtt

SEQ ID NO: 91011 - DNA, 617 bp, Heterodera glycines
gccgtcggcgtaggctcaccattttcctcgggtacacctccaatttggtcacttctggacttagggagacatttcgctatttgctggagcatgaccaggtggactgtgtggtgaccagtgccggcggggtcgaggaggacattatcaaatgcctacggcccacctatttgggtagtttcaaaatgccgggcaacgaacttcgtgccggcggcatcaatcgggcgggcaatttgctgatcccgaacagcaattattgcgcttttgaggaatggctgaacccaattttggacaaatgtttagaggagcaacgcctccagggcactcgttggactccctcaaagctcatcgctcggcttggctccgagattggcgacaagcggtcaatttgctactgggcttggcacaatcgcatcccaattttttgcccggcactcactgacgggtcgctgggcgacatgctctacttccactcggtcaaaaatggtggcgatggcattgtgttggacattgttgaggatttgcgttatctgaacacaatggcggtccgctcgctgcgcaccggtgtgattattctgggcggaggggtggttaagcatcacatcaacaacgccaacctg

SEQ ID NO: 91012 - DNA, 637 bp, Heterodera glycines
gtgctgaacaaagctttgctgtcggattcggccgcccaagctcaggccatggacataagcttcagaccgcatgattatttggttcttctggcaattccgaattcttttgcacttcgcgcagcgtctgaattggtcaaaatgcttttggacactgcccaatttggttttaagggtgtgactgtcgtgcggcagcccaccttggtactgtattcgtatgatgtgaccactggcgttgttgtggaccttggcgagcggttgtccattgtgccggtcattgatgaatttgtcgtggatgacgctgttaaaatggcacattttggtgcaccacaaattcgggaacaaatgctcaagggaattggtgacaacctgcagaaagtgttggacatatttggcaatggcagtgatgacgacgatgcaagcatacaattgctgttacgatacatcgttgaaaagtcatgttacgtcgctgccgatgggattgaggaagagcgggccaaaggaattaaagacgaattggttgaatttgttggtcaacattcattaaaggtgaatggtgagctaaggttcatggcaccggcaggactgtttaggccacagttatggggactcgaaatgccggcacttcaccggatggtcc

SEQ ID NO: 91013 - DNA, 630 bp, Heterodera glycines
gtaattttgaccatggcgtcggccacggggttggccattttctgaatgtgcacgaatatccaccctacattggctaccgtgtgcagagcaagtacaactatttgcgcaagggtgtggtggtgaccattgagctgggctattatgcccagggctcgttcggcatacggttcgagaactgctacgaggtggtggatgccaagggcacggcatcggtaacatcaaaagcaacagcatcaagacgacgacaacaagcacatccctggtggatgccaatgccaagggcacggcatcggtaacatcaaaagcaacagcatcaagacgacgacaacaagtacaacaacgccttcaacagtgccatcgtcgcctgctgagggcaatgccggcggcagcaacgccaagggcagcggcgacgcggtcagcagcagcgacagcagaaagttcgccatgttcgctccgctcacgtttgtgctggtgcagaaatcgttgctggtccgtgaactgctcgaccagcacgagattgattggctgaatcgataccacaaccaatgcctggaggcggtgggtcgctacttgcaggagaaaagcatgcaggaggagtacaactttttggccgaggcgtgcacaccattc

SEQ ID NO: 91014 - DNA, 548 bp, Heterodera glycines
caagtttgagactaaaaattccattcccttccattagctttgcttttgcttttccttcttcaaaatgccttctctcgacgaacgtttcaatgctgcggttgaaattgtgcagaaattgccaaaagaaggcccccttcaaacatcgaatgaccaaaaactgaaattctattcactgttcaaacaggcgacaattggcaacgtgaacaccagcagaccgggcatgttcagtctggtggaaaaagcaaaatgggatgcatggaaatcggtggagggaatgagcgctgaggaggccaaggagaaatacattgagacacttttggaaaaatttgacgatgctgggactcaggtggacatttcggattggctgtccaaaattgacccgtcaatcagaaccaatttggcgctgctcggcaaaaacctttgagccgaaaaatcattggacgaatgtgtggcaccacaaacagagaatggcgttgtctttaagacaaaacgatcaaatgttgtcaaaattaattaattattcaagaaatatttcatgtgtaaaaaaa

SEQ ID NO: 91015 - DNA, 412 bp, Heterodera glycines
gaaattcttgttctttgatcgtgtccaaatgtatgaacagtaccagcagcagttaccgcattggacctcaatggtggaaaaagcctatttatcaaagtcccgtggtcaatccattggagcgtgggccggatttcagttttgtggatggtcgtaggcttcctttcaccactgagtcggaatttaatcggagagtgaagcaagtggaattgggtaggaaagttgtgcaatatttggcagaaatactcctcgcggaggagctttacaaagaaaacaacttacaaagggaaattgtgcaacagaaaattgagcagaacatgccgaaacagaaggggacagaagaattattctgagttgccattagttcattttttaatagaaaatttatttttaaaaaaaaaaaaaaaaaaaaaaa

SEQ ID NO: 91016 - DNA, 525 bp, Heterodera glycines
gtgcaatgggctgatctgatcatttcgaagactcgtcggaattccattgtccagcaaggcatgtccaattgggtgttgaacatcggcttggtcttcgagactttgtcggctgttttcctctgctactgtccgggtttggacaaaggtcttcgtatgtacggactgcggtaagatttttttttctttttttgtcacattttcatcacatttcccaaggttttcgtggtggttccccgcattgcctttttccattctgattttcatttacgatgaaattcggcgctttttaatccgtcgtttccccggcggatgggtggagagagagacatactactgaagaaatgacagtttaatgtgaaaagttcaacaaaacataccttacattttatctctttagcttttatttttgtttcaaaaattgcaaattagtcagttgccaattaacatacccgattttttcgacttgcatacccgtaaccaatattgtgtacttttggctcgcaaataaactaatcgctttcaaaa

SEQ ID NO: 91017 - DNA, 117 bp, Heterodera glycines
gatatcaagaaaattttggcagcgcctaattgtcaactaaaaattatataaaacaaatttgtataaataaatacgaataattttcaaaaaaaaaaaaaaaaaaaaaaaaaaaaaaaa

SEQ ID NO: 91018 - DNA, 622 bp, Heterodera glycines
gtttgaggtgtaattactaattagttgtttttaaattcatatctgtcgttttttggaatcgaatgtctccctcaactaacaccgacttagtcacgccaaattatattgctgaaattgttggagttaatgagactgtcgccccacaacagcaattgaatttgctggtggaagatgcgctggactgggcccactgctttggccttgtgttacgtacaacggaacataaagaccggagcgatgtttgccaagcggctccatttgcgcttttctcatcgcctttcccgcgtaatctttttgacgaagcaatggcggtccaaaaggatttgaacttgttgtattttcgtatctcgtgggacttggaatttctgaaggaagcacaccaacacgtgatcccttccgatgcattcactcgaaaaatgctcgaaattttggaggatgtgcacagcggtggtgtcaaacagcatatcactctgctcacacaacgcgcggattacatgtgccatgtaacaacaattgatgaccaaacagagacagcgaggcaacagcaattcgagcttaagcagattgaggtgaataacatagccgttagtatgggcggattggctcagcgtgcttccgttct

SEQ ID NO: 91019 - DNA, 621 bp, Heterodera glycines
aacgctttgccaacctcggcgccgtcctctacattttgcagcgacttcaccgactccaccccgacggcttcaccgtggcacaatatgtgcagtttgagaatcgtcagaagcgagctcggccgacctctgagggcttttttttcaacaacactttgccatcggtggcttcgttgttggaatcggacgacgatttgctaagagtggacataaaggaagagaagttttacgtgtcggaggaggtcactctgacgcacctcttctgtctgagcaagaatttgtgctccaatttgttccgtcttttgcgtcgctgcagctccaacaatgccatccgcgtccagcatttgctcgaaatctcttcccaattggtgcccatcggcgcccccatgcccaactccaacgctttggtcgacctgtgcaatcgcttcccgaccattttcaaattgcgttgttcgcctcaagacaattatcgctttgacaattcggtgattatgctcaacgaacagttgctggacagcgagaatttggcgtggcgcgtcgttttggacactgacgaattttaaagggtgaattggcgaagaagcggactctgaccaaatttgccataaaatctttttgttgttt

SEQ ID NO: 91020 - DNA, 366 bp, Heterodera glycines
ggaagcaatttggcatgtgcccgggcgtgggccaatgacggaagaacaaatgcgagtgttcatggagacagcagctcctcaagcagcgacagtgacgaatgaatgacgtgacgcgtggtcggacgagacacatggagaaaagtggctatcggtatggacgagaatttttgcagaggatactaattaaatcacggatatgtgcccatcacagagagtgtggctcccctttgtgtgttgtataatgaaattgatcccccgtcaaatccatccgattgtatgtatataatttacccactgatccaccatttgatattaccaatgtctgaataaatgccattgaatttccctaaaaatcaaaaaatataa

SEQ ID NO: 91021 - DNA, 630 bp, Heterodera glycines
acgcttcttccacggcttttgccgcctccgctgtgtttcctgatgggcctcgttcgcaagcggaccaatggcaggaaatggccgtgctggcggaggcacaccatttgagacaacaccaaaaaaggctggaagagagagggattgtgctggaagatcaaaacagacaattgcaaatgcaattggaaaggcttcagatgctaatggcaaagaagggaaacgccctccaaacactgccaacaacagaagagcaacagtctcacaatcagcccggctttatctcctcaaccgacgcggaagacacagacatggaaatgcttgcgctggcgatgccaatcagagagattaaagcgatcggaatcagttcaggccaattgggcacggaaatccgtcgcaatcggatggacaggctgagagagacggtggacgaattgaacagggccatggagaactttgtggttttcacgcaaaattgtgcccagaaggagcagcagcaggacacggacgacagtgggacagcagacaatcaccagcaaacggtggaggagttggagaggtagcgagggaagtgggggaagcgaatggatgagaacgaagggggaagcggaaagattggaaagagccggaggaagt

SEQ ID NO: 91022 - DNA, 634 bp, Heterodera glycines
ttctcatcgcccattttaaaccgacggtggaacagcgaatttgccaaatgattgagggcgtaataaacggcgatatgaatgccgttttggcgacgatgccactgaaagtgcgcatcaatgaggacaatttggacttaatcggcagaaacttcggaattagccccgaccaaagcaaaaattcggagataaaaatatcaaaaaaactgcaagcgccacgcaatttcacactgctcaactttgtctctcagctgagggacagaaatttggtgctcgacttttcactgatcgacgaccctttcgttagtcaggggacagttctgatgaaatcgcacggcgaaatttcgtacgatggcctcggggaaacgccatttgcccctccgaatgttatcattccgcaagcgcagggcgtttttatggccgagttttttggcactgattttgtcgccaattcgatgctttaccacgcattcaaacaaaaatatatggacgtggtggttggccctgaatcatcgccacaactgaaggatgttctgcttacgacttgctcctcgggcttttgcatcggcgaatatttgggctctctcggccaacaattccccggccgtcaggtcgaaattcagttcagcgccaaaaa

SEQ ID NO: 91023 - DNA, 626 bp, Heterodera glycines
gctgagcaaattaattgatggccgatctttccaggagccttacattttccagattcgttcactcagcgacattggcacttcaaattggaaacagtccaaacgtttggccgaccctttgtacgaggagccgacggagtttgaccagccgaacccagtgggacttgctgagcaaatcccccggaatgatcagtttagttcagtgggctttgctgcttcagccttcggctcagcgacggcgttgtcgagctgaaagcatttgagaagaaaagagtgccggaccttccaacaatcgcctgcccggggagcaaagtaaaattttagtttacgggaaggttgaattgtgccgtgggtatctttttttgacgaaagaaaattgtcaattgcttggcggacaaaaaccaacgcaatgcgtgccgacggtgccgcttcgacaaatgtctgtgcaacgaaatgcgtccgggagcagtctaattagagagggactgaattgcgacgacacgacggaatggcaaaagcccgaaagccgttcaattggagagggtccgaattgctttgacacgacggaacggcaaaagcccgaaagccgttcaattggagaggggccgaattgctttcacacgaaggaa

SEQ ID NO: 91024 - DNA, 625 bp, Heterodera glycines
gtacgcgctgccgtagctctgtatttcgcttgccgcaatctatcgccccgatcacttcgtcgcgaatcctcaacatggacaagttcaaggagaagctcaacctgctccgtgccgaagccgatgcggccaacgcccgcgccgaccaagccgagctccagctcaagaaggtacaagagcagcttgcgtccaaggacaacgaggtcaattcgctcaataacaaggtggcccttttgcaactcgataacgaacgtgcggaaaaacgcattgaccaagtcaagactcaaaatgccgccgagtccgacctcaagtcgcaaatcgacgccctcaaccgcaaggtgtccttgttggagaaggatttggccacggccgagtcggcattgaaggttgcgcaggaaaaggtccgcacccttgagctctcgtccgagcaattcgagcgcaaggccaacaacctcgagcgcgagaagatcgagctggagaccaagctggacgacatctcggcaaagtacgccaagaccaagcaagagctcgaggacacgctcaagcaactcgaggagctgtaaatgcagcgacacccgtcgtgttttcgatttagcccttttcctattgcctttccttgcccgtctac

SEQ ID NO: 91025 - DNA, 432 bp, Heterodera glycines
  unsure (1)..(432): unsure at all n locations
cttcttcgtcctaccgtaccctttgtgtccctctcccttttcctactgttgttccttttcatcgcttttccttccaccgatggcttcggagtcgaaagggctgtacgtgataaacgcggatggccttgggattggatcggcaaacaagcatgcaaaacagcggcaaattgcaaatgcaaggatggcaaaagttgggccaaatgtgtaaagtcggaaggctacgcggccagcaattgttgcgacaaaaattacgtgtgggcatgttgcgggaagaagcccaaacattgatgagagaagagaaagggagagaagaaaataaattaaaggataaaaagattatggctctacgaccttatatcaccgatcaattatttacgcaataattaattaattattaaaaatgacaaagcnnannaaaaaaaaaaaaaaaaa

SEQ ID NO: 91026 - DNA, 621 bp, Heterodera glycines
aaaatctagaatttatttgtgccaagaccaaaacttaaggttattagtcttgttcggatcttgaatttcggtcgtattcaattgatatcaaccaataatgaaatttctgaaaagatgagatgacttggtccacacgtcccgaatgccaaagaaaaatctaactgtgtacgtatttttatgtataatggaaagtttgcattaacgtgtagtgttttatttttttccaactgtgtacgtatttttatgtataatggaaagtttgcattaacgtgtagtgttttatttcacggagtcatcatcaatacaattgtaactggtttgttacctataataaaattagtctgattaataattagctgttcttgaaaacttatactccacacagaataatactaaaaaatatcacttccttaaatttaataatatggacgaaatatgaatagaagaaaagagaaattcacgtgcgtctcatgtgaacacattaactctatactttcgacgtttccataatcaaaacaaaaaaccattttcaaatgaccaaataaataacagtcaaaaagtttacaaaagaagtaaaataaataaataaacgcaaacctcaaaaaaaacaaaaaacaaaaa

SEQ ID NO: 91027 - DNA, 255 bp, Heterodera glycines
caattgtcaactactcctatcggaaataggattgactacgtattccagccatagcacatggtttcataaaaccgtacgattctcccgatctaaatcaagccggttttacatgaagaagatttgactcggcatgttctattcgatacgggtaggagaaacggtattcttttcttaaacttaaaaaaatagagaaataagaaccaagtcaagatgatacggattaatcctttattcttgcgccaaagatcttcctat

SEQ ID NO: 91028 - DNA, 630 bp, Heterodera glycines
ctctcactcaaacgcatcggttgctgcaaagacaaatcttttcaaaagttgccaaaagagtgtgccaacatcgcaaatactcaactccatcagaattatacgcaatgcaagcctccaaaaacaacaattgtgtcgactcaaatttcaatttcttcgatgcgtttgacttggacagccaattgacggaggaagagcgcactctgagggaccaagcgcacgcgtactgccaggaaaagttgcagccgcgggtcacgcaggcattccgcgaagagaagttcgacccttctcttctgcccgaactcggtcggatgggttttctcggcgcgccttacaaaggttacggttgtgccggcacttccttcgtcggctacggtctgttggcgcgtgagttggaacgtgtggacagtggctaccggtcgattgtgagcgtccagacgagtttggtcatcggtccgatcgtcacttatggttccgaggctcagaaggaaaaatttctgcccaaattggccagcggtgaattgatcggtgccttcggacttactgagcccgaccacgggtcgaacccggcggggatggagacgaaggcggagtgggacgagcagcaacagttgtacaggctgagcggctcta

SEQ ID NO: 91029 - DNA, 640 bp, Heterodera glycines
cctcgtgccaagtttgagatgtccacgaataatcacaatgactcttacgcttctacgtctattgaaggtcttacaaaacaaaacaataattgcatccaatcggcccgtaaatttatggtcaagatgcacacacaagacattattgggatttttatcttttttgcccttccgattggatttttatatgccgtaacttttccactttccctttcgtttgacccgttcagcaagggttggcttgtgtgggtcgtcccctgctcacttctcggcctcaatgtttacttaaacgcgctgatgatgttcaaagtgggaccgaattcccagcgcaatgttttgccgtcggtggtgaagcgcgactttcacttctgccacctttgccaatcgaattcgcctccgcgttcatttcactgtccggtttgcaacttttgcgtcttccgccgtgaccaccactgttccttcaccggttcttgcgtgggtcacttcaatcagcgttattttgttgccgctgtatttaacctgtggccagtcgtgttttcatgctgcgtttggaattggcatgcgcttttgctcgccttctctccgatcagtctgtccgactttctcaaatgggtcttcccgcacatggctttgctgttccgct

SEQ ID NO: 91030 - DNA, 214 bp, Heterodera glycines
tgactctcccagacccaagcccatcacccaatcagccggcacacaaacgacgccaccgatcgcttcaacgtcacctttttcctcgacgacgacggtgcgccgacgtgcccactcattggccgacttcccgcctctttacaatttttcccagcgcccgttgactcacattcggcacagcagtttgggtgaaaacagtggagcggacccaaatttt

SEQ ID NO: 91031 - DNA, 634 bp, Heterodera glycines
catccatcttcaacagcaattgtgcaacatccagtcattacttgggcattcatcacacgcttgccccaacacacaactctagtgatgtcggccagtcagcgtggctcaacttcccaaccctccggctctaacggacaaccaacgccttcaccggaccgacactggagttcgacaccatctctcctgaacgtgcttcagtccgctgttgaccgtgcggctactttccaaacgacggctcgtcctcctccaaatcccaattccttggccccacctccggtggttgtcgaagggggttcagacatggaaccggacaaagaagaagatactgagcaccaaaataagggcccgaacgatgacgaagtcgctgatagtcaggagtctggcggcaactctgatgatcatccggatgatgcgggagacaccaattccgccggtttattgactcaattggcagcagcacttgcggtcccggggacagagcattttatggggacgctggcacaagacttgcatggattgccatctcgtgagaaggaccgattatttgccgccttattgattaatatcgcctatcgtcaggcaaatcctcctccacctccaccggccccctctgccatcgaccccgacctggccg

SEQ ID NO: 91032 - DNA, 484 bp, Heterodera glycines
gacgagggcagactcgcgcccgaaatgatttcgattgtgaaaagaaactcatgtggaaaagcgttggaaattgcgcgaaaagcgcgcgacattttgggaggcaatggaattgtggacgattatcaggtgatgcgccacatggtcaacttggagtccgtaaacacttacgaaggcacccacgacatccacgcactgatcctcggcaaggcaatcaccggacaccaggcattccaatgagaagacgggcgggggacggacgaccaaagcgattgtcggaattggggaagtgttgtcgggttgagacggggaagcgaagtgaatgaatctttcttttgccctctcaaaaatatcatttggcacttaaactcttactttttttacggatttttcaatgccaacatttgccttatgattggaatgtttttacaaattattaggccaaataaatgatatttattcaaaaggctgcagacaaaaaaaattt

SEQ ID NO: 91033 - DNA, 430 bp, Heterodera glycines
  unsure (1)..(430): unsure at all n locations
atttttattacggcctcaactgtcccgtggttggcgatatgaagtacgtgaaggcgcacctcaagtgcgacacggtgttggagacggccatttcgcccaatgcaatggcggcactgtcgctgcgcaaaaatgacgtgcgcaagctgccgatgtttctgcaccgtgccgaggtgcacctgccgtggacaaaggccagcgacggcaccgtcaactcatttcacatgatccgtgccgaaatgccacccttttttgtgcatgcgctgaagaagcttcatctgctcaggaaatgagaaggatggcactgttgttgtttcactttttgctcaaatatttaatttttgaaattttatttttcattaaaactattgttacgcttacaaaatgtatttctcaaatttttaaaanaaaaaaaaaaaaaaaaaaaaaaaaa

SEQ ID NO: 91034 - DNA, 332 bp, Heterodera glycines
aacagaacacagcgaaagaaggcgaagaagtgacaacccaaaacatcaacaaactgtgatcggtgttttttccgcgttttaaatggaataagggagcgaaatggcggcagctgtctccaaacaccgaaattatccccaaatccctttgtatgcatttttcacccattcccatgtagaagtcttccaaatactttaatttcgactttttgactgatgttcctaaaatttttgtatgagcaacatgaatccatcttcgagcacttatcattttgaataaatcctgtaatattaaaaaaaaaaaaaaaaaaaaaaaaaaaaaaaaaaaaaaaaaa

SEQ ID NO: 91035 - DNA, 636 bp, Heterodera glycines
gtcgaacaaaaactcacttctgtccatcgtgaggggttgtcaacattggaaaatgttcagaagcaaatgctggaagagcgagggaccatctatctaaaggccgcacagttttgtgccttcctgaagaaatgggcgctgaagccgtacaatgacagcatggaggcgtacatcaacttgtctattaagcaggcagaaaaggtggtctcggaatgcaaaggagaagcggatgagaatctgcatgaggacaaactgaagggacttcgagaatctctccgtctctaccgagagcagaaggaactcattgacaatgcaactgcggacgattccaatggtccaaatgtgatcacggctgagaatgtgaagaagttcttcgatgagttgtgcgatttgccagtgtttggtgcagacattcgacaaatgttcgagacaaagcaaaagtcccgacatgagcatcagaaagagtactccgagaagaagaccaatgttggggtgaagttgaggccaaccaaaagtggaaaagtcgtccaaccggaacagtgctggaacgaagagcagcgaaaactcttgaagacctacgagaagaaacaaaaggaaatggaacagttggagcgggagatggagaatgagaatatgctg

SEQ ID NO: 91036 - DNA, 640 bp, Heterodera glycines
aaaacaagtaaatgtctaacaacaaaaacactctgtcgcttcaaaactccgaaacttcctcgtccgcttcttcttcctccccccgtccaacgtcgccgaacggaattatgaacgaatacgtcaaaagtgctactgagcggatgatccatctgagtgtgttggaggtcggccgcgtgggcaacgacggcgttggcattgtgcaactgcacaacaccttcgacttcggcgcgtcggacgcgcggcggacctgcgcttgttgtgccgttctgtgtgcttccgggtgcgggtgcggccgtttgctggcggaagagaccatcttcaactacgcgaagaatggcatcggtgcaaagtttgggagcggaggccgaggatttgggcggagatttggtcgcaaatggcgcaagaatggaagggacggacgcctcgaaacgattcgcgaagggacgtacggaagagacacggcaatcgaacagaacggagagagggcgggacacgggacggtgcagagaggcggcagaagacgaggagtgaccgtcagaagaaatgagatgcagcggcaggagcaatcgatcggccagagcgacttccgtcttaaagcgatcagcggacaatgcgacttccaatggcaaccgatcggatg

SEQ ID NO: 91037 - DNA, 625 bp, Heterodera glycines
gtttgagcatttgaattatttttaattttctatttaaaaaatgcttccaaaagaccttttttcactttatctaattgttgacccaattctgtgcggtggtcattcccattctgtgaagttgcttaatgcggtcatcccttgcggggtgaaaatcgtccaactgcgggccccgaattggcacaaaggggcaattttggcacttgccaaagatttgttgaccataacgaggccaaaagggattccgttgattatcaatgaccatgtcgatgtttgcctggcctcgggcgctgacggagtgcatttgggtgccaacgatttgccggttgagtctgcacgtgaactgcttggccccgatgcaattttgggctattcagtgaacaatgaaaaagcattggaacatgccattcgacttggccataaaattgattatttgggcgttggaccggtatttccgactgcgactaaatctgaccacgcgccaccacttggaattgaaagacaacgcttaatatgttcaaggtcaattcatccaactgttgcggttggtggtatcaatgcgcaaaatgctgccgaagtgatggccattggagcgccagatgcattggcagtcatttcggcaatttgt

SEQ ID NO: 91038 - DNA, 403 bp, Heterodera glycines
  unsure (1)..(403): unsure at all n locations
cgaaagccgaatgcgaaatttgtcacaaaaaatttggacgcccgtggctgctgaacggacatatgcgaacacacagcggggacaaaccgtacagctgcgaaaaatgtgacaaaacatttgcggaccgcagcaattgtcgtgcccatgaacgaacacacggagcggaaaaacccttcgaatgccctcgctgcaagaaagcattcaaagtgaagtcttatctaacgaaacacaagaaatcatgcgggaaaagtgaatcgaaatttgatgattgatgttttggtgtagttcgtctttctatgacctttttacggactttattctcatcttctcacaatttgttctttttttcttcatttgtattatgtgaatctcttttatgcaaaanaaaaaaaaaaaaaaaaaa

SEQ ID NO: 91039 - DNA, 313 bp, Heterodera glycines
cattattcaaaaatgtgcctcctccgttttcttttcaccctttttctgatcactttggcaattttggccggcacccacggcactaatgagaactcagtgggtgatgagcataatgcggcatcgtccattgtccgtgaacgccgaggcgatcgcccgggacattatcgaagcaaatgaaagatgatgaggttgtaaatggaaaaggaaaaaagcagcaattaaaagaaaaatttggaaaatatgtttgtcgaaatatgttttacaatttgcataaaattgaataaaaataaaagaaaaaaaaaaaaaaaaaaaa

SEQ ID NO: 91040 - DNA, 630 bp, Heterodera glycines
ccaattaagtattttttcccatcggaaccacaattctgcatctttgcccaaagcatttcttcgtggatttcttgaatgtctctacattttcctaatgccaaatggcaatgatacgagtcaatttgcgtaacactttgcttttcatcatcgtttcttccttcgtttatcttgcttttttgatttggactgccaaagaccgagtgccgcagtttgaagtccaattgagagatgttctgagttatgttgttttggcggtggaaatgggcggtcatgccattgtccgtacttttatggaaaagaaacaaattcctttttccgaaaagggccaaatggacgtgggaagggccgaactgcttaccaaggccgacctcatctccaaccaattgatgctcactttgttaggccgatttcctttcctaaaggtcatttcagaagaaaaatcggaatttttgccggaaaaagagaccgaaaggtatcgtgccgataactacgaactttggttgggtctgcgcgaagtattgtccaaattcccatcttggcgaattccgctagcccgggtgaccgtttggattgacccgctcgatgccacgcaggaattcacggaaggtctaactcaattcgtcactgtga

SEQ ID NO: 91041 - DNA, 222 bp, Heterodera glycines
cccaagggggacctggtcacaacctctactttatcaaatgccaaaaaaaagttgagcaatataaaatgacccctttcaaggtcttgtactaaattaaacccggaaaccttgccatatttttaatgggtatatcggttttattcggtaaataggaaacaggaaaaaaatcaaaacaggaaataaaaattcagagatctcttccgaaaaaaaaaaaaaaaaaaa

SEQ ID NO: 91042 - DNA, 244 bp, Heterodera glycines
acagaagaaattcccggatgcaaccggagaccttgaccactcttctgaccagtctggtgaccgctgctcgaagcgatctcttcggctgaaccgcaaggcgggataggcacaattgaacggagtcgctggaaatgtaaatgtgcaaggagaagacatgaagaaatatgtgatgtcgctgagcaacgaactgatgattaacatggtgaagtcgacatacgccgtttccactttggtttctgaagat

SEQ ID NO: 91043 - DNA, 626 bp, Heterodera glycines
atttatcgcgaaacagtcggttcccggctattggcgcacatttacgtccaccacactgccgaggaattatggcgtcccaatttggcatggttggagcgcgcgacgcatttggcgttgcctcggctgatgaagcgacaaaaagagatggacgaatgggcactaaaccgtaagcgttgtttcgtcggtttgccacccaatttgttgcgccattgcgttttgcatggaattcgtccgtccgatgtccaattgagacaacttttggacgaacagtccggaccgaacgccgtcgtcgatccgtgtccgccaaaagataatcgacgtcaaaggtacgaaccggcgaatttggatgatttgctgcaattgcacgggttaaatgtcgaggacagtccggcgatggatggcgcgctgcagggatttgtcggcactttcttgcgcactttgcttcccgaccaggaacaggcccgcttggactctttaatccaagcattacgccaacgcattggttttgacagtggcggcggcggtgggccatcagctgacaatgcgacggccgaattgggcactgaaaatgagcaggaacagcgccaacaacagaacgatgctcagaatcagcagcagcgaaatga

SEQ ID NO: 91044 - DNA, 271 bp, Heterodera glycines
gtcgtcaatgtctgccgtcgatttgttcttcaaacaagaatatttgcaagtgacctttcgctactaacagcgaggggcgcgctttgcccttctgcgactctctgacaatgaaccttcaatcggactgatcgctgcgtcagctggcaatcacgcactttccctggcttaccatggcagcggattagtcatcccggtgactgcggagatgcagaagttcgcccctctaatgaatatttcctgctgtgaatcatacaaggacgccttcattctt

SEQ ID NO: 91045 - DNA, 343 bp, Heterodera glycines
ggcttctactattacgcacgtggtcttctaccttgatggtgttctgatcgacactgaacgtcattatacaacggccaacgagcggacgttggataaatttggagcaaaattcactccataaatgaagctcaaaatgatgggacacaaaaagacggaggcggtcacggttttgctgaaagatgcgaggatagcggatcgcgttacgatggaccaatactttgcggagaacaacaaacgcttacttcatatcatgcacgctctttcggaggaattgcctggtgccaccaaattgatcgaccatttgtacgcccacggcgttcccatggccatctgtacgggatcg

SEQ ID NO: 91046 - DNA, 471 bp, Heterodera glycines
  unsure (1)..(471): unsure at all n locations
ggaataatcgccatgaagtccatcgctgcctacctcctcgtctgttctcggtggtaacgagtctccctcggttgccgacgtcaccgccatcctcgcctccgtcggtgttgatgccgatgagcagctcgagaaggttgttgccgagctcaacggcaagaacgttgaagatatcatcgccgagggcatgaccaagctcgcctccgtccccgccggtggtgccgccgccgctgcccccgctaccggtgcctccgccgccactggtgcttcggctgcccccgctgctgcccccaaggaggaggagaaggaagagtccgatgaggacatgggcttcggtctcttcgactaagcgtctctttccaatccaaaaatccttgttgtctgtgagcttgttggatcccctgcaaatccagtgtcggaattccatacatcccactttcaattttcgccaaaaaanaaaaaaactaataaaaa

SEQ ID NO: 91047 - DNA, 591 bp, Heterodera glycines
gttgtggcatgttcacaggtggcggcttcggatgtggcatcagcaattgcaccaaattcacataagtggtggagggcggctgatcatcttttgaataagaaaatttattgaaacgaaaacattttcggcggtaaaaaaacgtttgaaaaaattccaggcaaaaaatggggttaaaattcaagaaaattttgcttcaataaagaactcggtaaatctcatgatactaatggcgctgcggtttagtcgagtcttgaagacaataaaatgtcaaaatgttcgcttgagccaagagaattccaggccagggaattaccgaactaaaggggacccaaagtgcccaaatttcctcaaaacccaattctcgaaagcatcgccaattttggcacctttgccgaactgactgctctccttccaatgccgtcggttgctggacatcattgaagatgatggtattgcttggtggtgctgctgttttttgaatccggcgccgactaagccggcgccgctgcgccgggttcgactccgaatcagaaacagtccgagcgccatcagcgcacatgcaacgccgcaggcaccgaacaccgccctgga

SEQ ID NO: 91048 - DNA, 611 bp, Heterodera glycines
gcgccgctttgctccatttttttcgtgtcgcgctttgttattcggtcgacggaataacctttttgccgtctcgccaaaaaaagttgcaatggattcccaaagacgcaaatgaccgccacaactggaagttgtgcgtcactttaaaagcgattatcccttcgctctccccactttctgcgccttctccgcccccaatgtcttccgcctcctctttttcgccgacaaattccgctagtgaaaatagctcaattcgctttgccttgcccatcaatcaggcgaaacaactgctgcattgccttgaacagctccaaattgatggtggcagcgacggaggctgtgccggcaattcggatccattgaatgtgcatcagcaaagattgtccggcccattgttcggcttcaaaaagagcgcattttatttgagtgtctgccgtccgtccaaagcactgtcgggcaaaccgctcgtatttctgtctgaacaccaacttttgcccaacgaatttcacgcctggcattcggtggtcaattcccttccattgtccctgtgctgtttgcccgaactgcgcaaatgtctccgattggtgcttgaacagcccgaggcgacttcctct

SEQ ID NO: 91049 - DNA, 388 bp, Heterodera glycines
gttgtccgtgttccaattgcttcttgtttggacaattatattgggatttcttctgccatttgtgttggcttttgcctttggagccaaggacacagtttattccgtctgggcgagtgacggctcccgcgagctcacactccttcaagcgtatttactcgcctccgttttctaatagatgggcgctgcccttttggagtatcatgtgactgacacaatgtgctagggagtgattgacctttacatttactatggacgctagtaggaactgatgttgggacagatcgccgtgtcgaccgggtgtggcgcttggctgctcattgccactttctagtagattgacgtctccaccacggactctattgttgggggcaccagtggatattcaatg

SEQ ID NO: 91050 - DNA, 616 bp, Heterodera glycines
cgcacaaattcgatgctctgagaatggtgccattttacgacaaattttacgatgaacgagtcgaacggtgcatggacctttatttggcgccacggcaacgcaaaatgaggctgaatgtggacccgaaacaacttctgcccaatttgcccaaccccaaagacttacagccttttcctactactttggcattttatctccggggccactcgggccaagtgcgtacattggcagtcgaacctgaaattggcgaacttttagtgtctggcggagcggactctacggtccgcgtttggctgttgcccagtggcaaatgccttcggctcttcgaaatgccagcctcggtcacttgcgttgcgttctgtcccaactccaaccgaacactcactttggtctcttgtgagtccgacttggtcactgtgcttaacattcaaagtggcgatcggttggccgtgtccaacacgcgccaattcatcgccggaattccttttggcactgagaacaccgctggcgttctatggacacacattcacagcaaaacgatgaatggaatccgaataaaaatgaacgacaaaatccgaagtctttgttggcacaaaagtggcgattatttcgctac

SEQ ID NO: 91051 - DNA, 239 bp, Heterodera glycines
taatcagccgcagcccgctgtccaagatgctggactactggccgctaaccaatacatgcatcttctttatggtcaacttcaacgcgcgcaatcgcaactgataatgaccaacgacaatctttcagaggaattttcacgagtcgtacgtgtaaatgccgttttgaccagacgcattgaccttctcacacgttcggctccacagcatcatccgcacaatgcggtcgatgctttggtcaacc

SEQ ID NO: 91052 - DNA, 620 bp, Heterodera glycines
acagagaattttctgcgtcccctctccaaacaatcgcaacattttccgttgcttttggtcacactaattacttaattgaggcactgattggccagaaaagggactctttcgcaacttcttctcccaccgattttgaggtcatcgacgaggacatccgttttctgttcaatgccgaggaaggcatcgaaattgggctcgacttcgaccacaaagaagagattttccgaacttttccaccgcttctctctccgagttccaagttcactttgaaatggcgttgggttcgccttggcatcgctgccgatggccgtgccaaaaggacgagtccccccgctgagctgctcttccgtgggcccaatggcaccgttttccacaggatggccctgccttcttacaattctttctccggcactcaattcgcacagttcgaatttggccgtttttctggcgtttcccccggtgtttggtccgttgctttgcatgccaacaattcccttccgattgcctccctttctttccccgtctttcccgacccatcactcagcagcgaatgggccgagcaaagaattgttcgattaatcgacgaatttttcaccgtccgcgacttttgctcagtcact

SEQ ID NO: 91053 - DNA, 418 bp, Heterodera glycines
gcttatctccaagggcgaccgcgagcaaatctaccagtaccttttcggcgagggtgtgctcgtcgcccgcaaggacttcgagttgccccgccacaaggacatccccgtgtccaacttggccgtcctcaaggcgtgccagtcgctcgagtctcgcggtttcctcaagtcccagctctcgtggcactggttctactacaccttgaccgatgccggtatcgagtacctccgcgagtacctccacatccccgccgagatcgttcccgccaccttcaagaatgatcgcgccgctgcctcgcgtcgcgaccgttccgagggtgatgtccgccgtccccgacaagagggcgagtgctagtcttatcgccgcgcctgaaataaagacggtgcccccgctggtaagtacaacccacacttccgagga

SEQ ID NO: 91054 - DNA, 638 bp, Heterodera glycines
accatttttcgtccggtgttttcccatttggttggccgtgcgtttcgtgttccgccggcagttgcttttccctgttttatggcttcgtcctctgaacaatccgccggtgggcagtgccaccaaaaggcgggggatggacaaacgccggccattgatcggcttgaaggtgctaaaaaagacccaaaggcagtgacggaggacgaatggcgcaaagtgttgtcgccggaggcgtttgaagtgacgcggcagtccggcacggaggcaccattcaccggaaaattcgacaaacatttcgtagccgggggtaaatacacttgcgtgtgctgtggtgccgctctgttcgtgtcggagcagaagttcaactcggggtgcggatggcccgccttctccaagtccattggggacgatcaaaacattgtccgactgcccgacaattcgtacggccgtcaacgaatcgaagttcgatgtgccaaatgcgacgcacatttgggccatgtattcgatgacggaccgccggccgacggtgggcagagatactgtatcaacagtgtggccattgactttgtgtccgggcaacagaaatgaggaaattgagaattgccctttccgctgtgatccgtcattgaccggtccatcat

SEQ ID NO: 91055 - DNA, 633 bp, Heterodera glycines
tttaaatttgcaaatatcaaaatgatcaatgggattgtgtctgctgaagaacaacagaattccttcctctctggcggttattcagcttcttgttcaacttcctatgttcagcagcattttcagcaacaacaacagcaacatttggcattttcatgtcggacgccactccaaaaactgacgccagaacgaatgagggaatatttgcgaaatcgagaagatctcgactgtatattggaaatttaccaccccaaagttgcacaaaaatcttatggcactgaaaaaagatttttctctccgcctccgttggtttatttacgcggccggggttggcgatggcggtggatgttgttgcagaacggaaatgacaaaatgctggacatccaaaatatccgattcagcgaattgtccaacgaatttcctgagcccatcgcttacattggcatcgtcggaagcaaagaccaggaaaagcacaaattggactggcaaaaggacaaagacggaaggtgcgctattaaatcattgcacatcagcgagaatgacaacaatcgcaagaagtacttcactctcagcgtttactgttcttacaaaacatcaatgcccggactcttacaaacattgggagtgttcgagtcg

SEQ ID NO: 91056 - DNA, 636 bp, Heterodera glycines
caatgagtgacactgtcggttccctctctgaagcattgcaaaacgaagacccggggattgagctcgtgacattctacaattcagaagggtcaaggatatcgaaaagcacacgaattcagcatcttttaagacttccctctttctacattcgtatcaacgatacgtttttcaagttcaccataaattcctttgtttttgagaacattgagaacttagaaactctggatgggataaagtcgaaagtattttctatgtacagcctaatgaacatggatgaatacaaattaaaattggaacactcacttatggaagagatagaaaatgtcgaacaaaggctcagaccgctgataatctttaggtacgatctgccattgaaaaagaatgtgaagaatacactcaacgtgtcttttggctgggattttccgcaatttgttttcaagttggcgtttttgccagattgacttggtgggaatattcatgggatataatggagccgattacttacttttctactttttcttccgtggtcattgctatgagttattacattgttacaaaacaaaatttcgaatacacttcggctcattctcgggtactgcgaaacgacttttacaaacgctccctaaaatacggttt

SEQ ID NO: 91057 - DNA, 282 bp, Heterodera glycines
ggacatcggagttcgatccatcgccgagctctggaacggagtcaattgcggtgccgtcaaattggaacggcgaacgcacagcgcacaattggagggaggcgttcactcaattcattcttatgacaaagtcgccatgtgattgatctttgcctcgggtccattaatctccaatttctcgaccattccgatatttataagtgccgtttatttaaatgttttgttttcctttattggttttccgtaataaaatgttgaaatgcaaaaaaaaaaaaaaaaaaaaaa

SEQ ID NO: 91058 - DNA, 106 bp, Heterodera glycines
gagaaacggtgtggggcggagataacgacacggaacagcacggattgtaagcggactgctttgatttgttaaataatttgatataaaaaaaaaaaaaaaaaaaaaa

SEQ ID NO: 91059 - DNA, 646 bp, Heterodera glycines
gttttgagtcgataactgcgaatataacatccattttgacattaaaactattggctaattaattataaagaaaatgtattttagggccattgtttgcttgaaatgccttccggaactggcaaaactgtttctctactggcgcttgtcgttgcttatatgagaaagtatccggtattttcacgatctcccatttaggctatttaaatttttacaggaaagactccacaagctgatttattgctcacggacaattcctgagatagagaaatgtgtcgaagagcttaaaaggctgtttcgctattataccaatgtcaccggagtgcgtttcacattttctcttttttaaattgttttctctaagtccgcccccgatttccttgccctcactctctccgctcgtaaaaatctgtgcatcaataaatccgtcgtcagttttcggtatggttcggccgtcgacggagcttgtcaacgtttgacggcgagttacgttcgggcgaaaaggcggctgaatccgaaccttccctgttgttcctttttcgaaaaatttgacgagaaaagggacatgactttgccgaagggtgtttacaatttggtgagttgattttctcatttctttcctaattgagtgctgatgcctaatcagtca

SEQ ID NO: 91060 - DNA, 574 bp, Heterodera glycines
  unsure (1)..(574): unsure at all n locations
ccttaccggacccacttcacatcatcaaaatggtcaagttcgtcaagcccggcaaggtcgctgttgttctccaaggtcgttacgccggcaagaaggccgttgtcatcaagaactttgatgagggcaacaaggcccaccccttcccccatgccgttgttgccggcattgagcgctacccgctcaaggtcgccaagaccatgtcgcaaaagaagattgcccgccgctcggtcatcaagcccttcatcaaggtcatcaactacaaccacctcatgcccactcgttacacccttgagctcgagagcaccaagtcgctcgtgactgccgagaccttcaaggagcccacccagcgcaaggaggccaagaagaccgtgcgcaagatcttcgaggagaagtacaaggccggcaagaacaagtggttctttaccaagctccgcttctaagctggacttgcttgtccccgttgcgtcattgtgcggatgggatatttgacatgagggaagtttggttgtgtttgtttgattcaaatgcatcgccttgttctctttgattgattgtgaanaaaaaaaaaaaaaaa

SEQ ID NO: 91061 - DNA, 505 bp, Heterodera glycines
  unsure (1)..(505): unsure at all n locations
acaacattggccgtgtgggcattgtcggacatcgcgaacggcacccgggttcctttgacattgtgcacatcaaagacaaagttgtgaagggcagtacaaactgtgcaaggttaagaagcaggcggtcggtgacaagcaagtgccgtacattgtcgcgcagacgcgcgaacaccattcgctacccggacccgcacatcaaggcccaatgtgcgatttgctgtggtccgacccggacgattggagctggacgacgagctcaactactccttcctgcagtttgacccgccggccgcgcgtcggggcgagccgcacgtgacacgccgtacgcccgactatttcctctaggcaaggaccagggaccgacatacaaccaccgactgactgactgaccaccaagaatgatgatggtgtatttgatggataatggaatatattctttttttgttttttaattgaatacagcaacaaaacaaacgattaanaaaaaaagaaaaaaaaaaaaaaa

SEQ ID NO: 91062 - DNA, 244 bp, Heterodera glycines
agcgactgtgagccttgaaattgaacacgtactccacaatttggagcggaggaaagcggctgtaaatgccgaaaagactttcaccgcaattctcggctccccgcaaatcgttcgcgagccaaagggcgtcgttttgctggggggcccgtggaattacccccccaatactttgttgaggcctttggtcgaggtcttaggcgctgggaatactgccggtttgaccccggccgaaatcgcgtcgaac

SEQ ID NO: 91063 - DNA, 629 bp, Heterodera glycines
aagacgacgaaaatgagttcggcgctcttcgcgctgtgcaaattgatgccgcgctgttggacaacactttgttggcatttatacaagcgcggattgaccaaattgtggacattggtggcgcccattgtctccaacaatacaagcaacactttcgcgaatgcatcgcaccgctctactttttatcccattttctaacaggccaaagtcccggccaacggctgctccaaattcgcaccaattttccaacaacattcaaagcattgctcaattatgtgctctgttttttgttgccatcatttgttgccttttttgtcaaactgagaccattcgatcggagaattcagctttggtacagcagggcgcagacggcccaccgactggtcgacttcatccacttttgcctgtttcttgcgcagggtgggccgataagacccaccgaacgactgtttggtagtcgacccgtttatgtgcagaaaccgacaattggctctctcaattttacggcactgaaccgtgaactgcttggccattcgtttgtccaattgtgcttcctttttgtcccacttttcaatgtgttcaagcgacgttttttgcgggcgctttcccgccgccggcaacaacattttcgc

SEQ ID NO: 91064 - DNA, 330 bp, Heterodera glycines
taagacaagataaatgttgaacaacactcaaagaaaaatacaaaaaaacaactaatttgaaataaataaatctcatcaacctataaaaatatttaattataaaaatggaaagtaaaagatttattcaaatataaggcaaaataattatagcaaaaaaaaattttataaaaaattaaagtgttttctttataatcagtttttgaatgtttaatcgattaaatatattttttgaaaagcatattaaaaattaatgtaacaaggaaaattaatataagaaaaaaccaaaatattcgtcgtaacaaagaaagccatcaggaaaatgaatcaaaa

SEQ ID NO: 91065 - DNA, 602 bp, Heterodera glycines
gtcatttcaaagcaaacaaaatggctcgcggtcccaagaagcaccttaagcgcctcgcagcgcccaagcactggatgctcgacaagatgacgggcacctgggcccctcgtccgtcggccggtccccacaagctccgtgagtgcttgcccctcgtcgtgttcctccgcaaccgtctcaagtacgctctcacctacaaggaggtcatctcgatcctcatgcagcgtctcgtcaaggttgacggcaaggtccgcaccgacgccacctaccccgctggtctcatggacgtcatctccctcgagaagaccaacgaggctttccgtctcatctacgacgccaagggccgcttcgccgtccaccgcatcaccgccgaggaggccgagtacaagctctgcaagatccgcaaggtcaaggtgaccggcaaggccatccccgttgttgtgacccacgacggtcgcaccatccgctaccccgacccgtccatcaaggtcaacgacaccgtcaagatcgaccttgccaccggcaagatcaccgactttgtcaagtttgagtctggcaaccttgccctcatcaccggtggacgcaacatgggccgtgttggtgtc

SEQ ID NO: 91066 - DNA, 522 bp, Heterodera glycines
ctttcgtccggctcccaagtggacatgcggggagacttggcattcaaaggcatgcgaaacacggaccaatggatgcccgcggcaaaggcaccctatttggagcattattccaacgaatttctcaaggaacaatgggccggactttgcgatgttgtagcaaaagtgtacaaggacctcggaggaagttttccatgcgaccgcgttctaaacacactgaagatccccgttttgatcgtcaacggtaacatggaccggttcgtccttgacccgagcttgatgagcaagaaattggaaaatgccaggattgaaatacatgcccagggagggcacgaccttcacatcaaatacccacgttggtttgctttaaaagtgactagttttgtgaaggaatcggcgaaaagtgatgtgaaagcgaataggaaatgaaagtaaaatcagtttcactgcttatattcaacccaatttcactttgtatttttcactgtgatcgtttcgttacaaatgctgccaaataaagcgcga

SEQ ID NO: 91067 - DNA, 342 bp, Heterodera glycines
gtggaggcacttttggggacgaactcctccgaagtggaggcacttcgggagacggactcggccgaagtggaggcacttcgggggaaagtggaggcagtgggaccggtggtactggcgtaaatgaacccagcggaaatgaaggcaatgacgggaacggactcggcggaagtgggggcactggctaagggaacggactcggcgggatttgaggtgattagagaacggcgactgatttgatgaatggaattaaaagagaaattccctttttcatgttaaatcaatgttgatcaacgacaaataaatctttttgttaaaaaaaaaaaaaaaaaaaaaaaaaaaaaa

SEQ ID NO: 91068 - DNA, 296 bp, Heterodera glycines
  unsure (1)..(296): unsure at all n locations
caatgacaaccatgggacagctctaccaggaccgccacgaggaggacttgttcatgtacatcgcttacagcgaggagaacgtttacggctgatcgtcggttgggcggcggagtgtcggtttggccgtggcgcataaaactcccatcgatgggagggaataaccagcgaatcgtcgtcggcttttatgtacctttttcatccctttcattcatatttttcaagtaatttgtgtgatcacgcatcgatgatgattatataaaatcgcttttttcnaaaaaaaaaaaaaaaaaaaaaaa

SEQ ID NO: 91069 - DNA, 475 bp, Heterodera glycines
  unsure (1)..(475): unsure at all n locations
cgattgttttgttgaattttcgcccgtcccttgggaagtgccgtcgatggtctaattaagcaaatgcttttgttggcagagtgcccacattgtcaccggctcccacttcagccaagtgttccgactcggtttcaaactgagattgatttgcaaagctcgcggggaccctcggcccaaaatcaaatggtttaaagagggaatggaaatgcaaccgaagcgaaacgcccattactacgaaaagccgctgggaaaggatgaaatttggagcaaattggagatcgatccggccacaatgggagaccagggcatttacgcatgtgtggccaacaaccaacacggagtgatggccaagaatttcaaagcggaataccggtagaaaaacagcacagtgctcaatattttcaagtgcatttaattcataatttatacagaaacacaaacaaattaacgccnaanaaaaaaaaaaaaaaaaaaa

SEQ ID NO: 91070 - DNA, 616 bp, Heterodera glycines
atgtcaagcaccaaagatgaaaatttgcttgacgaaaatcaaaaaagcacaaaaattcaacgattacgaaactttgaaattcagccaattcttccttcttcacttcaaacagaacacattgaactcactgaagcggttgtgcttaacgttacaaacaaaagcctcttctctgcactgttgcgcattttgcccccattgccggcccaatttgagcatttgaagcgcgtcaatggcaccgaattgttggtcagtgttagccaaaatggcgacgacggcacaattggcaccgccgaacggacggcgattggccaactgattggcggggagccaacattcatcggacggcacattccatgccgaaagcctcagagtcggcaccagttggagatgtacaggaaaatttggcccatgtcattccataaaaatgccaaattggaggcgatgatcgacggcactttgctcaccgcggatgaaagtgcacgcatcaaacaactctttgtcattgtcgaacggacaaaaggtgcgctgttttacgatccggcaaccgaccaaattgtggccgacggcacgacgacggcacaatttgaggcgcctgcggcggcagcgaacccacggc

SEQ ID NO: 91071 - DNA, 557 bp, Heterodera glycines
ctaaagcatataagtgcaaatgagtgccagttttgatgacgaacttcagctcgaaatgcaatcaattgaagccatttttccaaatgaaatccatattgaatcggctcgacaaatttctgtccaatgtgcgtcgaatgtacaactaaatttgaacatcccggcagactatccgagtgcccctccatcagtggaaatttgcgccccgtcagttagcggtgagcagaaacggcttctcctcagcgcaatggatgccattgttgtggactatcgagaggggccaatgctttacccattgattgagggggcacttgaattctttgccgaacaccggcagaaagatgcggaagagaaagaccaaagtggagcggaggaaaaagagccctacgccagcgctgacgaggagacgtgtgcagaattttttgccggaccaaccattgaagacagaaagagcaaattccaagcatatgtggccaaagttgaatcaaaagaccaggtggatttccttttgaccaaatcaaaggtgtaggaaaattgcaagagccacacacaacccatac

SEQ ID NO: 91072 - DNA, 509 bp, Heterodera glycines
  unsure (1)..(509): unsure at all n locations
aggcaatgattatcgttgtgcaccattcggtgagtgactacgcgagcaaagtgttccgccgcattttcgacgcgggcttcgaggtggaatttgacgaggacagcccggacacgctgaacaaacgcattcgcaatgcccaactcgcccagttcaacttcattttggtgatcgggcaacaggagaagaacaacggaacagtgaatgtgcgcaccagggacaatcaggtacgcggtgagattgctgtcgatgcgctcatccaaaagttccaaattttccgcgacacttttgcccaagacacagaaagtgcaggatcttttgaaggcccgaaggaacaaaaagaaattttggatgacaaaaaatgaacaatggcattgcaatttcattttagacgggtttttgttgttaacaaattgtgaaatgttccatctggttttttgtttgtttgttaattacaacttgtgagcccaannnaaaaaaaaaaaaaaaaaaaaaaaaaaaaaaaaaaaaaa

SEQ ID NO: 91073 - DNA, 409 bp, Heterodera glycines
  unsure (1)..(409): unsure at all n locations
atttcctcgcactttgtgcccattccattggcaaatcgccgctttcctttttcttccccaccttttcgatcagttgctgttgcatttgccacaactgttcctcgggaatgccgcatttgtccagtcgcgaatttttgcgcttcaggcgcttctcagccgcaattttgcactcgccaagcacagagttcgccgcgtccacatattcacgcggaaagccaagatttttgagtgctaaaaggagacgacttaacgaatgagaaaggaattgcaagagagattatccgaatttggttttaatcacttgagaggaaaggctattaatcctttgttttacgaatgttcaaaatcagggctttttccacaaatttaaaatcaaaagcgcagtcaannnanaaaaaaaaacaaaaaa

SEQ ID NO: 91074 - DNA, 580 bp, Heterodera glycines
atccgcttccgaacacaaggaatgaggaaatccttattaccaagctggataatatgaggaggccctttctcactacaacctcgctattataaagaacccgaatgatccgacttactttacaaatagagcactttgcaatttaaatgttacaaaatgggactccgcctcggacgactgcaaaatagcgcttgacatggactttattaatgtgaaggcgaattactacctggggaaggtgtacgtgcttgacggacagtttgatgaggctatcatagtggtgtcgcgggctcatgaacgcgttctctatcttaagcaaacatatggcgactaaatagacccgttgctacggttagcgcgcagagaatagttccgtcgagaagaagactaacgcatggctccggagattgtacttcaaagttacttaaaccaattaattgacgactacatcaccaaaaaagtgaaccaattgtaggacaagagggaatatgacgttgaacaaaaggaggaagagctgaacactcagggggacaccttcgaaacaccgctgaacaatctcgttgttcacgttgacgatcgtaga

SEQ ID NO: 91075 - DNA, 292 bp, Heterodera glycines
cgctgaaacgatctggcataaactgttgaggaaggaattcctcatgaaatacatgaggaacatttgttgttttttggaggaacaagccgaacagggtgtatgcgtttatccgcctcgtaatctcatcttcaacgcgttcaatctgacaccctttgacacgatcagagttgtggtcatcggtcaagacccctaccacaacttgggagaggcacatggtctctgtttttctgtgcccaatggtcagccaattccgccgtctctcaaaaacattttcaaggaactctcgtcggaa

SEQ ID NO: 91076 - DNA, 571 bp, Heterodera glycines
agaagacgactggctgtcttacctctcgcttaaccatggacatcattggcttatcgaagaaatgccattccaacttgatcgggatttgcgttgttcctttggaagacagcttcgtgtcatccgtgaaagggaggaaaacatgaaaaggaagaattccactaatggacgacgacaacgccgacaaaaggtttttagtcaaatcaacaatggaaacagcaccactccttacacggaggagactgagagatatccagcggaaaattggaaatcgaccaattcaaatgtttctaacaataagaaaaaaggtaacgaaaccagtggacaactgtcggcctcacctgtcaataatttgtttgagggcgttgagttgccgccgtttactgacaatcagatgaatgtttggtttaagtatttgtcctgcatcaattcgcggatcagagaaattaccgaggatgcatgagattattttatttacctaaaagggaacggatctgaatttatttatcgtttcggtgcaatttaaagctgattcaatttgtaaaagactatttgactattaaacaatatccga

SEQ ID NO: 91077 - DNA, 345 bp, Heterodera glycines
  unsure (1)..(345): unsure at all n locations
cttattttatgcttttgcttttcttctcttaattacccgattagtgataaaaaaattgactgaaaaaattcacgtctcattcaacaacatcgaataaaatttgtcgcacaaagcctgacaatctaggcagaacgagccgtatccaccgtgcgctgaaatgggaccaaaggagccacaaatgcgcaaactgttgttgggatttgcagttctgggtgccaagctaaccaagaaaatgccgcgttgtcattttttggaaattgattaaaataattaaatgttttatatcattcgtataaatactagcatggctaanaaaaaaaaaaaaaaaaaaaaaaaaaaaaaaaa

SEQ ID NO: 91078 - DNA, 624 bp, Heterodera glycines
ctttgcttctgcttcttcccctttttctgctttgtgctgcctttctcctccccgactcggcttcttccgaagtgttcaaattgccgctgcggcgcttcgattcgctgcgtttccaactccgccgcaagggccgcttggcggtgaaggcgtaccacgaggcggaacgcgtgtcgcggctttaccacagcagtgagccgggctatcttcgcgcaaaataccagcagacggtgtacgattattactacttgtaatacgttgcgctcattaccatcggctctcctccccaagagttagaagttgtgatggacaccgggtcggccaacctttgggtgccagacacaacgtgcaattccacttccacccaaaaatgcttcaaatggtgtcaaatttcattttactgtagcgccaactgtgacgagtactgttgcggcgaaagcagcaaagtgtccacgtgtgatcaaaagagcaaattcaacagcgcacaatcgagcacatatgagcagaaaggaaaagcattccagattatgtacggcaccggatttgtctatggatttttgggaatggataccgtccggcttggcgcctcgatcgatcaaaatgcgctaactattccgaaagcattta

SEQ ID NO: 91079 - DNA, 614 bp, Heterodera glycines
gtcattaaaaatttgtcgaaaaataatccccccgtctccattaaaggccctgtctccaattatgtccccctttctgaggaggttgaaaaataatccccccggggccttaattagagcaatacggtatggcttttcattccctattcctttctctctctaaactttaatttctttcttattaaaaatcttctaaaaaacaaaatgtcggaccctgccctcatttttcttcacattccactggaggaccttaaacgcgtccattcccgccaattgttcctttttgaatagcttggaaccggtcaccccaactctcaagccggacaaaaacgatttgcccgaattgaaacgctcacgattcattcgtattgcggaatacgaacaatcgctcaagaggtatgttaagcttcgagtgacactcgttgcattcaacaacgccctgacaccgcagtgtcaactcgaattgatggacgctcgacgttggatttgatccgtctcggcgtcacgttttgattttgattttcattgtcaatgtatctgagctgttcgtttagaactttatcattcccaagcttgacgaggccaaaacacttgctgtaaatattttgacacgttcg

SEQ ID NO: 91080 - DNA, 228 bp, Heterodera glycines
tccaaaggaagacctggaaacattattaaaaaaaataaagaattcgttagacatttggatagcttttcttacccgacatgacttactcaacaaagataatttgccccaaccgttaaatagcaacagcttaaaaaaggcgttgcatgttttagatacgataaacttcactgctgaggaaagaatggcttatgaagatcgcttgaaatggttaaggatagaagcgaatac

SEQ ID NO: 91081 - DNA, 630 bp, Heterodera glycines
gtggtggacgtccaaaattatgtgatggaaaagcacccattcagtgggcaattccacgaacatgctcaaaaggtggtaattccgaacattcggcgactgattgaaactgcgcgccaattgaaaattgaagttgttttcacggttatggagaatcagacgaaggatggccgtgatcggagtttggactacaaattgtccaacttttttatccctaagggatcacgggaagcgaaagtggttgaccaattgactccgttggacgacgaattggtcatcccaaaaacgtcgtgcagtctgttcaattccaccaactttgcttatctgatgcgaaacattggcatcgatacgatcgccgtgaccggctttttgactgatcagtgcgtcgaccaaaccatccgcgacggcgccgatgccacgggcggtttttggatgatcggagtgagcgatgggtgtgccgcggaaacggccgaacgacacgcagccgcactgaatgttctgcgcgggtattgtaggatggaaagcactcaatcactgatcgaagcaatgcacagtgaaatgggcggagaaagttcaaaaatgggtgattgagcaccacaaatgatctggatatgtattgattatgacggacgg

SEQ ID NO: 91082 - DNA, 519 bp, Heterodera glycines
gtttgtcggtggaagaatacgcggaacttctgctcggtttcctcgttcagaaacagccaatcaaagccaagtattgctatacacgcgcaatcgaaaagttcgtgagaaaccaacaattgatgcaaatttgggagtttggagacacaatttgtaagcaaaactttgacaaggcattgcgaatttgcaacgcgacgacactcggcgaagcgctgcagccgtacgtcgaagaactcaaacgtcgtctgacctccgttcagctgttcaccatgaccaattcatattcctcaattggactctccaaattcgctcaattggtgggattggacgagtcgagcggaactgtgcaagagttactccaaaagtgcaattggactgtgtctgaggacggcttcatttctccggtgcgaaacgcagaattaatgcaagccattgaaagtctcaacgacgccaaatttggaacgggtttcgatattaagtttgcggaacggggtgtcggtggagcgaccgaatcggacagca

SEQ ID NO: 91083 - DNA, 624 bp, Heterodera glycines
taaccaccgccgtcgtcctccataatgttgaaattgacccgtgtttttttcaccgcaattccgacctcctccgattcggtgaacagccgcatcttcaacagacagtggcgtcaccagcagcagcttcaattgcgtctttgctcgtccttctctaccaccggcccccctgggccgtcatttaattgcaatggtcagcggatggacaatttgcgtgatgttcagcaaaaggaggaggacacagtgaagcagcaaaggccaacagtcagcttggccaggagcggcatagcgaaggacttcagcgggacgaccgcggaactgttcgagttgcagcgacaggctggccacaatgtttttggcgatgacgcctgcttcatcgcttctcatatgtccacttatgctgctggtgttgcggatggcgtgggcggatggcgtcgctatggcgttgacccgtccaaattctcttcccaactgatgaaaaactgtgcggacattgtcacatctggcgaattcttgtcacaacggcctgatctgatcatttccaaggcttttagtcaactcagatcaaagactcggccagttgggtcttcaactgcctgtgttttggtggtacacgatcgaactctt

SEQ ID NO: 91084 - DNA, 464 bp, Heterodera glycines
gcacagtgagcgccaacgcacaataacaagcattgccataaccgatttgcctgaaggtaccgctgttaattgtgtggcaattggactccaatcggggatgatcaggctgatcgaaatgtggacaatgactgtagttcgtgacatttcattccaatccttccattttcccgtcctcagtctcctttttgccaacgaatcgcgccgtctttacgccgcctttgccaattccaacgtcgttctgtgtttgcaggtcccttcactttatggcgcttccagtgaagaaccaatgactgtgagcagagaacggccatgcttcaaagtgctcaacccttttaaatgcagcgactcttttcccttgtaacgttttcttctcaaagttctcattgttagcaattccttttttgccccctccccctttttccgttttgtttttccgatgagtgcgttaattggaatttacgagt

SEQ ID NO: 91085 - DNA, 331 bp, Heterodera glycines
ggacgcagatgggcgaaaagtgatcgtagtgtacaatgggacggggtacctcaagtgtggatatgctggcagcaattttccaagttacattttcccatcggacgtcggacggcctttggtcggatcccctccacgattagtgaacgacatcctgattaaagatttgatggtcggcgaggaatgctcctagttgcggcacatgttgtacgtgagctacccaatggagaacggcattgtgcaaaattgggacgacatgggccatccctgggactacacttttgggacggataagctgacattgatacagatgactgcaacattgatgctaaca

SEQ ID NO: 91086 - DNA, 355 bp, Heterodera glycines
aaagaatggggctgcaccacatggcatggacctaagcattgtggtgcaattaatcaactttcgaagtccgtgtgcacatgtcgctatggtgataaaggcgaaacaatgccgctgtttccaatgcctttaatattttttttatacggcgcacatcgattcccaccaaatcgaacacagcctgaagtgtagtggcgcaggagagaatgatgccgactcagccgatggcacactgaataacaaatatgttattgaaaatggcatgccggccacaattaaattctccacaaatttcattattggtttgaatttgtttgaataaaagtacataaaatgtagaagatccaaaaccaaaaga

SEQ ID NO: 91087 - DNA, 601 bp, Heterodera glycines
gagaagcgcaagcagaagaagatgaagggactgaccaatgaacgggagaacctccagcgagcggcaaagcgtttcggcgaggcggccacctcagcgctgttggagtattcgccgtcgtttcggcgctgccaccagcggccccagtcggcccgaactcattccatctacgactttacctctcgtgacaaaagcccaacaaaactgatcaagccccgcttctcgctcaatgtcggctcactgagtgcgcgcgagccgcgaccgtcgccttcctttgaacgaatccaatcgttgctttctccgcgctccgcctccgtaagcgatcagttgcgccacagtgtgcgtgcccgtgccggttcgggacagtccaccaaatcgtccatttccccgtcgccccggcatcgctcgtcaatttcttcggccggcacgcgatttttgagatggatcggcttactgtcgccatccgacgaagggcatcatcggcaaaacgggaagaatgaagacagaaagaagtcgacatcaaacaagcgaagaatgtcctcttttcaatagtgatcagtgatcagatatgagtggggaaaagacgagaagagagacttgggcc

SEQ ID NO: 91088 - DNA, 613 bp, Heterodera glycines
aagaaaggcataataaaaatgtctttaattaaattagttgtgaaaaccattgatgggaaagattccatcgttcgagtggatccgaagatgtcactcgaccaccttcgccatgcaatcgaagcagcaactgggatttccaaaaatgaccagcgactgatttttcgtggccgtattctcaaagatgaatcattatcactcactgaccagggctttgttgatggactggcaattcacgttgtcacaaattcaccacccgcttctacgaatggttcatctacggaaagcagaagcagtgaaacgtcgcagagtcatcagcaacccgaagttatggtcgtaccgcaaataacgactcagaatctgattgtcggacaagtcgtcctcgaaaggacttccctcttcgacaacccaaatgttgcattggatgccgtgaccaatgccttggaggagattcgtggggcttttcagctcgaaacagaatcttcgctaaacactaatatccaaaatggaagttttgctgtcaatgtgatcttacgcggaatgcgtgagcaaattgtcgatggaccggcgagagagcgcttcgaatcgcttagagttgaggtcaagaaactcgcgt

SEQ ID NO: 91089 - DNA, 205 bp, Heterodera glycines
tctgaccaagggtgacaataacatggttgatgacagaggtcttggggcgcccgggcaacaatgtctgccacgcaaagatgtgatcagtcttgcctgaggatttgttccatacgtcgggatggggactatcatggtgaaccactattcgatactctagtacaccgttctcgttctacctggtggcttcatgcttatgagtccagaa

SEQ ID NO: 91090 - DNA, 198 bp, Heterodera glycines
gtttgaggtgtgggagcaacttctcccccggacacgggtatgacacacgacgccaagttttcgctggtcaagttggctttgttctcgaatgcaccaagattggtttccccataaactccgattttcaaaactgtattgtgaccccaattttttaagtaattaaaaatgtctaattgtaaaaaaaaaaaaaaaaaaaaa

SEQ ID NO: 91091 - DNA, 604 bp, Heterodera glycines
gacggtgttgtgctgcagtggcaggacgagttgtgtgtcgcccaccgaaacgaagtcagcaaattgattgcgatgctcacgacaatttaccaatttgcgaaagtgccattcccaaagccaattcattccttcgacccaatcgcaccgtttgtcaacatgaacagttcactccccacaatcagcaccagttgatcaacgacagcctccacgctcatcgcaattttttgtccgcttctttcccccttttcccatttcaatcgcttccaatcattttcagtcggccgacgattacgtgctgagttccgcattggcccaactccaacagcagcacggtcacttgcaacaccaccaacagcagaatacgatgatgaccactgctattcatcatttgtacgacgaaacgccgcgggcaatttaggttaacattgagccccatttgtacgacaaagtggccaggccgggacagaagaggcacttcaacagcacactcatcagccgaagcagcagcaaccaattcagacgataacaatgaaagtgtcagtggcttcttcggtggtcagtccgacgcagcgggcagcggcggcgaatttcaccccgcgggtga

SEQ ID NO: 91092 - DNA, 162 bp, Heterodera glycines
aaaggacagaaaaaggcatctaaaaatgaatcccgggctcagcggaagaaaaagtgaatgatttttgggaaataacaaatgattgatcaatgatcattatgaatggaaattgacctgataattgatcctcacatttacataaaaaaaaaaaaaaaaaaaaaa

SEQ ID NO: 91093 - DNA, 555 bp, Heterodera glycines
cacagtggattggtaaagaattaagtgacgcgtggccagaataagtcataaggaatatcaaacgtgaaattaccaaagacattactgacccgtacgcctacaacacgactgcaaatcgcatcaacaatgaagttttgtcaagaggaccactagggcaaaatgacaaactgtttgaccttggtacgatgatcgcaacaattgagcagcaaacgggcgacttaaccgaacattcacgattccgcagttttgtgatcctccacataagcacttggacctcaaaagcctgtgtaatcccaattggattatctacgaatcaatttttaaattattccggctttggatatgttgagatgtatgcacaccatttattcaccacaaatgatgaattgtataagttgttcctgtttctgtaatttccttgaaacgcatttgtaaccattatttctggataaaggaacaaaactaaaattcctaccccaattaatatagtcttaaaattaactctcttatttttttgcgacaattttgttttgtatgaataaaaacatttttacc

SEQ ID NO: 91094 - DNA, 520 bp, Heterodera glycines
agggggggggaagaaaagggggggtcccgcgggaaaaggggggaccgcgggcggaaaaaaacccctttttgggggtccccgaggggaaaaaagaaaaaaagggggggggcgggaaaaacaaaggcgggaaaaccccgcaggggggggcgcccccccaaaaaaaaaaaaaagggggggcggagggggggagggcccaccccctttttggggggcccaaaaggagggaaaaaaaacgcccttcttttttggggcggcgggaaaaaaaaaaacaaaaaggggtgtgttggggggggggggaaaaacaaaaagaaagaccgcacttttttctttgcggcggcgaaaaaaaaaagagggtgggggggggggcgggggacgaagaaaaaaaaaaaggggtgctcccccccccccccccaaagggaaatagagggttggggggggggggggaaaaaaaaaaaaacacggggtgggggttgttcaaaaaaaaaggagggggagacgagaaactaatcgtggtgggtga

SEQ ID NO: 91095 - DNA, 417 bp, Heterodera glycines
ccgccgctcgtcccgggcaaattctgtggcttttgggactgactcgtctccaaactcagatgagagttgtgaaggctttccaagccactgtgcagaattcccacccgtcttcgctgtctcttcaggcgggtgaccgtctccgccagtcttaccggcgacttcgaattgcgaaagaaattgagcgcgctaacgaattacgctcgcgtggacccatacgaattgtggattccgagacgaaacccaagtcatccgacctgaaattcgtctagccaattgcaatacgctcacttagtgccggtcaaacgatgatcccttcccccgcggattattcgtttttcaatggcaccataaagtgtcctttttgttgcctttatcatacaaacagaattgaaaaaaaaaaaaaaaaaaaaaaaaaaa

SEQ ID NO: 91096 - DNA, 566 bp, Heterodera glycines
aattctgaggaagcaaagcggagagaaatagagaaaaaactcaatgaggcgatcgtccgctgctgtccaaagtgtcgtcttcagttcgtgaagttggacgcctgcaacaaaatgacatgcgcttgtggaactacccaatgttacatttgtcgggaagttgggattacatacgaccacttttgcaaccatccacgagaccttattatagcgaagtgcgacaagtgcgttaagccaaaatgcatgttgtgggaggacttcaagcgtcacgatcgcgaagcaatcggccgcattctcaaggagtccggcgtagagattaacatcccggcgtcgcctatgcctggaccgtccacgaaacagcaaccacgagccatcattccaccgatgctgcctcaacgtgttcatgttgcattacatttgccgccgcgtgtggccccgccgaatcgtatggctcctccaccgcaacgtgttgctccaccacaacatgtggctccgccgcaacgtatggctcctccaccgcaacgtgttgctccacctcaacatgtggctccgccgcaacgtatggctcc

SEQ ID NO: 91097 - DNA, 614 bp, Heterodera glycines
ttctttctgtattacaacagtaaatgaatttttatcatgcagaggctgcagaaatactcaataaagcagcaaaaaaggaaggatctcttcgcagattcatttacgagagcaaattgaaggataaaaaagtcctcctcaaaatttgctgcgaagtcgcaaagcacagacattggcttcaacagttggcatgtcgtcctgctgtgcagacatttttagctcgcgagttaagctgcggcgactcatcatatcaattggtgttgatcttcgaacttttgcatggcaaatggaaacgcaaagtgccgacaaatggtaatggacaacactggacggcactcagacaattgaagagcattctcgacgaagagtcggatttgctgctgaaggacggcgtttcctcggagagtctttctccggcagagtcttccgcttctcttctgccgcgttatgtgcgcgtgaacaccgtcagaatggcattcacacaagcagttgaactgcttgaacgggacgggtggtgcctttgtcgtttgaagaagcgcattacgccaagcaaatatcgaagattggtgtcaacattggagtcgcctaaaatttacgtggacccgcacatttacgac

SEQ ID NO: 91098 - DNA, 563 bp, Heterodera glycines
caagtttgaggggcatctcttggtaatttttgtcgttgaaacacagcaccagtgacgcattgaccatggactacggcgtggaacgcaaacgccgcagactctccaactacggagcgacgtcgccgacaaagagtgtccaggaggtgaaacccgtggcattgtcttggcacggtctcaccgctgtccatgccaaatcgggacggaaaattcttgacgacgcgtccggcatggccgacgcgggccaactcgtggcactgacgggcgacggcggagtggacaaaacagcgcttttgaacacgttgctggaccacaacctgaagactttgagcgtggagggtcaagtgctgatcaacgcgcactccttgggccggttcatcacttacgtcatcgggtacgtgcaacaggacgacttgttcatgggcacgccaacggtgaaggagcatctgatggcgccggcacagctttggatggtcggacacacccaacggacgatgcgtagacgcgtcaatgagttggaagaagccatttcggatggtgaggcgcgtcgtttgccgttcgtcttc

SEQ ID NO: 91099 - DNA, 290 bp, Heterodera glycines
cagggcgacggacttttggtgatttatgagcaggagcaggcggacccaacttatgaattggcggtggactcagtgcacgccatgggcgaagttgtcgacgctttgtacgaacgggccaagaaaatcaaagccgtttaaatgctgagaaaggcgcaaatggcgacggacaaacggccaattcggaaatatttttatttattttttcactgtgcatttttttgtttgtttattccgttcgtattgcacaattaaatttgactctgttcaaaaaaaaaaaaaaaaaaaaaaaa

SEQ ID NO: 91100 - DNA, 480 bp, Heterodera glycines
  unsure (1)..(480): unsure at all n locations
gtccatttaagtgtaaagaaaatttatgcattcataataaaaactaatgaattatgtttacggctccactaatgaagtgtttggggaggcgttggtcgacaaaattctggcccaaatggatttgaatgtgcttttggatgaccaagtgcggaagactgttgcagaatatgccggtgactatgtggataaggttctgcgcaaggcatgcgaattggccaaacatcgggggtcaaaggcggtgtattaaagcggacatttgctacgtgttgaagcactactttcgcaactaacaaatgccaacaagaaaatatgccgtgccgacttgttctctaattgattttcataataaagacaatgccttaataacatccgatccataatcatcatttgtaaaattgcgatctcttcccatcttccatttttttaatatccattcatgaataaatggctctagtccaannnanaaaaaaaaaaaaaaaa

SEQ ID NO: 91101 - DNA, 609 bp, Heterodera glycines
cacgcgctgctgccgtacgaccaatatttgcatcgttttgccgcctattttcagcagggggacatggaaagcaacggaaaatgcattacgagaaatggaacccgcgtgcgccactcgaccgggcccattgtttggggagagccgggcaccaacggacagcacgccttctaccagctcatccatcagggcactcgactgatcccatgcgacttcatcgccaccataaaatcgcacaatccgctgcggggaggactccatcataagattctcttggcaaactttttggctcaaacggaggcactgatgcgcggaaagtcggcgacagaggtggaggaggagctgagagcgagcggaatgagctcggagaaaatcgccaaaatcgtcccccacaaagtcttcgaaggcaaccgtcctaccaactcaattgtgctgccgcaactgactccctccacgctgggctcgttgatcgcgatgtatgagcacaaaatcttcgtccagggcgtcatttggggcatcaactctttcgaccaatggggagttgaactcggcaaacagttggccaacatcattctggacgagcttcggggcggcccgacacgcaagcacgat

SEQ ID NO: 91102 - DNA, 543 bp, Heterodera glycines
ctcccgctcccgccaagagccacgccaacacacaatgtcctcgtccaacaccaacacgaccgcggctccctccaaacgcagcagaaagcacaacggcaccggcggctcttccccctcgccaatgccctctgcgtccgccaccgtgccgcacacttccaccgtccccacgtcctcctcggctgcctacatcatgcccgccgacctgccgctgcccccgacgctcatgatcgacccgccctcggaacccgacccggactttgtcccgccattccttgaatccggcgcaaggcagctatccatgcccaacaaccgcggccgcaagctgcagatccagtcgcagccggcaccgtcgacgccccagtttccgcaatggtcggcgcccaaatccgaggtggcggctatgatgggtttgggaccacggccagatattcgtgcgccgttgtcgggggatccgtttgcgaagaagacgcagttccggttacctcaaagcgacaactactatgccgcctacgcggatccagtatcgatcaagaagcgccagcg

SEQ ID NO: 91103 - DNA, 445 bp, Heterodera glycines
gttgtccgtcatctgtttggccatgaaatttcttatacaacaagaagcgattgacatctaccgggagctgttcacctcctgcgggttctgcgtggaccaactgatggaattggcggaggtggcctgtgcccaggatatcggagaaacgtccgataacgcgaacgatctcattttgtcatggcctgggaataatgacggcgatgagctcgtttgtgcgagactcttgaaggattttggattttcgcctaccattctctgtacaataccatcaccaaatgatctgatgcaactatagacgcttcaattggaatgatctcgacgttcccttcgaacgaatctttccctgaccccaattctattgagacgttgaacttcagtccttgacgaaatcttcggttttatctttcgtcacccaattcaggagccattcgacgtaattttgaag

SEQ ID NO: 91104 - DNA, 402 bp, Heterodera glycines
ggacaatttgcacgtgaactcaatcatcatccgtcactgagtgatttcatagcagcattcatcaaggaaggacatcgacaaacaactggacattggacgagcagaacgtctccagaagagtcgaaaacgaccgcaacggtacatcatcaaggaacagagtgttgtgcgtatccttgacgaggctgactttgaatcggaagaaggattggcaaacgccttgcatctgctcggactcgtaatgcagggctttgtagaggggcttcacatccgtggaaatgatgagagtgatgaagaaactgctgatgccgatggaaattgaatttaaaatttagtgttttactttctattttttctttggattttaataaatatctatttgcaaaacacacaaaaggatagaat

SEQ ID NO: 91105 - DNA, 609 bp, Heterodera glycines
ctcttagcaatcttgtctagcgaccaagaccattccgtaaatgacgacctcagcaaccaacagcgactcggccaagtttgtcttcacggacgacatgaaggtcaagtttctcaatgatggctacctcatcatccccggcttcttttccacggccgacgcggccgccctcaaatcgcgcgctgacgaactcctgcactccatggacctttcgacgcaccctatgaccacctttgcgaccggcggaaaggatggcaccaagcacgtgggcgacaagtactttctcgagtcgggcgacaaaatccgctatttcttcgaagaagacgcggttgacaagcagacgggcaagctgctcaaacccaaggagcgcgccatcaacaagattggccacgcgctgcatgtgctcgacgacaagtaccgcgagttttcgcaccggtcggctgtcattgacattgtgcgcaagttggatttcgagaagccggtcattttgcagtccatgttgattttcaagcagcccgaaatcggcggcgccgtcccgccgcaccaggactcgaccttcctgcacacggatccaccctccgccgtgggcttctggtttgccctcgaagactg

SEQ ID NO: 91106 - DNA, 309 bp, Heterodera glycines
ggagattcttcgtgacccgggcatgcgagttttgctggaacaaatgagccatgacccggatgccgctcgagaacatatcagaaacccggacattttccgtaaattgatgaaattgcaagaggcgggcgtcatccaaattcgctgagaatgatcgacggaggaaagggcggaatggctaattactcactgaacgttccgatttgaaggattttccacatctttttgattttgctgttgtttttccttttgtcccttttgtttttgcattgccgtaaattctctgatggaaaaaaaaaaaaaaaaaaaaaa

SEQ ID NO: 91107 - DNA, 283 bp, Heterodera glycines
cggacaagagagattccgatgcatggtgccgttgtacatgcgaaatgcaagtgccgccgttctcgtttatgacatcaccaaccgggaatctttcgaacaaattgagcaatggcacaacgaagtcctgcgttgtcccactgccctcgaagagccgatatttgtgctgatcggcaacaaggcggaccagcacgacgagaaccgcgaagtggccgaaggggagggcgtccaaaaggcccttcgactgaacgcacatttttttgaggtgtcctccgtccactctgaa

SEQ ID NO: 91108 - DNA, 484 bp, Heterodera glycines
gtccaattaagcaaaatgctgcgtcattgtatgctttattcgcgtgcattttgtactgtcaaatcgcctccgttagatctcacaaaagaagtgatcactaaattggaacggctgtccgcacttcagatgcaattgccacaagaaagtcgcaacttggcagaggacattcaagtggcagagcgtattttcgaagttaacactgagggtgttgatccgctgcataatattgtcgatgattttatcaactgtcccgtgcgagaggacgtgtctgaacatacttcgattaacgagacgcttgccaatgcgcgtaaaactttcgagggattttttgtgtcgccttctgttggcgttgagtacaaacggcgggggaaagatggtaacaagaaaacggacagataggaaaaggaaagtgcgaaaatggacaaacaattaatttatttcggtgttatttcaacagatttgagttttataaatgtattgttta

SEQ ID NO: 91109 - DNA, 620 bp, Heterodera glycines
ctacgacagcctcccttcacacctcctcaccttagatcatagatccgttcggactctctctcttactttcccccacccacactctttccaacatgaagtctactctcatcctcgccgccgccctcgttgccacggttgccgccgctccctcgtacaacgcgcccgcgcccggctccaactacgatgccgccaagcccgcgcctgcccccgtccaacccggctacgacgcggccaagcccgcgtctgcccctgtgcagcccgggtacaacggtgacgccaagcccgcccccgccgtgacgacgccctgctcgtctgccgcggccgctaagcccaccgtgcccgccaacaactacgacggcgcggcgccggccccggcccccactggtgcctacgacggcgcgtcgcccgacggcaagacgccctgcacgacggcggttgccgaccaagttgcgactccctcgaccacgccgtgcgaaaagtcggcggccaagacgaccgacgcgtacgagcaagtcgcgccggcgcagcccaccggtgcgtacgatgtcaagatccagcctgcgggccagcagcagaatgccgacgggtcgctgtaccaggcgtcgagtgccggcaaggtt

SEQ ID NO: 91110 - DNA, 512 bp, Heterodera glycines
gcttctcacagccactccgccacgacacatcatggccaaagtcccgcgcaacttccgccttctcgaggagcttgaaaagggtgaaaagggcattggtgatggcaccatctcgtatggcctagccaaccccgaggacattttcttgagcgattggaacgggacaatccttggtcccccacataccgttcacgagaaccgcatctacagccttaaaatccactgtgacgcaaactaccctaattcgccgccggccgtttcgtttgtatccaaggtcaaccttccgtgcgttagcccaacaaccggacgtgtcgaggcgtcccgcttgccttgtttgagccactgggagcgcaactacacccttgaaacggtgctctctgaaattcgccgagagatggctgccccgaacaacaaaaagcttgcacaacctccagagggcagcactttttaactgctttggctcgcttcgaccgagcgttccccgatttcaagccttgatggagtacgatgtgacc

SEQ ID NO: 91111 - DNA, 626 bp, Heterodera glycines
ccgacttcagccatattaaggaccgaattgtcgcttcggtgccgggacgcttccaaaggagtggcaccgatggtgatgcctcgtgccgttttggccatttgcgcctgcgtcggctgctcagcgaagcattcagtgtggaggaaagacagcggcacaaagccttcgtgggccaattcagctccatcggttcgctcggcgcacggcccgaggcgtggctttgcgacgagtttttgacgagtctgtcctgcggacggtccatgatcagcgcttcctcgctgaaactgatttatccgtcggtggaaaatgtgcgccgttcgttggagggctacgcggccggcctttccctgccgtacagttcgcagacgcaccaaaaacagacctatctgaagcagttcctgcatcaatggcgaagtgaccggctcaaaaggtccgccgcttcgccccacgtgaaaagttacgtcgcgttggacgccgctggcgagtgccaatggctgctgctgaccagtgccaatttgtcccactctgcctggggcaagttggagaagggcggcacccaactattcatccgctcctttgaacttggcgttctgatgtgtgcaaaggaccatcttcgccgacaatccccc

SEQ ID NO: 91112 - DNA, 638 bp, Heterodera glycines
tgcaattctaataaatcattatatggcttttgctggcgatcatattgaagaattacgggaacactaccccacgcttctgcaaaatggaggaagtggtttcatttcttccaccgaagtccaaggggcgctgaaactgttgggtattgaccttcctgggtaccagattcgtgaacttttatcgcgtcatggcgacccaaaacatttgaattgttctgaattcgaagccatttacatggacttggacatcttttcgaaatgcggagacggcgcgatggaaaaagcgcattggcagtgttacaggcgcttaccaagtgcagggcattgcggagcatggggctgaggaaattgtacacaccatcagagtggaggaagaggtcgcatttgccaattggataaacagcagtttgtcagaggaccaacacctgaagggacttctcccgctgaaaggtggcgacctttacgggaaagtaaaggacggactgatcatttgtaaaatgatcaatttggctgttccggagaccattgatgagcgtgcattgaacacgagtgtgtttgacacgtacaccaggcttgagaacctcacattggcgttgaattccgctcgtgccattggttgtgccatcgtcaacattgatgcg

SEQ ID NO: 91113 - DNA, 589 bp, Heterodera glycines
gtcaaggtcaagcaagaacttaaattcctttctcgactaattagcgaaaactctcgaccaaaaccattccaatcattcaaattcaacacgacatatcacattctcaatcactacaaaaatggttccttggtggagttccaacccgtccacattgaacagttcaatggagagcattgaagctgctgctgctggtgaacaacatcgtcatgttcgaccagtgcacgcaacaccaccaccagccgattattttgacggaattgttattgttgggcaaggagtaacagcagatgtaacggcagcaggagactttgtgccatgttcaacctctactttggcacaatcaattgaacgcgtttttggcaatttgcaacaccagcaaatccatcctgaaagctatgaagaagcgaagcgactgttggtctttgctggactgtttttcctgctaatgtgcgcatttgtactaatcaaattccaggtggcattcgatgatgtctttcgctggtcaccagcagtttggctggtcagcgtaatcatttgtgctcttctgatgaatatgtctgtgcaaattaggcgatttgtgcaacgcata

SEQ ID NO: 91114 - DNA, 217 bp, Heterodera glycines
gtcccatccgatatgcccccagagctgtcccccgccatctcttggaccccgttacaaatctccgctcgacgacttccgaaatggtccccgtgagaaagtgctgttcgtcacctgtcccactgtggcccccacataagtggccgattcagtggccaccgtcgacgtcaacccgaacagtgcgaccttttgtcaggtgatcgcacaagttcacctgcct

SEQ ID NO: 91115 - DNA, 442 bp, Heterodera glycines
  unsure (1)..(442): unsure at all n locations
gaagtatgttggcagataaagtcgtcattttcataattggcaacaaaatcgatttggcacggcacagaacggtgccaaaggaagaggccaaagagtattctcaatccatcggagccaatttctgtgagtgctcagccaaaaccaacgaaggggtcagcgaactgttctcgaagttggcaattgaaatgttaaataaatcttccgaagagacggaagacaccgatggaatcggcacgactcctttccaacggcattacgggtcgaggcggagccttagaattgcggacgaagatgaaacacatgcggaacggaaacgacgcggaaaatgttgccgatgatgcataaaaggaaataagatagacgaacattccaactaattgtattatacttatggacaaagttctataaatatttacggcnnannnnaaaaaaaaaaaaaaaa

SEQ ID NO: 91116 - DNA, 123 bp, Heterodera glycines
tcgagaagggtcatttgatctcaattttatgtttgcatttatttaaaaacgattggccaattactccaaacgtgactttcattgataaacacataaaattgcaaaaaaaaaaaaaaaaaaaaa

SEQ ID NO: 91117 - DNA, 542 bp, Heterodera glycines
agaaggaggagcaattggagaagaaggaagagaaattggagaagaaggaggagcaattggagaagaaggaaaaaggcaacgacgcagcagcagcgaagaaagaggaaaggaagcgaaagaagggggtgaagagcgacgacaacaaccgggccacccccgccccgtcccctcctcaccatggaagtggagtataaacctccataagaaggcaatgctaccactgcccgcctccccgcaacgcccccggctttaaattcaaaaatttttcaggtgatgatgtcgaacccccagttgctccaagcgttgcccaaacccgtcgcgctcagtggcaggcgaaagtgatcatgatgatcaatgtgtcgaccgactgaactttctctgccctactcgcgatgacgtcattcgcccgtgcatatcttttacaattcatttgctatctccgctcatttctctccttctcaacaaatgtgatttctgttttgtttcctctctctctctctgtccccgcaaatttttctgcagaataaattgagttatgaaaa

SEQ ID NO: 91118 - DNA, 264 bp, Heterodera glycines
atccatcggaatgcacccacttgtccaagctgcaagtgcagaagcaggtccaaaaatccgaagaaaccgcgcaaaaaggctgagccatcggaattgcgaaggaattgatcgaaagttattcatcgttcgatgttaatggaacgatcaaaatgaaattgtagacggatttgttcagagtttgtttcataccccaaattttggcctacctattatagtttttttactgctaaaatgagccactttattttataaaaaaaaaaaaaa

SEQ ID NO: 91119 - DNA, 267 bp, Heterodera glycines
ttcattttttacaaattatcgttgtttcgtgcctcattgaaaaaatgtcctaaaacatcatttggcgattttaacagtgccacggaggaggccccaccgacgacggccccggtcccgccgccgatgcctggcggtctttcggatgtgaaggtgtgccaagaaggagacgaaaaactgacattctgttttgggttttatttgtaatgacgattttatataaggaattgattaaattgtgtaaactttttaaaaaaaaaaaaaaaaaaa

SEQ ID NO: 91120 - DNA, 264 bp, Heterodera glycines
acgagcagaacaagcaaatgttgaaggaggaggaggaggaagtggaccagaatttgtgtccccccaattcataacggataaaaattcgtcaatttgtgtttaatggactatatttttgtgtgccaattctccctcccccggacttcgtttgtattgagaggtcagccgatctactccccctcctaatgtcctaatatttaattttttatgtatttattctcaaataaaaatatgccgtctgaaaaaaaaaaaaaaaaaaaaaaa

SEQ ID NO: 91121 - DNA, 502 bp, Heterodera glycines
acaacaacaaattcatcttctgattgttcgtccacagcgacacggccttttgtacacatcaacgtgaatacggtggaatatgccgtgccatcggagtaccaatttgtggactatttgggcggtggtaactacggcaacgtgatcaaagtgcgagcagcgcaaggcgtcgaattggcggtgaagaaaatgtacgagccgttcagcagcgcgatcaaagcgcgccgcgtgttccgcgagttgaaactgttgcagctgatcagccatgagaacatcatccaatttgtggacatgtacacgcctgacatggacgacaaatgcttcaaaaatgtttacattgtgtccggatacgctggcgtcagcctaaagcaggtgttggaccgacaaaaacagttgggccaatcgctgatcaaccatgaccacatcaaatacattgtctaccaattgcttcgtgcactgaaatatctccattccgcaaatgtaatccaccgggacttgaagccgt

SEQ ID NO: 91122 - DNA, 534 bp, Heterodera glycines
gtcattcagttgcctaactgtgcggatgcgcagcgtcgcgtttcactgaccaacggattccatccgccgccgccctatttcgtcaactctttccctgcacaaccatcggccaggccgcagcccttcgctatgagcagtcccaacccgaaacccgcgcgtggccctcctccttcaatgctgcacaaacaaattgaaaacattctgcgcagttcacgcggtcgactgcctcccaacggacatcctttcatcgtgcggaaaatcagcatccgttcgcaggtccaacaggtcgtacaaaaggagcagcaggtccaagtcgtacaagaggacgagcaaagtcacgatcttcagaagccgaaacaatcatcgaatgctaaggacgagtcggaggacatcatcggacaactgatcgaacaatttaagagattgaaagtgagtgattgaagtgatcaattttgttgtttttggctgtttgccagttgtgcactacatatttttctcattatgtgttttggttggcaataaatgatcctattc

SEQ ID NO: 91123 - DNA, 301 bp, Heterodera glycines
ttcagattattgaagcagacgaagctgctgggcaacctaagcaagtggtggctgagtatgtggacggtacgggcagacgagttaccatgaaagcaagcggagaggtccgaattggccaacttgttgctttctttgaaggtcctgacagaaaccgcattcagcgatgcttcacgaacaacaacaacaactgatttgaaggatttgataaaaataaatttgaaaaacgtatgtcatcctttttgaaagcgcaataaaaaaagcacatttctgtgtaaaaaaaaaaaaaaaaaaaaaaaaaaaa

SEQ ID NO: 91124 - DNA, 574 bp, Heterodera glycines
gtccaattaagaatccaatagcaaattttatgattggacttgcataaacttggtatttccttctgacagcaaaatggtacctcataattctgagttcacgcgaaagttgcgggctgccgtacgtgcctaaattgaggagtttggcattgacgtggatgacgaattgcccgactatgtgatgattatggtcgggaacaaaaaggacaaagctcgaatgaagtccgacctgaaactgttcttgggcgacaaaacgcctgactttgttgaatggctcttcggcttcttccaaaaggtcaaaaatgccactacaacaagttcagcgtcgacacaacaaccgcagaaacaaagctcgaccgaatgggcaacggacaaagagaagaaacggacgatggacaaagacaaaggggacggagagggaaaagcggcggagaaagtgtcatcgatggaggaaaagccgacaaaacacgacagacgggaacggacgagggaatctgaaaagccctcctctgacagagccaaagtcatcagttcgtcgtccgcccattcgcaaccacagcgaagttcgtctcacacc

SEQ ID NO: 91125 - DNA, 615 bp, Heterodera glycines
gtccatttaagttttgtgttcattttcctttttgtaataatgagtgcatcacgtgaaataattgcaacacatggcaaggaaattacggctgacgatcattttcgaagtgcaaatggcgccaaagaattcttcaagcgcaaagaccgatcaaaatcatatgaaatgaacaacgtttcgggtgtgaggacaatctcgtggaatgcgagtggaacttatttggcgagtggttccgacaacagagtcgtttctgtcgggagtttggacccacattcttgtcgattgaagcaaatatttgttggctatggtcacgaagacatcgttgaagcgattgaatttgcaaaacgcgatgaaatgaaaatggcttcatgttcaagtgacaagtctgtgcgtctttgggaccttcgaaatccgagtagtcacaccaaactctcaacgccaggcgcaaatctttttgtgacgtggtcctactgcgataatttcattatctttggcgacaaatctgataatttgggcgttattgatgcgcgcgctatgaagacactggaactattcacattcaaagatgaaattaacgagttcgtttgtcacccaaacgggccactgattttcgtggcc

SEQ ID NO: 91126 - DNA, 512 bp, Heterodera glycines
attttgagctaaaacatattaaggggatcccagacgacgaagatgccccaatgttactccaattatgacaactacaaaatatacaacaggaactcgaacagtcagaacaaattcgggttgagttggagcagcgaaaccgagaaaacaatcgcctcgcgcagaaggaaattgacacgttaagaagtgccttagtagatcagagcaacgaactccaagatcagagcaaagaactccaagatcagagcatactactccaagatcagagcaaacaactccaaaaacaacaaaataccatcgcttctctccttgccgaaaacgactccctccgaaacaggctgcacatctttttgctgtttctttcatttgtagcgccgcctgttgctgtggctatgaaatccaattcacgccgaatgagtcatgcggaaactgcatcggctttgatccgctgcacatttctctgtttcgtcttctggtttcctgctgttatttttgcgatcagtttcgtcggcgtc

SEQ ID NO: 91127 - DNA, 608 bp, Heterodera glycines
cagcaccacccttctacttcgtcagctgccattgcctctccgtcaatgtctgtggacgttccccccttcaaaatggcaccgtcttccccaaattcggccccctcgtcggatggcactttctcttttcaccaacagattgctgcttcgtctgacaacgcaaatgccgagggaccgaagcgaacgcagcaaaaagacggagcaatgggcaaaaaagcatacggacgaacggcggaagggatgggattaccgacggacggacaatttcagtcgcacggaggagggggaccattcttcggctttcaccaccaccaacacccttcggcaccgccagtccatccttccatggaccatcatcattccgcaagtgttcccccgcctttcatgactcatctccatcccccgcccttcggccaccaaatccattcctccgctgtcggagggggccctttcaacgtccctccgcccgtttttccgatgtccgccgctgcttccgtcgctcccaatgccgccccttccttccaacaacaactcggttcccatgcctttaatgtcggtggcttttcctcgtcctccgattccgtcggtgggccgccccgaccgcagccgtc

SEQ ID NO: 91128 - DNA, 554 bp, Heterodera glycines
ggcggggggaacggacggatgggccaaacaccgcaagaaaaatggccatggcgaacagcagaggaggaatgccatcgatcaatccgtgtgcctttggcaccggccaatttttgttttgcaagccgagcaccgcgccaggcgctccttgcccgggccaacaattttgccatgtcggagacagtccgacaacgacgatctgctgcaacaaaccagctgccgtcgatgcgtgtcaacagcctctttttgttggcgttggcccttccaatttggtccgatggtttttcttcgcaccgtcggcacagtgccaaagtttcacgtacaaagggcttcagggcaacgaaaacaattttctatctcggtttgattgcgaacagatttgccaagcaaatccatgtgctgtgggcacgcctttgcgagaccaacaaggacagattggcttctgctcagccactcagcagaacatttgccccattggcttttattgccatgccggacgcgacgtcaagaccagtttatgctgtccaatgatggctggcgacccatgctcccaaccg

SEQ ID NO: 91129 - DNA, 424 bp, Heterodera glycines
gtcttttgcctatggaaagtccattcagcagaatggtggtcccaaccgtgtcacattcattctgcgaaaaggtgcaattttcttcactgggatggttgttggaacagtcgttgtttttaaggcatttaagccaacgcgtcccttcgacgaagcggcagaacgtggcaaaagggagctgttggagaaatacacggaggagtacaacgcgttgcaggaagagctgaggcaggcggaagagcatcattggaacggagggatgtcgaagaggcggaagcgagaaaggcttagccgatgacaataataatgatcaatttgggtggaagggttgtaaatcctctgaagtaggatcacattgctaattaaacattttgaatttcaaaaaaaaaaaaaaaaaaaaaaaaaaataaaaaaaaaaaaaaaaaaa

SEQ ID NO: 91130 - DNA, 347 bp, Heterodera glycines
gcaatgcaaatcaaagtcaagaccctcaccggcaaggagatcgagattgacgtcaaccccgacgacaagatcacccgcgtcaaggagaaggtcgaggagaaagagggtattcctcccccgcaacagcgtctcattttcggtggtaagcaaatggccgacgagaagacgctcgcggatttcaatgttgctgccggctccgtactccaccttgtgcttgccctccgcggtggatccaactaaatccacgctcgtgtcgtttgccttttgccgtttgtcactcgagtccctcttcaccgacagtcacacaatacacttgtatttcccatcaaaaaaaaaaaaaaaaaaaa

SEQ ID NO: 91131 - DNA, 600 bp, Heterodera glycines
  unsure (1)..(600): unsure at all n locations
cgacggcggcgacgggtgccatcggtgatgctgctgagacggcgacaacggcacggcggcgaccgttgttcgaactgacgctggaggagagcattcgttacgcgatgaacgacccggtggaagattggctcaatcagacgctgtgtctcaactcgcagcagagtttgcccacgtctttgacggggacaccggcgcctgacaaatgcgaattgtattacgtcaacagagactcgctcttctcatttcacaaggcggcagaggtgttcttggccaatctgatgtccatttacgcggccgcccattacaaaaacagtccggacgacctgcaaatgttggccgacgcgccggcacatcacctttttgtgctgatggcacccgtgccggctgaccaaagctccgtgccancagattttggcggttgtccaactgtgcctggagggctccatctctaaacaaagtgtgacaaatgtgcgggacaaaggcaaaaagcgggcggccggtgacctcatcccgtggacactttgccaacactttttggacgacgaattcccaactctgtgcggtgcgcgcattgtccgcgtcgctgtccacccgaacttc

SEQ ID NO: 91132 - DNA, 529 bp, Heterodera glycines
atttcatcatgcgcaacaagtggaagaaaaagcgtacccgccgtctcaagcgcaagcgcagaaagatgagggctcgctccaagtaagccccctccttctgagccaggcctaaaggctcccccggccgaccacacgcaccaaacccctccgcgtcgaccaccctcagtcccccgctggtcgtcgcaaacccgtcactttttttttcaagtaatccaagtctccgttggatcctttatctttgccgttttcgattgccgttgctgaagttcctcccgattctccaagtcgacccatgtttgccaagctcccaaaccgctcgccggtctcgtttctcatatttcaatgccgtggattcggtccaaaaacaagtcttccaggttgcgcatggcgcttcgctcgttgtcgtttgctcaaattcccacaagtgtgttccccagggtcgacctgtttggcctcgccactagctcgtgctctactctcgtcgcccgtgattcgtgtttggtccgccttccaagtcgtccccggattg

SEQ ID NO: 91133 - DNA, 605 bp, Heterodera glycines
aacctcgagcaatggcgaaaaggaaaaggaggccgccaagtcaaagcagaccgtcgccgtcttccccgacatcgaaaacgccgaagcacccatccagctgtcgcgcgagacgacccactccaaccaccacatcttgattgcgcccgacaacttgacgctccgcggcacaaagggatactgccaagcaaaatgcaacaatggcgtcactgagggacgctggtactatgaggtcgacatcacaaagatgggaccaaaggacaatgcgcgaatcggttggtccatgatctcaagtctgctgacggggccttgcggtttcgatctcttttcctactcgtaccgcgcccgaacgggcgttctctaccacgatagccgtccccggtcaccgccggctattggcgacttggacaagttcatcagaggctatggtgcgtcgtctagggcactctctctgcactggacgcatgcaacccctgataagtctctgttgacaggtcctggcgacgtcctcggcgtcgaaatatacctcccgaaaccaaccgaacaacagaaatccattctcgactcgcgcgtgtggcggccaaaggctcgatccagctacgaagcat

SEQ ID NO: 91134 - DNA, 388 bp, Heterodera glycines
ctgactcgaccacctccgatttcacatcaagcggctttacctcctcgtccccaacaaattgtggcactgttcaaatgctcatcggacaccagcaccaccaacagcttccaacaatggcaccgggccccatcgaaacatcgtcgtcattggccaacagtttcagcagcggttgtgcggaggtcggtgccggcggcgcggacgctggcggcggttcgtcgtcgtcggatgagtcatcatcctcttcctcatccgcgtcgacctcaccggttgtggacgaattgtccacaaatattgttggccaagcagtcccagcagcatcagcagatggacaacaacaacagttccgaaaggcctcactgcagcatcactactcaccgatgcgtgtgca

SEQ ID NO: 91135 - DNA, 545 bp, Heterodera glycines
cccgcgcgccatggccaaaaacgctaaagcttacgtgtccggcaccaagttccgcatggccctcggtctgcccgtcggcgccgtcatgaactgcgctgacaactctggcgccaagaacctctacgtcatctccgtcaagggcaccaaggcccgcctcaaccgcctccccaaggctggtcccggcgacatggtcctcgccacggtcaagaagggtaagcccgacctccgtaagaaggtcatgcccgccgtcgttgtccgtcaacgtaagccctggcgccgtagggacggtgtcttcctctacttcgaggataacgccggtgtcatcgtcaaccccaagggtgaaatgaagggttctgccatcactggccccgttgccaaggagtgcgctgacctctggcccaagattgcctcggcttccggcactgttgtctaagcttcctcattcctcaaggcctacatgctcaacggcatcgttgtcttcccggcgtttgtctgttggatgtgtggattttgatggctggagacacaaatacacctttgtttgt

SEQ ID NO: 91136 - DNA, 475 bp, Heterodera glycines
tgagtccgatcttttcgccatggccgccaaattccaaacggacaatggggaacccattgagctgaaggacgattaccaagacactgacccatcgccaaaggccattccgacggaagggaaaagccgacagagtccgacgattgattttgtccatgggtcccccggctcacacaaagacttcaaatatatgatgctgccccttcgcgagaaagggctgcgttcggtcgcattcaattggtcagggatgggctacactttgttcgaccgtcgtctccgacttaccaattccgagagaaccgcctttgctcgctctttgatcgatcagctcctcccctctccaactgagttgatctttgtaggccattcccgcggtggtgagaatgcccttcgattggcccgtgaataccctgcaaggactaaggcacttctcttgctcaattcatgcggctgtcgacctcacaaaggcgttcgtccc

SEQ ID NO: 91137 - DNA, 343 bp, Heterodera glycines
cggttcggacgattttgcgaagttgcgtcgtgctgctgactactggattattttggcatccactctgaaagggctcgaggaccacgtcataatcaatattgccaacgagtggttcggttcatctggacaggctgcacgttgggccagtggctacgcctcggtgctgccgtccctgcgggccgcatgactcacgcacctcatcatcgtggactctcctgtgtggggacaggacgccatcagcatcacacagcaagggcgcgtcaattttgaggcggatccagatcccaatttgatcttctccatccacatgtatgatgcagctgccccgtatgctgcgaccgtg

SEQ ID NO: 91138 - DNA, 561 bp, Heterodera glycines
atttcgataaattgattaaaaaaatttccttgtaaaggtgaattgttcaaggatcatatgcacgctatcggaagtggagcaaaacaggctatttctgtgagcaaaaatatgcttttttattccttatatacttcattagcatcttttttaaacattaaacatatttaaaaatattttttaatattaattacttcttaaataaatggaattttgaggagtgcgaatggcaattccgttatcatcgatggaactgctcaacaccacaagagctgaaggaacacattggtccaatacataagaaaggaactcgtgaagcggctttcacatatgctattctttctgccggtgtcacacatgaaattggacgccgttgtcgtcttggctttctgcgaagttgtggctgttcagaaagtgataatgcgccaaatcgcgtgggcttttaacaaaaattgcacctaatcaaaatcatctgcatttgatagttattattctggttttaaatttatattttggcagatttaatcgaaaaactggcaaatatctaataaactcttgtgggac

SEQ ID NO: 91139 - DNA, 623 bp, Heterodera glycines
caattgtatttcaatttcatttttaaatccattttgccgcactttcgcaaatgccaaaatcgaaacgcgacagagttgtttctctcacaaaagtgaagaagaagagtcgcgagggcaaagaaaacattttgaaagaggtcagagaatgcgttggtcagtacaaacatttgtttgtcttctccacggagaatttgcgctctgcaaggctggcggaggtccgccaacatttcaagcagaattcgcggattttcttcgccaaaaacaatttgatggccgtggcattgggcagatcggcacaggacgaacaggcgaacgaattgcacaaagtgagcgcacttttgaggggccaaagcggactgatgttcaccaatgcgaaggcaaaggaagtgcaaaggtttttcgacgagcacaccgaggcggagtttgcccaggcgggcgccgtcgcctcggcggacatttcgctcccggccggcccaatgccggcggaattgcacttgcacggcgccatggaaccgcagctgcgcaagttgggcatgcccacacggctggaaaatggtgccattgagctgttagaggcgttcactttgtgcaagacgggtgaccaactgtccgcggaccaggcc

SEQ ID NO: 91140 - DNA, 155 bp, Heterodera glycines
tttggtgttccagaagtagaccgactttagcagttctattccgcggttcatcatgttctgtgcgtacgcctttagtgcgtacgtagcctccacatggaattggttcaggaaggcgctgcgctgcagcattttgcgttgctgttgagcgctgaacc

SEQ ID NO: 91141 - DNA, 620 bp, Heterodera glycines
cccatcgtatttaacgtcgcgcctataagtgcctggcgattagttttttcgcaagaaggccaagagttggctgctctttctctctctccgccccattcagtggcacttttcttcaactacggactggagaaccttagacaacttaaaggcattgaaaggggcgacattttgatggacgccgcttggcacaagtcgaccagtgcacttaaatcgaccacaaaatttttctacactttgagcaaaaagcgccgcctctgtcgccatgccattgcctacgaactttctaatgaaattcgcgatgagatgagcaccccaataatgcaatcggcggtggacgaggaaagggaccgaatgatcgccgcagcggcgtccgccgtcgaagaacgaacggagactcttccgtctggaaatttggaggaacggagtcgaaaggaaattgaacttccggcgccgactcggcccttccctcggcatttggtcggaagtggacaatcttctggcaaaactgcgcttggttttgggacggccaacctcaagtcactgatcagctctttgaaggcagaaggcggaaggtcggccggcggcaccacagacggaggacacaaaacgccgcaatcgcc

SEQ ID NO: 91142 - DNA, 620 bp, Heterodera glycines
gaaccttggcgcggacgtgctcaaattccgttacttcatcggctattacttgcagtcggaggaggacaaaggccccgttttggccgtctccaaatgggagacgcattcgacgccccgctgtgtgatgccaccggtagaggcgagcactgcgggcatttgccgtgccaatttgcgcgacattttcggcttcagcggcggacgcgaattcttcagcgacggatgggtgctgacggacgaaatgcaccaaattttgatgaccgtttccggcgaggcgctcaaattctacaagcagaagcacatcagggaggagtacatgctcaaaatggtgccgtttgacttgcgaaggaacagaaatgacgcttccaatgccgaggatgacgaagagccgaccgtgactgccatggacgaattgccgccgctgacccatccggctttgccgagccattctccgactgagattgccgtaagatcaaattactcgccagtcccgtcgaccgggactctcaagctgactttgttcctccgtctcggtcactttcctcccgaacttgtctttgtcgtccggtcgctccgctctctccccattgcctttttcgtctgacaatcgttgagtgtcctcc

SEQ ID NO: 91143 - DNA, 361 bp, Heterodera glycines
attgtccgacgtcgacaaagacggacatttggactcggatgaatttgccctgtccaactatttgatcaatttaaaactcgaaggccacgaactccccacagagctgccaaaacatttggtgcctccctcaaagaaagcgatggctggcgatgcgtcgtcttccgacaaccaaatttaccctactttggatgagtgatggggcgagaattgacctacagatttctatgttttgtactttgtgactgtgaacaactccttcggcagtttcggcggcactatcccaatcggtttccctttttgtcataatatctaataaattaaccaattgaaaaaaaaaaaaaaaaaaaaaaaaaaaaaaaaa

SEQ ID NO: 91144 - DNA, 469 bp, Heterodera glycines
  unsure (1)..(469): unsure at all n locations
tccaaaatggcaaaaattacaatcattaaattgaacgggtttaaatttaaattaacaaaaatgattaaaaagtaaaaaattaattaacgaaaaaattaaactaaaaattgccaaaaaagggcaaaaaaataaatatataaaaaataaaaataatagtattttttaaacttaaaaattattgcaagaaatttctcaaacgccctccggccggagaaaaagggaaaagtgccatttttggagtggtgccatttcttgtggtgggaaaaatgccaacaaaaaatggcacaaacactcactcattctaacgactttaattgagggcttggtggtggtggaaaatggtgaaacaataggacaacaacaagaacaagaactggggacagagaagaagccccctgtatgggttggcacatttttaatttggcacaatttgtggcgaaatgacnannaaaaaaaaaaaaaaaaaaaa

SEQ ID NO: 91145 - DNA, 630 bp, Heterodera glycines
ccaattccccgacgccgttcttctgcccgtgctgggcaaccacgactcggcacctggcaattcgttcactgaccatcccgcaaaacagcaaatttacgagaaaatgttcataatatggaagcaatggattggccaagagggaaaggagagttttacgcgtggcggatattaccgcgtcgaaacatccgccggactgtttttggtgctgaacacaaacatttactacgaatcgaatccgctgagaaaggagcttgtggagccggaagacccaactagccaattcgactttctgcaatttgagctggaaaaggcccgccaaaagggggtgccggtgcacatccttggccacgtgccgccgggcgcatttgaagaatattcggtgaacaaactcgaaatggagcaaatcccgcaaaaatacaatcaaaaattggtcgatttgcttgttgaatacgcgccacaaattggatggattttcttcggccattaccataccgacacttttagagtgattaagaattccgacggaaaagcagtgcagcgatttttcacagcgccggcacttacgccggcatttcagaagaataacccggcatttcgtgtggccgactacaacactgacacatgggaatt

SEQ ID NO: 91146 - DNA, 609 bp, Heterodera glycines
gtccatcgatgtcgttgccgattctgacgatcgcctccaattggatgctctgcctgacattgaccaccagccaaagagtgcccatccgaagaaaaggaagcgccttttggtggacgaacagctccaattaggaaatcaagaaatgatcgaccgttttaacaattacggcgatttgttgcgcacccgtgacgacttgcacagggaaatcattcagcccgacaagcccaccctttcgcaactgtttttacccgcgtccctatcacatcaaagcattgaatcccgaacttttccctctgtttgacactgtccgcgctgaacaccgcgaacgaccgctgacctttgacgaagcgcaggccatgacattcgaagatatgcaaaaacgtcgtttggaattcgatcttcagtcgtggcattccaacgacgaaccgacgccgctgcggcaacgcgtggaagagagttttggggacgcaggcggagagcagagacgcgaagaaacgcaagggaaagagaaagtgtcggtgagcgatgcattggtcgaaacggcggacaaagaaaaagaggggaccgcagaattggcagcacatcgtccgtcgtctgtgctggaagggg

SEQ ID NO: 91147 - DNA, 565 bp, Heterodera glycines
gtggtgcgcatggagtaccgtatgctcagcgacgaccatctgatggtgccatttcccagtggtgtaccgattcgacgcagcctcggcacccttgggggaaatctgaccgaacaggatcgaaagaatgcgccgctgacgatggcccagtgcgtttccaaagggtctttcattaacattgcgcaaatgatcgccctggttggccaacagtccatctccggcaaacggccttctgacggatttgagaatcgctccggcctgacgcccaccgagttcttcttccacacaatgggcggaagggagggcctcgtggacacggcggtgaaaacggcggagaccggatacatgcagcgacggctggtcaagtgcttggaaggccaggatttggctgtcaactatgacaacacggtgcgcacctccaccaacgaggtggtccagttcacgtttggcgacgacggcctcgacccggcgtacatggaggcgaaggatggccgcccgttggacttccaacccatgttggctcaagtgcggaacatcaccagcaacagcacctgtcttggccaaatgc

SEQ ID NO: 91148 - DNA, 622 bp, Heterodera glycines
cacatatttaatatttatttggcccaataattgtgctaacatttctctgtctaatgtctctgatcagcgtccaacggtcgccctcgccgattgacgaaccttcggctgtgaacgattctgactgcgaaagtgaaggccaaaggaccggctcttccggccaaaaaagtcgcacgctcagcgaatgctttttcactgtgcgcggcacggctgtcattctgccgcaccattcgaccaacgagtcgtccgcgtcgttggctgtccgctgctgctcaaaccgaacaaacgcagagggcggcgaagacagtatccaggctcatctgcacgtaatgctcaatgctttgcgtccggaggactcactgacaatggtcgtccgtttgcagtcgccttccctcgtctccccctcgtcgccccacgtgcgctatttggccgtcctctccacccaattcgacgccaccgagtcgcgcgaggctgcgctgctcggcttccatttcattgggccgtccacttccaccgcccctcgcagcgccattggaattgccgtgcccatcagcacttcctccactatttgccttgacggcgacggtggcatcaaaattgaggaggacaaacagccgaactcgtt

SEQ ID NO: 91149 - DNA, 331 bp, Heterodera glycines
tgtgcgcccgtgcaatgacatatcgtaccatgaggcgatatgtggggctaccgaatggactagatcggacccccaaccgacccattcttttatcaaacgttattagtcattgattcatcccatacgtgccccacacattctgttcttcgtttgctcagtgttcgtgccaatgtgccccgcgcgattgccacaggcccacacttcctgccgttccgtctgctacgatgctctacatgattgcattaaaattctccacgagtgcaactttccatggtcccccgtgatccactgttgccgctttcccgcttctcccgagttgcgcatgagtccc

SEQ ID NO: 91150 - DNA, 615 bp, Heterodera glycines
gtccaattaagccggaaaaaggaaatgtttcggattgttgcaaaacgctcgttgtccaccactcgccaatggcttcagcagccgacccatcgtccgccgtcctccgcgctcagcgctgagccgttcatgaacgccacatcaggtgtgtacattgagcaaatgtacgagagttggcagctcgaccgtggctctgtccacagatcatgggacgcgtttttcaccaatgtcaacgcgggcgccgcgccgggccaggctttccaggctcccccgtcagtcccgtcgcttagcaccgttccgcacgccacggttgtgccgcgtgacatgcgcgaggtgcagccgcaaacagcaggccaagtgatcccggccgatgaactgacacgtgccatcaatgaccatctcaaaatccaagtattgatcaggagtttccagactcgtggccacaacattgccgatttggacccgctgggcatcaacagtgcggacttggatgacacaatcccgcgcgagttggagctggacttttacggcttcactgagcaggacatggaccgcgaattcttgttgccacccaccacattcatcgggggcgaacgcgccacattgtcgttgcgcgaa

SEQ ID NO: 91151 - DNA, 606 bp, Heterodera glycines
gtttgagaaccgtacgaaggaactacaggacatttgacttcgctataatggatttagtgcttattgtgcagcaatatattaatgaaatggtgcgattagcaggaccagggatgaaagccattctaatggacaaagaaacgacgagctgtgtttcttgtgcctatgcccaaagtgaaatgatgcaaaaggaaatttacctgttcgagcgattagattccgttgtcattcgcgagcctatcaaatttttaaagtgtgttgtttttgtccgtcccacacaagaaaatgtgcaattattgtcggaggaacttcaatctccgaaatattcgcagtattatatttatttttcaaatcggattccaaaagcggacgttaaaatattagcggagtcagacgaacaagagactgtgagagagttgcgtgaattttttgtcgacttcgttccgttggccccacatttggtatctctaaacatttctacggcatacgaaacccaacaattcggcatttccgcttcgacttttcgacggtgtttgcaagcattggttgcattggcactttcgttgaataaaaagccaacgataagatatcaaaagacatcgcgcgatg

SEQ ID NO: 91152 - DNA, 299 bp, Heterodera glycines
ggcacaaacgcggatgggacagtgacgtattggcgctgcgtacgtacgaattcactgcaggagggcggctgccgtggctctgctcggactgatgaattggacaatatcatcggactgccaacgccacacaaccatccggccatacctgagtttttctaatgcaattgtgatgcaaaaaccaccacacaacgaaggactccgtgcgaagaagtgccatttgttattctgttgctattttatgtatttgaatccattttattgtataaatgcaaatttgaaaaaaaaaaaaaaaaaaaaaa

SEQ ID NO: 91153 - DNA, 622 bp, Heterodera glycines
gtcagatgaaaccgacttcgccattgttatgcaaattttctttgctgacaaatcgtctcttttcgcttcaaaatctcatcaaactttttctttgaatgggacgttcgccagtgccaataaattgaaggacggagaaaaggtatttttacatccgctctctgaaaatgctttaaatcggtgtgaatcagttgtgattaatcctttggataacggcgactgggaaaaaattgtgtcttcaaccgtataaatagaagaactcctcctcggacagctccgcgtaattcagacgaatatgcgaatttgtgtccattttaaaaatgggcaaatggccaattttaccattggagaaattttcccccgcgttcaaatggccaattgcttcgcaaatggaaattccctttctcatccgcccgcttttctgatggcttatggcactcgtcttctcgttaatgcacctcattctgctgctgcatctgatgagaaattagtggagggaaacgtaaaaggaatgcgaaaagaaagcgaaagggcggcggaagggacggcgtcacttggaagggcttttgtgccggggattggttccgaagtgtccgactgtttttactcatcgatggtccctgct

SEQ ID NO: 91154 - DNA, 623 bp, Heterodera glycines
gagagagaggaagagcagcaacgagaagagagagcggacgaacagcaacaaatgatgctgcagcagcaacatcatcaccgcaatggcgtcaccagtgacggcatcagacggacgtacgctggccgtgccagcataggcagcacagggacggcgagcggtgggcgccagcacccggtgaacggcatttgcgaatgcaagcattgcactgaagcgctgaacgacctgcattcgtcccgtggctacaaaaatgccgagtctccgaactcgacgcacagtgagggttctgccgacagtggacgagcaacgggccatttgacttcgtacagtccgtttgcagatgcggcagccgagctgggacagcaagcagcggacaatttaccaatttacgagttcgaagtgcccaacacattggtcggactgatcattggcattaagggcaaaacgataaaggagctgtgcactcgggcggacgtgcgcatgctgatacgaccacaccacacgcaaggcaaatttgacacccaccagctttgttcagtggaggggcgtcgagacaacattaacaaatgtcttcacatgatccgacttcgttttccgccgtgtcgctttcccgacctgaacttgaa

SEQ ID NO: 91155 - DNA, 601 bp, Heterodera glycines
caagaagtgagttcggaaggcggcttccctaattacaaccgcaaccaatattttaaaagcattatcgacagtttgtcacagaagggacttctcgaagcgaatcgtcaaccgcccatcagtcactcgacactcagttttttgatggaaaggaaaaaggacccaatgtcaatggtcaacatttactgctcggcttcgggccaaggttgtgggaattttcaatggtggttttcctaatcgagactttagcaaatttgttttcatcactgaattgagaagtcggcccgtttatggcttttgcgcagcgtcaaaaaaggaggccaaaaaggcttgcgcattgcgacttctcgacattttgatgacagaagaacgactcgaatgtgtcaatttgtccggacggaaagtgaggaaaatgccgccaaagccaattccgacaaaagcagcgaatgtcgaacaaagtcaacagcaggaaaacatgcacttgtcattctctgatgacatcgacttggatgccattcggaaggacttcgaacgccttaatccgctcccatcggccgctaatgaaagtgaagtttttgctcgactgcgctcaaccgccttcaga

SEQ ID NO: 91156 - DNA, 602 bp, Heterodera glycines
ccagttaagctatttcatgtcacattatatttctgcagaaaatgagcccaaagctgtcgaagcatctcaaccaacaaatcgtgtttttataaacaatttgacaagtgatttggaggaattcaccatctacaaatattgcactgcttatggtgagatcacaaaatgtcaaattctgaaggactcaaaaaatggaatgagtcgcggcttcggctttatcacttacgccttgccatcgtcagctcaagccattttaaatggtcgtcctcattacattggacaccataaaattgacgttcggcccgctttcccaactagtgagattgttgtttccacgatggtttcgtcgtcctcttcatcatattgcgaccaatccgacgatttgccaaaaatacttcagtctcgacgtttgttaatcgtctacaatatcgctgaggcaacgcgaaacgatttatctgaacccgcaattttcggctatctcagctcttttggcattgtcaaagaaattgtccaacaattctcaacttcgtcggaggaagcaaagcaaaatcccgtcaatgagtattggatcgttgattttcttgacgaactttcagtcgaacgtt

SEQ ID NO: 91157 - DNA, 577 bp, Heterodera glycines
cttgtgtcatcgttcctctcctcgtggtcaccataacaatttgtgcagcaatgaacagtcggacagaagaaacgctttggctgtgtgcaattgccagcgcgctcggtgccttcgccaaaatggtggccatcatcgctttctccagcattttcggtttcacccgcgcgatgggaacgatggaaggccgacggagggaagtgacgaaacaatcgcatttactcagcggcagaggaagcccttgaaagagaccgatggctaacccactttttcatcgtccttctgatcggcgaaatacttctgatgctaacgatcgcatgcatacgctgtaatttgaagttcctaaaacagtgctttcgactcgacccctaatgaatggcgtaaaacaccaaataattggcgaatgaatgtgttttgatctccaaatttctgttttttttttagtgtatattattacattttccaaaatagcgacgaatagtctcatcaaaatgatgaattttcaggccaaaaattgttaaatagcttaaaatccatgccctagtcattattatttattgcattcaaaagacgctttttt

SEQ ID NO: 91158 - DNA, 608 bp, Heterodera glycines
cttttgcatgcccctgcccaacccaatgacccaatgacccaatgacccaatggccatgcatacgaccctcgcccgactcgtccaaaccgccggcctgacccgaccggcctggcgtcgtctcacgcccatctctgctgccattcctgccggcaatcctccttcaccaccgacctcgcccatcgaaccctcccgccacatctccacctctccccgcctcctctccggcaacgaagatggcgactcgcgctaccctgccatcgccgcgggccacggcccctggccttttgcctcgtcccctgcccagctgcatctggccgtccgcccgctcgccaaatcctacccgtcgcacctgcacatccaagtgcaatggggcgaccaagacgcatttgggcacctcaacaacgtctcgctgatgcgctactttgagtctgtgcgcatgcaatacctgattgacttttcgcgccacttgcccgccggccagcgccactcgtttgcgcacccgacgcctggatacccgggcccgattgtggccaatgtcacgacgcggtatcgcgcgcaggtgcattatcctgacaccctgacgtactttttgcgggtgagtgagaggg

SEQ ID NO: 91159 - DNA, 542 bp, Heterodera glycines
ggttcatttcccagatcaccccccaattttgccttatgtattttgtgggcacccaaattcaaaattggacctctcaatcgttggatgaacttgagcagttgcgcatttcggcgaatgccaagcacataaacaggtttcagtccgtgttggctgaacgtccgggcattgtcagcgacgactttttgactgcccgagaggaaacagtaatttgtcgaatcgtaagcgaatccgggataagatttgttttttattttaagccagaaatgtggccatcagtgcgttggattgctttttcttatttcaaacgattatatttgcgagaatcggcgatggaatattatcctaaaaatgtgaggatggcctgatattatttggcagctaaagtagatgacactaaagcttccattgacaattgtggagacaatgtgagaaacggcgcaaggacaggcgacacggagaccatattaacaatcgagcagggtgggacgcttaaacttaaataccattggaccgaacacccgccgcgccgcccgttggaaggg

SEQ ID NO: 91160 - DNA, 397 bp, Heterodera glycines
gtacctaagtgaacgggaaaaagcgctgagtgttcgctatttgcatgagcgtgatgccatgtttgagcgtttttcggagtggacggagcaagaccagacggacttctgcaaacaccttctgcagagcatgtgtgaccaccagcacggccaaattgaccaatttttgggcccaatgcttcaacgggacttcattgctttgttaccaaccggattggcggagaatgtgctccatttgttggacaccaagtcaatgtgcgcctcggagtttgtcagccgcccgtggaatcgagtcattgatcacggattgttgtggcatgagcacatcgagcgtcaagtgagcaacgacgcgctgtgggccggactctccatccaacgctgatggaagaagtacttcttc

SEQ ID NO: 91161 - DNA, 501 bp, Heterodera glycines
tgtgcattttaatttattttatttcaccgcaatttctttcctaactctccgccaatgatttttcttcttttttgttttatggtgttgtttgccttttgcggccactcaaatggccaaatgactgctgccaaccaaacttggcttgcctcccaacaggcattggcaagaaacacgggcagatgcggctcggtgagagaagcggcggacagactttttgtttcgtgaaatttcagttttttgtccgttttggcgacttttgctacttgcgctgccgacaacgcttcggcgatgacggagccaacggcgactgtcccttgggtggaggaccgtgccttatggtgaacagaaacgtgaacatttgtttgcgagttgctttcagcctcagacagcagtgaaagaggcaaagaaagaacgaaaacattggggaggaagtgatcggcagaacaaatgataagaaaaatggaaatgattgtgattttgtgaattgaattgatcaaaaat

SEQ ID NO: 91162 - DNA, 605 bp, Heterodera glycines
atttccccgttttgttcttctttgccactcattgaccgattgtttcgatggctcgagaacgcattgtaacatcaaagaaacgacgtcatgatcgcgacagttcggactacgtggaggaatcgaagcggcgatgcgacgaagcgcggaaacggcaaatcgaccgggaggaccgcgcacggaggcgttctcgggagaagagggagcaggtggagaaggagtacgaatactacttgcaaattgcgtgttcggagtccaaaaaggagtcgcaaaaaaacggcggacagcagcacaatttcgatgctaatggaggcgcacgtcaccatcgcacacacaaccagcaccaccactcggcaattcagggcgaatgcggtgtggttgtaagcgcatcgccagcacatcggctgccgattcaggacgacaaagatggacatttgatctactcaaatggggacagaattgacaacaaatttgaaatcgtgaagactctcggcgagggaaccttcggcaaagtcgtccaagtgaaagacttaaacaacccaaaggggccgcaacgggcgctgaaaatcatcaaaaacgtgtccaaatacagagaggccgctcgactg

SEQ ID NO: 91163 - DNA, 604 bp, Heterodera glycines
  unsure (1)..(604): unsure at all n locations
gaacaatgcaaacagtggaggaccaccgcaaatgcgcgggggtggcataacgcagcagcaacaaacggctggcaatcatccacagcagcaaatgctaggctgcgccggacagccacaggacccgaaggcgcgcaagttgatccaacaacagttggtgctgctgctgcacgcacacaagtgtcagcagatcgaacggtctgaaccgctacaaaaccgtgcgccctgcacattgccctactgctcggtgatgaagggcgttttggaccatatggtcgactgttcggccggccggcagtgtcagtacgcgcactgcgcctcctcccggcaaatcattgcgcattggaagaactgtaacaaggacgactgtccggtgtgcaacgttcacatcaacgagacaatggtggtcgacccgcgacaagctggcattatgctgagtgctgtcggttttccctctgtaactttggctcaaggcgcgattggccaacagcagcagtcgatgaacaatgcaaacagtggaggaccaccgcaaatngcgcgggggtggcataacgcagcagcaacaaacggctggcaatcatccacagcaaatgctctgcgcgggcag

SEQ ID NO: 91164 - DNA, 615 bp, Heterodera glycines
cggcggtgctgcgctgagccgtgcgtcgcctgggcaccgatgcattggcggcggcgccgcgtgcgatgtgctgacgatggcactgccgacgagcaatgtgatcggcggtgaaacactacatggcactcgtggacactcaacagtacgaggcgtgccaccaagaggcagtgacgcggtgccatgccacagacaattggcacgaaaataccaacaaattgccgggacaggaccaaaaagtggtggtggacccaggaccacaggtgcttgcttgtctgtaccattcaggcttcgatgagacggacccgttgggcaaagagtgcgcgttgtatgttcgccaagtgttgcgcgagcgtgcggcacgcgtcaatatgctcccggacattgaggagaactgttgcgacgcactctcggaatactgcttccaaattgtgatgcttgacaattactgctcgccaaaggttgacattgagtcggagggcaaaacggtgcacagttttctggtacattcgcaggagaaggacgaaggaaagaatggactccactatttcaaaacgcaggagcgcgagcgcaagaaggcggagaaggacaaaagtgtcaaacaacgccaatggcaca

SEQ ID NO: 91165 - DNA, 616 bp, Heterodera glycines
gatatggccgatcaaaccgacgtttttggggttgcttcgtcaagcattggaaagccaatcagagttgaacttgggacagggagcagaaaaacaattatttccggcaatttactaacgacagacccggagagcggctcaatagttttggtagagaagcgtcagcaaaataaaacatcggatcaggggaagtgcagccaacgattcattctgattcccggcagttctgttcactctgccaaattggttacaattaatgaagggacaattgggacggtaaaaaaggatggacaattggaggaagggacgaagagtaatgccgaactgcgcgagaaggcggacggaattgagtcgggggacgaagcgacaatcgaaagccatggaaaaagaaccctgtccgaaactgtgagaatctttgacgaattcgcactttcgaggcgcctttgtctgattgatgcactaaacaaatatggcatcaaattcagcgaaaagccacatgttttagtacaaaatattgacaatggacagactgagggacaaatgccatcgacggtaatttctctgcagagcggcggcatcaaaatctatccgccgtacggaaagaatgatataatcggcg

SEQ ID NO: 91166 - DNA, 247 bp, Heterodera glycines
atcgtagcagccccactaattaatgtgaaaatatgaaaaattattttttattttgatgatgcaacgcatttgttttcatttctctcctttatgaaaagagccattcattcttcattcattgatcatttgtacacattatacacacaaaattgaccacacaaaattgatgatcggactagtataactttctgtaatatttttgatcacttttaaattttgattaccgaaaaaaaaaaaaaaaaaaaaa

SEQ ID NO: 91167 - DNA, 510 bp, Heterodera glycines
tggaggtcgacttggacttggacaacaaagactacaagaagacgttgaaagtcacttggctggccaaacgtgccgaaaacttcgcggtgaaaacggtccgttttgatcatttgatcagcactccgatcattggcaaggaggaggactggaaggagttcgtcaatcgcgacagtgagcattttggcactttgttggccgagccggcacttcaaaaagtgaactgtggagacattttgcaaattcagcgcaaaagcttttacatttgcgacgcgaagacagccaactcaatgacactcatcgaaattccggacggcagagagacgaaaaacgcagcgcaaaaggggccagagggaaaagagacgaaaaaggaaggaaaagagacgaagaaggcaaagattgttaattgagacagtgtattcatgtggaagtattcgcaattgttttgttgtttttatttggtgatttctggtgttgattaaaaagaaagaaactgtaaaaaaaaaaaaaaaa

SEQ ID NO: 91168 - DNA, 330 bp, Heterodera glycines
atctatatctattccaacaacaaatatatgatgagctcaaactaaacaaccaataaaaccaatactaataatagcgtaaattattcctaaataaccaaaaagaatttttttacctgtatagaattggatagttaatctaactaaaccaaaagcaggtaaaattaaaacataaacctctggatgaccaaaaaatcaaaataaatgttgaaaaaccaaaggattacctccacctgttctatcaaaaaaatttccattaaaattacgatcaactaataaaagagtaatagctcctgccaaaacaggtagagttaaaattaaaagaaaaaaaaa

SEQ ID NO: 91169 - DNA, 545 bp, Heterodera glycines
gacaaatttcccactcagtttaattaattttttacgttcaatggcaacaacttcctctgaaaatgaccagccccaaacatcggcgctattggccccggcactcacaaggggaaatccgttcggtttgtccacattaaaaataaaccggcgccgacaagagggcaacccggtgctcaaatacattcggaatgtgccgtacgaatggtcatccgacgtaaaatgcgattttgaatgttctggtaattgtgggcttctttacctggccctgaaataccacaaactccactgcgggtacattgagactcgtttcaccgatctgagggcgtaccccgtgaaggttctgttggcttacgtcaatgtcgaagacccttcctttttgcttcgtgacctgaacatgttctgctaccgaatggacgtttctttggtcctttgctattccgtggaggaggcggccgaattcatcgaaacgttcaaattcactgagaatcgaagtgccgaaagcgaattggccagaatccaacagaacaaattgcaaagacagcaac

SEQ ID NO: 91170 - DNA, 224 bp, Heterodera glycines
cgccgcaccggcaaggactgatcgacgaagaggaaatggagaaactgcccaaagaaccgctcaaaatctcatccgggaaccaagttaagcagtccaaaaagagaagcagcaccgcaggatgaaaggggagaaggaaaaaggagtttagagcgtttagcctttgtttttttttgtttcattttttgtcgataaatgtaatgtaaaaaaaaaaaaaaaaaaaaaaa

SEQ ID NO: 91171 - DNA, 202 bp, Heterodera glycines
atcccccaaaaaaaattaaaaaacgggcgcgaagcgcccgtcatgaggccgccaagcggccaaatgttctcaaaaaattaaaagacgggcgcgaagcgccagttcttaggccgcgaagcggccgaatgtccccaaaaaaattaaaaacgggcgctatttttccgtcatgaggccgcgaagcggccgaatgttctcgaaaaat

SEQ ID NO: 91172 - DNA, 580 bp, Heterodera glycines
gtcaagcagagataactccatgaatgacagcgtctactgaatgcatttctccgcctgaaaatgatgccccgtcgtctcttgctgctgcacaccttccgggcaacgtcgcccttgctgtgtgctttgggtccatcgttgacagcggcgctcgtccgagggctgcgcacatcttgtgtcatgaacagcgcagctgcgttgcagagcccaggaacttcacagccgtcatccacaagtcgcgatccggcttctgctggtgcaagctcggcggcagccgatcctcgcggaaacctctttgctgaacgcgcatccaaaaccgcacaagctatccgggatggcttctttacttcgatttccaaggccaaccgggcggtcatttctgcttccgacgccaacgctgccgacgcacccgtcacaggaatcgcctccatctcgccgtccgttgtagatgtgaacgccggccaccaacactcgatcctcgggatgaccgagccaatggcgacgccgcttgcggtctccacgctcgctccgccagcaatcccagatttcaccgttgtcagcgccggcctgggctccatgatcc

SEQ ID NO: 91173 - DNA, 516 bp, Heterodera glycines
gtgcgcctattcacaatggtgtcattatcacgtcgccgttgcagggaaacattgtgcatttcgtatttcgggacaaagactcgccactcttcgcaatgccacggggactttttgtctgcaaaaatccatatggcatgaaaaatgcacaaattattcgactttaaaaaactctggagttcggcgatacaatcattttcacggccgaagaacgaacgaacacagtgttggattacgagaagggactgcaagtgtttgagacggactgcaattatggcaaatatttggtgaaatcggtgtgcattttgccacccgccaataaagacccttcgcgctgttggtgtgactatttcggttggattgatttaactaagaagcaaagtgaagagttgcacatgcgcgccatggcggacgtgcccatttacacttgggtggccattgagatcctcagggacagagttgtgccgaaataccacgattttatcgaaattgcggtcgatgagcgcaaaaatgtgtggg

SEQ ID NO: 91174 - DNA, 614 bp, Heterodera glycines
gtttttgtcattttattttctaattgattatacataataagttgattggaatggtggaccatccgcgacgcatttttaagcaaatttgcatttgcgccgatattttgttggactgtttccgcctgttggcacctgccaaagtcggcttggcattggcgttggtctccgaccgcttcgatgtgcttgcggacacgcatttccgaagcagaaaatggccaattggaaatttggggatttgccgggggaaaaacggcgccgcaattcacaaccaaaagggcggcgaaggtcgaacggcagcagtgaaacgactgctgccaattccgcaagtgccgctgccgaacggcgtggtcggattcggacgcattggcctcggttacatcgacggcactgtcattgcctttctccgtcgcattcggcgccttttccacacaaacggcgtcactttggaactgagcttttcctcggttgagggccgcagctgcgacgcttttgcctcttcgatttggccccttttgaatgccgcggccatcgtcgaaatgcgcttcaaagtcaacaacaatttgggctatttgcgctcgcgtctttcgccctccattctgcgcgactgtgccaat

SEQ ID NO: 91175 - DNA, 286 bp, Heterodera glycines
gattgaaaatgagacagcacctgatgactacgcggcttcctctgctgatctgcgtcatcgattggcttgtggattggccgaaggaacagaaatggtccaccaaattccgctgaatatgaacggggacattaccggactaatcagcttcgagaagggatgttacattgcccaggaactcgttgcccacacgcatctcactgccattgtcagaaggcggctgatgcccttccgaccaatcgatgacaaaaatggacgcccagatttccctagacggatttctgctggg

SEQ ID NO: 91176 - DNA, 605 bp, Heterodera glycines
ggccagtgaatgaatggatgcgccgcaaccccaagcattagcagagcctcagccttctcgcgacaacccacccgctctcgcacttggttcttctccgcaagtgcgcacgtctgcagtgcagtccatgtccccagtcggcaggatcgacccagcatcttccccgttgtttgcatccaacctccctgtacatccaattccaagcccgaaaatgccgtcgtccaccgcccgctgtcacgtctcccgccggccacgcctggcggtcctcgccggactcgcgctcgcggtcatagccgtcatttcggtgcaatcgccgcgcttggccgtcgccgtcgctgcgcccaacccgcagcgcagagacggtgggatcctcgaccgcatcttgcccaaccgcgacggtggcggcaatgacgactcgtcatcgacgccgaccactcctttgcctccaccatccgggaaccgcaacggtggcagaaatgccaacgacgacgacattggcattttgccgatcgtcggcggaaaccagagcgaaaacgaaaacgccgacaataacaacggcggcggcagtagcaacaacaacaatggcaacgggggtggccgcaacagtg

SEQ ID NO: 91177 - DNA, 605 bp, Heterodera glycines
ttccaaactccaccctcccgtcaaccatggctaccgaacgcgacaaccaagtctacatggccaagctctccgagcaggctgagcgttacgacgagatggtcaacttcatgaaggaggttgccaagctcggcgtcgaactcaccgtcgaggagcgtaacctcttgtcggttgcctacaagaacgtgattggtgcccgccgtgcctcgtggcgcattgtgtcgtcgattgagcaaaaggaggagaacaagggcaactctgctcaagtggacaagatcaaggcttaccgccaaaagatcgaggccgagctctcggacgtgtgctctgacattctcgccgtgctcgaccagtacctcatcccctcggccgaggctggtgagtccaaggtcttctactacaagatgaagggtgattaccaccgctaccttgccgagtttgccgccggtgacaagcgcaaggaagccgcgtcgtctgcccatgatgcctacaagcacgccacggacattgcccaaaccgagcttgccccgacccacccgatccgcctcggtcttgccctcaacttctccgtgttctactacgagatcctcaactcgcccgaccgcgcgtgc

SEQ ID NO: 91178 - DNA, 465 bp, Heterodera glycines
gattgttgccagagtgcgtatttgatgcaaaattgttgtccaccgctctgtcatcgcgcgtcccaaaagtgttggcatcggatttcccatcaccggcacttcacactccgtcgtgctgccattgaccaattgttaaaggccaacgagcgtcgcttcatcctttctgatgaccaccagcagtcggtattaagagtggacgttgcccaagtcgctgcaaaccgaccaatcgaggacttttactccgcttcaaagtgtctctattccaatgcctttttgtttggcatttttgatggccatggcggagcggcgtgtgcaaggcacgtgtgcacaaggttgttcgactatatttgttgctctgcgctggacaaacaccgagtggtgcaaatccccgtgggggaacaaatccaatggcttggggccaatgccccgcacagtcttccacaagagaaggacgacgcccatctc

SEQ ID NO: 91179 - DNA, 615 bp, Heterodera glycines
aaggcttggagctttatgaacgacggtctgcggacggacatgtttttgcgctacaccccggagacaatcgcttgcgcatgcattcaactcgcggtccgaacagtggaccaaccaattgtgttgcccaccgaaccctttgcatggtttgaactgttcgatgccagtgaccgcgatgtgcgcgccatttcacagaccatttgggagctgtacacgcgcaaaaaggcaccaaatttgaaatgggtttcggaccatttggagcagttgtaccaaaaagcggtggttgagccggagaaggcgcgcaaggagaagacaatggtcgaaatgcgagacatcaaggaacagattctgcagcgcaaaagtgcgatgcttttcggagcaggaaaaaccgtcgctgacgacagatcgccaccgaaacgtcgtcgccgagacatggccggacaaaatgtcgccgagacaaaacgtcgccgggacagaacgccaccgagacaaaacgtcgccgagacaaagcgtcgccgggacaaaacatcgccgagacaaaatgtcgccgagaaaaaatattccaaaaattaattcgaaaattgttcttaaaaaccatttttttcgctaatacactca

SEQ ID NO: 91180 - DNA, 555 bp, Heterodera glycines
gtcttttttgtacaatattcgagtcaatgtcctcgcttttcgattccacttgggaaggccatctccaacatatcaaattttggcgcagcgaagtgaaacgatcactgggcgagtccatttcgaatgtccaattggtgaagggagcggacggaacaatggcagttgttggccttgcgactgcaccgggcgattcggcacacgtccaaatggtcatgcaagccgaactgcccgacatttctttgggctacgacttcgagcaggacgagacaaagcaaaggccgactttggaattgcagccgctgttttcgcataaaaccgaagcggagcattcgacggacgcatcgcctcggaaaataccgcccgaattggcgttgcattacgaaagaatgcgtggccaaatggtggacggagtggacgacttcaaattgcacgagaaaagcggcgcggtgctcttcaccaccgccaaagaaattagcatttttaagggcggcgaaatcaaaaacatcgctcagtggcgtccctcgtcagcggtgctcaatgtatccttttgtgaga

SEQ ID NO: 91181 - DNA, 253 bp, Heterodera glycines
caaggcgaagagcaaggacggcggaagactgttgcgtgaacagctccatatgtacggtgttgagctggcgttaggacgacgaaaacagagcccattgagctgcttctcaagtttggtggagcaggaagcagtgcagttggccacggactttcgtacaatttgtcagcgcgattatcccatccaagctgttgcgacgcattctcttgctggtgttaacaatggtcaagatgcttacattccccgtatggaattg

SEQ ID NO: 91182 - DNA, 428 bp, Heterodera glycines
gttttgcagaatatatgatcaaattctgcaccaaaacgtgtttaaagtgtggcgaggctacgacgagcaaagcgaacggcgcaaaatctgtggcggcggtcggaccaccgcccatcgaattaatcattgaaccgatgatggagacaaaccacgaaaaggggagaaggagcagtaacagaaacaacagcagcagcggggggaggagggaatgtgtggacagaggcgaaagatgcatccaatggaagggcgatggactgtgcgatgccaaaagtgggacgactaaattcaacagaggacagcgaagggcgtgtgccaaaacgtgcggcgattgcaaatgatcagaagcaaaagaattacataaatgtacaattacttattgtgctttgcataaacacctaaaataaaaaaaaaaaaaaaaaaaaaaaaaa

SEQ ID NO: 91183 - DNA, 527 bp, Heterodera glycines
catttgagttcggtcctctttttgccactgttacttttgctttccaaattcacaccatcatcagtggccactgaattgacatttgaattgcccgacaatgcaaatcaatgtttttatgaagaaattaaaaaggatgttgactgttcgttggaatttcaggtggtcactggaggccaatatgatgttgatgtggtgttagaagatccgaatggcaaagtgttgtacaaggaggccaggaaacagttggacacccacacgtacaaaacagaggccaacggcacgtacaaagtttgcttctccaacgagttctccaccttctcacacaaggttgtgtacctggactggcaagtggggccggacgagcagcacaaaatgatgccaattccgcgggccggcggtgcgcaagcgacgcaaatggagcgcagcgcggagacaatcagtgaccggctccaaattgttgacgattatcagacgcaccatccgctgcgcgaggcgacctcgcgcaagcgggcggaagatttgaatga

SEQ ID NO: 91184 - DNA, 611 bp, Heterodera glycines
gtttgagaaggaccattttttcgcttttttatggccaaaaaagggggcggaaatgcggcggaagtgcccgactcattggacgaaattaaccttcgcataaatcacacagccgatgagtctttggaaagtacgcggagaatgttggcctattgtgaagagagcaaagaggcgggcatcaaaacgttagtgatgttggacgaccagggagaacaattggaacgcgtggagggaaatttggaccaaataaatacggatatgaaagaagcggaggagcatctgaagggcatggagaagtgttgtggcctttgtgtgttgccatgtttaaaaggcaacgacttcgagaagaactcggagtacgcgaagacgtggaaaaaggacgacgacggaggagtgatcagtgatcagccgaggatcaccgtgggcgactcgggcatgggcccccagggcggatacatcacaagaatcaccagcgatgcgagggaggaggagatggacgagaacattcagcaagtgtccacaatggtgggtaacctgcggaacatggccatcgatatgtccacggaagtgtccaaccaaaacaggcaattgtcacgaatccaagaaaaggcgct

SEQ ID NO: 91185 - DNA, 352 bp, Heterodera glycines
ggacccatccgtgaaagggatgattactttccctcaagacgaggaaggttcacccgtgacagttcatggcgaaatcagtggtcttgagcctgggctactcggcttccatggccatgcctacggagatttgtccaacgggtgcacttgcgccggcccgcatttcgatccaacaaacaaaacgcacggcggaccgcatgatcaaatccgacatgtcggtgatttgggcaaagtccatgctgggcccgagggaattggcaagctgacattttctgaccatttgatttcgctgtgcggagccaacaacattgtcggacgtgcgcttgtcgagcaacaatccgaacgacaatttggg

SEQ ID NO: 91186 - DNA, 262 bp, Heterodera glycines
gaagcgcacttttcctaaatttgtctagcgtggagtagacttataactgcttctggatatgaatgggaaacaagtccaccaaatgattcccgcccgtcaacgtcggaagatgaaccgcggattgtgcctacagcccaactcttggctcgatctgctgcgaaatgcatgactcaattgtccccagctgatgattgcggagtgcgggaagactcatttgcgagatatgatcgtgctgccggagatggtcggctgtgtgggtgtg

SEQ ID NO: 91187 - DNA, 607 bp, Heterodera glycines
ttaagatttttttggggttccctccccggacgacttgcccaccagccgagtctaattgcttggcacattgtgtggaaaattcgaagaattttcaggcctcgaaattaattgtgattgttgtgattagtcgttcaaaatgggcgccacagaaagcgttgaacacagcaaaagcgatctgcagcagctgaagggcgatatattcgtcaatgggagacctctccccgaccaaattcgccaacgaatcgtcgctttggccatggacggcatgcacccgcgggacatttcgcgcaatttgctcgtgtcgagcggatgtgtttctaaaattcttgcaagttgtggcaccatcgatggccgttccggaccccaaatgctgagtcaagaaatcgtcgagaaaataacgctgtataaaactgaatacccgtccatttttgcttgggagatcagggaccggctgaagcaggacagtttgtgcacggcggagactttgccaagcatctcgtcaatcaacactgtgcttcgttcccatgcaatattgtgaaagcagcagatgaaaagcaaatttgacgaaatcatgaaagaaaggagagggatgaatcggcaaacaaat

SEQ ID NO: 91188 - DNA, 261 bp, Heterodera glycines
  unsure (1)..(261): unsure at all n locations
gtaaatacaacatctgaacagaccgaatgcgaatcgagttcgacacgcttttctcatgaaattgttttggatgacgatggcgtcgactgtccatccgttgttagagacgaattgccggcgaaaaagccgaagagaatttgaatgaatagaaatgaagaccttttatttcttttcgggtattcgttttgtttatcgtcgctcttttttacggtgctcaataaatttatacatttanaaaaaaaaatttttaaaaaaaaaaaa

SEQ ID NO: 91189 - DNA, 352 bp, Heterodera glycines
gctgacatggatatttggtcattggttggctcaaaattgaaagtgctcggtgaagtgaatctctctaacgaaacctatcgcggcattgagaactcagagaaatattgtggggcgagctcgcttatcacggatttctttaacgtgatgaattgtggcgatgacaacggagaaccggtgacaaaacgcataaaaccgatggattttggagtgcaaagaatgcaataggacatctgtgagccattgtaaagaaagagtcttggaacttttaattgtttcccaattgtaattcctttctttatttatttgctttaaaaatacaatatgacaaaataaaaaaaaaaaaaaaaaaaaa

SEQ ID NO: 91190 - DNA, 614 bp, Heterodera glycines
atttcttatttatttttcataattgaatatggaggacgttgaccgaatgattgttgaccatctggtcaatgacttgcgctgttcttttgcggacaaagtgctgaaattggctgattttgattccgcgcacattgtggagggcattatccgctgcatttggcggtgtcggcccgaaagtgtcgccacttttccctccttccaattgcccaacaatcccattgagcggtttcgtcttgcgtccaaaatttcgcgtgaagttcaggcaattggcgtccgtgaccatcagattggctaccaggccctcttgtaccccaacgttttcgacagtcggcacatttttctggcacttttcgagcattttccaaaggaaacagtgaaaccgacggacgaaaagccactgagtccaattgaaaaactgagggcggaagttggcgttgtaatcgctgaccaactgaagggcgaatggacacccgaattttgtcgcttttacgatttgcaacggatcggccgtttgtggtttccgtctggcagaaaagcggaggaggaaaagcaacacagcagcgatgtttggacgacggtcatttgcacgggacaacagccgaaggacggccaaa

SEQ ID NO: 91191 - DNA, 532 bp, Heterodera glycines
cggtgatttgttggccaattctgttaaggatgtgatggagacattggccatggtcgactacccgtacccggccaccttcttagcaccgttaccaggatggccagttaaggaggcgtgcaaagcctactccacaaggctgggttcacagcacggtctggcgatggcggcacatgccatgctcaacctgttctacaattacaccgggcaacagaaggatttgtgcctgtgtggcaatgattgtccgggcacattcagtgagcttggcgaccctgacggatggccttggcagtcctgcactgaaatggtgatgccaatgagcagtcatggcccacccaccgacccattcagtgcctcctgtccttaccatgtgcgcgacagcttcagatggtgccaggaccattttgccaagttgggattccgtactgaactgttccggcctctgtggggaatgattaactacggcacagaatatccaaccgcaacctacattgttttctcccacggatggctggacccgtgatcaggcagtgcg

SEQ ID NO: 91192 - DNA, 617 bp, Heterodera glycines
gaattgttaaaatgagtttggttgcccgttttttacgtccgtccaatggttggattttttcatcggttttcagacagcagcaactgttgcttctcatcgcgcgaccgtatgcaagtgatgccattgcaagtgacggtggcaatgaaaaaggccgaaatggacgacactcatcagcggaggacacccatccatcttcggcgcccgcagcggacacgcaacatggccagggctggatttcgcgcattttgaccggtcccgcgggggcggaagggctaaagcaaagccactcgtctatgctttctgttggcgactccatctacgagctgcagacgcatgacgctgttggtggagacagagacaaatatttgggtgcttataaaaagtatgcccaagaagttagtgctgcgacgccgggcgccactttgttcggcagttggcatgtgctgttcggcaaccaagaccaggtggtcaacctgtggcgctaccaaaatgggtaccccgatttggacagccacatccgggcactcagctccaatacatcagtgaaaagtgccgagttagactacgccagactgtgccgacgacggcgtacagtcatcaccaagccgttcagttat

SEQ ID NO: 91193 - DNA, 316 bp, Heterodera glycines
gactcacatggtcctcggcattgccttcgtgtgctctctgatggctatgatcgccacagttggctgtctgccatctctgtgcgcagagaggaccccactgaacagcaaactgcgctgcggagttgaggtcttccccgtcaacaccgagtcggactgtcactgtgttgacggacgagtgaggggagcttgacgacgtcggcgaatccccgttgatatcccctggaaatccgtctgccgtagggaacgggcactgggcggacactgggagcgcgatggcctccaagagccgagcggtcccaactggccgcccggggcg

SEQ ID NO: 91194 - DNA, 537 bp, Heterodera glycines
caggaagcagacgaagaggaggagaacggggagtctcaggagaagcatctcgactcggtgctttacgacgagggcgcatttttggtgcttccctcaggtgctcgcattggtcaccggtcgttggtccgatactttcgccagcgtttgggctatggccttggcgacggtggcagcggcgattggaactctaagcagcagcagcggcaactgatgcataatgccaaacagtcgcgcattttgaagcaattgggtggccctgctgtggggggcggttgttgttcggttgccgttttagaggcgtccgttaaagcgcgtgcgcgcgatgtttcgttcatgaagcggacggtggcgcggtaccaactcagacgcgcgttggcctccaacaaattgttcaaatcacgcggccgaaatgatcaacagtgatcggaagcaaatcaatcgcttgacgaatattattgttgatatattacgagaatttatttgtttacacatttcccaaaatattggagaaaaataatataatcaaaaaaaaaaaaa

SEQ ID NO: 91195 - DNA, 609 bp, Heterodera glycines
gcggcattatggagaagaagatcgtctacttaaagctgttccaaattgtgttcactttgaccatcatttggcaactcctttcactgcgccaattctgcggcacttttgccgacccaaaaggcttcctcaatgaaacagttcgccattgcaaaggctattcgctcatcggaaaggactcaaaaactggcaaatacagctcaatgttcaacaaattgttcacccaattctttatgagcagcccaactgcagaacagcgacaccaattcatggacgaaatggccgccaaattgccccccgctggacgccattgtattccaatcatgattacgccttttgactggttttttgactgggtccgcctctacagaaatcccctcaacaatgacactttgtttcttttttcaaaactatttttcaacgcattggtgtcgcttggctgtctgtgcattgtcatcatggaaatgttacgctctgtggaagaatatgaatcctcgggcattttactggccttcgcttctgtcttgttttggggtcactctgttgcgttctcattcaatttgctgttcttttggtcgcacttttggacttgcttcaacttccgtgcggatc

SEQ ID NO: 91196 - DNA, 621 bp, Heterodera glycines
cactcgcatttttctgcgtttttttcgccaatgcccaaaatccgtcgtttgccagcgaatttttcccttcttcgccgggtttgctgctgcccccagtgccgggggatgaacagaaagcaaagaatactccgacggaagaagaactgatcggaaaattgctaaagtcgggcgcgggattgcccccgggaccaccggcggatttgccgagcgacggggaggaaaaagcagcgaagacgacggacggagcagcggagggacagccccaacaaccgcagcaacaacaacagggccaacagcaacagcagcagacggacacggaacagcccattcagccgatgcctccggcagtcgttgccgaatcgccctcaatgcctcagggcaccgatggcggcgcgcccgcggcaccgccaaattacgtgcaatgtttacttaaaatcgcgccaaaagtgtgcgacccgggaaacattctgaacgcacaacaaaagcaagagattgaccaaacacttgcagaattgaaaatggccacgagaaaggaggacgcgaaagacgaatgtgccaagagtgggctggaggcgatgttcatcatcatcaaacactcgaaccttctcgacgaacagacga

SEQ ID NO: 91197 - DNA, 625 bp, Heterodera glycines
acgaattggagccaaatgacttatcgggacggagatcgcccgcaacgcaaaacatgggtccagaaacaaacggaagccaacaaatccacgccgactttgaacctttcttcttccggcaacggcggtccatcagtcgaaggacggacgagggacacgcatttgagtggggacgaattggctgataacagtccgcaaaagggacagcaacaaattttgaatcagacgttcaccaaatcgtcgaccaaagagtacgacagcgcgactctcattgcgcctgtctcaaatggcaccgaatcgctcaacaatcgcagcggggggttggtgctcgaggacgtctgtgactcaaattcggagatgacgccggaaatgcaggcaaagcgacgcgcgattttggccagccaaattcgacgcaaagagcgaataatggcgaggagtgaggagaaagagacggaagagatggaccgactgcaggtcaaaatgcagcggatggagcaggcggagatgcgcaggatggagcgggagcaaaggcgtcagaaactgctcgaggactacaaaaaaaagaaagtggaacaggaatttatgctaaagcccggctcggatcgggcgtgcgtttcgtccacaattt

SEQ ID NO: 91198 - DNA, 655 bp, Heterodera glycines
ggaacaccaaatcccaactgatgagcggacagagtgcacagaaagacggaaagatcgccgccacaattctaatcgacccggtgactcagaagagtgccaacattaccatccgaacgccggcgcaacagttgcgcatggagcagatcgaagtgccgtacaaagtgcgccctttcgcttttgattcgccgcggagtgcgcaacagaagcattcgctggctcagctggtccacccattcgcttcaattcccccccccatggaccggttgaaggggcaaagggaacttttcgaggatttgtctaccgggcccccctctctccaatggtataccggggggggcaaaaaggggggtcaaaccccccccatttggggtggttgtaaaaaaagtgccccacccccccaaaaaaaaaaaggggccccacccggtgaggggtggaaggttccccccaaagaaaaatatttgggcctaaaaaaaccccggtggtttcccaatttttttttttaaaagacaaaccccccccgggagagtgggcccgcgggttttttttgtgggggccaccaaaaaaaggggggttgtttctttttgggggggattttttttttcaaaagggggggggggggggggggccctaaaaaaaaacaccggggggttggggg

SEQ ID NO: 91199 - DNA, 618 bp, Heterodera glycines
gcaatccatcgttggtcaactattcactgtttcctcgcgaggaacactcccacgaagtcgtgcaaacgtcgggagaggcaatcatggcatttccacccgagcaaattgagcaagcgattgaggacgggcgcagcagcaactctgaagtgctgttagccgcgctgcaggacgtgcaaaagtacatgaaggagatgggacatgctgcttcaccacatgaagcagttggtaccacttcgtcgatgcaatcaccgaccatggacacgccgccgccactttctgccgaagatgcacaaccgatggacaccagtgaggaattgggcaaggagaagccgaagaagcggctcaaagtggagctgaccccgcccagagagacaaagcctcatcctcgaatgtcgttgaattcgcgtctcagcaaccacactggcgacgaagttgttgacaatgagagtcattcgccggcggtggcgacgccgccggtgccgaaaagcaaaaagcgaaccgccgcctcgctcaagcagaacgacagcggcaacaacaagtcacttagcacattgattgaggcggccaaaatgatggaaggcggctcttcatcggaagagcatcaccaggacggagtca

SEQ ID NO: 91200 - DNA, 524 bp, Heterodera glycines
tttcgagtcaccgagcgcatggccaattattacggagtcaatttgttgccatgccttacaggcaactgcgtggatccttcgttgttttggtctgcttctcctcctttgagttcagcgccaagccgtccctccacctcagcgtctatcaaaagggagccgccgtccaacgtaccatctccggcgcattccgtggacacaacagcacggaagcctattggcggaggacaacttaagcctgctgatgacatccctcaatttacgcacttctgtgggcaaaaaattgagtctgtgctgagcgcttactccgatttgttggagtctctgaaagaaccgccactttctccgccgttcactgttggccagttcgtgctgttccgtcatgataaactcggcatgtgccacgggacagttgtgcgtcaggacagtcagcatttggttgtgaagcacttggtcacgcaagacgcacactatgtcaagatggaggccattttcgcctttccccaccaacttttgaaggagtgttc

SEQ ID NO: 91201 - DNA, 438 bp, Heterodera glycines
gggattggcgaattgtatcggtcgatgttcgtctccgcccaggtcaaactccttcagagatacgttcccgaactgaggccggaagacgtggagaggggattggcggggattcgagcgcaggcgatggatgccgaggggaatttggtggacgactttgtgtttgacagcggagaaggacccttggccaaaagaatgcttcacgtcagaaacgctccgagccccggggcgacgagttcaatggcaatcgcacaaatgatagtggagaaaagcacggagaaattcggcatttaattgctcacacataaaatacggatttaattgggcaatgggcattttgcacttaaatattaacttttttttgttttgccattccaatttttgaagctatttttgtggtaaacatttttatcccttccaaaaaaaaaaaaaaaaaaaaaa

SEQ ID NO: 91202 - DNA, 621 bp, Heterodera glycines
gttacatgagaggttccgtcgcttcaattgatttgaacacattttttgaggtcgatcgcatctgctcatggattttgtcaaacaaatttcaaaggactgctttacaactgcccgatgaacttctcgaacattcattccatctcgtagaagcggttgaacatagggtggaatcggcaggaacttgggaagaacagagggggaggctgtatgtgttggccgacacgtcctatcgaagttgttgtctggatgagattgcggctgaacatgtcgcgtgcgactccatcgttcactttggagacgcgtgtctaagtgcccgcagcagttccattcccgcgctatacattttctgcaggcacccattcgaattggaaaaattcgtcgagcagtttcgaattgaattttctgaatttggaactgaaaaacagtgggatgactgtttactgttatgtgaagccgcctatacacacattcaaaattcacttggaagtgccatttctcgcattcttccgccgtctgttcgtctgttcaattttgaagtgtcggagccaaattcgccctcttcctccattctcgggcgccaggtgccggtcggattcgtcatcgatcagtgttctgagaaaa

SEQ ID NO: 91203 - DNA, 269 bp, Heterodera glycines
attttgttttgtgccacatttgtatgccattctccgccattgattagaaattttgattttcttaaaaaatatatttttttaaatgaacattttgttttgtgccacatttgtatgccattctccgccattgattagaaattttgattttcttaaaaaatatatttttttaaatttttgtgaattgttaccaccacttttcgttttggcaattttgctgatctggtcacatatataataaatgtgcactttataaaaaaaaaaaaaaaaaa

SEQ ID NO: 91204 - DNA, 627 bp, Heterodera glycines
gtttgagataaattaattttaattctctcagtatttgatattccttttatataaacgatattttacttcaaaaatcggacatgggcgatgatttggtttttgcagtgcgtggttctttcgggtattctttacaatgcggtataaagtctcctacggaagtgattaacgaaaatcttgatcccaaagatagttcttgtcgctgtttcacatttagcaataacggcgtctacttcgcttattgtaattcgaatagcactacaatcgtcgaatcatccactggccgaaaatgtttttccgcagatttgggcaaaactcaatgcattattttttctcctaaagacagttttatggtcacttatgaaccgtacgtgatctacgggtctcgtaagaattccgatgggtccctcaaaactccgaaccccaacctccgtttctggtcagtgccaaatggcgagctgttggccacagttgttgcagacaaacaggcagtttggaagccttacttttccgctgatgagtccttaatgttgcgggtgcttggttcggaagttcatttcttcaaaaatggaaattttgcaaaggctgcacacaaagttgtggtcaaagacatcgcttccttttcgatta

SEQ ID NO: 91205 - DNA, 651 bp, Heterodera glycines
gtcctccaaccttcgccctcctcgtcgtcctccacgggcagcactttgggacagcagcgactgatcgaccggtgtgcccaccgtgcgcagcacaaacaacgccgaaatcacagcgcgacagccttcgattcatcttcgctttggcatcggttgggcagtgcgctgtcgggacagaacgaaacgcgcggcggcggcactccgccgttcgtcagcggacttccggtgcgccaagtgcgctatgaccacgtgcatcgtcgcggggctttgttctgtcggacgggcagttggttggaaatggtcggagagccgggcgaacggatcgaagtgcgcggcacgcggagggaaaacagcaaattcactctgctcgaatttctggcagtcgcttttggcctggtgtccattcggtcagtgaccaaccgccactttctgtgcatggactcctcgggacagctgtatgccgcacctgccagccgatactcagccgactgtgtgttcatggaggaaatgatgcacaattactacaatttgtactcgtcttgcgtctacggaagtgcgcgaagtccgtggtttgtcgcattgcgacggaacgggcaacagcgacaaagacggcacagccgaagacgggaaaagtcctccccttttgtcattgtg

SEQ ID NO: 91206 - DNA, 578 bp, Heterodera glycines
gtttgagatattttttcacaatgaatgattcatggataaaaaaatatctgtcgtcgccgcttcaatcaacgagtttttcgtcaagtgtccaaacttcgtcgagttttacacaatttgataagataaatgttcagaatttgagttttacgcctttgagtgttccgttgccttccccgctccaaaatgttcaacatttgggccttactccattaagcagaaatgctagcattcacagagaaaagaatcgaaaacgccctttctcaccgctggaaaatgaccttgggtcggtgtgttcaatcgccaaaattaaaagtccaaaaactccgcgtcatgcagtcaaaattctcaaaaaaattgactacgaagaccgtgcttcttgctatttggtgcaatggaattgcggaagtgcggaggaaaagggtccttcgacgacgtgggaatgggccaataagctgtcaccgaactgcagaaaattggccaaagtttttgagcaatcaatcgcaaaagacgcgaaaaaagcgtgggaattcaccgactacgaagtggaggccattttggacagaacggtgcagggcgaa

SEQ ID NO: 91207 - DNA, 591 bp, Heterodera glycines
caatccgaagaaagcaaataaagaaatggagaaagcgatcttcatctctgccgattgttggctcgaagtgttcgatttgcttccgccctttcaacttggccttggaattgctatgattagccgccaatttgactattacgtcgacgaacattttaaaacgcgcaaatggaaattgggcaaaatgaaaattcgacgcaaaattggacagaatggcgcaaatgaaatgaaaattgtcaattccgatggaaaagaattgccaatccctcaaaatccgttgccgaacaaagtcatcggattcagagccattcagatcatcttcatcgaccaaaatgtgatcacttttcttggccggtttgaccgctttttcgcttcatgtacaacaatgttgttcattaccactggaaatgttcgcgtttcggagttcgttctgcacaacatttggccgatgttcaaggacacaattcgtctgatggatttgaattccatcgcttttcgtcaaatgcgtcaattggccccgtcaatgctcaacgactgtccatcacttcgctttttcaatttctatgacggcatttccctcgaatttccgcccga

SEQ ID NO: 91208 - DNA, 624 bp, Heterodera glycines
caacattgtcgactcgttgggcgagccccagttgctcgacgacttgagcgaccattggacgtccgacaaccacgtggtcgagcgcgacaacgtcatcatggccctgcaagacctggccgcaaagtaccgcgtgcgcgtgtcgattgtgtcgggcgacgtgcattgcgccggtgcgggcgaggtcggcccgcagatgggcattgccgtgacgcgcgaccaagtgcccgcgttcatgacccaagtcatttcctcggctgtgggcaacgtcagtccgccgtggttcgtcatcaagggcctgcacatggtcagcaaacagcgtccgattggtgggtccgattcgctcgtcgagcgcatgatcaacgtgttccacaaggacgtcaacggccgcaacattgaccgcgacgagcagtcgctcatgggcaggcgcaactggatgtcggtgttgcctgaaggtgccggcgcgagcgacgagtccaagacgttggcgttcacgctgcacatggagaagaaggtgggcgatctcaagggcgagacggttgattacacgattcgcgtgccgcacgttgtcggcaagttgcgcccgaggatggccgagttgcaggagcccgtcggcgagatgcacat

SEQ ID NO: 91209 - DNA, 165 bp, Heterodera glycines
acttcgccacgctccgcaacgcaccgctgctgccgcagaaagcgacaccgatggtgaagcagaaggatggattgccgctcttgacgattcagatggcgccaacgccgacgccgacgccgacgatgaccaaggatcgacgtccgcgcctcagcagggtagtgccga

SEQ ID NO: 91210 - DNA, 439 bp, Heterodera glycines
  unsure (1)..(439): unsure at all n locations
ngaacgcnnngagaaggaaangcgccgaggggacgaggaaaggcagcgncngcgccacgagnncgaggggnaccgccccgccgcnncgcggncnncgccnaanacaacggggggcacgcagcccaangagggaggaggaagnccacggattttttttttgggcggcggggcgatggcgcgccattcgcctatttacgacccggacttggaaaacggaaagagcccactgatcaaagacgaaagtgacgggaaaacgttgagggtgagattcgacggcgcccaatacagacctgaggaagtgacggggaaaacgggggacaaccggttggtggtccatgccaaacacgaggagaaaacgccaagccgcacgggctatcgggaggacaatcgggaaggtatgctgccgcgcgggaccaaccctggaacagagcagctcaac

SEQ ID NO: 91211 - DNA, 241 bp, Heterodera glycines
aacgatgtcgagcatttccagcggcgtcgacttaaccacaaaataccagcgactcgccgttgaatatgttaaggtgcggaaccaagtggcggtgcttaagtcggctttggtggaagaacagtcgaaaagggccgatttgggcaaggaaatggcacagagagagacgaaactgttcaaattggagggcgaaagggactcgctgctattccgcaacgaacagttgctgaaacgggtggaggga

SEQ ID NO: 91212 - DNA, 514 bp, Heterodera glycines
tttggccatgtccaccgtttccatgcttttgttggcactgttttgggaatggacaatgccaatttttggtgcccaacactctgtggccatccttttgctcacttttctaatggcattggtgtcggccacttcaaatgtgctgtttctgcctttcatggccactttccaccccaattatctcaccgcttatttcgtcggcatgagtttcagttcgttggtgcttttttgctcaaactgatccaaggtgttggcaattacgactgtgtaccaaatggcaccgcgaacagcacacttgttgctgtttacatggaaccgttgttccacattcggctgtacaacatggccatgttcgcttggatgtgtgccgcaaccgcttcgtttgcctttttgtattggaatgggcggaggaaagcaaaaaggacgacaacagcgggggcaaaggaccaacaaccagcggaaggggaggaggacactgaagaaggcggctccgacaatggcacgacaggggacggca

SEQ ID NO: 91213 - DNA, 393 bp, Heterodera glycines
tacaagcaggaaaaggatgacaagcgagtgaaaaacttggataaaatgctggttgaatatgaagtggaacgtgccaagaaggaggagaacttccgtgcccaacttttctcggaaaatgccaattttgaggaaattccgttgccgttgggtgcgcctggcgctatggacgctgccaaaacacccttttctttgccgctgccgaccggcattacccctggggacgtgccgctgccgtcgggtgtccaactgtttgcggcgatgcgggccagcattttgaagaagacgggcgcgacggcaccgtcacaaaaacggcacaaacatccgccaggccctccgcccggtctgccgcctccgctcgccgtcgccgcttcttctgacaacgacggggaagac

SEQ ID NO: 91214 - DNA, 548 bp, Heterodera glycines
gtttctgacattacactgctaaaatgggcaaacacaaaaagccgttcattgaccgcaaaagtgcagtgaattattctttacacaacaaacatttggaggaggcgcagcggaccagtaatcgtaaaagtgttgcgaattttcgtccctttgataaacactttgaggatttttatgagggatatgcgaatgaagcggaggaggacggagcggaggaaatgcatgacggagaagggcaaattgagaccgatcctgcgcttttctcttctctgctggcggatgggcaatcacagcgatgtggcgaagagcgttttcagcgggagctgcctgatcccgaactgaagagcgcggtgttgcgctatgtaaaagcgatggaaattggcaaaggaagggccgagccgacggaggacattttggtggacaatgcgaagagaaaccgttgggattgcgagtccattctctccattcattcaaacatttacaatcacccgaccgaaattagggagccgatgaaagtcattgggaggcgaaggggggggacgacgactaat

SEQ ID NO: 91215 - DNA, 513 bp, Heterodera glycines
taattatttctcaaatgacttctcaagcggcggaacaggaactcgaccaatgtttgaaggataagtgttgcaccgccaccaatggcaatgggcacgatgccggcgacgacggcaccgccttccaaagtttgcccgattttgccgaaacggtggcatttgtgcaccaatttggcccactgttcgagctcagcccgttcagctttgacgatctcgcccaggcactgcaacagcttcaccatccaactttattttagtattgcccgccaaattcgctgctcgacaatttgttcgccgaaattttgcattactgtggctacaaatttgaccggtccaccctgtacaacagtttgcacaagctgatcagacgcgtcaaccggtggacagcgacaccatttgaggccgatttgttgtaccaaaaaagcggtggtggtggtccccaaattggggccaacaaatttgggcgatcgaaacaaattattcatcaaaataataataataataatgaccgaatgg

SEQ ID NO: 91216 - DNA, 663 bp, Heterodera glycines
attttgtttgttttttatttgttatttccttttttgttcttcgtctttcccctcgtcacaatgggccgtgctcagttcgaatacgacgaagtcggcaacacattttactatgtgattgtgtccttttttgctgtcatccttttcccgctcacccattttctgtggccatcgctgccaaagaggacggaggtgctgaagaggggctgccgttgcgagggcgacctggtcaagcggtttcgcaaagagcatataaagccgtgggagaaggcgaaatgcgtgatcaaagggtttgttctgctcattctgtgggcactgttcattctgttggcctacaaagtttcacaattggaacagacatttgaggagtatgacccgtacaaaatactccaacttgacgtggacgcggatgttggcgagatcaaaaagaagtaccgcgagctgagcaagcagcaccacccggacaagggcggcgacccggtgacttttgacggcattgtcaaggcgtacaaagcattgacggatgaggagtcgcgcgagaactggcgcctctacggcaacccggacggacccaaagccacaacctttggcattgcgttgcccaagtggattgtcagtgagcaatacggcggttgggtgctcggcttgaacgtgttcatcttcttg

SEQ ID NO: 91217 - DNA, 530 bp, Heterodera glycines
atttaacagtctcctattctttgatcagtgatttaacagtctcctattctttgatgtgatttgatcggtctcctattatttgatcaattatctgatcagttttctgttcaccacctggtgttcgtacgttctttccgcgtcgtcaggaaaataaatgcatgccaacccaaagtcggcaattcgcacttggtttcgcaccgtcaccaaaatgttgtccggcttcaggtccttcaaattttagtttggcattaaatgtcatgaaattcatgcttagtcagtccccagcataggtcgattttcaccggatttcgctaaaaaatttttgacaaatttgatcagcttttttcactttattttccttaaaaattcaaaacttttccgctggcgcctataaaaacaaaaattttattgaaatttccaaaataaaaaaaacaataatttgatattttcctccaattcttcataaaaattctatttttttttttaatttctaaatttggaattaatctttcccgagggtataaagagtg

SEQ ID NO: 91218 - DNA, 499 bp, Heterodera glycines
gtttaaaaccttctactaatcaaaaaactgtcaataaatttgtatctgtattttgacaattttggtagaaaaaattgaaaagcatggctaaaaaaatttttggtgagtttttccaaaattgttttatcctttgaaattttaaatgattctgatttcattttactgacaatttatcattatcactttcctttcctctgaattccatttgtctcaaattgttctactgttttttaacaaaaactatccacagagtaagtaatattttattttattttaaattttaattatatattcctcgcaattcgatgtttcttttttaaaatttgactccatttgcctacttaatttatacacttatacatcatcacatgtttttttgcagacgctcaatcactctcccgattgtccactttcgaactctgatcgctcttggtttctaatccgtgtactttgtttggattttgtgttgtgttgtgctttctgtttcatgttgaaaccc

SEQ ID NO: 91219 - DNA, 618 bp, Heterodera glycines
ggggaattatttttccaaaaactaatttttcgaattttgttttaattgtccaaaaccgatttatgcatgcaattacccaaaaccacaacataaatgggggtcagtcaaatttgactaattgtaaaaatatcaaattagttgtgaaagcttttttggagggttttctatcgggttggctgaagataaatacgggcacctattttgaccaatgtaaaaccccgaaagcaaatttgaataaatgttgaaaaagggagacaaccatattaccagtctaaaataagtttggaaatataaaagtgagttcctcttttgattttaatgctcctaaacccgaataatttcctcatttgtctcactaaaatttaaatgggtgtaagaaactaacgccagtcgaacggcgattcaaaattccaccaattgtcacttcgggtctgtcgtcacttccacaaaaacctgtatcattttcgtcgtctgacgactgatcactgcccaccagcgcaagggtaagaagcaaaaccaaaataatactgaaaattgggggaagttagactagaaaaaataaggtttgaaaaccctatcaaagtgaaaaagaacggttgggttgaagccgaacacaga

SEQ ID NO: 91220 - DNA, 489 bp, Heterodera glycines
catccgagggggaaaaacattcgtaggggacggaacggcgtactacacatggagctgctgaactgcatttcaccgaaacttaacgtcaccaggaaaagcaaattttaatcgaactttttgtaattttttgtgtaccaatttcaagaagttcccagaaaaacctaagattgcattaaaaataaaattcagaattcggctattaagttaaaaaaaatttatcggcaacctttgttctgcaaaaaaattttctaacaaaatttcaagcaaaaaaaaatggatcgctgaaaatttattcaaaaatgttttacatgccctgttccaaggtcaggcattcgtctaacaataaatgttcacttttagccaacccgttggtggacaaacttggcacgctgatcactttgccgttgtccgaaaccattgaatttgaaagtggctttgatgggtcgtcgtcagcgacgagcacaaccgcatcagtgttccttgtcgaaa

SEQ ID NO: 91221 - DNA, 617 bp, Heterodera glycines
tgtatcctcccattcattacacagcagatttaatagtcgtccccatcgccacaaaatgaccgttccaaggtcaaacagagccgtgctcttggccgccgtcgttttcgtcaccatatttctcggtctcgcgcatttccatctcaagactccctccgagtcaacagcagccgtaaagagcggagtcgacgagcccgcgccttttgtccccgagaaagaagccgccgctgctgtcccgactttcgtaccctgagaagatgaggagattggcgcgacacccgctgttgaggtcgtagctgagacgccgaagcctgaggagcatcaccatgctgttacgcctgacaagcctgaggctgatcctgcggaggagcctagcgatcctgaggagattgctgaggctgaggagcaggctgcgaatgcctctcctactcccgctgctgctgcttcgcccgccgctgagccggagaaggagcctgaccacgaccatgaccacgaccaacagcacgaggaagcgcacgaccacgaacatgaacatgaacatgatcccgaaagtgaagaagagttcatccccgaaaccgaggttgaggaaacacctgaaactcccgccattcccgaagcgc

SEQ ID NO: 91222 - DNA, 656 bp, Heterodera glycines
atagaagaagatttaagtgatacatgcttttatcgagagcccaattggtcctcttattatatctaaaaagtgctcgggaccttgatcagcggttgctcctttgagaaaaaataaaaaatagtgatcaaaggcgtctgattggcttctgtctaaaatattttgttctatgttaaacgcaccatcatgaccgggtccattgtggcaccaatccaactcagtgtgcccagcgtgccgacaatgatcgacccaattgtggtgccggccatgaggacggtgcgccaatcgtggcccatgaacacggcacaaatgaagcacctaggcaacaaaatcattggtttcgtgcccaatgattgttaaatttctatatattttttctcagagaatttaacaaaatgaaaataaataaaattacggttttttccatttcagttagccatttttgccggaaatttttagggcttttcataaaaaaattcaattttttaaatttctaagtctctcagtctgtacacgtacatgcacaacagtgtggccagcccggattgccatgcgtcggttggcatattgtcgatcaggtcgaggaaaatggactcgtcatggaacacggaggcgttcagatcagcgtaacggtccacaacagaacgccagtccattag

SEQ ID NO: 91223 - DNA, 605 bp, Heterodera glycines
tcgggtgatggaataaaagtggtatttgcataagagcaaggccaccattcaagtacatttggggaaatccattttgcttttaccaattcagtacccgtcttttctcgcattaattgtgttgggtttaagtgacttagatcttgctttggattggcattttgcaaaataccacaaattagattcaccattttttgaaataattcctttgtttctttattttggtaaatagctcttgccgtcaattgtgcagctgctgttgagcttttctcgttctggtctaaaggtttttcctttggccaccattgttctcttttgatcctatgggttgtcttacccgtaattatcctaaattgccacgaggggactgcaaaaccttgatcgcttaatttaagcgtgtgaccgcatgattctacactcttagcattctcttggaatgatagagcgaactgtgaattttttgatatccacattctcttagtgaatttcccattttctgttgttactttattgtaaagacacgctctttgatgctccgtggaatcgaggtttcaaattagaatcgcattatcctcccatcgacatgaacccttttgaaaatttgcatt

SEQ ID NO: 91224 - DNA, 447 bp, Heterodera glycines
ctcaacaaatggaacccgcccattgtcacgtgttctcttgggaattgaactcgcgcactccgctttgctatcgcttcaatttgggcattagtagaagtgtcttttccaactgtgaattaaattccaccaatatcaaagtgaacagagccggatggctggagaatttcaggccaacaaatggaacagttttggcacggttcggaaaaataccttgtaatatttctttcatctttttagtttgtctgttgcgccgaatttgccaaatgtatctgcaattgaaagtgctgggaaaaacgcattttgggtgggccgtgagaatggcacgatagagagggtattaattttggatttgaatgtttgggccaattagtatattcagtggacttctattaacgaagcgcatggcactggcgggagtgagtctttttccctcctttggtccctctc

SEQ ID NO: 91225 - DNA, 479 bp, Heterodera glycines
tgaaggtcaacgaactgagaaacgtgttggagaagcgcggcatggacaagactggcatcaaagccaatctgatcgaccgacaaagccattctgatcgaccgacaaagccattcggatcgaccgacagagccattctgatcgaccgacaaagccattctgatcgaccgacaaagccattcggatcgaccgacaaagccattcggatcgaccggcttgaccaggaaggtagccaaccagtgttggtggtggtggtaatgttggtgtcatcggaatgctcatgcggctgttgtcgtcgctgttcatgacgcaccgacccaactacgattggccaaaccggtgatggtggcggtgacaacaatcacagccatggaaatgatggtgctcagcaaatggaccaagatgagccggacatcatcatcgagacgtccaagagggcgatcaagatagagttttgagggtggtgtgctgatcaatctctc

SEQ ID NO: 91226 - DNA, 605 bp, Heterodera glycines
atgtaaaaatggtacttaaatttataaaaaaaaaatgctgacatttgctaataatgttacggttttcacatcaattacggataatacggtcgtatcagcaagctttatgtggaatgtttcaacgaacgcgagaagtgtttaacggtcatcggagggggcaaaatggctactgctttagtgcatggattagtttccgctggttttatcgacaagtccgaagtgaatatctgctcaagatccaaagaaacggcctttcgttggacggtttttaaagactgcgactgactgggaacggtttttaatttcagacacaaggttaccaaaatgcatatacaaatgatgaattttacagcaaagtgaaaaagccacgtggaattgtgattgtcgcagtaaaaccacagatctttcccgggtttctcgacgaactgcgtaaaaatggttggcttaactttgttgggcctgaagtgctttgtgtgtccataatggctgggattgcacttgacacctttaaacagcagttgaaattggttggtttcaatggccatgccgcccgttttatgccaaatgtgaattgtctcgtttctgctggtatcgttttggtctgt

SEQ ID NO: 91227 - DNA, 628 bp, Heterodera glycines
gttgttgtgcttcgttggacggagtgttcgcttttgctatggcggacaaaaagttcctttatttgggcagagatccaatcggcgttcgccccctcttttatggcttcgctggtcaagctttgctaattggttccgaggttaaaagtattgagaaactctgcagaagggtcaactttttccccccgggcttttgcgcacaaattccgctgggctcaacattctcaacagataatcagcaaatcgcatttcaacaattctttcaaatcccttcaattgtcaattattccatcagtgcttttgatgcaaaagcaattatccgcaaattgttggttgaggcggtcgaaaagaggctaatggacaatcgccaatttggctttatgctctccggggggttggactcgtcgctaatcgccgcgttggcaactcgcttcctccactcgaatgacttttgcgcttctccgatcgcattttcagttggctttgaggactctcccgaccttgtgaatgctcgtaaagtggccgagtatttgggcatttgccacagagtgttggtgatcagtgctcgagagtgtgtcgaggctattcccgaagtcgtcttttccttagagacattcgatccgctcgtcgt

SEQ ID NO: 91228 - DNA, 344 bp, Heterodera glycines
gaggaatgaatggaggaaacgagagaattgtaaaaaacaagagaaagagtgagtgagagacaaaagtcaaagtgacaaagggaaggaagaaccgagttacatgttgaaattacttgaagcttccaaacgatgacgggctgaatcaaagtccatggcaaatgcgattggccggacaaagcgacgaactccaaaaactcatccaccaaaggcgggtcggaagacgaatcggtgattgactggtggtgaacaaagtgatttgtaaatgattagtcgaagctggtttagggaaaaggggggagtcgaaacaccaccccgaatagaaaaccatcacaatactagtgatg

SEQ ID NO: 91229 - DNA, 517 bp, Heterodera glycines
ccaaagtcaaacgcatcggttcactcattacaatttcgaactgcttcaactcccttcagttcggaaattgcccgaccattggtgttccatcgcttattttgagttagatactcagtcgggcgaactgttcaaagtgccatggcaaatcaaagaggttgcaattgacggcggaatggacccttccggcgctttgtccgctcgcttttgtttgggcgcacttgcgaatgttcaccggagcatcggaacgggcacgaatgcacattggcaaaggggtttcgttgaaatttgctgacaattgcgaggccgtttttctcaaatgtctctcccaaaaaagcgttttcgtacgaagaggcgactcgattgttcacaaaatttgcccgggcgtcgagcgaaaagtgttcgaccttcgctgggcgtacgtcgaaatgtgccgtcgacgggaaaatgcccaactctccgctattgcccatgcgtacgccgtcgccggctttccctcgcaaatgccctcgtcttcgct

SEQ ID NO: 91230 - DNA, 434 bp, Heterodera glycines
tgcctctgcgatttgtccgttcgcattccgacactttcggtggctcgtcgactcatttggccatgaccgatccgatcagtgcggccaaatacaaaatcaactacttcctattgccaaattttattattcactcgattggcctttcctctctgtgggccctttggtattacttgaggttcaccaatgtttttccttaccaccaccgcgtgttttattgccgtgacgttgaccttttcaagcctttttttgcccccgaggactttgagcttttcgtctcttatcccctcctttacgttctcggctttaccatccctccaataatcatgcttggtggcgaactcatgttctggcttttttccacaaaaccgcgaaaaggcgtttacgccacttgcggcgagtgcaaaattgcgctgatcactccccggttgtttcgc

SEQ ID NO: 91231 - DNA, 369 bp, Heterodera glycines
aaacagcaacaattccattggatgactttttttaaaattaaaaataaaataaaattaaaactatcaacaaaaatgtgagtgcaaattggtaaagcatgtacaaagcattatttgtgggacataaagcaacaattgttagttaaatcttgtcaaatggaagtccgcttgagaatatgagttgtgtgaatttgcgtgccttttgtatatcttaagtgcgcgacactaaaacgtgaaagtacatgaaaaatgatatccatcacattttgtagtaacagatacatcatagcaattgtcgtgagaaaaatgtgtgttatatatccaacggattcgctcagttgggcccgtcaggtttgggccggcacgtttggg

SEQ ID NO: 91232 - DNA, 568 bp, Heterodera glycines
aacacgtggcggaaccgcacccgcaaatactgagactgatgaacaacattggcattgagtcgagagaaaatcaaaaatgccattcaagcggacgcctatgacaatttccacgcgatttatttgcttttgttggaacgccttcggggccatccgctgtcgcgcagccattccgcctccagtcatgccaatcatcctctggtcaactctccctccgcaacttctttgccctcgccgaccgcgccacacgcacaagcagtactcgcgagtccgaccacaaaggcggcaccggcagttgttctgacggagtcggcaggaggaggagacagcggagaacaaagaccaccgatcattcggggggttacgattcgtcgccaatccgatggcattgccattgtgggcggtgccgtgccgtgccattgctattgttgcagtgctgcccgagcacatccgatgctacagtcaatacagccgcaatacgcgcccttgggcatcatgacgcgatttgcgcaacatccgcagacgcgacgggacagtgacggaatcgcaatgcaatttgcatatcaaatgc

SEQ ID NO: 91233 - DNA, 598 bp, Heterodera glycines
aaatgcttaatttatcaaactaactataaattattgtttaatttctataaatagatttttaaattattttataattaaaaagttgaaaattgcaataaattcattttaaattttaaacgaataaatatatttaaaaattttctaaattttacatgaattgtcatcggattttaatttaaaaaataaattacctaattagctttaaatttaaattaaaaaattttaatttttaaatttaattttataattttaatttctctgaccgcaaatcgtcgcattggttcattgagttggcaaaaatcgcggcaaaattgggcaaaattttctgtccgatttgtccggtggttgaacagcggaaaccgcgtgctgaccaactcgtcaacgcgtgccgcttccgcgagcatttgggggcgcaaaaaattgtcgtcggcacggcgcggcaacagcaaaacgaacacgccgaacggatggccaaggccttgggcgttgaaaaagtgctcctttgaaaagtggcaaaattggttacaattggccaaatgttgttgatcggagtgtcagtgttcccaattatgtccccttttcggcatattttttattg

SEQ ID NO: 91234 - DNA, 612 bp, Heterodera glycines
caattaatgacattttaaatcgagcaactttctcgtcctcattccaatttcgtcctacagctccaacataatcagtaaacctctcagcccattcatcaaaagcaatcaccgaatcttcaccaaatacttccaaatgtccaatcattccggttaaagtgttaactctgccaagttcaaaactgtcttccgcaaacggatcaagatattcctcgttgtcttggcttaaattggcattattgcatgaattaaaacgaacatgagaagtttggtttggtgttattttgggtttgacaatttcagcaagtgtatcaattttagcatttaaaattcccatattcgtgtttacttcccctgccattttatttaaggcccttgtgtttgcatatgcccttcgatttacaattcgaaatgatctatttacagcttcctctaggcgtagaacttctatgtgggctctttccaaatcgggaacctttaccgacgttttaccattccaaaaatttcggtcaatgattgttatgtttatttcttcatccctctcttgactggtggccctagagccagtctttcttgagtgtgacataagccacaaaaatgtgcactgattgctat

SEQ ID NO: 91235 - DNA, 577 bp, Heterodera glycines
tttttcccccgatccattctccccctccaaatgacacctctctggagggactttcactgcttttgttccgaaaatattacatgctcgccgcattatgcttcggctcctttctcttcatcattttgatcaacgaaaaaaatcattttcaccacaaaatgacaccaaatcacttaacaaataatgccaaagaaattttcggggcaatctttgcaacgattgacccaaaacgaattgcggaaaatttgcggcaattcacaaaagagccgcacgtggcggggacagaagcgaataaaagggtaaatgaacaaaagaggtaaaagactaatgcacgctaattgactaaatggaggtggctgagaaaattgcaaagatttggaagcaaaacggaattgaagacgtgcattttgtctcctacgacgtgctcctctcctaccccaacttctcttctcccaatcatctctctgttctgtccgccaacggccaagtcaatttccgcacggacggagtcagtcccgaacttatggcccccaattcggaggacctgcgctcgtccatccaatgggtggcatattctgcc

SEQ ID NO: 91236 - DNA, 367 bp, Heterodera glycines
aggcaccattgggatgtgcgcgtgccatgatggagtttacgcgcctgagcagtactatttgccgcgtgccatccgcgacattccgccgctctacgacaaggagtacgctgatccgatgtactcggatttccctctgaagccgctctgtttgccgcccgtgcacgggatgaacaagcggctggtgtattgcctggccgaatatgaaccgctgctgtattcggccgacatgacttttgactagtggataccaatggtcaaagacattcgcaagtcgaattctgcctactacggattcgttgtgctccacggcaccgactcattggcatataccgcatgcgcattgtcatgtatgatggaaaacttggcc

SEQ ID NO: 91237 - DNA, 543 bp, Heterodera glycines
gctggttggatttttacatctgaaaggtcttgtgagggcccggagccttctttcgaagggcatccaggaccaacatgggtccgccgcagagatgcccacttattggacagcgatggagacgatcgagccatgtacatggtcgggttgagctggcacaatctttgccattcagggagcacacctttggcccaattaatgagcccccggtcgtctgtgtttcgcaccactacatcctttaaagcggactcctccacggctgaccactgctgaaccctctgggtccggactaggccggattgagcgcaggcatttataggaatagttataccgttttgcctttgaatcgctaccgccttaccacggggggccgcgggattggttcggttttggccgcaccctccctctcggacctcatcaggggctggtatcccggcgtgggtcggcgtcttgtcactgcgggctctaaagagagccatttgggttaaggtttctctttccaaatcacaggatatcatttcgctttgatcgcttttcaaatgtatt

SEQ ID NO: 91238 - DNA, 604 bp, Heterodera glycines
gatcatttgtcattggttggcatcgtttttaagccctatgctgtcgcccgggggcggtgggggtcaaatccgcccattctctcccctttccccgctttccgcccatttccttcgcttttcgccatttccttctgacgcctcttaattattctccatggcagagcattaaatagcccaattttgcccatttgtgctaattaataactgataatttgttaattaatgcccacggcatttgttggagtgcagcgccaacagcaaatgttgggcacaattttggaggaggaatggatggacgaggagctgttttcgggtgcacaaaatgaagagcagcggaggccatggcacaaaaagcagcaaaaagcgaattttggggccaaaaagacaaagggcggcggcggaaaggaaaggggacgagtgggcaaaatggtcgactggtggatgggacgaggagaccaatggccgaacgaagcggaggaggaggagggagaaaagcgggacaagcaacagatggtcacgctggccaagaccaccattcagttgagtccatcgtgggaaagggacggcacaaaaatggcggagaacggcatggacagggacacga

SEQ ID NO: 91239 - DNA, 328 bp, Heterodera glycines
ccattaccacgagaattacctctccctgctttacctgtccatcagaatgctcttccgttccattgaattacttcaagcatgttggataagtcgatgtctccaaacgcatgattacgatttctatgactggggcgtcttcatggacttaatcggagggaacgcgtggagtgactcgggcaatttcccccggttgactttttgtgacatcgacgtacgaattgtgggcgcaatgcaacggcacactgtccagtgcattttggagatcaacattttgacgtaaaacgcgtttctgttgatgtggcataggtactccctccttctgatgatt

SEQ ID NO: 91240 - DNA, 571 bp, Heterodera glycines
aactgcagttgttcatgaaaacgatggccatggtccggaccaggacggtgttgatgctgatttgttggacctgtctgacccatatctctacatgaaattgtgtgtttggaatgcaaaaaatattatgaaaaaacggccaattttattgcattttttggcaattaggagtgagaagcttctggaaacaaaaattcacattctaaaaaaacgaatgtttcttgccagtaaagactgttttaccgtaacccgtaattgcaaacttctttaaaatccgtaattcgttttcagccgttcttttttggatgcggagaaaaagaaaagcgccgcactgttggccaaggaaagtccggcggcggcgagtggcggaaaaaagcagcagcagagacagcaccacatttcgatcagcaacagcagtacgacgacgacgaacagtagtgatcagcacaaccaacaccaaaatcagacaggaaataggacaaggtgggggacagtctcagaaggcaccagttttgggatgattagcagtgggggactcattgggtttttcgggattgcggcttgcttggagtcg

SEQ ID NO: 91241 - DNA, 617 bp, Heterodera glycines
atgaaacgcgtcgcattggcccgactccgttgccaacttttgtgccgccttcacgtccgccaacttcgcgacaaccgacattcaccggactgaactatggcccggattgggccgaaatcgagcgcgagcgtgagagggcgcgggcacggaaattgcctccaaacattacagtggaaagagtggcggatgggttgccgatgagttggccgacacaaacgaccacagtttcgaacggttccaccagaacattccgtccgcccttaacacatcggccaaaagcggcacagccaatgccaacgacgccgaggccatatttttcgcagacaacagaagggccaacaacatggagcagtacatcgacagaaacgtccgccgatcgcttcgccaaaatttcttcaacgaatgtgccaaagggcacaacgtcaaagtcggcaaaggaatttggtgaaaatggagaggaagaagaaacactgtacgacgacagcatttgctgggaaacgatgatcggacaggagattgtcaagctggtcaccatggacctgtacattacgattatctccattttcctcatcgaatttgtgcgtggggtgtggatccggtactgctccacctggtgg

SEQ ID NO: 91242 - DNA, 319 bp, Heterodera glycines
  unsure (1)..(319): unsure at all n locations
aacctgtacacttgcaagggacagctgcacttttctcctccctttatgctacgacgaatatctcctttatcgtcctcttttcgggctcgacgattcggccggcacgctgggtgcaatgactcccccaacgcccgcctcgctgcttttctccttttggcccgatanaccccatattccccctttcgaggctatcgttggaggtatctgccgcgtgctttacgacactctccgtccgctggtcgtccacaacccgcacctctaaacactgggacaactgtgcactcttttgaaggtcaaaatgatcgacgagcgctgtgcc

SEQ ID NO: 91243 - DNA, 535 bp, Heterodera glycines
agaggatacccctggttttgaattgattcgaaacggaacgaccagcatcaaggtgcaatttaatgagcctataaaggacggcgggtatgagatgatcgttctgggggaatttgattcgattttatctattaatgctaatcgtgtgctcagtagcgacggaagcatatgatgaattcttatgagattgaaatatttctatccaaacatccgacaacccgaaaatattttatcggggtttttgcttccgacaagatgccaaaattgaaggacaggcattttccgtactgttttgtggcgaatactgaccgggcgggcacgataggtgaacactgggtcgcctgtttgtaaattcgccgacagaaattaaatattttgattcattgggcaattatcccaatgaagatttaagttcataccttaacttatttgaacgaattctcattaacgaccgcatcgtccaacatcaattctcagatgcgtgtggtcaattttgcatttatttcttgacacagcgctgctccggaatcccttattg

SEQ ID NO: 91244 - DNA, 515 bp, Heterodera glycines
caagattgtattaacgcacttcatgtacgaatttcggacaacttctcgcagattattgcctttttgcgcaactctttgtctgtcaaatcagaccgaaggaccggccgtgtcatcagttggcttgagtcggtgaagtgttccgtggttggcctcgtctcgtccctttgctcttccgacggcgattgcaccgccgccgcctccgtttcgttggatcagctcagagcacgcattttggaggtgtgccagagtcaatgtgacagcaccgatcagcaacagttactgctccgccagtgccttttgctcgccctcgccgatttgcgacggttgcgcaatgtttgtgcggctgacgacacttttgtagacacattgagcgaacattgcgagtccgtctttctgttccgttacgttggcaggcattgcgcacaaatggagcaacttttgcacgacgaagcactctcagtcaaattcatcttcctcaaagtggccgaatctgtcccgtccattgtttttgggac

SEQ ID NO: 91245 - DNA, 496 bp, Heterodera glycines
agtcagcctcgtcaagaatccgcaccacattctgttcctttatgatgtaccgttgcggacgttttctgcttttctgaagatgttctgcgcgtccgatgtccagctgtttgtcgatgtcccttgtgaatgcagtaatgaagtcactcaatgatggttgagttcacgctgaaataccaaaaattaatgtttttctaaagtattttttgtacagcgaattggccatgtgcggcctccatgccgttgtttgttcgctcaatttccatttgcgccctggtgtgcacattccaaaacgagattgggaagcgcggaggttggacgttgtcttgttcccagcatcgaataagctgtaagctgctttcttcggacaatgtaaccgtcggagttgatggttgtggtgaatgcagtccgaattgtattcgtccactgcctgtccttatggacgcctgggacacagtgaacgctaaattatttagaattgtattaattaccatgaaaa

SEQ ID NO: 91246 - DNA, 531 bp, Heterodera glycines
caattttgaaatgctatccagggacccctcccttcgccatcacttcctcgtccccagcgaatagaaccctaaaaatacaattttttgattgaaaatacttttatttaattaatttacattaattactaatacaaattacgctcgtttattctgtgtccctccctgtacaccattcgttgtcctcgaaactgctgatttcattttccggtctcctttttggcgaacagtcgacgatagaatgggcgttcgttcgttctttgctttttgctttggtttctccattttctcatttcatttttccttttcccccaattcattcgttatttttgttatttttatggtaattcttgagcatttaatcaattaattaattaattctcgttttgccctctctttgcaattctacaaaactttgaaaacaaattttgttgacgtttttaaccaaaaattgacgaaggaaagggcagaaaaaggtggcagcggagaaagagtcagaataaatcgctgacgaagtttgaaacattaattatt

SEQ ID NO: 91247 - DNA, 615 bp, Heterodera glycines
gccgaccgaacgcgcagttttgacgaccttgagtcgaagctggaaactgagtacatccaacgctttttgggccaactgacaccgctcgaggagagtcggctgtgcgaactgaagtacggtctgcaaagcatgcacaagggcaaaatgccgaacgacgcgcatttgctgcgttttctgcgcgcccgcgacttcgacgtgcaaaaggccacgcaactgacgctgaactcgttgctgtggcggaagcagttctaaatcgacagtcttttggacgactttgtgcctccggcgcttttcaaaaaatatttccccggcggatggcattacaacgattctgagggccgtcccctgttcatccttcgactcggccaaatggacattaaggggcttttgcgctccgtcggacttcagtccatcgtgaaatttactctctcaatttgcgagcaaggcctcaacaagtcggccgaagccacacatcggctgggcaaaccgatcagcacatggaaccttcttgtccacttggatggtctgagtatgcgtcatctgtgggcggccggtggccagggcctttttggcatcatccaaattgtggaagccccattaccgggaaaccagggg

SEQ ID NO: 91248 - DNA, 344 bp, Heterodera glycines
cattcaatttttgaatgactgcgtttcttcgttggggcaaccattgccgtatgttatttaatttacaagtgccatttcgtaatgtgctgagttttttttttttagcccgctgtgcctgatcgtcgtttcgattgatcatcgaccagctcagcaaacgccagcgggtccgctcgcggtctccaactgcgtcctgcgcaccggcgaagggcagcgtgtggaagcctccggatggcagcagcatgctggtgtgctggcttccctgtccgtcggcaccgcatattggttgttcaactgtgtcgcgcggccccgctacaagcagctggactgctggttccgcattgggg

SEQ ID NO: 91249 - DNA, 414 bp, Heterodera glycines
cagtaatcgcacaaatttatgacgaatttgtgtggacgggcgacgaattgggcacactgagtatttttgagcaggatgaacaccaattgttgatgacgaattctgccgcccctctttataaaattgacaccatcgaaatgctggaagaaagcagtcaatcgaaaacttttttagcttttggtcatccgccattaagtcgcttaatcacaattgcttcttccttgtcgtcatcttctgctgtccgtcacatcgtcgccttccgcgagcgtcggctgatcattgtcggactcactgtggcggtgcttttgtgcccttggcacgggcgggaaagtgtgccgcaactcatctgctgcatccctctaaatccaattccatccctcggtgcttctgatgccaatgctgtacatttgttct

SEQ ID NO: 91250 - DNA, 523 bp, Heterodera glycines
gtgaagcggtgcacaaatatctgaaggaaaaggtaaacacagcgaagggacaaaacggaaaaaataaataaattagcaaataattatttaatttttaggaattgcttctttatttaattgacgaaggaacggacggcggcacttcggccgggaaaatgtcgccgaaggcgcgtgtgctcgcctccgttcgtttgccgctttttcctttggcacgaaatcacaaaattcgcggtacttttcctcttttagacagagtagaaaaaaggacaaaaaagtatttgtttttaaatatatcaaaattaggcagacgaatctgtcatttccgaggcgtccatcgatgtgtcaatttattggaaattcgcttatgcttttgatggattcgaaaatttaaaagtcgaagaaaaagtaaatcaaaagaattcatttaaattgaatttattttaaggttccgttgagaacattcgctcaattaactgaacaaaatgggccaaaggaaaacggacaaaggaaaacgcagcgaatt

SEQ ID NO: 91251 - DNA, 509 bp, Heterodera glycines
  unsure (1)..(509): unsure at all n locations
ggatgacgatgttcgagcgatgcgtcaacaagcacatccaattcatcatgctggtggatgaaaagcgcaaggacacccacggactgctcaagctgtcggaggcaatgcacaaagtcaccacgcagcatgtgacgctggagaaagcgaatgacgttgtgcggaagaaccagcgccaaacgctggagaacatcctgaacaagctgaacatgaagaactttggcctcaactacgtgccggtgatggagccgtcggcgtgccgtcgcttttcgctcgaaaacggaaatgtgcttgtgatcggctacgatgtcaaccatcctgctcccatgccgcaacagacccgtcgtttgttggcatcgcagggcgaatcgcaattgagctcgcttgacccgtcatgtgtcgggatttgtgccaacatggctcctgattttaatgcctttgttggggattatttcttccaggaatcccgccgagaagccattgaccaaatgcagttggntgatcgcatgaag

SEQ ID NO: 91252 - DNA, 613 bp, Heterodera glycines
atttaagttcgagtcctattatgtgattgaatgtttcaacgcatacatggccaaccgttgcttcaaatgctccaatggcatcgaaaaagtcgactttccgacttttgccgaattgcgagcgcatatgagccaagtccaccaattgtccttttgtcatatttgctgtgataatttgaatgtgcttaccaaggataggcgggtttacaccagagaccaactgcaacggcacatggctggcagacttcacggggaggcggacggctttcgtgggcatccaacatgtcaattctgtgaacaacgcttttacgacgatgagcagcagtaccgccatctgagaaaggatcactatttttgccaattttgtgaccaggacggacttgagcagaatgttttttatagaaatcagcaccagctgaaccagcacaatcggaaggtgcaccacccgtgcactgacccagactgtcttcatgtgggcattgtgtttcggactgataccgaactggacgtgcacagggctaaacaccatcgagtttgcggtggcagtcgagcaattccactggacattcaattttcgaggagcggttcaactcgcggcggtgcgccgtcgaggggc

SEQ ID NO: 91253 - DNA, 546 bp, Heterodera glycines
ctattcaaaaatttggtaattgattttttaagtcaatcacgacctgcactaatatgtagagaacggcgttaccagtttggagagcgagatgagatcgaaatgtggctttacataattcacgaggctaaacaaaaaaataaagctgcgttaatttgcgatcagcaattttgggaattgtttcgtactcagaggctgcaatttgagacgtcatctgtctcaatcgaaaaacagtaatgattttaatgggaagaatatatccgaaaaactggaataactactaaatctttataaatatcggaaattgagcgcgataattgaatttttcgggatgactaaaaacctaaaaaaaattcagggaccttgacaaactcccaaaaatttatcgtggatatttactaatttctgaacgctattaatcgggaccattgaagaaatagttcacattttttattgtttttactccatgtctctcgcctttcttataacgtggttaatttttagcttccggcgatttatgaaaccaaatatactcgaagcaagactgaa

SEQ ID NO: 91254 - DNA, 427 bp, Heterodera glycines
gtaacatcgcaacagttgagccgaattggagcaaacgtttacattggcagtgccgaattcagagaattgccaacggatgagcgaatgaaataccaattaaaggtggtgccggaggagcagtcaaatggcatttgcatatgcgaaatgaatcggaagtgcggctgtgttcaggtccattcagaaccgttttccctgctgctgccaaattcgtcgtcctccgatcagtccgatttcgtctcccttttgcgtccctccgtgccctttttctctgtgccctccccctcctcccactctttcgccctccccccgcttcttctcgcctgtctctttctctctctcactctcattctgctggccatcattcttctccttttggtccttccccgttctgctgatcaatcgggggaacgcaaacggcgcattttat

SEQ ID NO: 91255 - DNA, 663 bp, Heterodera glycines
ctcagatcagagaaaaattgaagagcaggaaaatgcccatctccggcactaaatccgagttggtcaaccgtctgcacgagtcattggtggcggaagagaaactgctcgaagattccggccccggtggtgacaacatcgatctgtctggagtaaatgtggacgaagtgctcggtttggacgacgagaaggacagtgccgtatcatccgcttccgaaactaaaccaaatgacagtttgttgagtctgtgctcaccgctaaacgaatcgcctgagctgaaaaaaacggaaatattgtcaccggcgaaaaagcaactgacagtgaacaatggcatcgcaggggcacagccgacgaatacgggggaggacgggcaggaaaagcatagcgaatcggagtcagcgactgacgaagacaccggcgttggaaacaaaacgcagtcgaatgataatgagcggaaagttcagctcaaaatggccgctcgcctcggcgttccgctgggcgaatcggaggcaaaacgcgcccgcgcgacgcgtttcggatataatggatgcggcggggagaatgagctataggcaaagagagcggcaaggcttggagcatccgaataaatgccgaccaaaagaaatcggcatcggaggatgacgagaacatgctgaaaagagcaga

SEQ ID NO: 91256 - DNA, 291 bp, Heterodera glycines
ttttttacgaagtttcgcgtaaatcccgccaaaataccggtgtaaattcgagatagtcggatgagcatctctctataacacacaaagtgtcttccgaaggcggtattatccacttactgctgcgaaacacctcctcccccaccccctcccgccccgttgggcatgagaacccctcgggggtttatgacccaaattcttccccccccccttccattccgttgcgggcacagacttttttttttcatcctccgacttcctttgctctggttgggctgtgttcccattccttcg

SEQ ID NO: 91257 - DNA, 620 bp, Heterodera glycines
ataaaagccaattttacgtaaaagggattaatggaagatgccagcagcagcagtttattgggcgagaataaaactatcgagcttaatgaagaagcggattttagcgcgccaatgattatccgaaatgaaagcgaagacaatttgccaattaccgaaagccttgcggaaacaaatgattcgcctcagcaggagaccgattctctgttgtcattgtcgcaatcggaaagcgatgttgcctctaagccaaagtcaaaaacgccgagccgcgctgttttggcaccggacgttactcacgtgccaattcaggcggcggacattgtcgaatacgaatggccaagcaaatcgggcgacaaattcttcctccaggagcaaatatcggaactgctcggcattaactctttcaagcgcaaataccccgaattggtacgcagaacggtggagccagcggaacgcgactatttgctgaaggaactgagggcgaacatcgcactgcccgcccaccacctcaccgcactgcaagcggcggatgtgcacgaactgatggcatcggagtaccctttcgaatacgccgaatacaaaaagtgtgcaatgagcgcgtgaaacggacacttttggagaaa

SEQ ID NO: 91258 - DNA, 541 bp, Heterodera glycines
gtttgaggtcgtcctccgtcctcagcactcagcgccgaaccgtccatgaacgcacctccagtgtgtacattgagcaaatgtacgagagttggcagctcgaccgtggctctgtccacagatcatgggacgcgtttttcaacaatgtcaacgcgggcgccgcgccgagccaagcttaccaggctccgccgtccgtcccgtcgcttagcaccgttccgcacgccacggttgtgccgcgtgacatgcgtgaggtgcagccgaaacagctggacaagtgatcccggccgatgaactgacacgtgccatcaatgaccacttgaagatccaagtgctgatcaggagttttcagactcgtggccacaacattgccgatttggacccgctgggcatcaacagtgcggacttggatgacacaatcccgcgcgagttggagctggacttttacggcttcactgagcaggacatgtaccgcgaattcttgttgccacccaccacattcatcggggcgaacgcgccacgctgtagttgcgcgaatttacaaccg

SEQ ID NO: 91259 - DNA, 335 bp, Heterodera glycines
gaccgactgacgaatagggcatttgagccggcaagtgccagtttggcctcttctcatccgtcttcgcctcctcgggatgcttcgcatagtctgccgtctctttttgacgacatgaacatcaacagcagcggatcttcgttcggacaagaacgcctttgttttctgccgacgaccgctcgtccgttaaacgagaatgtttttgcggcttttaatcggcagccacacattacgccacaggccaacggatttggcgatcccccgagaacttataattcgtctgaaaattcgcgccaaaatgggagtcatttctcctccgcctttcaaaggcacgggtc

SEQ ID NO: 91260 - DNA, 459 bp, Heterodera glycines
aagggaatggccatcggaaatgggtatatgaacgcgaatttgaacattgacacttccgctcggtttgcttatggacacggaataattgatgagaaaatatggaacgaattggagcagcggtgctgtagaggatgcattgatggctgtgatttgacggcgttgaaagactcttgcgaatttttggtggacgacattttcgaattcctttggcacggcggattgaatccctacgatttgtaccgcgattgcgacccgagcccgggccgaaattacatccgcatggaagtgctcaaaaatgggctcgtccctccgaaaatgcttcgccgtttcttttccaatgtgacacgaaacttccgccggcgtctgcgagataccggacaaggagcacaaaacgttgggacaccgtccgaggcaagtttaaaacgatccggattgaccacatatatggaatctacccga

SEQ ID NO: 91261 - DNA, 466 bp, Heterodera glycines
tgctgctctcgcgacggacaatgggtccggaatgtgaaaagccaggatcgaggccgatgacgcggcccggaaggagtttccatacattgtgggccggccccgtaatagaacgtcatgagacgaaatggaacaaaaggactcaaagaagcgaaacaaaccacaaacgacgacgaggattctgacacttcaaggcccgattgagcaccgaatcctccccaactgggaccacatggaaaatatctggccccacaccttctacaacgagatgggtgacacccccgaggaacaccccttgctgctcacggaggacccgctgaatccgaaggccagcagagaaaagatgacccccatcatgatcgagactttccacacgccggccatgtacatggccatccaggccgtgctgtccctgtaatcctgctgacgtaccaccggtatcgtggtgaactccgctcatggtgtaacc

SEQ ID NO: 91262 - DNA, 529 bp, Heterodera glycines
gttacctcccacgcttcaccaatgaacttttcacggtggcagaggtgcactctgagcgttcgccagttgtttatcggttacgtgatgacaataatgaaattattagtggttggttttatgcaaatgatttatgcaaaacgctagaagacaaacagcaaaaaatgtatgaaattaaaaagattttgaagaaaaagaggcagaacggtgtggattatgcatttgtgaaatggaaagggtatggcactcgctttattagttggattcccgtaaattcaattagcgagaaaaatatataaaaagaaataaattaataaaatttataaaaaaaaaaaatgccttcaaattctttttatgttgttcttccgtcaaacaccaatattaaaggaaataggacaaattctttccgagtgcgtttaccgcgcaaattgcaatttaattcggaatgggaggtgggtcttgccgttattgtatacccccactcttggccttccataggcaccgtggagcaacaatttgttcagattgagtg

SEQ ID NO: 91263 - DNA, 311 bp, Heterodera glycines
ttctgtccatgtgggaacagaatgaactgcaacataacttctcaggttttattttgcttataataaatcaaagtgttgttacttcttgcattttttggatttttaaatcccgtaaaatgcaaaagtaacaaatgactcgtgttttatgtttgtaaatgccgtcgtccgaataaggacgggaacagggacacgcaaatgcaaacattgcgtaaagggtaaacccaaacggctgcgatttgcgtccgaaagcgtcccccaatgaggaaaagcgttcatttgattaacgaattccaaaaaatcaaccaaatctc

SEQ ID NO: 91264 - DNA, 412 bp, Heterodera glycines
tcgatctcaatttgtttgtgcatattttccctctgaaatgcctttgttgattctttcgtgccaattaggtatataaaacataggtagattttttccttgcgtatcaattgaatggctcctggaaaatgcgtcagtgatagaaagtatcaatattcctgctgctgggattttcaagatcgctctcactggcacctatttcggcaaaacccggaccacggaccaaaattcttttattaaaccgacagctcaaatccttgaatttcgtatttttgtttgtcaaaagctgcttaaatacacggaaacaaattgaaagcattaattgctgcatttacctaagcctttttatacgaaaaagactaaattcccaagtttggattttcgacttttgtttcatcaaatagagagcaatttg

SEQ ID NO: 91265 - DNA, 578 bp, Heterodera glycines
cgcttattctggtacacgtcagaataattccgcttattctggtacacgtcagaataattccacttattctggtacatcagaataattccgcttattctggtacacgtcagaataattccgcttattctcagaatgattccacttattcttgcacgcgtcagaataattccgcttattcaggtacatcagaataattccgcttattcttcaaaatttgttgctgactgacggtgccgctgagcccaaaggaaatttatgaagttttaggtgaattatgaacagaattagtcgacaaattatgattcgcaatttagagccaatttaaagtgtaaaatggaattacctgaaaagttgtttaaattaaataaaaattaattttttccttcgcgcttcacctcctcttctttatgtttcatgtttttgcccgcattttctgctttaaattattgaaaataatgagaagtattttgatacaatcgtactaaaatccctgtggtaatagtacaaaaaaaacaatatttacaaaattattgcttcgtgctttcgtggcattggtcctgatttttccactctcttcg

SEQ ID NO: 91266 - DNA, 579 bp, Heterodera glycines
tggcactgaaaattgcttcgagtgattgtcgttggttagtatttgagcagacggaggagtcgccggaagtttcattggggcacatcttacaatgagcagattttttgatttacgaatttaacttccaactcactttcctccatccagactggcttcaaccattgttcgaagacacctcacttttagaaaagcggctggatcgtgtcgggataaattgaatgccagtacgatagtgccacgtttgaaaaccgaagaacagtttttgggaaggggcggtgggggcaactgaaagggatagccaacatatcgcctgaaacacacctcgaccatttctgccccgtcgatttcgtcgcggtaagcggccgcgccgacagattccaaaagtatgaaaaacatttcccaatgttcgctcgcgtgtaaattggcagcatttgcgcggaggagctgatggagaccgaaagcaatttgacgggagaacagaaacaattcgggtggtcgaagtgccaacagttcacagcccatgaaatggagcacttcgtcggcacaattgctggcgcggtcctggacagtctgctgatt

SEQ ID NO: 91267 - DNA, 593 bp, Heterodera glycines
ccgagttgggcatgttctgcactgctcaactcgttgacttctaccagtccatcgagcatcatgaactttacgtgctttacgtttacaagctgtacactttgcatcgcaccgttggcaattgggtggaggccgggctgacgctgaaacggcacgccgatttgttgcgctggagcacttcacatcggcccgagtcgttcctttgcgggacggcacggaaaagcggtgggaccgagtttggcacggagttggagttgaaggagtacatttacaaggagatggcggaactgttcacccaaggcgagcactgggaattggccattgaaacaaatcgggaattggccaacatttacgagacggccacctttgactttgccaaattagccgatttgttggcacggaatgcggcgctttatgataaagtgacgaaaacactgcgcatggaaagccactactttatgatcgcattttatggcaaaagctgtccctcccatttggtcaacctcaaatttgtggcccggggccgtcccctggagcaatggggctgtttcaagcagcgatttgtggccaatttctccgacttcaaatttgtggac

SEQ ID NO: 91268 - DNA, 499 bp, Heterodera glycines
gtctcaatccccaacagtaacagcagcaacaacaacaacagcagcagcagcagcagcagcagcagcagcagcagcagcaggacaacaatgttcaattcacgacgaaaatcggattttagcgctttaaattgcaacagacacagcgaaaagaataatttagcggcattaaatgcgatcggtgcgccttgctccaccgtttcgctgcagcgaacctcgtccgaccgtcgctttgcgatgccctcctcgctcacctcgccgtccatcgcctcgtcctccctcgtggccaacaatgccggcggtagggtctccgccgcaatggcatccaagcgccgccgttgctcgcgcgtgatcaatttcggctacgcatgtgccatttattttttggacgaaccgccagaaatggacgacgaagacgaatatgaggaggaagaggaagaagccgaagggatgggtgttttggcataccaaacggtggagggggcacaatcgacggacaatg

SEQ ID NO: 91269 - DNA, 458 bp, Heterodera glycines
acgcggccaaattggacagatgggtctttgatagggttaagttgttttttgatgaaattcgttccgatgcgaatgccaaaagtcgccttttgggcctccgtcgtgccatttttttcctccatttgctcggccttgacaccaatgggcatgggcacaagccgaactcggaacagtacttaaaaaacattgccacggtcgacgagggcattctcggcattgttcaaatggttgagggatttttcggcgacaatcgcactgcttttttgttcacagctgaccatgggatgaccgattggggctcacatggggacggaactgacgacgaagtgaatgtgccatttttggcttggggtgccggcattgagccgagcggtgcgagtcgcaaattgtccttggcccaggtggacttggccccacttcagtccgcgctggtcggaaccgccattcccgtgaacagc

SEQ ID NO: 91270 - DNA, 638 bp, Heterodera glycines
ctcaatttggccatgggccaaaaaacaggaaatattaacaggcacgggcctttttgtggatatcgtcgcgtgcattcccaaatgttccgttggctttgagcgtcgcgaagagttggccaaattggctgttcagcatgccaccaacagcagtgatcagatggaagacggcgatttgtctttggtttcgttcggttcgtcggctttgcccggggcgctggccgattattcgccacgggacgaagccaaaagcaattacctaagcgaatacgtctccaaaacgatcagtgcggtggaatggctgatcaaactcgaccgactcaggcaggaggaggcgatcagaagggcgatggccaaactaagcgcggaaagggcaccaaaggcggaaattgagggatgccgggcatcggacgggcgaatgacacgaacgatttcgctgccgacatcgtttctgccacccctccatttgtccaacttcaatctgatctcttctaagcaaatttcgcctgagcatgttcagcaaggcgatggccaaaatcaatcggtgccattcgccccttggcttacggcatttcgccaacagcaaaaccaatcgccatccctaacgatggccccctcacaaatggtcaaaagcagccaaa

SEQ ID NO: 91271 - DNA, 635 bp, Heterodera glycines
aaacggttggcggctgaatctctcgaggcttcaaatggcaagcggcgaagtgatcacgacggagtggaaaatggggagaaaagaaaacggaaagaaccgctgactgcggaagaaaaggcattggaagagcggaagagagaagtggcggaggaactcggagagcatctaaaggaaagaaaccgagaacacgaacgtcataaaatctacgaacacgaacaaaacttcaaagcacttttggttgatttgataaagcacaccgatatcagttggcacgacggtcgaaaactgatgcgaaaagacaaccggtaccagaactgtgaactgctggaaaaggatgtcaaggagcgcctgtttaaagagcatgtgcgcgaattggagaggaagagacgcgacgtgtttttccaacttttggatgagcatcaggacatcacttttacaactcgttggcattcagcaaaaaagatcattgctgaagatgagcgttttggtaaattgaagatggatgataagaaattggaacaggactacagagaatggatggacagacgacggtcacaagcattggacgactttgaaacactgcttcgggagacaaaaatcatcacttacaagtctaaacagatgatagccgagaa

SEQ ID NO: 91272 - DNA, 638 bp, Heterodera glycines
gagcaaagaatgtttttctttggtctataaaaatgatgagcgaagggaccaaagaacgaaggggagagaaacggaggagacaccgctttcgagacgcaacgacacccatttattgctcgaggagctgttctccccccagtgtatccatgtgcttggccaggtggatgcacgggttttggacgatgttcacgtcaaattacgctttgtgatgccaaaaattggccgcattcgcttccgtcgtgttttttatgatcacatcccggcacataaaggacaaaaatgtgcctatctgataagcaacccgttggaaagacgacaacttcacgcttttgtcactaaactttttgttcttctttttaatgctgaacttctcgatcattccaatgtaaaaatgttttgtgaaaacatcgctacgactttcattgatttgagaaatcgcggttttttgatgtcacgtacccaaattttaaaaggcattcgatttgatcagattctttggttgaaaggactccattttcaactgaagcagtccatcgtgcttaatattctcaaatccttcctaaatctctttactcgcatttttacgtactttttttaatagaacccaataaaataatcccttcccaatttcatgtcct

SEQ ID NO: 91273 - DNA, 554 bp, Heterodera glycines
ctaaaccaattgtttcccaaattaaattgccacttaccctgtatgacggcagcggaggagcttcaggatatacgtaagctttggcgtgaaaacgcgcgcagatccaacaacgagtattcggattgattctcagaactgagttcactttgcttcggactgaaggaatccaaaatttgcttctcaatgaagcaaccatattttccattcctgtatgtttcctttctcgatgaatgtccatgataattatttccacaattggacaatttttattcaaatatataggatgaatagcataatggtccatgccactattttgcatacgcccctttgctctccaaattccgttctcttggaaaagattcaaatttaagatcgtctcattagatggcggaaaggctttttgagcttctttccacaaatggacttcggcacgttcgacttcatcaatcgttagaggatttatttgcttactgaatgatttgacctcataacttggcttaacagctgaaatgataattttattcgctgattttttgaaattttgaacggctctt

SEQ ID NO: 91274 - DNA, 642 bp, Heterodera glycines
gattaattgtggaaaaaattcgtaaccaaaaatccactactttttccgttgtgttactaaactaagaatttgacaaaactcgacaaaaacgggcaaaaagcagttcgttgcatgccatattaaaggcataaaaaatacaatttgaaccaaaatttcatcaaattcgtccatggcatgcacgtctgttgttgacgttttcaaaattctgattgaataaattaggcttcctgatccgatgcgagggaaggctttttttgttttaaaaatttgttatctttttagactctatattttatgaaagattttctctccgatccccgactttcttctacctgaggatcggggagcaacccttatagaaacaaaacgggaaatacccaaaaagcgcgaaattttgcgtgaatatccctgaaacatgcaacaatttttaaaacttacccaagtccagcaagaaagagtgtaattttcgcggcaacattcggattccttgtagccctcggcccagacacagtagttgacgcaggacaatgtttccaggcaacccggtgaagatttgtcaatcgtacatttcagtttttcagcacaactttcggtgtcgtagtgttcacggagcacctcaaatattataaagcatttaaatat

SEQ ID NO: 91275 - DNA, 504 bp, Heterodera glycines
gcacatttgggcacagttttggggattaaaatttaaagcatttacccaataacttaaaaaaataaaacaattctatcattaactagcagttgttagacttgaatttttttaacgcttacatacattaaaaaggggggggggtgtcgacaaaaaattttttggtttaatttattttattgattgatggctgcgcatttgcaaaaaatattgggcaaatggcaagaaatttaaaaaaaagtatcaggttacgtatttatttacaggcataaaagaatgcaaaattctcttaattcttccttaattgtcctcctataaaaacattaaaaaaagagaaaaaatccaaaatatttctagtttttccaaaattatttttattttataagatttttaaaaattttctatttgaaaattttttttttgagttttgagggtaagctatatgacgggtggtgggggctatctgctcccgttttcccctccgttttttcaccccttctcatttgc

SEQ ID NO: 91276 - DNA, 623 bp, Heterodera glycines
attttaaatttactttatttatttttgcttgttaaggaattgaaaacgcgcagcaatttgcacgacatgtgggaaaagtgatcacttcgagggtaatacaatgtttttggggttcccaatggattgacttcaaaggtgccacctaatgctccgtacgcaatgcgacttgttcagaccgtctacaaatgtgtccaagcacacactgattcggtcgccacagtgattaggtgaaggcatcgggtggggggagcggagatggttggcaaaccggacggaagacgatgagggaaagaaagggcacgaacgaacattgattgaccggcatatgccatctacatcagaaacgatcaatcgtttatttcattcagagacgcactcaatccgttgaagacgagcattctgagccaatcattcaaaaatcttaccacatttgtcgaccaaacgtttgagcaggacgaacgcagagacacaattgtagtggagcaagttggtagaacattctaattaatctgttcattgttgaaatttctttctcccctggtttctctttggatgcgtaatcccctcaccttttttacagcttaacgccactttccgtgccgagttggccagcgtggcttggg

SEQ ID NO: 91277 - DNA, 649 bp, Heterodera glycines
cggaggcggcggcggattgataggcggcgatcgacggataaacggcggaagaacgccgacccacacacaaaacagcagcagccaacaaattcacttcagctgatcactccgaacgccaaaaatggacaacgaagcggccgggacggtcggagaagcggtggaggacgaggaagtgatgacggacgcggacttcgaacgcgccatggaacagctgagggaggagggcggcgaggacgtcaacgaattgttcatggcaatgagtgaaaatcgcatcatcagttgggaggaagccgaacacattttgggcaactcgacaaatgaaccggtaaaatcgtcgcttcctcagcagacgcggcccacggagccggacaacgacacggacgtggactggtgcgtacaacggctgatgaacaacgacccgaaactagtggagataaacctgaacaacatgaaaaggacacccattcccaaaattaaacgtgtgatcgaagcgtgtcgcgacaatgagcatatggagaagctgtcgctcgccaacatgggactttatgacacggatgtgcagcctctgatcgacattcttgaaaacaacgccacattacggtgtataaatttggagacgaattatttgagcggagatttctttgcccgg

SEQ ID NO: 91278 - DNA, 630 bp, Heterodera glycines
aaatgtcttgaatttcatgtcccaaaaatcatttttgtccattccttttgttgttctgattctcacgctttcgtgcatagaattcaacgcaaacaatgaaaaccttaataaaaaatttaaaaaatattaatttaattttaaaaattcaccgaaaaaagtaggcccattgagagaatgacgaacaggccggaaacgttgtgcaaattcagtgaaatgcgctgctgcttaaccgacgaaccaacgccatggcatgaggcacccctaaaattttggaatttttgggcaaaattctcctcgccgccgcatcactttgagcgccaccattttgtctgaaattttaatttaaaaaatcgtatttattccccacttttttcattgcgataattccgcgtttttggtaaagcaaaatttggcgagagattcgatcagtccattcggaatctgtaagtagagagaagacagcaaggaaagattaaaatttgaaaaattttgcaccgtacttttttgcagtgcaataccgtaaccctttgagccgagcacaccgccaatttgtgtcagattacaattctgctgcacttcgtactccagcgagctagaatccatctgcaataccaaaaaattaattgggat

SEQ ID NO: 91279 - DNA, 637 bp, Heterodera glycines
cgaaacgggcacgtgctgtttgatgtatcggcgctcaaatggttcatagatgaagcgcttgaagcaaatgatctgtgaagggcaaaaaaggggagcaatcaatcgatgatcaattaatcaatgattaatgaatcaccaaaatgtcgggcaatcgcgtgaacatcagctgcttgacaagcgttggtggcgcagacggcggtggcgttgcggcagatggcggtgtcgttgcgttgctgcactgtgcacagcgtgagccttcaatatcttccggtttgatgaaatccgcgagacaattgttgatggagatcagcggcacatccatgggcagttgaccagcgtccgacgctcccataatgtaatgcgattcatcagtgaagcgctaaaaaagcggcaaaatgtcaaatggggttagggttgtcctcctggtactgcttgaactccccacctgggccaggctgatacaaatcatgcgatcgccctgtccatcttcgtccttgtccttgaacaatcgcatgaagcaccaaatgtcaattttgtcgagcggaatgtcgcgcagcgtcttctcgtcggatggttcatcatcgtcgtcctcgtcgaaatcgtcttcatcctcgtcatcattttcttcttcgttttc

SEQ ID NO: 91280 - DNA, 494 bp, Heterodera glycines
atcacagccaatttttcttcgaccccaattgtcccgaaacgtgttctccattttatttggatgcgctcttccgcaaaggccatttggtcattcgaatgttggagaaaaggttacccaaggagcagttcgttaaggttttgcaacgaattctttccctgggggttcagtacagtcagaatttgtatcggcctgtcgaatggacgcacatgctaattaacacggcgatgtttttgcgggttatgactgatgttactgggaaggaattgccttcctttgtcgaacaatggatcgattttggtggatttgttaattttcaggtttcccacattttcaaccgcaaaagaaatatcattgaattggagctgcgtcagacagttccgcttcgagaaggatgtcggaattacaccgggcctctcgcgatcgttgttcaggagcttggagggctttttgctcacggtatgcggagagacggcggcgggtctcggcagggcatc

SEQ ID NO: 91281 - DNA, 636 bp, Heterodera glycines
ggcacttttgaccagccccatcattaccaacggcgtcaaaacatgcacaacagtttgttttcggccacgtatcagcacgccaacaacaaatggatgatggcagcgatgccggccgaggaactctccaccgaagtaattgtgcaccgtaaggctgcgcaaaggcatcgacgacggacggtgtcgaaaagcagcggcggggacagtgacaacggctcgtcctcccggtgccattccaacgccaatttgcacgcctttgaggagtcatcgctggagggcaaagagggaattttgtctgttacttcaaatgctaacgatgatgagatgacggtggggaaaatggacgctgaaggaatggaacaagcgccagtttttgaggaggaaactcctgcgctttcggcgctgagagattcgcttggccttggagaaacaacggcgaagtcagtggcgatagacatcaaaccaaagcatcgtctggcatcgtttgggtcgccgctgccatcgctcggcacttcgctgcaagacgaattattactagctgctgctgctgttacaggaaaagatgacgacgacaaaattacggtggaagagttggcacgtaagaaattctcccagcaaggaatggctttaaattccaaa

SEQ ID NO: 91282 - DNA, 592 bp, Heterodera glycines
gatttttcgacaatttttgagacgctttttggtagcgaatcatcgctttgtgccattggagtctttttgggttggacgtctcaactcagttttgcattcgactgtttgtggagttggcccctccaatttttccaccggttttgcaaatcatttggttcaacatcgctttttttcttcacagtccgatggtttgaacgtcttcgaacttggctctgagaatgactttgacgatcgcgttctccaagcccaacagcccgtcatggtccaattctacgccgattggtgcggcccgtgtcagaatttggcgccgagaattgaggccaaagtgaacggacagaacggagaagttttgttggcgaggattaatgtggacagttctctcggttttcttactgcacaattcgatgtgacttcggtgcccaccgttgtgtgtttccataacggagaggtcattcaccgctttgagggcgacgtcgatgattcatatttggacgaaataatcgcgcatttgaaggaaggaaactcggaaaatgacaaagaaattatttgatggaataattgcttttattttataagtatttgttttaattgg

SEQ ID NO: 91283 - DNA, 626 bp, Heterodera glycines
attcatatgctgaattttaccgtgcttattcgatacaaaaaaaataataaaactgaattaaaaatttaactgtttttgttgtgatagtatttaatgaaacgaatgttttttgtcttcgttttttcgggtggcgtccccaagcgaagcaattccattgattttcggtgttccctccggcggagtttggcagagaataatgggctgcaattgcgcaccattcattctattcattcacattttcacattgattctttccctcccataattttttattttctttcaagagattttgttatatttatttatttaaaaccgactgagaaattttttagttttttagcaatatttttagcagattttcatcaaaaaaattcccaattttttgactttagaaaagtttagcaagaaaattaggttttccataaaaatttcgggttgggtaagtaagtaccccgcgaccccccccccccctccagcaggccggggcctgagtttttttcaaaatggtttaaaaaacaattaataaaaaatcaattaaattgcttaggaggaacttcgaaagtatttaaaaataaaaatttattttaaaaagagaaaaacaattctttttccgatcgactaaataa

SEQ ID NO: 91284 - DNA, 616 bp, Heterodera glycines
aatatttgtcgacaaccgcccgtcgacagaagaaaacatggcaccagacaattgcgaggactttgcagaaggacatcgaactgttcgagccggacccgactaacacacaatcggctttcgttggtgccaaccaacaaccccaagcggtgggagcggcgactgttggcagcgaaacgggcgacgaagcgacggcgaccgcagcccaacagtcgacacagcagcaacaccaccgatgcgcatttgcactgcgcgagcgtgacctgttccgcattggcccaatgcatgaggcgattatgcagttgtcaaaacgccacacgtccaccgtttctgctgccagtacaccgaccgctgtggagaaagaactgctcggcttgggcacttcggaggcggacgtgctgcaatccggcgctttgtccgatctcaccggtgggccgaaaacacgtggtgccagcaaacgaaaagcggccgccgccctggcggtgtcctgcacctcttcggtgagcggtggaccaactgctggggcagcaacaaatgtactgctgccagcaatgagttctcctcaatgcaattactcggtgccgccagcggagtgtttgttgatgtgccgtttaatcgt

SEQ ID NO: 91285 - DNA, 568 bp, Heterodera glycines
ctcaacactgccaaatatggcgatgagttatgccggcgatgtctccgcttacggtgtcaccaacaacccgcacgacacacgtcgcatcacgggtggaagcagcgcgggggagggggcactgatcggcgccggcgcgtcattgtgcggcattggcaacgacattggcggctctgtccgaatcccggccgcaatgaatggcatttttgccctaaagccgaccaccgttcctgaccacgtcgtgcctatttttggaattttgcccaaaagccttttatacaagccggccctgaacatgctcagcaatggaccaatgtgccgctacgcctctgacttgccgttggcacttgcggtgatggccggcaaaaaggtggacgcctttcaacaggatgtggactttagcaaagtcaaagtgttctacatggacgatctgaacgtgttgctcgcccaagagcttcaaaacgcgcagcaacttcccgttaaaatggtcaaatcttattttgagttcaaacacaatgtgacggtccaacgagtggaggttccactgatgtcacggttcctccaactgttc

SEQ ID NO: 91286 - DNA, 630 bp, Heterodera glycines
gacattcgagccaagatgaatatccaaagttcacgttcagtgttggatgaccaatggcacactttgctagttgagcgtgaagcgggcgctgccgtgctgtatttggacggtcgacttgaggcgcaaaatcggaccaatttgggcaccattgaactgcttcaacttcaatcgccactgtacatcggcggtcttccacctgagcttgttccccttgctgcgcgacttttgcctggcgttaagcccgaatttggtggatgtttgcgcgaattttcgctcaatgatttggcattggaggagcccgttgccgagaaggacattgcccaatgctcccaattcattgaacagggcattttctttggcaaagatgggggctatgccattctgagtccacaatttgtggttggcttgtcgttcagctttgagttggagttgaagccgcgcacaaagactgctgtgttgctctccgtcggtgtccttgaatttctgtccctgcaactgttgaatggcacgggcaaatttcgcgagggacaacggtggcggcatggaatccggtgctctacgagccaatcagtcccaacttcgtggtgtgacgggccttgggatcccgatccgaaccttcaaaaaaaaaga

SEQ ID NO: 91287 - DNA, 665 bp, Heterodera glycines
ccaagtttgagtttgtacagaaaaggtcgttatgtggcaatgaattggactgatgggttggcaattggcaatctgtgcaaatctcaaaagcatttggcactttccactctctcccaatttgcggccgctttcaaaacgaattttgtctccaatctgtccaaatttcacagcttttcaaactttaacactttcatataaaagtgacagacgaaagcgaaaaatgaaattcattaaaagtcggaacgatgaaaaacctcacgacttttgtgttctttttgataattgccgcacttccgccgattgtttctccagcccaatctccgccttatggccaacttcaaattaagggaagcaaattaatgagttcgagcgggaaagaaatcgtactgagaggaatgtcacttttttggagccaatgggacccaaagtattggaacgcggaaacagtgaaacaattaaagtgcaactggggcataaacatcctccgcgctccgatgggcgtcgagggaagcgacggatatttgcaaagtgcggcggcgagtgctgcgaacactcaaaaactgatgacaattgtggacgcgtgcataaacttgggcatttatgtgataatagattggcattataccagtgggaaagcgtacacggcaccagcggtggactttttc

SEQ ID NO: 91288 - DNA, 522 bp, Heterodera glycines
acaacccgggccttaagtacaccattttcacaaaacgagttcctgccccgtttgagacgatcagtttctcaaatcgacagattatcgagcaagtcgtaaagggtcgcttcaagcagcagaccaactctctcgacttgagcagctttcagaacgacccgctcttcgaacggagtcaactttcttatggactttttcacaaccacgtggtggtcgccgttgccaatttaatcgcgcgaaatttcccctcaattcgtggcattcgtttaaataacaacagtctacgcactttggacttcctgagttgtctcgtctacgccgcaccaaatgttgttgaattggatttggcaaacaatgcggtgagtgaatttcacgcgttaatgaattggacaaattgaaaagttggtccttggaaagtgtccactttgaaaacaacgaatttgtcgcgagttatcagggcaatttcgtcgcatattcacaagcaattcatcagtttttccctcgtgtcacatatttggatggacg

SEQ ID NO: 91289 - DNA, 592 bp, Heterodera glycines
aatgcaccgccatggtcgaggcggacattctgtgcccgaccaaacatttccccgagttggcgtgggctcgtgaattgcctaagtctgactcccattacgtcacgaatgtcgaatttacggaaaaggacgaatttgggatggaagtgcggcgcaacggacggccaatgcccgtggagtatttactcgtcgacgtcccctgcggcgtccgtttgcaagaagtgcacaaattcactgttccggagtcagtcgacgaaacgtttcccatcgaaaatcgcacaatcgtcgaccaacaccagaatttgcgcgacttggccaagtacgtcagtgcctttgacttgcccgatcagtttctcaccatggcctccgacttccatttcctcctctttctgttcaccaaccatcacgtggaattcagcgtggccgagttgaagtcgctggtggcgtcggtgcgcaaaagcgacgcccaaggggcgaaagaatgggcagagcgaagtgaaaattggggcacgttgcttttgctgagtcaaagctgaggtaagtgaccgacagaggccgacgcggttaatagtgccgatggtaccccccccccctt

SEQ ID NO: 91290 - DNA, 512 bp, Heterodera glycines
ttttaattcattctcaatttacagaccccgcagagctctcaccaccaccgaaggccaatgagagtttggagtagcgcagcgaacttttttaaatgtttttcgtacgtttaaatttaaaatttctttgtgctcctcaaatcagcaaagtgtcggaacattcaattttcagatttcagtatattatacaatttgtactttattattatatacacattctgaatgttatacaaattgtggatgatttggttggatgatcagtgatcgctccgctattcgccttaacgctctctcccacccatttcttcaatttccgttcattccccgcatttccctctgatcaaattgcgcaaaactgcgccaaatcctaaaaaattttaaaaaaatgttttgacagaattaagaaaacaaaattaaacatttgaaagtgttaaaaaagctgatttgagcctgaattgcgttctggcattgcatttcagcaatgccccaaaattttcactattcatgaatcgttt

SEQ ID NO: 91291 - DNA, 520 bp, Heterodera glycines
caccaccacggccagcagtcctccgttggtgccgcttgctcttccacccaatcctccgccccttcttcaagtcaatcggaacaggctgattcaacactccatccggaagagcggaaacgcattttgcatttgcatgcggaaaagaatcgccgttttgcgctgaaggaaggcttcgagtcgcttgtgaatgccattccggtagttgagcagacgggcgttaaatgcaccaatgcggtggtgctgaacagggcggcacagcacatcaaacaattgaagagcgaacaggatcagcagcagatgaagttgagggtgttgcgggagaagattaccaacatgaacgaacgaatcgccctaatccagtccaatttgccttcctcatcaaccggtggttcacggccttgtgaagctcagactcccagcatgcgcattcaagtggaacaattcttcgaacattacaaaaaggaacgttcccgtgaagattaccgcttttggctgatgggtgaggtgctcaagcctattg

SEQ ID NO: 91292 - DNA, 642 bp, Heterodera glycines
cagaaacaaacttgtccacttttacaattttggaggcaattctacaccacacaataatttgcaccatggcttgcccgaacatttgcttcaccagtggcgccattgatttggacaccaccaaaaatgagagcgtctgttccatggaattgcccgtttattgttttgacgtggtacttgcccgtctgaacaaacggccgtcgcccaaatgtccgccgaccattcccaacgaatgttttccgctgtttgtctcatggaaaaagggccacgcgcgacagttgcgcggatgcatcggcacgttcagtcggaacttgccgcttcatgaggggctcaacgaatacgctcaaatcagtgccttccgtgacaaccgttttgacccggttggcctccatgagctgccctcgctgcactgctccgtgtcgttgctgctctgttttgagccggccgacaactaccgcgactgggtgatcggcgtgcacggcattcgcattgagtaccggcaacaccaccgggcactgaacgcggtctatttgccggaaggggcctatgagaatgggtgggaccatgtcgagacgctgaaacatctgatgtggaagggcggtttcaggggcgacatcaccgaaggccaaccacaaatggggctgg

SEQ ID NO: 91293 - DNA, 610 bp, Heterodera glycines
gattcaccgcctccgtcgactctttgccattatcagcagcagccgaatgcttcacttaaatcgcacattttcgatgaaagcgactgctctttctcagtgcttgaccagcgcctgctcccttccgcggtggaatatgtgcggatccgatcggtccaggacggatacgaagcgatcaaagagatgaaggtccgtggcgctcctctgatcgcaaccgttggaatgttctcattactcgtcgatgtaactgcttcttctactgctactgctgaacacttttgctccgactctttcgtccaaaaaacatttcgccaatccgtcgaaaggaaatgccaaatgcttttgtccgctcggcctaccgcaattaatttggcaaatgccttccacgaactgatcgactttctaaagaatgatgaggacaacaacagcgatgctggaactgaaacggcggcggagattaatcggcggcttaaaatacgactgaaacattttgtgttggattggcagtcgcgcgaaagtgctgaaaacgcggcactgctacacaattcggtccaggcggtactcaatgaatgtgcggcaacaaaaaatgttggacaaaatgacgacgacaaca

SEQ ID NO: 91294 - DNA, 648 bp, Heterodera glycines
ttcaagtatttacaatgccgggctgtatgccaatcgccatgcccgagcatttgatccctttcgaccccggccatatcattccgtgcccgtttttcacacgtactgtgaggaatatcgtagaacagaccaaaccggacgttgtatttatggtctttcggtagtacatttaaatagaaaggaaataatataaataattattaatttacatattttaaattaaaaaattgttcgcttattaaaatacttaattaattaacaattttttgtttgctgtgaatttataacgattttttaaaccatcaaaactaccgaaagattaaaattaacatttatattaaattttaggtggtataatgaagttctgaatgtcccatttaatgaaaatgggactacaaaaaatgacgaaattttgaaagcatttcgccatgaattgcggcattttcaaaaattcgtcagcaaccgaatattcgtctcggccccaacactgcaattcaaacatgacgtggccaaagagttggccaaacggttgtggcaacacgctccgcttggcgacctgcaactatcgcttcgggagcattacgtcacaaatcgcttttcctatgcccgtctccgtctgttgaactgtccaaaatgtgtccaatttgacct

SEQ ID NO: 91295 - DNA, 368 bp, Heterodera glycines
gcaagctgttctatgtcccccaacgtccctacatgaccatcggctccctgagggatcaggtcatttacccggaccgtccggcggacatgcgtcgccgtgggttcaccgacagtgcgctggaggcactgcttgaccaagtgcagttgcgcaacattttggagcgcgaggggggctgggagggccaacaggactggatggacgttctgagcgggggcgaaaagcaacgcattgcgatggcccgcctgttctaccacagtccgcagttcgccattttggacgagtgcacttccgccgtgtcggccgacgttgaagacgccatctaccgacgatgccatgagttgggcatcactttggtcaccgtttcccaa

SEQ ID NO: 91296 - DNA, 547 bp, Heterodera glycines
  unsure (1)..(547): unsure at all n locations
cattgttctcgggattgcctcggtgtgctctctgttggctatcatcgccacagtcgtcactctgccatctctgtactcggagatgagccaaatgaacagcaaagtgcgcgacggagttgaggccttccgcgtcaacaccgactcggcctggactgacttgatnggnnacgtgcaagtggtcgtgacgccgccgtcgaagccccgtgataaccccttcaactccatcttccgtgccaaacgtcaactgcccggacactgccagtgcgctggcctccaacagccaagcttgtccccccctggtccggcccggcccctcccgaaccgccctggaacagcccccggcacccctcttaagnnncaggagaaacccgaaaaacctggaagaattgggaaaacccctttctttttggcccccaaaaaatccccccccccctttttctctgtggggcccccccgcccgcccccaagggaagagggaccccccccacaaaaaaaggccccccccaagaacacattggtcccccccccctgcggggggggggaggga

SEQ ID NO: 91297 - DNA, 550 bp, Heterodera glycines
ggcgtgtcaaagcttaccgcttcgtggcttacacgaccgtttctttctccatcatctcacttttgtcggtgtgcttgacactgccaatgctgaagagttacgtgtcgaacgtgggcatgaaaatggactctgagctcagctcatgccagcacaatgccaaagacatttggtccgaagtcagtcagctgaaggggctgcctctgctggtctccggaaaccgtacggcgcgtagcgcatacggtagcggccaagagtgttgctccggcggtgcccaaggccagcccggccaacccggacagcctggcaaccccggagagcgcggaatctgtcccaaatactgtgccgtggacggcggagtgttcttcgaggacggcacccgaagacgttgaaaaaagctattctgatcaggggaagaaaaagcagaaaatcagtagcgattgccctcccctcccccgtgcccttctcctccccattttccactggctttcttttccttcctttttttattttggttagcttttccaattcgcccaaattcccccccccctcc

SEQ ID NO: 91298 - DNA, 456 bp, Heterodera glycines
aacagtcaggagtctcaagtggcgtctccagtgaaagccggaaaagctactacgaagacgacggctagcggaaagggcggcaaagcgaaggcggacggaaaagtgaaggcgggcggaaaaggggcgaagaaggcgggcggaaagggtggaaaagtgaagattgctgcgagcggatcgaagaacacgcgctctgctcgtgctggcgttgcatttcccgtcggacgtatccatcgtttgctgcgccacggtcgccatgctcagcgcattggggccggaacgcctgtctatatggcatcgggtgttggaatacctggcggccgaaatgctcgagctgaccggcaacgcgtgaaggaaaaacaaaagttgcgaatcaccccgcgccatttgcaattggctgtgcgcaacgacaaagaattgaacaagcttctcgcggagggcaccctttcatcggggggg

SEQ ID NO: 91299 - DNA, 544 bp, Heterodera glycines
atgtattgccatgttggggccagccctgtcactacagtatgctgtccagcagaacaaatcaacccatgtgctcaatcagttgagcaaggaattgggcctaatcaattggagcgctttgccttcgatgttcaagcgcaacagtgcgtgccgttcgcttatcgtgggctgaagggcaaccgaaacaattttctgagccaagaggagtgtgaggtggcatgcctgccaaattcgtgcccttccggaagtccttttgtgggggccgatggacgggcccaaagctgcgcagtaagcacggcgatgagcacatgtcccaacggttattggtgccacgttggggcgaatgctgccacgacaatgtgttgccctgaggcaaatgccagtccctgccaattgccaatgtccacgggggagggaccgttccgattggatcgcttttacttcgatttgggctccaaaagttgcaaatcgttcatttacaagggactgaagggcaaccagaacaacttcctctctttgcgcgcgtgtcagctcaactgtctccccc

SEQ ID NO: 91300 - DNA, 411 bp, Heterodera glycines
ccatttgtcggcccaaactgaccaccaccaccacccgtccaatcatcgacaacattgtccaccgttgcctgaacgttttgtggccggattgcgttgcgcttttcaactgcttgacatcaacgggagcggaaaagtgccatttgaacagatttgcaagaaatggccagtgcattttgccgatttaccagtgccatcaaattttttggaatgtcttcgtcgtgtgaaccccagcgaagaaatggtcacttttgagcagttcatcaagggtgcccaattggcactcagagaaagaatgaacacggcaggccgattaaagagagtccaaagtgaaggcaaattgtttggcagtgatttggaaaatggcaaaagcggagaaagcaacagagcaaaaagtcgtggtgccccgtcctc

SEQ ID NO: 91301 - DNA, 635 bp, Heterodera glycines
ggtgcgtgagaaatatcaaacggatttctatgttctggacaaatacccattggctgtccgccctttctatacaatgcccgacccaaatgacaccaaatattccaatagttacgacatgttcatgagaggcgaagaaatcatttccggtgcccagcgtgttcacgactcggcaatgctcaccgaacgtgccaaactgcacgggatagacattgagaagattcagtcatacatcgacgccttcagatttttatgcccaccacatgcggggggaggaattggtttggaacgcgtgacgatgcttttccttgggttgcccaacgtgcgtttggccagtctttttccgcgcgacccgaaaagaataacgccatagaaggaagaaattgtttttgaacaaaaaataaatattgttctggtctcacattttctggattcaccaaatcgaaactcaatgacctctctcttcaagcgaaaatttaagtgaaggattgcacaacaaaaagctgaaaggatggagaggcggcacttgtcccaatttactcttctataaagcccaatctgccgattttttctataaccttaattaagtaacgcaattggcttatccatcctttgggtgttgttcgttttccgcttct

SEQ ID NO: 91302 - DNA, 639 bp, Heterodera glycines
aaatatcgaaaggcattggacgaggatcaattggctcgtcaactgtacgaattgatctgtcgttatttcctcgcgacttgtttgtgtcccagcaaaattgccgaaatgaccattaaattttccatcggacccgagacctttaaaagtgtcaaacatacggtggtcgtccagggctttctgttggtcgtcccatggatgcgacccgaattttgtgacacggaacttcccacagaagcgaccaaacagcttaatcagttcatcaagcaaacattcatcgtcagcgatgttcgtcgtctccaaattgaaaatcccaagggcggattgtcagaagcaaagctcatttcgcaaatggcacttttggagttgggcaattacgacacaatcccggaaacattgagcaaattaatgcagaaaaaactggccaatgtcgttggccccggccgttggattgtgcccacttccgaaggccttcaaaggctcgagtcttttcggcaagatggcgttgacacggacgggaacactgagcaagtgtcggacgacgttctagaagaaagggacgaagatgacggcagcgatgtcagagaagtgaagcagcacagcgacagaagggcgagaaaacgcgtccgttttgatttgacc

SEQ ID NO: 91303 - DNA, 201 bp, Heterodera glycines
agaagctaaagtggaaggagatgccaatattttatgcaaattgagtgcaccgagtgttaaagttaagactgaagttgacctccacaattcgcaattaaatgccgatcaattgtacgaatacgccaagaattgcttcaaattcaaaaacatttgcgttttacgctttcggaaatggtccgaagctcgcaatttttataagca

SEQ ID NO: 91304 - DNA, 596 bp, Heterodera glycines
aaaataattaatctcaaatggctgctttaatgatgctaacatttttactcatgagttcatttgttgcggaaatggcaaacgctttgaaaatattaatcgtccaacaaaattacatgttctttcgaagtcattttggattcggtttaaacttggccaaatatttggcagaagaaggccaccaaattcatatgttgatcccaataacagatgaaacttataaattaaagaataaaaatgatgaagcccaattgtatgtgcggtattttgtgccgaaaaagacgaaaccgttgcataagcttattatggagggagacaaaggcaaaatgagtgacagaatttacaaagaaattgccgaggactttgaactgatggacggattacgtgccgaaaagttcgacgtgggaatggcagaggcattctgtttgacggagtattcgttggcacttttccactttctgcaaattgcggtcacaatcgccacccaaagccagccgatgtcgccgtttcagctgcatttgatgggccatttgagcaaaatgaaacagtcggaaggaatgccgacggaatttatcggaatttctacaatgaattttttt

SEQ ID NO: 91305 - DNA, 644 bp, Heterodera glycines
ctcagaaattggttattcctgtgtcaacgttcttcacacctttaaaggaaaaaccaacggatcaaccaaaacaacctccacttgaatatgatccaattttctgtcaaaaatcgtcatgtaaagctgttctgaatgcattatgcatggtcgactaccggacaaaagtgtgggtgtgcccgttctgcaaccagcgaaaccctttcccgccgcattacgccgccatttcggaggaaaatcgaccgccagaactacaccctctttttacgacaattgagtacacgttgaagaaggcgaccactttgcccccaatttttctgtttgtcatcgacacgtgcatcgcctcggaagagctcaaagcattgaaggaatcgctgcaaaaggccatttcgtatttgccggccgacgcactcattggactgattacttttgggagaatggtggaaattcacgagctcaacgtgaaaggcatggcacggtcttacgtgttcaagggaaccaaagaagcaaaccccaagcagttgcgtgatatcattgctttgcaaattggccttccgtctgcgactgtccgtcgtcaatcggctgcttctacgcccgttcctcaccacccaatccaacaaccattgataaacggagtccaccccgga

SEQ ID NO: 91306 - DNA, 620 bp, Heterodera glycines
cagatgcagtgaaattgagcacttttcggcgtgtcaaatccggcacacattcgtcagactttgtggaaatgcctttcacgggttcggattttgacgtcagaccgcttctccatcacatcactcatgccagtttgccagacattctcgacattggcctcggcttcaccaccgacgtgccattgtcctcgcccctttcccattcgcttctttccctccaaaatggcactttgccaaattttctcttctattgtctcatagaaatggcttcagaactccgtttacgacactcaaaactttttttttcttcgaggcctttgcttttgtcaattgacttggccaattcgttgcccctggacaaattgctggaggcatttgagacgaacgaattgccggcactttgtcttttaaacaccgaaaagaaaagttttcgctgtatgacaggagaaaaaaacattgagaatttcaccactagcaatgccccggcggattttgcacagcgaatggccactgaaaagtccaaagcatttgaattcctcggcaacggcgtcggccccacgggggactttccttcctcgtcgcatcccttcgcaataattcaaatcgaacatatcggcgcattg

SEQ ID NO: 91307 - DNA, 604 bp, Heterodera glycines
cgcaaagacgcccccctcggccatcgcatcggcccggcgcccagcccttcgtcggccagcgccagttccacactcactcatttccaatggaaggaaggaaggaattccgcagagcgaaggacggcatacgaagggatctgtgcgattccgtcgcagcaaaagccaaccgacgctttttacggaatatttgcgcgacttttcgataaaaatacaattgaattggataaaacggagagagacgacgacataaaagacaattacatgatgtatttcattagcaaaagtgaagaacatccgacgaacatcagcagaagaaaggaaccaaacggagaaaccgacggagaaaggaggggacggtcattgagcccaaaagtggaaagacaaacgcgcacgtcgaaatgttccgttgctgctcatatgagcatcccggtggaccaattacagccaagaaattgccgaatgtgaatcaaaaaaatgatggaatggacaaaaaaacgctaatggacgaatagtgaaaaaagaaaggacgaagggatgcgcaattggcaacgacaaagaaaaacgggtgtcatgcaactcgtacaatgggtataggctaattttg

SEQ ID NO: 91308 - DNA, 325 bp, Heterodera glycines
tcaagatagttgctcccttttcgcccaaagccaatcctttcaatccggactgactgcacgaccctgatatccccgagcacccacctcaccagtacaacgcagacaaaccccgcaaacaacttgcaatgaactgcatgcgactccatgtaccccgtgacctatgggacaaaactcgcaaaattttgcgactgaacccccggtttccccaggagcacccggccagcccggcaccggaggaggacagctgcaggccggagaggccagcccatctgcactctatggacagccattacaatccgcagagcccggatttactggacagtcc

SEQ ID NO: 91309 - DNA, 657 bp, Heterodera glycines
cggcagcgcagtggtggccggtcagcgagttttttccgtgtattggacgaacttaaaccgaagggcatcaaagtggtcgggtgcatgtgtatgtgccgcaacagcatcggttcccattcgtacacttgcgatgagataatcacttcccgcagcggaaagcgcgtccacatttacaacaccgacgccgaaggtcggatggcaatggccgacccattggccgaggccaaagaaaaagccatgaaagcgaataacccacatttgttcaccatcgctacgctcactggccatttgatactcacttatggccattgctccgccgcgatggacaacggaccggcgagggcggcaaattacgcggaacaattgaggaaaacgggcgacgaattcggacaaccggtggaagtgtcgcgactgttcagtgaggacttcgactttcactctgcgaaatgcgaagcggccgatttgatgcaatcgaacgctttgccaagcgtgagaacgccacgagggcacatgggccccagcgcatttctgatgcgcgtctcgcgcatccaacaaggtgggcttgactcggccaagccgttgaaatcaccccatctggacattgggatatccatggggggaaaacccaaacccttcggtcacccttcccctctgctc

SEQ ID NO: 91310 - DNA, 395 bp, Heterodera glycines
gattctaaaggcatttgtcgatccgtgctgtcctccgactgcgacgacttcgacttggtcaattcgaccgcctcccctctcttcgcttacccttgcgttcgcctgattcccattggccaaatcaaacaaattttgcatgacaaaatcacttcttctgtatgaggaagaatttcaatgcaaagttgagggcgatctttttcgctccgaggacgggttgctcaattctctgctcagttttgagcattttgctcgcaaattacgaattgtcgagaggggatggcccagcggattccgaatgtggtttcgcgagaaaagcggatggatatacgaacggtgttcgctcgttgcaaggataaagggggggtttgcgcaaagcgacgcacactttgacatgg

SEQ ID NO: 91311 - DNA, 556 bp, Heterodera glycines
gggcggtgttggtcggcgagactgacatggagggagcgattgtaaatctgattctgaaccaaaccgacattggtcaaattgagcaagtatttctagatcctgatttcgatcttgaagatttttttgattaatcccaattattttgcatttaatataccaaaactatagaaatcattgccccaaaaaaccaccacaactccatcctgctgggcatgaatggtgggaacgaagcggcgtcgtcctcgtcaacttcggcaccaccaaatgcgaccatgctgcagctcaatgttccaaaaaatcagcagttgttcatgctcaatcctccaaatggacccgtcgtcaacattggtgaccacattcaaggcgatggtggtggtcaacagcagtcaacaagtgcctccacgccattgccggacaaaattttggacgacgacgacaatttaccgcctcctctgttgacctcggtgattgaacaggacggcgaagaaattgttttatgatgcttttctgtaccttgttttgtttggatctctttgcctgagaaaattcattttac

SEQ ID NO: 91312 - DNA, 526 bp, Heterodera glycines
gttgggtttaagccgactactgagcctactcctgctgttaccaccgctgtttctgttgctccgttgagtggcactttaaccttcaccgcttcgtccatccctattagcggcagtctttttggtggtgcttgtcgacccggaacaaacacgttatcgaacttggcggccaaggtcactgctaagaccactgaacctgttggatttaaaccgacttttgagcctctgcttcctgctgttactactactgctgtttcggttgctctatttaatggtgcttcaaccttcaccactccgtctgtccccattggcagcagtctttttggtggtgcttctcgtccgggaacaaacacttttgcgaacttggcagcgaaagcagctgagtcgggtggtggttttttgggcggcggaggcgtcactgcaaaaccgatccaatttggtcaatctgcatttggaaccaatgcaaaggatttcaagcttttccaacaaccgccttctcagccttcattcagttcaaatattcataccg

SEQ ID NO: 91313 - DNA, 636 bp, Heterodera glycines
agcagaggacggaacgaaggcggaaaagggacaaaacgccgaaaaaggcgatggagtggcgaaaggggcaaaaaaggaacgccttcggaagcttttcggatgctgagtttgaccaaaccaacgaacaatacaacgcattagtggaggaaatggacaaacagtcgaaattgaacaaaagtgtcttcgacgatttggacgaagaacaacggcagaaactcgaagggttccgtcccggtctgtatatacgtgtcaaagttgaggacgttcctgcggcgtttgttgactgtttcacccaacctttccttacattgtcggaggacttttgccggtcgaacaaaacgacggatacgttcaggttcgcattaaaaagcaccgctggtacgaccgtttgctgaagtcgcgtgatccgctgatcatttcgtgcggttggcggcgcttccaatcgatggtcgtttactctgttcttgaccataaccaccggctgcgcttcttcaaatacacgccgaaagaagccttttgtcacggcgctttttgggcaccttttgtaacgcaaaacaccggctttctttgcctccaatcggtcgacgaggaaaagaagggttttcgcattgctgccagcggcgttgtgttgggaat

SEQ ID NO: 91314 - DNA, 639 bp, Heterodera glycines
ctttatcaaacaatcccttaattaattatgtcttcggaacagtccaaacttttgctgcagaagcagttaaatgagttgaccagaaatccggtggatgggttcagtgcggggctcgtcgatgaaagcaatctctacaaatggcaagtgttcattatgggcccgccaaattcgccatacgagggcggcaacttccgtgcagaactcgttttccctaaagattatccgctgaggccgccgacgatgcgatttgtgtcgaggatagtgcacccgaacattgaccgagacgggaatgtgtgcatttcgattcttcatgagcctggcgatgaccgatttggctacgaaaaggcgtccgagcgttggctgcccgtccacacggttgagaccattctgatttcggtcatttcgatgctttccgacccgaactttgacagtccggcaaatgttgacgcagcgaaaacgcaccgcgagaatccgacggagtacaggcgtcaggtcgcgcggtgtgtgcgggaaacggaagagcaataggcaaatgcgtcggagtgaacggatggcaaccgaactgaggggggaggacactgacaaatgaccaaccgaccgacccttttgacccccccccccctctcgtgtcaattttcg

SEQ ID NO: 91315 - DNA, 421 bp, Heterodera glycines
gcccctcgatctgctcgcatttacgctcattttgcctttgcttccaccactaatccaccatttatcaaaacaacaccaaattaaatctgatccaatttttgctgagtttgattctggtgcgcatgggcttcaaacttttctaaacgatccttcgattgaacgaaataatggtgttttcgttggaggaattctcggatcgctgttttcttttctgcaggttctctcatcgcccattgttggctcattgtccgaatcgcatggacgaaaatcgcttcttttggcagctgtgattggctcactgatttcatattgcctttggtctctgtcatccgaaagcttttcaattttctttgttcctcgactgatcggagggttaagcaaagcgtccgacccggtagcgatcgcgattgtcactgacatt

SEQ ID NO: 91316 - DNA, 513 bp, Heterodera glycines
gtggaaaacgaaatgttgcgttacaaagtgatccgatcgctttatccggttctgtgtttgatcgcttccctttattatgcattgatcaatcgcgtgttcacgctgatcagtcacttttggccaaagagcaaagtgacgtggacagagggcgaggcggaggagccgcttctgttcatgtcggccaaaaaaatggctgagaaaattcggcgtaaagagatctcctcctcccaattggtgtccctttacattgctcggctgtgccgtgtccaaccgctgatcaatgccattgtgatggacaattatgaagctgctaaagaggaggccgaagcagtggacctttacatcgcatcaatggacgatgactcggaggaacttcaaactcttaccaccactaagccattgcttggcgttccgttcacattcaaaaacaacatggacgtcaaagggttcgtctccgttgctggctttaacaaatttttgaaaaatgcgccagccgaacgtgtattcgaaagt

SEQ ID NO: 91317 - DNA, 619 bp, Heterodera glycines
ttatgaatgactttaccactgtggcgattgcgcttttaagccgttattcgaataatctcctaaagaaggatagtgaggcagcactaagcggtgaaattgttggcgatgaacgggaaactgaaaatattgttcgtactttaattaccatcatcgattcatttgaagaaaatgaattcttcgcgcaaggactttaccgattgagcgggtctttgactacgcaacaaaatgcacttaatattatcgaaaatgccaatggacgggaattgaaactttacttcatttacgagttgaatgccacggataaggcgtcttgcattaaaactcttttgcgtaaaatgcccgacactcttttcccacactgtcaacgtgttgctctgctcgacctttctggaatggtcacttcgtacggtgcgccatgcgaaagcgacgaccgaattttgaaagcactgcaaattctcgtctattttatacccgaaacgcataagcaatgtttggaatgtttgctgatccatttgaaaagagtgtcggctcattccgacaaaaacaaaatggacgagtccaacctcggcctgctcttttcttcctacgtttttccagtccaacaacagaaatacgaatc

SEQ ID NO: 91318 - DNA, 641 bp, Heterodera glycines
gggaaaagcatttgcattttgttcgtcttgcggaggaagcggcgcgttacgacgaaatggtccaggggatgaagcaggtgattgaattggatgccaaactgaacgaaaatgaacgcaaattgttgggcgtcgcgtacagaaagtcagtcactgggcaacgcttcgcttggcgtgtcattgcgtccgtcttggcacgagggaaaggcacgaagagacagctggagatggtcaagcagttgctgaacaagctggagcgcgaggtggaagagaggtgccgtgaaatattggatttgttggactgggttctgatcaaggaggctgcagatgatgaagcgaaagtgttctacttgaaactgaaggctgaccacttccgctatttggctgagacacggacggtgaaaaacggtgttgcagagaaggcaaagcaagcgtaccaagaagcgttcgacctcgccaagaacaaactccggccaatgcatccgattcgtctcaccgtggcgctgaactttgccattctccaattcgaagtgcagaaatcaccagccgatgcttgccaaactgcccaacgggcttatgacgacgcgacttccgatgcgcagacaacgggcgagagtatttgcgcggagtccgtcacgatcatg

SEQ ID NO: 91319 - DNA, 301 bp, Heterodera glycines
gggcatggcggccgcttcttcagcttctggcaccagcagcacgacctcctcctcctcgtcgtcctcctcctcaatgattccgctggacattggcctgtgcatgttgccgattgcggagaattggtgcaacacgcaggtcaaggtggtcaagcttaactacatgtggaccattaacaacttttcttttttgcccgacgaaatggggcgaaactttgaagagttcgacgttcagtggcggcccgaaacaaaactgaaaaggtgcctgggcatcaaaccgaaagggctcgaacaagaatccaag

SEQ ID NO: 91320 - DNA, 547 bp, Heterodera glycines
agaaatgccggcggaattgcgaagcagcgacatgttcatgaagaaggagaaattgcatttgacgatcaatgtgctcaaattgttcacaaacgaagagattgaaaaagtccgcaaatttttgcatgaacaattccaatccgacaaaatcagagatattctgcagggctctggcggtcagttgcgcgtcaacttcaaaacattgcaaccgatggtttaccaatcgaaagaacattgccgagttttatttgcataactcgaggcggtcgaatcaaacactctccaacttttggccaatacgctcgacgacgcattgacaaaagccgaattggtaaagaaacgtcaaagcgaagatgtgttactgcacatgaccggtctgaacactaaatacttgctccacctttgcgagatgcgtggctctaccaatgctgacgatccgaacggatacgtttctgtgcactccgtcaaaattcccgaggcagcaaattggaatgtccgaaatccctcccccattatttccattggcaatgtgacctatataatattaatt

SEQ ID NO: 91321 - DNA, 318 bp, Heterodera glycines
ccggaggcgagggaccgcctgggcccactggtgcacctgggctgcccggcctgtctggcaacattggtcagcctgggcagcccggagcgcccggccaacccggcaaggacagcggctactgtccatgcccgccccgctcttccgcgatggcactcaaaaagaaaatggcggcggtcaaaatttttttagcgaaaagagcagcttcaaactgtgatgctaaagataatcccattattggatgttggcgaaattaaattcaccttcttcgtaaataaattgcatttttaaaaaaaaaaaaaaagaaaaaaaagaaaaaaa

SEQ ID NO: 91322 - DNA, 511 bp, Heterodera glycines
tctgtccaaaggccttcctccatgacatctctgttggccactgcaaacgctttacgctgatcggaaaggactcaaagacgggcgaattcggcgctgtgttggacgagcgcaaatggcacaaccaactgttcatgagcagcaccaactttctcccaatcaaagaacagcagcagcaattcatggacgaattggccgccaaattgccgtgccctggacgccactgtattccgattacgacgccttcgttttttttctggactgagaagaacagaaatctcttcgacaatgttatggactccttttccggccaactgttgctcgcattgtgctcgcttctcaccattggcattggcttcgcccggatgttacgccctgcggcagaatatgaatgcttcgactattgcatggccctctattctgtcttttgctggtgttgctctgcttgggcctcatcgtatttgctgctctattggacaccttattggtcttgcatgaacttccgtgcggatga

SEQ ID NO: 91323 - DNA, 544 bp, Heterodera glycines
gtttgagacaaacgcgcaaattctatttgaatatgtctggacacgttaatatgcagcaggaatgcacagtgtatttgcgaaacttggatggaaaagtaaccgaaaagctgctggaggaactcttcgtccaggttggtccggtgaattttgtcaccataagagaccctcaacagcagcacaaaggcccacattcggccgacacgacgcccaaaacctcgggaaatcgttacgcctttgttgaatttgccgatgtcgaatcagttctgttcgcctgtgaagtgatggacgcggtcgaaatttatggacaaaaactcaaagtgcagccgagggataacacacttcagagagccattttcacacaaatgaacatgcacaccgcttcctgggaacggcaccacgcacccgcggccgactcatccgttgcggggaagggccgtccggcaacacgtcactcggacatcggcgtgtacaatgagttggagcgacagtcccctggggcggggggaggacagcgcatcgtcacattcaatcgcagccacggagg

SEQ ID NO: 91324 - DNA, 640 bp, Heterodera glycines
ctcacaccgaatcggcactttccttggatggcattgtcgtcactcccgccgatgaacacaaacgagaaaagctggcgctaattacactgcttaactacttcagcagtttgagcacgcattgggcacagttactgcgcccatttgcaacgtccatcttccaactgatcccattgttttcacactattccaatgaaaatactgatgaagaattgagagggtgttgtaatgcgcaattggtgcgttacatgggcctttcaactgtggcctcggcagcggacttggaagaactgttcgccacttgcacaacattgcgcgagcgggcgtcttggtggaagagcaaagtgtgcctgttgcgctttctccaagtgttcgcgttcaccaatcagttcttcatcagtgcccatccaaatggcttttcggcactcgagcaactgatcatcgactttttgtgtgacccccgctttgatgttcgcgtagcggcagcagaaacactcgggggactcatccgagccgccatcattgcagtggaccaacaattcctggccaaggcacgagacatggcgaattcgactgatccaatcacacgtcactcgggcgtcctcgcactttccgccatcgttcgtgctttcccatactcagt

SEQ ID NO: 91325 - DNA, 641 bp, Heterodera glycines
ggaaaattgagcagggccaaatcgattggagcacagccgaagcattggcaatcggaacggcacttttgcagggaaatgatgttcgactaagcggccaagacgttgggcgagcgactttcagccaccgccacgcgatgctcgtcgaccaacggactgacaaagtgcacgtccctctcaatcatatcgctaaggaccaacaaaacttcttagagatagcgaacagtccgttgacggaagcggcggtggtctgatttgaatttggattcgccatcgaaaaccctcaccgaatggtcatttgggaagcacagtttggcgatttttacaacggagcgcaagtgcaaatcgacacgttaattgcgaacggagaaagcaaatggctccttcagaatggcattgtccttttgctgccacacggcatcgacggggcgggccccgaccacagcagtgggcacatcgaacgattccttcagctgacgaacagccgcgaggaccaacgaccgccggacggcgacgacgtaaacctttcggggggaaatccgagcactgcggcgcaatatttccatttgctgcgaggacagattgtccgtccccttcgaaagcctttggggattttctcaccccaaatgctgctccggcccccc

SEQ ID NO: 91326 - DNA, 575 bp, Heterodera glycines
cagtcgttggagaaccaattggccaccaaactgttacattgccaacggttggaggagaaagagagagtactcaccgaaaaccgagtgacacttgagcacgaattgaggatcagagaccaaaacaatgaaacattgcgcaaaaagggcattgaattttcacaattggcaacggacctccgcttgagattggaccgattggacatccaattcactgaacttcgcgagagcgtaataaaaaaggcatcctcatacgaagcgaatgccaacaaaattaaacggcttgaggaagagaaaagttcgttgaaacggaagttggaccgagcaaaaagaatggaaaagtacgaaaatgtggacgaattgctgcaggaggaaaatcgcattttgaaggagtctctgacctgtccaagttgcaaagtgaatcggaaaaatgccattctggacaagtgccatcacgtgttctgttttgaatgcatccgccttcgctatgacaatcggcggcgaaagtgtccgaaatgcaacgccgcttttggggccaacgacttccatagaatatatttggaatgaacgatgggaaa

SEQ ID NO: 91327 - DNA, 539 bp, Heterodera glycines
ctgcccatggtgtgcagtaccaattcccctccctgcctcagccctctcctcatacacaaacaacccaacaacaacagccaacgactgccaatctccactactctcaaagtcaccaacaacaagcagtccctttccaacggaatttgaatgtgttatcgcatccgatgcttttccaacaccaacagaacgtccaactgtcccaacagcagcaacagatgggcacacaacaacactccgtcgtttatgctggtgggcatgcgatgccaacccaacatcaccaacaatactctgctgcttacccattgttgcaacagcagcagcagtcgcaacagttccctccttccactggcgctgcctttgcccccatggtaattccgctgcaaaacgacccaattgcagtgggaattagacaacaacatcagcaggtttaccaacacacgcccagtcattcggctctacaacacggaacgtcacatgccgggggttacttggctcaacaaaaatagtcggcggacgtttggttgaccaattctctttgt

SEQ ID NO: 91328 - DNA, 628 bp, Heterodera glycines
gtcattccgaagatatcggcagattgtttagcaagttagactatgccggcatttccctgttgatcattggctcatttgtcccttggctactacgcattcttctgccgagttctcccgatgaccatttacatttcgatgatcttccttcttggaattgctgcgcttgtcgtttcattgttcgacaaattttcccaacccaaataccgccctctccgtgcgattgtttttatggcgatgggattattcagcgttgttcccgctcttcatcttttggtcactgatggcattgtgtggatgtttgaaaaggcttctttacactggttgattttgatgggaatactgtaccttagcggagcgactatttatatggtgcgcttccccgaaagatgcttccctgggaagtgcgacattttgtgtcaatcccaccaactgttccatcttttcgtcattttcgctgccgccgtccattaccacggagtgttagaactcgcgatgaagcggttgcaggacggttcctgctcggaacaactgatttcccacagcggaagtgacgaggcaaccattcagtggttggacgaccgattacgaccatattaattgaccaaggaagacgcatttgcattctgtt

SEQ ID NO: 91329 - DNA, 583 bp, Heterodera glycines
cgaccaatccgctgaattctgacgaacggaaacggcacgagttcatcgattgtttggccatcgaattgatacgcaccgaactgcttccgtatgccgcggcattgccacgggaattcatgcagcgcatcatcgacattctcaacagaggatccattaacacaatggactcgcatgacgttctcgcttcagacgcttaccagcagcgtgccgacctttcccgcgtctgtttcgacgctcttttgtcgcttactcaaacggacgccgccgcttcttccgcgacgacatccaagccgaagtcgccaacgccgagtggcggcggtgttttgcgcaattcaaaccaaacgaccgccgcgtgctcttcgcttggcgcaacagccatcgcgtcgttgctgcagcgttgcagcaaagtgcttaatgactatgccaaagatgaacaaacggccggccattttcgacttccgcaagagcgcattttcgaggccatctccgctcttcaggcgatcaccgctctcatcgagggcttttcgcggaatccgaacaacccgactctttactcgcacctcgtcaccctccacccgtcttt

SEQ ID NO: 91330 - DNA, 445 bp, Heterodera glycines
tcaattgcttagaattatgcgagaccaaattcgctcctcaggcccaattaccgttgatgaatacatgaaaatatgcgccacttgtcaacttggttgttaagcttgtcaaaacgaaaattttggagagcgcggtgacctagtaacttccccgcacctgactcagatattcggagaatgaattgcgagtagggctgttcatgaggtggaaatgacctcttggaaggaccagtggccattcggcaaactcgggtcgggctcgggcgaattgaaggacgacgggctttgtgggctgcgtcaatttgatgtattacacaaggttgaagcttatatggttaaaaattccaagcgtttagtggaacgccaacgacacactttgaggaagaaatgtggcgaacatttacttagaaccattcgatggtaccattcattggatgatgtgccacaa

SEQ ID NO: 91331 - DNA, 653 bp, Heterodera glycines
gcaagacccgtgaagtggaggcgttacccaccgcaacacccacaaccacggacgaagacgactacgacatctcaatcgactcgccaccgcccaccgcccaatcgggcggcctcggcggcggcccctcagctgctggcccgcctggccttctcggcgcgggcggcgggtacgcctgggaagaagaatacaagcgatcctgggacgccctgcaagaagacgaagacgggtccatcactgcgtctgtctcttatttcacctcgcagctcaaacgcaaacgcctgctccgcgacacgcgcattgtgcaacgcgggctcgtccgccatttggttgtcgtcgtcgacctgtcgcaagcgtgccgggacgtcgacttcaaacccacaaggatcgagcaggtgtgcgtgttgctggacgtgtacttgagcgagttctttgaccagaatccgctcgcgcaagtggccctggtcgtcacgcacaatgagcgcgccgtgcaggtgactgccctgagctcgcacccgggcgaccacttgcgcaaggtgaaggagcggcactccgcgctgctggcggccgaagcggatccgggcgagccaagcttgcagaatgcgcttgagatggccacgggcattctaggacatgtccccgcgcatggcacgcgc

SEQ ID NO: 91332 - DNA, 286 bp, Heterodera glycines
aggacttgtggccttgccaacggcggttgtcccatgacaaatcttttcccggttgctcattctgttgtgcatggcgatcatctccaccttttccgcagatatgctgggccaatgatgcgaaatattattgcgccgcctcccgggttaccggactcactgccaaagaccgtacgctgaaattgggcttaaggccctcgggccaaaaattacaactatccgatcgattgtgcgaaacgtcacccagcacggggccaccagcgttttactgctgctctgaggcaaaaac

SEQ ID NO: 91333 - DNA, 643 bp, Heterodera glycines
attgagcatgggaaatttaatatcagcggaaattcaagggaacaagccacaaaaattcatggaaatactaccgatgcaaagcgaattgacgatgacattctgccaaactcagtgccaattattttgccttcactcatatttgatcagcagcaacattctgctcagaaccggtccattcatcgtcgttttaccacctctacaaccagcttcaccacctatccggcacaacccccatcgtacccgattgaacctgttggccaagctatgccatcgctaagctacccaatcgggccaccacagccgcctgtgccaccttcttacccaatagtgccgcaagcgccttttgctggcacaacgagtccaacggcatgtgaatgttgctgttgttctgcctatcgcagttgtccatgccggccgagctgcccgccatgttgtggtggaacgcatacaacgtcaaccacagtaccaccaacaaagcccacagaagagacaaccacgactacaaccaccaaggataaaacccccaaaaccacaacatcaagcagtacaccggttacaaatccgctattacatccgtacaatccatgctgtctttcattgatcatcaattgtccaaacaacaactgcaattgtccaccgtcat

SEQ ID NO: 91334 - DNA, 584 bp, Heterodera glycines
tccgattctccgctcgactcctcctcttcctcctccttttcctcctcttccccttcttcctcttcatcgtcaatcttcgaccaattagggcagaacgacttggacttaatcaagcagaaaaggcacatcggagacattcagcaattgtgggatgaggacgaaatgaacggtaaaatgcgaaatgccctcaagccgacctcatccaatcggtggacccaaattcgaagccatgatggcaaatttgtgatccctttcataatcagcggacagttcacgatggaagaacgacagaaaatccaaaaagcaatggctgcgattgccaacaattcatgcgttgaatttcggccaaggaaattcaacgagttcgattatgtggacattcaaaaccgaaaagacgaggggtacctttaaagataaaatcgaattcgagatccaatttctggattgggctgtctgattttaaatgcagttgctacacgcaagttggccgagtgcggggccgccaagtgctaatgttggagtcggggtggagcaagccgtgcgggtccggctgcattcagacgttccccggctgtgtcaaacac

SEQ ID NO: 91335 - DNA, 642 bp, Heterodera glycines
gttccttcctgttattatttcaggcattactaatggatcaaagcaaagaccaacaaatcgcacaattgaaggccattattgaagagctgaaggctggaaaacataaggcggtcactgaccagcagccccaatcatcgtcaaccgcctctgccaagtcaccatcaaagccattcaaagagaaagtgaaaggacgtttgacatttgaaaatggaagcgcggctaattaccccgtgtcttttggagaagtgcagcggcgcgttgagtcgccagaccgaatgaaaatttcggattttctcactctttttcacctgcgcaaaacaggcagcaacagcgtcgatctgcgtaaaagcattgagaagtccgggattgaaattcaaacaggacaacggcaacacagcgaggacacctgcttcaccttccttcttgaagcagaagccgtcaagttggctgaagactttgccaaactttgcatcagcaattaccccatcaaaccaatcgccaacgaaatgacatcaggtgaaaatggtggtgagagcggcgctaagccatacaacaaggaagagttgaaatcaattgggcgttttcttgccgaagttttggctttccaacaggcggatgagagtccccacccgcctgctcatc

SEQ ID NO: 91336 - DNA, 541 bp, Heterodera glycines
ggacagacgggaattctgggcgaattcggactgagaggaatcgacggaaagccaggtcggcctggacagcccggacttgctggattgcccggcccccaggggctgccgggccctaaaggcgcgcgtcatccagacgcattctccggactgccaggaccacccggagagcctggatatgccggaatgaggggtgaaattggtccagaaggaaatcgcggcattccgggcgacagagggcccgatggcttcccgggaatcgcgggaaacaaaggcgaccagggcatggaaggagtgcccgggctgcccggcacaattggcctccctggccggcaaggcccaccgggcatccccggaccaagtccacaattcatacaggaaatgcatgctcctaccggtcggccgggtgacatcggactgtccggcatccccggctaccccggcgagccgggcgacgcgggccttcctggcccacccggaccggcaggatacccaggcgcgccgggtccgcctggagagtcgggaatccctggtctcccgggtc

SEQ ID NO: 91337 - DNA, 603 bp, Heterodera glycines
cttcactatttgctccttttcccgctttcccttctcctcccatttgcttttcttcgctcccttctcttcccgtgcctttgtcaattccttctctctccggactcacaattgtggtgagcttcgtttgtctgatgtcggcagccgagtgaaactcttcggatggatggccgccaaacggatgaacaaattcgtcctcctccgcgactcctatggttcagtgcaaacagtgttgccaaaagcgctcttttcgtcgctcaaaaataccaactttgaatctgccctttgccttgagggagtggtggcggacagaggcaaagaaaggaacgacaaaatgcccaccggcgacatcgaagtggtcgtcgacggacttgaagtgctcaatccttccgatgcgccgttgcccgtcgatgaatcgtccaacgaatacacgagaataacccatcgttacttggatttgcgttcggagaaaatgcaacgggcaatgaggctaagagcgagagtggtcagcaaatgccgtcgcttcctggaggacagttgtggctttgtcgaagttcaaactccgaccctcgcccacacgacgcccgggggtgccgcggaattccc

SEQ ID NO: 91338 - DNA, 638 bp, Heterodera glycines
agctgatggaggaactgaccgagctgccggtggtggtcgagttggccagcgacttcatcgatcgtgagacgcccatctttcgtgacgatgtctgcttttttatcagtcaaagtggcgagacggcggacactttgctggcattgaggtactgcaaacctcgcggtgctcttctgatcgggatcaccaacaccgtcgggagttccatttgccgtgagacgcattgcggagtgcacgtcaatgcggggcccgaaattggagttgcatcgacaaaggcgtacacttcgcaaattttggcgttggttatgtttgcgttgaacatgagcgaagatcgtatttccatgagtcaaagacgtgcgaatatcatcgacgggctcaacaacatcagtgaccaaatcaagcaggtgctcacccttgaccagcaggtgttgcaaattgcaaaccaaatctacaaggagaagtctctgctggtgatgggccgcggttacaacttcgccacttgtctggaagggtcgctgaagatcaaagagctctcctacatgcattgcgaaggcattctgagcggtgaactgaagcacgggccgctggcgatggtggacaaagacaaatgcattgtgatggtcatctgcaacgaaatgtgt

SEQ ID NO: 91339 - DNA, 385 bp, Heterodera glycines
tgccacaatttttgcgcgcattaaccggatttcagcgatcacagacccagattgggcgatgattgccactcctacgttccttccattcttcacattttgcccgagtattcgaccaccggcgtgtacaattgaggaattgccaaagattgacattgtcctcatctcccacaaccattacgaccatttggacgtcgtcggcgtacgtgagttggcacaacactttcctaccatcatttgagttgtgacgatggggcttaagcaattgccgctacacgagacgaactcaccagttgggcacgaaatgaattgtggtgaccgtctggaactgcgattacacgagagaagctctgaagtgttcagggtgccggcacagaattgcttacag

SEQ ID NO: 91340 - DNA, 579 bp, Heterodera glycines
cacgagacgagcacttcgagcaataacagcaacaccaccatcacagacaacaacaacaaaccacaaccagcacagcagcagcagcagaaccatcatcacatgttgctgagcattcagcaagcgattgttgcggctgctgcaatggcagcaacggtacaacaccaacaacagcaacaacaacattttcggcaacagcagcagaacggcacaaacaaaagcaatgctattgttggggatgaacaacaacggcacatgccattgcaacagaacgtccaaatggaagtgaaggaacaactgattactgtcgatgaagaaaaggacgagaacaaaaacggagtggacaacgatgaggacgattcatcgccgtactcaaatggctgctcaggctcgggcacaatccccggggcaccgccaacactggcaatagcctcctctgaagagaaaggaggacaacagcaacaccagctgagaacggcacagaggcaaaggggaggcggagacgacgcagtccaaatccaatgccaagcgaatggcgccactccgcactttttggccagcagtatcattccaatgcgtccg

SEQ ID NO: 91341 - DNA, 540 bp, Heterodera glycines
tcgtcagaacagcgcgtcggctgcttcaagaaatgaattgtcgaataaccaccgaacttcactttaccaactccaaaatggcacaatcgctggacccaaaagtccgtcgacggcgtccgatgggaccgatgaaagtgccggcaattggtagcagaatcggtcgttggccgaccaaatctctgaaattgacagtggcattgactctcttcgccaatatcattcgccgtttcatttcgccgcgactaatggcccacaaaagcatttttcggatcggcgaaagtctttgggcgccgtcgtggaaatggcggcggtccctttgaccgatgggacgacggccagcggaaactcggaagttgacaaatgtttggcaattcatttggacagggcgcagcaggcgattagggtgatttgccaagtccagcaaagtccgtttgagtacactctcagcagaatgttgtaccgaatggagagtactgaaacggtcgcactggagatgactttggcattggcacaaaatgcggcggtcaattgccagccgag

SEQ ID NO: 91342 - DNA, 607 bp, Heterodera glycines
  unsure (1)..(607): unsure at all n locations
tcttcctttcccttcttccgcttctccgcctctctctgccattcctcgcgttcgtttcctcactctgtccctttccttcgtctccgtcgtgtttttcctgctcactttggcattttctgtgctcattctcaccaacatcaatgccctgcacacggaagtgatggtggacatcgagcagttcaaaggcgtcgtaagcaaagcgtgggacggaatggntgaacttcaagcggcggacggaggccaaaacaacgggaaaagtgccggcaaagaaaacgcacaaacgacgattgaccgacagaaaagacagtacggcacaatgccatcgtacagctcagcctatgttaacaaacagcagacatgcaattgcgctgcccgagcaaacaaatgccccgccggacctccggggcccccaggcgccccgggattgcccggggagccaggaacacgtggacaagacgggattccaggaatgcctgggatgagtcagagtttcgacagtggctatcaagatggctgtgtccaatgccccccgggcccaccgggcgttcaaggtattcaaggcgtgccggggactcctgggtctgacggacaaccaggaacacccggc

SEQ ID NO: 91343 - DNA, 612 bp, Heterodera glycines
aatgcccgtactacaactgaatgcgctggaccacgatgggcttcagcagaagaagcttaacctgccaaatgcgccacggcaaccagacatcttgcttggaatggatgtttggcacgagctaaagattcaaccaattgaacaattgccaagcggcttcacaatttgtcaatcaaaaattggcaatattatcagcggaaagggtcgaatcgaactcagccaaccatccaacgtctctttcgtgatgatggttttcaacaaggaatcgacaggcagtaaaccgacacacatgcagaaagccaaacaacatcgagagagtaaaacattgagaaggcatcaaatcaacaagctcttgtccagcgctgcaacgttacgatcaagacgcaagcgagaatcggtgcccaacagcacaacaccaatcgtgattgatctttcttccgacagcgaaagaaactcatccgatgtcgagatcatacaagacccagtcgcgggtcaacaaatcagctcatcgaacaaacattcaactgctccattacccaaggcactgcgaaggccaacagcaacaaagcagagttcatcaattgccaaacgaccagcatcattccgcaagcaaac

SEQ ID NO: 91344 - DNA, 639 bp, Heterodera glycines
gttacattctcattgaagaatcgctgatgggagacgaaattcggtgggcaaaatgccaaactgaaaaaaaacatagaaaaaaacaaatcagacaagtgtttgcccgtcatgccacctttccgcagccaatcacaacagcacaatcgcaactgatcgaactgtcccaaacggcggacggagaaggcggcggagagtttgtcaattgggacgcaccgtcggttgaaaatgccgaacatttgaacggggcaaatttggacatttccatcggtggcaccggccttttgcttggtgccggactgaccgtcaaacgatcggtgcgaaaatgccacggggccgagtgcgttttgggtaattatcgctgaatttgaattgctaaatgagtgataaagccgaaaaaaagaaaatgggtaatttttaatgacagcaagcttcaacgaagtgatgtacacaagcattgtggagtattcgctgatcggagctgcggtgatgttcattgtgtggaaaaacatcggacaacgccaaaaaaagtcggagcaaaaggaaaacaaaacaacgaccgcaaaagggtaataaaataattgaaaaacagcaattatttattaattaattaatgtttaattgctttttgagttatgttag

SEQ ID NO: 91345 - DNA, 589 bp, Heterodera glycines
gataaattgatgatgatgttccatctctactcattagtgttttgtttccttttcttcattttggcactttcttctcactttggcacctgcgctggtgccacggagggcgacgacggcaacgaccaaaatggacaacaacaacaacaacaacagcagaacagcagattttcaagcagtagcagcagcagtggcagcagcaacggatgccaattcagcattaataatggcatcatcagtgacgggaaaggctactcgcgacgcatgacaccggcggaggagcaacagatgggcaattatcatgcgcaggttgcgcgcgcaacggaggaattccaacagcaaatggcacaggcggtgcaggcaccgttccgcggcggatttggcattccaagcattggccaaacgccccaactccgtttgccccagctgccatgcttccgcgtggacagcagcagcggcggagacggcgcgcaatcgtcgcaaaacgtggcggcacaaaattttagcggaaatgccgctggtggtgttgacgaggaaaactatgcctctgtttcggttgaagaatgaatttctctgttcttctaaggatcgg

SEQ ID NO: 91346 - DNA, 601 bp, Heterodera glycines
ggtaaaccgcccgcgcaaccaaacgcacctgtctgtactgctggtttctggcctcggttgtggtccattccagcagcgggtcatgcgcaaaagcgtgcagaacggtgcggagcatgcgactctcggcccgcattacctgttgggagtgggaagcgtgtgcatcaattagacaatgattaacggatgaatccatccatccatgttcccaccttcatacgccttttcacacgactttcggaatgtaccctccacaccggtggcgccaaatccgtccaccatgttgcgggtgagacggaacggcacaatctgaaattgacaaacgagaaggagtgtgattttttgtattagaattttatcgcaaaatttaaaaaaaaaattatttggaaacaaattgtaacggaatgactgtacctcgggcaccttcagatattcgcccttgtcaaagagaatgttgaagtccacgtggatcaaatcttggaagggtttctaattgcatgattgatttcatataattttcggtttttgaataaataaatcgaaaaaccggacaacgaatttttgggtgcaccccaaaatctcgccgccaattttcttataaaac

SEQ ID NO: 91347 - DNA, 73 bp, Heterodera glycines
ggctcagattctttccgggctcagaccgaacaagcagcgataaaggtgccaaaaaaaaaaaaaaaaaaaaaaa

SEQ ID NO: 91348 - DNA, 492 bp, Heterodera glycines
tcagacccggccatgttgggtgccgtgccgcatcagttccgctccccggccgacttccccgccgtggaaggcgtcgcggccggccgttccaccgccctggccgcactgtgccgcattgtgtgtgccaaacggagcagggaacggcttgacgacgaacagcttgcctttttcttcaccatcctccacgaggctctcatttcgaactaaccctgtcaaaatcaattttttcctgctgtgcgctacattatcgatcgtgaccgtctcatgctctgtgccctgctttaccacacttcggatgaattgttcaagttggcgctgaacggtgtgcaaattctgctgcccaattatgtgatggccattgacattgtgcacaccgagtcgatgaaactgcgattgcacccttcggtcagtcaggcggaaatgcgtgccgcctgtcttcgcgcattagcttccgtgttggcatggccctcagtgtttggcagcaatttaatt

SEQ ID NO: 91349 - DNA, 508 bp, Heterodera glycines
gggctatcgtatgataccaagattgtgcaatttggttgcgtctgagaaaagttatgagttgttttaatcaaaaatttaacaaattttgcactttttgtccttcgactcaccacggtatttgcgtttggaaatttaaatggagtatttcttttaatatatatgtacttacgtaactcgaaacatataaaatggagctgctgagcttaaggggggggggacaaagtgacgccgaaaaacggacaaaattattttttaaaggacataaagcgttttaagccatttttgagttctcagatcaacatgaaggagtgatctgatcaagttggtgtaaaatttggtcagcatcaaaagttagcctagcaataattttttaaattctgctaatttgaaattgagttagtgtctgttaaagattttgcttcgttacttttgtatcgccaaaaattaggtcaatttggttgtgacactataactttttgagggattaactaatcacgatccttttttc

SEQ ID NO: 91350 - DNA, 536 bp, Heterodera glycines
gcggacggcaataacaagagaaatgggcggctggcaataacaagagaggcggacggctggcaataacaagagaggcggacggctggcaataacaaaagaggcggacggctggcaataacaagagaggcggacggctggcaataacaagagaggcggacggctggcaataacaagagaggcggacggctggcaataacaagagaggcggacggctggcaataacaagagaggcggacggctggcaaaaagaggtaaatagcgggaaatgaaaagaaaaacaccgtttttatgtagaatttttacgattttatttgaatattttttaccaacccacttataaatattatagaatgtatttcaaagttttttttttaattttgcttcaattatgtcatgttcaaccacaacaaggcaagttttgtagtttaagcaaacaaaaaatcgaaatcaattttcagaccgattagaacccgataagaggacaacgaaaagcaaaacgatgactgtttttgaaggctataaaatgcgtactgata

SEQ ID NO: 91351 - DNA, 639 bp, Heterodera glycines
atttaaaaaaaaattctaatcattttttcttgttaccggcataaagtaaccaatccaaagcgcggccttagcgcttggatcaaacgcacaacccaaaggggtttattgcgttttcatcaagcgtaagagcaatgagtgagctcttgcgtatctccattgcaccaatggtggtgcgtctcaagatgtacattgagacagcccaagaaaacttgggcaaagagctgacggaccaaagtgtccgtgcagatcttcttgcagagagacaaaatctctgcaaaaccatttctcttcttgagaaatacaatggaaaatgggaagccattttcctgagagtgaagggacaagctcttcaagatgaagagcaaaattacagagacttcaaaccagaaggcaaggccttcatgcattgggtcgaccaagcccgagggcttgtcgacaccattgaaggggctttaggcctctcggagctgggggatgcaattccccagccaaatcagccagcacaagttgtgcagcaggcaccagtggtgcatcagcgtcatgatgtgacgcttccgccgataacattgcccaaattctcgggggaaccccgagaatggcctttgttttggaagctatttgagacttccgttgaaagtc

SEQ ID NO: 91352 - DNA, 297 bp, Heterodera glycines
gagggattatgacgtatgagctgggaggccggaagcaatggcaaaatgaaaaatgaaacaaacgctgaataaaagtgattatagttgttgctccaaaaaggaggctaaggataaattaatattttaaaatgaatttgtagcaaaaagtgcgacctaatgggaaatgaatgccaaatcacctcccaacaccctgccaaaccaaagctaaaatgggcaaattcaattgtgaaagacggcacggcacgcgaataacattggcatttgaatatgaattaaattaataccaaaaataaacaa

SEQ ID NO: 91353 - DNA, 624 bp, Heterodera glycines
agtaaaaatgttgttgtattaacagcggattcctcggcttctaacaccggtggtggtgatggtgatggttccgcagctgtgccaccgaccattagtagtggtgccaccagcaccggcgccatcaaaaatcaaattaaaaaaagccgcagtgccggcggcgtcggcgttggcaataaaagggtgccgccgacgacaatgaccgcaccggtggcagtgtcgccgccatcatcaactttttttacaattgaaccgccgcaacaacagtcatcaacaacgacgacggcggcacaatatcaaaaacacctccaccagcaccaagcgcgagcagtatcagcaacatcatgcacatccgaggagtctgaagagagtgtgcccgattcgtgggaagagggacgtgccccgttattgaggcgatcgccccgctcgccgctggccgacgacgacgacgaatgggcggcgccgtccgccgatgacagaaccgccgggcacgaaggcgtcgcaggcggcacggcagtcgcggatgcggcagcagctgccgacgccgccgcttcaccaaaagggcggcgacgcattccacgcgagcgacgaaaagccgggtacgccttcctcatgctcgttttttgc

SEQ ID NO: 91354 - DNA, 638 bp, Heterodera glycines
cttaagttaaaaatttaagaaaattatattctgaaagagaacaattaaagctattgaatgataccacgaaatattaatttggttgaatttgagccaagctattaatttaattattttgcccattttttgtttttaaacccattggcagttttaagaaacgcgccagcacccaattgaaaaacatttaaaattatgtttttgaacatgaagggttatacgccctgtggtggactcgaacccgcgagccttacaaaccatggaattctctaagctagggttgctctccgacccgatgcgggcaattacaaatctcattgttgtactctctaaatcggatgaatctcttttggaaatgaatttcttagcttttatttttagaaaatttctgtttccttttttcaatttttaagaaatttactccccgacgaggatggttcagtcatccccgacaattttttcggggaatttactccccgttccccgacttttctctccccgagggtcaggaaggtggtatgggcgttgtctttagaggttctcccatttcttttatcccactttctcccacactccgcttccttttggcaccaaaaatattcaaaattaaattattattattataataagttatttttatt

SEQ ID NO: 91355 - DNA, 575 bp, Heterodera glycines
tggtcatgtgcggtccgccggccccgtcgtcgttcgccgttgcccaggccatcatcggagtgatggcgcatttctatcgggacgaaaaagtgaatctggacgaccctttggtgtaccaccgactcgtcgaagtgcaaaaattcgcttatgcccaacggacaaaactcggtgattcggtttttgtgaaaaatgctcggcttatcagtcgcaatatgaccaaacacgctttttccaaatggatcgcttcgctaattcccgaaaaggcacagccccttcagtactattcgttggatttgactggccatgtgcccgaccacggcacttcgcatgtcgttgcaattgaccacgagggcaatgccatttcggcgacgagcacaataaaccaattgctcggttcgaagcgcgtttcgccaactttaggaattatttggaatgatcaaatggatgattttagtaccccccatatgaccaatttgttcgggattcctccttctcccactaattacattgtgcccaaaaagcgggcaatggcctccatgagtccgatgattgtgtacaacaaaaacactgaaaag

SEQ ID NO: 91356 - DNA, 633 bp, Heterodera glycines
catccattgatttagcccctattattggatttatcccgcttttccttctttcgctcctccccttctgaactcttatttatacctctttttgcccccatataattattctgccaattttccattggcatggctctctctgcccttctcctcctccttcctctgcttctcaatgtgcaaaatatcccagatgagtccgtccaatcggatgtgaaagccgttgattcggccatttcgtcgctggaacaatggaaggacccgcgcaattcgttggcatcactcgactcacagctgacagagccccaacgagcactggccaaaatgttttgggaattggagaccatcgaaaaggaaaagccgaaggcaccgccacaattcgacttgggacttttcttggaagctttggaagcgatggtcgaaatgaacgaagaagcaaaggaagtgaagctgagaaaggacaaactgaccgaatgggcaggcggagagaaagcaaacgaagggaaagaagggaagacgaaggaggaggagacagtgccggaagtgagagttaatgagaatggaaaggtggaagtgacgaacggcgccggaggggacggaaagatggaagtcaagcgaggaaaggacgagaacggaaac

SEQ ID NO: 91357 - DNA, 657 bp, Heterodera glycines
aatgggttttcccattgccatggctcgtccgtccgagatgaagtatgccgagaggattggcattggcgggagtgaggtgggtatgaccgcgatggtcatgttcccccacttttccggcacccccgggtgaagtataagccgttgagtctcgattttgccattgtttgtctcgatttcgatccatgcgctgagctgtaggtcccattcgatgcagctgaactcctcgaaaaccgtggtcgaggtggggacagccgcccaccggtagaacaggcacgaagctgatggaagcccacaggaattgtgccagaagcttgtgctgctcatgcacattgaatggccaggccggtgattgagttcgttgagttcggggaccatcacccgactgttcattgtgctgcagttgttgtcgcggcacgacccagctgatgggcaccttttcactgccacagtcgagattgtgtatgatcggagccaactctccgttttggggacacaaaccattgtaatcgagggcaacctgagtcgaaccgtccccaagagctcgtcctgctgcgttctgatcacaaacgaattgacctgatcggctggcagtaaggtgatgattgtggcggcagttccggcacatttgaagtctttggccgttcgggcacagtcctc

SEQ ID NO: 91358 - DNA, 539 bp, Heterodera glycines
attcaaatgggctcaatgttattgagagaagcggagacgttatgggctcttcgctctccccgtttcatattgtcgtatgggaacaaaacaatatttggatgggtccaagatttgccgatctcgtccataccggtgccaaatttactccgtgcattagaagggacgataaaatttatgaacaaattactgaagaacgaaagactgaagccgaaagcaccggctgttgtgttgggctcagtggttgtttccagacatcagagtgttcggtacgtaaacttgctaattgattgtctcgatttttgtccagaaacaatttgcgactctcttgaaatggactaacggcacttttcccgaaatgaattactctcgtgttgtttgtggccaggatccccgatactgtgctcgcccgcgttcagtacatccttatgtgtggggactgaacatttcgaattggccgatttgcgaaaagcattctccatcaatacccaaatccgaaaagcatatgcactgtacggtcacaggacggccttgctgcattc

SEQ ID NO: 91359 - DNA, 579 bp, Heterodera glycines
gaaacatcgctcgtctccatcatggcggtgaacaacgaaattggcgtgcggcaaccgctcaaggaaattggtaaagctttttaatttgaaaatttttcagcgtttataaaaaaagcttaaaaggatgtttattttattttttatgggaaaagcaattttcagttggtctatgttaaatttgattcatttttttgagaaatttttacaacttttgggaaatgttgaacaaaaacaaaaataggtacttaactccgacagtatacaaatgcttcgtattgtctgaattaggacccacacttcaaggggagctgaaaaacggtggtcatccctggactcgaattcaggggatacagtcaaaaattggtcccatttttaaaattttttttaaggttcctaatttaaaaaagcactggtctttattttaatgcctttttcttccaaacccaggcgaattgtgccgcaaaaagaatgtgcatttccacacggacgcggcccaagcagttggcaaagtgccattggatgttgacgaactgaagattgatctgatgtcgatcagtggacacaaaatttacggcccga

SEQ ID NO: 91360 - DNA, 380 bp, Heterodera glycines
atctgatcgcacttggccaaaccaccaacgaggacatcaaagggacattcaatcgcaaattgcacccgcaggtgaagaatccgtacagcagcggaaattgcgtcaaaaatctcatcgccacactttgcgcgccggagaggccgagtttgctcgaccgtcgcggttggcttccccccgaaaatttgggcccgacaatttatttggatggtgccgttttggacggattggccctgacggcaaagcggcggttggcgccaacgtacggcacaaccaatgccatcgccacagccaacgacggcaacaaatcgctgctggcggtggctaacggtcgggcgaaagggaacgacgagggacggaggagagggggagggggaggagga

SEQ ID NO: 91361 - DNA, 635 bp, Heterodera glycines
gatggtgatggacaaatacggcccatttggcatttgttttttgcccagcaatcaaagtcattgggatcgctttccacaaacaattgaccatcggccaatggatgcgaattgcgcgaattggtaatgaatgataatgatgataagttcgtcaattcgttgtccctatttaattagtgcgcgaaatcgtcgccaaaaagtgcggcggtgctgcgctgagtccctttctgaagtttatgctcggcacttatctgccggtcaccgaactgctccaatccatcgtactgaataaggtgagtttttgggtttggcattctgtcgaatttaggcttttcatccttttcccttctcagctcaaccaacgtacagtgaatgacatcgatgcaaattgggtgggcgaattgcgtgagagaattgcgcgtgtccgatcggacccgaccaggaaaagtcacttggcaatgcttcgttcactgcacagtgaattgtatttgctcagggaggacttcatcacgcgcaatttgggtgagttaattcattaaaggcaattatttaagttaattgcctttaatgagccaactaatgttacagaagtgccccgctcccacacgccgaccattggcggcgaattgcacagcgat

SEQ ID NO: 91362 - DNA, 157 bp, Heterodera glycines
atttaatcaaaaatgagggatggcgttgatcaatagagaatgtatgcaaattgatcacagaggatggggaaaatggcactggtcaacagaaacatctgtgccaattgatcgaacgagaatgggttggagatggcactgatcaaagggaaaaaaagag

SEQ ID NO: 91363 - DNA, 619 bp, Heterodera glycines
aaagccaaattaaagtgaaatgcaataatgtaagaccaattgggtttcgtctgagcagctctgaaagctttttccgctccaaaaaataatcaagccaattggcggtcggttcgtgttgcagaaaattgagttgcacatccatcgaaatgattaacaagaattggatagataaaaaaaataaaaaataaattgacacgaataatcagaaattggccacggacaaaaatgaatagacagaaagtgatttattaggcccaaataaacaaatgaataaaattaaaattttacaataaataagacaagattaggtaacccaacaaaattcacataacatcggtcccacgtctttctaactaaacagaaaatggtacggatatccgtgatgtttgctgcgaaacactgaaagcaaaaggctgaagaagaccacaaccagtcctattccgatgcatgccataactgaattgaatcaataaaaaacggtgccaaatggtgaaagatccccacgctttcttttcccggggtccgttttgctggaggcagcatcatttaacacgacgacgccaagggtgacggcggcgtacaatgagagaacgatgtacgtctcggcaatgagttggta

SEQ ID NO: 91364 - DNA, 565 bp, Heterodera glycines
tctcctgctgttcccctcttccgtccaccgaatcgtcgtccccaatgccaaccctgggcctggtcgtctgcttcttctggcttgtcctcaggcgctttgtccttcgtcttccaattgttcattcgctccgcctcaatccaaaattgccccgcaggcattttgcatttgcgctgggggatatttttgccattgaatggttcttgtgtcgagtgtaagtcttagcgcagcgtgccattggccattgctttgtcggttcagtgccctcccttctcgaccggctgctccccccacatgatcaggtcccgccgatgcttctcttctcctctcttctcctcgtgctcctttccgctcttctctcacttctctgctgtgtccaattgtgccgtcgctcaaaatcctccacccattgcaccgatgtgcacgaacttatggctatcgcagcggaggcgggagggccggtggtgtcggatggacgcggcggacattgcggtggcaatcggatcagcggcaatcccatttatgagccccttttgttgtcgtcgttgcctcaaattccacggcattt

SEQ ID NO: 91365 - DNA, 659 bp, Heterodera glycines
taaaaaaaacattcaaaattagcgtcgtcaaaattgagtgcaaactgttggacacctgtgagccacagcaacaacaacaacaacaacagcaacaacaacaacaacacccgtttggacaggacgagttgttgctgatgggcgacatgggcacatcgacggaaatgttaaaaccgatggcattttgcaaaggcatggcacagcaacagacacggcgccaaattcgtgccgaagtccaacaaatgactgtgtttgaagtgcacctacaacagcagaccatgaccacagcaacaattattcaaaatggcacttcccacgttatgccatgttcttccacggcaccgtttctgaactcggtgccgttgccggccctcgaaatggacatcaacggcggcactgccgagtaccaacaacaacagcggcacggtggcagcaattctagtgccgaaaacaatggcacgggtggtggtgccaaaatgcagccaagacaaagacggaaagtgcccgagggtgagctgtgtgccgtgtgttccgacagggccaccggttatcattatggggtggcaagctgcaacggatgcaaaacattcttcagggcgaccattgtctctgaacacagttttgtgtgccagtacagtggcaattgcgacgtgacaaagaac

SEQ ID NO: 91366 - DNA, 637 bp, Heterodera glycines
gtcaattctgaaatgataataggtagtttatattatgtctatattaaaggatttgactttgcatacaaaaaatctaaacaatttagggtaaccttcgaattgatgtcccgacggaaaaaaaagattaaaattttctttacatttttctagtgtaaatagatgaattaatcacgaattctagctcggtttttgcaaaattaataaatttaaaaaatcaagtactggatgaaaagtcatatacaaagtcaatgattttgaaaaattcgagcttggattcgtgatcagctcatttatttaccctggacaatgtaaagaaaatttttgtctcttttttcggttgggacaccaattccgaaggattacccaatttatgcttgcatggaaaaataaatcttgacacaaaaaatacatacctaaacagaaaatatacaaaattttaatttacttttgtatgcaatttcaattgaattgtcgagaagagcacggaaaatgtctttgacaacgttcaggtggggatagcccacacatttgtaaatgctttcctcgtctatttcagccgatgttgacaaagccgtgctctgtgaccaattcgcatttgatgatgccatttcatgcatttgctaaaaacctgaagaat

SEQ ID NO: 91367 - DNA, 640 bp, Heterodera glycines
gccaatccaagctgaagggagagagaggaggacaaaagataaatgccaaaaacataaataaaaatggcaaaaagacgcacagaatagaacgcttttggctcagttgggtttcgtcgagtggcaaaaacacgcctaaagcggaaaaattaaatgccaatgatgaatgaattaaacacgtgcctttgaagataaagccctgttggccaatcttctcgtcacggatactcggggaatcattagcagctaaatgagggccaaagattagcgtaatggaatgactattcgtccaaaacacacgaaaaccgcaaaaggttcaccttcctccaaacatttgcgcaggaatgaatacaaacgggaaaagagcagctcgacaaactttgcgccctcttccctcgcacaaagccatctgcaaattaaaggcttttttggggtattttttaacaatttcttttacttcaaaagcgtcggttggccaatgatttttcgaaaaacttcgacagccaccgccgcctcccacgaattggtgggcatccagagaaggtccagcaaaatggtgaggatcagttcattttgggaggcctaaaataaagaaaaaaaggaattgctttaaaaactaaattaaaaaaaggggaggggaaac

SEQ ID NO: 91368 - DNA, 559 bp, Heterodera glycines
tcgtcacgtttcgacggtttagtggacacgcattttgatggcaaatcagaattgaaaatttggaggccaatcacaattggcaagggccgtcgtgtcacatcggcagcatttatgtgcggttacaagtctgtgccgtttctgtcgcccgacagtccgctgaaactatttgtcaagggcaaatctgagggatttccattgcccgaccgtctgctgtccaacaaaattcgcattaaatgccttcaaattaagcacattgatcattccgtgatcgcttttctccatgccaacaagcaaatttgggacaaaagggccaccaatttgcgcattttcactttttactctaacaccaacatccaaccctttatggatgtgttggtccgagaaattttgcccatttttgcgccaaccattcaacgtttgcaacttctcgacgttgatctcttgatcaaatgccacagtgcttggcccacaattttgccggatctcactcggctgaactcaatcgatgctcatctgattttgcccagtttgggcgatgaccatttggacgcgccaactg

SEQ ID NO: 91369 - DNA, 646 bp, Heterodera glycines
tataatttttgaagatgggcatttgtcaaagcattgaagaaaaagctatggaccttaaaacgaagcaaatagaccgagaacttattcaagagcatcttgacgcacaaaagattgtcaaactattattgcttggtgctggcgagtgcggtaaaagcacaatattgaagcaaatgcggttattttttaaataattgctttattgaagataaattaagtgaaaaaaaaaaattaaaacaagcattcatatgctaaagtattttaattatttgtttaataaaattcatttctttgacaatcagcattctacatgatcatggcttcacggatgaagaacgggaaaaacaaaaatcagcagtgtacaacaatacagtttggctatggccactttactccatggaatgcaaaggctgaacatcccatttcacaatccacgaattgaaaatgaagcaatgatcgtaatggaggtggtaaatcatgggaaagaatcagagccattaagcgatgaattagcacatgccattaaaacattatgggcaggtaaaggaaataaaattgtaaaaaaatggatattttgtaacgatgaaatttaaaaaatggaatatttagataggaacattagagaaaaggtttatcctcgagggcagga

SEQ ID NO: 91370 - DNA, 646 bp, Heterodera glycines
  unsure (1)..(646): unsure at all n locations
tatagtcttccgtcagtgaaatgtctttgttgttctgattgtttgtcatgtaaagctcagaattccaatttatccaaaaacgacaatgttttgcgacaacccaattgcctaatttcttttgcttggcctgtgttgtagcaaactcattcaaattccgcaccctcccggcgccaatccggtgattctgccgttgaaggaaagtgaatttatgtcggagaaaaaggcaaaggtgaaaatcttgggcgagtccaattggtctgccgaattccctttggacatggccggcagcagtgggcgtgtcatttgcaaaggcatcgccaaaaagaagcgcgcatttgagatgactgtcgatgtccaattgggtcagtccggcctcacaaaagtggtgaccattttgcccttctttttgctccaaaatgacagcaaagttgacatcgaagtgcgcgagccgcacttgacgaaatggattgtggtgccggcggaatcagtaattggtttttggccagtggagaaaaagaaacacaaaanattagtggcacgttatgccaagacgaaagaggaatcggtgcaattcccaatcacagaggcattcgaaggcttttgtcaaatccggaataatctgatcggcctttacgtgatcgtatct

SEQ ID NO: 91371 - DNA, 654 bp, Heterodera glycines
gctaaagccggtcaaaatgtctgggcaaggctcgggctttaacaatttaacaagaccctgtccgcttggctcaaagaagcccgtttaaccggacgacctgaacccggtagtttcaaaatttagctggcgcgggctcgggtggtccatgaaagtctgtcgagcgccagacccggcccaattatattgtataatcgtaatataatttaatttttcatgaccttttccagcaactattgcctcccctcttttggatgttggccaagttttgcggaccaaaagcaccgaatctttgccctttttgctttgcttggcaaatttggcggttgtcgatttcccctccgtttttaagtgccttagtactccagttcttttccaggtctgtgtccaatggttgttgtacggagttttggtcgacgatttctacatgaaagttcccaacggaatcgggacgttcatctcgaccatgcagttgtctctgttcatcgtttaccccagaacttacaaacaactcacagttggcaatgtttaagtgtgtccgaacgttgccaaagccatggaatgtttcgccgtgtttgaattggctaacaaacaataagcaaaacctagcagagctgtgtgtccgttgtcagtgcattcattacctccgtccatagt

SEQ ID NO: 91372 - DNA, 547 bp, Heterodera glycines
tttcttgcgcctttttccatcttcgtcatcttcaactttgtcggcaacaaatgaacagtcacaaattgcgccatcacaaccgttgctcttcagcgcttacagaaatttgggtcttctgtgttattcaaatggtgaaccgaacaaattgcatttggtcattgtcgcatctgctggttcaccgccaacagcaaaaatattggaaaacccgccgaattcgtcgcaacccataaaaacttgtgtactcttcaaacgaataacaactgttgtcttatcgccaaaattgcccgaaaatgcgcagttcaccaatttgttggtcaatgccagcggcagtcgtgccacattggttggcacccgaatgatttttgtggtcgaattggacaccgacttttggcatcgtcccccatttgatggtccggactgtgtggaccatttgagacccgaatattatgcaaaatgcgatttgctccatgtgggcctttttgtccgcaatttccacccgccgttcgttgtgtccgttggtttgagcctgtctcggattttttggaaa

SEQ ID NO: 91373 - DNA, 633 bp, Heterodera glycines
tatggcacggaaagacttccgatttccaacatttttggggtcggaattccgacttccgaaatttttgatgaaaagtcggaaattttttaattttttttttaaaaactagtaagttttctacaatttcagtagttaacagcccgtgaccttcgccaccttcgccagctgacactaattagaagtgacaggtggtggaaagggggtgccaattagtcactaattgactgaccggggtgcgctaattggtatggtcagcagtgagaggggtgacaattaattagttaattgggggggggggaaccaaaccaaaacctattgaacggtttcaaattgtcttgtacttttttgacagaaaatttgcttgatttaaaaagtgacagacgaggggaggggggaaattttttgattggaaatttttgattggtcaccagtgacagatggggaaaattatgatttgtcataaagtgacagatgaggggaaattcaaattttgggagggggttcgggaattcaaagtgacatttgcggggaaaatttaaattttgctgtgagttgtattttgatagatcaccaaactgacagctgagggaaaattcattttttttagttgtagtaccactaatgacctattag

SEQ ID NO: 91374 - DNA, 545 bp, Heterodera glycines
ccttcgttgcctttcaaaatgatatgtccatcgcccgtagggttttgttggtcgctgaccttcactccatttcgacaggccgacatgaacctgcccaattgcggttgaactgctttcgcacattggccacactgctcgcttgtggggtaagcattggtcgttgagtcaaccaatccctcagaatgttcaatttgtcggtcgattcggagaagactttgctggtccaacagagtcgtttgcccgaacacaccgaactgatgtggattttgggttcaactacgactgtgacgagtttgacctcgatgtcgcaatttaaagacaaattcagagggtttccccaaggcgctgcccccctcggcttgcttgcctatccgttgttacaagcggccgacgttttgacgtacagagccacccatgtgccggtgggcgaagatcaaacgcagcacatggagcttactcgtcatttggctaacaaattcaattcgcgattccattgcaatttctttcccgtgccggaaaaagttctatttgcgaagcgattcgcc

SEQ ID NO: 91375 - DNA, 621 bp, Heterodera glycines
caatcgcaagcagctcagaagtggatgatgatgggaccaacagcagcttttctgacgacagaagaaaaataaataagttgttcattttgactgtagtgaacattacggtaacagtggcagtgatcattttctttacgattgagaatgcgcggatcacttctgagttggaatttttgaagaaatttgttggaaaaatggaacaacaatattggaatggtggtcaacagactgaattttgtaccaaaatggacaccgacaaagacatgataaaagccattgaaacaaaactcatcgaattggtggaacatcaaaagaaggaagaaatttttattggcgttttgaaagaccgatttggaaaggatggccaacagagggaattttatgccaaaatgaacaccgaaaaagacatgatcaaagccattgaaacaaaaatcatcgcattggaggaacataaaaagaatgaagaaatttttattggcgttttgaaagaccgatttggaaaggagcttttaaaagctgtgcacccggacattcgcaagaatattgttgagaagttttcgtacccaaaacaaaactattgggatgccaatgccagtcacaatgatctcgaagtctttggca

SEQ ID NO: 91376 - DNA, 588 bp, Heterodera glycines
acataaaattgtaaaaaagaaaaatatgcgcatacatttttccaaattgttgatgaggataaaattttcaaaatttttcttcaattacgttaaatttcagtgaaagccctctcaaaataaaccaaaatttaaattttgctatcattcaatgcccctaaatgttttctatttttctataaaatttatttcataaaattcgttactttgggaatatttgtgtcagtatttgaatgggacgcggaaaatgccatcgaataattcaagtgccattgaacgcagtaaaataagaaagaaaaaaaatgaaggagaaatgaacgaaccttatgctgtcgctgatgaaaggtaattaatattaatgagggggcataaaataattaacggcaaaacgatgacccaacaaaatggaaaagaactgaaacattatttgaattgtattttctcttttcaatcattaaccaataaattatattgctcggacattacttcgtttcgaattgaaaatttgcgaaaaaattatttacataaattcttccaatgcaaaaacttttgcatattttttagtttagtttattaggccccctattattt

SEQ ID NO: 91377 - DNA, 651 bp, Heterodera glycines
ctttttcgtttaatgtattattctatgccaataattcagcgactgtcacatgaatccgccaccaaaacgtgggaaatattcaatgattgtagacgatgatggagaaacggttgggacgagtgaactgctgaaggaagggtggaaacagtgcgactacgtcagtaacagggcgaggctgagatgtcagaatgtgcgcaagccggagaacttgaaggagtacgggttttgtgaggagcaccggggttttatcgaacgcatcagaaaagagggactgcgagccaaacattgtttcgactcttctttcaactcttgtcaaaatcttcacctgacagatgacatcgatgagacgcttttgccgaaacacccggccgacttccctttcgtttacgagtccttatattgcgacaatcgcatcgatgacaatgacaaccctttgagccgtgctaatgtttttaccaagcgtgaaattgctaagcaatacgtcagtgcattgaggcgtcaagacgcatcgatccaacaaatgcgcatcatttatcaggaaaaacatcgcaggacattgcatcaaatcatggagctcaggggaaaatcgcatcttacgaaattgaacccgaacagggattctcagaagataaaacggattttggctatgcg

SEQ ID NO: 91378 - DNA, 622 bp, Heterodera glycines
cgctttctttgacgacgaacggcacagcacgggcaaattgtgcacgcgcttcgccaccgacacgcccaacgtgcgctacgttttcacccgtctaatggtggtcatttcgtcggtggtcactttgctgggtgccattgccattggattcgtcaatgggtggcaattggctctgattttgttggcgataattccgctgattttggctagcggatattttgagatgcaacagcaggtgactgaccaacaacagaaaatcaaaattacggagttggggagttacaaatgttcagtttggcaagaaaatgcgtgacaccgaactgcttgaagacgccgggaaagtggcatcggaggcggttgaaaacatacgaacggtgcaaagcctgaataagcagctgttcttccaccgcaaatacgcctctcttttgtctgccccccatagtgccaatatgcaccaagtgcacatctacgggttcgtgttcgctttctcccagtcgttgatcttcttcatgtacgctcttgccttttgggtcggctcccttttcgttttgaatggcattatgcgcccggcatcagtttttcgcgtgttttttgccatcgctttctgtggccaatccgtcggtca

SEQ ID NO: 91379 - DNA, 548 bp, Heterodera glycines
atccgaacgagcgcagtgcggagattccaaggtgaagccgaacgcactgaaaagacgctaatggaaagcaatggacagaaaagacgaacattcccatgcactgtttgaacattggcaacggggccaaagtgccggaggcgagaacgatggaccgagtgccacgtttctattcatatcataattaaggaaaacagcagagccaccagtacctgcaggtatttcattgctacgccagcgttgaaacacctcaaattggttttgattttgcggttgtcgtccccccccccgccccatttcgtcgtaccaataattgagtttcacttccgttacgggttttgcgctttcaattccattttccccaacttccatcagttctttgtgctgttctcgcgggtccaaaatgttttccttttgctcaacaaaaagttgaaaatgacgagaggcatctgcaaaaagaataaacaaaaatgtgtacaataatttaacaatttccattaaaaaatgcattaattcatttcaataattgaagtcagtgccttcatcgctct

SEQ ID NO: 91380 - DNA, 574 bp, Heterodera glycines
aatgaataaaaataaatcaaatgttaaaaattcacaggtgattaaaatatagtgtatatgtggcacagaaaatttcctactcagaactcattgcttttagtaaacccctgaattcctttgccttattaatttgcacctaaattcgcatttttggagctcaggttcgaatccaacataaaaataaatatattttaagtaatctataatgtaactaaatcatttaaaaagccattttttacactaaaaaatgtatgatagtttttctttagtagaaatgagcaaaaaaaataatgaatgtaaaggttgggaattaatcaatgccaagcaatgcaaaggctacggcggttatcattaaactgtaatttgattaggtttcaattgcgaataatctattgagccggcgtctctatgggtttcctgaccaaatccgtaattaggtcctgtctagctcgggaatctcgacaagtccgtcgttatccgtatcttcattaaaattataatttcacaaccaacttgggcaagccgagcagcggcgacggacccatcagaagcatgacaatgaccattcccactg

SEQ ID NO: 91381 - DNA, 555 bp, Heterodera glycines
cattttgccgtcgtcaattaaaccgcacaccgatttgttggatttggacccgcttccactcactgcgctgaacaacccaccctttcaaagcttgtacaactttgaattcttcaaccctgtccaaacacaagtgttccacacgctttacgctactgatgaatatgcgctgatcggagcgccgacatcatccggcaaaacattgtgtgccgagttggccattttccggctcttcaaccaaaaacccgggaaaaaatgcgtgtacattgcaccgttgaaggcgttggtgcgcgagagagtattggattgggaggacaaatttaatcgacggcttggctatcaaattgtggaagtgtccggcgacaacacgcccgagccacacgaactaaacagggcatccattctgatcacaacacccgagaaatgggacgggatcacgcgctgtgcggacacacggcactacgtcaaacaggtggaactgttggtcatcgacgaaattcatttgcttggcgttgaacgcggtgctgtgcttgaggcaatcatcaccagaatcaagtc

SEQ ID NO: 91382 - DNA, 529 bp, Heterodera glycines
gacttcgcgctcttcgatcgaatgacgtctttcgaccaactaatgcgcggaattcggcgccgaccaaacgagagtgtcgatgagctcgggaacagaatttcgggtttggtccgccgcgcttatccgggtttaactgaacagcaatacgatgattattcaatcatgcactttataagagccatttctaatcccgagttggctatcactcttgaaatgacacgcagacccggagcgacatttgatgaattcattgcacaagcagcccgagcggaagcaacgcatcggctgccagaaattcgtttaggtcaaatcaaacttttcaacggcaaatgccgaattcgtcatattcatccaataatgtgccatcaaacaactataccagtaattggtccagaccagaaataaacacaaacaagccaaccaatgtcacatgtttcatgtttgcctcccaattgttaggggatcagaaacggctaggattcgaatgttcgttgcccagcctacttttggatacgatcttatctcttct

SEQ ID NO: 91383 - DNA, 534 bp, Heterodera glycines
agtcacttttgttgctccttggccaactgttgaacatgtttttggtgttggacgcgctgaaggacatgaaagcgtccatcaaaaacgatttgtccacatttcgccgtgcttcgcaattcttcaccaacgattccaacaacctcatctggttcgtggccacacagaacaaaatcaaacagtcactcagagaacgcattcaaaaaattgaagcccacgaggaactgctcgccgatctgatctacatcagtgcacattttcacgagaaccgaatgttcatcagccctgaccaacggcacacgcacatcaaagtgatcgcattttgcctttatttgatggatgccgaagtgtacacacggcttgaccagaagaagcgcatttccatccaaaaatttgacaaaatattcaattccatcgaagtggtgccactgttcggcgacatgaacattttgccgttctccttcgtcaaacagtgccgaaacacgggccaatgtgccaagggcacggggcaacagtgcaaatgctacgacccggcca

SEQ ID NO: 91384 - DNA, 556 bp, Heterodera glycines
ggcgtagaaaatggcgactgcagggcaattgctttttgatgagtcgggtcaaccttttattgttattcgcgagcaggagaaacaaaaacgtttgaccggcattcaagcgctcaagagtcatataatcgctgctaaacatgtggccaacacattaaaaacttctttgggtcctcggggccttgacaaaatgctcgtaagctctgatggcgaagtgacaattacgaatgacggagcgacgattatgaaaaatatggacgttgagcaccacgtggctaaattgatggttgagctgtcccaatcgcaggacgacgaaattggcgatggtaccacgggagtggtcgtgttggccggtgctctgctcgaacatgccgagtctctgctggacaaaggaattcacccgacgaaaatagccgacggattcgaattggcatgcaaaaaagccattgaaaaggtggagtcaattgcgcaacaatttcccatcgatgacaaaaaggcgctggtcaaaagtgcgaagacttcgctcggctccaaagttgtgaaccaatgtttgcgccaa

SEQ ID NO: 91385 - DNA, 205 bp, Heterodera glycines
tgcccaccgattgcaaatgttggacgcgtcgcttcgcagggcctgacgattccacagagaaattgccctggaaatgccccaccccccatcgtcgatggaaattctgaaaattgtgacaaagcgcctcaaactggacatacacgtttatttcgctgtgcttgcccgactttctcccggttatgttggcgccgatttgctcgccttg

SEQ ID NO: 91386 - DNA, 643 bp, Heterodera glycines
cccgtcaccgggtcacagctggcaccgttctgacaatggcacgactcggcacattgcaagccgaattgacccggagggcattctaaggaaatttcaaatggaaaagggcataggaggccaaagtgaaacgtaccgaactgacaacgaaagccgtaacgccccttgggacaatgacagcagccgctggtcgggtcacacccggccgagccgtgacagtcgcattccatggagcagttgaagccgtacttcccctggggacactgctgctgacaggtgggcccaatccaaccggagctatagggaaagcgtggaatggcaatacataaacaattgacataaaataatcgcagtaatattctccgcttcggttttggcgctcacccgcatttgcattggcctgtctttgggtcacaatttgtcggatcttcgcattggcacttttccttgcagttttggccaaatcttccggccctgcacatttgcgtgcagtgcggccccgtgaagccgggcgcacaacggcactcgccgctgcgcgggtcgcagcgagcgccgttttggcagtcgcacaaattagcacagctgaatggtgagagaaaaaagtgacaggaaaaaagtttaaatgggtcgagcaatgatcaaatta

SEQ ID NO: 91387 - DNA, 488 bp, Heterodera glycines
gggccacgaccctttccattgccttcgctgtttctccatcgccgttgccatttggaacattttgtactgtttgctccaatttgccctgctcggctggcaagttcaggtggtcaaacaatggcaatggcactgggagaatcgggcattgtttgttatgggggcaattgaccaatatcaggcgcgtttcccgggattatacgccatttacacagaaacacccgaaagacggcgagtgaacggtgaacaaaaagggaaaaatatcgtaaatttaatgtgtcattaatttaaagggtcattaatgggttgggatttatttgtacaaaaaaatccattaaaaaatatttatgaaaatgtttaattacattgataaaaagtttaaaatacaaattttcttaataatttttatttatgaaagcccaaaacatttgacgttaaaatgaatgggtaaatatggtttttttgtgcatttctcatcaaaataaagctgc

SEQ ID NO: 91388 - DNA, 427 bp, Heterodera glycines
gtacaccggctacatcgacatgaacatgtcctttaacttctaccaagagggcgtagcactccacaagattgcgaaaagggtccaaaaacggtccgacgaagatcacgtacccggtaccactttcatgagagaccttatttctccgggtggccgtcccgtcgcttataacgttcacaatccggacaacgacaagtggggcagagccttggaagcattccaagccgttttggctctcgagaagttcaacaatgagtcccagttggagctgcacaacctcgctactcaacaaggcgactctcaaaagggtgactctcttgaggacacatacctccgtggagatggccaattgattgaggatattggctcaatcgtcacctatctcgggggcgttggatacggttcgggcgagtctctttctgacaagaat

SEQ ID NO: 91389 - DNA, 620 bp, Heterodera glycines
acaaaatgcggctccacatcgatggcctaagtgtactgtttccctatgaatatgtttatccggagcaacttttatacatggaacaactgaagaaagtgttggatgcgccaggccattgtttgcttgaaatgccttccggaactggcaaaactgtttctctactggcgcttgtcgttgcttatatgagaaagtatccggaaagactccacaagctgatttattgctcattttttattcctgagatagagaaatgtgtcgaagagcttaaaaggctgtttcgctattataccaatgtcaccggatccgcccccgatttccttgccctcactctctccgctcgtaaaaatctgtgcatcaataaatccgtcgtcagttttcggtatggttcggccgtcgacggagcttgtcaacgtttgacggcgagttacgttcgggcgaaaaggcggctgaatccgaaccttccctgttgttcctttttcgaaaaatttgacgagaaaagggacatgactttgccgaagggtgtttacaatttgtcagacttgcgggggtggggcaaagagcacggcatgtgtccgtatttcgtcgcgcggcacttggtaaatcgtgccgacatcatcgtc

SEQ ID NO: 91390 - DNA, 508 bp, Heterodera glycines
acatgacactttgaatggcaacaggatcataccacaggctcttgacacttacaaagatgtccaactttctcgcggaaaaaccccatcggtcattgaggacttcaacaaccgcattttcaatcgaaacttggagctcaaacaatactgactgtttttttgctcctccttgcacacgcgaacaactgacatgattgagagaactgataactctgtttcgaaggaccgcgggagtacaacgacaattcttatggacaccttgaacaagctgtacgagactcatttggacgcctaatttcatgaccaagttcttgggatgataatccgttttctggagtgccaaaaagagcccaattacttcccctaatcgcaacgcttgggtgaactcaacaaagctcactcagggctcgaattggacgaccgacttcttgaccagaacaacgctctgatggcgtatcagctggcatttgatctttatgaaaatgcgccgcaggagttgttcaaccacatg

SEQ ID NO: 91391 - DNA, 596 bp, Heterodera glycines
atatcatcagtgacgcccgctcattccgtcgttcgcgttctgccgcacttgcacgtttgtcaacgtcgtccacttcgtcgccgtttgcggtgcctccacccatggctgctgccgcctcgtcggacgacaacaacacatcgcttgacaccgaatcaatcactacgacgcccccgcgaacgccgcgccgcggtaaacaacaacaatttaatctttcaccggcaacaccaccggcgaagaacatctcatcaaactccaccaatgggagtggtggtggtacgcctgtgccgcgtagcgctctgcggcgccgcggcagccgcacaagcccacgactggccccagtggtcgagaaaggggataatgaggaggatatagcggaggaagaagaggaaaaacagcaacagaccaacgaggaagtggagcagcagcagaacacagtggaacagactgacaatgagacgaaaatggtggatgaagcggacaaagcgacgactgaggcgcaaaaggagaaagaaagtgaagaggccggtgggtcggaacagaaacaagaggatgaggagaaaatggagctggacaacgacaacgctggtcctgatggt

SEQ ID NO: 91392 - DNA, 607 bp, Heterodera glycines
attagattatgcatttatttgcagaaaaggctttacggctctcaatgcgatgggtgtttgtgatcaccaaaaaagatttattgcatttttttgcaattaccctgggtcttgtcatgacagttacgtattacggtatttcattacagttgacaaaaaacattgtcttaaatttcaaagctcctcacaattcttctcaagaatgtattaagggggtcttgatgggataatattgggggattctgcttacccacagaaaaattggttgtttacgccagtaagatttccccgaaatcaaaaagaagaagcatataatgccgcacatgccgtaacacgtgttactatcgaacagtgctttggtatttacaaaaatcgatggagatgtttaatgaataagtgtaggctccaacccggtataaatttattttttgcttttttcacttttaaattaagaaaaattggcaaaagtagcaacagtttgcagtatgcttcacaacattgccattgattgtcaggcaccacagcctgcttttgatgatgatgaaatcgaaaatgagcaacaagaaaatttaaatgatgaaaatatcgcattaagtgccgaagctgttcg

SEQ ID NO: 91393 - DNA, 633 bp, Heterodera glycines
attcattttgcctattcctatttttcttgataaatgcaagcgccgcaaccgttgccaaatttgcaccaaattttccaagcggtggaccgcgaccggtccggtcagatcagtgcggacgagttgcagcgcgcgctgtccaacggcacgtggcagccgtttaacccggagacgtgccggatgatgatttcgatgtttgacaacaacaacgacggcggcatcagttttgccgagttccaatcactgtggaattacatcaacgattggacccgcgtgttccgcactttcgaccgggacaacagcggaaacattgacaagaccgagctgacgaacgcactgacccaatttggataccgtttgtccggcccgttctacgacatgttaatgcgcaaatttgaccgtacccacacaggacacatcaacttcgacgacttcatccaactttgtgttgtgctccaaacgctgactgccgcttttcgtgaaaaggacaccgacttggacggatggattcgcattcgtaacatgccttttcttcccataatattttaggaatgatgtcaaaattgtttttccttcccagctagtgtcaattttatggaaatcccaaaaattaatgcgaatttacaaatccagtat

SEQ ID NO: 91394 - DNA, 600 bp, Heterodera glycines
ttcccgtctattcttccaaagtccgttcttttttggcccaagtcgatgactctgaaatgcttcgtcccgactttgatctgacgacttacataaacaccattttccctaccgaacaatcgcttgtccatttggattcgtttgtaaagaaaattgacgaagaaattgccaattacgaccgtgaactgtccgaggctgtcgctgaacacgggcgatgtgcccttgaggcaaataacgctttgctgcaggcccagacaacaataacggaattggagcaaaaagtgcaggaaattcgtgacagaacgctttgttctgagaattccgtgcacgaactgacaaaagacattcgacaattggacgttgccaagaaaaatttgaccgaatccatcgccactctccaccatttgcaattgcttctcaacggagtgaatttgctcactcaatgggtcaccgaaaggcgatacaatgaaattacaacggaactgccggctgtgctcaacgttctgttgttatttgaggactatcagcacattgaacacgtcaaacagctgacggacaaagtgcagaaaatccgcgaacaattgaccgtccaattggcagccg

SEQ ID NO: 91395 - DNA, 626 bp, Heterodera glycines
taagcatcgatgaggcgtctcggcgatatcgacgacagtgagagtgttctacttctacttaattccccgcgcaaacggagtcgatttccggccattgccagtggtgcaacaaatgtgaccttccaacagcacaaagtgacgcgggaggagcgtgccaatgcgttgggccgtttcccgggctttcgcggctgcactttgtggttcaccggcctttcgggggcaggcaaaacgacaattgcattcgcacttgagaaggcccttgtgcagttgggcgttcccgcttacgcattggacggggacaatattcggcacggattgtgtaagaacttgggattctcggcagaagaacgagcggagaacattcggagggtggccgaagtggccaaactgttcagcgacttgggaatggtggtgctcgcctctttcatttcgcctttccgcgcgggtcgcgaagaggcgcgccgaattcacagcaaagaaaatattccctttttcgaaatatttgttgacacgccaatcgaagtgtgcgaagcacgcgaccccaaaaagctctacaaaaaagcacgcgccggcaaaattcgcggctttaccggcgtggacagcgactacgaagtgccgctgcaagc

SEQ ID NO: 91396 - DNA, 632 bp, Heterodera glycines
caaactgtgggggagatgagctgcaatccgagttttggtggcattggaaaaggccatttgatgcgtgaaattgacgcgttggacggcgtttgtccccgcatttgcgaccaaaccggcacacattttcacgcactgaaccgaagccatgggccggcagtgatcggactgcgggcactgatcgaccggaaattgtacaaaaaagcgatgcaagcggagattttccacaacacgcccaacctggacgtgttggaagcggcggtggaggaccttttgctgctcgagtcaacgtcgccagttgcttctacctccccctcggcctcggctgtcccgggtgacgatggtactgaaatggccacgcactgtgtgaagggctgtgcgcttgccaatggccgcttgatcattgcgccgactgttgtgatcaccaccggcacatttttgaacgcggaactcgtgtggggcgcgcaacgaaagcccggcggtcggatgggcgaggcgaccagctcgggactggccggcacatttcgtcgcgttggatttcgcaccggccgtctgagcacgggcactccccctcggctgttggccagcaccattgacttcgcccgcttcaccacccaaccgagtgatgccgtgcc

SEQ ID NO: 91397 - DNA, 529 bp, Heterodera glycines
acgaatttgattgagccgacccggcttagacgaattcgttgagccaaactggcttttacgaattcggagagccaacccggcttttgatgtctagcagtttctttgactgcttttagaatgtgccgactcggcttcaaaacaattcacagccaatcccggcttttcggtgaatttgttttgccgtctcggctttttgctttgtcctgaaaacaaaatttgatgttttttctcacccgaagatgtagagcaggtcctttgctgattgcgccaaattgttgtgtatttactacaacaataaaaatgtttggtttttaaccaaaacaaatgttgtcaaataataaataaattatttatttaacaaataaatatgggaggaggacagcagagaataaataataaaataaaataatgaaatggtggaatgaatgggagaatgcccggagtgagggaaaaggagacatatttatggggctggtcaaggggcggggagagagacaataagagagggagtgaaagggaaaaaaaaaaa

SEQ ID NO: 91398 - DNA, 625 bp, Heterodera glycines
atttggtgaatggcttttgagttcctctgatttattttcctcctaattcttttttgccaattcgatggatccacggcacttttgggtccaatctcttcaacatgagttggaattggagttgaatggcacaattagttatttggacgaagcttcgcgcttggcaaccgaaggtaatcggacgctgaatgagattcgaattcgactggagaaaagggacgagttcagaagggcgagcaatgaattggacagaaggcgaagaatggaccatttggaagtgcacaagcgatggaaacagaaatttggggagttggagaaggaaatgaatgagagaatggcctcaattgaaatggaatttcatcggagaatagagcagctggaagaggagagaaagacgcaagacgcacaagtcgagcgagaatggcaccagaaaaaggcggcattggaatcgacggattggttgacagcgaattcgcagcggaacgaaagcgatgggaatggacaaatggaggacatagaaaggagacgggaagagaaaaaggagcaaacgaataacgaagagaaagtggaagagaaagagaaggaagagaaaaaggagcaaaagagtgaagagaaagtggaagaggaa

SEQ ID NO: 91399 - DNA, 575 bp, Heterodera glycines
cattttttggcatggcattttggcaagaggggggccggccgcacgagattctcggtctcaaatctagagaatttctctgtcttctatgtctcggtcttgaacccttggataagccccgatttgatagaaagtctcgaaaaaggtcggctctcgaagagccataattggcagtgtgatgtcgggaatggaaaattcatggcactcgcgagacgcaagattggcattagcacacctgtccaggcaagaaacaaggatgggatttgtcaatcccgagaatgggtgggggcccagattttcccatttcagtccaatcaaatctctctctattcccatttcagtgccacaaattcccccatcccatttcagtcccaccaccgtgagtcccaacaccgggaacagtccctgcccattgtgatccccaaattggaaaatcctttgggctttcaatacgctttggaggcgcccatttccacgtccattctgaaggaggacgatcggatgacatatgtgaacaaagcaagtgatctgttgaggcgttaattaaattttcattaatagtttttgttcgaaaaatc

SEQ ID NO: 91400 - DNA, 564 bp, Heterodera glycines
acggggcaggctcgccttttaagtttctttgaaagcattgggtggaaggtgtacaccgttcctgagaccgcgtcatttttcctcggtcctggacgcattcgttttcccgacctgagtagtgagcaggctgctcaattccagacagatttgctcaaagcattgatacaaaatgaggatgtctttttcaaccaggccgaattcagtgaagcggaaaaaattatgatcattttagaccggggtgcgatggacggaagtgcttatatcgacatggaatcttggtcagatgtattgtcagcatgtaaggtgaccaacgaacaattgcgtgaaagataccaccaaatttgtcatctcgtcaccgcagcggatggtgcacaatcattttatcaacttgcgaataaccaagcccgaaccgaatcaatggatgaagcaattcagcttgacaaaaagaccaaagaagcatgggttgggcatgaatatctatcaatagttgataattcaagtggttcgtttgacgaaaagatctccaaacttattgctgatgtttgtgaacgttttggcatttcg

SEQ ID NO: 91401 - DNA, 607 bp, Heterodera glycines
tatttaattcaattgttcttcatgacaattcaattcacatagtgaaaacattaaatttacttttttcccaaattgctcaataaacaattttcgttgttttggggagggcaatctgacgattggtactccaatttactgtcgagaacatgactgttttaaaaataattcattcaaacaaaaatatggaacaaagttttgcttttatgaaccctatgaaaaaatttatcttgtgaaatctgatgaagaattaattcaaatcaaagcatggggaactactgaaaaaatattttacttgccaaataatttaaatcaatcatttattgaaaatagacggaataaaagagaagaaaactcttcaatcaatgaagaagcaaccattgagtgtttaaaaggaggcattattattaaagcaataaatgatatacaagaattacaaatttccattgaaaattatacaattataaaaaagaacccccaaaaagaggaaataatttatttacccccaaaacttacatcctttgaatataaacctgtaattaaatttataagtaacccagataaatcaaatgagaaacaaatcacatgtcaatcatctcccgtatgcgaa

SEQ ID NO: 91402 - DNA, 541 bp, Heterodera glycines
gattccgcgaggatggtgattacaactgctgcatcagttcccaattctatgctcctgaacagccgaaacgatattgcacgacaacttctccggatttgctcaactcttctcgaggtcatgttaatggactttgtgaaaggtgtaataagaaccaacaaattattgtcgaacggctgaataaatttgaagctattgatgaggagaactatttcgacgagcttgaaacgtacaagtaccgattgaacaaggcatatccgttgtgcaggcgatgtgaaacgtatacggcgaagaaacttttagatgtacaggcgaaattttcgacgccaaaacgatcggtaaaatcaacgaaaacgttttctacaaagaccttttcaattggcggaaaaacagcttcgattgttggctcggttaagcgctcaatttccggctcaatatttggtgatgaacatgttagccatgttagtagtacgaaactcaaacagcataatcacactgggaaaagactttttgcatccgggttttatacgaactgtgtgaattc

SEQ ID NO: 91403 - DNA, 621 bp, Heterodera glycines
atgacataagggtagaggctgaccacgtcaatgcacaaaatctcctccccttcggcacacacgtgatggagcttgaacggctccgtacgaccacccctcaacgcgtcgctgcgtgggtcaagcggacggggcacaaacacatgctcataccgccccctcagcgccgggtccctacgcagccgctccttccactcacaggcccacaccgtgtgcagctcacagccgtgttggtgctccagctcccacaaacgccgcaccgtccgctcgtacagatcctccgccgtccgaccggcggccaaccgttgttgccggttggggaagcactcaacacatcctagcaataaatttggatacaaaaaaaatgggggctcccaagtgcgcgaccgtgatagtaacagcccatccactcgatggccatcgggcgaaggggcggctcccgacgccaaaggccgtccacccgatacccgctgtcctcaatgtgcgcctctccaacggaccagctcgcacactgcacctgcgcacccggatgctctagctcaaagaagcgaatgtagcgcctcgactcggcggaagcacgacgtccacgcaggtagccgccctccggggagtggaccaaccggt

SEQ ID NO: 91404 - DNA, 614 bp, Heterodera glycines
cttcgaaagctgtgttcaagtgttgaagatggaggagaaggtaaattcaatggaaaaaagcgaatggtcgaacgaatggaaggcactcacacaaatagagcccgaacagtacaatcgatacttatactttttacgcactttttcgaaaaccagaattcgctttacagcttttcccacggccctagtctctgggtcttgaatgaattttggaaaatgatgcaaaagacctagagttctgttaaaaaacaagaattttgtctggaattctgtccgggtcccaggaccgtcacaggatttcggctttgggaaatacggggtgatgacgaccttttttcccatttttatgcggcgcgctttttcaataattttttggggaatagtgggtttttgcatggacacacccattaagattgtcaatagcagcagcaaagaggttgtccgtcttgagtacgtgttgccgtccgtcgccccgccaaaaacgtttcattacaccactgaacagttggacaaccagttgcagtgctacaaaaatattcacccagcggaaggtgggattttttttttagtttatacgttttgcggaatttccatcgggttactgtattagaaccagc

SEQ ID NO: 91405 - DNA, 617 bp, Heterodera glycines
gcacccccccccccctcacttttttaataagaaaataccaagaaaaaattgaaagtttttagctattttttccaggcaccaaacattcatcatatattcaagattgaaaatggaactagtaaaatttgtttgacgccaatttcagacacttgagacaaaatttgcggacgaattggccacccaggagcgcttctacggcgcggacggcggcacgacagcggctgcggcattaatgagttcatctacctccacttcgtcgtcgtccaacggcggtggcggcatttgtcccccggccgtgccgcaacatcagcagttttcccttagcggaggcagtcatcaacggcacttttgatggattaatgatggcaaaaaaagaaaaaaattcctgcagaaattattgccttattatttttattatcacattattttgacgcatcattccttcctttgtttccatttgttttgtgtcacattttcgcatcaattttagcccaaaaatgattgttcagaaacagtgaaaagcacacacactatataagctattgtaaacaagctacatacaaatgcatgcatctttttcattgtaatttgccagtgtttaagtgatcaatccgtct

SEQ ID NO: 91406 - DNA, 648 bp, Heterodera glycines
gccaaggcatccctgaacgatgtctcccactctggcatgcttcgtcttgccatggtgcgtgggagctccttcgataggtgactgtcctcggtgtcgactgatctgctcgatcgggagatgctctgctccctttcttcgtcctcaaatgtttgcctcatcgcctgcagatcaccgagatgctcagccgcaatttggagcagttcggcaggagttggatgctcccgcagttgcagatacttcgtcgaggctggcaagggggcggccacgaaatcatacaagaaatcctgccgctcctcgggtgctgcacccgcttctgctattcccttatcgaaatgaccttcaaaaatccgagtgacctgtccaagtccccgttccattgccatcagccgcgcggcgtgctcgggcgcttcgcccctcgtgaaatccgagtccatcagctcccgcgcttctgcgattcgcgacgagagtgtttcagccgctctctcaatccgatctcgggccgacctcaccgtaattgctccgctgcgcaaattcttcgatgccgcgggtgtaacacccgtttggcttgtccccaggccttgcgcgtccatccctttctttgttttggtctgctgcgccgcattcgctcgttccccgtcctgtcggtcg

SEQ ID NO: 91407 - DNA, 601 bp, Heterodera glycines
gtgttaaaaggctttaataaagcggagacataaagaaaggcccacaaaaagaaaggcgaattgaattttaattaaaaaaatattttatgtaattaaggtccgtgtaaattaattacactaattagaattactctaaataggccttgaaaattattttctgtgtcgttgttttatttatttatttttatattttaaattacttttattgcactttcccccattttattcacatacccaagtgttttccattcagtgtgtaagtgattcggccgccaactcggttaacaccacagccaacaatgtcaccgacatccaacgagggtgtgccatcaatggcactgctggcaccatcgcgggtgctgccagctgccgatgtgctctgcccactcgtgccagccgaaaataggtcgtcataattaagtgcttaaattttgcaaaaaaaattggttctaaaatgaaaaagcttcccgaactgactgactgactattgagaatgttattttgcgtggaaaatccagcatttgcccggtttggggaatatgtgccggattttgtcggatttttaagctagtgtggcgagtgtgcggattttaattttggc

SEQ ID NO: 91408 - DNA, 447 bp, Heterodera glycines
gaccgccgcggcaaaactcaaccgtttcttccgccgtttggtgcacgtccgacagatttactttgaattcgctgcttggcaaatgctttacctgctggtcaatccgcaaaaggtgtacaggaatttcatgtacagaaaaaaagccaaagatcaatgggcccgcgatgaccccgactttctcctccttttggcactttctttgctcggctcgagtgttctgtttgcattaccgctcaatttgtccttttcttcattttgcgcctttttcctttgggttgtgttcatcgattgcatccgaattggtattgccaatgcaaccgcactttggttcaattcaaatcactttttgcgtcggacgacggattgcgacgtgatcgagcgggcctattgcttccatgtagatttgaatgtttttttctgattgctcattcttctccacgtcatttt

SEQ ID NO: 91409 - DNA, 624 bp, Heterodera glycines
aaattggcggagtgccaaaagtcatttccaaatgtctgaaggatggctcgttgcctttctttgcgcttgggagtcgcgtgccgcaacagtgcgccacggaaagggacgacgaatgtccggaggaatacgagtgcagcttggccaccgacgacaattactattgctgtccggcgtgggatcgctgtccgcccggcgcttctccgtttttggtggaggggtcgcgcaaactgttgggttgcaattggatggccaacaattgcccggatggctacacttgcgagggctccaaagaccgcgcgatttgttgccgcacgcgtgccagccaattgcaatgtccgcacgagcgtgccccctatttgtatgggaagcgcccgttggcatgccccaagggaagcaaacgcagttgcccctccggctacgaatgcacggcctctaaaaacggaccaaatcagcatttgtgctgctctgtggtggaccatcatttgcccgaatgtgtcagcggattcgcatttgtcgacccaatgaatggtaaaaatcggatttgcgacccttcttccgagtcttgccccgttggctatcgctgtaaacgttcgactttggccaacactcatgtctgctgctcag

SEQ ID NO: 91410 - DNA, 647 bp, Heterodera glycines
ctttcattttgttaactttggtccccatttctttgttcccacacgcgcgcaccagcgaactcagtgcggtgagtgtggagaccatttcgacctgtttaatcatcgaatgcaaatggacactgttcccccggcagtacgcctccaaaagcaaagcgtaacgggagaacagcttggaaagcgcattctcagctgacaacgagaaataaatgcaaaatgggggtagaaagcgaattgaaatttgaacccaaagtgccgtaaaggccagaagaaacagttgttttggactggtcaacggccaacagatgagcaagttcggcgcggagaagccaaaacaaagtgtgaccaacacggtaatccatcagagcacgcatcaacaaaaggcggacgagtggggaaaaggcgtggggttcaaaacggatggcctggaaagggaaataaactcaatgtttttttatttaccttattgtaaatccaaaattcgttttcagaattaataaatgagtggccaggcaagtgtttatcttacctggaccaaaatgagcaggtaaagctgcaattggtcgtcattgagcgcattgtccaaatggtggacggccattgcgcgtaatttcgcgtcgacgtaacggccgtccaaaagttcgcaagca

SEQ ID NO: 91411 - DNA, 603 bp, Heterodera glycines
cctttcactgattaatttttgtgtgttaatacacaaatttaaatttaaatattattttaaaattattagtttgatttccctccattttttgccattcctcacaatgtttcttggcatcgatctcggcacttccgcggttaaagttctgctgatcagtgctgatcagagtgtcgttggttcggcgagtgttccgctgaaagtgtcgcgtccgtttgacggatggttttaacagtgcccttccgattggcaccgtgccacccgcgaggtcattgaccaattgcggcattcgaaccctaaggcgttttgtgccctccgcggcatcggtctttcatgccaaatgcacggcgccgtgctgctcgatgcagccggcgtgacgcttcgcccgtgcattttatggaacgacatgctaagtcaccgcgaggcggacgaattgaacgcggacgcgcgcttccggtcgatcactggcaacgcggtgttccccgggttcactgcgccaaaattggcctgggttcgcccaaacgaaccagagatttttgcaaaaattgcaaaggttttgctgcccaacgattacctccgtttttggcttaccggtgcttacttttc

SEQ ID NO: 91412 - DNA, 400 bp, Heterodera glycines
agaagcggccttcaaagacattgactactcttttctggtcggagcgatgccccacaaagaatggatggagcgaaaggaccttctcgcggccaatgtccgaattgtcaaatcgcatggcgaagctttggccagattttccaagccaacagtcaaagtgctcgtggtgggaaatcctgccaacacgaacgctttaatttgcgccaaatacacggccagcaaaattccggctaagaattttagtggcatgactcgtcgtgaccacgaccgtgccatggcacaagtggcacacaagtgcgcatatggaaccaccgttgggatggtgaacaatgtgatcatttggggccatcactcgagcactcagttccccgatattccacatgcaacaattgccgacggtggt

SEQ ID NO: 91413 - DNA, 455 bp, Heterodera glycines
gttcgctattagccaataaattttcaaaagtttcatttgaatcttttttttcaatcacttagattaaaagaaaactcttagaataataagaattgggcaaaatgttaggcctcggatgggaatcgaacccactcgtgcaccctttccatgggcaagctctaccattgagctaccgaggcacatccgccctttcttttatggattatcaagcccgctttccacgttttaaccgcccagccagcttcttctttcagagctatcgaatgatactaagaatgtttaatttggatgcttctagaagaagttttgaagcgttaaagttgtcattctattttgtggtcatgtttatttttatgatcgtgtaaactgcaatagagccatttaattcaattaatcaagtgaatatcggcgcgactcgtgcggatcccttcgcgacggccaaattggacgcacga

SEQ ID NO: 91414 - DNA, 529 bp, Heterodera glycines
ccaacagtcggcggagatgaaactgaaaaattaaattgaaattttaaaaaaatttagtagtttttttttacattttctttttgtgatggcctcgtggttttggtgtttttctgaagcggtcccaataaagccaaagaatggcacaacagccgacaaacattggcacgctgtacagactaaaaaatttttctttgattgcatttttcatatgaatttctaagaaaataaagcctatttaactgaaaaagtgccgaaaactgtcttaataatttgctgcaacaaaatgtcagacaaccgaaaagaagccgaataaaaaatggcaaaagcaatgtaaaattaaaatgccaattttcaatttcaattttaaattttattttcctttttttcagtttcatctccggcgacggttggctttgtgtgttcgatttgcttgagccttctcaattgggccttggaattgcacttgtcagcaatcgttttgattgttacgtcgacgaacacttcaagacgcggcgttgggcgctcaaag

SEQ ID NO: 91415 - DNA, 596 bp, Heterodera glycines
aaacatacggcaacaaattttccaccccatcccactgaatgcacaccgcattaaccaagtgtcggttaacgcgcaacgcaacattgacgttcagtacgtaccaaataattgcgttaatgccccgccaaacgtacagcgtcattgcgacattcagtacaccgctcctaaccctgtcgccgcgccatcaaacgcgcaacaaatttattttggaagtagacttattcaaaacattccaatgcaggctcagctttggcagggccctgatggaaaaatgattttggtttacccccaagaccaacagcaacaagtgctgatcgagcaacctaatttggctcaaaatcatcaaaaattcactcgccaggtctttcagattccggaaacgaatcaagagcctagacatttccctacctatccccaaccgaatgttgcgccaagcaacctcgaattcaacttgattttggaaagaattccggatctaaatggaaatgagggtacagattctgtgcgccgttttttcaaaaaatttgatgcatacaccgacggatggccaaacgcgaaacgaatttcggcgttagaaagcaaagtttacaacaaag

SEQ ID NO: 91416 - DNA, 575 bp, Heterodera glycines
gtcgccctcgtctttgcttggtctttcttaattatttgagaatgaatcggtcggaatattatcaaaaattcctcgaaaaaatgtggttcgaattctggcacaaatcggcttcatttaatcataccgcacacttttttagggtgggacgtgaattgggcgtgcctttcactgaaatggatgacattgtaatgcgcattgaagaacgaacaaacaaagaagattttagcatgaggcacatgcaattactgtttgatgatcggattgttgctgtcccatggcttcgcattgactccgtccccggtcatcaaaaattgttcgcctttactgaaatattacggctagaaatgttggatgaaatgattgcccagccatgttacaaccctctcaatcacaatgtcgacaatccgctttactttccccctgattatgaagaatcggaagaaatggaagaaggcgcggaggacgaaaacattgcgaaaattgaaaggcgttggatcaaaaggaaaaagcgcatggcaattacccattgattgaactgtttgttttgttttgtcagattaaaatgttttttgctc

SEQ ID NO: 91417 - DNA, 512 bp, Heterodera glycines
attaagtgaataatgcatgtcatatacttcgacgacttgcttccgagggcgccgatgtggctcatccaattgcccttctacatcacttcctttcttgtgctgctcgtgtttatgctctgccctggcaatatgtttctctatactcttatcgctgtggcctacccaatgtacgcgagcttgttgaccctcaacactcaaaacacatcggaatacacccagtggctcgtttattggtgcgtgttcgccgtgttgggccagttggactttctctttggctctatcaatggccttctgctgctgtacgtgcctttgaagaccgtctttctgctctccttggcctttccgcaaatttatggcgctcacaacatctacgtgaagccggacgtattggacaagatgaagaagatgttgtgatcgaggagacaacgtatcactgtgtaatgtctgtaggatgattctttgttgtgattcctatattgtgtgtatgtattgtatgtggagtaaaaggcaat

SEQ ID NO: 91418 - DNA, 232 bp, Heterodera glycines
gatcaaacgacgcttttcgcccgaggcggtggacaccattttccagacggacgagacggggaccatcgattggattccgatgctgatcagggtccagtgctggcggtgactcgtctttgaactggccgagcagttcccgcactgtctgatgctcaccttcgccatcacattgatcagcgacgcgtgcttcccacacaatagtagcaatgtgaacaccgcggcacagcaactg

SEQ ID NO: 91419 - DNA, 651 bp, Heterodera glycines
caactgcccaccaatgtttggtgcactccgtccgccatcggtcgcatggccaccattttgcgccaaatgcacgcggtggtcagcgaggaaatgggccgggaattgatgggacggcaacggttgatggaccatctgtgcctggtccatggctacttcttcatgttgcgcggcgattttgcctccgcacttgagcacatcctctttatcaaaaccgccaaaacgaccgcaaccaaaaagtgtgccacgccattttcgtcgcgcaaaaatgtgtcccattcgacaaaaattgcggaaaaatgtgtgaacgacgcgttggcaatgtgctcaccgcccgcaaatgtggcgaatctgatgcacttgttgtgcggcgtcaaactgaccaaacgcgagcaaatgaagtgcaaaattttctccgaaaaattcatgctcaaaagtcgacttcgggaaggccaacgaaacgaattccaagcggttgctgaatttttctccaccaatgcgctccgggcgtacaagcgcgtgttcggctttgtgtccaacctgcagttgcagcgggctcagttggactacacgggacagaatttgttacgcgttgtgcgccagcggttggccacacggagcgaatatcgttcatctttctactcgatgctcatc

SEQ ID NO: 91420 - DNA, 267 bp, Heterodera glycines
tttttcttctccttttgtttctctgatcagaccgttgatctgcggcatcaaattgtacacgacgaaaatggtcatttgtttggtccatttttgcgagtggcctcctccacgttgtgttgttaactcctcctcattctccgcctcctcccaccatatatttaattataattatcacaatcgtttttttttatcacactcttaacatgttttttgtggttgaccagcaaataaatttttaatctgcaaaaaaaaaaaaaaaaaaaaaaa

SEQ ID NO: 91421 - DNA, 598 bp, Heterodera glycines
gttttgcttctgaattttgccttcatattctttgcatttttgtcttcaatttatgccgaggaagaagatcccaaagttacgcataaagcatttttcgacatttcgattggtggcgtcaaaaagggacggattgtgattggtctctttggtgaagtcgtgcccaaaacggccaaaaactttttggaattggccaaaggcacccatggctacggttacaaagattcaaaattccatcgcgtaatccggaacttcatgatccaaggtggtgattttacgcgaggtgacggcactggtgggaagtccatttttgagggcaaatcatttgaggacgagaatttcaaactgcaccactatggcgccggatggcttagtatggccaatgcgggccccgacaccaacggatcccagtttttcattaccacggtccatactccatggttggatggacgccacgttgttttcggtaaagtgctcgagggcatgaacattgttagagaaatcgaagacggcgaaactgctggcggagaccgtccaaaaaagacgtcgtgatcgttgacagtggagagctaacagtcagtgaaccgttcaaagttgcacg

SEQ ID NO: 91422 - DNA, 379 bp, Heterodera glycines
gattgagaatattggtgtggtcggcaccggcctgacgggcagtggcattgtgcaaattggggtcgagtcggccgtccaaacgtgcctgatgggccggactcaatagaagtgtgatcagacccggctgaacatcaacaccggagtgcaaaagttgatccataagcgcatggcaaatgacactgccgaggcacaacagcaggtgggcccggcgaccatggaaagccttgagctggcgaacaacttggatgaagtggacttgccagatgccgacattgacattgaggcactggttgaacatctgaaggtgaagcagaagatgctcactgaattggaagccaatgtcagcgagaattgtctgctgggcaccaacacttcgacc

SEQ ID NO: 91423 - DNA, 648 bp, Heterodera glycines
ccatttaaaaaaaaatctgacaaaatgaatttttctccgatcactctgtttctgctctcttcacttgccattttctatgcagcggttgcattccgccaacaaacggtcgccgttcgcggccgtttaatgtgtggggataagccattgacggacacgaaagtgaagctgtggaataagaacaaaattggccgtgatgatcagctggcggacgtgaaaacggacgcgcagggaaatttcgcattggacggcggcgtcgggtccattttcggcatgaatgtgcacctgaaaagttgggcactccatttttgtaaatgcgaaattcgcgcgaatccctaacattttttgccagtttatcacgactgtgatcgtggcatccttccgtgccaacgcaaagttaacctcggcattccgggcgagtacgtcacgcggaccagcaccgttcagcgatggttagacgccggcacaatgaacatgcagctgaagtttcatgacgaatcaacttcatgcatcaactaatttaatgtttaagaggatgagatgaaaaaaaattcaatttttgaagcccttgaaaaacgttttaaaatttttgactttgtcttcattatataaacttattaacaactaaaaaaaaaaaaaaaaaaaaaaaaa

SEQ ID NO: 91424 - DNA, 631 bp, Heterodera glycines
attgtttgttgcctaaacatgaatagaagacgaaaatttgcacccgtaccgaatatggtggcagcacagcaacaacaaccgcagcaacctatcaaaacagaacgggcgccggagccgaccggtggcgagacggtgccgccggaacttgaccagcaactacaggcgttgcaggcggtgaccaacgtcggagggaccagcggaagtggtcagcaggtcggagcagtatcaactgcagcacaaccacaaaaacagggaccgagcagcgcaagcagtgcaccgactgcagcggcgggaccacttattggtgctgttcccttcaagacagcagcgctggccctggcaacttcggcggcatctgtgttgccaccggtggcatcactgctcaaccgctcgccgccttcgtcgcccccgttgcaattgtttgccgagacggacccgatgctgtgcggcggcggcggtgtgcgacaacatttgtacattgaccgacacttgcaaccgcgggcatacacaccggaggcgctggccgcgctggacaatgccgtgctgactgctgctggccaccaacgcgatgcggccgcagttgttgcccaacaccagcaactgctgcagggacaaggacagctcggtgcaa

SEQ ID NO: 91425 - DNA, 615 bp, Heterodera glycines
  unsure (1)..(615): unsure at all n locations
gttttaatttgacaaatttaatattttaactaagccaccaaaaatgcgtttgtcatttctccgtgccagcgagaaacattttggcaatttgtcgaaggtctgttttattatttggtctatatgtctatttgcatggagaattcttataagtcataaccatgactgtattatcaaagcaattcaagctcatttcatgtagactcgaaatgcattcaacattttgattaagtccaaaaagttcactgtcatttagactattaaaaattaatccacgggatgcaattttctattgttttaggcttacggttggtattacgttcgcattgctccggttgaacagaaagtatggaagggctttttctttgatgcgtttgttaagccggtcaaagagcagttgccccactggtggatgttcttcttccccgtagtcacttactttttggtcaccgactgggccaagaaagagtaccgtcgtctgggacggatcaaagaattcactgacgaagaatgaatgtcnaattggccattcggactgttatttgtangaaagaccaccgagtcgacagaatataaatcgaaatgttttggtactgtcaaattgtgtgttatgtccaa

SEQ ID NO: 91426 - DNA, 620 bp, Heterodera glycines
gtccaattaaggtaaattttactgacattgattatgaggtgtttaccgaagcggcccttttggctcgtgaaggacattcgccctatgaacagcctgagtaccgttacacgccattgatcgcttggctattggtgccaaatggacaattcgccgattttggaaaactagttttctgtgccattgatgttcttgtcgcattcctgcacttacttatattggaaagtcggcaacaaaatcaaagaaatccttcctcgcaaaatgaaggcaaaaccattcattcatcatccgtcgtcttccgtcattttggcgtccttttctggctgttcaacccattcaccgccatcatttccgcacgtggcaattgtgatgcgatcatttgtgcactcgttttgttggcactgtttttactgatccgtgtgtggcagcggaagaacgatggcataaccgccacatttctgcgcttggcactggcggccgttgttcacggggccggtgccacccattttcgcattttccctctcatttatttgccttccatttttctgtcttttgctcattcgtcacaaaatcatcagcgtcgtcttaccaaatgtaatgacttcaaatcgttcatttggatg

SEQ ID NO: 91427 - DNA, 633 bp, Heterodera glycines
cccctttctctgttctcgtggtacaactcgcagcagatgaccactgcgcagttaacgcatttggacctgagccaggccaaatttggctcaagcgacacactgctgcgtctgctcattcggtgcgagtcgcttcaggctttgagtttggagtcgtgcgaattgctggacgaggagtgctgccgggcgatcgccaataattcggcgcttcgtcacttggatttggtgtacgctaaacgcctcactgccgctggggttgaagtcattttgcgcgcttgtcaaaaactcgtggaactgaatttgtcctgggctgaggtggatgtcgatgccatgctcgccgtctgccgacttatgccctccggcgttcgtcggctaaatctatccggcttccgacagctttcgtcactaaatgaccgcagcgttgcccagctgtgcgaagtttgtccccatctcgtagaattggacctgagtgataacgcgttgctaactgaaaattgcttggattccatttgcaaccgcctcaaatacctccgccgtctcacactgtcgcgctgttacggcattgaacctatggcatttctgcagttgaacacccttgacgaactgaacattttcgggtgcattaccaatgacggg

SEQ ID NO: 91428 - DNA, 652 bp, Heterodera glycines
agaacaaagttttagattacaaaaaactaatttgtatttctctgtttctgtctgttgtaccatattatgattgattgattcacattgccaaattggtgaacaacaaacactatcaaaatgttcgaattttgcattaattattatgatcattaattatcacaacccccccccccatcctaattaattattattttttgttgcctaattttcacgtcactctctcttttcttcccctcaagattgtctcctctcattacgtcgctcttcgtcttcatcatccgtcgtcgtttgcccacaacatttcgcaatttgctcttctcctccttcatccaccacggcaccatttcccccctcttccgtgcccaccgaagagacttggtggcttttttcccgctcctcccaatcatcatttgctgatcccgaaagcgatgatgagcgattgatttgattaatcattaatttatgttttggcacatttttgttgccctttttttgtttgtttccccccgcccattccccgaaatcagcgacaaattttgtgcccttttcataataatcccgatgtttttttatttacataaaatgtatgtttattagacaacaaaaaacagactctctctccatctctctcccgtgtttctctgtgcgcata

SEQ ID NO: 91429 - DNA, 488 bp, Heterodera glycines
gtcgagaatcccggggggtcgccgtcggcacgggaccaatggcaccctccatcggaacagcagaaattcttcgctggcggacggcaccaatcgccgattcaacggactctttcttttgggccgaggatgggccgttacacaaccaaaacgatcagccaaatatcgaacatttcctcagcccattgacaattccgttcacaatcagtagcattgctcctctttattcctttttctagtcaactgatttttttactatgaattgagctttcctttccctctttttctcctttggaattacattggtctctctcttcccattttcatttttttgacaaattcctcatccgttataaatttgtttctaatacaattaattgtccatgtttttccatgtgttcatctccggttttgtttggggtcgtcacttctcaccgattttctttcttttttcccttcattttcctcctttctttttgaacacctctctt

SEQ ID NO: 91430 - DNA, 208 bp, Heterodera glycines
tgttctctggattgcctcggcgtgctctctgttgcctatcatcgccacagtcgccactctgccatctctgtactcggagatgagcaacatgaacagcaaagtgtgcgacgtactagatgccttcctcgtaaacaccgactcggcctggactgacttgatggacgcgcaagcggccgccgacgcccccgctcaactccgtcgagaaccc

SEQ ID NO: 91431 - DNA, 642 bp, Heterodera glycines
agaaattcgagacgatgaccggcatgcgcattttggaacgctatggaatgacggaaacattggtgtccacatcgaacccatacgagccgattaatgccagaacttcgggctcagttggccaaccagtgaagggggttcaggcccgaataaacgtggacggagtcattgaggtgaaaagtccgagtctgttcaacgggtatctgaacctgccggagaagaccaagcaggaattcacagcggacggcttcttcatcaccggcgacatgggcgaaattgaccaaaacggcttcgtttggatcaaagggcgccaaaaggatttgatcattacggggggactgaatgtttacccgccggaagtggaggacgtggtgaccaacattttcggcgaaaagctaaaggaatgcgcaattattggtgttccgcaccccgactttggcgaggcggtcgtcgccgtctgcgaaccttccgatgccttcgcagaaaagctcagcggcgttgcgcaccaattgacggacgatgagaagagtgccttccgtcaaacattggcaccctacaaaattccaaaggctgtccaatatatgccgttgccacgcaatcaccttggtaaagtgcagaagaatgttctacgcgcgatgcccgaac

SEQ ID NO: 91432 - DNA, 652 bp, Heterodera glycines
ggaaatccgtggcaacagcaacacgcgttgcgaacttattccgatatcgtcatcttccttatttgtatagtctccatttccgcgcttcactgtacggtggtacggtaattcgaccactgttctttgaattcccatcggacaccaacacacacactttgaatttccaattcatgtggggcccagcaatggtcattgtgcctgtcgtgaatccgaatgttgattctgtccatggttatttgcctgtcaacgaaacttggtattcgatgagtgaagcacatgagtacagtgcgcgaattatgccaggattttcaacattcaaagcgccaagagacacgccgttgccaacatttttgaggggcggtcatattattccaagacaagagcccgatttgaccaccactgcttcacgcaaaaagccattccaacttctgatcgggttaaagccacttgcttgcccgtgcaaattggtcgccgctggggaaatgttttgggatgacggcgaaacaattgtggacgatttcggcaaccattcgtactatcgttttgagtttagtaccacccgcaccgcccattggacaccattgttgtgaatcggacgcacaattcaagcgaagacccattgccaagctttgaacaaattgtcattcttggc

SEQ ID NO: 91433 - DNA, 489 bp, Heterodera glycines
caatttcgattgggcgtaagacggcggagtactcactgcactcgcataccaccgacgggacggactttggtgcaagtctgtaccatcgggtgcaccaaaatttggagtacggtgtgcagatgggttggaagatgggcgacgccatggcgagttgggcgattgccaccaagtacaacatgagcccagaattgacccttcgtgcaaagatggaccacaactctctcgtgtccgtttctgccgtgcacaatctgaacggcacgctcaagctcaccctttcctcacactttgcaatggcagcgttccctgacgcgcaaaacaaatttggctttgggctcgagtactgtcccggcggcacgtgctgcgcgaaagataaagaagatgcataaagaaagagggagaggacagcgagagacctattagacaggaatttggaccacatatatttgttctgttttggataagtgttagggataaacatgtgtaattccc

SEQ ID NO: 91434 - DNA, 585 bp, Heterodera glycines
ctgatctcttgacaaaacaactaacagcggtcgaagaatgtaaatctgtcactgcgacttacaagccaattcgtgtttccgacatgcccattcaattatgcgaacatggccgtgtcatgcccggcccgtttattcggggtgaaataaaggcggtgaacacttcggctgcccgacgcctgatcagggaatttaatgtgaacacgactttgtacacgggagctaacatctgtgtcaactgctgctcaagacttcgtgatcaccaagaaactaggcgaaggggacggacagaggcgattttatactaccccgaaggcgctactttgtttatcaaattgaatggggatgagaatgatgggaacacaacaaagggcaagaaaaccaccactggaccatccgcggcagtgacgcgtcgagcagcgtcaaaagggctaataaaaattcgaatttgttcggatgagacgatcaatgccctgaagttgcgcatttacgagaagatcgaccagtctccagtcgaccagttgctttacatgggcggacaagtgttggatgggaatttgacgcttgagagggcgagggttcctgcaa

SEQ ID NO: 91435 - DNA, 587 bp, Heterodera glycines
catccgagggcggatgggaatttgcaatggtacaaagagcgaatgtctgctgaagaatttgatgaccaaactgatttgcccgaattgcagaatgagtacaaacgatacaaagacataccggagagagactcatttgaaagtttatgccgtggcgaatttgaaattccaccagaaaatgtcacacaattgaactgttattataagaaagacaagccttttctgaagttggcaccccataaagtggaaattgtccgttttgaaccattggtcgttctttttcgtggtgtcatttcggacgccgaaatttcagtgatcaaagaattggcaacaccaaaacttcgtcgggccaccgtacacgacccggccactggacaactcgtgttcgcctcatatcgaatcagcaaatcggcatggcttaaggatgaagaacacgaagtggtggcacgggtcaacaaacgcatcagtgacatgaccaacctgaacctggacacggcggaggaattgcaggtggccaattatggcatcggagggcactacgacccgcacttcgatttttcgaggcgagaagagaagaaccaattcgactc

SEQ ID NO: 91436 - DNA, 651 bp, Heterodera glycines
gtttgagcagcacaataaatagccgtttaatttcttatcaaatgcaatcactttcacatattcttttcacatttttctcaattctttttgctgctcattgtcaaagcgatgaatcaaaaagcgcgggagcgcaaatgcaaacggtggacgaaaataagattcggcacggcaaaccgttgacgagcattgtcaaatacccttttatggccactgtttggcaaaatgaccgcaaactttgcaccgcgtcaattgtcagtccaaattatattttgtcggcgggccattgctttgtgaaaatgtccgaggaaaattacataattttggtggggacagtgaacgcgaagttggagaagggcaacggacagcaatttaaagtggagaaagcgcacgtgtactcggagacggtgttcggccaagacattgccattgtgaagctgaagaattcgattgatttctccgacaatgccactcagccgatcactttgtcccggaggtccaattttacaaaaactgacctggcattcattgccggatggggacgtatcaccgactggagttctccggtcactctgcaaggtgccaatgtgctgatttggccaaaggatgaggcgcgttgcgacggcattatggagtcggaagtttgcgcatttg

SEQ ID NO: 91437 - DNA, 598 bp, Heterodera glycines
gtttgagccaaatgtttcccgctaaatacaaagcctttcgactggaaaataaagtcgcggtgatcacagcagcgacaaatgggattggattggcaattgctgaacgattaggccacgagggagcacgtctggtggtcagcagcagagacgaagacaatgtgaagcgggcgatcgatcggctcgtctcttcgggactgaagcgttcggaccttgccggttgcacttgccatgtgtccaattcggaggaccgaagtcgcctgctgaaactgaccatccaacggttcggaagcgatttgttggacgtggacgagtcagcctgggacaaactgttcgacgtgaatgtcaaggcgggcttcatgatggccaagctgttcgcgccagaaattgaacagagcggtggagggtccatcgttttcaactcgtccatcggcgcctatcggtccccccagggaatcgctgcttacggcatcacaaaaacggcactgctaggtcttaccagagctctggcagaatcacttgcacccaaagggattcgcgtgaatgcaattgcgccagggattatcaaaacaaaaatgagcaaagcgctttgggaaggcat

SEQ ID NO: 91438 - DNA, 622 bp, Heterodera glycines
tgttctcggaattgccacgaagggctctctgttggctatgatcaccagccccgacagtctgccatctctgtactcggagatgatccctatgaaccgccaagggcgccacggatttgaggtcttccacgtcatcagcgactcggcctggactgacttgatggacgggctgatggccatgacggccccgtcgaagccgcgcgataaccccttcaactccatgtaccgtgacgaacattaactgcccggacactgccggcgcgctgtcctccgacatgccaactgtccccctgtggcccccggccccgcggcacctgctgtacacccgggacaccctggatgtgcgtgacctcccggagagcctgtatacggtgtgcaaacctggccaccgtgcccgctgcacaacatcccctgcccacgctatcctgctggtcccacccgacgcccccaaggactagcaccgcccggactgctttgatccgctggaccacctgggaccccctgctccaggcggatgaccctgcaactactggtaacgcccggaccccaacgacagccaggacaatgccgacatcccggatccgctggccaaccctgacagcctgcatccaccgtagtcgtctcc

SEQ ID NO: 91439 - DNA, 540 bp, Heterodera glycines
gtgccgggcgttctctactcggccggggacttggcgacgcgtgggcgcaacaattggcgcacgtccaccgctgacggtgacaccatccaggaattcgacttgccgccccagggccagcctgaggaagtccgggcccaagcgcaggctcagttggacgaacaacgcgcctcttactttgcccaagttaccgaggaactccgcccgaccattcccaccaagttttgggcgtagaccatcactgaactgactgatttgaagagagaaatggtaaactcgatcccaaaaaaacaaaaacctttgcttcaatcaatttgctatatattttctcttcactgtttttattgtattcaattccattccgtttttcgattctcacgatcagaacaccttttgttaatttaaccaatcactgccaacatttttttcgttgttttcactcttaaccattcattcactgccatcattgtacacaaatatcatctcatcatttcttttgttttgaattattgaattgaaccatttatcactttcctcctcttc

SEQ ID NO: 91440 - DNA, 525 bp, Heterodera glycines
gggaatttctcctcgaggattgaagccttgaaagcggcatttgccaatgcttcatctcccgtcaatttcattgttgtcatttggcaattgccgtctcctgttgacccaaatttggcatttgatcggatcaacgaattgactcgggaacaattgacgttaaaaaggatgaacggtgtcggccattattttttgatccgttgtccaattgcgcgagacgagagcaaatggacaaaatgggaggaggaagcgattggctggcgaatttatgatcaatggaacataattgacattcggattaatgatgagggcgaaatcggagatgggccttaaaattccttttcttgaaagtttttggagttttgtgatttctgaatgatgatcgacacttttggaccattggcattttgattgacacttatgtaataaatcccgcattcttccctgatcagctgacctgactcaccattcaccatgattgatcaatattcacattcagcattttgatcataaatttggcattttgaa

SEQ ID NO: 91441 - DNA, 638 bp, Heterodera glycines
gggcggcagagtggagtacagaatcaaatggatgggctatgacgacagttggaactcgtgggagccgagcaaaagcgtgaagcatttggatgtcgtcaaacagtacgagaaggagtggaaacagcaacaccagcaggagaaacagcagccggtgtctgcaaagcgttcgcttcgtttgtcgcgcaccgaacaaacaccgaccacaaagggcactactccgtcctcatccgtcagtgtgtcgaccaagcgcattcgcgtggtggtccgaaaggagcaggacgacggaccggcgcacgtggaacagaccgagatggacgctgtctcggtggagaccaaagagttggcgcccaagacgccctccaaaaagaaaaagaaacgctcacgctattgagcaccgaagaagaagaagaaacagcagacagaaagcacgatcaaaaaacatcatttccaccgtttcgcctatcgcttcttgatttttttaatttgttttttatttatttaatttcacttctcagatggttttcgtcttgttccttaaataccaaaaaaatcccttcctccaatcaccgccattttttttgatgctcctttgaacatcaccattatttattctgcgatgcacttacgaattagtgttg

SEQ ID NO: 91442 - DNA, 214 bp, Heterodera glycines
ctactgcaaagactgcgacattatattcaacagatcttcttcgaatgacgcgtcggccaacaaattcaacattttgaagaacggaaccatccaatcgccgccggatccgaccgaaatttccgtatatttggacaaatatgtggttggccaacaacacgcaaaaaaggcgatgtctgtcggcatttaccagcattacaaacgcttggaaaacaat

SEQ ID NO: 91443 - DNA, 331 bp, Heterodera glycines
gatacacccattacgcgatgtgaatttggactttggaaaagctgtgagagaggacgcgaggcccggcatagacattcaggcgcaatgccgtgttcgaattctcgatcgaccggccagctatctgatgaacgccccagaagtgctatacccgtgggttagcatcattgacgcgtcgatgaaattggccatttgcaatttggtgttggatacgaccacacggcccaatttcgtggccgattatttactctattttatgaatagatatcgcgacttttcctacgtcgactttataacaatcacagagccctcctacgacatccaacaagtgctc

SEQ ID NO: 91444 - DNA, 618 bp, Heterodera glycines
tcccacagtccaggaaaaaaatatggatttccatataattggactccctagtaatagcaacaacaaaagaataaataaacggaattttgttttgtttattggtcgtttttagaccgtcgtcatgttattctggggactttatctgatggacccggcgacggtcacaaggaaggaggcgcgatttatctttgacttcaaatggttcaactatgcactcgtgggtggaaggattgatttattgcaaaaatccacttgttttttttactccagaattaatgtccccgtggaaagtaaaaagttcattaggaagaaaaatctaaactttattttcatcgggacaccaattctccaatattaccattttttctccgaaatctcatgcgttttgttttcgtttttggtaatcctaccattactggtcaatccttccatttcagcacactttccccctcttcgccatgcttctcgacttttccatttggcaccatcgtcgcccctcaaaagtctctgcgctaaaggcgatcttgtgtttctccctgttttacaccatccacatccactgtttctatgtctgcttcaacttttgggcttatcccatccttgcccaaatgtccttca

SEQ ID NO: 91445 - DNA, 613 bp, Heterodera glycines
ccgtcattatcatagcaccaagatgtgtacagcaaaaaatttgctggcggagatatattttttaattttttaatccgtcccttccaaaatagaaaaatcccagaagaaattacacacatgtgtgctttgattttttggttttattttacagtaatacaattttcattttttgttaattttttaaaattttaattccctaattatttaatacgctaattaagtcgccctgctttaatgagcacgaatgttgcgcgaaatgggcagccgacggacagtgcgaatcgaacagcgaatacatgagccaattttgcaaagccagctgcaaaaaatgccaatattcgtacaacatgcaagaggaatgtgctgatcgtcataaaaattgcaaagctttgtcctaccaaatgaaatgcgattcaagctggatggctgaaaactgtcgaaaatattgcaacaaatgcaatgtaaaacgtatgcaaacatgcgctggcggttccccggggggagaaaaacgtaaaaaaaattcggaaattaattttattaatttttattaaaatatattagccacgctttcatatggcggcaacaatggtggctttaaatcaaaccaatgcta

SEQ ID NO: 91446 - DNA, 568 bp, Heterodera glycines
tgaacaattggcccaaaattcctgacttcagcaggacatgacaattctgccacacaactacaactttgacataccgaatacaatatggaaaatccggacaattgatgccaaaattgtagctttgcaatttcccgagggcatcacaatgtacgcctgcgtaatcgccgacattctcgagaagcacaccggcgccgagttcatcattctcggcgacgtaacttatggagcctgttgagtccacgatttcactgcgcgtgcgctcggactgtcagctagttggtacactacgggcacagtgtgattggtgccaattcacgacactgttggcatccatctgctgtacgtgctcgccaacattgacatgggcacggcccatttgctggacacactggggcacaattttttgcacaccgccggagatggaatggaaaaagtgcctaaattggcattgaacagcaccgtccaatttgtggcgacacttcagattgtcaagcgtgagttggccaaagacagtttctacattgtcatcccgcagtgcagtccgatgagtacgggcgaactgctcggc

SEQ ID NO: 91447 - DNA, 331 bp, Heterodera glycines
gcaaattgtgctccggcaacatgtggcgtgcaggtcacccgctgccatccctacttccaacgagacccacgacgccccttccaagcgttacggaggctgttgctgtggctgcggagtgtctgccccgggcccgcccggaccccctggcccatcggtacaacccgaccgacacagacaacccgtagggtcacgacagcccggagtaccaggccaggcagctcctcgcccgtacccatcacgccgtggatgcatgccgaagtgagatgccgcccagtccggagtcgccggacctcccggaccccccggatgctacggacagaacggccaaccc

SEQ ID NO: 91448 - DNA, 651 bp, Heterodera glycines
tgagattaagcttaaatggcgaataaaataaattactaaaaaagactcgtggcaacagtcagcagatcggccacataaaatgtccagtttttttcatggtcatcagcggacacattcgcaagcacaacagctgatccctcgtggtccctctgatccggatgatccttgctcgactgcttctccctacgactctgatcccgtcctcatcccttcctgcgctttcccctcggggaccgatcggctccctcaactgaccaactcgcgcattttgcccgctggccgggcttccgccatgcgtttctccaccttgggcagtgattgttcttcttcgtattacggactccccggaggggtcgaaggcgtcgaagagccaattacgacgagaagtgtccttcgtgccaacttccgagtcgttctcggttccgccgcgttggctttgcttggctccgtccttttggtgttcggcagttgtgtaatgcttttccccaacgacatggatgtccacggatggattttcctcgtcgtcggagtgctcttcgccattcccggcttttaccacgtttggtacatcggctgcactctctgcggacggcccggctacagtttcgagaatttgccaactttcacaaagcccaactttccctactaaca

SEQ ID NO: 91449 - DNA, 628 bp, Heterodera glycines
taatggctgtggccttaagcaagtgccaatttactcctccgaaatgggcgctgtgaggcagttttgagtgaacctccaattttgaaaatggtggaggatgccgggacgagggccggtttcgaccaaatcgacgcattggcacgggaagcggaggaattgaggcagaaattggagcaggaaaggcacaaactgaacgacatcccaatacaacaagcagctgaacggttggaacttctgtcccaattggccatcaaacagcggagagtgctaaagggccatggcagtaaagtgttgtgcatggactgggcgcaggacaaacggcacttggtcagctcctcccaggacggcaaagtgatcgtctgggacgggttcaccaccaacaaagagcacgccctgacaatgcccaccacttgggtgatggcttgtgcctatgcgccgagtggtcaaatgattgcctgcggcggtttggacaacaaatgttccgttgtgccgttggacccccaggaggacattctgcagaaaaagcgttctgtcgccactcacacttcgtacatgtcctgttgcactttcatccgttcggacaatttgcttctgacgggcagcggcgattcaacttgtgcaatgtggg

SEQ ID NO: 91450 - DNA, 641 bp, Heterodera glycines
atttctttacactgaaactaattacgatgatgctccgcaatcgcgatttgaacgtgcagccggctgcaggtgcgggtgctccactgcccaagcgccagtcagctcatttggtaaaggtggttggtggcgccagcggccgtgcttcatctcagtcttccgccgggtcggaccgggactccaagtacgagccgaggccaaagcgtgcatgcagccagaaggacaaggaaaacagccactacaacaacaacaatcacaacaaaagcagtcataacaagtccaaaaagaacaccagcgggggcaccgtcgttccggtcacggctttttcacggtcgctgctcatcgattcggccaagaaggacgtgaccgttgtgtcaacggctgtcgatgccggcggcggtggggtgcttgccgcaccgattgttggccgtaagagatcgtctgcgttgctttccacgcgtgattcaaatgttggcgaacacatgtcttcaacgcagaaagaggagaagcaggacgatgaacagaagatggagcaggacagtggtgaacggcagcagcaacaggaggagggattgttcgactttgacaaggagaatgaccgcgacatgtctgccttgtcgcagtacgcgcaggacatcttcact

SEQ ID NO: 91451 - DNA, 624 bp, Heterodera glycines
gcgatgtccacggcccaaggcgaccatgacgagagaagggacgcgtcgtcgcctccccctccgccgctcgcggcttcgatccgtccaaatgcgatggcggcgtcgtcctcgcgcattggccattctctgctgggcgagggcgcactccgtccgtcgcccttctcccaattggccacttcctccttcattcagccgtcccctttggcggccattgttcagccgcgcgccatccaagagagtaatttccgtgccttggaaatgtcaatgcatgcccttctcatcaaccaaatgctcttcgccaattcgttcgcttctccggcccttcgttcctcccggcatcgcccctttggctacggttccatcccttttggcagtgtttcccgtcgcggacccgtggacagtatcgtggacagcaacatttttggagtgcccgccggggccagtcaaatccaactgatggacgaattggaaaatgaatttgacccattgtcaaataatcgtagggtgtgaaatgtaataaattgggtttctccaatcaaccgtcagaccattttttcattcttctcctcttgcgttgaatgaatttcacatactcaaaaacagctttatttgcattactatact

SEQ ID NO: 91452 - DNA, 629 bp, Heterodera glycines
ctgtgcccaatttggcacatcggtcacttcttttcttcaaattgatactaccgacccaattgctctttcggaattgcgtttcgatgtccttccccttttgctggccaatgcttggcctcttcgacgaaacattcactttcttagacgattggtctttattctcgcttattcttctaatctaaactatcatcttgtgcttgatcctcttttgatgggcttgtccaagtgttcaactcgtgaaaatgtcttcctttgttgttcccctgagaatgtcacaattaccgacgtcaagattttcctcgttcaactttcttcctacatgaaactgtgcaaactgtatgatgaaggcgttttcgttttcccatggattttccattgtgcgcccaatgttcagcaacaacagttttggagctacattaattctctgttggatgggaaacaggaatcggaaagtcttccgactttggtatcaattacgacaagaatcgcccaaaaatggtcaaacgaagcgatgtcgaagaagttagaggacatcaattctctgatgacgagactaacccttcacaaccgttctttagccaaattattcgcattgaaccaaactggttctcttttttagcattttcact

SEQ ID NO: 91453 - DNA, 469 bp, Heterodera glycines
  unsure (1)..(469): unsure at all n locations
attaagggctgcatgcaattaagaattacgtccttttcgatgccatcgttatctcttaaacaagcatggtaataaatcacacctggcccatgttgtaattccgtgccattttcaattggcttaatgttcaattggcgcattggctttctgatcaccctgctcatgctcatcactaattgcaattcatccgtctgatcatctagcgcttcttgaacagttccattttgttgtccaaactgatcatcgcgcttcttctgttcatcaacattccgttctttttgaagtttggcactttgttcaattgcattttcctgttgttgttctacaagtactgctccattttcttgccttttgctttgattttcatgccgttcttcatttgtcacattttcaccactttttgtcccattattttgttggatttcttgaataaattggcccatttggaaaannaaaaaaaaaaaaaaaa

SEQ ID NO: 91454 - DNA, 491 bp, Heterodera glycines
cccctccctccgctgccattcgccgcctttcgtccgtttgccgtgccgagtgaatgttcgtcctccgatgtttctgttcctccctccgtcactcccttcccgcctttgtcttcccttccttttcctccttttttacgcctatttcggcgacggatttcgtcggagatggcgcgacgattcattcataaaccgaacattcaaaccgaggcgatacaaattgacactgtccattcgcaatcacaatgtgacggatgtgcgtttcttccgactgattggagttgataacacagccgacttttacgtggccccgggcgacactttcaccaacacttacaccgttaacagaaaaggcgcctgggttttgtttgttgaatttcccggaaatcgatacgcaaaatcccagcggaaaatgatctcacgcgactctttcccccaatggatgatggaagtttatctgttcccacctgacaatgtcggcttctctgaatggt

SEQ ID NO: 91455 - DNA, 247 bp, Heterodera glycines
cattctgaccaggcaaatcttattgacttcatgcggatcttacggcgatgtgctccaattgaggagcattctcgagcttcgtattagccacttccagtttttctaccaaagggccatgtctttggaccactgcggtgaaatgctttcccgaactctttactcacgtcctcttttcccctatttcacggtgaccattatatgtggaattaccatggatggccgtgatgacctttacagttacgacccc

SEQ ID NO: 91456 - DNA, 328 bp, Heterodera glycines
cttcaccttcaactccaactagggatggaatgatttgagggacgctaaactggtgttgacgcttccggcaaagcaccctgtgacgacatatctctccaacttccgtgccaagcgtcaactgccaggactctgacggagccctggactcctacatccaaggtgtcctcctgaccctctcggctccgccggaactcctgcacagcccggacaccctgaaatcgcatgacagcccggacctgtcttataacctaggcaattcgatgatccttgtacacgccagaacataccctgcactgcatgcaatgctggaccacacggtcccctcgga

SEQ ID NO: 91457 - DNA, 325 bp, Heterodera glycines
gcaagagactcacattgttctcgggattgcctcggagagctctctgatggatatcatcgccacagacggcactcaggcatctctgtactccgagatgacccaaatgaacaacaaagtgcgcgacggagtggaggccttccgcgtcaacaccgactcggcctgcactgacttgatggacgtgcaagtggacgtgacgccgccgtcaaacccccgtgataaccccttcaactccatcttccgtgccaaacgtcaactgcccggacactgccagtgcgctggcctccaacagccaagctgtccccctggtccgcccggcccgtgcgga

SEQ ID NO: 91458 - DNA, 529 bp, Heterodera glycines
ccagccttcaactcaacgcaacatcaacaccagtgcgcgccaagctcgtctacacatttcgtcgcgacaactcatcacttcatcatgagcgacatgagcgcctacatgggatccggccccgccgagcctgcaccgtcgtccggcgccgcggaagcctctccatcgtcaggagtcgcgagcgcctacatgggatccggccccgccgagcctgcaccgtcgtcaggcgccgcggaagcctctccatcgtcaggagtcgcgagcgcctacatgggatccggccccgccgagcctgcaccgtcgtccggcgccgcggaagcctctccatcgtcaggagtcgcgagcgcctacatgggatccggccccgccgagcctgcaccgtcgtccggcgccgcggaagcctctccatcgtcaggagtcgcgagcgcctacatgggagcctcgcccgcgtacgagccaccagcgcaagagaagtccccggatcagagcgcctacatgtgagaagatgcaacaacgaccggcggatggatgg

SEQ ID NO: 91459 - DNA, 633 bp, Heterodera glycines
cgtccatttcgtccgatttacacatttcctttccctccgttctgtcatccaactgctgccactttcaattgcccttcacggcaatggctgatgacattcctcctcctcctgctgttgctgctgatggtggtgatgtcgtcgttgatttggagcaacatgttcgccaactcatcatgtccatcggccagggaagcgaggacgcagtgcacgagctttccattctgatcgagtcattcaaccaggagcagctcgtcgactttctggagattatggcaagaatgtacgtcgagagcggattcagcgttgacatgccgggtggccaagaaggaatcaccatgttgatggtcgctgcgtcctctggaagggtggactttgcgcgctacttgctcgcccacggtgcaaccgttggacacttggacgccaccggaagcgtcttcccactaatgctagctgccgaatctggtgaagttggaggtgtgccgtctgctggtcgaggaatgggcagctgaagtcaaccagcaagcaattgatggcacgacacctttgatgagcgcgagcagtgagggacgactggacgttgtgatttatctcatcgatcatggcgccgaaatccaacatgcgaacgccgaagga

SEQ ID NO: 91460 - DNA, 640 bp, Heterodera glycines
gttgagcgaatcgaatgaacgcctccaaatccatctgaaggagcgaatgcaggcgcaaattgacaagaacaaactgatgcagcggcttgaccaggccaagaaaatatttgatcagacggaacgtttcaaagagcggttgctgcgtgagaatgacgaccttcgcaacgacccgggcaaagtgcaaacgctgggcgagcaggaatggaagcgcattcagcaggcgaacgtgttggccagcatccaacaggctttttccacctcttcttcaatgctcaatgtgaacgaggcaccgccgcctgcgctggaccaatcgacgactgatcccctggacgcaataaacaacgaaattcggatgatccaagagcaaaaacagcaggcggaacgcgtcgctgcggaacaaagccaagaatggccaccgaacggcaccgtttacgagtacggcaacaacaacaacgcgagcaacggcggatactcaccacggcaacaacatgatcagcagaagaagcagaagatgcgatctcataaataattcatgcacatgctgtttttaaacttacttaattgatgctccaaatatgtattgattgtgtttaaattgaacaaaacataaacaaatgcaccacaaaaaaaaaaaaaaaaa

SEQ ID NO: 91461 - DNA, 595 bp, Heterodera glycines
ccatttgcccatctttttccttttcctctctgtccgactcccttttctcttctcttacccccaatttccttctccgtttgcccatccgccaatgtctccaatggccggcattgagccaataatgccgacgaattttgcgcttgatggtttcgcccgccatgtgtccccctccggcggattcggcggcggagcgacaacgcacccaatgaactcactgatcatccgcaacagcccttaccaaatgccaatgccaacgatgcccggaggggcgagtcccttcccgatgagtcagcaaatgggcacagacggaccgcagcagccgatattccccaatgggatgagcattgacaaaaatggcatgggctcggcaaatgccgttcttccatcggacattccaatggatgttttggttggaagacagatcactcaaaatcgcttggatgaaatgggccaatcggtcgtcggttcggcggcgatgaatgggcggcacccctttccgttgggccctttccttggcggctcaaacggcggcgggggaaggaatgcgccgccgttcggcgcgggaggcggcgccttttctggcgactcactgaca

SEQ ID NO: 91462 - DNA, 587 bp, Heterodera glycines
  unsure (1)..(587): unsure at all n locations
cacaactctcaccgcgataaaaccaaaaatgttgggaaggaacattggcaacggacgggggagacctttgggaagtgcacataaagccgtgggaaaagccgtggatgggtcatcaagtggcgattcttccgatgacgactcatccatcgaccagcacgtccaattggccagcgaaagcagagacgtaaaactaaatggtggtggtgaatcgacaattatgaaagggacggggcggagaggacgtcgcaaaggccgaacgagggacgagtcttcaccagacttggccacgacaacagtggccgaagattggactggtggcaatggagacccggagttatgtgcacacaaaaaatgccaaagaccgctgcatatgtccatcaattgggtccaatgcgatgactgcgacaagtggttccattccacgtgtgtttttggcacaaactcaactcccgaggacgatgccgatttccactgcggatgtgagaggaatacaaagaaaaattcaacagaaacgacacatagaaaaagtttatcattgtctcccccgacataatgtctctttgggagtacaagntttttttcttgat

SEQ ID NO: 91463 - DNA, 646 bp, Heterodera glycines
gtgcgaccccttcctcaaagtgagccgaatcaacgcggacggcacgtgagcagaacagacggacaaataatgggctcgacagaatggtactgatcaagtttcagaatgcaattggcctaccgaagtcggtaccacgaacagaatctgaaccccaagtggaaaccattcgaaattctcacgcagcaactttgctacggggacagagaccgaccatttctgatcgaatgctttgactgggaccaagacggcgaccatgatttggtcggggcatgccaaacgacggtcaaccgactgatgtgcgggatggacaaggaattgccgctgatcaacgaaaagaagttgaagaagcacaagaagtacgtcgactctggtcagattcacttccatcgcgtgttcctttggcaagactacacttttcttgacttcatccgtggcgggactgagttggatttcaccgtcgccattgacttcactcgttccaatttgcccatgaaggaccaatcgtcgcttcaccgcttcgaccacagcaaccgcccaaaccaatacgaaattgcgatcggagccatcgccgaaatatgccaacattacagcaaaaacaaacttttcaatgcttatggcttcggtgcccgaattccttctttggatg

SEQ ID NO: 91464 - DNA, 634 bp, Heterodera glycines
caaatgtttaaagacaaaaaaaacaatccaaaaatttttttttgttcaacggtcctaggcatgttaatagcacttaggcaattgaaaaagcaaaattttctttttttttaaatcatgaatttgtaaatttatatttaaattattttaaaattaaaaaaatgagttttcaggaaatgaaaaaaattagctatttttccagtaatttatttttgtaattttgcaagaaattttaagtgtagaaagcgaataccaaaatttctcttccattcgttcattataaaacgccaacaatttgagtctcatttccttgggtagtttctcattaatcgctaccgtgaagatggaattgtcacccaaattgtgccaaaaaataaagggattaatggaaacaaggagaatagcctgtgttgttcctgtacctgtattttcatgtacttttgtacagaaaaaaaaacaggtacatgccatttttggaacacagataacaggtacagttaccggaacccgtcagttgggcgcccgcactttttccaatatagcttttttatttgttatccaaatccaacaatcttggtatcattcgaaagttattaacatgctctcttagtcttacaaaaagcgaaaagattttcaa

SEQ ID NO: 91465 - DNA, 604 bp, Heterodera glycines
ccgtctgatttcacttggtgcgcctaaggaccagaacgaatcgcacttttctgacgaagaagaactccccgatgtgccgttcaatggcgcaagagacaaagcttgctatgccgcaactaggctaactgacaatgaaatcaaaaacaccaaacaagcacgaataactcaccgcgttaaggacaccagtctttttccactgtacgaagtttccggagtgatccaagactttgagaccactgccactccggctgactacgatttcgcactcggagacgaacacattgtatggccctctgaaaatatgcgccaaaatggctatgctgactttgtggcagagacaaatttggcgcttcttgtaaagagtgccgacactttgacaatgcatgtggcgccaaatcttccggccgacgcaacttgggcactctctgcaagtgaccatgcccgttctgccgttgaagccatcgccggcaccaacggatgctacctcatcttaccagttggcgctggaggactcgcactgtggattccgaccttggccgaacatactcctaccgcgaggcacgagaaacgaatcaaactgattgatgctcactctaaggagaat

SEQ ID NO: 91466 - DNA, 610 bp, Heterodera glycines
cacaaattgacaccgacgaaaacggaggaaagggcggacggagtgccattgagcaaagtcaaaagcgagcgaaaatgggaagtgaaagcaatgggcaaatcaaagaagaagacaaatcggagaaatcagcgagcgaaggcactttggctgaggaaaaggcaaatgctaacggaagtgttggcaatgcctttcttgatgaggtcatccgaaattacatgcccaaaccgcacgcaccgatccaatgcattgctatggaggatgcgcattttgccctgaacacaacgccaatctcttcgaacagtccgtccaaatcgccagtcagaacgggaaatgatcgccttttggaggaaagcatcgctttgatgatgccgcatccgaacagaaaaagggaaggaaaagcatttgcaaggccaaaagatcaacaaaaattcggacaaaaaatggacgaccttttgacagcggatgaagaagaagaagaagcagttttggaacagcagcagaaagtcactgccgaactgcccgcggacgtgaatgcggaattcgctgcccattggatggtcgtggagtgtgggacgaccaaaagtcctaaaacggacgacgaggaacgaag

SEQ ID NO: 91467 - DNA, 640 bp, Heterodera glycines
gcaaagtttctggcgccttataaacaaaccgcgcattgatgattggagtccattggcaaaattttattatgctgatgatacattaaatgctattgctaacgaattggactcttttgatggtcggagggatcccgagcgctgcaatcagcttgttaacaagttacgacaagcgcaggacagagtcttacatatcatctctgagatgttaatgctcatctttccactcgagtctgaacgtgcaactcgtgacttccgcgtcaaatttcctgacgaaataatgcatgataatctccctggtcaactttggtttggagcagaatgtttggcagctggttccaacattgatgaccatgaaacagaaagtgaggcaattcaaccgatggctaaatcattcacaagacacttggaaaagcttcgcgaaatgttgaaggagcaggcacttaaagacccaacctattatcccgacgggataaaaacttctctgaaggtcttcgatcaactttttgctgactttgaatttgcttacgttagtgcgatggttcccggcaaatccgccaaggaatatgaccgacaacttgacgtaacagtgcttttttccgaatgtctgactagggctatcaaaatgcgctacatcacgagg

SEQ ID NO: 91468 - DNA, 644 bp, Heterodera glycines
gttcaggcactcggaatctgcgcgacaatttggccgatttaaatgcgcaaattgcggccaatcaaaagggcattggccttctgcatgaactcgtccgtgaatattcgctgcccatagtcaaagcgtatatgaaacatatccaacggaacgcagtcgaagcagtgagacaattgttgaaaaatgtggcggaagagagtcagcagaagggacaaaaggttttgagagcgaaggattggatggacgacggaacggagataaaattggaggtggaaattgacagagactcaggcgatgctttgttcgacttcaccggcaccggtctgcaagtccactccagctgcaacgcgcctccggccgttctgatggccgccctcatttactgtctccgctgtttggtcggccgtgacattccgctcaaccagggctgtctcgaaccggtcaaagtccgcgtcccccccggcaccattctcagcccttcggaaaatgccgccgtagtcgggggcaatgtgctcacttcacaacgcctttgcgacgtcattttgcgtgctttcaatgctgtggccgcttcgcagggatgcatgaacaatgtcacttttggcgattcccaattcggctattacgaaaccatcgggagaggggcgggg

SEQ ID NO: 91469 - DNA, 619 bp, Heterodera glycines
cttaattcctcattttgctatttgagttaaatcccaaaacctcaatggaagctccttcaagtttgaatgatttaaacaaatttccgacagtttcagacaacagaaaacttaacgaaaacaccgaagagccttctgagtggaacaaatgcattgaattattggacagaaagaaagagacggacgagaaaatctcacaacaagtgacacttgtggcgaatttgggcaaggcattcgacgagggcattcagcagaacgaaggcgaagaacagcgggaagaaaaggagaaggaagaggttgagaaggaggaggagaaggagcagacgccgactcattcgcaattcgaatttggcatggacagcaaacgaaagcattcttccgctcgtcaccaacagacaaacccaaaaaacaatgccaattcaacgcgtgcgcggcgttccaaacgtttgtattcgccgtctccgccgccctctctgatcagcgaaacgaatcgaaagaagaaaaaagaaaattctgcggacgaagtcggcgatttctctttgggttctctgccgaatgctccgagttcttcgctgctcaaatgggcaaagtgcctccgtcgtcgtcttcgcttttctcgagc

SEQ ID NO: 91470 - DNA, 624 bp, Heterodera glycines
tctttattgataccacctccaagacttccctaacccaatttattttgactaaattttccaaaaacataaaattatcattttttggacaaaagctgttaaaacgcacttaaattttcaaaaaattttccccggctgcagctcagagcaaaaaaaaaaaaaattagcctaccaaatgaacaaactgccaagaacaccgccgaaaatgcccaacattgcgaacggaatcagttccatgaatgtccaacgcatggaatagtccacgtgaaacagcgaagtctataaaagaagaagatacactattttttatttgctttccaagaaaacattcacctgatcacttccgaacgggttgacaaaacgaaggataacaccggcgaccaaagcgcagaaaaacgagcgccacatcgttttgagcggaaaataataactcgcctcctccagactaaaaaaaccattggtcaaagagaatgagtagggtttgtttttttaataaataagcctgttaaaccgaaatcatcacctgaacatcactcctccgattggcgcgccaaatgcaacagaaacaccggcggcagcggaagcgctcagaaattcgcgctttttcccctcatttagcccatattt

SEQ ID NO: 91471 - DNA, 640 bp, Heterodera glycines
aacacgaaaaggtgcccgcccccttcgacaaatgtcgaactgcttttgcccaaaagcagtacgttaggtcatcgtccagccacaacaacaattactgtgccaacatgtccgtgccgttgccactggctgctgctgttgaccatcattagcggcactttgatgtcggttattagcgggtccatcagcggcataagtgacagaagccgacggcaaatgccagcaagttcgtcgggcactgtaaattctgtgggcaatcaaacggcaatgtcggcatcgaacgccctttggaaggcacccgacggaacagtgggtggcaatggcagttcaattgggacggcgggcgggccgggcccgagcagtgttttggccggttcgaatgccaaagttggcggtcagagtgccaacggggaaaccggcgcgcttagcttgggcggcacacggtccgagtcgttcggctcgtctagctcaatgctgaacggtaaccaaaccgcgagtcagtccggtacttcgtcgtcaaacgctgtcggcaccggcgacgtttttgtctactcagtgggaaacggaaatttgacaaattcggcccagtcagcagtcccaaaagtggccgccgctggcatgggcggtgccaccggcaaccaat

SEQ ID NO: 91472 - DNA, 367 bp, Heterodera glycines
cgaatttgatgagaaaacgagctctcagtacttcaaaaaggcgacggaacttgccggtctttactcggacattcggggaatccgaggcgatggcaattgcttttaccgtgatgaactcaccgcccaactcgaacgctgatttgaggacgccgaggagctgaaaaggttcaatgagcttgtcaaaggttggcgtgctcgtctgatgaccgacagctgtttccacgaattgaccaccggtgacttttgccattcgatggagcaactgatgacttcgctgctcaatggcacaatgctaccccaaattctgctggacgacctcaacaaggacgggattgccgattattacgtggtcttcattcggctgatg

SEQ ID NO: 91473 - DNA, 656 bp, Heterodera glycines
  unsure (1)..(656): unsure at all n locations
caacggtccatccagcagaacacctcgcgattgaacttgcagaaaaggcgtgggaatgactaaggggcagggaacaaattggtggtaatgtttggaaactggacgaatgaatgaatctgccaccttttgcattgaagactccaccattgtttgcaagccgaaccatttaaatttgacggtgaccactttgtacgcgcacatcaccggcttgcagttggtctgccactgctgcttcaacggaccacggcctgttttcatggagcggaatgtcgacggtctggtgttgtcaaggatgtcggctgcacgcagaaactcgttgtcgttggcgatgttgatgcgcaccaccttgcgttccttcagcacatccttgtgatgatgatgatcattccatccatacattttttgtggtgccgcggtcgctcaagtgcattgtttcaatccgaatcagaaagtcgtccttcatatagtccgggttggtcacctccgttttgcagtacggaaaggcgttccacgaccgttcatgcagcgntgtcgaacctcttggcataatcgtcctcagaaaagcaggcacttttctggagaaaaaaagacgaccaaattagcattaattacatttccgcgcctccctcgaaaactcacgtatctaagtggataat

SEQ ID NO: 91474 - DNA, 164 bp, Heterodera glycines
ctttttacttcgccgatgtttgcgcggggcccggcggatttagcgaatatatgttgtggcggaaagccttttacaacgccaagggattcggctttactttaacaggaaaggacgatttcaaattggaaagattcaaagccgcttcatctgattactttgagaca

SEQ ID NO: 91475 - DNA, 509 bp, Heterodera glycines
acaacatctgtgtatgagttcttacgcccgactaattttcttaaatttggaaaaaatcaagtagttgatgaaaaatcatagataaaaatcaatgattttcaaaatctgagttcagattcatgaccagcgcattttttaagcctagaaaaaatacctgcgaatttttaacattttaaacaacgatcatttcagttctatacaaaatacaacctttgtgtatttgacgaataaattgaatttatcgaaggatttatgagaacaaaggtaaggagaaatgctgggaattcacagggaaagtcattaaaaataagcattgtcttctataagcacagaaaagttgcgaaaatcatcgaggacagcgcaaatagaagggaaaaggaagcgccggtgggcggcgaaagtgcggagttgcagggaaaggtcgcctgaagaatggggggagggtaaccgtagaatattattcagtccgttgcagatgatttattccgtacaaggtttccccccccccc

SEQ ID NO: 91476 - DNA, 606 bp, Heterodera glycines
gttcggaccagcagagttgttgcgaattgaaaaataaaatgcaaaaaatgaaatacgaaaaaaattaaaataaaatacgaaacacaaacgaaaaacgaaacgcgaaaggcaaaacacaaaatttgtttttgaaaaattttaaaattttagaataattctaaaatataatcaataaagaaatattcgagatcaattattttcacatttttaatcaaattccataaaatttagaagttgatattattgttattattgttttttacttttaaagttctcctaacatttccttaatcaaggtgtgatctgctaacaaattttatatttttttgccgcataatttttcctaaatttttgtggagtaggaccgaaaggtcatgcttttttgaaactagccaaattttttgcaattaaaaaacaaaatgcgaaacacgaaatgatcaacatccctcccgaccccactcaagcccagcagaaggacaatattttcagtattgtcggccgccaagcacttaacaggccggcgttcaccgacacacctttttggcgatttgttctgcccaaaatatcggcccattttatggtcttccaactaactttttttcactg

SEQ ID NO: 91477 - DNA, 217 bp, Heterodera glycines
caaccgccgcttaagtcccattccaagcggtttgcgttaccagggaagaattgaaaaattttttcatgaatatctcaaaaagtaaaatttaatttttgatgtgaaattaaatcaaatttttaatatcaactagcgcagatgcgctcgcttcgctcgcgcacctcgcattcctttttctttttctctctctctctcccgtctttttatctcttctctt

SEQ ID NO: 91478 - DNA, 560 bp, Heterodera glycines
caattttcgcagaatgcttcgagaaatctattagctccgcaatttccttgctcaacgtctcaattttcaaacgtcgcacattatcacccttcttttaatccaacaattgcaagcaacatttacataaacccatctgttttcaatacttctcacgaccagtcctttgttctcatcaatcagttacaacacctttcctcaaaaagcagccaaaattggcatttgatggtcgatgatttcgttaaaaaaactatttcggttcctccacgcaattacccgaagaatcgttccccatcctccgattcttcctttcccgtttctcacccttcgacgcgatcgaacagtcgaaattcccgaaagacatcgccaccgacacgcaaaaggcgtttgaagcacaatatttcacaaggcaaaagaacgcaaagacagacgaaagaggcgcatttatcaaagcaaacgatggaatgtgcgaaggcaattggacttgacagtgactacctaaggaaaatcgaagaacaaaagaaactgagagaagaaattgcgcgcaaaaaaaaccaacaccg

SEQ ID NO: 91479 - DNA, 635 bp, Heterodera glycines
ctggagatattccgttggcagggctcgcgaactttactctgagatgacttccattggcttaatccccttcgaggaagtgttcaattcgctgctttcggctcaaattcccttcaatagttcgtcgtcctctttcgacgtgactcattggctgcatgaaatgtctcgcctcggagtgcgcccatcggttaaaacgttcaatgccgctttgtcatcccttttgcaaatcaaagaaaagggagcaaattcatttgactatgggacggaagaaatggcagcagctgtaactccttcgactgaagaatcatcatacgataaagaacacctgtggaaaaccgcgtctgatttagtccatgaaatgcgttcgcttggaattgaaccgactttggcgacattttcttacactttgaaattggcaccaacaaaaatgagtttggatgctctgcttaatgagattttgacacgattggagtacaagctttcacgctccgaaccgatcgaacgtgttggggatgatgatgcaattttctaccgaaatgccatttcaatggcgcgcatactgaacaacgaattacagatggatcgtctggttaaaatttacagatccgaacacaacaaagtctttttcgagaactatg

SEQ ID NO: 91480 - DNA, 587 bp, Heterodera glycines
gagggcaagaattcgggggttgtctacagcgagatgcaggcgcgagactccgaaatggactcgatgttggacaaaaaaagaaaggagctgttctaccccgcgggaagcagttacggggcgatgacaggcggtactctctctgacatccgcgaactgtgctcgctggaacgggtgcgaaactttcacaagaacttttaccatctcagtaacatgtacattacggtttgtggcaaaatcgaccaccaacagctgctgaatgccatcgaaccgattgagcaggagaacctcgacgccattccccggcagttcgccacgccttttcaagcgcgcactccgccactgactgagcccagaacggcgcggattgtgtgtccatccgacgacgagtcaatcggcatggtcgaaatgtcgtggcacggaccgcccggattcgacttcaaaacaacgcaagcactgacgattctgttcgactacctgacggacacagcagttgcgccgttgcgcaaggacttcgtgcaaattgaagaccctttttgcacatcagttagcttctgcttgatggagcaacgggactgcgaaattgttgc

SEQ ID NO: 91481 - DNA, 515 bp, Heterodera glycines
ctctctctccccctctctctctctctctccctttctctctctctctctctccatttgcctccgtttccatttcccaatataggcaattattggcagtttaattaaattgcatcgctaacttttcccgtccaaccaattaaattagccaatcagtcgcattccgtcgctaatttgtcttttgaaacaatgcactcattcgcctgctgccgtttcgccgccgtgccattgtttcctccgtgccaatagtttcgagttcactcctcagccgatggccaatgctttggctttgtgccgtgtcctttggcccattctcttcgcttcttctttcgctcaatccaacacttctccgtccaatttccccccaaattcgttgcaaaatcacaacaaagtcaatgactgtgtgtacaattcgagtcaccgcaaaagtgtgttgactgacataatgaaaggctatgacaaaactgtggtgccatcaaatgaaagtgtgacggttcaagtggagctgaccgtacagg

SEQ ID NO: 91482 - DNA, 580 bp, Heterodera glycines
ggacagtgccgggcgcaccattccctcgggcggatttgccttcgtcgacggcactctccactcggaccacttcattttccaggcatttcgtccatttccttctgtctgctggtcagactgatcttccgtttagggcggtccggacccgatcattcgtggaatgatgtctcaacagttgaaaaggccacaacgattgacgcggacgatcaccgaacaaatgtttggcaccaccgacttgggcacaattaacatccaacgagggcgcgaccacggggttcgattggcgaacagcagtgctcagttggccaaactgtgacttaagtgccaatttttgtcaggtgccgtcgtacatgcgctttcggcaattgtgcgggctttccaccgcgacgacatttgaccaagtcgagcaaatcaataaagcaacaataatcgaatggcattttgatttggcactttgtttagctgagtcgtgagataatgagtgtcgaggcacgacagaatttgcagaggatatacggcacgccaggttggtactgttcactcacttattgccagtgcgtacatttgtttgaccttttca

SEQ ID NO: 91483 - DNA, 387 bp, Heterodera glycines
gtccgaatgcgccgtcatcgtcaagaaggcccaattttggcaccgtgccgagacggaggcggcaaagcaggcggctcagtttgcgacgatttgtgccgtcagcgaatcgcagaggaaggcaacatttcacagcgtatcagcagcggacgaagtgccggggatcgctctaaacactcaagcacttcctcgtggcctgacgaattgtcggcaccgaccggtgccgaccagcaattggacatcggcacgggacatgtccttctcgcatttttgaaggagcacatggaaaagccgggcgaagtcagcaaagagtgggagtcggtgaaggactacgcgaacgcagcaggcgaagcgacggtcgcacggcgagcggaaaatgcggcgaaaaat

SEQ ID NO: 91484 - DNA, 637 bp, Heterodera glycines
atttaattaacgtttttaacattaaatgtcggattgtcagtgccatcagcgtggttctattcacctaattattggacccatgttcagcggaaaaacgactgaattgttccgattggctcagcggtacattcttgccggacggaaagtcgcagtggttaaatatgcgctcgacacgcgttacgacgagtcgcacgcatgcacacacgacaaacgcaaaatggaggcgattagtgcgacgaaaatggaagacgcattcgaggaactgaacaaattcgatgtcattggcatcgacgagggccaatttttcaaagacatcgtcaaatacgcgcaagaattggcaaacactggcaaaacagtgatcattgctgcactgaatggcgattaccggcaggagcccttccaaaatgtggcgatgctcattcctttggctgagaaaattgagaaactaagcgcagtttgccgctgtggacagtccgcctcattcacatttcgaatgtcggaatgcacgaagcatgtcatactgtaacatgttaatgatgcattattaatccatgctgaacaaccataattttgcattttcatgtaagaccattttggggtaaacccaacttatccatacccaacgcatccataccca

SEQ ID NO: 91485 - DNA, 661 bp, Heterodera glycines
gggatttatgccgttggaactttatcaagaagttgagaagaatgccaaccaattgcccaaataccaaaggacggattacctgtgcagacgttgctatttgctgaaggagcacaatttcttgttgaatcttaatgtgtctccggtggattacgagtcaatgatgggacatctcaaaatggtccacgaggctctgattttgttgattgttgacatgaccgacatggaggcgtcaatcaaccggcagttgccctcaatcattgggaccaaaaaaccgatgattgtggttggcaataaaattgaccttttgccccccgacttccacaagggttatttgcgccattttctcgcctctctcaaggcggccatgcacaaagccggagtcgcacagcaattcaacattctcaaatacttgctgttgagtgctaaaacgggatttggcgttgaggatctgatcacgaatatttatcaaaaatgggtcagtccgcggggctcaattcgaagtgacatttacgtggtcgggtcgacaaatgcgggaaaatctacacttttcaacgccttccttcagtccgatttgtgcaaagtgagggccatggatttggtggagagagtgaccacttcaatttggcccggcacgacttcttcgctgctcaaatttccgata

SEQ ID NO: 91486 - DNA, 457 bp, Heterodera glycines
gtccaattatggagcgatgtcaccgaccaagagtgtccaggaagtgcaacccgtggcattgtcttggttttttctcaccgttatccatgccaagtcgggacggaaaattcttgacaatgtgtccggaatggacgacgcgggccaactcgtggcactgatgggcgccagcggggcgggtaaaacaacgctgctgaacacgttactcaaccgatatctgaagagtctgagcgtggagggtcaagtgctggtcaacggacatttcctggggcggtccatcacttacgtcagagggtacgtgcaacaggacgacttgttcatgggcacgctgacggtgaaggagcatctgatgaggcagggacagcttcgcatggacggacacttcaaactgtcgatgcgcaaacgcgtggatgagatcattgatgagcctgggctgccaaagtgtccgccggggcgtatt

SEQ ID NO: 91487 - DNA, 486 bp, Heterodera glycines
aatgcacaaagcgttcaccgacggagtgccctttccggtgcttaaagctctcgaatacttttctatgggccaacaatcattcgcatgaggacgacagtttcggaacgcaggcaacttcactggcacaatgctttgggccgccttcttcgtgtggcttgtccagtgccttttgctgctctttttgccgcaccattttgccaaggccggcatattctgtggcctgttgacattgttggcggatgtgctgttcctggtgttttgcccgtccgatctgctgatccctttcccgtctgctgatgcccccgcatcaatcgcttttctccattttcgccttggtgcctgcttttggatgagcatcgcagcagccattctcgagttgctcttctctgccactctgtgttctctgcaatcacttcgtctgtactctctgaacaccgttctttctgcttctctggacaactctgtcggcccaccaaagtgccgttt

SEQ ID NO: 91488 - DNA, 585 bp, Heterodera glycines
aacgaactgctcccagttgggtggatgataaaaatatggggttttgaggtcgctggtcttcaaaattgaaaaactaagttgttttgacttattgtttggttggggttagacagaattggccaaaatttcaattgtttaggtgtacaaggaacaagttgagggagcgcctacgcctatcaatttgaacgttcaatttggcaccaatgcgcgcgagctcatttttgacatggacgattcaatagccgtggtaaaagagaagatccatcgtgcgtggccagtgacgccagtgccggctcaaatgttgctttacttcgcacgtatggttaatttcataaattgcttttaacaataaacacccacccgttcaggtagactcctcgcggactcaaaaaggctcagggacattaacatctccaaagaccagatgctggacgtgcgaaaagatgtgggagaaccagtgacggattgatcgcccttttggagattattgaatggacaattgatctcttctcgttaatttgatgtttctttccgacgaaaatatttatttgtttgttttgccttcagtcggtataaaattcaaat

SEQ ID NO: 91489 - DNA, 551 bp, Heterodera glycines
gccgacaccacgacgtgagcccaatcagaagaatggacagcacgggacaagggacatcggcggcgagcggaacggaagaaaagatcgtgaaaattcgaaaactgttgctgcaggccgccgacttattgggagaaatggcagacgaattgttcccgtataagaaatagggggacagcaaaaggaatatcaaaataacaaaaaaaaacaaaatacaaaaaataattaattacatacattaaccattatttttgctgcccccccccctttaattgattgcaaatgaaatgtttgggtaaatgactgccctttgccttcagtcattttctctctcccttttcacatctcacacgttaaaatgtctcgccctctctttttctctcattctattttttcgttccatttccttttcttcatctctatctctctctctctcttcatctgtctttcgttttcgcttgcctgaggaaatgccaatactcaccaatcacggcggacggcacaacaaagcacggcacaatcaaaattccaaccaccaaaacaacggacatcag

SEQ ID NO: 91490 - DNA, 574 bp, Heterodera glycines
gccaagtggcgcgaaatttgccaattacccgccgcttttgacctcctcaattttctcgcctccgaaactgttcagctcagatggaaatccgacggattgttggccaacaaattggcaatggaaaatggcgccattttatttgccgtcaaaaacactccgttcgttgtcgaccccagcggcacagtgtgcactttcctggccaatcacttcaaaggcaattcgacagaaattttacgagcgaatcaaactgatttaatgaccaaaatcgaattgggcgtgcgctttgggaagactttgataattgacgaaatcgacgaacgaattgagccggcattggtccctctcctaaggagggactttcacacaattggcgcgcgattggccgtacaattgggcgaaaaacaggtcgatttcaacgaccaatttcggcttttcctctgctctcgaaatgagcattgccatttggcctctcacgtcagtgccgtggtctccgagatcaatttctccgttactcgatccggcttggcctcccaatttctgtcattggccattgaattggaaaagcccgaactgg

SEQ ID NO: 91491 - DNA, 623 bp, Heterodera glycines
aagttgatcaatttcatcctgaattgactgttttttctgttcatcattcaaaaattgttgttgttttcttaattcgcgaatttttttgtaatcgtcttgaagcccttcatattttttatgaatatgttcccagtaatctgttggatgactatcaaaaaatggctcaacgtaatccttattttgttcatagctcgtcctctcatattcttcagctgatatttgtaaatcttttttcaatacagccttgttaatatcattcaaattttttcttctgtgtttcattgctgttctcatctttagtgctgtttcatttagttcttgaattgttctaccatctgttactccttggtattttttcatatggtcttgaatgttgaataaatctcttattaattctaatcgaacttcatttaatttctccctatagttaacagaatacatttcgaggaattcttgaccagttctctcctccttttcctccttcccgtcatctctttgccttgctgcttcttcaagcgcctctattcttgctttcttagtcaatgattgattttggagagggtcaatttcctcatcctctatttttctcttcctatgcgtgtccgtttcatcatcacgttctc

SEQ ID NO: 91492 - DNA, 487 bp, Heterodera glycines
aaatcattgactttaaacttcggtttgtttccactacttgtacttacaacttattgcttatttaaaaacaaaaatttctttatattttttattcctttttttcgttcattaactgcacacagaagagacgcaaataacaaattgtgtatgtgtcagaattatgtataaaacagatggattaaattatcttcaaaaaattttgttaaaaccgatcacaattagtaaatgaatgatgggacagcaattgctttttgttaatgtcccgaactctacaaaaccatcgattagtagtaattaacggttaattagggggaattgcttaattcgaaggaaggcaaaaaaagtgtaatttccgcagcgaaaaataacaattatactacaattttgacggatatataaaaatcctccaattatcccatggcgatgtttcacgcgacggccaaacgggtcgaactccgtctcctttgccaacatttctttggtccac

SEQ ID NO: 91493 - DNA, 581 bp, Heterodera glycines
ttttgttggaaaaacatgactttgatgccgcattgaaacactatgaacaaattttggccacaaacgaacatagcccaagagcactttttggccgtggacgtctccaccaattgaaggccgaatttggagctgaacatgatgatgattcggagaaatttattaaaatggcattgtccgattacaattcattgttggaaaatgaagacaccccaaatgaactattcaagatgactgtgcaatattttgtggaatgtgcaagacaaatgggtggctatcatcataaaattttgcaggcccaaagggcactggtggaccgatttccggacgacgcggacataaaatgcgattttggcgccacatggctgggcatggccaggcccgagaaagcagcggacatttttcgaaatgtgttggacaatgagccgggccatgcgctcgctttggcctatttgggctacatccaaaaagtgcatgaggacgaattggaacgccgggtgcacgcgttgcgccgcgcaatggccacgggcgacgaacgcgtgacaggagacgcgcgaatttatttccccctgggcgatggaatt

SEQ ID NO: 91494 - DNA, 618 bp, Heterodera glycines
gtacatcagccagtccaagctggacgacacgctggatgttctgctcagcgacatgggcaccatcatcaaggagaagctgttgtccatcatggatctgacgttgggccgactggcacgttatgacgagggaaatccaatcggtgcacttctgtcaatggcatcgacaaagccgaacacattgttcaacaagatgaggaatttggtgggcgaacagtccagcaatatgcttggcaacatcgccggatgctgcggcggcgccggcactcaactctcgtcccaacaccgaccgtccacggcacaattccaccatttcaacgcgggggcatcggccggaggcggcaccgccgccggggccaacaacagtgcccagcttggccaacagtacgtgaacttcttgcgcgcctcctctgaacagcttcagcaagtgattgctgatgaagtgtgggtgaaccgactgttggaagaatggtatgatgggcaaacgcaaatgctgaacgaatggcttacggaaaggcttcaacaatcactttccaacacgcaactcaccagtttattgctcattgtaaagaaaatttattccgactttgaactgcacggcattgacgaggaacggctgaa

SEQ ID NO: 91495 - DNA, 634 bp, Heterodera glycines
ttgtcccaccaaaatggcaacggatggcgtagaagaagttcatattgaaccaaaaggtctgctcggattgctcggtgttccccccggcgctcgtgccatcgttgtgttcgcgcacggcagcggaagtggacgactgagtccgcgtaacactcacgtggcgtccgaactgcgccgctctggacttgccacctttctattggatttgctgacgccggaagaggaggcggaccgtcgcaacgtttttgattttcctttgctggccaaacgtcttcaactcgcgtccgaatggcttcgctcacgtccaaacacagcaacgctttcccagggatatttcggagcgagcactggcgccggtgccgcgttgacagccgctgccgcactcactgacacttcgacgcccatcggcgcggttgtgtcgcgtggcggtcgtcctgaccttgcaatgaatgtgttggatcgcgtgtgcgcgccaacgcttctcctcgtgggcggcttggacggccaagtgatcggaatgaatgaacgcgcgttgaacgcattggtcaactgcaagcataagaaactgcacattgtgccaggggcaacccatcttttcgaagagcctggcacaatggaagaagttgtacgccttgca

SEQ ID NO: 91496 - DNA, 495 bp, Heterodera glycines
cttcaacgtgccctggaggcttttgcggtagccaatcagtccaaatttgccaacagttcggcccattcggcaccgtccattgtcggcagccctttgatccctccgcctcttgcgcacagccaatcgcaacaattggccactaatggcgcaacagcagcagcaaccacaatgagcagtgtggagcaacagctgctgtctctgctcaacttttcccagctgagcagcaaaaatagcaacactttgtgctcctttgctcctcacaatttgctttcttccaatggcttttgcctttcctccgcgacgataacggcgacaacgacaacggcaccaacaatagtttctgaagcgacgcagcaaaataatgccatcgtcgacaaagtcaacgaacaaacggacgaagcattggcaaactccgcctccgcagctgctgacccatcggtgccgattgatctttcctccaaccaacagcagtcgcttctcctctcatccgccccc

SEQ ID NO: 91497 - DNA, 581 bp, Heterodera glycines
ctcagaacagagggctgaccaaagtgggaaggggtgagcatcaatttgagattgcccgaggggcgatttaaaatcgaaaaagcaacgattaggaaccaggagatcaggagaatattgcgaaggcaagaagcggcggcgcaagcggcggccgcggaaaaagcgaagggaccgctgacgacgcggccaccgaaggaagcggaggcgaaaaggaagatcagcgaattggcacggaaagcgaacgcttcgaaattggcggtggcgggcgcaacggaacagccaaaggcgggctcatcatcggcagaaaagccgatgctgcgagagaaagcgcgcgacatggaaagggaggcgatgaagccgaaggagacgaacacggcggaaaaggtacttctgtcgcagagactgcgcgagacgggcgtcgagtcgggagtggcggcgagaagggccaaatttggggacaaagcggcggagcccgcgggggaaaaacgcggcgaaaaggcagtgaaaacggcaccggacagagaggagaagaaagctcaacatactactgacgaaacagcggaaaagtcgaagtttgttccgag

SEQ ID NO: 91498 - DNA, 524 bp, Heterodera glycines
ttcacattttcaaaataaatattgattaaaggtttcggttaaacgccatggcatttgaaaaaattgtacaaataaaaaaccaaattttaattataaaatagcagtcgaaaaaaatgaatgaaatttctgcagttcacttttaattgggtactaaaatatttatataaaaagatcggaatagtagagttcaattctggtacgattcacactttaataaaacagccctttttaattcatttacaatttttttttataaaaaaccaaatttataataaattagtacagggttatattgatcaaatctctatttttctcattttattttgctaacaaaatgattatgtaaatgggtcggcatcgtagggtaagactctgatgtgattcatactttaaaaaacagataaatttttagaaatttgttgacaatttttaatattagcttcaaaatatgccatccacattttcaaaataaatattgattaaaggtttcggttaaacgcaatggcatttgaaaaaattgtaca

SEQ ID NO: 91499 - DNA, 256 bp, Heterodera glycines
  unsure (1)..(256): unsure at all n locations
gaccgagtcggacagtcgcatttgggcctacaaattcgttgcctattcggccgtcactttctccatcgtggccgttctctctgttgtggtcactctgcccatggtgtacaattacgtagcccacgttcggcgacagatgcagcacgagctcggcttttgcaagggctcagccaaggacatttacgtggaggtgaaccatatgaagtcgacgcccgacatggacttgtgngttcaccgaactgctcgtcaaactggc

SEQ ID NO: 91500 - DNA, 274 bp, Heterodera glycines
agacaaaggttgcttcgacaaattggcggagctcaacgactctgtgaactgtgcattgtgtgtggaaaatctgtcggaggatttcgtctaacgattcgacttggtcgttctcaccgatgcgcccttttccactcagactgaagtgaacggttggatgcgcaaccctcgcaaaatgatcaactcggaagacgcgtttggtcgtttctcacaagcatctgtggactagggggactaattctttgtgcacgattccgacggggagacgtgcaaagag

SEQ ID NO: 91501 - DNA, 515 bp, Heterodera glycines
gtcagagtccagtcaacgccggcgtgtctgaggtcggcgtggatttcttggacaattagccgagtcagagatgagtggcggtcgagaaggacgggagaggcgagagtgggcggaccgttcgcgtgcaggagccgggttttgaggcacaaaaggccatcctcattgaaaacagtggggtgtttgtcgtagccgtcgagcgagcttcgttggtcttgtcggatgaggaaagtcctggctgctctgaacgtttttcccgtcggagggccactccgtgggattgacgaaatgccgcttctgagccattttggtcgacgacgcccgatgaattggaggacgagaatggtcgttccgagaagggtcagcatagtgctgaaacgagccggatcaatgaggggagggggcagcggactttgtttggccatgagggtcttggtctccgattcttcaaacgggagatcggcggaaggggagtcggctggcgtcgcgaacgttaactcgtcgggccattccgtttc

SEQ ID NO: 91502 - DNA, 465 bp, Heterodera glycines
ggcgtttgaaccaataacagttgtatttttgtgatgacagctcttactccagcagatgtgcgtgagcaacatttggcccttcgggtgatgcgactgtccaatcccaaatttcatgagaccatttgcttgggccgcgatccggccgatcctttctcaatggctatttgtgattcgattggcaaattgagtggtcaaagttctgtcgatttgccgcttgattcctacttaattgcaccacatgcgatgttttttttttatctcggggaaatgttcactctttacatttcaatcatcaacattagctctgtcatttgcaaagaaatagccattaaggtcgacattcaaactcagaatcagcgcgtctctctcgaagaactggccttcgccggaattgcccttgagccgaaccaacaaattggccaaattttgaaacatgacatccgggaacttaggcaacacaatctt

SEQ ID NO: 91503 - DNA, 295 bp, Heterodera glycines
ggacgcaataaaataaaataaattatttcacactcaaataattcatcttaactttgtcttcttcttttgcttcgacaataaaaaaaaacaacaacacaacgccaacaaaggttctctcaaatttttttttgtcgtccaccgaaaaaatgatgggaattgagtgcgttcggagtacggcgccgaggccgtgggacagcgaaagtgaacgctttcatcaagttcaccattcttccgacggctatggacgtgatggcattggcacgcacccgccaatttcaggtgacgcaactgccat

SEQ ID NO: 91504 - DNA, 619 bp, Heterodera glycines
gtttaacattgagtatttttgtttgaatggacgacgaaaactttcatcaagcgaatatggaacgagtgagagaggacgaagatgaaaaaattgcgattggtcgccaaacggaagatggcgaaacggagccaaaggcggagagagagcgcgagaggaaaagcgacagagagagggagcgcaagaagaagagcaagcggacttcgcgagaccgaagccggtcgaagtcgcgggaacgcaaacgatcactttaacgccgacgaagtcgctcgcggtcgaaggaacgccaccgcgagagagagcgaagccgagaaaaggaaaggggcgaaaagaggtcgaaagtgaagagcaacaaatattgggatgtgccacccgctggctacgaacacatgagcccgaaggagtacaaagaactccaagtagtggtcgtccattagaattgcgcaagggtgctgaatcgatggattttttagcatttagcactcaatttggtcgtctcgtcgtttttcagatttaagatactccgccaaatgttaatcgatatgaaagtcttttaggttttaggggaaaacggtgtcctgctgcatttttggattcatcccaacccaatagcttatagggt

SEQ ID NO: 91505 - DNA, 642 bp, Heterodera glycines
aaggaagaccgcaaagctcaactggcctcgcagtacatgcagcgcttggccgcgatgcgcatgcagaaccctgctggcctcatggggacaatgtatgcgcctgccagcggtggatttttcctgccacaggccatccagaaccaacgtgctgcgccgttcatgcaaacaccgaatctgtccggggcacaaatgcgtggcgctgtccctcgctggaacaatatgggcggtttcaatcatccaatgcaaggctacatgatgggtccagctggtggcggtcagttcggcggcgctaaccaaattgctcgtggaggacctcgctccggtggtggcggaggaatgcgtcagtacgggggacaaccgcgccagcaacagaaccgcatgcctggtatgggcggaggccatcagcagcaaggaatgcgttaccagggacagccgagaggaatgcaacaacaacagcaggctcaacaaccacaaattgcctattcgtcgtatccgcagcagcagagccgtggcggcatagcaccgcaaatgggtggcggagcgagtggcggtggagccaacgctggccatgtgatcacttcttcaacacaccaggagccgttgaacacacagctgcttaccgaggctaacataaccgcacaa

SEQ ID NO: 91506 - DNA, 548 bp, Heterodera glycines
tgactttttacatatatcctaaccaaaattgttcgagaattctgacttcttcctggttactcatggaatttttgaggcctcatatcgaaagatggaaaaaaatatttaaaatactgcttaacgagttgatcgatctgcacaaactctgtaaggaagaaatcccttgttttacatttaccgccctggcagaaaaggacaaaaactgcaatgcctttgttgccgcgttactggaactggttaaagaggacgcttatgcatctatcgacggatctggctcgaatgcgttgctcatccgtctccgcgaactttacccaagtgttattgaaactcttgcgtggactggccttcaaacactcaatgccgaactttttccatcaacacagcgtatggtgcaagcacttcgcgagttaattgaaacgacgggactttattttggagccgttcccaaggcgtcctcatcaaaggaacatttttaccattctgtggcttgcgttggcgatgttttgccgaacgttgatgaccatcctccgccacagcttaagaaaatt

SEQ ID NO: 91507 - DNA, 522 bp, Heterodera glycines
tggacaaaatgctaaaccaaaaggacaatttcacattgaaggagcttacaaatcagacagatgaagagaaacagctttttcagctcatcaatgaagacaaaattgaggaagcagaggaattggttaagagtggcaaagtgcgtgtgaattcgctggacaacagcgggatgaacgcgttggaccacgcgtgtttcaagggcaacgaagcgttggtcgagtttttgcttggaaatgggtcggactcggacaactcgagcgcactcggacggatacacggcactgatgttcgcagcactcgcaggtaacggccgaatatgtcaactattgttggatgctggggcaaatgcgcatgcgcagaacaacattggcaaaacagcagccgaactcgcagcttttgtagggcaacacgaatgcgtgagcatcatctccaattacatcagtttgcgcgacgtggacgcgattctgcatccccagggggcggacagtgccgtcctttacccgcctgagttggccaaattcatc

SEQ ID NO: 91508 - DNA, 287 bp, Heterodera glycines
gaaagatgttaaaaaaatcagtcaccacatcctcctgcaccctcgacaccaaacatttttggtcgcccctgccgtgcaaggcattagcgatacgatcaaaagctgcacgctggtcggcattaaaacaacgtatctgcccgagcaccaattgaacaggagttcgttgtttatgctgttcaacaccaaagaaatcagcgagaagtcgagcttcactcagaaccgaggattgctgagcaaatgaatagttttatttcaacccatgtaaaccaatttgactaagaaataaa

SEQ ID NO: 91509 - DNA, 612 bp, Heterodera glycines
atgcgtactgtagcaacaaataccgtatagccgcgccgcgcgtcagacactttgatttttctaccataccgtatctttaaacagccaaacttctctcgtctaccgtacctgcctgcgtctaccgtaataaatcgaattttaaaattaattttttgtttttcgacgccagttaacccaccaattctctgctaacactcgctgaacccaggccaaacatggccattgtcgtggccacgcttgacgctctgcgctccgccgcttcggctggcggccgctcgttaggcttgtcattgcccatggcattgctgcttctcacgctccttttttggcattggcaccgcgggcgccgggctcatcggcacacattccctccggggccaacgccactgccgttgatcgggaatttggcgcaagtaagtttgaaatggtctaagaggaggggggacaaaatgccaaaacgggagggagaggtgggacaaaatgccaaaaagggtgggacataaacaaagacaattctcggcaagcaaaaatgccaaaagcccatctgagaagtggtgtagagtttgacttatgttaggtctaattttaaagagttaaatttttgtagatcga

SEQ ID NO: 91510 - DNA, 394 bp, Heterodera glycines
cctggagaacattcgccgaattgaccaattcgccagaaaagtgatcgaacattgcacccatgcggcactggtccatttcagcattgagcagaacaactggctgaagacggaggaggacggcccgctgttcatctacgaacggcttgaccaaccgctgaactcaatgattgttttttttcgacaggcgcccaaaaaatatgtggaacccatcacggacgggatgcagctgcgctaagaaccgccctacatttttgtgcaacgcgaagatggctgtattcgcggactttgggcgttcggcgaaaacaaatgcgaaccagtttttgacactccgacgaatgtgagcatggagctgaaaaagaaaagtgccggagccaccgccagcagccccaaaaac

SEQ ID NO: 91511 - DNA, 466 bp, Heterodera glycines
tgtcgttgatcactccaaactcacaaaagcgacagttttgcacttggaagcgtcgactgtccacgtaaatgcattcgtagaaatgctttggttccaaatgcgacacgcaaatctccaattttaagtgtgtttgcctgtgccgtgttcccaaaatgccaaactcactgttccggtctgctttcggttttcttgctgatcggtgctaatccgattgatccccccgtgcagctttgagttctgcgactttccttcccttgcacaaatcaaatcgcaattcggccccataaaataatccaaacactgcacggaatattccaacttcagccttaagcaatcggaagctttaccctgacaactctctcaatgctttttcttacgtgctttgtgtgtcgtatcggcccacaaattcattttccaatgggaaagtcggctccattgagctggacgggacattgtcgccgagggg

SEQ ID NO: 91512 - DNA, 235 bp, Heterodera glycines
atttgaagtgatccatcaattcctttccgatggctttgaattgaatcaaatccatgacgccgaacctaacatttcggatttccacccgattgccgacagtttgcaactttccaaccagccaaaaatgtgcctgccggaaagtgaaatagagcacacattcactggtgacctcatcgaactgatcggcacttctctctgctcaattagtctcgagcattggactgaagtcatacgc

SEQ ID NO: 91513 - DNA, 493 bp, Heterodera glycines
attgactttgatatgtataaaaagcaaaaaaataattaaaaaatgaatttacatgtaggggacccgaacctagtgttttaaaaacgatgacaagcgcactaccgatataccaatggacaattcgcaaagaagcaaataattatttaatttgtttattcattaaaaaagtttggcacgtcataattcggcactcagactcatttcgcagaaaataaaaacatttttcttaagaacccatgggtgctctatccacccaccaaatttcatttggaaatcccacggacacctggggaccttcctttgtcaggaaaactactcctgaggtgcggaaatggcaaaaaaatgttttttgtaccggttgaaaattcgaaaaattgaacaaaatggggcacttctaaccttttaaaatggtcaaaaccggacaaatttgatatcattcgacagctattgatgagtaacgtttaaaaatcaaagaataaagtcaaaccgacac

SEQ ID NO: 91514 - DNA, 471 bp, Heterodera glycines
gagagaactagtctctgggggtagcattcattttgaggtgctttgagtcataacggccgcttttcaaaaaactcattggggtcgtccgctttcggctaaatagtgcacctcggcaaaaggggcggcgtttgagcgacgattctctgggggtagcattcattttgaggtgctttgtttgagtcatacggccgcttttcaaaaaactcattggggtcgtccgctttcggctaaatagtgcacctcggaaaaaggggcggcgtttgagcgacgattctctgggggtagcattcattttgaggtgctttgagtcataacggccgcttttcaaaaaactcattggggtcgtccgctttcggctaaatagtgcacctcagcaaaaagggcggcgtttgagcgacgattctctgagggtagcattcattttgaggtgctttgagtcataacggccgcttttcaaaaaactcattgggg

SEQ ID NO: 91515 - DNA, 560 bp, Heterodera glycines
gggcgagcagttcaccgtttcccagcaaaccaagacggatgctcagctgagtctgatggaaaccgcggtggacatcaaagtcgaaaatttcgacatttctgctgatggccgtcaactgtttaacaaagcctcgctcactatcgcaatcggaaggcgttatgggctggtcggacccaatggaatgggcaagacgacgctgctcaaacacatcgctgcccgcaaattggcaattccgccaaacattgacattttatattgtgaacaggagatcgaagctgacaaaacatcggccattgagacggtccttcgctcggacaaagtgcggacggaacttttggagcgcgaaaaggcattgataattcaattggaagcgggagacatttccgcggggggagaaactgcaagaagtgaccagcgaactgaagaacatcggcgctgaggcggcggagccgagggcacggcgaattttggccggacttggctttaacaaacaaatgcaggaaaaggcgggggaagacttttccggggggtggcgaatgcgcgtctctttggccagggcc

SEQ ID NO: 91516 - DNA, 636 bp, Heterodera glycines
cccaattcaacacgaattacgcccattgtgacacgtaccccgaacaactttggatccccaggggggccacaacgcaaatactcattgcgtcatgcagatttcgaagccgcgctcgactgcccgtgctgacttatttctatgggaataacggagcagcgttgggcagatcgtcacagacattggccggtttcagtgcgcgatgtttggaggacgaaagtttgatggaggtgatcatggcgacgaatccgttcagcacacacctctatttgatcgacacccgaccgagggtaaacgcaatggtcaacaaagtgcagggcaaaggctttgaagacacgcgcaattacacgaacattcagttccattttttcgacattgagaacattcatgtgatgcgagcaagtctcaacaaactgctggaagcatgccaacggactcaaacaatgacccaatatttgaaaattgttgatgcttgcgggtggctgaggcatttgaaaacactgatcgactgcagtgtgtttatcgcagagtcaattttgcgcggaatctcttgtgatattcactgctcggatggatgggaccgcacttcacaaacagtttcattggcacaattggtcatcgaccctttctacagaacag

SEQ ID NO: 91517 - DNA, 434 bp, Heterodera glycines
catggaccacgaatcgactaactgaagttcaagctgttcagcagcagcacccatcgacgactgttcatcatcagcatcatcatcgtcgtcgtcgtcgtccattttgccgctgggcatttcgcgcatcattaacggcaagtggttgttgtccggttcgcctgctgggagcgattcgcgcgccgggcaaggctcgccggatgagtcccagcgctgacttactgtagtagcaatgttttcattgttgttgtttttgttgttggcgatatgtgccagtgactgatggtgttcaacagcagtagaagatggttctgtgttacataaaatgttgggtatggtataataattatcgtaccttcttggaaaagattactgcgaatttttttaaaattgaaatttagcaacgaaatcacgcaacctcatttacaaatataaaa

SEQ ID NO: 91518 - DNA, 256 bp, Heterodera glycines
aacatgtcagagttagttccatgcaagtgtcgcaatccatttttgagtgctcaccatgtcgcctcaatgccttgagtgtgcactcttggatcaacaaacacaatgtcctctagcgcttgcttgcgcaaacaaagtgaacttttttatttattcatcttattgaggaatgaaaatctcctaagttgaataaaattgtaaaatgtactttattcacaaatttttgatcggactcataaactctgattgtacttacaaa

SEQ ID NO: 91519 - DNA, 599 bp, Heterodera glycines
gtcccatctgtcgtcggtcagcccaattcttccgtctccgcctctttggcctctttggtccacccgcccccccgttttcgctgctccttccacggcgaattctctccacacgccaaactctgccgctgtccgtttcccattttccacatgcattggcccgatgatgagtcattttgagatgatcggaacagataatcaaatgtttccgcaaaatgtgcgacttaatccgggcttggcgctctgctcttccgcccctttcggagggcacatcggcacatcgcttccctccgccgtcactgtctctcccgccgcagtcgcatcggtcggtggcggtgagctccaacagtttgcaattccgcgcatatcgcaacagtcgcaagctcagcccgtgcaggggttgcaatttgcattgggacagtcggcgatatttggcggagaatcggcgagagacggcggaggacagcaaacgcagcatttgttcgacctcagtaacagcataatatgcacaaatggcagttccatggccaacgcaagtgttatttcaatggcggcagcaatttccaaaggttctcttctctcgcagtgccaatctcagcaga

SEQ ID NO: 91520 - DNA, 643 bp, Heterodera glycines
caagagtgaaaataatttttaaatttgaaaaaaacagaatgtcaagggttaaaataatttttaaatttgaaaaaaaaatgcaaagggttgaaataatttttaaatttgaaaaaacagaatgccataatttaattttgaaaaaaacagaacgccaagattttaaatattttttaaacgagaaaatggggaaaacaaatgcaagaaattggccagaaataaatagggaaatttggcacaaaaatgtgcaaaaatttggcaagaaataaatagggaaatttggcacaaaaatgtgcaaaaattggcaaaagaaagggttaaaaattgtggcaaaagaatgccaaaaattggcaagaaataaatagggaaatttggcacaaaaatgtgcaaaattagcaaaataaagggttaaaaatttgggcataacaatgccaaaaattgacaagaaataaattgggaaataagggggcaaaacaatgccaaaaaattgcggcaaaatggcacaaaaaacggtgccatagtaataataatgccaatctggcacataaataataaatggcaaaaagtaatgggtaaatgggtaaacaaatgccaaagaaggaaaaaattaatgcataaataaatgataatggattattgattggct

SEQ ID NO: 91521 - DNA, 612 bp, Heterodera glycines
gttaaaatgaaaataagtgaagaaaccataagaaaacgactccaatcaattaatcaaacacaagaagcagttcaaacatgctcaaaatgggttttacataatcgtgaaatgattgacagaattgccacctgttggatggatatctacaaaaaggctcctgagaaattacgcatcgcactcatttatttgttgaatgatgttgtgcaaaaagcagcaagcaaaaaggataataatgtaactttggctttgcatccacactggataaacgcaactgcgatgtccaatgtaaatgtgaagaaggcgatctcgcggtgcgtggaagttttggaacaaaggaatgtttaccctgctcatatcatagaagaaatgaaagcggcattggttagtagaatagccactgagaaggacgattctcaaagtggggagatcgacttttcgcaaatggctcgtagcatcgacagtttcttcaaaaatgaagttctcaccgaaaaagctcgtgaaatactggccagaagttcttttaactttaaagaatcagtccaatctcgagtgaaagatagagaggaaggagtgaaagcacttgcggacatggatacatcccgacaaaaaatg

SEQ ID NO: 91522 - DNA, 633 bp, Heterodera glycines
gtttgagataggtaaaccagctgttcattgtacgtttattgcctattatctagctccgcagcgacaatgtctaccataattcgaaaaaatgaacaaagagctaacgacaaaaatcctgggaagaaattagaatatgaagcgagtgtgtttatcctcagcgaagtatttggagagatctttgaccagcagaagggagtgcatctttttatgaatggtgtgctgtcaattgtggaaaagtccactggagttttcattgagtggaagccttgcgggacaacgcctctgaccgcattgcctgaccacgacgacaccgaatgggtgattgagggcgaagaggcgggcgaggaagagaacggcacgagaggaaagcaacaaaaaaacgcggacagtaatttaagacaaagcctttcgctcgacctcaactccattcgctcattcatccacggaaacttgaagaaagctcctatttggcttcgtttcatttgcaaagatgggactgagtcggacacttactatttccgaggcggtggttatgaatcgcttgtgaattgtttgcaaagatacgtttttcttactcgttcggccaagtcagacaatctcattttgatttcggacagtcgcaccgatgccttg

SEQ ID NO: 91523 - DNA, 642 bp, Heterodera glycines
accaacagaaggcgagagtcgatggatcagcattggcctcgctctgtcaacgcccacctcaacaatcacgccagtcaccagcaacttcaacactcggtcggctcgccgtacatggtcgcctccatcccctccacgccctcctgctccgcattggtcggcccccattgtgccgttgtcgaacctttgacgccgtcggccatttcatccgcattcagtcacaacaatttggccacaaccgctgcacatcaccagcagcaacacaacaacagcaaccattatgcaagttgcaacagcaccaatgcaatgtcctcctccaatttgatggtggccgcttcgccctacacgcgttccgcttcctccgttatccattcgcatggcgcacggttcggctcggatcagccgcaaacccaacaactgcagcaacactgcatttaccacgctgacggcagcatgtacaacaactccaccttggttgagccgggcggtgtgcacggcctgcatccgttgtccacggcgacttcctcctcaacactggtggtgaacattaacaacaataatggcactgggaatgctgccgtgggagcgaacgcagccacaacgccgggcagtactccgaacacacagcggaagcagcaccgacgg

SEQ ID NO: 91524 - DNA, 593 bp, Heterodera glycines
gctaaaccaacagagcttgaggagatttcgtctgatttgtccactgttcctacacaaatacatgtctccattcccgaaaatcttatgaattttgacggcactgaactaatcgaccttcccattgacaaatgcgtcattgtttaccattgtggaatttcttatggcattgaacctgaattgtggaaagcaaaaacaatggaaaaaattgatggggaccaaatcaaacaaactcaagaaatggacactaaacaattggaggattatgtcactgtttaccatcatggatggtacggtcgttttgaggatgaacaacaacaacaactaattgacgaagaggaggagcaaaaaagacaatttgacaaaagtgaaactgaccgaattgcattatcagtggagcagaaaaaagaacaattggctgccgttgaccacaaaaaaaaatcacatgaattgtctgataattctgttgaaccgatggaagacaaaatcgaagacggaattaaaacaattgatacatttgagaagaaaccagcagagaaagaagaacagactttgatcattgatcagcaaaaacggactgatgggagagtgacctt

SEQ ID NO: 91525 - DNA, 541 bp, Heterodera glycines
tcagagaggaattgaagaagaataaggagatgaaaaagttctttgaaagtgtgccggacaagggaccaatcaatccgagggatgcttatgccgggggaagaacgatgccattttgtttgtacgcaaaggctaccgaagaaattgagatatcaatgtttgatatcattagtttgtatccctttgttaattatggtaaaaatctgcttaatttttgttaaagtttcctttcgcttaagatactccataccccgttggagtcccgaaaattgtagtgagcaggaattttaatgtgaattggacagtgcccgacgatattccttatgatggactgctgaaagtgaaggtcgtccccccgaaaaatcttttgtaccccctcctccccgtgcacatcgatgatatgctcctcttccccaattgttgggcttgtgcaaaaagggccaagaatgagtttgtgatgacaaaagatgtaaagaaatgtaaccaccgtccagcgcagagagcatttttgggaacgttcacttcgattgaactacggaaggct

SEQ ID NO: 91526 - DNA, 458 bp, Heterodera glycines
gtcacactaaactcaaataacgaacactaatgtttatcaaaaacatgacacacataattgtgtcacactaaactcaaataacgaacactaatgtttatcaaaaacatgacacacataattgtgtcacactaaactcaaataacaaacactaatgtttatcaaaaacatgacacacataattgtgtcacactaaactcaaataacaaacactaatgtttatcaaaaacatgacacacataattgtgtcacttttaactcaaataacaaacactaatgttttatcaaagacatgacacacataattgtgtcacactaaactcaaataacgaacactaatgtttatcaaaaacatgacacacataattgtgtcacactaaactcaaataacaaacactaatgtttatcaaaaacatgacacacataattgtgtcacactaaactcaaataacaaacactaa

SEQ ID NO: 91527 - DNA, 635 bp, Heterodera glycines
tgcgcgccacacagacgaacttgtaactcctggtacttcgcccattcccccaccgccacctcctccagctcctcggccttttcattcgcctccacttcctccacaaggcaaccgcaacttctcaccgccatgtcttcttccaccctctccgtcgggtactgtcaactttttgcacacgccgccgcctcctccgccccctcggcctgcaattcatcagcctcatacttctccaatgcctccacggatggcgccgccggacacaatgatgcgttttaatacgcctcgtcttgctccgatgtctcttcgtctggaaccgtggcaaatgttcccatctgctactccacggcaacggatgatggcgcctacggttccctctcatccacaaatccaaccaatgttaccagcaacaactggtggcaccatgtcacatttcagcaacaaggaattgttggaagataacagggttggttgctcgtcagcaggcggcggacgcggcggtggtgcgggtagtaaacgtaaagccggtgaattctttgaggaattaactacttctccaatgcctccacggatggcgccgccggacacaatgatgcgttttaatacgcctcgtcctgctccgatgtctcttcgtatgg

SEQ ID NO: 91528 - DNA, 626 bp, Heterodera glycines
ttttaaaatatactttatcataaaatataaatttaaagcttcataactttctcataagcaatttattaaatacaatttgggccatttaatagctcttacttagtttctcaattaacgcacaaattaaaaaaaatttcattacccctgaaaaattaaagtgataatattcataaatatctattactaaacgactcagcacggataaaaatcaacttttttctcaatcatccgttgggttacaaaacgaacacggctacattttcccttcaaaactaaaataaaaatgaataaataattaaaaattaaatccgaaaaaagaaattaaaaatgttatcttttttataatttcatttctcctcactgtttctgagaattttcaaatcggccaacgtcgcttctggccattggcacgcaatggcaacaatttgcacgaatttggcatgcatttcgatcacctattattgtacatttaaattttttagactttttatggggtttttaactaatgacaaaataaatatttgtgaattaaaaagatccaagccaaggagcatggaatttttatctctcaaatatttttgcccaatttccatcagtaaaaaagagcctacgtaatttggcgtgtc

SEQ ID NO: 91529 - DNA, 652 bp, Heterodera glycines
aatacttcatcttcaacttctgctactgactcttcaccagacggagggaactatatcaaagaggaaatgctccagagagaggtcaaattattccagattatctcaaaaattctgactttatataagtcgactatgggcattactggataatcttggctccacccaaaaaaaaaaaattatcttcgtgttatgaaaagatcaacattatcttcaggttttttgtgagtgtcttggtggcgaacgtgtttcggtccgtgcttcgcttatgtttcagagccaaacctttgccaatatgtggaaggtttgtcatttgtcgcacatacagttaaacttttatgtggattttttctagtctttgaacgtggacaccaatgagttgcctgacgattttgtcttcccgatgacgagtgttgcagttccggtctttaaaaagattatcaattggatggagagtcacgtcggtgagtttaattaatgacaaaagtttgtataatgatgaattggaattgcaggacagcaagtgcctgagtttgaagaggtaatatttggcataagaggagtatctactgaccaaaaattttaggacccaaatactcgcgaacgcaaatggttcgtccagactgacttcgaaaaggaatttttcaaggttcgt

SEQ ID NO: 91530 - DNA, 617 bp, Heterodera glycines
aaaactttcaaaatcctaccttgcaccgccgacatgcacagcgcctctcccggcagacaaatcaccggcgggaagtagccgccatgcactgttcgcacatgacgatcacaattcctttcgctgtttgtgccaaagagacagccaggcacgcttaatttgctaaaaagctgttttttaatatttttcataacatataatatttctttatacatttatttaatatatttttttttatttgataaaaaaattaattttaaaaaagtaccaattaaagcatactgtaatcatgaaaataaaaatgaattaatttttcaacataattttatttcattttttcatatgtatagtattaaatttgatgaccgaaagaaaacattgtcactgaaaaaatgcgttggtaaatcaatttttttaaaattttaacctaaattgacacaggaacacatttaaaataatccaattagtgattgttaaattttaatggattttcaaaattctatagttttcttttaaattgaatgtgacaaattcaaaagaagaattttccactgacgcattatccggtgcctttaaatttttcttacgggcaacgaaacagggaaccgcgctcgtccgcg

SEQ ID NO: 91531 - DNA, 557 bp, Heterodera glycines
gtatataaagtagtaattttccgttatttgtaaccgtaaaaatgaacacttctacagcattcacagataaagacttgcaattaaaactgccttttggtatgataatttcgggtccctcatcatcgggaaaaagcacctttctcttaaaacttattgcggaatccaaagacttaattgatccatcaccggttgagattctctactgctttggtgaaatgagttctactgtcccggtgttgcaaaaggcaggcatatccgtgtatgctggagtcccaccagaagaatttattcgtagccaatcaaagccgcttctgctcatccttgacgatctgttgacgtctatagatgagaagtatctgtcagaattgttcaccaaaaagtctcatcatcagaactttgccgttatatttgtgactcaaaatttgttcgaacgaaaaataaaggttgctcgccaaaatgcccaatatgttgttcttatgcgttcaccgaattcaacccttgcagtacggaaccttggtgtgcaactgtttccccgacagttggactactttttggac

SEQ ID NO: 91532 - DNA, 610 bp, Heterodera glycines
ataaattaaatttgcatttatttagctttccaaaataagcatttattttatcattcatttatcaatgctcaataatatttttttgtgcatttattgcctttttcgcgcacttatcggagatttggcagaaaaaagcggcgaaaaatataataaaagtacaaatttatggccaatttctttgacgaaattcgcaaagtttgccttcttttttgactgctttacaaatgttactacgcataaaagtgcacattttttaaatacgccggggcggcaaaagtataaaaactaaaaataagcaaaatttgtggattttattttcaatttaaattattattttcgttaagcttttaatatgcggcatttcgctgcttcttccacagttttcggccttttctttgcttcgtttgctgtcgccacggaattcctcaacaataaggacaaaattttggatcttcccgggttggactttaagccaaactttgagcattattcgggtaattatggaaatgattaaacaaattatattaattgggtttttaggctatttgaaggtttctgaggagcatcagctcttttattggctggtcacctcgcagcgaaatgcgtcgga

SEQ ID NO: 91533 - DNA, 346 bp, Heterodera glycines
tgacgaccaagcggaaatagtgcagaagatgggcaaggacgccatagactcatgccttatcctgccacagcccgacttacggcatttggaagacggacaaagtctgcgcactttgaccattgagtcgcgagacgaccccaaagtccaggagatttgccaattgatgttgtattggctgaacaatgagttggcagaggaacggattgtggtgcgcaatttgcaggaggacatttatgacggacaagtgatccaaaaactgactgacaagttggcacaagtcaagattgaagttccggaagtctcccaaagcgaagaaggccaaaagcaaaaatggcgcataattgtg

SEQ ID NO: 91534 - DNA, 422 bp, Heterodera glycines
aacactgaaatactctaagcaaatggccaaatattcaacagaaatgcccaaatattcgacgcaaatagcaaaatattctacgggaatggccaattcgtggaaatgtcgttttccccggcattctctctctctctgctgctctccctcactttggaagtcttttgttcccggacgacgtccattcggcacttcgccagcagctgctccgcgtcttttccgaatatgtcacaataataaaatatcagatcgcgcgtcacaatcgcttgtttggtcgccgtgttgtacaattccaacgaaatttcttcctcggccttaataaatctcgcggactttgcaataatacagaaaaatggacattggacacattgaacagagttgggccaaacactttcgaaatattttccaacgaggccaaattgcgg

SEQ ID NO: 91535 - DNA, 148 bp, Heterodera glycines; identical to SEQ ID NO: 68167

SEQ ID NO: 91536 - DNA, 635 bp, Heterodera glycines
gtgcctatgctttcgagtttttcgaatttttagaaatcaattaaaattggtgcacttctgagcacacacccttcggagaatatcagtgaacaaaattttaagaaattcagaaatcgtaagtaattcaccagaatcaaaattttgaggcttaaaaaaaattcgaaaccggaattccgatgataaaaaaaagtcggaaaccaaaattctgacatgtccaacaaaatcggagattgcgctattctcatgccttataatttccgcggcgcaaaaaattttcagaaacccccctaaaaatgccagattcgtattcccagcagccataaaatatccatggccatcctcctccacctgttgatgaagtaatggcacaatggttggtccatgtcctggtatcgctcgttccaggacaggaacaccggggcattttcgtcggacaacagaaagcgcaggaagccgtccccggacattttgccctgcgcaatgtacgactcgtccgactcgtacttggcgatcagctgctgcacccgctcctggtcaaagtgggggaacaggatttcgttcagccgcgggtcgcgctgctcttcgttgagaaactggagcagccgctcgcgcgtcagatactccttttggcccga

SEQ ID NO: 91537 - DNA, 427 bp, Heterodera glycines
attgggacctccaaggccaagcctcccaaactgattcggctgctgatcgatcgagtcggccccgtctctttgtttctccattttttggcattcgcatacgccgtttttgttatttctcattttggtacggagaaagcgaaaattcaagaaaacgcgctgctggctggacttgttgaggaaaattggaaggatacttcgaaattggaccattttctgagggatttgcgcaggaatgttggtgacaaaaatagtgaacttcgcgattacatcgttaatgctctggtcgaaatgggcgttgaagtggccaaacactcgttcagactgactccatcatcctttttgaataactcttccgtggataaagtgaatgtctatggaattgtccgttcctttcgtgccaacccggccgagtccattcttctcgctg

SEQ ID NO: 91538 - DNA, 436 bp, Heterodera glycines
attcccttcggcccattgacattttcggttcgacttcttcgattttggaattgtccaattttcaaatggccaatgagagcgctccgtacgaatttattctgtcggtttcctttgaagatggtcattcgtataattcaacactaaaattatttgtacatgcatatccacaaattccagtgattgatgcgcaaaacttgacggttaatttacgtgctgattcggtgatgctcaaagctcatatttcgaatggttctgcggatgtgtttttgaattttacttggatgcaaacggatggtccgtcccgcgttgacttggcaaatcggcactcgctcagttcggcgtccatcgtcggcccattcaatgcctccggcatttactccttccgcgttaaggctgttaccattgcagaggatgttgtcgaagcgtccctttttgt

SEQ ID NO: 91539 - DNA, 641 bp, Heterodera glycines
cattcgtcaacgaaacggaaaaacagaaaatcgcaaggggccgcgacacggaaatcgcaaaggcacagacgcacgtgccgtacagggaaattctctgctccggcgccgtttgggcagttttcttcggtggcattggcaatttcactgccatcaacctgctctaccagtttacgcccacttatttgtacaaggtacaaggctttgaagtggtcaagaccgggtttatggccgcccttccgccgcttggttctggcggtgatgaaagaatgtgccgggctgatcaatgatagaatccccgcgcggataatgagcgaaactgtcaaaaccaaactgttcaattccatcgccttcatgagtatgtccgctgtcattgtggccgtctctttcgtgccttccggctatggcaatctcgcgctgtttctgctcactttctcggcattcactctcggctttaacattggcggattttacaaaagcggctcgatgattgccgggccctattcgccttttgtaatgggccaaatttccaccgcaatgaccgtcacaatgctgactgtgccggtgattgtcaatccgttgaccataaataacacccgcgaagaatgggcattggcattttatgtgaacgccgccattatcgt

SEQ ID NO: 91540 - DNA, 590 bp, Heterodera glycines
aagtttgagttctaacgaaagggcaactactgcaactccaattaaatcgttcagttccttttgactcggatgccgccgccccacgcggattcccccccccccccccatttttctgtgccgcttccgccgatcacttcgcttttgacccgtcttctccgaatgtcgcctttcggctttttctcttcgccctttttccctcttcgatccctcaaaatcggtccaattttttttgttgttgtttgttttttttcgcatcgttccaccacctgaaaggggacattcgtcgcctcattagccaatgccagggctaagaaaaatcgccatttcagtgaacgatgcggcgaacaacagtcaaagcttagtaaatacacaaacatcgaccagcaaagcaacggcagcatttgcttccgcctgcctccgtgaactcttccaatcccgaatgaaacgaatggcacacattttgggcagcatagaagcgctgctggtgtgcagaaacaaagcaacggagagacaattgttgtgcaagagggtgaggagcaaaggaaagtgatcggaaatgaaaatggcgaagggaaaaaagcaaaggaatg

SEQ ID NO: 91541 - DNA, 635 bp, Heterodera glycines
cttttttgttctctgaaacggaagacggtgacttcgcttcattcaaattgcttttgttaaggaaacctttgttcgttgacatattgcaaaattttctggagcgattgttaaggaattggcctttggatgaaagttattgtttgttaattgaaatttggcaaacgttgatttaccacaaattgctcaaccgatgttctgacgaaaaatacaaattgtttgtccaaatgtcttcgcaatatttcgtggatcttattgagacacaaattcaacgaatgctcaccacagacccaaagaatttggtggagtcgccggtgctgagttatgccaaggaaaacattttccgctgtgagcccattttgggctttttttgagagacggaatttgccgaccattgattacctccgggcattgtgtcaaaaactcgaagattatcggaatggcattcagcgaaaattggaagcgactaatcgaagccgttaccgttccgttttggcttggttgctccaactgctcttctccttcgcttacaccgctccagtcaacatgcatttgctaagtgcacacattgccgacttacgcgagctcatcgtccaactttcacgtcgtccggattggatgcgcgattctgacctgca

SEQ ID NO: 91542 - DNA, 445 bp, Heterodera glycines
cattcatctgctcccttcgccgactactgcccagcgcccaaaactgctccccaactaccgtactacctacggaggtgctgatttggcctcagcactcaattttgagttgccgccaagtgaagtggcgactcacaccctgtatttggcactgatggacacgccgactgagcatgacgcctgacttttggccgacgcgatgaagggattgggcaccaactaatacatgcttattgagattttggtgacccgcagcgatgcccaactgcgtgccgtcaacgcggcctaccagaagttgtactgtcatgggttggacaacgacctgtcggccgacaccaacggcagctattggactctgctgctcgacttggtcgaagcgaaccgtgatgagtcgtaccgtactgatctggacaaggcgaagacggatgccaataaactcttccaagcc

SEQ ID NO: 91543 - DNA, 593 bp, Heterodera glycines
ggaaagtgcatctttcagcgaatagcacaaataattatgcactgctcttctatttggctttacaagacaaagcttcacattttgttttacaagaccagcagtaccgcaaatcgtcaaacaactttggctatggctttctcgacggatattctcatattcttggtcaattcgctatgaatatccaaggcgttttttcctccgaagctgtttcaaaaattgcttacaaaatgacaccgattttggatgtactattcgtcgatgaattgcttaaagtttcaattggacagactgaagggaagctcggactgcagttaacgcaaaacccagagatacctgacgaggaagcaaatttcgcagcgattcaatttgatttttcaaagaatatccatattgaattagaaatgcttgctgaaggcgatgctaaaattgcgaatttcgatcatatttttactcgaaaattggaaacgtttagcaacaaatttgatgaaatattcccgattgatcaccaggaaggctctgattcatttaatcgcttgggaaaaattgcattgtccaatttactcggaggaattggagtttggcacggatattcc

SEQ ID NO: 91544 - DNA, 561 bp, Heterodera glycines
gtttctcgatgaccggcacatttccttctgagcccacttttgctgctgcctcctcaaatgccgttgttgacgatggtggcgagtcgcatcaaacggaacgaccgaccgaaactgaagacacttcggccgccttccttccccataacatttcgttacgttctgttatcgaacggtttggggaggaaaatgtgttgaaagaatggacggaggaagactgtgccggacttcttgtccaattgctcaaaaatttttgcgactacgaagtagcaaaacgaattgtgcgctgtttccgagaaacatcggttgacgagattaacgactgtttcaacctttgcaaagaattgaataaacgtgccgcgaatgagcgagttcgaatgggaaattgcgtgagttgtgcgccgctgccccaagagagtctgccgacttttccgaattggtcatcggtgttggcacaggcgaaaaaatcacagggaatccctgacgactcttccgctgtcgttgccaaaatgctctcagaaatttccgccaaatataatgatgccaatttcgcgcccgattccc

SEQ ID NO: 91545 - DNA, 497 bp, Heterodera glycines
cgctcatcgttccgtcaggggaggacactgaaaaagccgcggagcaggggcagcactcgggtgcttggaatttggatggggaaattctgcttcagccatcggaccgaccattgcatttcagactccatccgggactgatccgatactttggacttgctgaggaggtcgagctggataagcggggcagttgctgctgttgctgatcacttcccaattctcattgtcgtgccgatgttcaagtgattttatggccattcgtccgttttccccctttttcttctcttttgtcactttgcattgtttttacctttcaattttcacaatgcatttacatatttaccttttctcatttgtgtaaaacattgtctctttttcatctttcatcgtatttttccctttttctatcgtccaaagtgcgcttattcctttgccattgtccctcactttttgcccctttagtttctttccctcattctttggttgctgggcttaaacac

SEQ ID NO: 91546 - DNA, 558 bp, Heterodera glycines
ctttgtgctgtctgcgctgcttttgctgctgctcaacctgggcgtccgacgtgagggtgaactgtccgcctattccgtgttcaaccccaactgtgaacggttgccgggccaattgactggcgaacactttgagcgggacatgctttttgccaggaggcagtaatcgatcgaacaccgacgggttctaaccccctccccccccccctaagttaagccattttttgggtgggcctgtgatttttgtactgttgtatcaaatattatatatttagaaatgacaaagaagtgaagcaaagaataccaaaagcaaaatttaatttctttttaaatttatatttcgtttgtttttttagtcgattcataggagatgttctcgttttattgtaaaggtattttttgtacagaattttctgaaaatttccaaaaataaaaaccttaaataagtacaaaaaatagacatctaacatcgaagaagctccaacccaagtggaaagtgcttttttcctgtttatctcgattattaaaaatgctcaaaatttgcagttctttaaaaaagcg

SEQ ID NO: 91547 - DNA, 553 bp, Heterodera glycines
cttcttcggcgtgtgcctgtccaccgtggccacggttatcgctgtgctttccgtgccgttcgcctaccagcacttccaacagatcggcgcccaaatgcagaacgaagtggacttctgcaaaatgcgccccggacccgagggacagaacggccaacccggtattttcggcaccacccgcgtctcctggccgccccgggccccagggacctcctggacccgatggacagcccggcaaccccggagagtctggccaacccggccagcccggcaaactcacccagggcccgcccgtcgtcggaccgcctggcccatcaggaccccctggccagcccggacagcccggcgagaacggacagcccggccagcctggaaaccccggcccgcaaggataccctggcgacggcggaagccccggccaacccggcaaccccggaggcagcggcgagcccggacagcccggagcacagggatccagcggccaatgctaccactgcccaccgccccgcaccgcccccggctactgagtgtgatcagtcgaccatcgacaattgga

SEQ ID NO: 91548 - DNA, 190 bp, Heterodera glycines
gtgctctctggtgactatcggcggcccagtcctgcctctggactctctgtactcgtggatgagcctgatgagctggaaaatgagccactccgttgaggccttccgcatcaacccctcctcggactggactgcattggtggacgtgcaactggtcgtcaccccgcggtcgaatccacgggaaaactccttc

SEQ ID NO: 91549 - DNA, 580 bp, Heterodera glycines
gaagacggagggcaaagcgacaaagaaaggacggctgcagaagaggcggacgacaccttatgacatttgggaggacgaaggcgaacaaatcactgccaccactaaatgcaaacgcgtgaaatacgtgccgaatttgctcccggctgtggtgccacctcccgagggaatgtcttacaatccgccgattgacagttatttgagaatggccgtgataattgcgaacgaagaaaggcaaattgaaaagaaacggcggcggacagagcgaaggattggcattggcactgacgaagtggcgactttgccggctttgcgggaagaagtgacatattccgtcagaggaggaggaggagtgactgtgagaatggaagaggaaaaagtgaaggacgaaatggcggggggagaggatgaaaaagtcagtcccaatgagttgcgacttcaaaagcgaaaaaccgcaaaagaaaagaaacggcgaaagttgcgaatggaggaagagagaaagaaaacggcggaaaaggaagtggagggaaagatgagaagacaattggacagtttgaagtctctcaaggcgcaagtgcttaag

SEQ ID NO: 91550 - DNA, 590 bp, Heterodera glycines
gcggactgagcacgaactacgccatcaaagatatggtcgacaaattccgtgagactgtccaatttgtggacgatggcgcgccttcattcttgcgattgggagcctcaaaaatggcgaagaaagagcagcaaagacattgccacgcctgtgccaagaaagtgccggacagcgaactgttcatttgcaaagactgcaataagccaaccaaaaagcagttcatctgtgccctctgtgttgttcgttcgcatatttcaacacactgtggtgacattggactgtttggccagtgagcgcgaccgcgagttggccgcactgcgcattgaagagattctgaatcatgctcaacggatggttgacgaatcgcgaggcatgcaaaacgacattgccaagcagtttgagacgatgcgcgagaatctgttggccaaactgagctttttctacgccttgcaaaacgagtgcctgaacggtgaacaaattttgctgaaagagcacattgaagagaaagtgtactctgccattcacaagtgcgaacagcttaatgagcattttttgcgactgcgcgagctcaaatcggagtttgaacagcattt

SEQ ID NO: 91551 - DNA, 348 bp, Heterodera glycines
  unsure (1)..(348): unsure at all n locations
ccatttgcttttgggggacactgacgactgtttcctacggcatttgtgccgcacttttcctctggcaattcttcactcggtttcgccacaatgtgcttttgtccgaacatacttccgctggtttctcatcggagggatgcgtccggttgggcttttccttttggcttttgataagcgcagttttggcacaattcgcctcttgcgttttgctattttgggcattaaaggggagatttaagcaaacgaatgaagaacaaaaatcgaaagagcaagacaccgttttcctttattaacgaaaaatataaaacagaaaaccgagtanaaaaaaaaaaaaaaaaaaaaaaaaaa

SEQ ID NO: 91552 - DNA, 560 bp, Heterodera glycines
cggcctctgttctggaaaggcgctctctcctggaaatgtacgccgactttttcgcccatccagacgaattggtcagcgcggcttacgaaaccacacctgagaaaagattccttgccgtcctgaagtactatctgaactccttcttcccggctcgcaaaagtggcgtcgccaagaagccgtacaatctttattttgggcgagacatttcgctgccgctggacgctgccggacgtgcctttgaacacggagcaaactacccgcggaccgttcccgggctctgccagcaatcagttgacattcatcgcggagcaagtcggccatcacccgcccatctctgccttctacgctgaacatccggcctctggcgtctgctgcacttcgtacatttacaccgagtcgtacgtcgccggcttttcttcccttggcgtccgtaacatcgggagagcgactgtggtactaggaaatcacaatgagacttacaccgccactttccctgacgccgtcgcacgaaactgtcacgccactccgtggttcgaactcaccggcaaagtgaaagttcg

SEQ ID NO: 91553 - DNA, 516 bp, Heterodera glycines
catcgaagtgacgaccaaatggaggtgtggccaactttccatttgctgacggattacgtgccggagtacggtaaagtgcgggtggagggcggagtacggtacaagctggtgttcgacaactccggtggcactttcttcagtcgagaagtgaaatacgggcttagagtgaagaaggttgaggagagtgaggaggaggagagagagcacggagcaaaagaagcagagaaaacgaacggagtgacttcatggggagaagagagacaaagcgtggccagagacaccgaggaagagaaagagaacacgatcagagatggagagggaaaagcgaaaaattaatgggaagacaagcagagacgacagcagcagattctttcccttccctaccgtaacccatcaacacacatacagtaactatttatacgcaaaattttatacagaaattaagccacttttacatgttgtgatatttgaatatcagtccgtgattggccgaataaagcttctctccgttttcaa

SEQ ID NO: 91554 - DNA, 172 bp, Heterodera glycines
agttgtctcacgcccaattcctggcccgaagggaccgcccggagcgcctggccagaacggaaaccccggaaagcaaagtcagccaggacagccaggaggccaaggaccgccccggaccttctggcgcgcccgggctagcccggccagcctggaaaactctggccagcctgga

SEQ ID NO: 91555 - DNA, 536 bp, Heterodera glycines
ttatggcaaagttcgagatggaatacaaaaaaggccttgacccagtgaccgctccgacagcttgcgtcaaaatgcttccgacgtacatccgcgcgattgctgttggcgaagaaaagggcgaattcctggcactggacctcggcggaaccaattttcgtgtccgacatcgaagggtttatgcacagcaccgacgggaacccattcgccaaagtcggcgagatgctgcgtgccattggcatttcgaactcatcggccgccgactgtgcaaatgtcgcctacgtcagctcgttgattggcacgcgcgccgcccatctctgtgcctgtgggcttgccgccatcctcaaccgcatgcagaggccccgcgtgacgatcggcgtcgacggctccgtgttccgcttccacccgaccttcaaattcaacctggaccagaagatcaaggcgctgttggccgtcaaatgcgaattcttcatggtgctcagcgaggacggaagtggacgaggcgcagcagtcgcagcagcggtcgcattgcggatgaa

SEQ ID NO: 91556 - DNA, 554 bp, Heterodera glycines
agaaattcattcactcagtccatcacaattccgtcttctccgactgttccattctcaaaagcgtcgtaccataacgtcacacacatcataaccctcatgaccactccagcaaacgcggcgagggcccggattgccaaggcgaagctgcgcgatgccaagcggaggagggcggcagttggacgcgcaggatacacaagaaaagcgcagcgggcgagcgatgtgccatttgtatgaccaacgtgagcttcttcacgcggacgacgctcggctgcacccatccgttccatcgccgctgcttgtatcgctggatccgctaccacaccaattgccccgtgtgccgctacaacttcgcccgcaccattccgcgcggtgagcgtaaccaaccgctgtaagatgccatgtgttgtgatcgccgtacgatgtcatttgtgtgatcatatttgtatcccattgttcggttatgcgtatgtatttgtacaatggaatgtatgttcttatatgtactctgtatgtacagtatgtataatactcgtcagtaaaatactctccttgtt

SEQ ID NO: 91557 - DNA, 560 bp, Heterodera glycines
attttctaacgcaataattctgcaattattcttccctttgtgacatctttcggaactcggccaaaattgtgctaattgcgaaaaatgaacagacgttggatttgcaacgacgtttggatggacattttcccatcctttgaccgtgcccaactcggcctcaaattggcacttctttcgccacgtttcaatgcgttggtggacaaacatttcgatggcaaaagcgaattgacaatttggagatcaatctttattagcaaggacaaaggaccagaaccgaagctgtctgtacgaatcgatgacaaatttgtgccatttccattcccagacgaccgtccgctgcccagcaaaatccgttttaaagaccttcggattgattacatcgatcactccgtcatcgcttttcttcgttcaaatcaccaaattttcgacaaaagaggcatcaatttatatttgtggattccatcaccacacaacacggatggccaaccaatttgggacatttttggtcgtgaaatttggccaattttttcggcaaacattcgctgtttgggctttaccgg

SEQ ID NO: 91558 - DNA, 584 bp, Heterodera glycines
aagaaattgcataaatccagaacaaattcaaattcttccggttcatcgtctcctaatgtttctgtgaatggttcatcacgagaagcttgttcagcaatgcaatttatgtcgagcttaaatcaaaatggacaacaaaatttgagtgtgtctccccaatctccaattatgaatattgctgagctgagggtgcgtttgagggaggacagtgttctcgattttctgcacattatttgggctccacggaaatttcgaatgtcgaaggcaccgaagactgccggagggcaatgcaatcggccaaaaatcgcgtacgccaaatggctgatgtcccatgggttgtgctggaaatatctgttactggcataaacattcgagaaaatgataacaaattgttctatcgacatccaatcgcaaatattcaggtggtgtgccaggatgaagttgacctgaactgttttgcctacatttaccaagagggagatcgccatttttgttatgtcttctgtgtactcactgcgataattgccaaggaaatcattgtgacacttggcgaaactttcaatttggcctaacaaatcgcaattcag

SEQ ID NO: 91559 - DNA, 634 bp, Heterodera glycines
gagggagagaatttccgttccatttaataatttaataaacccaaaatgtcttcatcaactgctgaactgaatccggaagatggtggtcatccgccacagaacaccgccgtggccatcgagcagtcgcaacaggccatccatccgccggcacaaagcggaagcggcaaaattgccgcgtgggcatcgccgaacgcggacgacacggagccgtacggaatttgcgcaaagattctgatcgttctgttttacatcatcacaatcatcacttttccgatctccgtgttcatgtgtattaaaattgtccaacaatatgaacgagcggtgggtaatatccaaaacccattagggaaccgggggagagcaattatcagtcattagtgttgggctcgtgaatatctctggctacctttatgttacagttttatttattccgtttttctgaattttacccctttcccctaataagtgcgttggagactgtcggtctcgagcctgaactcgagaaaagtctcggtcctttgggatctcgatctcgtatcgagtctcgggaaatttcggtctcgaacagcacaactttcatttcccatatactcactccccctcacccaccgcaaaattcgattttccaggaatt

SEQ ID NO: 91560 - DNA, 649 bp, Heterodera glycines
gcaattttaaacggcctggatttaattaattttcatttttaaggtgatcgccaatccgaaaacacttggccaatgcgccggtaaaattcaaaaatatttaaaatccgaatttgcatcaattacaccgtcagtttccttcgtttgttcagacacgcatttgggcgaaatttgggtgtccagcgggcacaatgccagcgggttcttttcactgttcagtgaagaggcgcatttgcaaacgaatcatttcaacgccaaactgaagacgggtgacaccaacacggcattcgcacgcaccggctatttgggcttcttacggcaaacgcaagcgatcacagcggacggaggtgggcgaagggagagaacgacggggaggggagcaaaaggaatggcaaatgacatgagacatttaaggcgaaacaatatttgaaaattcgcatttttggatcgaaaaatgaaaaataccgtcgattccaagtgtgtttttagcatgctctttcgatttttttctaaatccaatgcttcccttttttcacattatcagaattacacgacgcaatctttgtggtcggtgctttggaggaagcgctgatgctgcgcggaatgcgcttccatccggtggacattgaactcagtgtttctcgggcacacc

SEQ ID NO: 91561 - DNA, 559 bp, Heterodera glycines
gcgagttggactcgttggcgagcagatcgcccgcgggcgcgacttcgacctatcagccgcatccaatcggcggaatggggggcacgaggaactacgaatatgaaagtgctgccggtgtcgtcggcacttccgctgcgtctggtgcagcggtgacgcaccaatggccggacgatctgatcgaaattgtgcacgagccaatgggccatacattggacagaatgcgacgcttcagcacttccctctccaacgtggaggggcgcgagggggcagcagccgaatcggaaaaagtggaggagaaataccgacgcacgtacagagaggaatattcgggcaatggagctgaacgacgatgactgaacagaaaaagaaggaaagaaaacggagagagaacacagcacgagcagttgaagcagtacggcacccaaacccatccaatcgctgggtctcttttttcctcaccgatcgatctattttcttcgttactgcctttcatttgcttcacttttctattctgatcaggtcgttccctcctcctggatcattcccacccccccccctt

SEQ ID NO: 91562 - DNA, 341 bp, Heterodera glycines
atcctttaaggcggacgatggcgcaaaactcatcgaccaaagcgaaaatcgttgtcaccgattcgacggtttcggtgaaaaaattggccgaattcggcgacgtttgccaattttcgggcaatggtcaaatgccgagggaaatgcttttgagagaattggccgacgcggaggcacttttttgtttgttgagggacaaaatcgacgacgaattgttggcacgagcaccaaaattttttgttttgagcacaatgagtgtcggatatgagcacattgatttttaagcatgcacaaaacgggggattcgcattggatacacgccaggtgttttgacggatgcgaca

SEQ ID NO: 91563 - DNA, 343 bp, Heterodera glycines
aaaaacataaaatattaaaaactgaaaaaataattaaattagattcgaataaaaatatcatctgctactgttagtccctttcaacgccaattgttcccgagtcaattcgttggacagaacaaagggcacaacggcgttatcaaaggtcaaaatccaaatggcaaaaatgaaattggcgggagatgaagccgaggcaaaagcctaaaatttggaaaaaattggtttaagaaagaatagtaaattacaaataaatgacacttttcggtttagacggctctgatgggacccaatgaaaaaacaagttgggagcaagggcgtaggcagggggggggggctgaggggg

SEQ ID NO: 91564 - DNA, 531 bp, Heterodera glycines
ctgcttgcccggttccgccttctctctgcccaattggttccgtttggtgttggctttccccgaagaaacgacgagggaagcgtgcgagcggatagccgccttctgcacacggcacatgcgcccgtgcaggaaacaattggcactatgggggagtcaactggacgaggaggacggccgagggtcggaaggggcggaacggaccgcagctgaagagagtacgagtggtgaggaggaggaagacggccatattctaagcgagcgatcagccgaatgatcaatcgatcggccgatcaaagcgtgccgaaatgcggcacgggcacacattcccatccaaccgaaaagcaaatctcaaacagtcgctaccgtcgcgtcatttatcctttttgattgtttatttttttctcttattaatttatataatttctaaacaaattactttgcttttatgcattctttcctatttttatccatttgattttgattctctttataacccaatgttatttttgtgcaaataaatcctctcatttt

SEQ ID NO: 91565 - DNA, 513 bp, Heterodera glycines
actactactgttcaccaaattttgttgatcattttttgcgcaatcaacaacataaaacaatgatgatgatgagctctgctgctatgctttttgtgatgatcactttggcattgatcagctttggctgttcaatcggagctgtcaaatcggagggcgacgacgagtcgggcgcagtgcgccacagccatgaattgatcagtcgtattaaacgctacggctattggtacaacagctacggatatggcggaggctgcgcatgtgcccccgtgccggtgacgtcatcatgctacagctgtggcagcggcggcggcggctatggctattcttcgtaccaacctgtgccaccaccaccgcctcccatgcagccatcgtattcctcttgcgcaacatgtggcggtgggtacggcgggtacggtggcggcttgtcaggctacagtagcagctggaacaacggtgggagcgcgtccagctcatggaataactacggcagctcctcttccatgtcagttggca

SEQ ID NO: 91566 - DNA, 173 bp, Heterodera glycines
agcggtggtggaggtgaagcggctgcaccagcaccggaagccgcaccggcggcagaagcggcggcgcccgcaccagcggagcaacccgcggccgaacaacccgctccggcgcctgctgctgagccagctaagcaacaggcatccggttaccgacgaaagcgcaaccagaacag

SEQ ID NO: 91567 - DNA, 607 bp, Heterodera glycines
aattcccagcttcgttcccgttttatccgccaacaatgactttcctcaccgacattcttcatccgaacattgacacgagtggcaaagtctgcatcagcattcttcatccgcctggcattgatccactgggctatgagcaggcggccgagcgttggaatcgcaaccgaaccgtggagtccattttggtgtccattcaactgctgttggtggagccaaacttcaacagtccggccaatgtggatgctgccgttttgttccgcagcgatccggcacgatacagggaggaagtgcgtcgacgtgtggagatggagatagcgaggacggcaccaatactaccgggagcgcaaccgccgccggaagagcaggggacgcaaccgccggaagaacaggggacgacgcaagcggcagaagaacagagggcgcaaccgccggaagaacaggggacgcaaccgccggaacagcaagggacgacgcaaccgctggaacagcaagtgacgacgcaagcggtggaagaacaggggacgcaacagccagcgacaccgccgcctgaagggccgcagcaacaaacggacgaatggtacatgtgatgtgatgtgatgccctctga

SEQ ID NO: 91568 - DNA, 631 bp, Heterodera glycines
caaaaatgctttcttcttccgcctgctgtactctgttggccgccctcatttcggcggcgtttttcgccatggcaaacgcacaaacggtgaagcagtgcctgtgctccgaaattcagccctgttccgaaaagtacatgaacacatggaagacatgtatgcagcagtgtaagggccatttttccagcgtgggcggcgacgtggaaaaattgggccactgtttggacagcaaccaggcactgctccagtctatcatcagatgcacccaatcgcatggggacgagtcgtaagtttgacgagtcgggcaaattaatgcaatgccatgggggctactgtagtcaaaattacggtcggcaattccattctaattagattattttatgccaatgacccgatttaattggaactctttgattaaccaattaacggggttggggaaatcattaaatgccattgggactactgtgatcaaaaatacgatttgaaattccgttccaactggtcattttatgccagtttggtgtcccgatttaattgggactctttacaattagtgggaggtcccgctctttttgggattgatcagtatttgagtagtgtggaaggggaaataatttggaaattaattgaaatg

SEQ ID NO: 91569 - DNA, 214 bp, Heterodera glycines
gcaagagacggatgagcaccgtcagatgcgccgtgtcactttcgaagcggacgttgtttcgacgggagctgtgaatgcttccgtcgctactttgacaatgctttacaattacggccagaccttttttatttgtctgatggctgagacggattactgcaaagcccgtgctcgtgacatgtggctggagatgacctccctccgaattggcaaggga

SEQ ID NO: 91570 - DNA, 591 bp, Heterodera glycines
gtccaattaagttaacaacagatttttgctttttgacacacaaatcaattggaaaaagggaaaagcgtgctaattgaaccaccaaaatgaatcgacgttggatttgtggtgatgtgtggatggacattctgccatcttttgaccgtcctgaacttggtctcaaaatggcattgctttccgaccgtttcgatgttttggtggacacgcatttcgatggaaaaaacgaattgacaatttggagaacaatcaatattagcaaggacaaaggaccaaaagcaaaactattgggctattggatggattttccgatgccggaccgtccgttgcccaacaaaatccgctttaaagaccttcggattgagtacattgaccattccgtgatcaaatttctccgtgccaacaagcaaatttgggacagaaatggcatcaaattggaattgtctattgcaaatgtccagtacattttggatgtttttgttcgtgaaatttggccaatctttgcgacgaacattcgctatttgagctgccgatcagttggacaatttgcgtcgttgtattcaccgacaattctcaccgatctcaatcaattga

SEQ ID NO: 91571 - DNA, 568 bp, Heterodera glycines
gccatcgctgatttgcgggaaggaggaggaagagacggagcaaatggccgagtcgaagtccgaattgggcgacgaattgtggacgggcatggaagggcctccggtgaaggaaatgaaactcgagacgaaggcggaggaggaagaggacgagttcgacgaacagtttctaaacgaatccaaaacaattccaatggacacagaaacactcactgccgcggattctctccgctcgcatttcggctcactgaccaaaggcaatcagtgccttttttattgcacttttgtaaatatttccgtctcttaggaattccaaaccgaatgcatcgttcgtctcttctcagtgcctgggaaccgccgacttcgtccgcatctattctcaaaaatcccgaacaacagcagccttcccttttgtcggacattacagaagtgttcagtgcacaacaaaatgtactcggtccatcgacttcaattgggaaaattacggaaatgactcacaatgttccgtcccaattcaacgcccaagttaccgttaaagagctcatctcccaatcatttggagagacaaaag

SEQ ID NO: 91572 - DNA, 640 bp, Heterodera glycines
gaaattttaatattcatttaataatgtcaagtcacccaaagccattttgggcttctagtgcagaagcaagacaaaagcggaaggaatggcgccaggagcgggctcaaaaaggcggttcaacaccaaaaagtcctcgacaaaccacagaagctccatcaacaaccggagagggaacatcgaccgagacaatgccatcgacttcgaatgctgagccccgtaagtgcaaaaatcacaagcgcctacttctcttctcaaccgaaatccgatcgattggaacaccgttttcgatggatattgccgccctccttggcgaaattcgggagctccacgtttttggacgtgcggacctattgacaacagaacaaatcacagatttctcaaacaaatgtctcggcattcatggctatttcaagaaactttgggagacctatccaactgcatttgacacaaacaatgccgcaggattcatccccaaattgcattggtcgctcgcccatggtccagactttgccaagcgctggggatggttcgcatggatcagtgaacagggcatcgaacatttacaccacgttttgaacaagcagtctgagcgcttcttccggtacaagggcgacgaactgctgctgaagatcggagaaca

SEQ ID NO: 91573 - DNA, 631 bp, Heterodera glycines
cccatttcgaagtgcacccgctgcaacatttttaaacggcctcgacaaacaagcaaattcttcaccaacacaccgatgaagagcgtcgtcagcccaactccgttccgccggcccctttcgctccgctgtgtgtgctcagtgctggtgctgctcatctgtgcgttcgatgtgtcactggcagcaaaagacaaggagaagaatggcaaagaagaaccaggaggcccatttaatacgctcagcatcattttgttgattccgctggtcatcgtcaccggcgcgttcgtctacctgttgtttatgaagccacagagcgaaggaaccggcgaggacgacggagaaggcgaaggagacgcggacgtggaaaagggaccaaccgaagagacgaaaacggagcctcgaattgaatctccagcaactcttttgggcgtgacagtgccgttggagcaagacgaagaagagcagaaaaaggacgacgagggtggcgaccaaaccgcggagaagaaagaagaggacgcggcggcagcggacgaacaaccgaaagaaggcgccgcggaggcagcggaagcggagaaaagtgcgacaaaggaggagacgaccgaggacacggaggagaccacggaaggatcgacca

SEQ ID NO: 91574 - DNA, 481 bp, Heterodera glycines
actaatcagatttgacctatctgaacaacataacgacatccgggacggagctcttaaattaactaaacaagtggttgctcctcaagccgtggactatcaacaaacaatggcttccccctgtgacattatcaaacaagcgcatcacttgggactgatgaatccgacccttcccgcagaataaggtgggcctggttgatccaatttcgagaccgctctgatcgccgaggcattatcttaaggctgttcggccatccaattggccgttacggactcatcggttgcgtgaggtccgcttccttagcccggcatccaaactgaaaagcgtcagtacgccagcatgttggcaacttaaccactgattgccacggattgtgtgacccacccgcgggcatgctcgcacatgagcggaatgaaaacaaacggcgaactgacaagagataaatggatgctcaacggtagcaaggcctgtattaccggtggc

SEQ ID NO: 91575 - DNA, 646 bp, Heterodera glycines
cgggcattaaatttttaataaaaaaaaatgggtattcatggccgagagtctcgacttcaactaaacaatccaaaacaaattttggaaaatttcagggcgtccaaacggcactgctccaattggccccaccattctccggcattatcactggcatcgccttcttcgtggtctccattttcagcattggcaacaaggttttgaccaagtggattgtgcagaatggcaccaaggatgagtgggcagtggtcttttatgtgtcagcagttgttgctgcactgccggttgtcgtcttctcaatgtggggaagtgatcagccccaactgtgggctcgctcatcatcaatgaaacggacacaaaacagcatcgcatcaacaatcacaacagcaacaacaatctcagtgaagcggaaagaatgcccagacacagcaaaaatatgatgctcaattagtgcgagtgtaattaattaatgattgctaagcccaaatttgaaatttcacacacactgccaattaacgggacaaaacgcttgtacaatacctatgtacaagtagtggaaatcgcatttaaatgtcaggcatttgaattatttaattatttgtattttcatatctttttaatgtattttttgcacattttgtttttctca

SEQ ID NO: 91576 - DNA, 229 bp, Heterodera glycines
ggcgttccacttgttgctgctcggcctagatcccgatggacacacatgctcattgtgtcctggacagccactgcttaaggaagagtccgtttggatcgcgcccattgacgactcaacataaccaccgcctcgacgcgtcacagatacaatactcctgttaaacgccgactccaatttaaccttgaacagccacggacgctcaaaagctgcttgttttccaggaattctt

SEQ ID NO: 91577 - DNA, 478 bp, Heterodera glycines
  unsure (1)..(478): unsure at all n locations
ccggcgcggcgccaccggtgcctggggatgatgatgaagtggaagaggaatgagcccgcatttgagcggccgctcgaagaatggcgggagcgccgcaaccaacacgcgcaaaacaatattcacccgcctccggcgccaccgcaggaggaggaggaggagcactgggcccagggtatttggccgctgctgttggtgtcgccactcttttgctcttcactatgcctgatgagcccgcttatgagcggccgctcgaggagtggagagagaggcacaaccaaaacatcgagaacaatattcacccgcctccggcgccaccgcaggaggaggaggaggagcactgggcccaggcatggcctgaggaggaggaggaggcggcgcccgangcggcgttgaaccgaggggatttctacctaatcggaggtgtccatgacccgatcagtcttcgttttgaggctgcgatttgcgcgagatgatgcgg

SEQ ID NO: 91578 - DNA, 140 bp, Heterodera glycines
caaaaaatgcaatcatatcattacatttatcatatcggctaatacaaattccctttgcctaactatgcctcttgcttggacttctgtggacactcacaacgcacttttgtgcgccgcagttccttccattggcgccttcg

SEQ ID NO: 91579 - DNA, 628 bp, Heterodera glycines
tgattcccagcagaaggggcggctgacgctgaaaattgaaaagttttccgatttttctcgcggcggagaatccggcactgaacgatacagcgatgccgtgaacatccgaggcttttcattcaaaattttggccaacacttacacaatgtctgctgacaagagcaagaaatgtttgggctttttcatcgaatgcaataaaaatgaaccgaattggtgctgtacatgttcagcaacgctgcaaattgttgtgcaaaagaaacagaaatgttcaccaccatacatcaaacagttcaaggacaacaatttcagcgccgaaaaggacgactggggtttcaaagaattcatttctatcgagcgattgctgaacccggccaatgggtggtacaatgaaaaggatgactcagtgattttggtggctgaagtgtttccgtattcgcctgcgtatccgcccagctggtctcagaagcggcaatggactgactgactgattgattgatccatttgtgcaattgttgcgattgatttaaatatttttatcgccaacaattttgacacttcttaaaatttccaatttgcatttttcacttgactgcgaatgtacatataattcaacgaatttattttgctg

SEQ ID NO: 91580 - DNA, 620 bp, Heterodera glycines
gagatatggacccaacaagacaaaaaattaaccgccctaaagaagcttcaaggtctaatttgggaggaaggctatcgcaacgggtcgcttcagtctcatgttttccccgacgttcccaaggcatttcaaacactttccgaattgggcattcccattttcattttctcttcgggttctgtccatgctcaacggcttctcttttcacacacacaatttggagacattagtaaatttatctccggctatttcgacaccgaaaccgggccaaagctcgaaagtgattcgtaccgaaacattgcaaagcaaatcaattgtccggtggggaatgtgctcttcctgaccgatgtcgaaaaagaagccgtgtcagcagatgaagcgggtcttcaagtgcgattattcgtgcgcgaaggaaacgcccccctaagcgaggacgccgcaaaaaagttcaagactttggaaagtttccaaaatctattgagaattgattgagcaatcaccatctaaaatacacgctccgaaggcaaatgatgagttacaaaaattattcaccaaataaattattgggactaggtcgttttggcgccgaagttttggcgcgccagcccgagtttttggatcct

SEQ ID NO: 91581 - DNA, 648 bp, Heterodera glycines
taagattttattttccatttgtgatgcgttatctgttgagaattaggaattataattttctcacaaagatcggcaaaagcagtgttgtccaatcgcaagaatcccctccatcgcttcttacggattcaaagccctttaaaaaagtgctcaattctgccgtccaatattacgaggaatgtattggcctggtagaagtccacaaagcccgcgacgaagtcaaccgatgcgaaaacaatttgtttttggcacaacaggcgagaagagaaaaacagggcgaaataaagtcattgcaaaaccgattgaaagacattcacagcgaattggacagaactcagcgaggcgaagacaggtatctccatctgctcacagaagaacacgcggcaatcaaaagtgagagggaattgctttcgtcctttgaacaattggaagccaatgaacgcgatgcatttaatttgctctccaataaagttcgcattagccacgaacgcgaaagggaacgagatgaacgtacgaagtactggtcgttgaccggctctttgctcggcgctttcctcggcattttcggcacgacaattgccaacgaactgaggatgaaacacattcgggaaatgattcctagtggccagcaaatccaacctttgctgaagg

SEQ ID NO: 91582 - DNA, 420 bp, Heterodera glycines
  unsure (1)..(420): unsure at all n locations
gccattttatggactttgagtttggcggaggatccggcggaggcgactcgattgttcacaaaatttgtcccggcgtcgagcgaaaagtgttcgaaggctgatttcaatcgcaaagccatgcctactggtagaaagccccacacccaacagaaaggggccaaaattaaaggaaaacggcgctgtctttctgtctatcgctcatcccacttaataatttctcacaggtgcaacttcaccggcctcttcaacttctcaatgaactgcttcaaaaacccgagtgaatactcattacagagggatttgcagtgggtcagagtggactaacgaatgaagatgatgatgacgatgatgatcattgtgtctcaaagacattgtactaatgtaatttgtctatacaataaacgagaatattcnnaaaaa

SEQ ID NO: 91583 - DNA, 458 bp, Heterodera glycines
atttctccgttttgcttgaaagttgagactttcctcagggcgaacgaaatcacttatgaagttattggcagttggaaccttcgaaatgctccgcaaaagcgctttccattcattgaattgaatggtgaacgaatttcggattcgcaaattattttgtggagattgtcggactatttcaaaattgaagatgggttgtttctacgaacaaagggcaaaagcacgtgcaattgaaagactaatcgaagggtcactttattattctctcattcgttttttatcctatgaaaatgcgactaaaatggtaaattcggaaattagcggtctccgattgccggcctttttgtctcgattcttggcaagacggttgactgaagcgacgcgaaaacgattgcttgctgaaagcaccctcctccacccgcgtgatattactttggagtcactctcacttgatttgcatg

SEQ ID NO: 91584 - DNA, 644 bp, Heterodera glycines
tccaattaagttaatttggtaaaataaacatcttattaatatatttgttttgtataaaacattatggacatttctcgacttcgaaggatttgtgccatttacgcttccgatgggattaacggatatccattcagtttggcggtgattaagaaggcattggagtcaaaattaaatgtgtgctcattattgttccttcatctccggagggatctgcccgatactctcaaaaataacccaaaattcgtcgcgttggaatgttttggtttcgattcattagaggcaattcgcaaaagattggcaaaggaagacatttcgcgcgaatctttggtgttcatcgactcgcttcccgttctgatcgagcagttctcgctgccctccacctcgtggttcctcacccaaattgccgaactgtccgcctgcgttttggcattggttcacagctcagaatccgaagatgaccaaaacagcgaagattggcgacgaattgaatcaattgcatcgactgttttcgagcttagggcgagggataaacacacattgtgccgaacgaagaccaaaaaaaggaatggcaccgcagaagagaaacttgaacaattctccatcgaagaagactattccatcactttttctccatttgattattc

SEQ ID NO: 91585 - DNA, 547 bp, Heterodera glycines
tgaacgaagcgcaaaattattggactgccgtcggtcacaaaaattttgtaattatggacagaaagccatttaaaaaaatggcgaatgggccaattgaaacaccaaaacagcagaaaaaaacgcagcagagaaaggctaataagtcggcatcggcacttccgtctaaatttgatgcgcgaaaacaatggccggaatgtgcggatttcattgggatggtaaatcatataggttataatgggaacggaggatgcgcttcggcttgggccatttccgctgcggcggtgctcaccgaccgaatttgcattgaacgactcaaaaagggcattcgctcgtacaccaatcacgcgtcgtccttcgcttccgcgcaagacattttggattcgcatttggacaataaatgttcctgttcgaccgaaatttcgactgcaattgtatggaaatggttcgccgagacgggcgtcgtcacaggcacaaattactcaatgggcttgggctgcaagccgtacatttatcccccacaaaagaattgcctgtgaaagccactggt

SEQ ID NO: 91586 - DNA, 370 bp, Heterodera glycines
ggcaccgaacttggtctccgaccagccaaactgtacccctgatgcacctggtgacggaacaacttctgccactgcggtacaacctgccatcgcaaaagaaggcttcaagaacatctccacatgtgctaatccgtcgtacgtgcccaacgcaatgatgaactgaccgcactaattgtgctgggaactgcaggcaatgagcaagacagggacaactcccaaagaaatcactcacgtggacactattgcagcgacactagacgagaacaaccgaaaactgatctcggatgcgatgaacaaggacagaaacaagggtgtcatcaccgcgaaagacgtgaagaccctgttagaccagttgcagatgattgaaggt

SEQ ID NO: 91587 - DNA, 629 bp, Heterodera glycines
gtccaattaagatttaaaatggctttaaaacctaacctgaagcctaagcctaggcctagcctaacccatgatactaattgcgtttgaaaattctcgtagatgtgaattgtctatgatccgaattgtcccatcagctgtaaaattctcctagggattatttcaccaattggtgcaacacttttgattatacgatgtcactgaaaattggattcatcggagcggggaaaatggcacaagcattggcgcgaggtttcatcaattcgggacgctatccggcagagcaattgatggcgagttgtccaaagacggaagttgcaacgattgagcaattcaaaaaaatgggcgtcaaaatgacggatgacaacacacaaattacccgtgagaatgaagtcatcattttgtcggtcaaaccgatgcaaatcggcaaagtgacgcccgaaattgcgccccatgtcaaacagagtcatttgctcatttcacttgccttagggattaggctcctctccatcgaacaatttttgccatcaaattcgcgagttgtccgcgcgatgccgaatactcccgccgttgtctgcgccggagtcagcgcttataccatgggctcggcgtgcagagatggcaactccaat

SEQ ID NO: 91588 - DNA, 637 bp, Heterodera glycines
ctccgcattggccaacactttggccaaattggtgttgcgctacgctgagctcaacaagggtgtcccctcaactgttaataaattggcgagtggtgcgctgctgctcatcgcttcaatcattcatcttggcaagtcgggcttgtgcaaacagccgatcactgaggacgacttggaccgtttgtcgaccactgttcgactgattgttgaccaatggccgaaagcggtggatgtgtttttgagagagtgccgtgcttcgttggaaagcatgctcaaggccaagggggacgtggaccggcacgaacgcgacacaaaagcgccgaagaagaaaattgtgcagcccgacaagacaattatgttcacgcagctgtccacacgcgtgtcagaaaacgtgacggacacaaatttgtttgatctttcgctttcccaagcgcttggtactgcacccaaaacgaccaaatacacctttgccagctccaaactgggaaaagtgattcagttagccggcttttcggatcccgtctatgccgaggcgtacgtcaacgtcaaccaatatgacattgtattggacgtactcgtggtcaaccagactagcgacaccttgcaaaatttgtcattggaactctcaaccgttggcgac

SEQ ID NO: 91589 - DNA, 319 bp, Heterodera glycines
cggactccccggtccgcccggaccccccggattctacgcgacgaacggacaacccggacagtcggcaccaccctcgtctcctggccgccccggaccccagggacctcctggacccgatggacagcccggcaaccccggagagtctgggcaaaccggtcagcccggcaaactcacccaaagaccgaccgtcgtcggaccgactggttcttcaagaacctctggtgagccaaggacttttttttataacggataggacggtcagtctggaaaccccggactgtgacgataccctggagaacctcgtaaccacggacaaccg

SEQ ID NO: 91590 - DNA, 653 bp, Heterodera glycines
attttggagatcactcaagaaattgagcgaatgagaggccaaagggaccaaaaactggccaaaataaacgaattggagcgtaacaacaaagagttggcagttcaatgtgaacgcttcagccacgagaacctccagcaccaatcggaggtgcaacgtcagctggctcgagcgcatgaaatttcagaaattcgcgctgagattgtccaattgaacgaccaaattcagcagggagagaatgaaatacaaacgattgctattcgctcacagaatcaggagaaattggtggaagagaagcggccaagttgggaagagtcgtgcaaaaacattcaattggctcgcaatctcttcacggaactgttggtccgttacaacaaaggtagaagcgatgctggtgccctttatgaattgccgcccgacgcaaaagcatcaccctttggacacggcacttcgaatgcacaaccgaaacgaacattcggcacttcatttgatgacgacttcaaacccaacctttcaactgcagttgatgtgaatgtccaacaaaaacctgtagacaaaacatcagcagttggtgacatcgaagtgaaaaataatgaaattgttcaaaatggcaaccaattgagcaaagagagcgtttcaactgtaccatatgaaca

SEQ ID NO: 91591 - DNA, 489 bp, Heterodera glycines
tttcctttagcctaaatgttttccaatttatcttttttttaatgacggaagcaacaaaaatttacaacagactcagtgcttttcaaaagtttcgcatcaatttgaactgccatttgcgtcgcgtccggtcgaattggttgtatcagctttcgacggcgctggtcttcgttaccgccttaaaccatgccagcatttacctcacttacgggcccgaccacccgcgatgcatgcaacaatggaaggaacggaaacagcgcggattgttaacggacgaattgctttggaaggagcggctgctgtacgcccgcaggcgtgagtttctcactgctgttgatggttacggcacagttgacaattggaaacacccgagggcgacgatgggagcgtcgactttgtccagcaaactgttttaggaagaaaagcaaacaatccaaccttcgtttaatgcaattattaaatcggattaactccaataaactttttgtttgt

SEQ ID NO: 91592 - DNA, 292 bp, Heterodera glycines
  unsure (1)..(292): unsure at all n locations
gnaagagaatcacattggtctcgggattggctttgtgcgctctcagatggctatcatcgccacgggcgtcactctgccgtctctgtactgggagatgagcgaaatgaacagcaaagtgcgggatggagttgaggacttcggcgtcggcgccgactcggactggactgacttgatggacgtgcaagtggacgtgacgccgccgtcaaagccccgtgataaccccggcaactcgatcttttttttcgggcggcgactggacaggagctgccagtgggctgggccccggcaggcg

SEQ ID NO: 91593 - DNA, 379 bp, Heterodera glycines
tctcgtggtgatccatcaactatacactcaaataaaccaaatgaacaaccttgagatggactgtgttcaagttttccgcgtaaacccgattccacgcgcactgatctgatggaagtgcacattggcgttgctccacatacccactcgccagacaatcccttcaactccattttcctacaccaaaagcaccagggattgccatcaccaatgcgtttgccaactgaatgcagcaatatggcctcatggtcctcctggaccccctgggccccccggaacacacgactatgccgacggcgtcgtgataccggaacatgccgcactatccgacaaacaaatatctccttgcactcccccccggtacacgtgtccaaaatgtgcc

SEQ ID NO: 91594 - DNA, 622 bp, Heterodera glycines
gttcaataatgtgttcttcggccgatgagcaaatttcgcgccacgccatgttggccgacctcgaattgctgtgcaggaaccggtgcggcttctacggcacgccccagtgcgacgggttgtgctcacgctgttggcgcgactttcagctggagagcaagcggcaaaatgactaccaaaacaacatcaaagtgttgcgacagcaccagcagcacgcgacgggcccaagcggtgcgggcggcggaagtgcggtggcgccgtcgtcggcggcggcggtgacgcgcaaaggctccgacgcgcgcttcaactcgctgaagacgctgctgaagaagtcgccgtgcgtgttctccgccagcacttacgaccaatcgccgctcatcattttggggccgaggccaccgagtccggacactgtgaccgcccaggagcatctacaccaatttttagaggccaattttgcccacgtttatgccaaagagttggacaagcagtgccaagtgttcattgacaacttgttcaagagtgaatttttgccaagcgatgagctctctctgctcgtccaggcattttaccaatcgatccaagaaagtgccgtcaaatttgctgcgcaaatgccaccgcccgc

SEQ ID NO: 91595 - DNA, 622 bp, Heterodera glycines
ctttccgtccactttgttggccaccaacgaaccgttcactcagccgcgccacatttgcgctacggatttccttaactatgagggccaaaagttcagcaaatctcgtggcattggcgtgttcggcgacgccgtggcttccattggcattcctccggacgttctgcgcttttatttgctttatattcgccccgaagggcaggatgcaacattcagttgggacgacttaacacagaaggtcaattccgaactgttggccaatattggcaattttattcaccgttccctcacttttctatccaaaaatttcgccggtgttcagccgtcggtcgtgccaacatcggctgagtattcgctgttcgctgctgtcgacgaggaaatggagcagtacacaaaggccatggaggaagtgcgcctgcgagaggcgctgaagcacattttggccatttcgcggaagggcaaccaatacatccaggcgggggagccgtgggcattggtcaaaggcacggccgaggaacggaaacgagccgagacaatcattggcgtctctgccaacctcagtgcgctgttgtccgtgctgctctatccgttcatgccctccattagcgcacagattcaacaccag

SEQ ID NO: 91596 - DNA, 641 bp, Heterodera glycines
gtttgaggatcaaaaaaatcgaatggaacaagaggcattttacacggtgggggagttcgacagaagcaaaattgaccttaacaagccggcgatgactgtcgaagaatacatgcaacaggttgtcgttggccgtgagcttttgcccgacgtcgccgtcgcttctcccgaagtgctcaaacggttcagcgccactcccttaagaaagtctctcacaaatcttccgggcatttgcgatgactcacgaaccttcacctccaggttcgggccgaacaaggagtggtgtgtagcgaagagcaacgaattctctcagagcagatccgagtttgagtgcgtcaaagtgcctgatgatgaccccctcaaagacgtccaattgccccccatgaatgattggatgcgttggtgccaagtgtgtttcgagagccgattggagggattcgcaattgcgcctgagaatgagaaacgcttcgcccaccacaaaggcactccgccgacggtgtcactgatcacgagcctcaaagaccaccaagtgaacgagctgatcatccaccaaataaagtatatgctcaacaaaggccaaactcgcgcgactttgcagtggctttacgcattgcttttggtggtcaaaaagcctttgctgcccg

SEQ ID NO: 91597 - DNA, 163 bp, Heterodera glycines
  unsure (1)..(163): unsure at all n locations
cgtcactctgccatctctgaattcggagatgagcnaaatgaacancgaagtgcgcgacggagttgaggccttccgcgtcaacaccgactcggcctggactgacttgatgggcctgtcagtgggcctggcgccgccgtcgaagcccccggataaaccattcaat

SEQ ID NO: 91598 - DNA, 466 bp, Heterodera glycines
tgcctcggtgtgctctctgttggctatcatcgccacagtcgtcactctgccatctctgtactcggagatgagccaaatgaacagcaaagtgcgcgacggagttgaggccttccgcgtcaacaccgactcggcctggactgacttgatggacgtgcaagtggtcgtgacgccgccgtcgaagccccgtgataaccccttcaactccatcttccgtgccaaacgtcaactgcccggacactgccagtgcgctggcctccaacagccaagctgtccccctggtccgcccggcccgtccggaccgcctggacagcccggacagcctggaggcgcaggacagcccggacagcctggacagcctggccaacccggacagcctggagcgaacggagttgtctcacgcccaattcctggcccgaagggaccgcccggagcgcctggccagaacggaaaccccggaagccaaggt

SEQ ID NO: 91599 - DNA, 280 bp, Heterodera glycines
tgtctcgatgtgctctctgtcgactatcatcgcctacgtcgtcactctgccatctctgtactcgcagatcagcgacatgaacaggaaaaagcgcaaccgatttgaggccttccgtgcctacaccgactcaggctgcactgacttgacggacctgatggtggtcatgacgcccccgtctcagccccaagatcacccctacaactccctcttcccagccatcctttaactgcccggactgtgccagtgcgctggcctccgactcccgagctgtccccctggt

SEQ ID NO: 91600 - DNA, 593 bp, Heterodera glycines
gtgccgttcaattgcgagcgaaggcgaacgatcccttagagaaggcgacgctgttaacggtatgtgtgcaggcttttatttgcaaaaatgaaaaacatgcatatatttgctccgaatggcgaattttgaaattcggtagtgccggtgggtcaatggcaaaaaaacaaaaattcggaaaattagatttagaagtttaatagaataagtgaacatttactgttcatgaaatggtgtatcatgggtaaaacaggttgatttttattcccattatgaaaacccagggagtaacagagcaagagattttttgttatactggcctgcgtccatcgatgatgacaaatggtcatgctaatcatgaaagggccttttcggaatggcccattaaccatgttggaaatgaaccgctctgagatggatagacggaataaccaacaggaagggtgtggcgacttttgggctgagggagataaagcaaccctcccaaaaaatttaaagaaaaattaccaattgcacaaaagatttaaggggggcgcaatccaacgccactgactggtcatgtatttaattaaatagcaattcagtcattttaaggc

SEQ ID NO: 91601 - DNA, 178 bp, Heterodera glycines
tgctcgtttcgacactttgccaccgcatcagcgacgaaaaggggaccgaaggttgagccgtcgcgactgcccaatgggctctctgtggcgtcggtggaactgcagggcccaatttcccaattgatgtttgctttccgttccggtgcgcgctttgagcaacacgacgaagccgggctga

SEQ ID NO: 91602 - DNA, 645 bp, Heterodera glycines
ggccaactccttcgggagtccgtccagcccggacaacgaacgccatctcgtcaacaccacgggcgccccatgccgaatttacaatgccatgccatgccaaacatttcgccacatttgccattcagaaaaatgagttgaagccgcgggcaaacaatcggcgctgaattgacaaagatgccgcttctctgttgctgctgatcgcattgctgtgctgtaccgtgcccgcaccggtggccgcaatccgtggcgcatttttccgttccgggcattcgtcggccgctttgtcttgtctaccgatgccagtaagccgttgtgccgctgtcgtcggcaacgaaaaggtcgccggtgtggtgccaccatttctgatcactgccgagcaaatgatcaacaacaaagaacaaccgccgggtggtggttgatcttcgccagttggcacagtgaaacgtgaactaacaatgctggcggatgcggcgaagcaaatgctggaggaaataaccgacaaaagtgaagaagccgctctcgaggaaatggaagaaaatacaggaaattctggcacaaagcccactgcacacattcgcttttccatcccggcactgtttgggacaccgtcacgcattttgtgacgccagtaagcgtgccgccggg

SEQ ID NO: 91603 - DNA, 334 bp, Heterodera glycines
  unsure (1)..(334): unsure at all n locations
atgatgcaaatgaactgcaaactgcgttatggaggtgaggccttccgcgtcatcacctactcggcctggactgacttgatggacgtgcaagtggtctcgactccgccggcgaagtcccgtgataaccccttcaactccatcttccgtgccaaacgtcaactgcccggacactgctcagnactctggtctccaacaggcaagctgtccccctggtccgcccggcccgtccggaccgcctggacagcctggacagcctggaggcgcaggacagcccggacagcctggacagcctggccaacccgctcctccttggccgccccaaaacatcccctgc

SEQ ID NO: 91604 - DNA, 569 bp, Heterodera glycines
tcttatttctcaccgacgataaggtatgagtacgcggacgaatcgaacatttcacagccgtcgtcgatgtacgcggacccgcccctcttcaaggaggaaatgtcggacgaatcgcacttttttctccactcaaacaacagcaatcagtcactgccatttccagcctctacgtttgtgcaggcacacgacgatgagaatttgcagccacccgttgctgcgttcagtccttttgccattgccgacacttcgcaagaattacattactcgcaaccggcgccgtcgtcagtcgattatttcttttggcaatcggacgaagcgtcgtcatcttctgtttgtgcagaagaaagacgacagatgtatgaacaatacggcggacaaaagcaaatgagacggaccgaaaatgacaaaaacacggaacaatgccaacggaacgcccagcggaacatcggcgaaagaatgccaacgatggacgacaacaacgaccaacagccgtcgattctgcgaagaatgcctttgcaatcgatggaaaacgcatcgctactgaagttgtccgaattttcctcttccga

SEQ ID NO: 91605 - DNA, 643 bp, Heterodera glycines
atcacttacagcggttccttcgcaacgacagtgcattatgtgaacacgccgttggctaacagtctgaatgaactgttagaaacaacagtctccgaaaaaggcatttcttccgcaatgagtttacaagaaaagaattcgccattatatgcttcttgcgaaaaattcatagaagccgacgcgacaagtttgagaagtttgagcatttgcagtgagctcaacgcgcgaataattcaacggggcggaagaacgcgcgtcagtggacgctctaacaaagataaaatgataagacggccatctccgccttcacttccaccgccactaccacctcgcaaacaatcttcacagccatgcttttcaaaatacattcctccggtgttcgatggagattacgttgacattgatgccataatggagattaatcaaagcgaatacattaacaaatcaatgctcattagttcgaatgccggtcgagagatgccaaaatatcaatcacacaatgcaacagattatattcaagtctatccgaatgcaacttcagaattaagaaagacggacgattcactcagagcaccgatgagacgctcgagttccttgtacgacttctttgtatctcaacaacctccagttcattctcttgcgaaaa

SEQ ID NO: 91606 - DNA, 592 bp, Heterodera glycines
gtcaaacttcgctgtcatgcccatcaaagtctcgtcctgaacatcttttctgtctcactccggagcatctttgcgatggcgtcacgcattgtgcaaacggagaagacgaagattctaagacctattgccgtgcgaaatgtgacgacaaaaaagaattctcgtgtcgcgtgtcggaaatttgtcttccgaaggaagtgttctgtgacggaataaaacattgtccttttggagacgacgaactgaactgcacggaatgtcgaggcgaagcaaagcgatgcggtgaccattgtctgccaaaacggaagttatgcgacggagaagtggactgtcaagtggacggagggagtgacgaaaaggactgcgattgtccttcttgttccggaatgaacagcgcgttgtgtgacggcgagcagaagttttgcgtggacaggcgacgattgtgtgacggacgagcggactgtccgggaggggaggacgaaaacgattgccatggcatttgtccatcattgcccaaaggagcgagcagaacggaggacaagaatacggatggaatgggtcaatgctccgatggagtcactcgcttatgggctgt

SEQ ID NO: 91607 - DNA, 579 bp, Heterodera glycines
cggatttcctggcatggatggtgaaaagggcgatgccggatatccggggccagccggacccgctctcagagatggctttgttgtggtcacacattcgcagacgacgcaagtgccgaactgtccacaaggcactgaaaagctgtgggacggcttttcattgctgtacattgaaggcaacgaaagagcacactaccaggacctcggcgatgccggctcatgtcttccccgcttctccacaatgccattcctgttctgtgattttaatgatgtttgcaattatgcttcacgcaatgacaaatcgtattggttatccaccggcgaagcacttccaatgatgccagtgaacgagcgcgaaattcagccatacatttcacggtgctcaggttgtgaaacgcctgcaaatgtgatcgctgtccattcccagtccatccaaattccaaattgtccaaacggttggagttctctgtggatcggctactcatttgccatgcacactggtgccggcgctgaaggcggtggacagtcattaagttcttcgggctcctgtcttgaggattttcgaacaacaccattcattga

SEQ ID NO: 91608 - DNA, 543 bp, Heterodera glycines
attttcttcgggcgaattaccactggcgcccaagacgatttgcggaagatcacacagatcgcttactctcaggtggtcaaattcggaatgagcgagaaagtcggtccggtatccttcgacactccggagcctggcgaaatggcattcgataagccctattcggaggctaccgctcagctgattgaccaggaggtgcgcgacatggtcagcgcggcactgcggcgaacgcgcgaacttttgatgtcgaaggtggaacagatcgaacgggtcgctcttcgactgttggagaaggaaatcttggcaagggaggacatgatcgaattgttgggtccgaggccttttgccgagaagcacacttatgaggagttcgtggcaggcacaggatcaatggatgaggacacgacgctgccgaaaggacttgactcgtggaaccgcgaacgagagaaagaagagaaaaaggacggagagaaagagcaaaagaaagaagcagcctaagccatgttgttatttgtcattttgtttatttaattagagatgaacccg

SEQ ID NO: 91609 - DNA, 591 bp, Heterodera glycines
ctgtgctcacatttctccgttcaaacaagccaatttgggacagaatgggcaccaaatttgagttggaagtgtattcatacgaaacggatcaaatatgggatgtttttgtccgtgaaatttggcccatttttgcgacaaacattcggcatttgagctttgccggtgccgatgctttggacaatttgcgtcgccgcatttcaccgacacttctcactgatcttgttcaattgtattcaatcacttcctatggactgtgccccgatggaatttctgacgatgggccaaatgcaactgccggccaagcgttgtccaaatggttgcacacgccgagcaaaaatggaaaagcgaatgaattgtattgctgtgcttatttttgtgaaataacatggatcaacactttcaaggagacatttctccgtgccaccacttctgtcgcttacaatgttcggcttgaacttctagtggctaacgaaatgaatactgttgaacaatttgagttggtgaacgaaatgacccaagaaaagttgacactgacgaaggacgaagagatttgtctgttgaaacggtgtccaattgttggggagacggcgg

SEQ ID NO: 91610 - DNA, 581 bp, Heterodera glycines
cattaaaacactttatccgtgttaactgattgcttttatgaatgggggcaaaaatttgtgttattggatttaattaattaatgaacatcggcaattaatcaggcaaaaatcaaaatcatccgtcgcttcttctccatctgcacatcgttcttgacccccacaaagcattcaccctccgctcattcattcttcttataaaagcgcttcgttttcactccgttatattccatttgcatcaccaaaaagccgtccgagtcgatgttgtatttgtagatgtccggcttctcctccgagtccacctttttgtgcgtttcgatcagctcgtcggttgttgggttgtagtcgaaggtgatcttaggcactgagtcgtccaaatactcggcttggaactcctcgcccaatttgaagctgggccactccacattctttttggtggtttcaattttgcatgcatatgtgccgctctcattcttcgaaaatgttttggtgatgccggcaagcttgaccctcgtgccgaattcggcacgaggcgggcaactcgaccatcggacggccggaatcaaacgaaatccccctgctct

SEQ ID NO: 91611 - DNA, 635 bp, Heterodera glycines
cgaaattgccacccgctggacgcctttgcattccgataacgatttcgccttctgacattggccaagacaaaatgctcctcgacaatggcactttgatctttttttccgcccaactgttgtccgcattgctctcgcttgtcccgcttggccttggcataatggcaatgctttgctctgtgtacttatataaattcaccgtctattttcatgccctcccttctgtcatggcctggtgtgcttctgcttggttctcagccaaattgctgctcgattggacggacttttggatttgcgtcaacttccaagcggatcacacaaatgtgccgttggtcagtttggtgctcagcattgtgttggcgtgttcgttcgtcttcgagattttcttcaagaattcgctgctcaaaaagcagttggccacggaatgtgccatcgtgtgaacaatacgcagagacgaaacgaatcgggaacgatgctgatgccaacaaaacacaatcaatgcgatgaaacggcgatgtgatggatgatatatatgtatatgataaatcggataacctatttctccgtcatacactgttgtattcattatactagtatatatatatcatatatatatgcatagttgtataaactcactc

SEQ ID NO: 91612 - DNA, 651 bp, Heterodera glycines
cggagggaaaagagaagcatcggcaaaaggacgacgaaaaatttgggcaaaaagaggcgaaaggatgaagcagtaacagcaccgccggtcactggcgttgtgctgccgtcctccaccaccgcagcggctgatgtgccaccgccgccgtgcccttcggaaaccgcaaatggccaaggcccgtcaacgacgacggcaaatgccaaatcaaccaccaccacagccagcaacagcaacgagcatcaggagaaggaggaggccactgcgatgttgctgaagatgcaacttggcacgccggtgccgatgagtcacaacgtttgcgctgacaagcccgactacgcggtggagaagcccgcgctggagaagtggtccattggtattcaagcgttccaacaccaaccgcccgcctcctccaccggcttcttcaaacggatgcacaaaattgtgaaaagtgtgcgcaaaaatggccccgcaggcgttgaggacggcgcagacaatgaaaacaacaacaaaaaggacaacgaagaaaatggaaaaaaggcgaaagaacaccaaaagagatgataattgggagaggacagaattatgagttatcaatcaaagcaaaacaaagaaaaactgtttttagttcaatttttttggtgatttgtgtga

SEQ ID NO: 91613 - DNA, 559 bp, Heterodera glycines
tctggtggctatcatcgccacagtcgtcactctggcctctctgtacttcgagatgagaccaatgaacagccaagtgcgcgaccgagtttaaggctttcccggcaaaaccgaatcgggctggaatgactttatggacacgcaaatgggcctgacacccccgccccaaaccccctgataaacccctttaatccatctttcgtggcaaaaagcaaatggccggacactgtcagaggggtgggctcccacagaccaaaatgttcccccggttcggcccggtccctcctggaagcctggacaaaccccgacaaacttgtaaggggcaggacaaccccgaacagctggacaagactgggcaaacccgcttcctccttgttccggccccaaaaaaattaacctgcccaccattggccctggtgggccaaaccccgcgcgccccccccaggaaatagggaccccccccgcacacaaaaggaagacccctgtgacaacccgggtaaacaccccccttcaaggggggagggaacctggaaacaaactggggagcggccccggacccccc

SEQ ID NO: 91614 - DNA, 576 bp, Heterodera glycines
cttttccctttttcttccttttcttcttcttcgtcccatcaatttcatccttccaatttgcgcgttgtttccaaaaattggaacgccattcaattgacaactctcagcctctgacagaaatctttcgctcggcccccactgattgtctcgaacaatgcatttcacacacaggcaatggcgatgagcaggaaaatcccggttactgtcgctctgttgtgtacgaccatctccaacacagctgtcgactgtacggtcacgacggaagcaaagtgccggcactgatacacccagccaacggattcgacctgtacagacgcacttcgagcatgcaggaatgtgttggtcccactcagcgacttttggcacttaatgcaaaaaaaggcgcagtgttcgctgcgcccagccaacaagtgcaaagtgtgaagggaaagacggccattcccgtgacgacgccgatggcggaagacgaaacactgagcgacgaggaattggccactttgctggaccaattggagagaaaggatgagaaaggcacggaaattgtgcgacaaaggcacgagggggagggaaaagtgg

SEQ ID NO: 91615 - DNA, 609 bp, Heterodera glycines
  unsure (1)..(609): unsure at all n locations
ctcaggagcaaattcagcacatggaattttcgctggtcaccggcggcaaaggaatggagagggaattggccagccatcggttggacgacaatgtcgccacggaactgaaacttgtgctggccgccggcctctacccacagttcggcgtcgtggacccgaccaacaatttccgagagggtcacgaccaattcgcgcacacgccctccaagccgttcgtggtgctgcacccgaacagtgcgcttggtctacggcccgaagtgctgcgatcggacgatttggactcggagggccattccgtgcagcaccaactcatctactttggccttctgttggagacgacgaagccgtacttgtgcaattcgtgccgcatccccgcctcctttttgttggtcatcgccagaaatatcacttgcgtctctccgtctgtgctctgttgcgacggttttgtcgagtttcactttgtgaaggcgcgccattgcgacgattcgctggcattcgcctgtcgcgtgcgttcgctgtttctgcagtcgcttgagcataaattgcgcagcgacgactacggcgactgtcgcgagttggagcggctgatcatcnaattcgcacgcctcc

SEQ ID NO: 91616 - DNA, 556 bp, Heterodera glycines
gaccggcagaagcgacagacatttccacaaaacagcagcggatgccacgaatgcaagtcgccgccaccccttctacggaaaagccgaaaacacggaagcggaaacatgagctctctgatgaaaccgatgctgaattagaaaaatcaaatgcaaaacgtttgagaacatcatctaaacctattacagcattcacttcgttgtacatttctttggacaaatcaaaagaactgcttggggaatccgaagctagggtaaacttgaggccattgccacaattcgaatccattggactgagaacgcgtgtggccaaatacgcggaagcaagcgaaaaatgtttattgaccaagtccggacccgaagaatttaaagaacacacaattccgattcggcgaatggaaggcatagaaaatggcattccgattatagcgaagggtcgggaaaatggcattgatgcaaaacaggtcataaagcccgtggctggaccggcagaagcgacagacatttccacaaaacagcagcggatgccacgaatgcaagtcgccgccacccctcctac

SEQ ID NO: 91617 - DNA, 448 bp, Heterodera glycines
gattgtactcgggattgcctaggtgcgctctctgatggctatcatccccacagactttactctgccatctctgtactccgagatgattcaaagaacatcaaattgcgccgactgagttgaggccttgcgcgtgaacacccactccggctggactgacttgatggacgtgcaattggtcgtgacatcgccgtccaattcccctgataacgccttcaactccatcttccgtgtcaaacaacaactgccccgacactgccattgcactggcctccaagagccaagatgtgaccctgggccacccggaccgtacgaaaagcctgtacagaccggacagcctgaaggggaaggacaccccggacatgctggacaacctgaacaatccgctcactcatgccagcaccagaagatcccctgcccacgctgccctgctggctcgcactgtcgcccc

SEQ ID NO: 91618 - DNA, 322 bp, Heterodera glycines
gctagatactcgcattgtccttgtgagcgccccgatgtgcactctgttggctatcatcgccacggcttttactctgccatatctgtactcggagatgagccaaatgaacaacaaagtgcccgacggagttgaggccatccacgttcccagcgactccttctggaatgaccaaatggacgtgcacgcggcgttgacgccgccggcgaacccccgcgacaaccccttcctctccatattccgagtgcgccgacaactgcccggacatgttgtacgaccaggacagtccggacaggctggacaaggtgggcaagccgctcctgct

SEQ ID NO: 91619 - DNA, 626 bp, Heterodera glycines
gttggacaatatttgatgaatccattcggagaggacgacgacgattttgagctcaattatgtgcttgatcggaacacatacatcgcgcatatgatagcctccgagttggccgatcagattccgtcaaagatctccgatgagatggaggtcacgctcccgcacacgcgggcatccttcaaaattcaggacatcatccccaaagggcatttgtccgactttcaaattgcgcccaaggacatgcagctgatccgtgccaatgagctggccaatgccatgatggagttggagcagaagcgcaaaaagctgagcgccattttcagggcggccggcagaaagcaaaccccaaacagcttaacaatagttcccggcgcggctgacagcagcagcattgaagagaaccgacgtttgacatcgacaattgaggaggaagcggtgccaccgccgacgacaccgacaaaaaaggaacatcccggcccatgagtgataattaaactttgaaaattgaaaatgaatggatcaatcaaatcccgctcattttaaatcatataataatttgcattttgtgtatctctctcttaacatttgcttgccattttgtgtcggataaagaaaagggaaaagaaaaa

SEQ ID NO: 91620 - DNA, 256 bp, Heterodera glycines
cattgctctctagattgcctcaaagagttctctgatgaatagcctccacacaaacaaatgtcgggcaactctgtacgcctacacgagccaaaggaacacctcaacgcggcaactgttcgaagccttccgcggaaacatcaagtcatactgaactgagttgatgtacaaattggggaccaagacccccacgacaaatgcccgagataaccccttaggctccatcttccgcgtcaaacttcaactgaccggacactgc

SEQ ID NO: 91621 - DNA, 605 bp, Heterodera glycines
  unsure (1)..(605): unsure at all n locations
aattcagtgaccgtttttccgatgatcagttctcattgttcgatgcgatccatcaacctcgtccgctggtcaaaaacaacgtacgagaaatcattgacatggcaaacaatcgacggcttactgttgtggaggcggaggatgcgaacattttgcgtatgcgggtgggaagattcatcgaattgaacggacgcaccgaaatgtctctgcatgatgcgtaccaactcaaattggttcaaaagccgcagactttggccgaggtcattgatagtggctcgctggacaacaatggtcgtttcatcgatggtgttaaacctcgcactctgctcgaggcgatttgttcgggaatgctcgacccggatgtggcgcacatcaaagcgggaccaggcgatgagctgatttccatcggagaggcgctgaagcgaggccgattgacgccgaaaggagaaattgtgttgactctgggtgaagttggcatacacngaggagagaaaattaatttgttcatggcgcacgaacggggccttttgaccagccgtgttcaacacaccatcttcgatgtaaaaggagtgagaaatgctgcggatgggtcaattatgagcttcaag

SEQ ID NO: 91622 - DNA, 502 bp, Heterodera glycines
gagaggcgaggctaaagaccctcaaggagaacctacggcaggaacggtttcaagggagaagctactggaaatccttcttatgaacaaattggcttctactggcaaactgccgccaaaatctgctaggaattttctccacaaaaagcttcaacaaagaaaatttttcgattccggtgactacaacatgaacaacaacaagcctattccacctccgataggacataatttgactgctgccacaactcccaaactggccgttccggttgaaactgaacccgataaaaaaatggaacaatcagctccgattattggatcgcaattgctcccaatgatgcgtcccttggccggctcaatttcgggttgttcgatggatgacggcgaatctgacgatgagggcggaaaacttcagattcctcgacctgacacattgccgcagcgcgaatcgaccattttacatccggcagcacatagctaattgagtcctcaaccggacattcaccac

SEQ ID NO: 91623 - DNA, 269 bp, Heterodera glycines
cttcttcggcgtttgcctgtccaccgtggccacggttatcgctgtgctttccgtgccgttcgcctaccagcacttccagcagatcggcgcccaaatgcagaacgaagtggacttctgcaaaatgcgctccggcaacatgtggcgtgaggtaaagccgaaaaggcggattggaaaagccggaaagtttcaaaaaaatttcaacaaattttcaggtcacccgcacccaggcctactccaaggtgtcgcacgacagccgtcacaagcgtcag

SEQ ID NO: 91624 - DNA, 637 bp, Heterodera glycines
gttcgacgccgtcgttttggaggacgtcgccgcgttgaaaagtgcggaggattggcgttcctttcttccgttggcaccccttttgcgggtgttcagtgacccccaccattcgattgcactccctccgtccgccgatagcgaagagacgccttttcagtgttccgttgtgcagcaaattgcgcccaacagagaagagtcgaccgttttcatccttgaccaacaataccgtagcaatatgaacgcccaaatttggtcgggtcgcgccttttacgcgccgctttacaaagagctcgacttagcaaggccagtggcacacgctcagcaggaattgcgactgaaccatttgatggatcgacttgtgctggacgaacggacggtgaacaccgacacactgacgctggtggacaccggcgcattggaaggccactggacggagacaatgttcaaaccttacaaaatggccgcttgggctggcgattcttccgccccttcgctggtcaattggggcgaggcacttctggcggccatgcacatcgattctctgctcagttacggcatttggcccttccaaatcgcatgtttcacgcacagttcggcacacggcgaagccatccgaaggattttattctctctgaac

SEQ ID NO: 91625 - DNA, 616 bp, Heterodera glycines
gaaacactttttgcggcgcgctaatcctgctaaagccggtcaaaatgtctgggcaaggctcgggctttaacaatttaacaagaccctgtccgcttggctcaaagaagcccgtttaaccggacgacctgaacccggtagtttcaaaatttagctggcgcgggctcgggtggcccatgaaagtctgtcgagcgccagacccggcccaattatattgtataatcgtaatataatttaatttttcatgaccttttccagcaactattgcctcccctcttttggatgttggccaagttttgcggaccaaaagcaccgaatctttgccctttttgctttgcttggcaaatttggcggtctgtgtccaatggttgttgtacggagttttggtcgacgatttctacatgaaagttcccaacggaatcgggacgttcatctcgaccatgcagttgtctctgttcatcgtttaccccagaacttacaaacaactcacagttggcaatgtttaagtgtgtccgaacgttgccaaagccatggaatgtttcgccgtgtttgaattgactaacaaacaataagcaaaacccagcagctgtgtgtccgttgtcagtgcattcattacctc

SEQ ID NO: 91626 - DNA, 217 bp, Heterodera glycines
gggcaacagaaacctaataacagctcatactactcgccgaagggtataatgccaatacgcagaggagtacagaaaaagattgatcggacttcgaccagcaaattgcagggcagcgccgcaaatttgcagcttttgcgcagaacctcgggactgggcaatggacaagcgcaagaaacgcgattgaggagtgtctcttccgtcgccgcgtcacaccgca

SEQ ID NO: 91627 - DNA, 627 bp, Heterodera glycines
gtttgagagcccatcgcaaaggctgtcgaatatgcgccaacggaaggaatttgtgacggagcagcaacaaaaagcatttccgtcgcctgcggtggccgttcaaatcaaagtccgcgcggacaatcggacggacatccaaatcaaagaggcattttgtgagcagaaaaccaatgaaatggcaatgccaaaagtggaacattatgccgaacattcgtccgccgatgttttttccaccgacggaaagcaaacatttggccaaaatgagtcggaaaagcgacagaatgggaagtacgttttgtccggcctttcccccgaaatttccccgccgccgtaccaaaaaatgaatatgtcacactcttcacgaacaaattcacccgaagaacaaaaaggaaatttccacgagattttcgcgctgagtgcgcaagaggcgcgccaacggatgaaggggaggaaaagggacccgcggaaggagggcaaaatgacattggaagagaagcaccggcttatactgaacttataagcagtttattcaacaatccgtccgaacttcttcccgttgctgtccaagtcaaacattctcactagtccactctctctccctccctctctctcttttagtccactctc

SEQ ID NO: 91628 - DNA, 583 bp, Heterodera glycines
ttgaagattaatgaacgttacgacaacggatggattttgttgttcagcacccgcccctcccccgatggaataaatacatcataataaatcaccgccgtctgtcagttgcgatcaatggccaccattaccacttcattacctaataaaacagcgttcatcgccagcacaggtcaaaaaatgaaatttattagtttgcttttgcctattgacaattgaaaatgagggagaaaaaagggtgacgggaaaataacaaaataataacaccaaaggaacgtgtttttcacaaaatttacatgtgacaaatggtgaacaatgtacaattaatgaataaatgagtagggaatgaagatcgaatgcgggttggtctgtgctgataagcccttttgtactttcggtctgaattttattggtaaagataaaaagaccgattccgcgtttttttcacgagaaaatcgattcgatctcttaaatacatcgtttattgttattggtgagtgaacacaaggtcgtagcaaaaagtcattttaggggtagggggcaagaaaatccctaaaattttaacggattgtttaaactccacatg

SEQ ID NO: 91629 - DNA, 645 bp, Heterodera glycines
caagtttgaggcttcctccggtgccgatgccgtccgctcttccgctttctcttccgttttgcttggccctgcttttcctcctcctcctctctccgtccccatgcttttcctcgtctcctcctgacgattcgccaattgtcagcaccaaatttggcaaaatccgtggccaacttttgcacgtcgtcgaccccgtcgatggccaacccgtggcactcaccgcctttttgggtgtgcccttcgcgcgaccgccgctgggcaaattgcgatttgagaagcctttgaaaccggaaaaatggagcggagttttcaatgcttctgaaatggcacccgcgtgttggcccattgcgcgtgccgaaatttatgcagagcctgatcagctcagtgaggattgtctctatatgaacatttttggaccggaaaaattgccgtccgatgatgccaatttggcccccgttctcgtctatatccacgggggcggtttccaggccggcacaagtcgccaattcaaacccgaagcgattgccaaatttgtacgccgtggccttctgtttgtcaccatacaataccgactcgcaatgttgggctttgccacgacgggcgacgcttcctttgccgggaattacggcctttgggaccaggcgatgg

SEQ ID NO: 91630 - DNA, 606 bp, Heterodera glycines
gagactcacattgttctcgggattgcctcggtgtgctctctgttggctatcatcgccacagtcgtcactctgccatctctgtactcggagatgagccaaatgaacagcaaagtgcgcgacggagttgaggccttccgcgtcaacaccgactcggcctggactgacttgatggacgtgcaagtggtcgtgacgccgccgtcgaagccccgtgataaccccttcaactccatcttcccgtgcaaacgtcaactgcccggacactgccagtgcgctgggctcaacaggcaagctgtccccctggtccgccccgccccgtccggacggcctggacagcccggacagcctggaggcgcaggaaagccggacagcctggaaaggctgggcaacccggtcttccttggccggcccaaaaaatcccctggccaccctgccctgttgggccgcccgggcgcccccggaggaaaggggaccgcccggaacaaaagagaacccctggaacactggggacccccccctaagggggaaggacttggaaaccctggggggcccgggacccaagagaaaccctggaaacccgggaaaccccccagaaaccttgggcaaccc

SEQ ID NO: 91631 - DNA, 493 bp, Heterodera glycines
ggagggggaagaggaggaagaagaggacacttggtggacaatgccaatgccggagttggccaaattgaagggcttcccattcgatgccgatcagttggacaaagttgaaaagctgaccgaggtgatggacgtgtggttggacagcgggttggcctggcaaacgttgacaagcaatgccgatgattttgatggcgaaagtggtgccaaattggtcgccgatttggtggtggagggggctgatcagtttcgcggctggttccaaacttccatgctcacttcaatggcattacaagacagcgtgccgtttagacgcattttggtccatgccatggcggtggacgaccgggggaagaaaatgcccaagtccaagggaaatgttgtggaccccaaaacgatcacaggttgtgaagaatcggctccctccgatgcgggtgccctcggggtggacccacttcgtctttggcgcgcttggctcgcctccgaatcctcgggt

SEQ ID NO: 91632 - DNA, 624 bp, Heterodera glycines
atgaatttcgctgtccgtttgcctttgtctcccttgaaatcgtttcttttgccccgcctttggccccccttttgctgctgctccgtctcttcttcttccgtttgttctgttcctctgttcgcctatccttcgctcgtttcttttccgtctcccgtcgccgcatttttgtgccaacgcgcgggcgtcgccggacaatcgttgcccctccgcctctttgacgtccgttctcgtcaaaaacagcacttttaccaccaccaccatggcactttctcggcccgcttctccgcctttttgcgccgtttgtttccctttggccgtggcggtgccgtcgttctgatggcgttcaacatcaaacagttgttcagcttcaaccgaaccgacgtgctggacgacgacccgctgaaggacaaagtgaagcgggcgatgctgcaccgaaagtacggcgaatgggcggcggctgttcaggtgctcaacgaggcgttgaacgaggcggtctagttgggcaatgaaattttcgtgtcacggatgtattacgaattggccaccaccttttgggagtcgggacaattggagaacgcagagcatttactgaaactgctgcacggaagatacctcactttgcaa

SEQ ID NO: 91633 - DNA, 648 bp, Heterodera glycines
taaagaggccatcgaaggggaccaaaagacgcacactttttgtggtaccattgagtacatggcacccgaaattctgatgagaactgggcatggcaaagcggtcgattggtggagtttgggggcgttgacttttgacatgctcaccgggggaccgcctttttcggcagagaatcgcaaaaggacaattgacaaaatcctcaagggacgccttacacttccgccctatttaagtttcgaagcgaaagacttgataaaacggttgctgaagcgacacgtggacactcgccttggggccgggccgggggacgccgaagagataaagaaacacgcctttttcacccaccacgtcgagaattggacaaatgtttatcggcgagaatcgaagccccgtacaagccgaacatcaccagtgaggaggacgcctctctgttcgactccaaattcaccaaaatgactcccgtcgattctccgaccgccgaattgccaccaatgtccgtcaatcccttcgaaggattcacttatatagcgccttccgtcctcgaacaagtcagccaacccacgttggtccgtccgagacaacagcgcaaaatacatggccccgccatctttcacagtttccacccccaccaatcgacgaccgacaacgga

SEQ ID NO: 91634 - DNA, 608 bp, Heterodera glycines
cgttgttgggtgcccggagtgcccggggcggtgctcacttggcgaccctcgcacggtggcccactgccctcgggcgcgaatcagagcggcggttacttggacttccccagcgtgtcccagcaccacccgggtcagtacgtttgcgcggcttacgacccgagccgcgacccgatcggaagtcgacctgtcgactcggacaatgtgcggctgaagctacggccgaagaagcctttccaagtgctagtggagccgccctaccaaattgtggacgaggaacagcccctgccacgtccttaccgctgttgggtgccggggtatccgcaggcggtgctcaaatggcgaccggcactcgacgaaatgcttcccagcggggtggaggagcagcacaacggtgcactgctcaacatcccacgggcagagcttcggcatgccggcgattatatttgcacagcctatgacccgcacgacgagtcaccggaagagaacacagcacaaagaggaagaggaggagggcaaaaagaagcagcggaagcggaagaggacggaacacgcacagcacaagcggaagaagagcatcgcggaagtgcgcaaggaaaacttgcggagga

SEQ ID NO: 91635 - DNA, 553 bp, Heterodera glycines
gaggggcgccattaaactctcgaaagggcacgaaatccgaggccatcaatttgtggccacttttttccggcagcccactttctgctctttgtgcagcgaatttatgtggggactgaataagcagggatatcggtgccgactctgcactttggcggttcacaaaaaatgtcacgaaaaaacgctaagtcagtgcccgggatcagccaaaaacagcaaagaaaccatctacctcaaagaacggttcaaaatcgatgtgccgcacagattcaaacaggacaatttcaaaagtctgaccttctgcgaccattgcggctcacttttatacggactgttcaagcagggaatgaaatgctaagtgtgcggagtgaattgtcacaatcgctgcgaaaggcatatgcccaacctttgcggcgttaaccaaaaacagctgtccgacgcacttttggagatcaaacgaagcactccgccgggctctgtcggcggagggacggcacaacagcagcaaatgttcaacggaatgggcaacaagttcaaagccctcttccggccacaa

SEQ ID NO: 91636 - DNA, 633 bp, Heterodera glycines
gtttgagccatggattgttcctcaaaaattaaactccctaatgagctcaaagccgagttggccaatgcttttcgtttcgatttccgttggtccgttctccgcgtttcttcctccgtttttgatcactttctcgccaaaagacagcataaaattcttcaaaatgttgatttgaaatttcgacagtcatgtgaacagcatgtggaattggacaatgttgggcaaaagttggccaattttcgaaacgaaatctctctgccaatgtccaatgtgccaatacatgaagctgtgatcgcggcacgcattctgatcagcttacatacgcgcaatttcaatgagttgtacgccttcttggaaagccacaaattcccacgacaaattcatccgaagcagcagaaaatttggtgggacattcattttttggaggccgaacaaacgctggggaaaagccaacttagcctattggaaaagtacaaagtgcgtgaggagcatccgttgccgccgacaatttgggacggacaacggaaaaatggcttattaaacgaaaatacgctgacactgctaaatgagcaatacgcggagagtcgttacttctatgccggaaggtgggaaatagcggaagcgacgggcctttcg

SEQ ID NO: 91637 - DNA, 326 bp, Heterodera glycines
gacgaaaacgtacagcagccacagcaacaacaaaacatggaggaggaggaagagggacagaaaagtgacgacggaaaagcggaggaggggcagcagacgaaacgccaaattggcatggacgacgacgaagtggtggcggtgctgggccacgagcttggccattggaagttgggccataccatgctgttgttgacttgcactgaggtcaacttgttgctgatgctggtcatcttctcgctgttccatcaacaggagagtcttttcaccgcttttggcttcccacccgcgcaacaacagcccattctgatcggactgttgatcatcgg

SEQ ID NO: 91638 - DNA, 399 bp, Heterodera glycines
ggcttttaccatgaagccttggtcaagactcggagaatttgtctcttaaagaaaatttttttcgaaataatggtttttctgggtcatagaattcgattctgatattgaatttttgttcgagtccgggtcaggggttcgaaatgggccgaaatgatatcagcatcaaattctacggcccacataaaacagttttatttcgaaactttttttgaaaattttctttttcaaaaaaggggggtacatttttttctattaccgagcctgggaatcatacaaaaatggagcaataaagcagttcgcacacaataaaaaacaatgtaataaataaagcttaaggcttagcctagcacccaaataataagcatgaaagcttttggcaaattgaaggactatccgcaa

SEQ ID NO: 91639 - DNA, 492 bp, Heterodera glycines
ttctgcgttcatttggtccgcctctggtggagacaatggcctaaatcaattgcaatttaaatttgaatattaaagcaaaagctgttgctatcacaaactcacccaatgcaatccgtgcaattattgagcgtaatgatgactttgttcaaattgtccgtcttttcatccttccactgaagcgtccccccaatttgttatcgcttcaacagccaaatttggcaccgcttcaacgtccaattgccataagcatattcgtcttttttctccaatgtcagcttttcgttggtccgttcgttcaccaattcaaaagactcaattggcgatgattcaaaaaattcaaatttaattcgaattatgtagctggccgaagaagtggtggcacggagaaaggcctaaacaatggaaaaagaaaagcaaagggcaatcaacccaaacacattttacgaaaatgtggacacacctctttgaagctgttcaacaatttagtgattc

SEQ ID NO: 91640 - DNA, 322 bp, Heterodera glycines
cgaacaatttgctcaaggtatggtcaaaaataagcgactatatatgatgtacaatgattattttgcattccctcaggttactgtactactactgtcgtgcacttacgaacacggcgtgtgctgtcgttgttatgatgattctcacaggtaccatatacatgctgtatatttctgtatccacatgctgtacatacagtatccatccgcttatttccaagcataggtattcaaaaaatggttttaagctaatattaaaaaaactaaaaataaaaacaattaatattgaaattaatatactcttttgcataaatcatatacatcg

SEQ ID NO: 91641 - DNA, 512 bp, Heterodera glycines
cgcgatcacttgcaattgcgtgcccttttgtaaaattttcaatgccgttttcccacgtccctctgcgccgaatgttcagaaaaaatgaatgtcagtgacgaagaaatccatttctctcggactgttcgtcatcttaatcagcggctgttcttcggtttgttatcgcaattttcgggaaacattgccattgtttgggacggtaaagcgatgaccacacaatttgacatgatagttactcctattttgttacaagagcacaatgtgaccaaaaattacaaattggaactcgtggcacaacccgacacacaacacgttgtctatttgatttatgcgacccgtcaatctgtgttattgcttatgcgaaattggcttcaccaattgcccgacgatgacttacgcctccatcacgttgtgttcatccccgacgcttcattaactctcagacaacagttgcgtgaagatcaacgcgtttgggatcgtctccaatcggtcgactctttgcctttgcattg

SEQ ID NO: 91642 - DNA, 375 bp, Heterodera glycines
ctctaaaacactttgtaaatttatatttatataaaaatcgaccttattgcaaacagttcgtgacgttttggtgaaacagtgtatacgcgcaccaacatgcgcgcccctgcaccaacagtcagcggtcgttttcgtttaatccagtctcgtttcttttggtcccaacttgaatacacattttaaaagaaaaacaaaatagacatactaaacatagtaaggcatttgattatatttctagtcaacagcgactggggcacgttcacacaatgataagaaagaacttaagcgtgtgtttgccgccagacgttgccgcccttgcttctcatgaccttcttcaacaacaatagtttgtcccagttcatcatgaatagaaag

SEQ ID NO: 91643 - DNA, 231 bp, Heterodera glycines
atccgtcaaatcattggttgttgtcgttgtttgttccccgatacgagtcctctctggtttgcaccggcatgtggtctttgcactttgggcacgttttttggagtccttactgaaatggacaacaaattgttcaccattaattgaccctttctcggcacaacgccctactaattgatttggacggcctcctcttgtggaaaaagtctttgagtttgtccgcatttgtcacat

SEQ ID NO: 91644 - DNA, 501 bp, Heterodera glycines
aagctagtcaaggactgcttcaagcgaactttgggtcgaaggattctttccttcgaccaactcaacacattcgcggccgaagtggaggccaccctcaattacagaccgattaccgcggtctcagacgcagtggatggaccagttccactgcgtcccatctttctcttacaaccagagattcatatcaattaagaaacaacaacggacccaattgattcagaggaaatgttttcctccacacacgaacgtttaacttcccgaatacaagcactccgggaagccaacgacattttctgggccaaatggcactctgagtatttaacattactcagagaaagagcccagtaggaccacaaaggcccacgacaccaaaacttcggtgaaccgaagaaagggatggtggtcctaatctctcaggacctcgttcctcgcaatcaatggccaatgggacgaatcgttgaaacacacggacggcctggagccatccgaagtgttaaagtt

SEQ ID NO: 91645 - DNA, 473 bp, Heterodera glycines
gccattccgagtcccagtgcaatttgagtgtgggcaaacatatgaccgcccgggaatgccccgtctgttacattcgacagcaccccaccaatttccacaagctccaaacctgctcgcatttgacatgcaaagcctgtctcgtcaaggggcctttttgtcagcaatttaagaggggcaaaaattgtgtgaggtgtttaaatattggaaaaatcaaaaatatttattgattcattttctcaaagcattttttatgacatcacgaaaatcgagctatttaatatccatctttttcttaatcattgtttcgttttcagtatttgaacctcgaaatcatggagagtcggactaacatttcttgtccaaattgttccgctcttctccacgccagtgacatttatgcactgcttgaccaccagcctgagctgttggaccgctatgaaaagttctcattgcgccgtgcgctcagcactgac

SEQ ID NO: 91646 - DNA, 565 bp, Heterodera glycines
tttgtggtgccattttatgatgccatgaaattggcgaaaaaaaaatttgtggtttcaagaattgagacattatcgagagagccgagggaggagagaatggcgactcaaaaaccgcgaaaagacaggtgaaggccaaaaattagtttagagaattggtcgggaatggggactcaaaaatattgaaatgacataaaaagccaaaatcatagacggattgtcgaagttagggactgaaaattcaaatattttggatttggaataccgaaaaatttgagaaaattaagagcaagggtggggagaatttcggataatttgagaaaattcagagccatttgaattgaaaactaaatcatgaaatttagaaaccttagattcaattgctcgggattcaaagaaactaaatcataatgaaatatacagaaaataggactaggatttaaatgtgcctaagtttgggaacgtgaaaacctatagtgaaaggctttcgagatcgttaatcccggatttccagaatgaagatccagaattcaaaatttgggcccttgctcaagactgaaaaaagcca

SEQ ID NO: 91647 - DNA, 535 bp, Heterodera glycines
aaggtgttcgatgccctgttcactgatccatgcgaaccacccccagcgctttgcaaagtctggaccatgggcgagaagccaatgcaatttgggggtgaatccagcggcattgtttgtgtcaaatgcagttggataggtctcccaattcttaaaaggggaatgtgagaaaaatgcaaaaaaattttttgccttgaaatagccatgaatgccgagatatttgtttgagaaatctgtgatttgttctgttgtcaataggtccgcacgtccaaaaacgtggagctcccgaatttcgtcaaggagggcggcaatatccatcgaaaacggtgttccaatcgatcggatttcggttgaggcgagaagtaggcgcttcatgtggtcgcctaaaattgattcgaaaaaaagaaagaggggaatgtcaggaccagtatactcttgcgtcttggcatgccgaattgctcccgactttgccataattgcttctaattggcgtttttctgcgggtgacccatttttttgaaaaaagtcaatgcatttc

SEQ ID NO: 91648 - DNA, 617 bp, Heterodera glycines
tgctgttggtccagcagcatttctttctgctggatcaaaattgactctcggggttatgtctatgtcctttctcgaaaactaatccaatgattttttctatctggataaagtgggattagaattttaaaaggtaaaacaaaatatttagcaacaaagccaacgacgacgcctcccaaccatttgaccaccaacaacaattcggcgtcctcttgctcatctgcagcttggcgtctatcaatttctattgttattctgtccattgctttttatttttttccattatgtttcgtaattataccaatgaaattttaaaattttatcttttaaattaatgctaataaaattgaatggaaagagacatttattccatccagggattttgctgacgtcctcaaaaatttcggcaatcgggattccaagcctaaaaatgtcggaatcttaaatcggcattctggcattttttttttattcttcgatttggcgcagtttatgaaaaaggttttgatttgatgttcctgctgatttcgacgttggatttgattcaaaataaaaaagtttttaacacgaatgttttcaaagaaatagtacataaaattgccattagagaaacaaaggaa

SEQ ID NO: 91649 - DNA, 618 bp, Heterodera glycines
cacttcacttcacttccttgcgccaacgtcaattttcttcattctttgtcaaagtcttcatcagagcatatcccttccctttttcctcctccattcactccaaaatgaccaatttcttattgctcaattttaattttgtgattgccttttttgctacattgacccaatcccaagaattcccacccgttcaacctgtcccggcaccgcccgaaacccaaaatcaaaatttggaggaaaactccgatattacaacgggtgaactgacataaatgagacaaaaggataaatgaatgtttccgttaaaggcatgccgccttcagtcacagaaacaacggttgcgccttttgatgggccgtcgcaaatgaaaggattaggcggaggagagcaaattatgaccacaacgccccaggggaacagctcagaaccaaaaccgagcagcccaacaaatggaaacgaagaaaaggacacaaaaagtgaatacggtcgaattggtgctgtaattttggtactgtaatcaaaatgttcagcagttgctgctggggttgcgctttccacaacagttgcaacgatcgaatcgccgggaaattcatttggcacgacggaaacgccactgggcac

SEQ ID NO: 91650 - DNA, 633 bp, Heterodera glycines
gcgcgagcgaagttcaccgactatttcacttcggttgcggagacggtcaaccaatacttggacaatgtgaacgactttttgcaccgagtgaaccaaatgactttttctcagcggatcgaagtgctcagtacgcttgagcgtgcgttggtcgtcgaatacccaaaaaatgcggaagaatgtgtgagttgggcccgtgaactgttcgacacgctttaccacaatgacattgcccaaatgctgcacaatttcccttccagcatgcttactgcccaaggcgacaaattttggagtggaaccaaacgctgtccgcacactttgaacttcgacgttaacaaccctgaacacttcgagttcgtcttctccgcttccattttgcgtgcccaatcttacagtttggctccgatcactgaccgcaaaaaagtggcacaattggccatggcgtactgctccaagccgttcagaccacaagagggagtgcgcatcgctgtgaccgacgcggaggcgactgccaatgatggcaacacagcaaatggcgatgcagacgaaactgaacttcggctgaacgatctgaacgtgaaattggccaggctgaagttggagaacattcgccgcatgacgcccattgactttgag

SEQ ID NO: 91651 - DNA, 350 bp, Heterodera glycines
atgagtcgaaatcgtctcccaccagaacttttactcgaaattgtcctctgcgttcgcaggggacacaacacgcctaacatttgtttctcttctcgcattttacgaactttcatggagcctcgagttgcgctgtggcggagagtttggatttctatgttacgcaaactatctgacgcttatttaaaggcacttttgacgtctatttggaactatgtgcccctggatgaaaattgccaaatgttttttggaacacttaacggagtttttcgtcaattggaagacagagaaattgctgccaattgtttgatcagtggtcccggcggcatcaaagggcaaattccgctcgcaca

SEQ ID NO: 91652 - DNA, 552 bp, Heterodera glycines
gttggacgcccatcagaaagaggaggagaagcgcattccgctgatcattcccacggtttccgagtaccgttacgcggagccggacaccgacgagaacatcattttcgaggattacacccacaacagcggcatccccgtggttcgtgccggcacagtgctgaagctggtcgaacggctgacgtatccgcagtacaccgattttttaatttgtcaaaacgttcatgaccactttccgctcgttctgttcaccggccgaattgttggcacttttaattgaacgctttgtcattccgacgccgcacattttcatggcattggacccgcagcatttgctgtcatccgtgatggcgaactcatcctgcaatgattcggcatccctctcaaatggttctctccaacattcgcaactccattcgttcgcccacaatttgtcgcagtcccaacttgagcaggcattccacaaattcaggcaggaataccaaaagcccattcagctgaaagtgttgagcatcatcaaccactgggtgagcaaccacttctacgacttcgagt

SEQ ID NO: 91653 - DNA, 611 bp, Heterodera glycines
aggacattctctttgggtcaattgaaaatgtcgtcaagccgcaggcgatgaaggagaaggaggacgcctgggaaacagttcgtactgaaatgattgagcagggctttgtcaatttcgagcgaaagtcgtggcgcgatgtacgaaatcacgactggcaatacttaagacgttctgcggttgcaaaatacgaacacaatcagaaggcgggcgttgaaatgatccaatacaacgaggtagacaaactcgtcttcgaaataatgggcaacgaagtgtcctccttcgacaacacaaacaacgattctgttttcttgcacaattttccaaatgatgaaggacaacaaaatgaagtggccgacccgccgttctttccaacgtttgccactaatgcattgcgaactccgaaattagaagaactgcagcaaatgaactccaacttaagccattccatttctgttggttcgtctcgtgacccaccggcacagacaaagggattttcggttgaaacaatcaaattttttggaatttgcagaacaaaaagattctcctccctgtggcgaaattcagtccgaccttttgcacagtcctcatttcgtcatcctctctaatcaacg

SEQ ID NO: 91654 - DNA, 576 bp, Heterodera glycines
ggaagacgtgccaacaatgtttggctgagaaaaagaagagaaagcggcaaatgcaattggaaaggaatgaaattgactttctttgtttaccctgcaatttcaaagtctctccgccgttcgcatcgcgaaaaacatcgaatatttccaaccaatcgttgcactcgtccatggaattctcctcgaaaagcgcaaattgcttaattgaagggaaaggcggcggtaattggggacgaatttggccaaactttgaaaaagagaagaatttgggcattggatgggccaacgatgtgataagtgcactcggcatcaagcggatactgaaacgggagcagaaggaatggaaggcaaaacggatgacgaacgttggaaggatagcggggactgttgaaagagccgaccgagtcgcggaagcgaaaggcgcaccgattggaaccgccgacggactcaccggcgatgccaaaatctgacaaaaggggcgcaaagggcggcatgacgacgagttcggcacttcctctgacccgttttgaattcgacgcgcgcccgaaaaccgtacggcggcgcaaaattggaggccga

SEQ ID NO: 91655 - DNA, 624 bp, Heterodera glycines
gtaaaatgtgtgaaccaattgggaataataatgatgtttccgcatcacaacatttccctggtgccagtggttccggcggtttgacgtcagttagccccctcgaacctttggatccgacaaagtttcgtaacataatggtcgagaagcatgaggtcccttcagcattcggcaatttttgtgacaatagcgaaatgacttccgatttggctcctctgggccagcagcagcagtcgtccactgggccttttctgcatccgtgtttccctccagcagctgtgtccgctttacatcagtcaaatccacaacccttcaaagtccaacagtcgccatcgattggccaacagcagcagcaacaactgtactttgttcagcaaaatgcccaaggcaacttcggtccaatgcattcgttttcatccacctccccgctgtttggtgtgagacagatgagttactttggccccggtggtgtttccgttcaaccaaactggaaccagcagcgtcaagcccaatatattaataaccctcaacttggtcagcaaaacaacataatgtcacctcctaagcaacaacaacaatttgtcgttgcaaattgtaagccttcgcagccgtgccaaatcagctctt

SEQ ID NO: 91656 - DNA, 190 bp, Heterodera glycines
atttaatacaccgtttcactttttctttgcttgtttgatttttttcagccgtttttcctgaccattccaaaattggaaattggcccgctaatttttctcgaattttttatggtctcatataacaaaaacgaatgtcttatatataatttagaccgttcgaatacaaacatggctatctttgctacttaaa

SEQ ID NO: 91657 - DNA, 543 bp, Heterodera glycines
acacatggccgccgggcaaggcaacaggtcggcacttcactttggcattttgggggcgagcgccggagggcgacggcatcgttttaataattttatttgaatttaaaaaatgttattcgcttaagtgaggtggtcctttggttcggttacattcgcgggggccacgtcaaaccgccggtggatttaattgacaggcgccgaaaaataaaaaaataataataatgattttattgtttttctcaggacaccctttcattacgcgtgtctcggtggacaagcgaacacagttgaagcgatggtataacacattggagatgaccaattcattggtcaaatactttcttcatttattaatggccggcactttttctgatcacttattttgcactaatttccaatttttgctcatttcatttgtctctttttgagtgatttgtgaagcatttggttctgatcatttctttgtcattttctgatcagttatttttaattcatcgatcatttcaaacatttgattaatgattgtccaatattccccctgat

SEQ ID NO: 91658 - DNA, 569 bp, Heterodera glycines
ttaaaaaagggacagcgaaaggaatgggcggaggaaacggccgctggacaagcgaacggacgaacggcaccaccattcgcaacactgcagcggggcaacagaacacagaggaaacaattttgtgtctatccgaggggagtcgccgtacaatttgggggttgtgaggaggagcaattggacaatcgaaacattggggaagagaacacagaacaaaagcaaaggcaaagtgaaagcgaagggaggggatttttgaaagagacgaaacgaagcgaacggagcagccaaaagccgagagatccgcgtttcattacgccgctttgttcttcctcttctgagcccgtaaagcgccgttctctgctggtggagccaatggcaccgctcgaagatcaccacgagttgccggtggtcgttttgcaagaggagcgactgaactcgcaaccgccggtcagcaaggagtacctgcaagaactgttcgttcaattggacgtcagcttcaacgaattgcacaaccgccggcccccctcttcggcatgttcctccggcgccgccccttccgcccaatccgccgg

SEQ ID NO: 91659 - DNA, 550 bp, Heterodera glycines
ggacgcgatcaagaagaagatgcaggcgatgaggatctagaatgacaaggggatcaaccgggcggacgccgcggaggaaaagtgccatcaaacgcaggaacggttggaacgtgttgaggacgaattgcgggactcgcagaacaacatgatggcgacggagaactacttggacaccgcgcaggaggacctgaccgctgccaactatttgttggaggagaaggagaacaacgtgctcgacgctgaagtccaaatggtgtccctgaaccctcgcttgggtctgttggcacaggagatggacaagcttgaggagtgccttaaacttgccaccgactaaatggaagaatcgacggaccattgcgacaagtcttaacgcgtgtcataaatgatggaaaaccgctctctgctagacgatgagcgtgccaatgccatccaagatcagctgaaggaggccctgtcgctggaggaataactggactgaaaataccaccacgtcgctcgtaaattggcaatggttgagtccgatttggaacgtgccgaggaactcaccgag

SEQ ID NO: 91660 - DNA, 289 bp, Heterodera glycines
cgctccatttgccattcggccgaccacacgtaccaacgatggacccaacctttggctgatggtgcttgtcacacatgggattgtgcctatctgaatcgacggaaggcgcaatgttgggcgatgcaaactcaaacatccgactccatttttgtgaaccctggaatctttgtggcaagaaagacatacagcctacgcgatacaacatgatgctgaagaggaacggcacaactttctaaatctgaatggccgattactgacggactcgttggtcatgccggagatgaaaggc

SEQ ID NO: 91661 - DNA, 572 bp, Heterodera glycines
aatacaaacagaaattaaaaacagaaattaaaaattttccaagaaaattaaggttttttagggtccggtggtgccgataaaagccgccgaaaaagttttgatgatttagtgcaattaattacccaaaattgtacaaaaactgctatttttgaaaaaagattaaaaaaaaatttccgactttaccaaaaatttcggaaatcggaattccgtcccatctgatatatactgtatatgaatgagctaccgtcgcacattggcaatctcaaggggggggggggtgcacattgggggatagacctttcagattcctacgtttgtactattaattatttcaaactatttatcaaaattttagaaaagttgcgaaatgttcgtaacaagttttgtatacaaatcaatggctttcgtgtttatgtcactcggattcacattttcgccatcttcggcattccgatcagagagtttgatgagcagtccttggcacagacttttatagagctgttggacacgttcggagcgacaatagaaggtgatcacgacggagatgaacactgcaacttcctcccagtgga

SEQ ID NO: 91662 - DNA, 499 bp, Heterodera glycines
ggtgcaaaaagatatgactttaaaattaatttttttttaaatccgaaaaatcacgcgaccgttctgaatccagcctaaatccccaaaaaccccacatactccggcgtgctgcccttcatggacttgatgagttcgatgagtgggtttttgtccgtcgatttgttcaacagctcgcccccgtggtcgaacagcgttttcatgtacaatgggctgaccgccagcagcgcgaccattgacggcgtttcgcccgcattgttcagcgaattgatcaacgccctgcccgcctcctgttcaagcagtgtctccaacatttgggtggacacccgggcagcatagtgaagctgaaaatgggaaaaatatgggaaatttgtttgaaaaaagcaataaaatattgaggatgtgctgccattcccaccgatgttaccaaatttaaaaagtaaatcgcaaaaattcgattttacaaaaaaacgaaaaaattttctatataaaaatattaaat

SEQ ID NO: 91663 - DNA, 533 bp, Heterodera glycines
gcgagcattacgtaaaatgggaagaaagaacctaaaaacttcaaagtcacttcgacccttggaaaatgtcaatgattcggttggaaaaataggggaagacttggaggacgaagaactcgaagaagcggacgacaacgaatcgcttgaagacgaaattggagcggaatcgggagaagaaccttttgaattagaatttgttgggtataaatcggcaacaaagtcggctaaatgtttgcttttggaagcattggaggacaacacaattgcaacttcgcgctttgttctcttcaagttttcggatggcattgaccattctgttcaggttgctaacaaagctcttcaatggattgtcagtcccgtcgactgggaaacttttttcaacgatttcttcaataagcgtgttttggtggtaaatcgtaagaccaaggattacttcgagggtttctttgggactgtcgatttgttcgaaatgctgcaaaaatttgacttggacgttggcacggatgtgaacttttctctgtatgaaaattatg

SEQ ID NO: 91664 - DNA, 602 bp, Heterodera glycines
attaatttgaatcaccactcaccgcaaaactaatgaaattgtgaaatctacggcttatatttttattaaaaatgcgatcaccacttctccaattaaattctcagtgcctttcttttgagaaataattcgaaatattcccgaacttttacaagattctgcaaaaataaaaaaaaattcaataaaattaacttaaatttcatatcagtttttccaatatcagtttattcggacattttttattgcaactatgcttttcaaggtcgctgaccatgacaagattttttgtatcgccgaagccaaattcgaacaataagtcttaaattcgaaaatctgttttttacccattaaatgatcgttataaaaagttaaaaggaatgacttgtttcgggtttcaatttttgtctaaaatttatctacatgatcgcttattatagcattggcgattttcaatttatttctatgcattttagacagttttagacccaaaagttgaaatttggaaaatttcaactttaaactatgttcgaattcaggtctatctcatatcgaaattgtgatcgcgaccctgaaaatccaagactaacaaagtgttttcaacacaa

SEQ ID NO: 91665 - DNA, 615 bp, Heterodera glycines
gagagagaggcagtcacagcacaatacccctccggggacgaccaaaagcgttgagaacgcaatgaatagagaaaataatgagtgagatggagagaagagagagagagaaagggagaggagagagcgacagagcaaaaggaaaaggcagacaacacgacaaaggagaggagaaaaacggccatttgctgttgttacactgccgggggacgagccaaaccaagttcaaagtgccggtgcgcagcggtttgttttcgttcaatgctaatcagctaattgctcactaattaccccaaataacaaactgtcccctgatgccgacattcgccaacaaatgccttccgctcgaacttctgtacgaaattgtgcctttcatccctgccgaaaatgccgcccctaatgcgctctcgtcctgttcgctgctgcacaaacttttgctgccacgtgtcatcaaatggaaagagaaagcgatggacgaaagaataatcgagctatttgaccaatttaaagaagagatggagcagaaattaatgaacaaattggacgaaattaaagaagaaataagccttgaatttaaccaaaaattcgacgctttggagcaaaaattcgacgctttgg

SEQ ID NO: 91666 - DNA, 525 bp, Heterodera glycines
ctggagggccaattcgaatttgatgcgtggcacagaaatgtaaatgcgctgctccaacttgggcctgacccggccgggcctcacccgctcgtgttcaacctttgtaaagttaatcgagtgagttccgatcagtgtccgacgtctgggcataccgccggaggaggcgctgccctcaaaaaaggttgccaaattgccgcaattgtcccaatcttttgccaaggaattgaagccgttaagtgacgccgattcggtggcatttgcaccgtacggccaattggttgccgactttgtgcaccacgtggaacagtccacggaggtgcaatggccgggcgtgccggagggcgaaatgagcgatggcattgccggaccgctggtgcaagagtttgtcgtccgatgggttccggccggcattgaggacggcgacggcgagcccaatcagttggtgctcgaatttgagggcatcagcggctcatttgcgggccaaaaagggcgcccgggcgccgcctactcatccgaactcggcat

SEQ ID NO: 91667 - DNA, 611 bp, Heterodera glycines
ggaatgtttgcgattgtccaacggcgtgcgctgtgttttccacaacaaatcgtgcaccaaaactctgcccaattcgtccttcaggcagtcctttctctcaattgccaagggcgaaacggcgatggtctcttaccaagaacactgtacagggactgccatgggagacaaagatgccgtcgaattgcgcacctgcactttgttgaccgactgcaacaattgtctgcttcaaaagggctgcggttggtgcgagagcagtcagagttgcctcggttcctacgccaattgtgctgatggtttgcttggcgatcgttcgctctgtccgttcggtggtgccaaacagcgtcgtacggatgtcgttgagcagcgtccgtgcagtttggccaccaattgcttctcatgcaatcgtcttccgcactgcacttggtttgccatcgacacgaaacacatttgcgtgtcattggcggacgaggccattcttatcgaggagcacaatcggatgcaaaccgaacggctgtcccttgcgccgatggcggacgatgcgccatctacgaacgttcagcaacaatcgaatccttcctcgactctttcaccacaatcgattatttcaaatg

SEQ ID NO: 91668 - DNA, 648 bp, Heterodera glycines
tcaaccaccctggtgcaaggaatgccatttcaaagatcattttcgtcaaaacgctcttcgcttcaccggaccccccgcggatgaaagtgtcggaagcgctcaatgcaaattcaatcaagctcagttgggacccgccattggaaccatttggtgacatcactcattacatgatatcatggaatttggtgttggaatacgacacggccaaggcgaccgatgtttgtgacaagagggcctttctctccaacatcccagcggcaaaagttgtgcatccgttcgcttcccaagacacgtgttccaaggagggctgttgcaagtgcacaggcgaaagtcgaagcggcgaagccaatgcccgcggcaaagccatcgacgcgaacaaattgcacgacgagcggaaggaaaagagcaatttcgaagaccaactccaaaatgttgtcttcgtgcaaaagacaataaactcggccgttgcccgtggcggcattcgttttcggcgtgccgttgcgttcgacgccgcaccgcccaatgagacgcgtgaacaaccacaacaacaacagcaggacgaaatagacgaagatgatgcaaaggcaattccgctgctctccgtcgaagtcgcatcatcgcttcaaaccgtgttgccctcctattaca

SEQ ID NO: 91669 - DNA, 418 bp, Heterodera glycines
tgaaaatatctttcatattgacattgacgatgtgtacattggtgccattggcactcgaatggttgcagatgacgtggactatttgtccattttgcatggcaaactgcacgaacacattgccaactttcatttcacgcttggcttttctggcaatttttttcgtcgtggtgacgcggcacaaattcaaggagacaacatccttgacatcaatgcgaacaaattccactggttcccgcacatgtggcgtcacaaccatccgccagaattgtctgcggattatctgcttgcattgatgacacgaaatcgtgtgtttgatgagaatggtggcatttgtgccaatctgagctatgccggttcaccacaacattctggggtttatccgatatatcaggctctgtaacatgcctggggcaaaatt

SEQ ID NO: 91670 - DNA, 232 bp, Heterodera glycines
ccaatcccaaccataacaaatgtgccactaacaacttgctgctctcgtggcgaacaatggatcctgaatgggcaaggcctgtttcgcggtccatgacgcgctccgcgcggtgttacccatcattgtgggccgaccccgtgatctgggcgtcatggtctctatgggacataacgactcatacgcgcgatactatgcttaactcaagcgaggtattctgactctgaagtcaccc

SEQ ID NO: 91671 - DNA, 541 bp, Heterodera glycines
ttcccttttccaccttcatggcaaccatttcgcattggtgggccaaacggaatttgcaaatggccgtctttttgctctttttcagcaaaaagtcggcgcagcgattcaaaacggagtccagctgaaaacggtgggccaacagaaggacactctccacacagccatctgaatttttaaattatgtatgaattataatttaataattttcattttctaccatccaactccaaattcattggtgccatcgtgtggatcagtcgctcgaaattcggcacggccttcgcattcccttccaactgaattcgcggggttttctctgcggtctttccaaaaaacaatttgcggaagaaaacggaatgggcagccaaaatctgaaattaattcaaagggaaacatcggaaattgcccatttaatttattgacataattaacgattaaattgtcattaattagctcacgtatttgttcacgcaaatcgtctttccgatgaccaccaaagtgtgcccactttgaacagagctaaaagagagaaatggataac

SEQ ID NO: 91672 - DNA, 568 bp, Heterodera glycines
  unsure (1)..(568): unsure at all n locations
ggcaaattttatatgaataaattggactgatttcggggaaatgaaccgatttaattcaattaaaaatgccaaaacaaaaatgggggagggcatcatggccttaaatggaatttttccatttttttgtcgcttggtttgtgcccaccatttttctttgaaatttcagcgcggattaacggagtcgcaaagcgtgccgccatttcaaatgcggcggacacaccgtcggcgccgaggcgttcaatgtgngtcctacatcaccggatcagtctgaagccgtcgccagccgaaggtattttttggcttggccatgtcacaattttttaaaatttacaaaatttcctcaaattttagcggaaaaaatggggatttttttatatagtaaatctaccatcccaaaacgtcataaaacggggattttttgtcaaattttttttataaataattcatcaaatgttcaaattggtccgttaaaatcaggcccacattatatgtcaaccaatttttcagttttttgccactttttactgaaatattttgaatttgttgctcttaatttgttgctcttttt

SEQ ID NO: 91673 - DNA, 295 bp, Heterodera glycines
agccaccaagtcgggcgaaattgcggccgctgcagggcttaaatcgacctcaatcgcggatgagcacatcgatcgcatcacttccagcaatgtgatccaaccaccgaaagacgcggcttatttgtcccgtgacatcgccccccgagttggcgtacccgtccatgtcactgcacggactgtcaacaggctttgcagctcggactacaacgcgattgcaccgggaggccaacagatcctcgcaggagactcaaaggttgtgctggctggtggaacagagacgatcagtgaagcgcca

SEQ ID NO: 91674 - DNA, 619 bp, Heterodera glycines
gccaacggaagggcgaaaggttggaccatttgcgaagataatactcaaaagtcaaactcagctgtgccgaggacgaattgtgcacgggcggctcattttgtggcgaaaactccatttgtatggcgccccgggggaaagcgttcaaatagaaaacggaaaagcgaagaaatgcatgttgcaattggaggaaaaggcgcgggacagcagccaaccggtcaaggcggagccgggccagctttgcgtggagggcggcatggaatgttccggaggggccaagtgccagaatggcatttgcagttgccctgagggtacgtctgcttttggcacgaccattggccattcatctgtcgtcccgttgccttttctatcctccctttttttctttaggccacactctcttccgcaatgagtgccttccgcctcgggcattgccaataagcattgagaaaattcacactcattctgccctttttgcgccccaatcagcagtgatggacagtccatcttcagtcggcacaaatttcgaccccaatttacaggatccaatcccatccaaaaccgtttcgcccggagcaatgtgtcggttggtatttagtctgccgatgtttcacgtttattt

SEQ ID NO: 91675 - DNA, 168 bp, Heterodera glycines
aggaaaaaaaattaaatctgagggaacgattaacaatgttcaatttcttattgcatttttgttgataacaattttccgaaaaatcctaaaataagcaccaaaatcgggagggattctcgaatcgggattccgtccaaatccccgatcccgatcaacccccaatgaatt

SEQ ID NO: 91676 - DNA, 623 bp, Heterodera glycines
aaaataattgctttgattattaacatgaaatatccggaaaatttaattgagtattggttatccaattttcacattaatatttaattgtccaactttgaattttttgcaatttaatccactgaactttttagcagttttaattttttttttttcatctcaaaataagcataatgaaatacctaacaccaaacatatttttgattgttttttaataatgcattcctctaaatttgatcaatcacaattttttgttttgcttttcgttatttaattttattataaacacttttatagggaaaccaacggaaattctctcacttccatattttatgcttaaatgcgatttggacccatttcgttccgaggccaattccatgtctcgaattcttagttcatgaaccgtgagcatgtctcttaaccgattttctgatcggtctaaattttggtcaaatctcggctatgccaattttgacattccaaaatttggcgatggcgatcaggccctaccttcttcaaataattatttggccacagatttgtacaatggcgcaaaaaaaagttttaacgggatttttcccggtcccggtcaaaatacttaagtactatcagttgtacgtgttttt

SEQ ID NO: 91677 - DNA, 626 bp, Heterodera glycines
cttttgactacggtaaccgtactctgagagggcggttggccaacgatagtgggcacagtaacgcggcggaaatggtcggccttttcctgcaacaattggcccatcatgacaacgaaaactgtgtgaacagtgcaaggagtccacggcaaaagaaggaacatgggcaacaacagcagcaggttaagaagatgaataaatggtcattggctaattatcttttgcatttcaaggaccattctctagcactgtcctttgtcgagagtttgttgaatgcctccaacaaagtgccattgtcggaccatttgccgtcaacaaaaggctgccaattgaattggcaatccaccggcattcgagagcttcgctcagaatggatagtcgatgcagcgcttaaactgaacccgcaaattccgcgccatttaaggtccccgggttaataaatgccatggcattggcactttctccgctttaaaaaagcaaaatttataatttagtaaatcattggcacttaatgccatctcacgcatcgatctgtcctccaatcagttgtgctctgtgccccatattctattcacccatttgtcctcgctccgttcattggacctctccaaaaattgcattctgcgctt

SEQ ID NO: 91678 - DNA, 641 bp, Heterodera glycines
tgtcttcatttgctaaattggatgctaaaaaagtgcttattgttgtgacgggagcaagccgtgggattggacgggaattggcccttcaaatggccaagttttttgcgacgaatgaatgttttttcgttcttttggctcgcggaaaagaagcgcttgaggcggttggggatcaaattcgcaaggagttcggtgtcatttacaacttatacaaaggcctagactaagcctttgctttaggcttaagattgcttgggctcaaccgcctattatattttcaatatagtttttctgcagaaacccctcggctgttgttgaactcgtttttgcggacttggcaacacaaccctttgcgttgggcagcattaacagccgaataaaggcgtggagagaaaccgttccgtttgacctctgtttgctcttccacaacgccgggactgtcggtgaaatggccaaaaaatcatccgaactaagcgacgaggcgcaatggcacgagtttttgcaggccaatttggtgtcagcgattttattgaacaacggagtttatgcggccttaaacaatgcagagtcggtccgtttgttcatcgtcaacatcacttcgctgctgtccgtaaaggcatttccctcgtttacccaatattctg

SEQ ID NO: 91679 - DNA, 570 bp, Heterodera glycines
gtttgagtgagtctagaatatcttaatttgctcaaaatgtcttgaaaatggttggttgtccaccaatcgttgtccgtaacgccaacactcctccgacggcaccgttttggtgccattggatcaacaacaaacgcagaggcatttagtccaacttctccgtcttccgccatggcaccgtcttcctcctctgctgccgccatgacaccactcggcgtcattttggtgtccaaggacgagtcggccgatttttgtgctgttcatgtacccatttgagcgccgtgtgtcgccgcactccgcccacattaacagcagggaaaagtgccatgagcacaaggactcagtggtgtcaatgattggtaaagacgtgccaaagttgggcggcggcggtacgccggacgacgtgccgtgccaaccagctgcaattgacagcggtgatcagcaacaacaacgtctctgcgacggcattgcgttggacggcatttcgactggttttcccgtcaaaatgttggcccctttgctcgtcgccaaaggctccaacggaaatgggacgccttttgatatcaaagtgga

SEQ ID NO: 91680 - DNA, 625 bp, Heterodera glycines
cgcctttttcgtcccttacattgtcctttttctgctcattgccttgcctatttgtttcattgaactgtcccttggccaattcatcagtttgtgtcccctctccgcttggaaaatgtcgccgctgtttaaaggcatcggtgtctccatggtgttcatttcgtgcatcatctccatttactacaacatgatcacttcgtgggccttctattacatgatcaatttgctcaaatttccgctgccgtgggcaacttgtgggaacagttggaacaccgagaattgctccgtttggaataagggcgctgttgagacgtgtcgactgctcagcggcgtcattttggcgaacggaagctgtgccaattttggcgagaatttggcgaccgaatttggcaaaggcaacgacagcgcagtcacctcgttcaccgacggtccgaaggcgggcggagtgatgccgagcgtggaatatttccagtcaaccaagttctgatgctctcttccggcatcgtcgacttccaaaccgtcaattggcaattggcaatctgtctgctcatttcttggcttttcgtctttctgtgctctttcaaagggatcaaaacgagtggcaaagttgtctatttcatcgtcatct

SEQ ID NO: 91681 - DNA, 626 bp, Heterodera glycines
gaagtacgaagaggaggaggagttgcacaaacgctttccgttgatgtcgggcgaaggccattacgacccgagcagaactgacgcgcaccacaattgcatttccagaccttgctatgggtggacagtgccggagaacagacgcgtctttttggagggggacgttcgagtggacattttccagaaatcgcagttaaaactgttcaatgtgaagcaagagaagaaaaagattggccacatttggttcaacacaatgttcacatgcccgggtttttgcggagatgcttatacgcacggggatgaggagtactcctacccggaggcgatgattgtgcggcgctgttacaaaagaaaccctcgccagccgaaaaacacggaaaagcggcagggacagcacgacgactcgaacagcgagaaggaggacacgggcagaggcagggaaaggtccgtcccagccgcgaatcgacttggcggactgcgtctaaacggaactgctgaaaccgcaattgttcccgaaaagaagcgttccgcacgttcgccgtgccgacaactcattgaaatggaatcgaggaattggcaatcgcaagatggtgaagaacacccacacaaaacgcaccagtcagggtgtc

SEQ ID NO: 91682 - DNA, 585 bp, Heterodera glycines
cccattcctctgatggttagtgattagaatcactttcccccaattgtttgttaagctgatgatgactcggtctgtgctgacatcgaccgatgggcgtgctcttcgcttgaggaggaggaaaactgtgccaatggcgcatttcggcaaagcagcgaatcgaccggcagaatcaaagagttggagcagcaacagcagagactgagcgaatcggtgatgcaactgagcactcactttgcacaagtccaatttcgaattcagcaaattgcaaaggcaccggacgaacagcgaaatgaaatgatcaaacagctgcaggaattcgcttcacggagttgcatcgatgtggggacacttcgaccagcgaaagggtcggaaggagcagcggaagagggacagcagcagcagcgggagacggactacagaacggctcagatgcgccaactgattgccgacctgcgccaacagctcaccgagttggagcagttcgcctggcaaaacggacaacttgggcccggcgaattgccattgagggaattgcgaagccgacaaatgttgttgctggacaaactgcgggagaaaattcgactg

SEQ ID NO: 91683 - DNA, 625 bp, Heterodera glycines
tacaattgtaaacggattgtaaaccggaaggcgaaaacacataaaaataggcttttttcgacctttgccggggtataactttgttcgaatttgtcgtagagctacgaaatttttttctcacccttcctctcgacgagctctacaaattgttcgcttaccgcaaaagcgtagctctgagggttcccgagaaataaggtgaaaacacacattttacaacccatttttggccagttgtaaaaagccgggtttttttcgttcgaacgcgattttctcgaaaatgtctgcttgtcgctaatttttccacaaggatagaacgatagaaaaaaccgagctctttcgaatggtaccggtcccgtggcgatccgttgcgtagttctttgcttctttttcgtttagtggttagctccccacatactttataagcaaaaaataatattttgccggaaatataaatttatgatgaagaaaaaataaaagattgaatcgtgtgaaacctccttattgattttaggaggaaaagctggaaatttttatgcatttaaatattttgaataaaaaatatttataagaagttttttcttccgcggtttttgaataaatttaaaaataaagggattttggagct

SEQ ID NO: 91684 - DNA, 337 bp, Heterodera glycines
acttattccagagctttttaaagtgcttggagagaaagttgaaatggaacgtcaaaagcatgggtcacaagatcgtgttccgggcggaacaattcctttcctttgggtttagtccctttatgtgcttggcggccttctccacgaccggtatttgactccggctgaattggaccctcttagcaagcgattattggccactgagaaacgaccgccctgagaagtgcaagttgtgattctcgctgaaaggccaaatgttaaggaataattgttgacaaatgaagtcgaagtgcaaatgattagccaattggattcgaaatacgcttagcttcccccctca

SEQ ID NO: 91685 - DNA, 651 bp, Heterodera glycines
atttcatcgcccttttatcaaaaccctgctttcgctttcatacgtttccttcttgcagtaaaaggttctcctacacactttcagtttttcattcattgccaagccgtttttctcgacttcgattgtttaggggcgaatcccataaaaattatgcaactgcagaaaacaaaagaccttcgagacatttaaaagatctcactctgcgagagcttcgcgaaattgcgacccttgcatacccacacagaaatacttattttagcgggcctttgctgtctttgtgtcagttcggtgattttcctctcagtccctcgaattctcggcaaactcatggatgaaatgaacaaagaaaaggaaaagaaatctgactttatttcgaagcttgtccgacttctcaaagaaaatccttttgctttgctcgtcatgttaattgtcggtgctggggctatcggcttgagagcgtatttaatgcacacggcgggccaattagttgtaaacgatttgcgaaccaaagtgttcaattcggtccttcgccaggacatggcgttcttcgaccgcaacaaagtgggcgaaattgtgagtcgcctttctaccgatgcttttgtcgtcggttactcggtgtccaccaatctcagcgaaggcatccgtgccatt

SEQ ID NO: 91686 - DNA, 635 bp, Heterodera glycines
gcaggagcagaaacaacatctacaccaccaccaggaggaggaggggtcgaacgcgttcaaatcgttgtttttgttggcggtggacaaagatcatcagcaggacaaggagtttttattgaacgacgacgacgacaacaaccagcaccaccgagtggaggaacagttgccgttgttgttcattgttggcagcaccgttggcaccgcgttgcaccgactgttgttgttttttgcccgcacgacgcccatgggttggcccgactggctgcagccgcacattgatgccttcgtgctctgggtgaatgggttgctcgagtattggcatctcggctacttggaatacctcgtctggcttctcctcccaattttcattgtgttcgttttgcccattgtttttctgttcttcagctacggttgtgtgattttcttgcgcatttacaagcatcggaatcgtatccgagaagcgtatgcctccagcgtttgggacggtgcccgggcgagcattgccagcttttgggaaggcgtcggttacctttggcatggctacgaaattgatgggttggagaacattccggacgaagggcccggcatgatcattgcctaccacggacccacgcccatcgatctctattatgtga

SEQ ID NO: 91687 - DNA, 630 bp, Heterodera glycines
ggagcactgacatattacggcaaatttatcaaagaaatgcgtgagctacgaagcccgctggatgaactgctgaaaaaggacataaaatgggaatggagtcgacaacaacaggaggaatttgaaaaagcaaaggaattatgctttccgacctcctgttgacccattacaacccaaaattgccgataattgttgcagccgacgcatcaaaggacggaatcggcgcaacaataagccacattttggccgacaaatcagaacgtgtcgttgaacacgcgtcgtgcacattcacagcggcacaaaagaattatagccaaattgaaaaggaggctcttggtttggtgtttgcagttcagaaatttcaccgaatgctgtatggtcgaaaattcacactgctcacattctggctatttttggatcaaagaaaggaattccaatttactctgccagtcgcctgcaaagatgggcactcatcctttcaaattatgaatttgacattcgctatgtgagcacaaccgcatttggaaatgtcgacgttttgtccagactcatcgccaattacccacggccaaatgaggacattctaatcgccaacatttgcaacaaaaccgaatgttttgtcaatttggtttt

SEQ ID NO: 91688 - DNA, 619 bp, Heterodera glycines
  unsure (1)..(619): unsure at all n locations
attctcaccatttcctctcgtccttcgcttcctttcctttcgctctttcgtcgcttttcctccgccctttcgtccgttgtcttacgccttttctctgctcattgaatgcggggattagcctccattgatcagctgatcacctcacaacagcaaaaggccaaaggacaaagggaccgacgggggaaaaggccaaacggaggccgaaaaagcgatggttttgttcaacggaacggccaaaattcgggtggtcgaagcgcgcgaccttcagcccacagaatggtcgaaaagattcaaccagtcggacgacccggacagccaattggtggatgcgtatgtgaatgtcgactgcgatgagtaccacgttggcaaaacggtgacgaggcccaagaccaaaagtccggtgtggaacgaggactatcagaccgaggtgcgcaatgggaaggaactcggcttcaccgttttccacgactgcgctttgccgccggacgatttcgtgtcgaactgtcgcatcactttcgatcacctcaaactgatgggtgtcaacgacatttgggccgacttagagccccatggccaactccatctccaaatcgaactgcanggcaaaacggccgaagga

SEQ ID NO: 91689 - DNA, 590 bp, Heterodera glycines
cttattttgacttgacttctctgttaaatttctattgaaatggataatgaaaacttttcttcctcaaactccaaacagcaaagcaggaacggtggtggacgcgtcggttcacccttcagaaatggttattcgaacagtggtagcaatggaaaacacggcggaagcaacgattccagaaaaagacggacagttattcgacgcgtcaacgaaaccgcgagctcttcccacgcttgggattcgtcgcacgtgtggctttctggggaggagaagtcccgacttgaagccgttcagcgggaatggcgcctgagtcggccaaaggccaaacaacagttgtggtccaagcagcaaatgggcggcagcggaggtcgcgtcggctctctgatggaactaacgacggacagcgcggagcgcaaaagtttggacgctctgaccgagtcagtcgcctcctcttcctccgtgcacccatcgccaaattccgtgttcacccgaaacagaaaagtcacgtcgcccccggcattggcgggcgattccgtgctgaaaaagtcgtcgccgcctgccgcgtcgtccattttcaattctgctgacaaaga

SEQ ID NO: 91690 - DNA, 587 bp, Heterodera glycines
  unsure (1)..(587): unsure at all n locations
gaagattttaatttttgcaatatgagtaccaatacgcacaatatatttgcatatatcatttgattatttttattattaatttttttaatagaaattttacttaatatttatataaatatattttttgttcttgaattaattaaaattagtcttttgccgcggtaacgaagaaatgataaaatgctctccaaaataaatttttaacaacacttcaaaaataaatgcattatggtatcttcatatatantttttatttcctatcaaaaaaagggtctgtatcagggatgggccaaattgaaaaataaaaagcgaaatgcgaaaagcgaaatttgcgaaactgaaaaatgcgaaatgaaaaaaaaaagcgaaatgcgaaaagccaaaatatgcgaaaatgcggaaagcgaaatgcgaaaagcgaaattttttctacaactttttaatagttaaaatcataaagcaaaaatcattttttaaaattttattccaaatttaaaaatcaataaaacgcttttttgaggcgcgctttttccaaaaaactttttgggaagagggggcagacggcgccggcaggcgccgccgggaaa

SEQ ID NO: 91691 - DNA, 643 bp, Heterodera glycines
ggggatttaatgttgtttaaacgctaattgatttggaagattaatgtgatttatggcattttttaaaccaatttttcattcggttcgatgacatcactcaaaattttaaaaaaaatgaaaagaaattttttcttaaatattattctgtagcctctaagtgttctcaattaacgattgaaagattgtttattttgattgctaaagtcaaaagttatggtcaattattttttgattttgaagattaaatccgccgccgatgaattaatttatttgagggattaattaggtaattaaatgccaaattttggtcagccaaagaaaataggcacaattaaaatttttataaaaacattttaaaatagaattgatcagccatttttaaatatgtgcattattaacatgcaaataaaatttggtggattttagagcatattttttgaaaaaatatttataaattaattttgcaaaaaaaatatattaaaataatgaaaaactcagaattttttcaagaattttaaaaacaataagcgttgaaatattttcaggttaagaaagggttaattcaaaattaggtaattaatttttaaaaatttgatcatccacaactcattttaattgatcaaaagctcgtcaaattttgcgg

SEQ ID NO: 91692 - DNA, 644 bp, Heterodera glycines
gtttgaggaaataattttttcaaaaaatgtcttccaatccagcgctaataaaagaaggctttgtggagaaatacaaaagcggctttttgagcagcaaatggaaatcggtgttcgcccgcctctattcggactccacattggcactgtacagcgaccgggccgattcacgtccatcggaaaccattttcctcaagaatgtgatcccctatgtttgcattggctttatgacagaccgaatgccggtctgttgtccatcacttccgccgggcactgcggtgcaacgtttgattggcattggcatggacccgagagcagagaaagtccattggattttgttcccatctgagcagattttagaggagtggcttaatggcattatgtcgacgctgccgccaccgccaaatccgccgccgcaacagcctacagtaccacagcaaaacatcggatttgttccaccaccaaaatatcctgaccaaccgccaccctatggtggtcagccgatacaaccgcaacagcagtcaccgtattacccgcctccagcggcgggtgggtacggtgcacagccacagtacccgcagcaacagtacccgggcccacagactgtagtcattgacagggcaacaaccccgagcggaggctacgga

SEQ ID NO: 91693 - DNA, 551 bp, Heterodera glycines
atttgctaagccttttttttcttcgtttcggcttcatttgtttccgtatgctttttgttttgtttttttgccatcactttttgcttaaaatatttttcaccatggcatttcccattgctttttccatttttggcattttttcagtgcttttcggtaataaaaatgatgggcccaaactgcgcgtgaagcgcagtagcagcgtcgccagcagcgcaagtgccgccggtgccatcgctggcggtgccaatgccaattcgaatgccaacaatgcgtttgcatcattttatgccgatgatgacaataccgttttgtgttgtgtgtgccctgcgccgatgacattaggcgatttgaagaaaagttcgtcgaaaaaaaataatgaaaaattattttgaaagctttgcggcttttcactatttaaaattttcaaaaatccatttttaaatggcttaaaatagaaaatttgactccaaaaagtgcctgttttgcttttttgctttcttttttcgtttttcgatttttagagcctggtcttcccgagaggccaaaaaatg

SEQ ID NO: 91694 - DNA, 626 bp, Heterodera glycines
ccatcgtgtcgtcttctcccgtcgtttctgaggtcattttgccactaacccctgaaaaccaaatttacgaattaaatttccattatcaaaagacctgacacaaagaacagaaaatcgccgagcaatttgaccgatgcttgccgaatccgccagttctcgtggatcagcgcggattggagctgtgggatcagcaactttcgagcgtgcgtggaagaggcggtgatcaaacgtttgcccgcaattaacgccgactcgcggacgtattccgtttcatcagccaaagcctggcaaataacagaaagacagttaaatattgtgctgcaatgaatgaatcaccttcagaatggaaggaatgattttggaaaggaatgggatgaaactgaaaaagtattgaaaagttaatttaggagaagttgaaattggactgaccgatctccgaaagccatgggcaaataaatgtacaattggatgtacccatcgcgaatgtgtggctgagtcgtgggtgactcggtaatgcgaataacgccgggcaaattgtcagacagaaattggtcgccaagtgccgaaatgacttcggaaagtccttgcgccgccccttgccggtcccacgaagaggagggcgaaac

SEQ ID NO: 91695 - DNA, 626 bp, Heterodera glycines
tcgaggagacaattcaaaacaaatggcaaaaggcaaaagtctttgaaaaagaggcccctgaagaagacaaatcatcaactccgaaatacgtggtcacttttccgtttccttatatgaacggccgcctccatctcggacacacattttcgttgacaaaatgtgaattttctgttggttaccatcgcctgcgcggccgtcgctgtctgtttccattcgctttcctttgcaccggaatgccaatcaaagcatgtgctgacaaactgttgagggaaattgaacaatttggcaatccgccagtgtttggctaccaaagcagcgaagaaatgtcaaaaaacgggacagaattagcgaaacaggaggaggaagtggaccaaatcatcaaggacaagagcaagggcaaaaagagcaaggctttggcgaaaactgtggctgccaaattccaatggcaaattatgcaatcgttgggcctcaatgacgcagaaattgccgagttttccaaatccgagcattggctgacctatttcccgcccaagtgtatggcggacctgcgcaaaatgggccttgcggtggactggcgacgtgccttcatcaccacagagggaaatgcctatttcgactcattcgtg

SEQ ID NO: 91696 - DNA, 583 bp, Heterodera glycines
  unsure (1)..(583): unsure at all n locations
tgcgattttgtcactttttcttttcttaattcacattttaaggtataaacggcaaaaagaaaaaactccgttggtcggattgatggaaagcgctttgccactgctccaagaacgactttcaactttgttacccaaccaaagccaaccgtcctgcatcctccaaaaacaaattttaaaaattttttactgcctaaaccatnncatganaaaccttcaaatcctatcaatggaccagttcagcaaatggctccatttgtttttggccattttggagagggaagtgcctaacgaatgcaacactttgccagaagatgaacgggccgagacgttgtggtggaagtgcaagaaatgggcgataaaaataatacaaaggatttttgaaaggtatggcaacaaaggcaatgtggacttatcctactccgatttcgcaactcaatattccaaggacttggtccttccggtgatcacctcgttgatggtgcatgttttgaacaatttcatcaacgggcattttgtgtccgacgaagtgtcttatttcacactcagccatttgtcggatgcgatgaatcaggcgcaagtttgg

SEQ ID NO: 91697 - DNA, 591 bp, Heterodera glycines
ctccgctgtgctctgttctcccagcgcttcgtccacggtggatgcatcggcggtgtccttcttcttgcccttcttgtccttcttcccgtgcttgtccttcttgcccgctttgttgtcgtcgctcttccccgcctccttcgatcggtgtttgtccttgcgcttctcctcctttttgtccgccgctggtgctgctgctgcgccttcgcccttcttgtccttcttcttgtgcttgtcgcccttgctgccagccttcttctcctccttgtcgccggcggtcgtcgcttcttcgcctccttccggcttgggcttctcctcgtcgtcgctcttcggttggtcgagcatcgggccgaggtacgccttccaacagtactgaaaaggacaaaaatgttatgaaatgcaaattgaaaaaataaagaaagcgcagcattacaattcctgctccgaaggcagcagcagcgatgaataggtaagtggccattgcgttgcgttgcgcactgaagcggttcgttggttggagtgtggtgaagaagaagaagaaatgtgaagcggagggaaagacgaccccttttatacggatccaattctgctgga

SEQ ID NO: 91698 - DNA, 549 bp, Heterodera glycines
gttttaaattttgaaaaacaaatatttatttctcagatattcatttagagaaaatttatttatttaataaagcgaaaatgaatgattggataaaatggcagaaggatggacggacgaaccgacaaaaaacgatggaattgaaatgattcattcatttgctggcgatcactaaaaaagagttggactgaaaagccaaaagcaccacaaatattatgtgaaagcaaaaaaaaaacaattagtattcaaatatattttgatgaaatcgcctaaaaatgtaaaaaaataaataaaatcatacggaaaaagagaataatggaatttggataaaatatttaattgaaaatagaataggcattggaatttctgttcaagatttaatcataatccacaggatggcattcttgtgcgaggaatggcaagaaaaagcgcttgtcttcacaaatgtgcaattgtcgcttacaagatgccaaatccaattaatttacaaagaaataatgtttgaggctgcatttgcacttttttatttgcctatttttcttttttctctta

SEQ ID NO: 91699 - DNA, 530 bp, Heterodera glycines
gcacaaaaagttttacacacgcaaaaaaaaaaataacaccaatttcacggcataaacaacacgatcatcgtcgcggctggcagatcaaaaatcgtgctgtccaccagtccgtctgctgcgagccgccccgccccccaccccctccgggggcaatttggggaaaagaatttgggtgtgtgtgtgactgtgacccatttacggcacagcctttaaaggtgcccggaggaggaagaggcgattagccgcatcttttcagaagcacagcgccttaaaaggcgttgtatggcgcggctgtcaccaaggcggggagagagaaagtaaagtaaagttggaaagtgatctgacagctgagttgatgaggcaagaaagttggtgtggttggcatgtgaaaatttatttaattgtcaaatggagttttaaaagatttaatttaatttgaacaaatattaattaattttaatggaaaatcgaatactgtattgaggaggatgatttacttacttttgagaaaccatccactgatctcaacc

SEQ ID NO: 91700 - DNA, 639 bp, Heterodera glycines
gaaagcagcagcacattagtgggtaatgatgacgataatcgtgtcattagctcattttataattattattattaattgcttttttgtcatatcattagctccttcttattattattttaatccatttgaatgtttcgaaatgcaatttttcacttttttaatcttttttattccgttcgaagagcaaaaagaggtgaggtaattaaaaacattgtaaaaatatttaacaataatagtaatttgagctcgacctggtcctggttccagcaggcctgggctttcctggacttgggtttcctgagtttttgtcccggaaatccaagtccaattcaaatataaaaaaatttaggtccaggtttggcatgaaaaccaggatttcttgtgtaatattttagaacttgttatttcgagttaccgatttgattgctttaacaaaaaaactgaaaaagtctaggcccgacctggatccaggccatgacaagcctggatttttctgaatttttgtcgaggaaatccaggccaaagtccaacctggaatccaggtccagaggtccagcttttttttcaaataatcgagatctgataaaaacgattattataaacaattttatgtgtgttagagatgtcgcgaattttgac

SEQ ID NO: 91701 - DNA, 592 bp, Heterodera glycines
gtgaccgccgcttccaccgttccgttgagcattcagaatgaaattttgtggatcaaacaggacgctctccaagttcgcaacgccgtcattctcttggagcaggagaaggacagtcttcgcaaagcaattcgcaaactcaagttggagaatggccgcctgaagacaaaggtgaaaactttgaacgaaaaggtggcaaagattagtaacgaggaaatggacgatgaagagggaaaattggcgcctgaatcttaattggactatgacgaactaaaccgaggggatttctacctaatcggaggcgtccatgacccgatcagtcttcgttttgaagctgcgatccgtgaccaaaatgccgtcgaacataaaagtgccgaacgctactactggtacaaaatggcggaattctttggcgacgaggaagccatgaagagcattctgcacgcgcagaatgtccaacaggccgaagaggccatgaaaaacatcaaaggcttcgacgttgccgaatgggacaaagtcaaacttaaacattgggaggacggacagcgactgaagcttgagcaagtccgttggatcgaaaatttgctggtgctga

SEQ ID NO: 91702 - DNA, 606 bp, Heterodera glycines
cgaaattgtcaaaactcgtgaaaatgaagctggatgagtctgaggcctttcgtacgttgttcactcccgaacttacccgactctcccaactgtttgaggggcatggattcgagattcgaatcgccggcggcgctgtcagagaccttttgatgggcacgcgaccgtccgacgtggattttgcgacggacgccacgccaactcaaatgaaggagatgtttgagcgagaacagatcagaatgttcaacaagcgtggcgaggagcacggcacggtgacatgtcggataaacgaccgcgagaacttcgaggtgacaaccctccgcgtggacgtggtgtgcgacggacggagggcgaaggtcaacttcaccaccgattgggagttggacgccttccgcagggacttgaccatcaactcgctcttccttggcctcgacgggctcatctacgattacaccggtggcatcgaagacgtcaaacagcggcgcatcatttttgtcggtgaccccatccaaaggcttcaggaggattatttgcgtattttgcgatactttcgcttcttcggccgtttctcccaattggacgcgccccatgaacagaaaaatttggaag

SEQ ID NO: 91703 - DNA, 391 bp, Heterodera glycines
tgatttgtaaaatttccaattttctctatgtccccttcggctttgttcgtttgttttggcactcggcagaaaggaggacgcaaaatgccgtgcacaaattgtatggcggaatacacacgacgcagaaaagaaatcggttgtgccgtttgtcgtttcggcttttgcgagcgatgcgttagccaaaagtgcgcagtgccatcagtgtccccgaccaaaccggtgccggtgtgcaacaattgctacacattgttgacagacccaaaacggcagtgtccgcaggcgagtcgcctcggggctgaaaagtcgcgcgatttgccaccgattggcgtgcccttcgagcaaaacgcatggggcactgatcggttgccgcccccgtcgctgcgctcgttgt

SEQ ID NO: 91704 - DNA, 379 bp, Heterodera glycines
cacgacagtaccagtattacagtccccatgattcgggagagcattcacaattgagtgtgatgcttcgaaaaaggctattggagcagttctccttcaggaaaatggtcctgttgcttacatttcaagagcattaaatcggcacgaaacaaattacccttcaattgaaagggaggcgttggcattagtttatgcagttaaggaattctcgccatatatcgttgggtctggggttacaaaagtaataacggattgtagtgccttaacaggcatgatgaaagcgaaggagctaaaagggagacttgagaaatatcaagtaactctccaaagtttcgaattagaaattatttatcggcctggaaaaaaaaaaaaaaaaaaaaaa

SEQ ID NO: 91705 - DNA, 648 bp, Heterodera glycines
attttcgatgacaaccatcggcgaatgattaacacttcaatgcttctcgcgattgatctccacaacggtcgcctcgtccgaaagtcgtttccgctgaacagtcgcattccgacgccgcgcgacaaaacgacgtcatgggtcgcggacgacaagttcttcatttttggtggctatggcatgagttggcatcggcttgaccatgcccaccaccaatatttcttccgaccccacgactttctcgacgactacatgggcagttgttggaataaccaattgctgttctatgaccttttgcttgagttgtggctggaggcgccccacggcggcacaaaaccgtcggcgcgcgcagcggcggcctccgcctactcagccacacttaacaaagtgtttttgttcggtggacgtcatgaccaaacgcgactgaacgaccttttcgtgttcgacttggaccaaatgttgtggacacaaatcgagtcgtccctcccctccgaagtgtccctttcgcccgggggtttgccccctcttcgccccgagggtcgttcctggtgcacttttacacttgtggaagcgcagaaaaagattctttgtttcggtggactcgacaccgccggaaggcctttgagcgacctttgggagttggacatcgcg

SEQ ID NO: 91706 - DNA, 638 bp, Heterodera glycines
atgaatcgcggaaattcgacattgattggtgtgccactgtgcgaccaagtttctacgattttgagccacgttttgacgagatggctcgacaatgtttcgtcccatttgctattggcattttgcacttcttgaaggaaaagtttggctgacaacaatgctggtgacatcaatccaagcgggtcgtacactttggcaatgtgtgatagaattgtgcgcttggtgattgttccctcgaaaattggcaatttgaatgcgatacgattgtgtttcggcttccaagcgattccaagaacttttgtctcttccaattctttggccaagtcttcggctggcaattgtttgagcccttcaatgtcggtgccgtaaaattctcggattatcatgccggctgctttgaagattgatttggcttcattgaccactgatttgagttgttcgtcggctttcatttcgattagaatattatcgacgtaaagattctcgtcaatgcgttttgccaagtcgttgtcgaaaagtgaaaggtgttcacggatcgtggcattaagcagaaaaggcgaaacggtcaatccgaagcttacacgactataacgaaagaccaaaatgtcttctcgttttagaggggttaattcggcctcttt

SEQ ID NO: 91707 - DNA, 646 bp, Heterodera glycines
agttccttaactgtttgcaggtcgcgtaatcggattacttttggatgggttggaacggcgcggtttggcgaagcgccagtggcaattgccaattttcggtagccaatagtgaaaccgttacgcgttttaacagtctgaaatatgggtacgttaaaaacaaaattttttagtggtatgagaggccaaaaccttttgatcgtgttgccacgaaatcacggcatcctgaactaattgaattctgcttgtcctgccaaaaagtaaatttgggtcaatgccctccacgtcgaaggccattgtgacctgtccaaccttaaagattgactgcatcaggcttgaacagacatctcaacctgtctttgattggccacacgcttaacgaatccttcggcgcctgagataaaaacgatgcgatggtttgatgtgccagcaacttcgtccctttccaataaatcgcacagctcttgaacaacgcaaacacccgcaacaccgccacccaccaccacgtaatcaacatgtagaacccgagcatccataataaagtgtacaagtaattcttcgatattttcggaacctggaaatagggttagacaaatcgggtccgggtaaagatatttacacgattctgtattgactgggtccaaaagca

SEQ ID NO: 91708 - DNA, 357 bp, Heterodera glycines
agaaaccgctgatcagagccgagaacggtggaatggaaatcacccgccaaccgctggaccaacgtcggcatcatttcggaaagccaatgggccatggattgggcatttcgccaccaatttggcggataatcacttcaaaattgattttaacattggcgcaaaattgtcgagaatttcggaaagatgccaatgactcattccattttctgtcccccacacactcactacggttgcaagtcgtgccggtgccggtagagacgaatggtcgggtaactgtgcacgtattcaccgtcgcaaatgtccgggaacgcttcgcagtcgacggagccaaaagacacccaaaaaaaaaaaaaaaaa

SEQ ID NO: 91709 - DNA, 604 bp, Heterodera glycines
gtcagccaatagctttacaaccactgaatttaggtgccaattttgaaaattgaactcgcatttccataccacgggatcaacgtggacataaattgcaattgcgtggccggcattttcaactcacatttaatttaccattattcaaggtgagattgtgtggtttccgtttgagttaattgtttcttacttttcaggctcgatgaacgttttgtccaaatgaatataattctgaaagaatgggggaaagttaggcaagtcatcgacccaaggtgggattttctttcttggagcgattgagcaatttcttccaatttagattcgggaaaatcaacagttacacgatgactctgatggtaatgcactttctccaatgcggtgtttttcccccgattctgccgaatttatacgccctttttcccaaattgtttgacggcagcggaaacgtggaagatttgcgttatgacgtcaacattaagcctaatttgcctagtctgtcttattttttggggtcttggcagttcgtacaataggcagttcgtacaatggagtttcgtacaaaagccagtttcaatttggcgtttcgtacaataatcaaattttaaaa

SEQ ID NO: 91710 - DNA, 337 bp, Heterodera glycines
ctcattttctcgtattttaccttcttaagacagtgctttctatttgacaccaaaattaattgatttgactcaaatagtgcaatagaagcgttattttgtgcaagtcacaattttagtgttgcagaatttgcattatgctgccagtttggactgatgattacgattatgaaactgaagatacagagagaagccgtcgtttgtgtaaattgcgtgcagagggaacaacgcatggatgggctcaattgttttttttggcggaagagactgaagaggacggcgaaggaatggccgcggcacagccaatgggcgcttcgaccgttctttgtgcgagaggacc

SEQ ID NO: 91711 - DNA, 490 bp, Heterodera glycines
gtgattggtaattagtaatgtacccctctcattattatcaaattaattgtttaccaaaacaaacatattgtactagtatatacacacacccattgtctgccaacctgggcgggcgtccgcgcgagcgcatgcccggataaatgtacttgacaatcacacgcgcgcgcccggtgccacggccgccgcgcatgccgcgcgggggccgattggtggaggacagcccgggcacattggtacgcttcggcatcaccttgatctgacggcccaggaacagcgagtcgttcaacgaggtggacgtgttcaccgcgtccacgtccgcgaattggatgtacgcgaaactggaggaaatgtggcaaacatatgaaaatgtgttagcaaaaggactataattagtaatgtacccctctcattattataatcagtcccgcccgcccccttccgcttttcttccccgaaaatttaaaaaaaatttcagaaatttttaaaaaaa

SEQ ID NO: 91712 - DNA, 638 bp, Heterodera glycines
gtttgagttggcctttttctgcccattttcttaatggcttttcgcccgtgaaatgaccgccacttcgacgacgatcgtcagcgagctcgaggaggaggaggagaaggagcagaaaatccgtgcgattgtcgttttgccggccccggaaataattgacgcgcggcagggaactgccgcgagggatgcgaacgaagcgatggaggaaatggccaaagcgatgcgggaaaagacgagggactgtgcgaagctgatctctgcccactcggctgtcattttcactgcaaattttttgcaaagtcgcgtcgtcatcaatgacattggcggacaattggccaaactttacgatgcgttggaagtgaaaaaggcggaagagtttgagcaaaggatgaacgaattggcaagtgccggggatgagaggagagggagaaaaattgccgaacttcgggaagcatttcgcgagtgggagactcttttggcacggcttgacgtcgagttggagcgggtggccgggccaaacatccagacggaactcggcgaaacgggcagggaaattcaattggtgtcctccaacaaaatgttcaaaggcggctccctcctctcctacgttcagtcctcctcctaccctctgatgttcctcg

SEQ ID NO: 91713 - DNA, 628 bp, Heterodera glycines
aaaacatagaaaaacctatgtttttcggatttattttatgccattttcttctaattaaaaatttttcgcctcttttcttcatgtttattaaatgttaaatttgttgaaataaaaaataattaaatgatgtaaaaaaatatttttattaatgtaaaatttataaatgaaatataaaaattttaaaatcagaatgtaattttatttcttaaattattttatgcataaattatttaaaatcatcgcattaatagaataaaattttataaaaccaatgtgccacagcaataaaattttaaaattatttttgtgcataaattattttaaacccgtcccttaatgcaataaaaacttttaaaaaaccaaagcgcttcatctataaaatttcaatataaaatttttatttgcgcttttattggtttatttattttcttttttattcatactccaaaaaatcaaatgctatatatagagtggttctcatttctatgcttacaaaattatttattttaaagttctaaggcactcaatggagatgccttccttaaagttcaacatgattgcctgggccatcttgctcattccggtaataaacctccaatcagtgctgatcaaacaaattttttttttt

SEQ ID NO: 91714 - DNA, 624 bp, Heterodera glycines
cacagttggtgaaaatatttctgatttgcggaccaatgaaacagcaaatattggcatttttttatgactgcgtaattggaagagtgagactttaacaataaattgaaaattgtctggatttggattatttcaaggtttgtacaattaaagttgaaggcgaacagtcaaccacaacaatcagcgtaaagtcaacggaaccaacggacgatgaaattttgtttgacattcatgagaagtgcggccgagtccgagcggttggtttcgcgccggacatgcaaattgtcagcattcaacaggaggacagtgtcattgaatttgtgctgctgcaggagggcaaagttgtgggcacttttcggcacaattgcaccgcaaaaggcgccgatgtgctcggcgtccattggctgtccaactcccaagtcgcttttgtcaccgacttgggctgcgagttcttttgtgtgtacgcgtacaaacgcacgctgaaaatgacccaacggctccctcaaatttgtttgtttgtgccagcggtgtacagaacaacctttttagtttcgtaacttttcagcaaaatgttccgcacactttgggcacggctgaggttgattttggctactcttcaacaaagcc

SEQ ID NO: 91715 - DNA, 480 bp, Heterodera glycines
agttctgttcaattgcatttccctttttctttgccctctctttcctttcccttcactcactgttcccgttcacggcactctccgccagaatgttgctgttgccgttgtcaaattccattagcattggctcgtccccgtcggggttattcggcttcactttcggtgccgttgtcgttgccttcgtccgtttaattgacggggacggcgaattggctttgttcgtgctgttcgtgatcagaatgaatgttcggctcacttctgctggtgttgttccttgagttgttggcctttctttgtcaattttcccttttggtgtttccctctgttcctccgttgttgccatttctgtcgatggccgtgccgttctcttcgcctcgggggtcgtcggccgttgcctttgaggcggagatggcggcacggcactcgacgacgccggctcgtgctgttccagctcttcttcggcttgctgttgcctctgct

SEQ ID NO: 91716 - DNA, 632 bp, Heterodera glycines
cgatcgcaacctcttgtggcattttgaagcccggggaggatttcttagcgcttgaggggaaggaattcaacgaccggatccgggacgagcacggcgaagtttgtcaggagaagttggaccaaatctggccgaaactgcgtgttttggcaagggcacagccgacggacaaatacattctggtcaaaggcatcatcgacagcaaactgagcgctaaccgcgaagttgtagcagtgaccggggacggcacgaatgacgggcccgctttgaagaaggcggacgtgggatttgccatgggaatcgccgggacagacgtcgccaaagaggcgtccgacataattctcacggacgacaatttcacttcgattgtcaaagcagtgatgtggggtcggaatgtgtacgactccatcgccaagtttctccaattccaactcactgtcaatgttgtggccgttgtcgtcgcgttcgttggggcgtgtgccattcaggacacccctctgaaggccgtccaaatgctgtgggtcaacctcatcatggacactctggcttctttggctcttgccactgaattgccaaacgaggacttactaaagcgaaagccctacgggaggacaagtccgttgatttcgcgcaca

SEQ ID NO: 91717 - DNA, 624 bp, Heterodera glycines
gagaaatgaatcctttttggagacactgtctaattccaaaaaggcgaaaattgttattagagacgcatccgatgaacaactattatgcctggtagaaatttgtctcaacattctaaagggccgagttccattgcgtccacgtcatttaaagaagctgaaagctcacgcacagatgcttcgtcgtctcgcccgcacacgttgttctcgctctgccaaaaacgttttgctacagcacggagacggcctcccagccattgtagggctcattgcatcgattgcccttccgcttattgcgaacgtcattgaaaattatacatagtgcttgataaagtttaaaaaaagtaaaatgcaacatacaaagcgctatttgttggtccccgaagagatttatcagagtttggcaacactgtcaccgtctgacggttcaccaattgggctggtccgtgccagaattaaacaaataaaaaatgatgatgccataaatgaggcggaaagagcagtcaaatatgagcaggaaattaagcgtctcaacaagctcaaaaaggacgaggatgaacgtcccgtcggtgttaaattagaaaatttgagtgatgtggttgacgccatgccaaaaccattcaacat

SEQ ID NO: 91718 - DNA, 619 bp, Heterodera glycines
atgagttcaagcaaccgtcagcaaatttactaccaaagccgtcaccatccgcagccccaccgtgtccccggcttgtcattgccaattgcttcgtcctctcaccacgacattggctccatcagtcctcgacatgaccatcggcagatggtcatcgtgtccgggagtgactcgtgcacggattgcgtggccgattaccattcgtcgtgcgactgtcccgcctgcgaatcgaaaaatcttgcttcggtcggacatgacgctgggctggacgaccaccagctgtactcgtactcactggaaccgacacagttggaggacgacgacgaggggattgtgcacgaattcacaacggactctggcgaacgccatgtggtgatcatgacgaagaatgatgagcatttccaggagggcatcaccattcaagaaagagttcgtcgtcagaaattgtctgaagccgcccgtagccgatacgctcagctcagcgatgaggagaaacgagcggtcaccgaacggagaatcatcatgcgacaacgacggaagcagaaagaacgcgagatggaggagttggaggcgatactccgcgcaagcaatgacatcaccgacgatttgattcccctggatg

SEQ ID NO: 91719 - DNA, 653 bp, Heterodera glycines
gcaagggatgttcagaagcgcaacactcagtccgaacggaaggggagagttggaaaagacagcacacgacggccgttgcccgcgttatttattcgcacgaccaccgctaaatggggaggaaacgacgaagaataaaaagaaaagggtagaagaaaagccaaaagggaaggagaaacaatcgaagaaagaggcgaaaacggacgaaaagggaaaaaacaaaggcaacgacgaattggacgtattcgcctcattgggcacactgcaaaagtcactggtgaccagagacttgatgagccgattctgtggacaacagcgttcgtcattggccgaagaagcgattgtcagtcattcgacaaaagcggacaaatctatggacaatggctaccccctccgcggcacaaattcctttttgccacaatcgccgtccgttgggccgcggtcgactgcaacgccattaacaaattcgtcgggcagcagcgaaagcgacagctcatcgttgggccggtttcgaagaggactgtccattggcccggcattttccggtatttctgattccgttgaagacccctcgctggccgagaaaattacacggaattacgaaagtatcttcctaaagacattggagcaggtgaacatcactcgccgttgctctg

SEQ ID NO: 91720 - DNA, 614 bp, Heterodera glycines
atggaattggatttggagttccgtccattcaacaattacccgacaatgtcttggagttgattttcacctatgtgtcgccttacgaggattacaattccataaaattggtgtcccggcgatggtattatcttgcgaccgcaacgttgaggcgaatgaatcattttttcaacaaatgcataaacttttcatggcactttgtcgagggcgatcacctcctctcatagcggtgttcccacgcggcgtgtttccatccccgtcattgtgtcgtgtatatttttggtggctgtacgaatacgtacactgcgttcaacgacctgtggcttttcgacttgagtcgtcgtgaatgggaacgcgtgatggtcgcccgtcctccgctgccctccccaaaggcactcgcttcgatggtccgtttcggggacaacctcctcctattcggcggcttttccaagtcttcgatgaaccccattcatcagacaaacacattttacaacgaattgcatttgttcaacacagcatcgacgtgttgggaggagattatttccgagaacactgcgccccatttgggcggccattctgcttccattttgtcttattttatgctcgggttcggcggc

SEQ ID NO: 91721 - DNA, 589 bp, Heterodera glycines
gaatgagtccttcccgaggagttggagcagtacgcggacgctgtggcgccaaaatctttttttgtttcattttttgcccaattttcttcaaattttttgccgcttcaacagcggtggaggaaatagcacaatgttttgagcagcaatacgccaacagaatggtcaaattcggcgcacttcacgtcgtccgccgggttggcattatttcaccattgggtgccttctatttggcacatttcattgatgaagcagatacaacaaaggagctccgccgttacccatcactccgacaacggcatttggcacggcaggaaaacggcgaaattttggtgatttactcggggcattccgcgcactctttggaatgggcccgtgtcgatttgttggcttccgcgcttcggcttgagcccattttggacggggacgactttcagccgcacgtgtcgcccgtactgctggttactgcgtgccctgcgcccgctgtgtctgcgcccgtctcattgcccgccccgtactcgttgaaaacgcgcagcagcacaacaagcggcgaggagcagcagcgtatggtcaacaacaacaatataacgcc

SEQ ID NO: 91722 - DNA, 627 bp, Heterodera glycines
gtcgacacataatggaaaaggtacagacaacagagaattaattttcccctcattagctaattgccattacgtcaaatcaaaagataatttgtataaatttaaggatgattttgccaacaaccaagaatatatcacggtgatggtgtacaaaaatgatgggaagcgcgtctatttgccatgtgcgttcggctgctttaatttacattacccgatattctaatccgttttcagttgaccccaagccaattttggagggcactcgcatcaacaggtgcctctgcctgatcattctgtcccttttttaatttgtccatttcaattagtccccattatctttgtcaactgattgtccgtgagcctggcattcaacgctttacgcttgtcattgcgcaagtacaaatatcatatattaatttattttaatattaatttagtttaccatatccatctctcccaatattttcttttacagtatgaaaagatgaagaccatttactacagtttgcgggtgtattcgagcgcagattttcgttgcggtaatatgccaatgccgtacaaattccaccgcaaagtggggtaaggaaacaaatttcattgaaaaaattgaaagtaaattttaaggaagcg

SEQ ID NO: 91723 - DNA, 410 bp, Heterodera glycines
cgcctttaccttccacccctgcgcgtcttcctggctggaccggtgcgcaaagtacgggatgttgtccgagaaccactggtaaatctcgctgagcttcagccgtccgtcaatggcacagccgagcgcgcgcgcgatcaagtccgagtaggactcctcgccccagggattcggctttttgtgtgaatgctgctgcgctgcttgaccaccaataccaacagcaccatcatctgtgacaccggtgggcgccgttccgccgtcagcggtacgtcgacggactcgcttcggcttcggcctgattagtgccatagaggatgtgccgagttgagcggtggagaatgacgatgacgcggtgacaccgcaaggaccaccggaggaggacagcaacaacgactgttgtactgcttgagaat

SEQ ID NO: 91724 - DNA, 411 bp, Heterodera glycines
ggggggaaacgtagtgcacccggacaaaatatcgccgcagaaatttaaaaaaaaattttcaaactttaaaattttaaagaaaaaaattctttaaaaattcagcgctttttttgttgttgttgaaattttatgataaattactgttttttaacgaaaaatctttcaaaattttcaatgatttttttcttgaaattttcatattaaaaattttcaaagattttcttctttaaaatttttttttttaaatttctgcggcgatattttgagacgcaccccaatccatgacaaggggtgcgccagtcagaccctcatacgtcggacgtttggcgcagggggggggtgcgccaggaccaatttttcttaggtcggcccccaattttccccggcgacgaccttttttccaaaaaactt

SEQ ID NO: 91725 - DNA, 530 bp, Heterodera glycines
atttcccgccgacatctgatcaagcgccacccagtctgatcagcggcttatggcacaacgacgctgaagccagcccggacaattcgccattgttcgatcaacacccatggcatcccaccgatggtgccatcccagccgatcattcatcaccgccaggccacccatggcattctgccgatgccatgccgggtcatgcacacacaacggcggttgatcaaccaacatgggatcagcaggttaaagctatgtctgatcagcgcccaccattgggacctgatcctcaatatttggtgactaccgccacatcaatcaacaagcatccgccggcggcaccacaacaaaagccatcgccaatttcggcaccacattcggccacattgccaaggacacagtcgacgccttccgctgctgccagccggccatggactccgtcgacagtcatccatacgactataaatacgacctatcaaggcagtcacgggcatcatcaccagcaattgccaacgccacccgccacaccgtcgccgcgg

SEQ ID NO: 91726 - DNA, 473 bp, Heterodera glycines
gtgacaccaaaaggcccaacggcgggtgtcttacttttatgcaaatttcataataccttcatcatttaattaaaatataatttaaattaattaccgattcatagctaaggatggcattaaaattgaatttgggcactcaaactttgacacgccttctgtcattatgtgactgaagctgactacatccgtcaattggtcaaaatgcaacaattgcagtcgaattcgtctgtcaacaaagtcacaaaattgtttcaaatgaatggaattggcgacaatgcaacacacagcgaagaagtggtcgtacttaattaattagtgagttaattaattaattactaagaattaattaattaaaaagtttctttattatttaattcattcccaaattaccttctctgtaaagttagcagtcggaaataattggccccaattttcggagggatttgaattttgaatctttcggactttaatta

SEQ ID NO: 91727 - DNA, 628 bp, Heterodera glycines
ttcgccgggtggtcctaaaccgtaaaaatcaatatttgccttgaaacaccatcacctggcggtgagtcttcgccacgctcgcccggaggcccctcttcgccggcttcgccgtggggtccaatttcgccctttggtcccggctcgcccttagcgtaaccgatgccctgctcgcccggcggtcctcgcggcccggcctcgccgatctcgccttgcagtccgatttcgccctcggggccctcctcgcccggctgtccttcgcgtccgggtgatccaggggcacctaagcaataaatgttttgacattcattcgcctaaatgccagtgccaaccctttgctcctttctctccgcggaatccgcgtttgcctttgtatccagggggcccgggagggccggcagggctaaatgaattacacatttagcaattcggaattcaattccacgcataccaaggtgcgcattgtccgcctccgcccagttggccaccgtattcgccttcgccctccgcctgtgacaccaattcctccgggaaggccgggtttgcccgtcctgccaggctctcccgggtatcccggcgaccccttcggtccgggcgggcatcattgactggcagccacaaccggcgaaga

SEQ ID NO: 91728 - DNA, 654 bp, Heterodera glycines
cttcaacgccttcgtttgctgatgggacaacggctcattccaatgggaaggattcattagcagaagggcaaggacacgcaaagaagcccaagcttactcaaaaagtaataatttcaaaagagaaggctttgccgctgaaacaagcgattccaaatacgacgagaactttgaagaagcttttcaacgagtgcaaaacggacaaagaacagtcgcaaccaattctgaagaggaaaatacctaagtcgaaggtggagcccaacggagtcacagtgaaagcggaagaaagtacagaactttgcttacaaagcgtcgtccatcctcaccattcgccggaagtgccaagtaccagcgggtcaatgtgttatgacagtcggacaacgatacctataagtgcttgggagggcaaccaaatggaacggatggatggggataacgataaaaaggacaacgtcaatagaatcgagaatttgttgcccatggtccggggagaattccgagagcatttggagggattggacgaggcaattcggcaacaaaattacccgaaagctggggaggaagtgcaggcattggccgactctttgttcgatgcggatgaatttgacaacgaacaggcggagtgcatttctctctgtttactacacatattcctgg

SEQ ID NO: 91729 - DNA, 159 bp, Heterodera glycines
atccctcccaaccttttctggcgattgtaccaattatacgagtttttggaacacatttaaggcaggtgttcatgacctgaacattcccaattccctcaaatttacctatctaaagcaatgtctctctggtcctccccttactttaattaattctctccc

SEQ ID NO: 91730 - DNA, 552 bp, Heterodera glycines
ttataaaccatataaaaatgatgaacgaaaagaaaaaaaattagtcatgagaattgtgaattttttttgtccacaataaaaaaggccctaattaaataattaaagtaattaaatttgaaagcgtaaaattatttttgctcctcatcagttggtcagaggatggaacaatcattggccccaaattaaagaaaagtacgatgatgtcagaaaagggctcaacacaaaacgagtggagaaaattggcgaacaagttcggcagaacgtagcgacggacttcagccacgaaagccgatggaaactgaagcaaatagtggaggaggacaaggaggagcagaactatctgcagcagaaccagcagcacgagaagctgaaggaggagtatgagaagcaggacgaggacgctgactcagacggtagaattgacacggaaattcgaaatggcattttcaaaggggcaaattgccaagttgaactgtgagcataacttacagccggtggtaatgggggccaattaaggcataatttggtgataattggcgagtatttactttc

SEQ ID NO: 91731 - DNA, 653 bp, Heterodera glycines
ggctgagcgggcaaagaaacggggcaaagccaaaggggataaatctgaggagagaaataagcaaaggaaatgggagaggaaaagctgaccaaaaagataaaacaaatgataaaaggaaaagcaaagaaaaatgggacgataaaacggaagaaaaggcaaaagaaaggacaaatggtcaaattgggagaagataagagacggaagtgataagggacgatgattcatcagcagaaagaaccaaaaaacaaaacaaaagcctacacaaaactgttggtgaagtgaagcggtgaatttgggcaaagctttcaaagggacgagaaaattttgaaggatttgccgcggcgaaaagagacgccgactccgttgggaagtgagcagcggaatttcgggaggaagaagccatccgacaagcaatcgcagggggaaaaagccaatcagagggaccatctgctcaatggaccaaaaaagagaacgccaatggcgccgaaaataatccccggaaggcatatactcaattttgatctaaacactcgaataattaggtaacaattaacaaattaatcaaccaaacaactcacgccgcctctttcgcacattctctgcgcatgtttgtaaaagaacggtttgtgccattgtccaaatttgttcaacaa

SEQ ID NO: 91732 - DNA, 303 bp, Heterodera glycines
  unsure (1)..(303): unsure at all n locations
gtacacaatgaccattttttgatgtttcaatggtttttgactaaatttagcttatttggatcaatttaggaacaaaagtaatcgaaaattttgagttttcgacatttttgttcgaattcgggtccgggattcgaatttgatcaaaatgaatgggttanngattcgtgatcagtgaccctaaaaaccccataaaacgtgttttcacgacaattttccaaaaaggggggaccatcggcagtattacctaaaattttcttggtatcatttaaagagcccattaaagttctctaataacatacaaaa

SEQ ID NO: 91733 - DNA, 606 bp, Heterodera glycines
caacaacagcagcagaatatgatgcaatttgcacgaaaacattcgagcagttcattggccgagcaacggatggccatggacagagaccatctcgatttggcattccatcatggctccaccgtgtcgctgtacgccggcaccggcgtccgcaatcagccgatgcttccgctgagtaacagtgccaatcgcatggtgccattgacaacaccggcgtcgcgtgcaaaacagcgcaagcagcacattatgaacgcctattttggcggttttggctcggcactgaacaaattggcggctgcgaataattggacaattaacggcgtgaaaatgatgggcagcaacgaggaagtgtcttcatcggtcgagatccaccaaaatcatcctgcttccggcatcaatttctgtccaaatccgtcgcagccattgcgccaaacacggggcacgttctcacagcgaaagctgcagaatcaccagcaatggactgcccgatcggtggtcggcatttacacggacgaagaggacgaggaggaggaggacgacgacaatgttgatgaggatgcggatgatgatgacgacattgcggatgatgtggacgtgtcaaccgaggaa

SEQ ID NO: 91734 - DNA, 588 bp, Heterodera glycines
agaaaacttatttttatggcaaaaaattaatttatttttttcgaaaaggggtggacaaattatgctattaccaaagactgaataatgtccaaacaaaatttatcatgaatgtattttgtcaaaaaagaacgggaggagaaggcaatgacaaaacgacttgaaaagcatggcgcaatgggacaatacaaaaaagcatttgccattcattcgaaatcatcaatctgcgcaattgtgccgcatcccctcaattgatttgggccagcaaaatggcacggcgctcagtgttttggaacagtgcgcgtaccaaacgcttcacctgcgccggcttcagccaaagtgccaatggaccggtgccttcgcaccaacgcggtcgacagtcgtggtcagcagattggccgaaatctccgcgtcgctggaggcgatgtcctccttggccaggattatgttcgccattgcggacaacaaatacgaaaccaactcgccgacacaatgcgtcagcacgaaatcggacagcacctgggaaaatgcggcaaaattgatgcgtttattggcattttattaagaaattcactcttttcccacacctct

SEQ ID NO: 91735 - DNA, 461 bp, Heterodera glycines
agaaaaaatggaagttttatccgacgaagaagaaggaatggcattgtccgatttgaaagagacagcaaagaaaaacaacgaagaagccaaacgccgagaatttgaccggcgactgccaatcattcactcatatttgggcgatgtcaaccaaggggaattgtctggtcaagaaattaaacaaaggcaatttgaggaacctgggaatacaatcaaaatttcggtttttgttataaacgaagtttgtctgtttccgggccagaaaatgccaatccaattccaccaaaggtcaggcatccaatttgtgcacaatgcacaccgtcagcaaaatatccttgcccttttcactgcggaagaccctaatttcgaatttcacaatgatgaggaattttcgtccgtgccatgccaccaaactggcacattgtttcagatgcaaaatatcttggaaaatggtgagaatgatg

SEQ ID NO: 91736 - DNA, 229 bp, Heterodera glycines
gtacggcgaccccaacagcatgcggccctccaacgacggcagcgccgccgccgcagccgccatgagtgtgctgcgcacctccaacaccctctacaacgcccctgactccgtgccctccacccccggcgcccccaacacggctactgccgctgccgcggctgcagctactgccgcagctgcagctactgccgcggctgcagctactgccgcggctgcagcccaaccttca

SEQ ID NO: 91737 - DNA, 466 bp, Heterodera glycines
tttgagcttccaatccaaataactgaatcttttccaattgtttctttatgctttggcgccgttccggtaattcgtcgtctgtcggtcgaagcggcggcgaatcctttggacaacgcgacacaatgggccaattgtcctccgccgaattgccaaccgtggccaatgccgtggatgtacagtcggaagaaccgtcgacagattcaaagacggggcccgaaattggaaacgaagcggggcggctggagaagctggtgatcagaccgagtcagcccatcgacatttgccgagcgccctctcagaatgagccgaggaatttccatctccaacacttgcaaaagccaatggcacaacgactgttgcagcgaagtgcctccgaaatgacaacagcagtgccaaagtgtgcttcgaccgatcgttgggcatccgcaggcacacaaaaggggcaccaccagccgagagtgattca

SEQ ID NO: 91738 - DNA, 505 bp, Heterodera glycines
acgcggcgtcggcggcggaagcggcgccggacgcgcagagcggcgaagcgcacgccgcgggcattgcctacaaaattcggctggcggtgccgcacgtgctcattttttccaccacaattttatacaatttgttcggcgctttggcttttcaatcgttggagcgcccatttgagcttgcccacctgcaaaagcattctttggccatttctcaagcgcagaatgccctcctccaactcggtctctcctccgcttccaatgattcttccttcgctgctgatgacagcgcctttaacgttacacttatggtcacaattgacgaactcattcgtgtttcgatgaatgcgtttgaggaaggcattcgtgccgatgaaattctgctggccggcgcttcccatggcaattggcagaatttggcacttccgtctgtcgatgggtcgccgccacttggccattggtcttctgatcaccaccagcacaagtccaaatggaacttccattcttcgtt

SEQ ID NO: 91739 - DNA, 517 bp, Heterodera glycines
aaaaaagggaatgaaaaaacaacaaattctgatgacaattcacaaaccatgcactcatcacatctccgcgacggactgaaattgaattttcactttaaatttggcttttttggcactgccaacccgaaatatctttgttcaaatagccacggatttcgcccagaatgaactcaatgtcactgttgcgcggcttcggagaaaacgaaacgtcgcacggcgagtccgtcgtgccggccaccgtcattctctgccatggactaaaaatgtacgacagtttatgaggacattccaacacaaaaacgcacagaaagaaaatcactcgtccgtcggtggtggacgggtccaaaaggcccgtgttggcgggactgtaatagccgggcaacacaatgtgcacgccggcggacggacgacagattggctccgtgtccgggtcggccatcatacggatggagtcggtgaatggaccggtggcattcacaatgcatttggcacggatgggaaacaattcgccagtcaa

SEQ ID NO: 91740 - DNA, 358 bp, Heterodera glycines
tttgatccttggccagaactgggcggacggcattcattgctatgacgggagcgccctgcaaaatgtgtggtgggaaaaggttggagaatacgcggccactttcccgagcagcaccgagtgcaaggagaacagtttctcggacacgagcggcggtgcgaaaaatggcaaggacaaagtgttccaaatgaacggcggcggcactttaacgatcaaagattttgaggcggaacgcattgtcaatttggcgcgcgcgtgctgcaactgcaaaacgcaatgccaaaaactaaagtttgtgctggagaacattaaagcgactgagctgaaaacgctgttgagtggcctcaacaaaaattatggc

SEQ ID NO: 91741 - DNA, 572 bp, Heterodera glycines
gtgaccaaaatggaaacataaaaatgccatgcaaaacggcacttcaaatattgcaggggacggggggggggaaacagaatttggcaccaaatttatgcagggaaagaaggcatgccaaagttataaattgtaaaattaaaaaagaaatatttatataattatatttttaaacttaaattaattagaattttgtcattttttaaaaaagatatattataccgttttcaattctttaagtaaccacggcgaaattaatcaggaaataaaaagaattttgaaattaattaaaaaataaatttaattatttgggaatttgttttatgttttcaaaattagccaatttccattcattggtttggcgttatggtggcattccttttggcctgcgcttttggcggaaaacaaaacaaagcatgatggggatgaatgaatgtccatgtgccgagactgaaatgagaaatcagaaaccgtgaacaaatttttgtgaaggtgttgttggctaggggccatctttttttggcgagggcaaactgagaaaattcagtgaatttttaatcgaattttccacaatg

SEQ ID NO: 91742 - DNA, 649 bp, Heterodera glycines
caaaagatcaagccccattggatgttcactttggacgatttgatacgaaacgccgttcagcaagcgataaaatttcttagaccacaagagccgacgagtcgcgacgaaggcttcgccaattccaagcaatgttcgtcggtccatcagttgctgcccgtcccccaacaatcttcgcttttggcgccggcttcgtctttcgatctgttgggcaaggcgtacactgaccaaatcaaaagtctctgggacgacttggtcagtgtcgagcgcaaattgctcagtgtgttggaggtggcatttgtggagcggcaggaacgcatccgctcactgtgcacttcggcctccgatttgacgcctgggaatccgaacggcgtgcagcagcagcaattgtgggcaacgttggcatcacaacagacaatgggacaagggcaaatgccgaacaacggcagcaaccaccagcagcagggagcagggggaggcactcacttcgcttctcctctcctttccgtcgatgacagtggcattgacatggagagactgagtgatgatgatgaacccttacgtgaatggcttttgcgcatcgggtgtgacgattattcgattgagctcttggagagagagcggtacacaaaaagggacattttggagtttg

SEQ ID NO: 91743 - DNA, 661 bp, Heterodera glycines
ttcttctgctcctgttgataaagaggagccttgggtcaggcgctttccaccatacaggtgttcgatagaggttgaagagctcaatgaattctatgttcttcatcaacaagtcgtgcccaatcgtgttgtgccatgctgcgtggattgtgtcgaaattacggaaattgctgcaattgcggttgagaaaataaacagcgatcggatcagtgaaggaatgaagcctttgaatcttgtcaggatcatccttgcaaccacacaatacgtttcgggcagaagcttttgtcttcaaatactttttaaacagacaaaggatagcaacaacgagaggactaattctccatcttgccctatatatttcttccaaatttatcgcaatattaaaggggtcatcgacattaaatatgaagaaattgcactctttgccgatgtaccgggcggacgatggcaattattgagtggcaattttatgcccaaaattaggtttcaatgctcgcctgattgggatgaattggcggcggaaaaatggattcagacagcactcgaggcaggcttccgaatgtttgatcttacattttttagccataatcaagggcagattagcaaagcaattaagaaatatttgccttggtttggtctcaatcgtaccgatgtgtttatcacc

SEQ ID NO: 91744 - DNA, 648 bp, Heterodera glycines
gtcagattttttatttttggaaatttgtcgagtaatatctatcaatcatcaccatcacctattcttgcctttttatttgcccaaatattgcataattagtggagcaattgtaaaattattttattaccaaactccaacaacactcagcaaaagtcattcaaatccgatgggacaacgtccgtcaatgcagcagagcgaagtcgcgcggcgtcctcgtgccggttctgaacttggcagcagcgcacaaaccacgggcagcagcagtgcaacggcacacattcacaaccatcggagagcgaatggaacgcgcagcagacagccgcagaatgacacgagctcgccttcttccgcttcgtccgcgtccccggcgtccgcgcattcttcgcgttcattcaccgaagaggccgcagaaggggtcactggtggaggtgccgcagaattggcccgcttcttcaatcagttgggctttgtgccggtccaaagcagcagcaaccggcatcgaacatccgcagaaattctgattggcggcacgtcgacgagtccgtcaggttcaggtgggctagcccaaccgcagcagcagaacggcgatgcggcttcgtctgcaccgtccacgtccgtgcgccatgcctcctcgtcatcatcaaatct

SEQ ID NO: 91745 - DNA, 628 bp, Heterodera glycines
cattcgccaactgcaaaacgtagtgcaaaacgttgaagaaacggtgaacgaagcgcaagaggaacagctgcaggaagaggcgccgccgccactgctcgcggaagccgaagcagcacagccgacggaggaggacgcggtggaccacgtgctgttgctgaagaaggactcggagcagttcaacaacgccgacatgggcctggcaaacactgtgcacaaaatcgtgaaaggcggcatccaacgtgtggagggaaaccgcgtctatttgaaggtggccaaggaacagctgacggaggaggagctgtacaagctgatcggctacctggacaagaagattgcgcagccgaacaacctgtactttgacgagttcctctacgaaaatggccagttgtccttccgcatttctcgcctcggcgtgttgcaaccgaacaaagacaaaaaggacggcaacgcggacgccgcattggaaaatgcgagcggagtggcgcaggcggtgtacaaacgacggaaggacatccaaacgttggccggcatccgcgtggatgagacgggcatcggaagcggagtgtacgtcgtcccggtggagcgttctcagcgcgattggctgttcgtgccaataatggctgtttcc

SEQ ID NO: 91746 - DNA, 585 bp, Heterodera glycines
agtttttttttttttttttttttgttgcacttgaggcaagtggcgtccttgaatgtgcagtcggagcgccaatggtcggatttgccacatgatccgcatggatgcgtcggttgaccacgcgttggctttccgcttgaatttgcaccttgtgcgaatggcgtttgtggcaattggtgggttaaccagcgaaagggcgctctccttgacaagctgaattgcccgaagttcctcctcaattttcttgagcgaaatgtcggtgccgttcttctgcgagtcatccaacattttcaatgccttttgtcgcaaatcatgatgttcatcattgagcgcgatgaccaaaataatgcacttgagctgctcctttgtcagactcaggtcggcattttcacatgatgcgttgatctgcgcaattagtgatgagatgtcttgcccttgttgctgtcgaattttaaaacattcgaagcgacggacgaacagcgaacgtgtctcggcaaaaagctgtttgagctgtgaagtgatgtcattccaattcacttggtccggttgggttgggctgatcgtgtccctgatatttgctgtactcct

SEQ ID NO: 91747 - DNA, 238 bp, Heterodera glycines
cacccctgtggtttcgtgcgccgtcgcttctttgggctgtgatgcagtcatcatgaacagcgcttctcacaatccgaaggacgacggcggcttccatgcttaatgggccaaagaagctcccattctgagtccacaccatgcggaaatttgtcgaattgtctcggaggagccaaaacccgaacaaggctattgtgacatcggccaactcggcacaagtgtctttctccactcagacgac

SEQ ID NO: 91748 - DNA, 658 bp, Heterodera glycines
atcttttttaaagttaagttatgattgcaaggatctccatgaatttaatttattactcattttgaaatggttataggacatttgcggttcggacatttgcggtccggacatttgcggcctgctggaaatcggacatttgcggcccgacaaatgcggtcggacttttgcggtccggacatttgcggcccgtttcttaagggccattttcggacatttgcggccggacatttgcggcccaagggaaaatcggacatttgcggccatcaaaacgccaaattgtcattcctttttcaaattaattataccaaatatttttatttaacacatttcaccaattattttgttcaatgacttataataattttttcaactaatttttcgaaatatttttaactttttttcacaatttgattatttaatttaaaagagcttgctgaaggctccaaccagcttaaaatgcttgcttaaggtagcaagcatgcaacatcacaattaaaataagtctgcctatttatagtcgtagctcggcttctgatcacttccatacttagttcgtttctttttaaaattaatttttgttctttagaaaatctgccattatttatttggattcttgcttaaaactctcctcgttgcaaaaataggtttccattcctta

SEQ ID NO: 91749 - DNA, 604 bp, Heterodera glycines
acaccattgcccaagaaagtgcaattttaagatatcatttgataaaaggatgtgggctttgactaacaaataagttaaaaagttaatggtctatgaaaaattgagattgtcactgattggacgcctaaagtgaattacaaaaaaaattaaattaataatccgccgaatggataaaaaaaaaaagattttattgtttagtttactggcatacgatgaacttttaggaacataagcataaacattgaaaaataatttttttaattatctaaaaataaaaggatatgggcaaaaaatctattaatcgcttaaataaaatcccattcggcccccaaaaaatcaaactcctccacgagcttctttcggaattagttcttgcccttcgttatgattttgggtaactaaaaacccgaatttgtgcagcctttgattttttttctcatcaaaaagaaacaaaactttcgtaaagtaagagtattattaatcgagttgctaaatgtatattgtttccagacttttgaacaagcggtggaagagcagcaaagggctttagccagttctgccactggtttatccaatgccacaaaataccttttggagtttggcc

SEQ ID NO: 91750 - DNA, 343 bp, Heterodera glycines
gcggtcgcgtggtttcctttgtgcaacgccgccgtcggaccgcctcattcaaaagtcgcgtgtcgcgtccgcccaattggcgccattcgatgcgattgggccgaacagcgacccaagtggaagatgaagcgagcgaagagatgttgctgagcatcacgcactcccagcagatgcagcagcgggcgacggccgcgccgggcgcccaacgccacacgccggcgccgcccgaggcgccgcggtcgcccgtttttatgctgagcattgcccgcaaaggtcgcctgcttctcccattcttcgcttttttcttagtggtttggtgacctttttttatttttattttttt

SEQ ID NO: 91751 - DNA, 632 bp, Heterodera glycines
gttgataagagccaactgaggccggacgatcgggaccatttcagcgccgctgatcggtcattttaatctactttataatatatattttggatggtccatgtatagtaaattgtaataaaaatgatatcttataggcaggcatacgataactggcagacaatcgtggtgaaaataaataaattaaaaaatgaaatggagtaatcagatcgaaacgacaattgcacaaattcggcccaattggcacaacaataaaaataaaaataaaaattaaaatgtaaaatagtaaatagtaaattaaaattaaaaaaattaaaattgaaattgaaaatgaaatgaaagacgaacattattcaattgaattgaattgatgatgatgtgttggcgcgatcgtggtaaaaaaaacaacaaacaaacaacagagaaaaatacaaaaaaaggaatgaatgggcagtgagtgatctgaactgatcggaatcaaatagcacagaaaagggagggaaagttgtagtgtaaaaagtctgacacagaaagaaaggcttggcagcacagataagctgataactcgaaacaaacaaaaagaaaaatggatgtttatttgtgattcaaactgatcagaacatgggacctgatct

SEQ ID NO: 91752 - DNA, 656 bp, Heterodera glycines
tatcgtttttcatgtttagttagaactctgctaaagtagcaaatggggtggatttcctcctttttgttcttctgtagaagacatccggcgattgctttggtgctggcgtcagtttcaactacgaatggatgtccaaatcttggcggagctaacactggcgctgtcatcaatctttcttttaactcttccagggcttgctcgtgtaattgtccccattccgtcgtactttcattttttgttagttcataaatgggttgcagtatttcagcgaatccgtaaataaattttcgaaagtatgataagacaccaatcagcgatcgtaattcagttatattttttggttttttgattttttgtatcggctccaaatccttggggtcaattcgcacacctttttccgaaattaaatgtcccaaatatcgtatttctccaagtgcaaatcggcacttctctggctttaatcgaaagccaacctcagccatcgttttcagaaatgtttcgatgtcttttaagtgttcgtcctctgtcatcgaaccgataatacaatcatccaaatacacaaagaaggtagctgagcacaattggcgtacttcttccatggctcgttggaaggttgttggtgcgcccgcccatccgaatgggcatcggagccactc

SEQ ID NO: 91753 - DNA, 634 bp, Heterodera glycines
gtcgattggaataaatggaaaaaaaagcaaagtcaaaacacaaaaccttaaagcaaaatgttgttggcacaaaaagtaaagggggaaaaagaagacaaatcatccgatcaagggctaagtctcaacagatcgcagtgtaaaagctgctctactgctaacaaccccctgaccagtagtcaagtcgtatacaagtgattttgcgccccgacgttccaccatggcacacgagtgctacggctttggcaatgtgcgagcaattaagcacgcacatcgggccagatgctggggcatttgtgctgcaccgcaagcggcgcataagtagtgcctcccgacaccggggagcaagaatattgctatcttgcctaggcgggattctgacttagaggcgttcagtcataatccctcagatggtagcttcgcaccattggtctatcgaccaagcacatgaaccaaatgtctgaacctgcggttcctctcgtactaagcaggattactatcatagcaacaggtctttagtagggtaaaactaacctgtctcacgacggtctaaacccagctcacgttccctattggggggtgaacaatccaacgcttggcgaattctgcttcgcaatgataggaagagccgacatcg

SEQ ID NO: 91754 - DNA, 232 bp, Heterodera glycines
ctctcatacattcttgatcaacttgatcaattgatcaaacgacgtaataccatttcccgaaccggctgaaattttttttttttttttttgctataaaagtgggccgaaccgacgaaaaaaatcattccataaaacggatcgccaaaaacaaaaaccaacaaatccctcaaaaaacaaaaatgtctcctttccgcttcctgatgatgttgctgggtgcgctggtcgctgccat

SEQ ID NO: 91755 - DNA, 632 bp, Heterodera glycines
tatagtcgtgccggaccactcatattctttccgcgccattccgatggaattcgtttataacgcacttcattccaatcacgttctgggtcgtcctccggaagaaaatgttcagcactgtttaaatcagctggttgtgcattttccgcccctgcaagcagagttgaatcagagaagtcggcaggcaaacgcacataatttgtgtaacgcacttctaaaaataaagcaaagatgagaaacaacaaaacaaactgcgctataaattacctgagagctctgtaaggtcggtatatggctttggaaaatgttttcggcatcgggttcgcccctgctcatcgacctctgtgcacgcagaattgcaatcatgcagcatcattgtagtaacataatgccatagccggcgctgctgatttgcttctattgacatgtcctccattggtggaagcggaggaattcttgcaaacacatattggtcaacactttcaggtgttaaaaccctctcccgttcttccaggataagaagcatatggatgtgtggcatgcctaaatttcaaatgctataaatattttctaaaaaattcaccacgcttttggtgttcaacgctatagcaccatcctggcacttttcccagcac

SEQ ID NO: 91756 - DNA, 639 bp, Heterodera glycines
ccaacgtcggttgaccacacgcatacgggacgagcaagtgatgtttttcgtcactgcaacatacagaagcaattgtttcgccgacgactccttcctgtacaaatgcaggctcggcatgctgaagttgacccgtgcccagctgaacgacggggtgccggatcaagaacaacccccggttggggagcagcaatcgacacaaaattcggacatatcggtagacgaattgcctcagcgattgaaaatttggattgtgccatccggagcgggcgatgtcagtgccgttggatacttcctggtcaagcgcattgacgcacggatatgggtttccaatgagccagaatccgattcggatagcagcagtgtgaacggagatgccacaaacaacggcaacaacaacaaagtgccattgtcgcattctttcgcggcatggttttacgaaatggtcaccgccttccacgaagccaatcgcctgtctgatgagcgacgaacatccatccagcaatttgttgacgaactgcaacagggctttcgcaccgagaccggcgttgactcgttgcaaattgaactgttcggctccgttctgtccggattcggctccaacgactgtgacattgacctttgcctgatcaacaccggcat

SEQ ID NO: 91757 - DNA, 236 bp, Heterodera glycines
ataatgtaacattattttccaccacctctgttttccccaataaaacagatgactcattgccatctcttctgatcaatgacatcgaaatgatggcacatttcaacaaaagcggtgccatcggaaacacttcgattagcttcaatttcaccacaaattcatcaacaaatttattgtcccatccaaatgcaactgatcatcaccaaatgaaactgaaccccgttctcgttgatgaacat

SEQ ID NO: 91758 - DNA, 534 bp, Heterodera glycines
caccaataccaccacctgatgcttgtgcccccacaacaacaacaaatggacgctacttcatatacccaacaacagtatctgtaacaaccgaaccctactgcatttccgatggggtcatattacggcgttgtggaccatcaacaatttatgagccagccatgctcaattccttcagaaaatgtgcaaaatgacccgtcggcgcaacaacaggtgggcgtccaccagttaaagaagactcaatccatgctttttaccgctccttctgatatgactcatcaacaacagttcggctgtggcaacccatcaagcgtcacttttccttctccttctgcgtctttcgtccatccgtcgccctcccaagatttttctgtggttcgaactcaccataaacaccaacaaccgatggttcgtcttccgccttctcaacaaactccgcatgctcatctcatgcatcaaatatcctcccaatctcttcaatttttcgggcacgatccgcttttagctgccactctcaatcctgatatctgtttggcc

SEQ ID NO: 91759 - DNA, 529 bp, Heterodera glycines
aaaatgaaaaaaagggttccgtggattttgcaaaaaatattcttaaatgagaatgaatcttttttttcaatttgatcattttggacactgactgatcagttgcctcaatttgagcgaaacttagtctcgaatgggtgggcccaattgtgcggacggtcaatgggtttcgaataaattttcaatttttaattaccttttgactcatagccggcgattgttgctgaagtgaaggggaataattatatagacaattgaaacaaaaagcagcagcacagcatttcaattttttaattgaaaaaatcaaaaatataatatttaaaaaatttattcgttgattaacggaaagaattaagagaagggaatgaatcaaaaaattggccgactctatcgaaaatgcacaatttttacacaaaacagcggaaaaggttacacaaaaagttggagaaatattttgggggatgtgattatgccctgtggggttttgagcgaaattcatttgggagagggaaaatggaggggggggggcacg

SEQ ID NO: 91760 - DNA, 451 bp, Heterodera glycines
cgaggactaatgaaagtgcgaatccgattaggctgaccgtttaatggcaaaaagtcatcgcagtaattggccaaattcaattgtccgttcacatggcgacatcccatcaccgccgatggcattggcgcggcgattttccgcctctgtgcctcggctgtcggccgaatgaatgcgtcgcttcggtcgtccattgccttcgcttctcccccccccccaattttttttttgccttttccgtcagtttctgtcaatgtcccgcatcctttcgcttctccttttgttgcctttgtctatggcaatgatttgttacaattcacaggcggtcaatccgagcagagaaagcatttgtgagccggaagaggtccaagagaaaagcgatgggaagggaagggaagagggggagggggaaagggaagggaagggaagggaagggaagggaaagaataggggg

SEQ ID NO: 91761 - DNA, 571 bp, Heterodera glycines
tttcattgtgagagccaagcgctgcactttctgcgcctttggcggatcactgaaaaatcacacacccaccgatttgggagaaattgcggccgctgctgcacataaatcggcctcaatcgcggctgagcacatcgatcacgttattttcggcaatgtcatccaatcatccaaagacgcggcttatttggcccgtcacatcgggctccgaggtggagttcccgaccatgaccctgccgttactgataacaggctttgcggctcgggcttcaaggcgattgcgcagggaggccaaccaatcctcgcgggtgactcaaaggttgttttggcgggtggaactgactcgatgagtcaggcgcccttcgcagagcgcggcgctcgcttcggcacacagctcggtgccaagattgagttcgaagacgtgctttggctaggacttaccgacgcacacgcgaacatgccgatgggaatcactgcagagaatttgggtgcgaaatacaatgggacacaacaggacgccgacgctaatgccattcggtcgcaaaaccgctggagactcgcaaacaatgccggc

SEQ ID NO: 91762 - DNA, 631 bp, Heterodera glycines
ggcgtttaatttgcaaaaagacactgtgataattagcaggtaaaacattaattggctttttccttcctcaaatgataatccttttcttttctcctttcgtcttgcacaaattttgcgttttccgttggaattcgaaaggcactcattggagaagggagatcatcccgaaatccgagagggaattgcccacgcgcgacaatggttcgatcgtcgattagaacaaattcgaattgtggagacggaggaaaagggcatcatttgcagggagtacgaggaaggggttgcccaactcgagcaggaacatgtcaaggtgggctaacaagggaacatatcgaactgtatgtgtccaaatcactttaaaaccacgtctatcatgtagagcatagtctattttattttgtacttgggcagaagctgaaagagttggaggaatcgttcttcaaagagttggatgaacagaatcggtctctcgacagtgaagtcaatgcgttggacattgccattccgccgcttggcaatggcgaggaatccctggcgaattgtgccacgcaattgggacagtgccaacaccacccgaacccactcagtgccaatcacggcataacaaccgcaattagcggcaaaaaattcc

SEQ ID NO: 91763 - DNA, 575 bp, Heterodera glycines
gaaagattgttttgattgccaatgacattaccttccaaatgggctctttctcaatgcgcgagcatcggttataccaaaaagcaagtgaatacagtcggaagcatcaaatgccacgcatttatgtcgcagcaaattcgggcgctcgaattggttttgcatcggacgttaaaaatcgcttgaaaattgtgtggaacgacgaagaaaggcccgaggacggcttcaaatacctttcgatggattgtggggaggaggaaagcgacattctctcccaagttgagtcgaccttcacggatggacgccatcgcattgacgcagtgattgggaaagagaacgacatcggagttgagaatttggtcggttcgggatttatcgccggggagacaagcgctgcctaccgcgaagtgcccacttattgcttggtgtccggtcgtgctgttggcattggggcgtatgtcgcacgtctgtctcaacgcatttggccaggtggaaattcacatatcaatctgactggcgcgggtgccctcatttcatgcttgggcgggaagggtacacttctaacaatccctttgggggga

SEQ ID NO: 91764 - DNA, 636 bp, Heterodera glycines
aaataataaaataataataattaattaattaaacatttttataataatttaactaataaatattatttaattataaccctcgttcctttttcctttaaaatcaaaaattgggaaaattccgttaattgatttgtttattaggccttattgcagcactcttccccttcttcattgatttgtttattttgttcatcttaaggggtcctgtaattaatttggtttagttaaaataattatgcaaaaaaataaataaataaaaaattgggctcataaattaaatttagataaaaaaaaacattcaaagccaaagagttagaaaaaataaatttgcatcaaagtataaaatttcattgaaattttaattgtttgaaatttaaaaaaatatttgttattattttaaataataattaactaattaattaattagaacattttttaaaatttataaataaatattatttaattatacggtcccccatttctttttcgctttaagtcaaaaattgggaaattccgttaattgatttgtttatttgaccccccttcccttcccgccacccgaactcgccatttcccgtatccctcgctgcaacccttcctcgccactctcgctgccgagcaatttctcgccatttt

SEQ ID NO: 91765 - DNA, 623 bp, Heterodera glycines
gcgatcagaaaaatactcaaaatgttaacgtcgaatgtaattgtccaattttgaattcaggcattggtcgttgaggagaaaaatcgtccaaagttttcgctgaccgaaccggaattgagccctgaacagcttcgtcaactttttccggaattgtccgaccactggagaagagcattagccaaatcgcccgtggtgaagcgagccgccgccattcaggagcaggagcagaagcgggtcagcaagcacaggacgagcagatattggctggatgaacagttgagtccctctgagcacatttggctgccctcctccgcttcatccgcttcttcgtccgccgtggacaccgaatgttatttgggcgagaaggactgccagaagatgggggagaagcgccgctgcagcggctgtcacattgtggcacacacggcatgcttcccactgctggccaagatgaatttgagctgcaaaatgacttttcgcgactgcgcacaaagtgccaatgccaaaagtccgtcgtcaatggccgccagaaaacaaaggcacagcaaaagcgaacagaacaatggcaacgaattggtgagcaacaacagcacaaccacaaccacaataacaacatgtagcaa

SEQ ID NO: 91766 - DNA, 333 bp, Heterodera glycines
ggatcgctggggtcgtgggttcgagtcccaccgggcgagttaccttttatgttctacaaaagtggccgcgccaaaatggccgcgccaaagtgacccagaccccaatttgacggcaattgaatatttagtggcacaaaattttagccaaaattcatcaatgatgcctgcttatggcacggaagggcaaaatgccaaagtgccattttttttaaatggaaaagcacacaaatggtgttgatgaaacctaatttggcaatgaaagcgatcaaaagaaaagaggggtgggacgaccgaaaaggcatcccagtgaatgaaaagtgtgcgggaggaaaa

SEQ ID NO: 91767 - DNA, 526 bp, Heterodera glycines
accgtaccatccctccttaatttattcgttctcagttcgtacaaccgcagcggatgcgatggcctcgctgttgctaatgtctcgcagcgtcatcggcgactttacgcatgtgagcgacgccaaccaaccagggcgagagagagacaacggcagcaacaacggcaaactgctgacccatttggccaaacagagaccgaaaccggcacggctcaatcgcagtcgcattcagccgaccatggcaacggtgacaagcccgacggtggatgatgagcagcagcactgtgtggacgacacccctccgacatcctcctcaactggtgaaattttgccggatttagccagtaaaaccaaataaatacgagaaagtatgctggtcaatggtgatttttcatggggtactccttggacattcagctaatgaccattttgtatccgctgagtacgtttctgacccaacggttgcagcatcgtcaccggcaacggcacactgtgccaatccgaagtcggtaatttatggccgcttgtg

SEQ ID NO: 91768 - DNA, 625 bp, Heterodera glycines
agttgactggcgcctggcggaacgaactggcgagggggacagcagacggcgacgggcgagcggccgatttggcggtgacggcgttgacgagcgcatgacgggacagaccggcgctggcgagggtgaaagctgacggcggcggtgggggacaaaggacaaaggcggggcaggccgagttggacggcgaatcggagagcggttggccggcagaacaagttggggacgagggcggttgggcacggcgggagtagggcggcgagagtgtcgtctttcggcttgcgccaaatcgtcttttgctcgtttaagcgccgcttttttctcaggcaaactcataattggtggggagaatttaggaatgttggaaggaattttggaatagatttcggagaaatgtgaagagtagtggccggagaacggcttaaatagtctccgattggaaaatcgaccgaagaacaagtgaatcataacagtgtttgaacggattatgcgaaaaggtcgaaggtggcggaatgatcggatgtaacgagtcactgagaatgagcaaccgccgaaaggtgaattgtcctccaatggcagaataatttgcaaattccaatttctttgaaaatgaacgagtgtataaaag

SEQ ID NO: 91769 - DNA, 652 bp, Heterodera glycines
gtcaaattctcgacttttttgtcttggacgtcagcgtaacattccctttctgatggaaacagccaaatttgacccgcatgtcaattggcttccgccttgttatgcttcaacttctgagttttacgctgtaaatccattggatcaaacagatttggaggaggagagcggcaaagaaattgggacgagccaaaacactccttctggggaaaaaaaggcggaatcaactgggtggggcgcattggacgacgaacgacagcactacaaatgcgaaaatggcattgaaaccatcactttcccacagcaaaccaaacaaaaaattgatctcgacttgccaccactgccctacaatatgctcacccagcaatggataagcgacaaatccatcgccgatgcggtggaggcactcattggtgcacatttgattcaactcggccaagacgctgctctcaagtttatgaattggttgggaattcgcgttttgacgcaaaggccttgccttcgcagttcgcttgatgatcactctttaaaatcattatttttgctttacaataaattcgactttgccacagtcgaaaatacaattggatacaaatttgcgaacaaagcctatttggtccaggcattcacccacgcttcctacttcaacaatcgt

SEQ ID NO: 91770 - DNA, 632 bp, Heterodera glycines
caaataaatgaccaacctggcaagcttgtccttttcatcgagttttcgaccaaatgcatccatgtattctctaaagcgttttgcccacctgtcaaatgtgaccacacagtcatccttgtagccttcaagtgccatgggatacgcatcagtgatcatgttgacactttggaaggatagtgcattgcgttgctgatcattatcctcatcatcgctgctggagctttcttggctttgattgagtgtctgtcttgcctgatgtaccaattgttgtacaggagggggaaccggcagatgaggaacgggtggttgagtgatagccatagcttgttgaatgttcttgttggctaaagtgagattttcgagggtttttaccttaccagcaactttcgaaatctcatcagtgaaggtctgaaagcctgcgttgacttcattggcgagggtgccaagatggttttgcacattgttggccttacgattgacttgacggatggtgcggctgactccctcttcgagtcgtatgagttcaccaaaaactttctcaacgtcctcaaaacggactgtgctattttgctgtttgccttgaaacagtgtcttatttacgactttaagaattgactcatcatcagaaaagt

SEQ ID NO: 91771 - DNA, 494 bp, Heterodera glycines
taaaaaaaagaaaaaataaataaaaaacaaaaattgtttgtaaatttgaaatcagcggtaaatataataataaattaaaaaatgttttaaaaataatgaaacatataaaatatttttttttttttggttttttgcgacataaaaaaattaaaaatgttaagcgatgtatttatgtacaagaaaaatgatggtcaccttgtaattttgaatttcagttttaaaaaatagaaaaaagctaaagtcatattaaagagccaaataagaatggcacttttgctggctgaattttagaggaattaggcaaaaaataaatataatttaaaaccaaagatcatattttaaagaattaagaatattttgaagaaaaaataatgcaatttttaaaattttttcccgaatatcggtgaagcgaaaataaaattgttaggtgccggcaccggcggcacgggcgatgggcaacggcacatattaatgggcgagagagaatgagcttc

SEQ ID NO: 91772 - DNA, 313 bp, Heterodera glycines
tgatggttggtggtttgtgaactaattttttgatcaattaaactgaaaaaaaaatatatatatatatatagataatttaacttagtttattgcctgggcctaaattgatggagcaattccttgcttagcttatgagtaattcaaatatttttaaaaaattattcaaaaatttttataccgaccaggtggtggtgccctcctgagccttgccactttcaatttcttcaacaacagtaggggtgtggtagaagctgttcagatatgattttatgccgtaaaatttgccaccagctcctttaaaaaaaaaaaaaaa

SEQ ID NO: 91773 - DNA, 641 bp, Heterodera glycines
atttaatattattttgcatttttttatacatttccattttttattttataattttccaatgttacaaaatttgaaaatataaattttacttttactaaacataaaattatttttattttttcggccggagaaaagataagtattcaaggtaattaaaaaataataaatatatttttttaaatgttaaatggccaatttaggaaaacttcatattcaaaaatatcttttggatttggcatcagatgtctatttaaatttgaataaacattcatatgaaaaatttcaaacacaagctcttcaagctttctgtagtgaaaattttttgaatgaaaatgaaatacaaaatttgataaatcagaatttttataaaaatggcaaaaaatgatagacattttttgtatgcagatgagtcaaggaaaaaacatagaaaattttgaaggaacgattcagaaattgggcattgaataaagggcaatccaattataattaatcaaaacctaatgttttcaaaaacaataaaattataccaaaattggatgaatccgaaattactttaccgaagaaaatgtcaattgaaaacaaaaataaacttttacaacatttttatttgggagtcaacgaattttttaaagcatttagcg

SEQ ID NO: 91774 - DNA, 615 bp, Heterodera glycines
atcagttcaaatgcagcccatttcggccacagaatttgcttctttgaatatgcagcaacaaaccaacggaaactcaaatgcacagcaaatgcacgagggacagaatcagcagacaatgggaggcgcaaagaaaattggcgcgtccaattcccatcaaatctcacatcggcttgtcacttctgtgcccaacagcgcttttggccaatccaacggaatcgcatccaatgccttgggggcgtcggcgtcggcttcttcgtttctgttgcgcaactccaaagcgaactgtttcctttgtgaccttccgcgaatgccgtgggcaattgttcttgattatgcggaacccgtgtgcagaggctgtgtgaactatgaaggagcagagaagatcgaagcggtgatcgaaagcgcacgtcggatgaagcaggtccatgcgactctctccgccggcatttgtccgtccgtcatttccaattccgtgccaatgggccctttggaccttctgaacggcacttcttcacaattgaggtcgcatctgttttccgctcagcctgcacaacaaatctctgtgaacggaaatggcattggcttggccaatgccgcggcgtccgctcatcaccc

SEQ ID NO: 91775 - DNA, 595 bp, Heterodera glycines
ccgaggaggacgacgctgaccaggaaatccggaggggacattcccggataagggccattgccatgttaagcgatccattttctatattcgtcaacattttcacccctctttatttaaactttccatttctcttcattttttctcatttacataatgttttcttcaactccaccatttgcccttttcttttcaatttttctgccattcacatctgcctccgaatttttgtctctttgttcacactttctcagatcacatttttccatttggccattctttcatctcatttttccctttgtttggcattttttctccccgccgatttttgtacccttcggcgtcgctcttttgcatcttaatctttgcccccccccagggggaaaatgttttggtacttaagtattgtttatcgtctaattctacacacacattcacctcttgctctttactggtttttcactcctcaccatctttttctttttgctgaatcattcccaatttttgaccccctcaataatccttatcgcctttccctgcctccaattttcaccatataatccatcaacatctcgcatataatatccaccaatttttg

SEQ ID NO: 91776 - DNA, 617 bp, Heterodera glycines
gtttgagcattatttatcaatttttatttaaaaaataatcggcaataaaacagtggcccgacagtttggcacaaaatttattctttcattcattccttcgtttgtgccattattctctttgctctcaaaacgtgattccctagcgatgcccatcgacgctgctgctttgtgcttttccgttgcgcggcattaatccttcccttttgacagttggcacaaatcgaatcgtgcaatgtccgccccttttcccggtggccattcttccagcaatgtccaatcgcctgtgacgactccgtccagaggtcaacaaacgctgtctttggcggctgctttggttcaacagcagcaacaatcgggcacgaacacaccgaacgtaccgcaggggatggagcagcaactgcaacagaccgacctccgttcgctgcagttgcagcaacaattcaccgcccttatgcagtcacaaccccaacaaccgcccgctgcccacgcgcacgcggcacaccaaacagcgcagcaaaatgtccaccaacaccaccagcagcagcaggcatcgcagttgtcttccgcttttctgccccatcagcagcatttgctggaagggaccgcgcaaagttcca

SEQ ID NO: 91777 - DNA, 319 bp, Heterodera glycines
atatttttttataaatttcagtaaaactcgcaattgcactgtcctttttcagttgaatagaaaaagacatatgggagaaggaacagacagacagcagaaggacaacaaacagaaaatgagcaattagtgataaaagggaaatgataaaatataaaaaaatatgggaaatgataaaatgggaatttgacggaggacagagaaagaaaggcgttattttgcagcagcaaaaggaaaagtgaggacaaaaacgaattcgcaattggaagagtcaaaacatttgggaggagcaaaaagagacaaacattcaataaaaaaaaaa

SEQ ID NO: 91778 - DNA, 595 bp, Heterodera glycines
aaacgacagatctgatcagaaaacaattggcagagatcgaacgagagattgccaggaggatgcagaacaaaaatgtgaagaaggtcgagcggggagacgccgcaattcactttttagggtttttgaatgaatgtctttctttctctcgtcacatcccttgtctctctccatcactctctttctcttgctttccctcttttatttctccgttctatttcctctgtcctttttgttttcttccgcacgggtttcggttcggttcgcctcgctaaatggccctttcagatggacgagcaggagatgaaccagctgttgttgaaccacgcgttcggcttccaacagcaaatgcaaaacgggcggcgacagggcgaagatgtacggggagttggtcaacaaacggaggtcagagcgaatgagtcggtgtcgtgtcgtccatcgtccacctgttcctctgtgtccttcttttttggatgctttcactgtttggccgcttttctctaacctagagtgcgctgggaccgggaattttgggcaaaaccgggaccgggacttgccgggaccaaagaagccgggaccgggacttgccgggacctaa

SEQ ID NO: 91779 - DNA, 256 bp, Heterodera glycines
gccacaggggccatcattctccgtaaatagcaaaatcgatgctttttgttcgcttgtcattgtcgccccccccattaagtgtccattcattatccggcatggaattcgggccatattcgcattttcgccacttaccgggcccattccaacgagcgcatcaacgcccttttgggcgttcgcattgggctgacccacgtgaacatcactctgggcagtgagttcgaaatggggataaacaacatgccaaaatttaaaa

SEQ ID NO: 91780 - DNA, 651 bp, Heterodera glycines
taaatatttaaatgcctaatatgattttcagttgggacacggccaaagaccgtgccaatttgtacatggttatggaatttctgcccggcggcgaactgttcgcctattttcgagcattgcgcaagttctccagcactgtggtcaaattttactcagcagagatcattttggcacttgagtatcttcattccaaacaaattgtaacatcgtggcaaaacggaaatatttaatcgacaaataattcaaattttaggcttatcgcgacctaaaaccggaaaatctgatggttagcatccacggacacatcaaactaacggattttggctttgcaaaagtcatccagaacaagtcagtcattgagtttgtgttgcattttttcagcttttttttgtcccttctcaatttgccaattaatccatggccatcatcccccggcacattctttcaaatgatctttaggccaattgagaatcgcataatccaaaaatgctttcccattggctaataacagctgttccctatagcactttctgatcacaaagatcgaccgaatcattgtgaaaaaatcgtgaaatttgtcagaaaagctcacaactgaattagcccatccgccgaagtttcgatgggaaatgggcaaattcatttgtcagt

SEQ ID NO: 91781 - DNA, 633 bp, Heterodera glycines
cgaactgacaaatggaaaaggtcatcctcgccgacatcgaaaaggcattcctgcaattgggcgtcagagaacaggaccgcgacgccacgcgattcctttggcttgctaacccaaaggaagcaaatctcgaacagctgaaacaagaagacttccgcgtcttccgattctgccgagtcagtttcggattaaccgtgtcgccatttctgctcaatgccacgatccgggagcacctggcacttcacgacacggatgttgcacaacgcatcagtgacaatctttacgtggacaacatcatggtggaagtcaaaccaagtgaaagcatcaatcaactagtcacggaagcaaaaatcatttttgaatccgccggaatgcggatccgcgaatttttcggaagtcaaatcgacgaactcaaagagcttgactcatccgaattggccaaagacctcgaaaacacaagggtgttaggcattgaatggaagccacgacatgaccagctgatcttcaaaatgccgctcttcacaagtccaaccacaaagcgaaacattctgtcacacatcgcaaaagtgtatgacccacttgggcttatttctccagcactgttgcccgccaagcattttttgcaaatcgtccaaa

SEQ ID NO: 91782 - DNA, 572 bp, Heterodera glycines
cagctgagtaccaagagaaaagccaccaaatgcgtgaacacaacaattgcaacggaaatgtgcaggaaaaaaagagcgtcacttttgtgtcgagtcggccgagttcgtcgctgagtgtagccagcacaaatacaaacagcaacgacagcaagcagccgtttaaacgatgtccactgaaaatcgaccgatatcgtaagcatctcagtgagattttgcattcgctggagaaagtcgcaattttcattggggaaacggcgtgcggaaagagcacccaaatccctcagctgtgccttcaggctccgtggtcatccgaaggcacaattgtagtcactcagccgaggcgagtggcggccaaaatgttgggcacgagggtggcccaggaattaggcactgcggtcggcgaattggtcggctacaaattccgctttgaagatcagaccagcgaacggactcgactcgtttacatgaccgagggcattctcttgcgcgaattgctgcacaattgtcggctcaacgcctactccgccgtcattgtggacgaagtgcacgagcgttccctcaacccgatgtgc

SEQ ID NO: 91783 - DNA, 526 bp, Heterodera glycines
gcttttggctaatggtgaaaaatgaatcctcaaaataattgtccgacagctgcggtcattgcacaacagtcgcccccaaatgctgagcccgattcgctgttcgcccagcaaagcgtcgcgggcgaagacattccgtggtggcaaaggaattttctgctgcaacagcccactttggtgaacgcttggaatgccgtctttcccaccgttgtcgtcaacattttcggcattgtcattttcctccgtatgggttggatcgtcgtgcgtttgcctttgattcggtgccattggttctgccgttctcccatttgtccagggcactgccggtctcttccaggcatttgttgttctcgccctgtgcacccttttctcctcagtgactgtcctttccgccattggaatttgtgagcgatgtcagattcgcagtggtggcatttactttttggtttcccatgtgctcggaaaacgaatcggtggggccgttgggctcatttacacctttggtcaagcatgcgcaactgcactggtc

SEQ ID NO: 91784 - DNA, 495 bp, Heterodera glycines
gggagaagaccccaattccccaaaattgaacaacaactgttcgaattggtgcagcaccaattgacggcgggggaatgcgcgtcgaacaaatggatacgaaaaatggtaaagaaattgacaacagtgggtacagagaatgccaatggaaaacggatgaaagaggacaaagaaaaagagagggaaaaagagcgaatgggcgaggaacagagaggggaggacagagaagcagagggagggaaagagcggtgccaattctcggaacggtggctgaacaatttcaaaaggcggtatggtattcaaacaacgatggagggtactgtaaatgcggaaggagacgaagagacggaagacgacgaggcggagagagaacggcggggcggagacacaattttagtggaaggcactctgtcgctggtgattgcggggggtgtcgcctgtctgctcacttctctgatcactggctgagtttgtgcctttcgctgctggggcaatttg

SEQ ID NO: 91785 - DNA, 610 bp, Heterodera glycines
ccattatcgctggacggaagagctggaggatcgtctataatgactcgcagcgttgttggagctttgggaaacgaaatagggacaacacccaacagaaagaacaatttcaacaagccaccggctcaaccgacaaagcaaacgccgaattccatcaaaaaacagcgaaaaatggccaaccaaggaatgattcaaaccaacgaaggaatgttgactgctggccaaaatatcacaaaagaagtgcagcaggagaagcagaattctccgactctaactgccaccaataaaaccaacgagggaatgttgactgcggaacaaaatatcataaatgaagtgcaacaggagaagcagaattctccgactctaactgccaccaacacatccttttacactgcccatgagagttcctccattggcgaagtttcgatgtatgagcacgttccattgacggaaaatgagcccataataacgcctccgaagtcgaccacaccgcccgtgctcatcgtcatcccgaatcaggaagaaaaggaggaacgccgtcgacacatcaaagaacttctcgcccgcactcgccaagaggctaatggcccgccaaatgcgcagaataacggaa

SEQ ID NO: 91786 - DNA, 474 bp, Heterodera glycines
caaataaaatttaaatctctttctaaagggtcttgaaccaatggttgtgccatcgaactgtccagaagatttgccccgaacaatgcaagtggacccatttgttaagcaaacggcacgccaaaaggcgaccgatgttgcacagcgaatgattgatgaaaaagtaaataaaaaaaattaatgaaaaaatgggaatccgcgcgttagcctcatggccggtatcgaaattttttgaaattttgcacagatacgaaacaactggcaacagccggatttacccctgactctattgcactttaggcctccaatcaatgggaccatcttcagtttcttaggcctgagaaatccgaaattcaaaaattttcgagtaaattcaagaatgtagaaattacccaagtaaggacaatttatggcctaggaaactgagaagggtcactgattgaacgcctaaagtgtaatggagccgtaaattcctaa

SEQ ID NO: 91787 - DNA, 619 bp, Heterodera glycines
cggcgggccacatttcccaacgctgcctgctcttcgggactttatctacatgtaccggatggacgcggacaaaacgctgagccaaaattacttgatggatatgaacttgactcggaagatggttaggagagccggagacttaacgaatgcgtttgatgtggaggtcggaccgggtccaggtggaattacccgagcaattcttgagcagccgtgcaaacgattggacgtggtcgaaattgacaaacaatttttgatgcctttgcagcatttgagcaatcattccatggagcggatgaatgtccatcgggaggacgtgctcaaatttgactttgaacaagtgtggacggatgcgggggcggccaaatgttcatgggttgaggagcatccgaattttcacatcattgggaatttgccctttcacatttcaacgacgatggtcataaagatgatgagacaaatgtctattctccgtggaccgttcgagtttggccgggttccgctcacctttaccttccagtacgaacttgccaagtgtgtagtccgctaaacgtgcaccgactttcactctcccatctgagtgacatgccacaatttgaccgagccgctcattctcattcat

SEQ ID NO: 91788 - DNA, 207 bp, Heterodera glycines
ctcgcatcaaatttcatgaacaaatcccttaattcctcagggaaatcctgttctggaatttctgggacaaaaactttaccatagtggcaacaatccttaaaagaattgccacgaccatgaattttctcctctgcaaagtgcagagcatcacaaaattcacatctctcattcatttgactaagtctatgttcattagcattctcatga

SEQ ID NO: 91789 - DNA, 652 bp, Heterodera glycines
cctcaacagcgtggcccaaggctttctgacacgcgaaaagagtgctgcaacgagtaatgtaccgttgagaatgccaactgatgataccaattcgtaccaagaaaaattggatgaatacttttctaaattaagtgagaaaaatttgagcattcttgatgaattgggcatgacaaaattgaccgccgaaatcaaaaatttgagcgaagaggaacgtgcgatccttgaagccacaaaggaaatgggaacggaagcatggattcaggcgtaccgtgagatacgtcttgtctgccaattcaactacgacgtcaataggaatcgttttgtcctgaacaccgacccacggtacgttaaaaggtcaaagtctcgcctcagctcgcttacattctcggtttcaacaacacggagtttattcaatctgaaaacgaggcaagattcatgccggacatgagcggtggagtgtcatccttccacgtttacacgccggatcttattgaaccaatgatgattggtgacgtcacggcccccgtgttgcgcatagtgaccatacgcggaaacccggaccaagtagttgaagaacaattttttgccatacagtatcataaacttttattaaaggagttttctgaaattctgattgagatacgtaccaata

SEQ ID NO: 91790 - DNA, 241 bp, Heterodera glycines
ggacaacagagcgtccgaggccttttcggccattctgcaaataaaagatttggcggacagtgacgccggagcctatcgctgtgccattgtgaatctttttttttatggcaatgccaacttcaatttgaaacttactggtttcggatcgccaccattcgttgagaaaccgcaaatttcctcacatgaccacggccggctgatgatcatggagggtgaggatacacccgtttggaaaccgacg

SEQ ID NO: 91791 - DNA, 152 bp, Heterodera glycines
gtgtgttttcggcctttgattttttcgtttatgcaaaacaggtggatgaagggcttaaaaaagcaaagcaacaagtttcgtcagttgccaatgctcagtccagtgacgaacaacgacgaaaactgctcacagaaatcgcggcgtttttcaaa

SEQ ID NO: 91792 - DNA, 652 bp, Heterodera glycines; identical to SEQ ID NO: 60259

SEQ ID NO: 91793 - DNA, 665 bp, Heterodera glycines
cttccgcttcttcgatttccgtgcccgattttgtgagggttgaagaaattcccgaggaatgtgccataaaacgcgtcccctcggctctatgttcatttgtcgacccattctgtgaccctaagaaacccgtcaaaacaacattttcggacatttccactgctgcatttaatatccgtgacggaatccttcggacgcccacaattaagtcagacgctctgtcgtcaatgtttggcgtcgatttgttcttcaaacaggagtatttgcaagtgaccggcagcttcaaagagcgaggggcgcgctttgcccttctgcgacttacggaagagcaacggcgaatcggagtgatcgctgcgtcggctggcaatcacgcactttccctggcttaccatggcagcaaattgggcatcccggtgactgtggtgatgccgaagttcgctcctctaatgaagatttcctgctgtgaatcttacaaggccaaagtcattctccatgggcttaacattcaggagtcaaagatattcgcttatgagttggccaaagagaaaaacctcaaatacgtcaacggattcgacaaccccgacgtaattgcaggccaaggaacaattggactggaaatactggaccaagtgggcgatgtggacgcaattgttgtccccgtggggggg

SEQ ID NO: 91794 - DNA, 575 bp, Heterodera glycines
atggaagggaaaagcagaagcgggcggaggagagactgtgagggattatgggagaagcaatcgctgctcgacccccccccccccttcgtcttgtacataaactgtccgtcgttgcccacgtctatctgctgcgcaaataataaaatgcttactccccccttcccccggcgcatttgcccattcgattccatcgataaaatattgagaaattctaattaaaaataaaaaaaagagagagagaaagtaattaatcagtagacggcggaaggaaagggatgtgagagaatgaataataatgattgagcaatgaatgccaaagggcactttcactgatttggcgatgcctttgaaaactcacgcaaatgctccccctccgtctcttccgcccggccctttcggcggtgtcctcgtccaatttcttctcgcccattggccgcgcgtttcgtcgccaccgccccaacaatttgcggggaattattatggaggtgaagcaacagaacgaagagaacgatgagaagcgggggaatttgggaaggaaaagcgaagaattgggggaaaaccatcggaaaataaaa

SEQ ID NO: 91795 - DNA, 663 bp, Heterodera glycines
cacactttttccaattattacctttatgttttataaatttagtcatattcaaacctagtggttcctccccgaccctatctatctgagaaaaagtcggggatgggggaggatattcttcgaaaaaatgccggcgatggctggggaaatttaaaaaaaacgtcggggagcaataccactgttggcgtctaaatttctttaaaaattgaaaaaattattaaaaaaaaactttatttaaagaaaaaaaatcttataaagtcatttgaatacaccatttagagaggcaaaacaactttttgcttatgaaaaaaattttttcatcggagatcaacctttaacttgttatttaattattaacaatgtgcattttgccaacaacgtataaatgaacgctaattttaaaatttcggtaattttttaaaatttcttttggcgggaaatatcatttgggagagagacaacgcagaaatgagagggtgctgcaattcagtattggtcatacaaagcattttgaaatccttcttccatttcgaataccaaatttgtgctggtttctttaaatatctgataattgcacatttatgaagtcttgctacaacttttattttatatggcaatccaagctttattaaatgttgaaatgaaaaaaaatgcaattaaaaagta

SEQ ID NO: 91796 - DNA, 662 bp, Heterodera glycines
atttcatcctcaaatgttttttacttattgttcaccttctcatttacattttacacaaaaaaattcaccatattcattgcctgtcacattgattcaacattaccacttcttttgcatcacatttaaactgttgaagcgggtgtcaacaaaaccggccaagtcagaatgggctacattctttttattccatcaaattcatgcaccgaattgatttgctggccacacacactgttgttcaagttcgagcttggcattaaggcggatgatgaccggcgccagtgctgcaaagtgcagagacggagttggccaagaccgcccatttcatcatgcgcctggaggcgcgcgcggatgacatttggcaacgcttttgcgccacatccatttgctcacaatcagcggcaacaagtacgacaacataaaaggcgtccaccaaaaacaacaccaacaatggcaccattggtgggccgaccagcagcagtgtggcttcatcatcaattgttgtccaacgggcggacaaccaaatgacgcttactgacctgtccgagcgctccgattcgctggaatgggcacaacgaaatcgcaaaaagcgcatcggttcacaggcctcaaccgaactttcccctggtgggaccggcagtggtggcggcacttcagcaacaggc

SEQ ID NO: 91797 - DNA, 620 bp, Heterodera glycines
gtttcttcatgttgatcacacttccactcgcttggcccatcggaaagcttttggattgtattttgggcgaagatttggttggcatggatcacgaaaagttgttggaaatgctgcgaatggcacaccaacacagcgaacaccacgaagaactcgcggaagatttgaaaattgctgttggagcgatggaaattgcggagaaaattgtgcgcgaagtgatgacaccaattgaggatgtgttcatgctttctgactaggccgtgttggactcggattgtgtggcggacgtagttcggcgaggctacagtcgtatccccgtgttcacgaacaacgaccgtaaccaaatcaccggtttgcttttcatcaaagatttggcccttttaaagcccaacgaacgactgaccgtttccaccatttgcgacttttatgcacgcactttgcgtttcgtcaccgacgacacaccgttgcaaacgatgctcgaggagttcaaggagggtgaatatcacttgggcattgttttgtcggagaatcacaatcgcgtggtgggcatcatcccattggaggacattgtggaggaaattctgcagtcgaaaattgtcgaccaaagtgaagttgtgtacgac

SEQ ID NO: 91798 - DNA, 178 bp, Heterodera glycines
gccctccaaagaccctctaaaggccaccgatttggtcactgcggccgctgtgctgctcgctctactcgcaaacctcaaccaaatggccattctctcctccatgccctttctgctcgcttatgccttcgtaaattattcttacggttcgttggcaatgagcgacgatttggactcattg

SEQ ID NO: 91799 - DNA, 653 bp, Heterodera glycines
gaagaacaccggaaataccgcttttccgattctgaatgtgcattgttgcgcgttaaattggttggagtattttgcataacgttctcatcattgtctactcggtactggtaaaacaagggaatttggcatcttgggctggcatcatttcaatggcctatttgttttcaagaaaacggctgaccattaaataagttgaattccaacgcacttcgacatccttaatcatagattttgcattgttatttatttgaattttattactttttgtaaagtttttagtggaagatcattttcaatttgcaatgctttgaaatcgtcagcaattatgcgcgattttcttatgcgacggattgcttttttcattcgttcctttacatcgaaaatcccaccaaggagctttaagccatctccaacagccttaaaatagccaaatatacacaaaattaaatgtattttatttaccaattgaattttgtgggcaaaacattgcatggaattataaccgagcaaattggtcgccaatttcatcgcaccttcgtcatcacgtagaatcaagtgtaattttttatcagtaatttgataagcgttcaaagtcttaaaaacacagacatacattttaagctttacccaaaaattaacttttgaaaacatgt

SEQ ID NO: 91800 - DNA, 566 bp, Heterodera glycines
tcgggcttctttcgttggcggatcgtattgatgtgctcaattcacttactaccgaagatcgcaagttgatggtccgtcttcacagtcttgaaattcttggcgtttcgaaagttttcgatggaatcagaaccgcatacttggcactcaaacacaggaagaatcgcaaccatcgtcagcgtattgtcgtattcttgggcagtccattagacccgttgcttgaagaaaaggaaacgtttataaaattcgctaaaaagctaaaaaaggaaaaagtgagtgtcgatcttgtcttgtttggggaggccaccgccgagaataacaaaatcattgccgattttgtcgaccttcttaacggggctgaagagggaaattcgcatttgttggtcgtgatggctggagacaccaaactgtatgatgtttcgctccgttcccccatttttgcggcctcgggggctgcattaggcgcacgcggcgaatttggcatcaacgaagaggaccacccggaattggccatgccattgcccattcccttggaagaggagcgtcctccgcccccactgtcagcaggg

SEQ ID NO: 91801 - DNA, 536 bp, Heterodera glycines
gaagcgggagaaattgggagcggagaagggacttcgaactattctcaagaaaatacggacaaaccgaagcgaaagagaaggaccatagaggaaattgagcaggaaaagttgaacaaagaagtgaaccgaatttgccgtcagattcaatcggcgaaaaactccaagtgcgaacaattccttttctgtcatttttcgtcgaagattctcgacttggacggttttctttttttgcagttaaaaaccctgaaatattaacgaatttggctgattaagacaaattgagcgatgagctgagaaaacgctttgaggagcgtggaattgaacaacaaattgtttatgacaaatcgcccaaaaatccgatgcaaattttttggcgcaaaaagaaattggaagcgtaccttgacggtgagcaattgcacaaaacggagagaatggaattgcaaaatgtgttctgttgcgctttgagcggtgagacattttctgtgctggtcaaaagtcggggaaattcgatgatggattatttggacgagcaaatg

SEQ ID NO: 91802 - DNA, 446 bp, Heterodera glycines
agctgatgcacgagcactgtcccaacccagaagggtttgtgctggccaatgactccgattacaaacggtgctatttgttggttcggcaaacattgaagcgaatgccaaccgcaaatgtggcggtggtaagtcacgacgcctcccatttgttggtccttttggacgccaatggccgaccgatgcttttccatcgggttctatgcgatttgatttgcagcggtgacggcactctgcgcaaaaaccccgaactttggcggagttgggacccactgacaagtgtaaatttgcacaaacttcaattaccaattgcgcggcgttgcttggaactattggacaacgacggtttgatgggctattcgacttgttcattgaaccccctacaagatgaagctgttattggttcacttttacgtcaatcccaacggaacagtggaacttggggggac

SEQ ID NO: 91803 - DNA, 438 bp, Heterodera glycines
aaaatggtctaagtaaaaatcgtaattacgctcaaaaagcttctcaaacaattttagcgcttccaattccttctacaatcgcctttatacatcccattatgagcgctaaaattatcagagtgccgaaaatcgcatgtgatctaagcctagaaaaaaatggtctaagtaaaaatcgtaattacgctcaaaaagcttctcaaacaattttagcgcttccaattccttctacatttttttttatacatcccattatgagcgctaaaattatcagagtgccgaaaatcgcatgtgatctaagcctaaaaaaaatggtctaagtaaaaatcgtaattacgctcaaaaagcttctcaaacaatttcagcgcttccaattccttctacaatcgcctttatacatccccttatgagcgctaaaattatcagagtgcccaaaaccgc

SEQ ID NO: 91804 - DNA, 579 bp, Heterodera glycines
ctccgacccaattgtctgtctctacttcgtttgtgcgcaaaactgacaattcccgagactcgggatggccgaggagtttcgaccaccattaatggggttggcattccgtcccaccccctgaagaaataaaaaactaaacatttttaaggaaaatgaagcataaatttctttaaaatatgcataaaattttccccagtggcgcctctcggcagcgcctctgacgacaaaattgccttaaattcttcaaaatttgaccccaaaatgaatgaatgtgtgggcaatgttttccccccccccctaaatgccaataacatcttcctgaatttcagctccagaacattgaggcaaaggtaagcaagcggaagtgagtggctgccccgagggcgtccaatcggtttttatgggtccaatcaatgggccgggccatcactcagtttcttaggccataacttttttcttacttgatcaatgcccacatttaccaagccaagaatctatgccttggctaaataagaaaaaaatgatggcttaagaaactgaggaaatgggccataaagtgcaatggagccaattttgatc

SEQ ID NO: 91805 - DNA, 561 bp, Heterodera glycines
  unsure (1)..(561): unsure at all n locations
ttaaacagccaacaaagataaattaattattttgttttatttctgtgataatctttataaaaattcattcccttttgaaagttgcaaagaaattctgtgggacttattgtggcacctctctattagactcttgtctaatagctcctgtaatctggttttgcaactttcaaaaaagtaacaaattacgaattagcaattttatattcgaaaattttgcagttgataattgttgctataaccacgatgtgtgtgtgctacataaataaatatcagaaacgttacgattgtgatattaaattttgcaattgccttaatgaatatcctaattgctttctaacaaaagtctgttctccaactcatatcttaaatattttattttttagaatatattatgctggtcagttcatatttttggagaatgttttaaagaaggataaaaataattattttattttaccgtcaatagatatgcatatgtattttanatttttattgttatgtaaacttctaatatatatatatttatatacataatcatatgagttggcggttttaagaaac

SEQ ID NO: 91806 - DNA, 413 bp, Heterodera glycines
cgaaatggtgagaccggctgcagcgagcacaaaggcccccaccaatcccgcgaatacatgtgaatggtttgtggaagtagtcgagacttccttggaaagctcgtgaaatttcgtcgtcattccgctaaactttccatcaaagtcgctacggaccctcttttcaagggtgagcaagtcctaaacggagtttgttcgattgagttaaacatttaaaacaactttccaatcgacgacaccaacagtcgaatagtggcgaaaagagtcgcttcttaaataatatttgggtgaattgcaaacactttcgtcatttggaccaaccgagagagattggcctgcagagttgcgcccgattgacccgtcacccacagaaggcgaacacccacttcaaagggaaaaaaaaaaaaaaaaaaaaa

SEQ ID NO: 91807 - DNA, 564 bp, Heterodera glycines
  unsure (1)..(564): unsure at all n locations
gagagaactagtctcgtgttttttttttattttaattttattttttaatttaattttcaatcaattcaaatatttttattaaaaattcccgaccatcgtcggccacgagggtgccggcgttgacgagtcggtgggccccggcgtgcaaagtgtccgtgcctgtgaccacgtcattccgctgccgttgtgccaatgccgcgagtgcgacgtttgcgcagacccaacgtcgaatctttgccgaaaatttctttatttgtgagggaattgatatggcgtgtcttttattattggaaatggttgacaaaaacgaccaaaaaatcacagactttttttntggggggtggcaccacccgtttttcgtgccgtggacagcccatttaccatttcgtcggttgcagcacgttcagtgagtacacagtgacgccggaaattgcggttgccaagattgatccgtcgttgcccctggacagaatggcactgctcggctgcggtgtcaccaccggttacggtagtccgatcaaagggtgtcccatccgcgccggcagtacggtgggcgtgtgggga

SEQ ID NO: 91808 - DNA, 671 bp, Heterodera glycines
cttactgactgctttgtgattaaagatttgaaaattttgaaaatgcagcagcatccgatgcatcatcacccccattatcagcaaccgcaatttgcctatccacctccgccgctgtctgcgcccaacgcaggcaccggagcacatatgcagcagcagccgactccgccaccacaggcggcacaacttcacgccatggcggcgtccgctacgcccaccggactgttcatttacgctaccaatttcggcacctttcagcaggcggcggcggcgatggggccggtgggcgaaccgccgcatcagcagcccaatgaactgatcggcccaatgcccggacagcatcagcaacatccgatgcatcatcatcctcactatcagcaaccgtcgttcgcttatccgccgccaccgctctcggcgcccactgtcagcaccggaggagcgcacatgcagcagcaacagacaccgccgccgcagacggcaccgccgacgcaccaccaacacgtcatgcccaccgcactgttcggctacaatcccaacatcggaccattccatccgccaccggcgatgggaccaacagtcgagcagccgcatcagcagccgaatgaactgattggccaaatgcctgtgcgacatcagcaacagcagcatccgatgcatcaccacccccactatca

SEQ ID NO: 91809 - DNA, 422 bp, Heterodera glycines
gtttagaagaaacggaacaccatcagcagcaagaacagattcgccaagctttgcaagacgaaactattcctgcccatattcgctcgctgattcgagcaatttctgatcaattgtccgataaggtgacagaaattcaagcacttcgacgtgtttttggagacaaaaagtacgcacttttgctcagccgcggagcagctttgatggaggaggaagctggttggcatccggacatgctttatctgttttgcattggccttatcgtcttcattattctcttcgcaatccgtcaatggattaaaggtgcacagtttcgcgagaaagtcagagctcgtggggcggtggccattgtgacgggcgcgaacagcggaattgggaaacacctggagcgcgagctcaacctgcgttatgtgaaagtgtacatg

SEQ ID NO: 91810 - DNA, 556 bp, Heterodera glycines
gtttgaggtccaaaaatatccgaatattcctccgtttgtttattcgctatgctccgttaccttcgttctcgtattggcagttcgtatcaagtgaagagcgaccattttgacgatttcgtcgacttcagcaaactgacgacccatggcttccctcagaaagcttcttcgatgtccgtggacgagaaattgggatatatcgcaattgggacgaaagacggcagacttttgatattttgttcaaacggtgcccaacatttgtccgccaattttggcagcaaattgccgatctgtgcgctttactttgtcgcagcattttgtacggtgtcaaatcacttctgatcagctcactgtcacccatttgaacaatgaaaggcatttgaagcggatcacttgctgtgagatggttggcctcgccgatgggcagtccgcccttctgattggcacaataatcggcaacatttatgcacttttggtgcgcaacatggaacttactgaacatgttgtttttctcgacaccgctctcaaagacattttcgagttcgattctcagcaaaag

SEQ ID NO: 91811 - DNA, 489 bp, Heterodera glycines
taatgcttaattaaatatttattatcctttttaaaaatcaaatttgaaataaaatcaatttaaaagttattttataaattgttttattaaaaataagttaaatgaattattaccaaaaaaaaaaaaaattaaaaggaaaaaaatataaaatccctctaattaaatccgggaagggtttaaaataatttattttatttaaacgggcgcgaagcgcccgtctgagctcaacaaaatttaaaaacgagctcttagcgcccgtccgagctcaacaaagcttaaaacggaaagcacgcctgtcaacaaaatttaaaaacaggcgccaagcgcccgtccaagcccaacaaagaaattttttaagaacaataacccgtttccaaaagtttttttaagtcagaatattaaaaaagacaatcgctgcaataaattttctttataaagatttagtcccaaaaatccgcggatcacagtcgcgcattgcggattcaaatt

SEQ ID NO: 91812 - DNA, 545 bp, Heterodera glycines
cgaatttggaggccgaacagcaacagaagccaaaggaggaggcgggcgaagagggcactgaaaatgagaaaggcccaccaaccgaccgaattgcggggacagacccatgggcactgagaatcggtccaccgccgaggagggaggactgttgcacggacgaatatgagcttttatgtgtagaaaatttggacgaacttttgagcagtgagaagcaaaagccgaccaacgaggacgacgacgagtcggccccgccgtggcgcttcgggccggcccaaatgtggtacgaccgttttggggtgccggcgaacccgtcgaatttcgactacggactgaagaggcggggcacggcgctgtcgaaacgttcaacggacgacggcactatgccattgccaagcgaagatgaccgcaactttttgccagcgcatttcttacattgggaggacgacataatcattgaccctgaacaggcgcgggaaaagctggtgaaggaactctcttcggccaaactgccgcgttgcggatggattccgacgccgtacacgcgc

SEQ ID NO: 91813 - DNA, 248 bp, Heterodera glycines
taacccattttgaaaaaacatttgtattccattaggtgcggatgtgccaaatctccagtaattttgacggattcccgccctcccctttaacgtacgaccgaaaaattgaaaagtttacactcttgcgctgaaacggcgtgcgcccgccacttcgctggcacgggatttgaagtggtcaagcaaaaggtcggcatctttgcgcagcatttggcccgactcactgaagttctggaaaaaaaaaaaaaaaa

SEQ ID NO: 91814 - DNA, 205 bp, Heterodera glycines
gatcgaaagcagcttttccgattggaatgctttctaattcaaacatgtgaaagcatacacagaccaagaaggggcgaacgaacgaatgctaactcaattgagcgccaaacagttcattgacaagcacaacggagcgtaaaaagaggggatagtgtccttccatagccgggagagattcatattgtctacctgcccttttccgaat

SEQ ID NO: 91815 - DNA, 595 bp, Heterodera glycines
attttatgctaattctggctcttttctaagaacccgtgcggataatatcaaagcaaggaagtcttctgctcgcctttgcagcctctgtacggcactggggccaacactttatgtgtcgttaattttatgctaattctggctcttttctaagaacccgtgcggaaatataaaagcaaggaagtcttctgctcgcctttgcagcctctgtacggcactggggccaacactttatgtgtcgttaattttattctaattctggctcttttctaagaacccgtgcggaaatataaaagcaaggaaatcttctgctcgcctttgcagcctctgtacggcactggggccaacactttatgtgtcgttaattttatgctaattctggctcttttctaagaacccgtgcggaaatataaaagcaaggaagtcttctgcacgcctttgcagcctctgtacggcactggggccaacactttatgtgtcgttaattttatgctaattctagctcttttctaagaacccgtgcggaaatatacgtgcaaggaagtcttctgctcgcctttgcagcctctgtacggcacttgggccaacactttatgtg

SEQ ID NO: 91816 - DNA, 543 bp, Heterodera glycines
ggtcgtacacggaggagccgcacgccacaaggcgaagtcaaattttggaaaggcatccggaagtgaaggaattctttggcattgaccaaagcttcaaatatgtcgttgtttcgatggtccttttccaattgctcatggccttctttctcagggactcgcattggcttttggtttgcctccaagcgtatttcgtcggtggcactttgtctcattcgctgactttggctgtccacgagtgctcccacaatttgggctttggccattccaaaatgcttcagaatcgtctcctcggcttcgttgccaatttgcccatggccattcccatgtcgatttccttcaggaaataccatttggtgaacaccatcgcaatttgggcgaagatgtcgtggacactgatgttcccaccgaatttgaggcccgttttttcaccggcaaagtcggcaaattcgcttggcttttcctccaacccgttttctacgcaattcgtccctttgccatttacagaaagtctgtcactgacatggaaattgtcaatgctttgct

SEQ ID NO: 91817 - DNA, 625 bp, Heterodera glycines
aattaaaccaatttataaaattcatattgataaaaatttaagacctaattaattgaaataaaagaagcctccgaaatgatgcgagttttcgatcatgagcatttataatatggcatacattaatgacgaaattgaaaaactcacataaattgaaattcatcactatatttattaaatgtaaataatgaaaatataatctatgtcttttaaaaatcaaaaataaattataaatttaaaattaagatactttagtgcataacaatctataaaattaattttaaagaaactagcgcaggcgcgctcgcttcgctcgcgcacttcgcgctagctaaaggttaaaaaaatatttgtcatccttatccaacttgcctcacgctctatttttttctctcatctctttgtcgactcttctctttctctcgtctcttcttaattttctctttttccatctaacctcttttctttctctctatccgctttctctcatctctttccactctctctctcctctctctctcctcactcctctccccttttatcttttctctctctctctctgtttcatttcattctatctctttcctctctctctctctctctctctcctcttttctcttctcgttcc

SEQ ID NO: 91818 - DNA, 563 bp, Heterodera glycines
ttgaaagtctaaaaaagtgaaaattgctttggcctgctgtttttctctgatggtcagcaataaaatggagggcaaaaaaatgttgaatatcgctgcctcttggcccgccattgttggtgatgttgtagtcaatgagcaggcactggaaagtgcgcaaatacttccacaattattgcacgaggccagcgtagaggcacaacaacaacagttgatgaacagacagcagccgatctgttagtacaattggccaatggcggagcgcaatgaaagcaatgagaacgaagaaaatgaggacaacgagggggcagacgaagaacagctgcaaaacatgttggagaactaccaaaaacacgtgatcaggcagaagcaacgccagagcagcagaagaggacagcaaggcacagccggcagaagcgcgagtcatctgcagaagagaatgaacgcctcgcaacaatctccgatgagtcattcccagccgtgtctgctttcgtccagcgttggccaatcgcatcacaaaaatgacgcgattgctggtggaattaacggcttggttggcgtccaga

SEQ ID NO: 91819 - DNA, 634 bp, Heterodera glycines
ggcgttcttttctccgaagctgaagcttttgcactgctcaatgatggcgaacttgaagctcgatttgaaaaggccatagggtctctcaacattctcgaatgcacattatgcgattcagccaaaatgaaggcattgcaacgaagagttcagcagaaaaatgggccatgtgaggagcagcagacgagtcgagtgccgagcagggcaccgaccctttcccaaacgaccgcggaccaacagatgttaagcacatcccacacgacgacaacggcgacaagtgctagcagtagtttcactgtgcaaagtgcaaatttgactcgcccggagagcacatcatcagcgaaatcatcgacaactcgggatcagcaacaacagcagcacggtcggcttcaaccaaacacaagcactgtcgccagtaatgcgccgagtctgcttcaacaacagcagcagtcacagagggccgcagctgcgacctatcggccgaatgctgccgattttgtgtcaaaagctggctgcattccccaggcaacgacttcagccagctcactctcttcaagcaaccatttacacccacaggcagcatccatccaggctcaattctaccaacaactttctcaactaaaccattcgcagatgc

SEQ ID NO: 91820 - DNA, 647 bp, Heterodera glycines
ggttgattcaacgctaacgacgaatgattgcagaaattgacatttatgggtcttcgattctatgaaaaatattttgttcttttcggagcgtttattggaggctgctttctgttctctggaattctcgtctattttggctctgatagaattaacatattgcctgaactgcaaaatcggataatcaacccgaaagttcgcaatgtttacgattcacaatcaatcaaacagatggagcacagatttggttttgcatcgaatttaaacgtttcgatgaaagaaaatgaacgtcgacgaaactttacaagaaatatgatgaagtttgcatggagcaattacgtacgctatgcgtggggtgaaaatgaattacggccgatcgccaaaatcggtcattctggctcagtctttggacgtgcaccagtgggggcgactattatcgatgcacttgacacgctgtatattatgggtatgaacaaggaattcgaccagtgatttgtccgttttcgaaacaaatattcgcttcgttggtggtctgctgagtgcttatgctctcactaaagatcagatgtttttgaataaagctcgcgatgttgctgacctgctcatgccgtcatttaatgccagccctttcgggattccgatgtctttaa

SEQ ID NO: 91821 - DNA, 594 bp, Heterodera glycines
ggaaatgctgcgcaagaaaatcacctcacgtccgacaattcttcacctggttcgactacgtgctaaacatgggggacaacaattgttgtgtgcaaacacgcatttgtattatgacccgaaatacgaggaagtgaaaatcattcaaacccttctctgtcttcggtacattgacaaaatccgtgcgcaactttcaaatgattcgtcgtgccaaatccaagtgatattcgccggcgatttcaacagcactcccgaaagtcgcccaattgcattgattggtggcgacgaccaaactttggaaatgaaaccagacgaaaaaaactacgaaactaacgctgaatctctgaaagttaaagcgcccttcaaaagccaacttctgtccggttctcccgactacaccaacttcacgtgtccccccggctcctccctgggcttcaacggctgcttggattacatttgggcccaccctccgctgcgcattgagcacatttggccaatgccggaccatcggctggtcaccaaatacgacgcacttccgtctccaattgcgcccagcgaccatttgcccattttgtgcgacgtccaattggacagcga

SEQ ID NO: 91822 - DNA, 677 bp, Heterodera glycines
gtgtccaaacaatgtatgcatttggactgttggatggcattaaagccaaaatcaactctccgataaatctttgcagcgcagggaaagaatcgagaggcaaaaatgccccgatcaaatccaacaaagttgacggcacgccaaataaggacgccgaaaaacaaatcagtcagctaaagcaggagtacaccaatgtctttaaaaatgaattgggactctgcacaaaggtcaaagcgcatttagaattgaaacccgacgcacagccaatatacagaaaggctcgtccggtcccgtacaacgccaaaaatgcagttgacggagaattggatcgttgggagaaaatgggagtcatcggcaaagttgagcacacagaatgggcagcaccgattttggtcgtcaaaaaggtcgatggtagcgctcgattgtgcatcgactattcaaccggactcaacaatgcgctaaaagaccaccagcacccgttaccattaccggaagacatttttgccaccttaaatggaggccagtacttttcacaaattgatctccgggatgcgtatcttcaagtggagctggacgaagcatcgaaaaagctgtgtgccattgccacccatagaggaaattatagagtcaagagacttccctttggcatcaaaacagcgcctggcattttccagtcgata

SEQ ID NO: 91823 - DNA, 680 bp, Heterodera glycines
catagcaattcatttgatcagcttaaaatttcactaaaaacggtggagtgccatgtgtcaattactgagagccattggcaggcgtttgaacagctccgaattggaggaaaccacgcacttcgactacacccttctgtactgccacggtatctgctgaatgccgacaaataacaaataattatgtcaattgggcggattatcaattaattggctaattaaatgcctcttactcaccgccgttgatttgcatttgcatttatgcctacaattagactgctcactcttcatcatttggacttttccgatgccgcgtccgtgccggaagagttgtttttggaatggacacgacaggcggaaacgcaatggcatcacattgggctgagaagagcaaaaatcaaagccaaagctggtgctgatcagccaaatctgcgccaaaatcagtggacattttgctcagccaaattggaatggttggacatctcagaaatgggcagcattggtaattaattaataattaattaattggggaaaaggcagcaacaaaaaacagctgaagtcggcacattacgattggacggatgcgttcagctcaaatggctttatgcggacgcaaatgccctgggggacattcaaatcagcgactcggggcctgcggcgcttctgtctttgtccgcacgcga

SEQ ID NO: 91824 - DNA, 274 bp, Heterodera glycines
taaaaaattatcccgggggtggagtcgagttgctcatagaatcatagaaaattcatttttctaaattgccgaaaaaataattgaaaactgatcaaatcgctgttgtaatttttaggtttgcggtgcctacgaattttcctttgttgtacacaccgacagattctgtcaggcgagccggccagggatgtcctgttacgcgttcagcagctctacgccaaaatgagcagcgcacaacggaaaaaacgaattcttcttagaaaaaaaaaaaaaaaaa

SEQ ID NO: 91825 - DNA, 554 bp, Heterodera glycines
caattctcatcgacgtatgggcgttcactgaacagcagcggaagggaggcgccacagcattggacagtttttgttcaacaaacacttcgacgccaaaagttggcacattcagatcgttgagcacactcatcctggacattcttaatccggtagcaaagcggcacaaaaatgcgctgatcaattcgttgggcgtcgtttggatgttccgcaacagttacggaggaggtgccaaaatggcggacacatgccgatgctccttcgattactccgcccagcaaattgaagtggccaatttggcgctgaatttgaatgccctgtcgctgacttccatcatttgctcggtcagtgacacgttgaaggagtcgggcaacaaaacgacaaaatcatcatcttcagcatcatcggctaactccagtgaaaagttgggcgtcggcgggttcagttttttatttaaagacgaggattaacccgatgttgacggattttgtgcgccgttgcggcagtcttagtacgagtcggggtaccagaacgagtcggggcagtacgagttgggt

SEQ ID NO: 91826 - DNA, 360 bp, Heterodera glycines
atcgagtggttcaggaaaaagcggaaaagcagcgaaaattgagtgcccaactgaacaaactgctcactttgggcagtcctatcagcgtcaacctgctcagtatttccattttctgctcttacgcctctaaaatcgatgttctccactgttatgccgacctgcacaaatcgattcaacaatttctctcttcttatggccaggaactgatccaaaaagtgaaattcgattgcaattttaacatcgacttcccttccgaatttgccctctccgtttgtcaaccgttgggtctttccacactgtcattcgccgataattcgagctctcacggcatttttctgaattgtgacccaaattcgcgga

SEQ ID NO: 91827 - DNA, 601 bp, Heterodera glycines
acaacttcgtaccaaattgaaaatgctggactttcccgttgcatgaaaggtgcgcaatcactgcggtgcgcggggccacggcaaatcacggccattggttttgacttgggcgcggtcggctgcaatttggccatcatcatttttgtgccgaatttcatgtgcggaaaatgtttgcacactgttgtgtttgggttgagcggctttgacgccaacgggtaccaagtccatctctttcatatgcccaaattccgcggcttcctcaaaagtgcgctgcccgaacggaccaacgaaattgtgtggctgcagcacatgaaattcatcgtcttcgacgacactgttctcataagaatcgctatttgctgatcgagactgtccactgttgaccgacttcttcgtcgacctgttccgcctcgttgacaatccttccggcggatgaacgcgtcggaacagttttttggaaaaaactcagactcttggtccgtctctttcgtatgcccaaattctgcggcctcctcaaaagtgcgctgcgctgaccgaaccaacgaattgtgtgactgcaccacatgaaattcttcgtcttccatgaacactgtcgtcatca

SEQ ID NO: 91828 - DNA, 666 bp, Heterodera glycines
gtccaatgaaatcatgttcctcatcggcaagtacttgttcgacaggtgacacaagcagtaacacagagacagcagaagaagataaggaaggtggtggcatatgcagcctttactgtctcgccagctgtctcggtgttccgtctgagctcggatttgagtttcttcgacagaaaaatgctttggttctctcggggctaaccactcactccgacgacgctttgccttttcttcgcattagcacttttgacaatgttccgcccaccattctcttctacacaaagggtgcaaaagttaaaaagcctccgcctcactttgcctctcaactcacttggtgcaacaattcccttttggccctcgtcgtccgtcacagtttggctgctagccatttcaaattggtggacgaatcgaagaaatggattggctattgggggaagcatttgaagtcaccgcaatatcggacactgaaaccgttccaaaaggtcaatcattttcccggcgcctttcatttgggccgtaaagatcgcctttggctgcacatttacgagtttatgcagcgtttcgaaggggacctcttctgcattatgcccatcacttatgtcctccctcgcgatgctcgaaagctccgactttatttggccggctatacggatcgccatgtcattctga

SEQ ID NO: 91829 - DNA, 662 bp, Heterodera glycines
gagcaattgcaccatttggggcttttccttgcacaaaaactgacggcaaatgacgaaaaatcgcgcgaattggccctttattatgcacatttttactggagaattcggggcgacccgttaaagtcgcagcagtgccttcgcctctatttgaagcgacggccgaattgcgttgctgccaaactccaaagtgggctcgtccatctccgaatcggcgactatccatccgcaattgaactcctccaatccgtcaatagcattgtcaccaattgcgtcgattgtctgatggcattgggcgatgcctttgttttggatggaaattataaagcgggcatccaagtctttgacatggcgttcaataccgatccgaaggaggaaatggcacttaagaaagcgtcactgctgagatgcactctcaaactgttcgaagtgatggaaaatcagcacaaaaatctgctcgaaataatcaaagacaaagaggcctatcgggacaaaaccaaacgaatgcagcaattggaggcgcacattgagcagaaccgagcagtgcctgaacaccgacttcaggcgcgactcgcccacaaattcatcgaatttggcactttcccatatttaaaatgccgcgaaggcactcaatggatgaacggaattcacgagagaaaacgatt

SEQ ID NO: 91830 - DNA, 650 bp, Heterodera glycines
tgcgtgaaattgtgcatatccaagcgggccaatgcggaaatcaaatcggagcgaagttttgggaagtgatttcggacgaacatggcattgagccgagcggaatttacaacggagactcggaccttcagctggagcggatcaatgtgtattacaacgaagcgaccgggggaaaatatgtgccgagggcggtgctggtcgatttggagccgggcacgatggactccgtaagggccgggcctttcggacagctttttcggccggacaacttcatcttcggccaaagtggtgctggtaacaattgggcgaaaggacactacacggaaggcgccgaactggtggacaatgtgttggacgtggtgaggaaagaggcggagaattgtgactgccttcagggcttccaaatgacccattcgcttggcggtggcactggctcgggcatgggaacgctgctgatctccaaaattcgcgaggaatatccggaccgaatcatggccacatattcggtcgtcccatcgccaaaagtgtcggatacggtagtggaaccgtacaacgcgactttgtcagtgcaccaattggtggagaatacggacgagacattctgcatcgacaacgaagcactttatgacatctgtttccgaactctgaaactg

SEQ ID NO: 91831 - DNA, 610 bp, Heterodera glycines
gtgcgtaaccatgtccctcggtatttctaggcgagattgctgggtcttcgcccctgattcgcattcgccattgccaatcttggtaagccattcgcgtaaggctgtttgccccggaagcacgcgcatatttagagtcaagctttaaaagttaaataatcaaatttaacatttaaaagtaccttatttgttggaaatgttcccggaagagctcgtccatttttatgctttcttgcacttgatcttctcgcgtgccatgctccacaacaggtgtcagctgtctccaatcgccgcctagaaccataactttgcctccaaatggtttgtcaactgcacaaacatccctcaatagccgatcgacgtaacgcagcacctttttgctcaacatgcttatttccttagcagtaaaatgtttttatatttcaatatatacatacatcgattatgtttaattgaacgatgcgaagccttttcgcccctgcagattcaaacggcatttttggtgtagtattatcatcaacttcattcggtacagagaactgtctgtgaacagtgccaccaccgatcaaaagaagtgccgcaatgccagtgctagctgcagaagtgacagagc

SEQ ID NO: 91832 - DNA, 627 bp, Heterodera glycines
atgatttcctccagcaacagcagtgttggcactggtggctcaaaatgcctgaaaaatttggacattgtaatggaaagtgcggacgaaggccaggcactgctgcaagacaaccccaacaacaccacaaccatcacttccgtttctgctgctgatggcattccggacggtgaagggacatcatcatcatctgctgaacagcaacagccaaatcgaacggacagtgcccaagcgcaacatgcacaaccgtcgacgacaatgctcaaaatgaaactgatcagtgccatcagtgacgacgacgacgaaaacaaattggcgacactcaaagggcgcaaaaaggccaaccaacagcagcagccgtcgcgggttaagcgcagtcggctcagtgtgatcactttcctgaacaacatcacagcgccggcgacgcggacagacggcggcggcggcggcaaaagttggcggcgcagtttgagtgtgagtgcttcgtctgttcaacaacaaaaacagccgcaccattcgcatacgccatcgtcaacatccgcggagcacagccaaatggagtcggacaagcagaaaatggtgccgctgacggacagtgggactgataaggacggcggcggatgctccgcc

SEQ ID NO: 91833 - DNA, 573 bp, Heterodera glycines
gaaaacattcccatggcgccatgggactcgcgccggtgggctccgcgacgaactccttgtcaagtgcgttgtccacgtcttcgctgctctccagctcaaccattgcacttcacaacatttccatcggggaatcgagcatcgaattggaggaactttcccgggaagagctcatcagacgatgcaacgaactcaccgaacggtgcaaaatggaaatacgttctaagaacaaggagaagcagctcaaggaagagaccatcaaaaagctggtggttcttggccagcagaaaggcatcatcgacacacgcaacaaatcgaagaaaggggagaaagagaagcgcatttgggaacttgcacagcacgagaaaaacctcgagataaacaaatatgaagaccgatacaaggagatgcaatacgcactcgacagcacaagacacgaattggaagaggagtaccagaacagaatcaaaactgaggaggagctacggcagtacaaggactgtttcggacagcttcccaactcatacttggcctccgccaacccgcataataatgacaggcaacgtaaccaggcgc

SEQ ID NO: 91834 - DNA, 667 bp, Heterodera glycines
caactttggaattgtgccgtcgtgcactgccactttgattggtttgacaaggctttttgcgtagattaggttgcattcatcctttctgattattgttttggccttttggtacacggcaattcccatgccgtatatgctggcgtcgcagaagcagtggaattccactgagtcgatggcttggatgtgcctggaaattcgatcgtgattgcttcgcctctgtcgagccactgtgccatcaatttgagccagtacttgttgatgtttgctggcatttcgtcgtcccattttgggttcaagttttgcacttcttgaagaatgagcttggctggcagtagcacgggtgacatgagtccgagcgggtaatagactttggcaatttgcgacagaattgtccgttttgtgatttttccttcgaagattggcaatttgaatatgagtcgattgtgttttggtttccatcgaatgccgagcactttgttgtcttcgaggtcctttgccaagtcgtctggttgcagcttttttagctcttcgatgttgcttccgtagaattctcggagtttcatgcccgctgcttcgaagattgtcttggcttgcgtcacaaatcttgaagcttttccgttggcttggcgtcgaacatgatgttgtcgacgtacagattctcttcgat

SEQ ID NO: 91835 - DNA, 662 bp, Heterodera glycines
ggaaaggattaattgattgaatcgaattgaacatttttgatgcgcagtgaagggtgaatgaattcatcaatcacttcgttcgccattaatcagactgccaccgatttcgacctttcccttccccttttaccacatcgtcaattttcgtcctttgcctttaaacgtcggtagcaactttgactcacaacaatcagccgttgaattagcatttcctggattttgaatttgttttggagagtattcgtcgaacagaacgcggcggtattcatgttcattaaacaaacaacaaacatctgatcgctccttcgccaaattgcaaaaaaaagcggaaattactgacaaaaattcactgaactgctgctgatcacattccaacaaaacaatggctgacctggaagcagttttggcagatgtatcatatttaatggcgatggaaaagagtcgaagtcaaccggcagcacgggcctcgaagaaaatcgttctgcccgacccgagtgttcgaagcattatgcaaaaatacttggagaaaacgggcgaaattcgcttcgaaaagattttctcccaacggttggggtttttgttgctcaaagactttgcggaaaatgtggccgacacttcgtgtcctcagataaaattttatgaagctatcaaagaatacgaaa

SEQ ID NO: 91836 - DNA, 378 bp, Heterodera glycines
ggcgtttgggatcaggaattggaaaaggcctgcgcgctttgtggccgattccgaacttatgcctggtccccgttcgaattctggcacacggacgtggaatgccgcaaggtcgtcgaagacccactggcagccttcaccaagtggttaatgaacttcgaaacggaagtcttcggcatggagcccggtgcgaagaagcgcagaaaaaggaagaatgccgaaaacaccgacggctaggctatggattgcgaagaagaagaggatgccgtagatgaggacgccgagaacaactggatgctggggtacgaagaagccggggagaagccggagtcggtgacaacatacgcgtacgcccacgccggtaattttggaattatttaa

SEQ ID NO: 91837 - DNA, 658 bp, Heterodera glycines
gtggcctttggtttttctgccaatttaaaattgttcactgtgacggccaaaggagaaaagttttgaggcgaaggcggcaaaggggcgaatgctttcagctgctggtcgactttggaattgggcagaagaagggaagcgattggcttaagaaggcattcttttgttggtcagatgtgagtgattgtcctaatggtcgtttgtttgcctttgcctctcctccgactgaattcaattcggacggacaaggacagaatttggcgtcggcgccgtcctcgcccggggggcccttctctccgcgctgccccggctttccctccaatccgtctaatccttgcttgccgacccttccgtccggtccgggcattccgatgacaaagtttcgttttcctctctcgccttgtttacccgtctgaccgggcggtcccttcaccccgggtaatcctgcaaattcagccctttattttatttaggcgtttttttcagggtttatctttgcctggtggtcccgtgccgccgggtgccggcgacccggccgcgccccgctttccctgtttccccgcaattcccgggtgtcccggaagtccttctgggccttgctctcctgaaaataaacaagcattcttaaactttacttacagatcagaccgtccgtcccgtc

SEQ ID NO: 91838 - DNA, 421 bp, Heterodera glycines
ccctcctcatcggctcttacgtccgttgcatatcaacgaaaaaatattgttcagacctggtcccaataacatgccaccactcttccaggagggactctttctaccgatgcttggacatatgcatcccgagttcatcgaaattatggatgatgtgaaagccggcatccaatacattttccaaactgagaatgcgctgaccttcactgtatcagacactggccatgccgggatggaatgtgccatttagattctgctggaggctggccagaccatttttcaggtgcaaaacggaatgtagcgcttgcggacagcgaatgtagtggagagacttgccattaaagtgcatcgattgggcgtaccagcagaagaagtgattaatatggacgctcttgccgaggctgcggattactaccgtccccac

SEQ ID NO: 91839 - DNA, 678 bp, Heterodera glycines
cgcttcttccgctggttttcggtgcgttaaatgatgaattgagtgaccaaaaaagagaaaagtttaaaatgaaaaaaattattgtttgaatgatgaacattttgaaaataaaattgacccttttttcctttccattgctttttcaatgcctgaccctcgaaggaataaattcccgaacaattttcttcgtcatcatccatcacattcgtcattctctgttggcattttgcatatttaattattctcggcacttcccgggaaagaaatgttattaaaatggtaaatgataggtcatgggaatgatgatggccatcctttgggcaaaaagagcattttgacaaaattaaatgcaaatttcgctgggaaagtgtttttcgcatttgcaggcgcctccgccgctgctcagccattctctgcgcaaggtttgctgcgccgtgtgccgcgtccgcaccgcgcagttggcgtacatcactcgcgagcagcactcgcaccacgggcaccatgtgccgggccgcaagttgtgccacgtgttccgcgtcagcacaccgctcaatgcacagcacatacaaacggcacttgcggacgcattccgacagcaaaaacagtgggacgaagccgcgggggaagcggaagaaatggccaactgtcacatggacaacgaggaaaatgatgacggga

SEQ ID NO: 91840 - DNA, 671 bp, Heterodera glycines
gttttacatcgacgagtgtttggcggacccctccatggtcagacgagtggccaattcgttggcatttgccatggtttggcccatcgacggggaagaggtccttcgtctaatgtccctttattgtataagtgccaccccttccttcaggacacaactttcttcgaacttaaagtgtgcgatcagtgggctttcgtcggcgattacgaaaatgaagagacggcacctttagtcaatgtttacagaaggcacggcactcaaaataataataataattaacgacaattccataattgtcccaattaggcacgaactccccgagcatatccattggcgcgactcgcgactggtcgctccgattgtgctgatcgcacggccagggattgtcctacttacggtgactgagtgattcattgctttcttcgcatggataaaaccgcacatttccttttggtatttagcgcaatattccatcgaccgatgttagcgagaaattggccaaaaaatggaaaatgctcgacggatgggaaaataaacacgaagcaatgcaaggtggggacagaagggtgggaaagggcacatttattggccaaattttatgtaaaaaaagaattttaggaattttcatggcaagaggaccgggtaaaattgccaataataatcagttggaattg

SEQ ID NO: 91841 - DNA, 662 bp, Heterodera glycines
atcagcaaatgataaaattgtaaaacattgtactgttgaaggtggcatattttcatcagatcatttagcacagctttttgtgctgagtgttccagaaataagagcaaagcctaaagaaatttgcctaagacggtttactccgtctaatgtatcacatttaaatgctgtaatttctgctagattaagttctctttctctttcacattttagtataaatgaaaaatgccgtgccttcaatagcgccttgttgaatgccttgaacgagtgtattccaataaaaaaattactaaaaaaagatttagctccaaaatatccacaacatttattggcatccattaaagaaaaggcaaaattatatagacagtgtaaaattgatccaacaaaaaaagcactttatgatagcattactttacatataaaaatccaaaccaaaaaaatacataatttaattgaacataaggctatttaaaagggaaaaaattcaatttttaaatacattcaaaaacacaatgtcaatccctttgaaataccaaatttagtttttgaaaataaatgctatcatgaaagtgaagagaaatcggaattatttgccattttatttgcaaattcatttaataactccgaaattgtcctaaacgatttaagtttggacaactcctatg

SEQ ID NO: 91842 - DNA, 661 bp, Heterodera glycines
cactcgtataaatcaacattactgaaaagcagtttcattacgcctcccaaatgcaaaaataccaattgtgaaatgtacaaatatcagttcaaaattcacctgatcggaaaatttactatggtgggattcttttcgatgaaccactgattcttgtggaaacgatcataagtaatgattagatattcggggagatgaagcagttcaaacttctttaggaaattgtctttgtacgttttgtactccttaaatcaatggaaatttttggattacttcgaatttgtcctaactagttaaaaatgttaaactatttaattgtttaattaaaaaagagttgctcgccgattgggtaattatcgcaatatttggttttgttataaatcaaatgcccactttctccgtttgtccgttgaatttcatgagcagcgtcgacaacggcacttgcgggataatattctgaagccgttcgtccaaataaagcggcgctggtggtaaatccatcgcaagggaaaggaaaggaatttccttggtttgttctgcaaaaattaacttacccaccactcattcattaaaagtccacctttgtattcctccgtttcggccaatgtccgccgtgactcgtcgctggcgtccacaggcagcacttttcgcatgcattgacgca

SEQ ID NO: 91843 - DNA, 618 bp, Heterodera glycines
actgaccccggctcaaacaaaacattcccatccttggtacacctccccaaaaccactctccctactttctctggtgactgcacctcttacaaatcattttggaattcattttcgtccgctgtccatgatcagtctatccccgattccctcaaatttgtttatctaaaacaatgcctttccggtcctcctctgaacctcgtgtgtgctttgccggtttccgacgcgtcttacgcttccgcaattgaccttttatctgatcactatgatgacccggaagaaattgcccgagcccttcaaaattccctcaggaaattgccgcgtgtccgtaccggagaaaccttttgctctgaccttcgctcactgatcgaacaattggaagcgatttgtgtgcaaatgggacagcagcagcaaccccacaacacgatcaacatacaaatggaagtcgaacagcggctcccccggtacattttggatgaaatttatttggccagggaatcagcaggacaatggtccactgatcggctgcgagataagctccgttctattctcaagagaaaggaacaaatcgacactcttttgcccaaaaccgaccatgggccccgtcctaagtcatctcca

SEQ ID NO: 91844 - DNA, 627 bp, Heterodera glycines
tgaattttgaactcaattcaacccttaatcctctgtcgaaatctctctctctctcttaatccatttaggtttggctcagtgaattaaatgtgcggcatttgggttattttgggcgccgaatatgtgccgaccaaacatcaaagagaattcctgcaaattggcgggaggggtcccgacttgaccattatcagccgagtgtcttccaaagtttggctgggcttccaccgtttggccattgttcagcccggcgactctccaagcgaacagcccatttgtgcggacggtctttcggtggtgtgcaacggcgaaatttacaaccatcggacgctgaaggacaattcgctgctggacaattcgtccgttcggaatggcggcagtgattgtgccgcaattcttcacgcttttcgctcttcaggcaacgatttacgtcgttgttgtgcttccttggacggagtgttctcttttgctatggcggacaacaagttcctttatttggggaaagatccaaccggcgttcgccaccctcttatatggcttccctggaccaagcttttgctaattgggtcccgaggattaaaagtattgaggacactctgggggaaggggtcacactttttcccccccggg

SEQ ID NO: 91845 - DNA, 639 bp, Heterodera glycines
aaaagattttgtgccattttttgttgttgtacgccatctgcttcctccgcacttttcctcctttttctactcttcgttcaatccttctcgcactttgaacgcttcaaacaatgcatttgcctgaatttttaaatatttttggtcagtcttatcaaaaacacagaaacgaggaaatgtgtgagagagagagagagagagatagagaaacgagatgcaaaaaacaatagggggaccaacacggaggaaggcctgcctaccgcttttcacagctccgaaataagcattgaaggggggaccaacacgagggaaggcctacccatcaacacccagatattaggaaatgtgagagagaaagagagaaatgagaagcaaaaaacaatagggggaccaacacggaggaaggcctgcctaccgcctttcacagctccgagataagcattgaagggggggaccaacacgagggaaggcctgcccatcaacacccagactttatgaaatgtgagagagaaagagagagagagagagaaatgagaaagaccaatccacctttgccctttgcgctggcgtgacatcgacagaagatgaaaacacaaatggcaattgttgctcgaccacttgcggaccattttgctgctgctg

SEQ ID NO: 91846 - DNA, 667 bp, Heterodera glycines
ttcatttagtcgttcattctcattctttattttggattttgagactgtcgctctttttaatttaacaaagccttaatcttattctatcaatttcattttaggagtaggagtgcagtaatagtgctttaaaatggctgaaaaaaagaaaaagagggaaaaaaacagtggacgaaagggcactgacgacggcgttgactccaataaattaacaaaggatgaagattcgctggctcgtttcctccgatttaactgtccaacaaattctactatgtttgaggggaatgaagtgcattacttctccggcagaaaagcgatcgatgtgctggtcgagtcgaagaaatacggcgctacggccaaaacacccaaatttttaaacagcgatgcggccgaagaattcctccaaactctactggcaaagggactctttttcagggccaagaaattggtgccaaaaaagaaggaaaagccctcgtctgatcagcaacaaaaaggagaaaaaagcggaagagatgtgagcaaatcgccgccgaatgcggctaaggctgagaagagacagcgaaaggaagcggaggaagtgagtaagacggaggaggacgaagccagagaggaggaagaggatgaggagggccagcagcaggagaagccggaagccaacaccaaggatgaa

SEQ ID NO: 91847 - DNA, 394 bp, Heterodera glycines
gaaagggtcggcggacgcataccctggccaacttcagcccgatttgtaccgtcggcgtggctccgtcatttccgtcagctcttcgggtggcggtgcgcaagttgtgggccgtgtgcaactgcagctgagctacgatcactcaacctctgacgtggtgatacggttggcacaactgaatctccatccgtcctccgcttcgcttggccaatgccataaacttcttttgttgtgcacaacgccgtgcagcagcagcaacaacaatggcacaaattgtagcgaagagacgatgggaacggcacgggttggcagacgcgcgcgcgagacgggtgcactcacttttgacacgccaaagcggacagtgcaacaatttgccaaaagagttccgattattagc

SEQ ID NO: 91848 - DNA, 432 bp, Heterodera glycines
gaccaatcagcagcagaagcaattaatcagcttatcattgataaactcacaatcaatccgattttcattgataacaatcactacagccaacttttgagtgataagtatttcaaaatcagcttattgtatcattgtgttgttcattatccctccccctattcagattcgcgtggttttcgccaaaaatcccccggatgctttcaccacttgcaagtccttccccgtgcttacccccaacatggactgccctttccccggatggcttatcgaggcgaggccattttcagttattgctttatcagttacctctttaggtagtcaaaatgttggcagactacctcagccttcaggtcgacccgattataatccaatcggaaattggcaatgtcaattggggacacaatgtgagaggaggggaggtggaggggggaa

SEQ ID NO: 91849 - DNA, 503 bp, Heterodera glycines
tcgtgaatcggagcaattggaccattccatctgttcggacccgcaattggacgagagtttaatggcggcgagtttaatcgcggcacacaaaagggccatgggggaggaagaggaggaaacgcccagggcaaagggaggggggcaatggggggaacaacgccggaggggcggagggacccaaacggcggtgcaaagggcgacgacgacacccgccggcggagaagggtgggaacggcacgaaagacagtcttccacctcatcatccgtcgaattggacgacgaaagggacgaacttccgccaccaccgccgccgatggttcagcaaaagttgcggaacggaatgcagcgggaggagagagaagaagcccatcgccattctcagcctctgcccctcccctcccttcctccgaccacggcacaactcccccatcaccagcagcagcaacagtcccttcctccgcttcgttcccatcttccgcttccctcccgcgtccatccgttac

SEQ ID NO: 91850 - DNA, 633 bp, Heterodera glycines
tacttctccaaataatgcttcgcctcctcaaaagtgtcaaactttttgtgcattgcgctcggatagcccttggtctaaaaaaatattatttctttaaaataaaaaatagtctacatttttcttgacagtttctatgtccttgaatatgccaacaacacgaccacgagcgacagcaaaaaattttgtgaaggaatcgtccacagacactgaaaatgaagtttcggaggtgagaaatatggctctattgcagttttcacatcataaaataatttgatttgttagttttaaattttttttatggtcgtttaaactttactcgaagtcgattcgggctttgaacggttgacgaaaccctctaaaaataatgatacgtaagttagagcagtgttcattatagggatatgaacataaattattttattcgaattcggagtctaaccggcttcttcgcgatttttgaacttcttcatagtcggactcggaaagcctttcgtcgctgcttgggcctctttgtaactgccgaacactccacgctgatgaccccaagcaaccgcataaaaaacggacggagtggaaggcgctttcggttgatgatcagacattttcagtgataaataaatgcgtacttttaat

SEQ ID NO: 91851 - DNA, 541 bp, Heterodera glycines
actccctggttttattcaatccgcttcgttcttgctttcgtcctactagagatgaattgtttcgggcggttgaacgtctcagagaatccattcttctcatggacactgaaagagcccgattccgtcgttcgaacggggctttgctacggatgatcgtgcgattgtcaggtggcatcccgccaaattttaatcatgctcattttgctgctgctgcacagccggtcgtcaatgtgactgcggttctcgccaatgccaatcccactgggcagaattaccaacgccttctgaatttgaacgccgatttgacggagaccatcgcccgtttaactgtagaaatttcccaattgggatatatgaatgagcaattgacggaacaacttgaacatctcacggaagtgcctccgaatgcgaattttaatctggatgatgttgtgtttcatccgcccctcgaccaacagcacgaagtgcctccgaacccgaattttaatccggctttgcttgagtttgatgatgttgggcttcagccggccctcgaccagca

SEQ ID NO: 91852 - DNA, 230 bp, Heterodera glycines
gtgatgagtaatcatccccattctttgtcaattggccaaccccaacaaaaaagtcgtcgacagcgatggtgcggcgacggtccttttctgctgcttacactgacaatgagcatcggaggggccctcttctgtttgttcgtcgctatatgggcggttggcattgacgtcgtttttcccctttctctgcttctgtccgcttctctcggctttctggtcgcttcctcgctcgg

SEQ ID NO: 91853 - DNA, 690 bp, Heterodera glycines
gccaattcgcccctccgacaggggcaaatgcccgcaaatgttccgccggctcagagaactgcttgcctggcttcaaacggtactccgacccaatgaccaattctggtggtaattacacgccgccggcgcagacacagccaaattactcatgtcagcaccaatcgccctatttggcacactctcagcgcctttccgcccatccgtcgcccgtcccttccgtccgccccctctcccaaacgccgtcttccgtccattcgatgaacaacgccaccatccaacaacaacagcagcaacaaacgcaattcaaccaaacagcaacacattcttatgagcaacaccagcgatttttggccgaccaaaggctaagaatgctcgacttccaacaacagcagcaattcgtcgcttcccatcagtccgtctccgtttcgacctttcagcagagaaagccccgtgaaatgcattcgattactttccacaaaggctcccatggacttggcatccgcgtgatcggaggcaatcagtcgggcatttttgtctcagctgttcaggagaattcgccggccgataagaacggcattcgagtcggtgatcgaattcatgtggtaaacggcgtcagtatggtcggagtgacgagggaagaagcattcgactttctcctctccaccggcgagcagccaattagcataacgg

SEQ ID NO: 91854 - DNA, 507 bp, Heterodera glycines
agtcaattttgtttaaaggaaaattatgaataagttctccttcccattttttcggcccctcatacgaacgaagtcagggtgtttgactccccccccccccatatttaaggtatgttcttgacgtcgtcgtcaccgccgggcacgggcatcggcattctgttcccaaaagcacttctctgccactgctgctgcccgtccatgtttgtctggtcgctgtgctaacagtgtttttttgccacctgttagtccgacggcttggcaaaatgcttctgcgcccaaagctgtcgtcgctgttattgctcagcagcggcggtggtggtggcacaaaacatttggcaaaaaagacgacgacggcagcggccgagacgaggacaaataagccgaaattgctgggcatcacaacgccagcagcagaggacgacaattggggcaaagtgacgcaatcggaccccaaagactaccgattaaaggtctcaacaattagtgccgtttatgccagggctgctg

SEQ ID NO: 91855 - DNA, 557 bp, Heterodera glycines
tcgtcccgtttctcgcgccttttgttctccggccaccgcactttgctttggctcttcggctgctccctctacgccctctattgggccgtgttcgtcaaacccaccgtttacagcagtgtttacttcggctggttctttttcccattcgtcggctatcgccccgataatcaacacgagttcgctgttcaactgcacactttccacgacattttggtggcgtttctgtgcccgggcatttatctgatctttgccctcgttctttgcgcttcgagttacgattttaacacaatgcaaaaaaagacctttctgcaagtgtttttggtctctctgatcaacactttgaccggcagtctctacgtgtacatgcaacacaacgacttgcgccagcaatggatgctcactctcgccgaatttgcttggttccatgcccacggatttcctccggtcatttatttggcactgaacaaaaccatccgcaaggacagctgctcattgttcatgaaagtgttccagcgggaccatatcagctcggtgggcgttgttgccgtgtccgcccc

SEQ ID NO: 91856 - DNA, 560 bp, Heterodera glycines
ggcaaaaatctccgttgcccattcaaaatgccaccattcctcccccactccttctttcccccctttccccccacctctccgccaactctccgcccattagccacactgccaatgtgccaaaatccaagaattttaagttacttgacacattcctcccatttacttgcggttgcccgggtgagtgtcgccgtaggccaacaacagaattttggggggttgggtttgtttctccggaagggtttgacctttctgccagtgagttgactttgttccgctccagctgaatgaaaaaaagctgtcacctctcgacgacgaagtaaagtgagaaaggacaaatgccaacaaaatatcagtccattgtcaaggcaaaccgtcgtcaaaatgccaaatttaaattttacatggcatttcatttcattcttttctctccccctctccgtatgtctcttctgcctgcctcccatctccaaccttacccttcaagtacccctcccgagggtccctccttttctcggcatctccagtcagtcatcatcctttgccccttcccttccattttt

SEQ ID NO: 91857 - DNA, 640 bp, Heterodera glycines
ggatgacccgtcgttcaatgaccacgaaaagtcagtcggttgaacacgtcgcagtcgcacaaaaacatttgtccggcattggccgaaacatcgcaaacggaaggacgaaagagtcgaaaagtgcgaatgcatccgacagacagcgaaaggaagtcgaagacgaactgaacaggacgaagcaaatgctgaaacagaccacaaaaacattggatgtgttcgctgtggtggcatcacattttgacagaaaattggacaatgccaacaccgaatcggctgttctgatggctcaaaagggcgacgaggcggcgcaacaccaaagggccatcgccgagcttcgatgaattacgcgcaaaaatttcttctgaacaagcggaaaacatcgcgaagatccaactacagcatcaaaaaaccgtgaacgaattggaaaaacatgtacagaaactcggcaaaaaactggcggaacaagaagaaaaacaccgaagggaattggccgagtcggcgagtcaatcgacaaatagacttcacaaagaattggagagtcggaattacgaattgcaaatgaagaacgaagaaatgttcaaattgagacaggcaaatcgcgaattgcaattcgaagtggacaaattgcccgaaaaagagg

SEQ ID NO: 91858 - DNA, 586 bp, Heterodera glycines
cccaatgagtaccgcttctccgtccccggcttcttcagcttctgcttcgtcttcccaccaaaaccgtcgtcctttttccatcagttcactccttaacccctcacaaaatgccacgcaaaaatgtcctccgcttggctctgtcgccgcattttccgatgccctccagcaatgtctgccgatgcttttcgctgtgcggggaatgatcggcgaaggcgcaacgaacgcaatgccaaaagaggaagcttcagcggcaccgttcagaaatgctttccaaccgttgctgatgggaaaagttcggatgtgccaagaaggggccaaagaagaagaggaggaacaagaggagaatgggcacgaagtgccaacatcggaagaatcctctcaatcggaggacgatgggattttggccaaagatggggaacagaaagtggagatgaaagacgaggaagaggagcaagattttggagagagtgagctgaagatggagcaggaacataaacagatgaaggcggagggaaagagagagggcgacgagggagacaaagggaacacaacgccaagagagggtgcgtttgaacaaccataccag

SEQ ID NO: 91859 - DNA, 426 bp, Heterodera glycines
tacaaaaataaaagtgattttgggattcgggaccaaaggggggtaaccaggatttttgagtgaaaaaattttttcaccaaaaatctttcaaaaacatgtcattagggctattttatgacgctgatcacgaatacgtgatcagattttacttttaacatcgataagacctcagaatccctgtgtgattggggattctgaggcatcattttgaggggggagggggcaggttcggatccggacggtgtatattaattttctgtgcattttaacgggcgcgaagcgcccgtcttgaggccgcgaagcgtcccaatgtcctcaacaaaattaaaaaacgggcgcgaagcgcccgtcctgaggccgcgaagcggctgaatattctctacaaaattaaaaaacgggcgcgaagcggccgaatgttctcaaaaa

SEQ ID NO: 91860 - DNA, 555 bp, Heterodera glycines
tagtgagcttatttttcctgtgctcttcctcctctcccattgcttcttctgctgcttatgcgcccgctttgcttttaggtcgtcacttgaaagttcgtttttttcatctttttccgctttgttgcttttccctatgattttgctttttgttgttcctcagcatactgctcgaactagttgttgcctgtgctacttctgccgatgacgatgttgctccctttttccaatttcgttgcggtgttcctggcagttttccgcttcttgtactacttgaattaattgtttccgttgttgtactgcttgaacgcgcggattttctagtcccctccttctcctcctcccgcttgactttgcttatttttaatgcaccgtttgttgtcgtcgttgccaaagcatttatagtcaatgaacgtcttgaactcgttggtgttgatgttgctgccagtggtcttcgtattgtttctgcactgttgtccatcaaattgggtttgaaccgtgctctcagtgccatttccttccatttccgtgtcgcttttttctcgtctccgcgtctcc

SEQ ID NO: 91861 - DNA, 696 bp, Heterodera glycines
tatctctgccctgtcgccgcgtgccagacggtgaaattctcaatgtctggtttttagtggatattggtaagcacccattgttatcaacatgtcttcataaaactgcagggtcgccttacaccgctgtgtcatgtacaacactgtctgctctttacggcaacagatcggaacccgcggaccacttttttctgaatatcttgcagtcgccaacacttcggtgcccgactttcacaaattgacctttgcgctgctcagcggactgcccaacgaagtttctttcggtcttaacattctcaccgtcctttcccaccccggcccttttgtgttgaatttcgccaattgtccccagcttatcgctcttttggtcgccctttgcggcgtttgcgttaacgttgaaggtccgtccaatccgtttttgctcttcgattggtggcgtcgttcttccggctacgacttcgcctccttttgggccaactcgggcgttgaagaggctcaacgtgctgcaactgctaaagattgatgaaaatattcaaatggctgagcacgccgttcaattcctttacatgcgctttctcagcaaatttgaacagagcgaagcgggcaacgacatcagcgaagagcacgaagcggaactgatcaacggacgcaccaatcgtttcaaaacgtttgccctcctctccaagcgaactgtgcaga

SEQ ID NO: 91862 - DNA, 371 bp, Heterodera glycines
gagagagagagtgatattagggagaggaggagggagagaaagagagtgattagggagaggaggagggagagaaagagagtgattagggagaggaggagggaaaagcggacgtacttcccgcggccgcggcggaggcggcaccgcttccgaccatcgaagagatgcgctgcagcagcgaggcgttcagtgcgccgcccttgcggaggaatgcctgcactttgctgaggtcgtcgacgcctcccgcttttcctttctgcttcgccgttgacgagggcgagacggagcagtccaacctttgcgcagctgctgaacaaaccgaacatgtataattccacgctttttgaatcacatcctcacaaaaagcccacccc

SEQ ID NO: 91863 - DNA, 163 bp, Heterodera glycines
gaatggcaatggcacggccaaattaaatttggcggtgccaaacgttggccgagtggcggcgagtgctttattgccgctttgggagttatttattttggacatgcgcttttgttggcattcacttcggttggcacttggcgatatatcaaaaaaaaaaaaaaaa

SEQ ID NO: 91864 - DNA, 583 bp, Heterodera glycines
gtttgagctattcttctgattggatttgtcatcgttgtgaaatggaagtacaatacaacagacgtcatgtgccgaggattaaatggaatttggcaatcaattctcgtgaattttctctcgacaaattgtgcgtcgatgaatgtttttacaaattgcctttcgatgaacttttcgcaaaagatgagccaaattcgaagagatgtttttactgtaaaaggttcgtcgagaagaggatggtttcttgcgacttttgcgacgcttctttctgtttcgactgccccaacccgccttttactgcactgccaaatgaacgttttatgtgctcacttcacatcgaaccattcatcgacgccaatttattggattcgaaacgggtaactgaccgaattgccctttggaaaaggtacaccgaactgccaaagtccgaaacgccttttcggtccgttatttcgtgtttctacacaaaagttagagaggataacacaaagcaacatcttaaattgaagtcaatgacaacaaaaaagcaacaaaagactatcaataaacccttcaaaatcgaaagtctgatcaaaagggcttatgc

SEQ ID NO: 91865 - DNA, 627 bp, Heterodera glycines
tttttgcttttgcctattttgcttctccatctccaacaatcccaagcttgcttttcacgtggcaacagtggcgaaccgtcggatggcaatcccgaggcccaggggctaaaatcggaaaacgatgttcggactgttcagttgaagaaggaaaaacaaacggatgaaacggaagaggagaaagacgaggaaagttcggcagaacaaaaattgccatctgaattggacccggaatttgtgaaaacttatctgcgagaatttggtcatctgaagcacaatgagaatggcctttcccatggcgttaagcatttccaacgctttttgggctaccggcagacgggcaatgtcgacttggcaacccttcaaaaaatgtcgtggaaacgctgtgccaactctgacgagggctacacagcacaagacccatcgcaactttgggaacgttcgacattgttctggaacctgaacgcgtcgcaccccaagcagttcactcatggcgaaacgaaggaattaattgcgcaagcattccgcgcatgggaaattgtgatcaaaatcgactttctggagacgaacaatgcggacaatgcgcagatcattttcacatttgaaagcgacggagcaaaaaggaaaaaa

SEQ ID NO: 91866 - DNA, 642 bp, Heterodera glycines
aaataacaattttttctcagactctttcaccggtaccgggtccgccatcattgagaccacgcgcacgagggactaccgagaggtccgcaagaggaggaggacggagcaggacaaccgacaagcaacattccatcgacctccaaacaacagaaggacaaagagacgagcggagattccaaaatcgcattgccacccccaaaattggccataatcgttgaggccaccgaatcagcaccccgcggattgatttgcccgacacttcctcccatttgttgcgcaatgacactggactggcgtcagtgtgagcagcatcgaatcggtgaaggtggtgtttacgtgccattccccggcggtgaacaatcgacgtgttcagaccgccaaaatcggccgttctgcgacagtccttcagcacatggttgacgtgcgcaagaagctggagttggaggtcaaaattgaccctgccatttttgtcgtttgctccggcggtgcctttgacccaacaaaaacgacattaatcgccgaagttggtcaattgaaactgaacacttaggacgagccgtccacaaaagcatacgaacatataaccgatcagagattgcgttcattggtggcaaggcatacgacaatttccaactttgcctc

SEQ ID NO: 91867 - DNA, 626 bp, Heterodera glycines
gtcacaatcacaaggtctgcctcgtgaccctgcattgaatcagctgtggctgaagcagcatccgctccaagccgttcgccctcagttcacgcccaatttgtgctgcttggctgagtaaagtgaaatgacccggactgaaccaggaaaaccccttcagctccttaaaaggtcaatgacagtccgagtttgaccagaattggtcgcagaaaaactcccgcttccattggcgaatcttggtgaatgagcacaattggagattcagcaattggtattttggcaaaactcgtcagcatcctaaagattcccggtcccgatcttagcctttcaccatggggtgtgtatgccgcatattcaacgccgttgacaatttctggatgtgaacggtagttcacttccaacgttgttttttccacaccagcagatgagtctgtattgagtaaaactgtgtcaaagccgaagccgactcggagttgttcagggatgtccttcatgttcacggctagctgataacgatcaccagtgatgaacagcttctgaacttcctgaaggggtgagaggaccgagcagacttggacaaaaggcgcttggcccgattcgtcaagcactatcatgtttctgtccgtgat

SEQ ID NO: 91868 - DNA, 649 bp, Heterodera glycines
cgccgctgtgtcgaaatctgaacaaattcaggtgaagttacaacagtatattccaaggcttttttaagaaaatggttccaaatggtggcctctgccaattccaacaaattccccactaatccgaagatgataataaagctctccaaatttgtccggttccactttgctccgacgaaattgagctgaaagaattcgagtaaaacaaaatcatccgattgaccatggccgttgcagattcgcaggtgttaagcacaacttcatggccctcacaaatgaattcaaaatcgccatcggagtcgtgatttttggcagtttggtacgccagcagaatccttgcctgaaagacccccccctggacatatttattcacctctaaaatccgtccattggcacaattttttcttactcctttcaatctcgcttgaattgcggcatcttcctcccaaaattcaaccaaatcaacaaacttacgtttgttgtcaagaaaatgttcaaaagtggcaacaactgtccttccgttattgtccaaaatgtggagagttgtctcaatggcgaactcttccatttttatccgatttttaaggaaacaagacgacaatgccgctgcgatgcctttttcagctaaatgaatgtcagttgcggcactgaa

SEQ ID NO: 91869 - DNA, 612 bp, Heterodera glycines
ataaattttagttaattaaacaataattatttaggtgagaactgaattgtcccggaatccctaccctaaccttcattcacataatacaatattatatattttaataatacttcttttttaacttttgattcgcttattttgatgaaacacactcactcatttccgtaattttattaattatttttcaacaatttttatttatttttatcatttttaaatttatttttattattcctttttataccttcaattggtcttgtgatggaactggtaaacactcattaaacatcagcactcattcatcatttccgatcaaattgaagaaaaccaaaaattacattttttccccaatttcccgcgtccccccataaaaaaatttgaaggccattcattcgttctttcgttcgttcattcgacgcgcaaaaattcatttaatttgcgcccattttaccgaagaaacatttgtgcccaaaaattgccttctcatctcacaaatcagcaacaaatgaattgaataaataatttttcaaaatccattgaaaaagatgaaaatttgtttattttttattttttggaatttttttaaattgcaaaatgttgcatattttttac

SEQ ID NO: 91870 - DNA, 93 bp, Heterodera glycines
ccaatctttggtcttccaagggtccggtcggttttgacagggctaactattggatttgacttccgtcgatcgcttggctttttcccatttgcc

SEQ ID NO: 91871 - DNA, 506 bp, Heterodera glycines
ccaggagctcttcttccaagcccatcgttgacgctgatgccaacctgaagacaacgttcacagatgacttctgcaatgatcaacagcgggacgtgcttctgcaccaatcggttgttaagctggagcgggctgtcctgcgacgtctctgcatcgaagaagcaaagtcgaagcggcaatacgtcgtcttcgccgtcatcgtcaccgttgtcatctgagttgtcgtcgttgtcaacagcaactgatgcgcgttgccgagcagacagatcacaaattggctggatgaagcagggctcttcggcggtgtgaggcccgtcgcaacgtctacagttcccgttgtcggctgtttgttgacgtgggcattgatgtttgccctggtaggcgatgcgcccacaatcacggcacactcggcgccattgacagattggctgacgctgacgctgtcctcgggcatccattggagctggagcatgttcgatcagatggtagtcgtagcaatcatcgttggg

SEQ ID NO: 91872 - DNA, 670 bp, Heterodera glycines
cgatcattcatttgagaactttttactgaatgattatgcatagctttgatgagtgatgctttccccccaatcgctcctctttttgttcctttttttgttggcttttctctttccgtccgcccaatgtttgacactaaaaagacagaaaccgtcgcaattaaacagaagaaacgaagaattaaacgcagaaaaagcattgaatagaacggtggccaaactgagaacagacggagagaacggccgactcattcttttggtgtgccgtggaaaatgcctaaaggaaagggcacagatcccaaattggcttcgcgagttcaacacagcgaacaatcgcagctttttgaaaaggaacaacgacaaaagcatttccgacgagcaaagtgatcagagtgtgagtgatcagcagaaaaacaatgcgtcgctgggaagggacgacgaattgcaaaagcattgggaagggggcgtcgcctttcatttctatgcccaccgactcccaatccccgtgatggacattgagacggcactgcggcagcattcgtcgtggcaaagtgtgcttttttatgtggtcgccggaaaggcatttcccgcagcgccggaggcggtgatcagagaaaagaacaccttcctggactggctgaattcttttgaaaagacgccaattgtacgaatt

SEQ ID NO: 91873 - DNA, 593 bp, Heterodera glycines
tgtatatatacatatgtatttttgtatcatgttttgtgccgcatttatgatcatctccacacatttgatgtacctattgatgtatttgtatgtgctatgtatattttgttcacatatgtctgaatgaatcgtgtttaaagaatgaaagtgttcttgtgactataaataagacgaattttgagtaaaaatttgagtggaattattttctatatacagtgtgtaaatttagaatagggacgactgttttcgggagtttgacttgtcggaaaaaccgatttcgaggcccccacaatagaaatgtgaaaaattgaattttcataaaaattctaaacacgcaaatggaaattgggcggaatacgaatttggcacaaaattggagagaatggcaacaaacaaatgcaaattgtcaattccgatggaaatccattgccaattccgcaaaatccgttgccaaacaaagtcatcggattagaaggcattacaatcgcgtaatgccaatgtttcgcgactccattgttgtgatgtttttgaataccatcgcttttcgccgtttacgccaattggctctgttactactcaaaatcaacgattgg

SEQ ID NO: 91874 - DNA, 529 bp, Heterodera glycines
acgtccaagggcccccttcctccatttccttatcatagagttgagctttgatttccgtgggcaacttttcctttatggctacggtcagaaatggattatcatccaaatcactgcccaagctctcaagttgtcggcaaattctgtcgacatgctcagaaaaaccccttaatgacgttgaatgccccgtgggtttagaaaggtggaaaagctcgcttcggagccggtctgcccgtttgttgtcgtccccaaaacggccctttaggaggtcaaccacaatcggatagttgtgatcagtgagggcaaaaccgtcaacaagagttcgggccccaccccggagccgacctaccaaataagtcaatttctgcgcccccgacaaggactgattgtcatgaatcgtatgacagaaagcggcccaaaaggatggccaattgctttcgtgtccgtcgaagtcgggtagctgaagggccgggaggttaattgtggggcgaatggtgggggctgaatggagaggcccgggggcgagggcctg

SEQ ID NO: 91875 - DNA, 597 bp, Heterodera glycines
actcatggctcataaccaatccgaaagttcgactactgatcaaaaaacgcctcccgaaatagacgaaagggcggctggaactgttgaaaacagtggaaatgcggcgaagaaaggtggtccgccgttggcaaagtgcagcgtttcttcctctcagtcgagcggcggcgatcagacggacgttgccgaccctcctcaaagtgtgccatttttgcaggacatcaaactcattccaactacgacatcatccgcttcttcgtcgccggctttttcccaattaagcgaacaaggcgactaccgaacgccaatggccatgatcgtcaagaccgagatggacacgaacccaaaacaacaaattgtcgaaaataccgtcgcaaaggctattaaattttacgacaatgaaattgatggaatgaacagcaaaaaaagggacgctgaaatggaccgtctgaagcaggcgaaggatgcccaagcccagaacattcttgccctaaacaaacttcccttctcttcttgccccgatcgaacgtccaaagaatcgtttgtgaagaaagagagtgtcgactctttggctgcgaaacgacccgcgttggttctgaa

SEQ ID NO: 91876 - DNA, 603 bp, Heterodera glycines; identical to SEQ ID NO: 67272

SEQ ID NO: 91877 - DNA, 593 bp, Heterodera glycines
cacaactcaattttcctttttgtgcataattttgtttttttgcgtgccgtggcacaatccttttgacattttcctttcttcaatttccattagaaagagcaacattctcggtggcaatcatttacatatttaaatttacaaatttaaaaaaagaaataataattgaaatttattaaaattttaaaatcaattataatttaaatttattaagattttttcttttccttctcttcttttacttgaacatctgaaaattgcagcacagagcgcgaccaaatggcacaacaaacaacgggcgaagaaatgaacaaaatgaagcaacaaatgaaggaatcgtatgaggagttgaagcgttgggatgaagcggagcgggtgacggacaacataatcccggaagatcgtgggctcatgagagacgaaaaagcttacgagaagataaggatggaagaaggaaatgaaggctgatggaagcgggctgtaaagattttcaaaatgatctgaccagtgatcagagatgtctcctattttctaaaatggttaagtattttcatccttaggatgtaccgtatgactcacaaattggggtatctgat

SEQ ID NO: 91878 - DNA, 675 bp, Heterodera glycines
aacagacgccttgaggcggaaaacagctctttgaacatcactgtggatgcctatcaggagtcggtgcgcaccaaagacgagctgatcatgaacatggttaccaacgcgaccaatgccctgccatttccttcatcgagtgtgccgtccacttctgctgcgaccggtgccatcgccaccaccactccggccggcacaagcggaactccgccaccgctcgcaacgcttcgcaaatcgctgattgggtcgttcatcggcaagggcacttcgtcgcctaccgcgcaaccgacgcccaccgctccaccggttggggacaaacagtcgccagcaaatgggaacggagccgaagcgactgaagcactgctcgtcgactttggcactccgacggacgtggcggcaaagaatttgttcaccgaaacggcggtgaacgacctgaacgaaatgaaggacctgaactccaacaaattgtccaatctttggaggaccgtgagcgaaagctgatccgacaaaattttaacattgaagctgtttactaccagttgaagagccgctacattatgttgctcaaccatttccaaccgtcaatggaccgccaaaaacggctgcccgtggaaccgtcgatgatccaagaactgatcgacgaggtcaccagacctcactctccgatgcgtacacaca

SEQ ID NO: 91879 - DNA, 402 bp, Heterodera glycines
tattcagtccatgaagttacctacaaaacaaaaaaaagcggtatcctaaaggcgggaaaagcggtaaattattgctattaagatgcgtataaaaatgaattcaataatttttttttttgaaggtcagacgaatccaggaacaatttgtgaaggctttgcaaatccatttgagccaatgcgaacatgggcccctactttccgagattctcacatggcatgtggttgattaatttttaatattaaggcacggatttttattgagcaaaaacccctaaatgacagggttggtgaaaaaaatggagaaataggggcgaagatggcaaaacagagatgcaaaatttacaaaaattgtttattttttatggaaataaattaaaatcggtacaaacaattttatttatt

SEQ ID NO: 91880 - DNA, 665 bp, Heterodera glycines
gtaaatcatggacttctcagtactgaccaacatacctgtgcaaggaggtgtatgctgaccaatgaatgaattattcttcaacacccattacctccactgttttgcattcgatattcattgcgaccgtcgaacacctcaaaatcgtcgagtgcagccgcgatttgttcttcctcttccacacttccaccggacaatgagccgacggacgccccttccgccaattcgtccgcgtcaattgctaaatgcttcagcgtactttaattggtctgactcattgggcagcacctgattcgaccgactcggcagcgacttcgctccctccagtggtaattccgagttggtcgagcatccgaccgtacagcgcgtgtcttttgaagggggtgtttcgttatcaaaatgggcatcggattgcgctttgggcttggtttatttgcctgttcctgaatttgctcaaaccatccatccgatggttcgtcgttgcgcagccgggccaaaaacttgttgacaattgcttcgctcaacggaactcgaaggttcacttcctgtgacagatactgatggtacatgaagagagccgcttctcgaattgtctcccgcgcgtcgctgtccaaagtgtcgcccgaggccaaccccctcaactgatgctccatggacacgttgaaacc

SEQ ID NO: 91881 - DNA, 606 bp, Heterodera glycines
cgaacattcaaatgaaatccattgacagcactgaaaaagaaaattcatttggcggtggtgccgaattcggccattcccttttcgtttctggcattgaacagcgtttttcggtgttcgtttcgcccggcacggcctctctcacggcgccgtcccttttgaaactgtcgttagtccaaagttcagacggttctattgaatttttgaattctgacggaaattggaccaccgaagcgcaatttctaatccctccgcttgacgtggaggaaaagcatcgaattttggtacgaatgtgcaaaggaatcgaccgattggagacgtaccaatcggaacagaaaaacgaaggacaaatcgaagagaaatgcgaactcaaattcgaatggttcgctgcttctgattgcaaatctctgcttagcgatgattttctgatcatccgccgctcttttccgatcacttttcgcccgattatgcttctctcatggcgcacttcttttttgtccgatcgcactcttttccatgtggacatttctcgcaaggattgtgtctctgctgctttcgctgtcgatgtgttccccacttttgtctctctcctatctctcaaactgattg

SEQ ID NO: 91882 - DNA, 478 bp, Heterodera glycines
catcttcattcctcctcccaccgtttttgcccttcttcccatccccatcatcatcatcaataaatgatgatgattgattgggttgtcacctcaacaacaaacagcaggtcggagttggaaaatgtgtgtcggtgatttgtttcggggttatgatatgttgtacagttgtcagtcggggggtctaatttttggtggagtttattaattgcacgactaattggcacacttggacggaatgtggtgattcaaatttaaaaaaaataaattgcggcacattaaatggtcaattgacctgctggtcggttggttcccttttcaaaaaattatgttacataactttcagtattgttatggtcaaaagaactcgaaaaaacactgttttttttgttgaacatttttggccaaactttcttgaaacttaacgaaatttttagaaattttgcacacatataaaatttttagaggtatggaatgattt

SEQ ID NO: 91883 - DNA, 646 bp, Heterodera glycines
aaatgatgaagaccctgaatgcttttccttctacgaaaatctgtccttctctccggacggcataaatttgttggcatttgctcgtaatgcgcgactcggctcacacaacgcttcgatggcactgtgccggtttaaatgggatggcgcagtgtcaccggctaatgagcaggcggaagtgctcatcccaacgctggacagtccccagctggtggacatcggtcggcagagtgtgccattccccggctgtttcgacccgtcggtgccattgcgggcgtggagccgagacagccgcttcttcttcttcactaccgtttggcataacaaaacgaaaattatccgtgtcgatttgcacaacggaggccaatggacgtgcatcccaacggaacatttggagggcagaaaattttcaaaaacgaggcaaatggagcgtgaccgtattctcttccaacgccaacgctttcccaccgtcgcctcaattcaccatcagccggcgacttcgtccgcctccggcgttttggtgccaattccgacgacggacggcgccgccgctgtgcccggcagcgccggaggctatcagaggcgatattcgacacatcgagaacagcagctgcagcagaggaacagaagggacagcaaattcagcagg

SEQ ID NO: 91884 - DNA, 565 bp, Heterodera glycines
  unsure (1)..(565): unsure at all n locations
ttgaggttttaagaaaattggttttaaaaaattgaaaaaccaaatcaagcagcaggaatgcccgcaatgtcagctgctgctagtgaagctgatttgcgcaatgatttgatgcgattaatcattggtgaagagcacttgttgaaaattaaagcacaatatttggacgagcggacagcgcttaacctgcgaagaccagtgaactacatagaggtggagcagtactttcagaataaatatggtcgattactcaacttttattacaccacctcgacgcgcgaactgatgattcagatccacaaccaacaggacttggaccaggtcattcaattgcatgaaagcactggggggaaccaacgacgaatgcgtttgattctatcacagaaacgtgatcagccggcccaagtcggccctctgttcgatcagcaacggcctccaccgtcgtcaccctctccgcttggcattcaccgaaattcgcagccaaactgcggcaatgaccgtgtggcgggcaaccgaaacattgtcgaggcaccgctttcctcctgctcgtcctccgtgtggtcgntgc

SEQ ID NO: 91885 - DNA, 343 bp, Heterodera glycines
cctaatctcaaatccacctgaaatatggtgtgtgctgatcccccccccccccccctctttcccattttgattcgagagagtacagcagtattatgtatcgcaccaagaattacgatcatcaaccgcaggacacacaacagcaatggcagggggtggggtggggacaggtatgtgcaaaaagtgcacatttgtgggtgggcagaaggggggggggaatggcgattgaatttggggtgcgcaatgtttctttatgatggacgggacaaccagttcctcctccatattcccgctgctgatgaacaacaacaggttagctttcctgaacaatttttgttgctattga

SEQ ID NO: 91886 - DNA, 621 bp, Heterodera glycines
gaacgttctaaatgtgcaatgcaccaagaaacaatccgaaattgtgaacttcgtgtgtcttgggctcgtcccgtgaacatgccaccgctgccctttttcgtcccgctgcctcttcgtgagcttgccatgcccgacccaccttcgggtttgccgttcaacgctcgacctctgacagaggagctgcgttcatttctgcagaactatggagatttgccaaagttgggagtaccgctaactgaggaagagggcgaaagagacacacaaatgctggaggactacaaaaaggttggggccacaccttttctggcgccttttcactccaccaaatctgatctgatccgattaattcgtcacgttcaactagcagatgattgagaatgccactgtgcgcgttgtcattcccacagagaggcctttattgacacttattcaccgtgttgtggaatttcttgtacggagtggccctctttttgaggcaattttgatggccagagaacgtcaaaacccaatgtatcgttttctgttcgataatcatcaccctactcatgtctactaccgatggcgtctttacacaattttacaaggcgatgaccgtcaaaaatggcggctggagaagttcaa

SEQ ID NO: 91887 - DNA, 619 bp, Heterodera glycines
cccgttttagaatattatcgccaaatttttgtgattaaaaattaagtgcaattttggggaaatgctgtgccaaataggcaccgtggggaaaaatgcgaaattcttaatgcatatctttattctatttgagtccggcgatattagtcgcctgaccattcggccgatcaaaatctccgcgcatgcaatcacagtcaaatggtatgcgatcagtcgtggctgcatggaaaacattccaattcacaaatacttacttttctacacacttgccacggacgattacaattggaagaaaaaaaaggtgaatttgagaaagggactcagtgccattctgacgacatgcgtcaacacaattttcttttggcttgtgacttggcatttgcgatggtcccattccaaaatgtttcaggagagagcaattagaaatatttgaaattttaaagtttgttaataagggtataataaagtttgcacattttgaagccgtgaaatgtggtttttaaggtatcaataatatttgtaagttaagaatttacctttttctaggaaatgtactgatttcttttaattctaaatttttcaagcaaaaaaaaatttccttaaaaattgctagtatgaaggg

SEQ ID NO: 91888 - DNA, 651 bp, Heterodera glycines
ataactgcctctggtttacaagtcgtacgcaattttgacgaagttgcttttgtccaaaatcttgtttattacattgaaacaggatatcgaacgcctaggactttggcacttgggaacgtggtgacaaaaccaatcagggcattcgcgagctgaacgcaagctcaattggaatggcaaaggcggctttgcaagcgattaatgacattggcgacctttttggagacggttctaatggttctattgttcacgttcttcccgatgaaatccaacaatgctcagcagtactctgcaatatgcttccgcatgaaagtttttcaaaggaaacggatgccgctttgctttccgtcatttcgtttcctgcttttgctgtcgatgatttttcactcgcaactttgacacgcgaaacaattctcgctactttgggcggtcgctacggttgcaagcgatttcttcgtgacggctataaaacagtgcttgaggaccctaatcgacttcattacataaattgtgagttgcaaaaatttgaaaacatcgaatgcgaatggcctttgttcttctgttatttgtatatcgacgccgcttatcggaaagacgaaaaggcagagaacgctttttggaaacagcttcaaacgcttattgtcgccgatagca

SEQ ID NO: 91889 - DNA, 494 bp, Heterodera glycines
ggcttatcgatccttttgaatgtgtaaagtttccagcaagaggtgtcagaaaagtcacgctttcgcggtccgtattcgtactgaaaatcaggatcaagtaagcatttgcctttttgctctacgagaggtttccgtcctctctgagctcgccttaggacacctgcgttacgctttgacagatgtaccgccccagtcaaactccccgcctgacactgtcatcggcgcgggtcgccgggccaccgggtggcccgacttaacaccaaaatggacaccctttcgggcgcactcccgttttaccgattaagtaaggaatcgatgaaagtagtggtatttcactggcgccttgcggctcccacttatgctacacctctcatgattcttcacaaagtcagactagagtcaagctcaacagggtcttctttccccgctaaatttgccaagcccgttcccttggctgtggtttcgctagatagtagatagggacagtgcgaatc

SEQ ID NO: 91890 - DNA, 593 bp, Heterodera glycines
  unsure (1)..(593): unsure at all n locations
gccataagaagagcaatccttaaccagctcaatcacccaaatttatacttctttaacctcaagtcggttcgctcgcttaactcttgtatgaattttcatctgtaatttaatcccatttctgaatactcttaagcttattcactatgtacatgcagtgtaattctggtttagttgctttcctgatttgtgttcttcttactttcgtatttttattttataaccaatttgaatttgatatcacttttaaaagcataatgcttatggttgaacaaaaaccctcctcattcttcgaaaaggtaattgtccatttcgatctgaaaggagctgcaccaaagccacattatattaaagaattattaccgttcattaagaaattgggatttactgaaattcttatggagtatgaagacatgttcccatactcttttgggttgtcggntttaagacgaaagactgcttttgatgaaatgactaccaagcagcttaaagagtctgccaatgccattggattgaacatcatcccattaatacaaacattcgggcactttgaatttgctctaaagcatcaagagttcttttcattgagagaggac

SEQ ID NO: 91891 - DNA, 522 bp, Heterodera glycines
gcggagccgtccccactggtgcaactgtcctttcaggtccctctgctcaatgtcgagctgtgccatcgtcgtccgtcctttgacggcagtgttgtgccgccactgttgccgcaaccgccttcactgatggccaacaatgccggcagtgaaacagcagcagacgaaccgtttccacgggcattctttgaaggcaaaggcaccgccaccctttgtccgaacgacagcaaaatctttaccgttgccagcattgacattttgccaccgtcggaaacaacaccggcaatttgcagcggccacattggcaccatttctgccgagacagtgtcgttcccgctcgtggtagccgcgctgcgccctctgaagcgcgtgcggttcgcagacgactgtggccagtgcctggagacggtgcgtgtgatgaccgagcccagcgactacccgccaaagatcagcccagctgttctccgtcgaatacgtcgtgcagcagccgcggcttcctccgcaattgctgctgcccattccgcc

SEQ ID NO: 91892 - DNA, 581 bp, Heterodera glycines
  unsure (1)..(581): unsure at all n locations
gtccctttctcctcttctcttctcttccaatggctcctccgtctcacttttcttcgtcctccgccgctcctccacgagcgtttgtgcgtcaatgcgaattctttgagcgttacggcgagtgcaaattcggcgaccaatgcttttatgcgcacgacgacgaaatcactttgggagttaaaaatgcaatggaaatggcccaagcgattggaaagggcggcactgctgggggaggggtggaaattcgatttgacgaacgagacagagaggtcaaaatagtcagagtgatggacagttcgtcgacgggcagaagccgagggatggacaacggcagaagagggaacggaaggggcggcttcggcagagcgaacagaggcggcggagggggcgcagcgggcggaagcggcgcattggcatttattgggggaggcggtggcggatttggcgagggccgaggcaggggtcgctttttccgaggcggangaggcgcggggggagcacaaatgcgtggccgaggccgaggccgtggcattggaattggctttctgtcgcctgtgcgcgggtccggcaacattttcagcgag

SEQ ID NO: 91893 - DNA, 645 bp, Heterodera glycines
taatgtttttaattatcataattgcatcatttttttatacaaatgatccgacccaacattgttcttctgatcactgacgatcaggacattgaattgggttccatggcatttatgccgaagacattacgcctcctccagcaacgcgggacggagtttcggaacgcttttgtgtcgacgccaatttgttgtccaagcagaagcaccattctcaccggtctctacgcgcacaatcataaagtgatgaccaacaacggaaattgtgcaggcgaagaatggaggtctgacttcgaaaaggacactttcgcggtgtacttggaaagaaccggcttcttaacgggctttttcggcaagtttttgaacaattacgacggaagttgggtgcctcccgggtggacgaaatgggccgcgttggtgcgcaacagtcgatattacaattactcgcttaacaaaaatggacgcaatgaatggcacggaaatcgttacgaaaatgactacttgaccaacttggtggccaacctttcgctgcaattcatcgacgagtctgttttgctgaacccccacgggcagccattcctcgtcgtcctcagtttccccgctccccatgggcccgaagacccggcaccgcaatttggcgaccttttcgaa

SEQ ID NO: 91894 - DNA, 646 bp, Heterodera glycines
aaattacaaaaatttccccggcggcgcctcttggcgccaccggatgcccctctccaacccccaattttttgaaaaaaacgcgccgcaaaaaaaggcagttttaaaaggcaaaaaagtcgtcgcttggttgcaaaaattggcctttttgatgaaaatctgttaacaaatcagaacgaaattacaaaaaaaaatttccggcggcgcctatcggccgccggaacccccccccccgttccacaaaaatatttgggaaaaatgcgccgcaaaaaaaaattgttaaaaacctgattttttgatcccaactgaactggacaaattgagcattagtaatctaaaaaaccagccatttttttgttgataatcttttaacaaattaaactcaaattttcaaaattttccccgtcggcgcctatcggcccgccggactccctctcttccccagaagatttttgaaaaagcgcgccgaaaaaatgatgtgaaaagcaaatctgaatttctaataatattcgtcatttagtccaaaaataattattttttgaaatgattgaagaaaatttgatttgaaaattttattaatttaaaatccccggtcccgcttcactctattttatataagaaaatttaaaaaatatatatttttttaatg

SEQ ID NO: 91895 - DNA, 587 bp, Heterodera glycines
gtcatgttgtttttataaataaatttgaaaaatagtaagggaaaatttgatggttaattaaaattaaataaaagaaatttacatatataaaaattatttgaataaaatgctgcgcttaggaatatattaaagtgacctcattcaaatgacattattatattgttttattgaattctttttgtataatataagaatttttatttttgtatataataaaaagggcaatattagccaaatttttattaaagtgatcaataacatagacatatattttatttttgccgctttttacgtaacatatacatatattttatttttgcagctttttacgaaaaaattttaagctcaaacttggtagcggattacaatggctactcgatttttgaggatttgcaacttggggacccgacatttaaggacccgacttttgaaacaaattcaatgacaatcaatcaaggggatttatgggtaaaaaataatttaaaaagttatttaatatttatttagccaaatttgataaacaaaatcacacaaattggcgaattgtaccgcagtggcaaattgtttgagaatccttccgctgtaac

SEQ ID NO: 91896 - DNA, 497 bp, Heterodera glycines
ctaaatcacctggtccatttttttttttacttttaaatccgaagtcgaacttttcgtaaaattatgtcttttttgcctatatgaattcgccaaccaatttcaataattttcattcaactactaaatgtgttccgcttgaaaatggctctgatagagagaagggttcgaccagtaacaacaatcacaagagaaggaaggataatgttaaaagtgagttgatagacaacgccatcggaagtccgaaatcgaacaaacgggcatttttttctgctgattgtgcactgaacccaacggcattggctgaaatgatgccgagttcgagattaagcatgggaatggccggccgtttgcgtgacatcgtggcgattttccctcaaaatgatttggcttctcctggaaaactgctctttcgggaacaaatgacaaattcggaccaaagggtattttctgccaagggacaagcggatgttccggggatgaacgccaaggaaataagc

SEQ ID NO: 91897 - DNA, 644 bp, Heterodera glycines
agacaagtattaaaaagaaaagctaacaaagagctatgaaaaaagaaattttaaagctaagaaaagaaaaaaaaaagaaaagcatatgataaaaaaaaaacgaaaagcccagcaatgaaacgaaaagccatgaaaaagaaatttttaagctaagaaaagaaaagcgggcgaaaaagaaacgcaaacgaaaagccattaaaaagaaaataaattttaaagctaagaagaaaaaaaaaaaaaaaagcagtccgagtataaaaaaatgccaattcaaatgttgtcactcacataaaaaaaactttcgttccatactaattttctactatattgctttttttttaagcgaaaaaattaaattgggctttattgttatggctcaacaacaacaacaacaaaatgtcttggggcaaatggcaccttttggccaagtcataaaaaaataataataataataaataataacattcaattatttaaaggttgctcagttagtgcaaccaatgctcgtcaacgcggcacgtcagcaattggcggtgctttattctgttttacatattaaatttatgccaaactgtcatttcaggagcctttctgtgcggacggcacgcacagcattcaatttttgaatgactgcgtttcttcgt

SEQ ID NO: 91898 - DNA, 123 bp, Heterodera glycines
caaaaaaactcagtgtgggctgtgggcgatccacaaaaaaactcagtgtgggcgatccacaaaaatactcagtgtgggcgatccacataaaaactcagtgtgggcgatccacaaaaaaaaaaa

SEQ ID NO: 91899 - DNA, 658 bp, Heterodera glycines
ggccattccttcgtggaggcactgcggctggccgggctcattcatcccgtcatctccatgggcgtccatgccgcgtgtcgtccagtgtgccagtgccaagaaccgtcgctgaattgccaaaatctgtcctgaacagcatcatcttgcgatggcgatcaagcttctacaggcagggattctgattttgtggtcggagtcagcaaaaaacagcggcaaacttttcggaaaatggttcaccgctcggacattcatttggccatctgttccaacccgaccaagccaattaagctgtgccggcagtggaatgagcgcgttatgggggaatactggcgacaggatgatcgggaaaaaggaattaaaatattcttttatttgttctatttgctgccttcaacctttgacaaaggctatggacccaacagcgactgacgatgaaaaaagggccagatggaaacaagattataaatgccgaagcacgggccgactccgttgtgagtttgaagatgatactctggacaggtggcacgaagaaatggcgaagcaacggtcccgctctgcttcttattcacgcgcgcgaaaagaaaaagcgcagcttttgccggtagcgccggttgtaaaggcaaaaaaatacttctgtgacaaatgtcctgccaatttt

SEQ ID NO: 91900 - DNA, 644 bp, Heterodera glycines
  unsure (1)..(644): unsure at all n locations
cagaaaaggaacattggcagttattcgccataacccttcaaagggcttctcaaagtggtttcggcatcgcaatttcgggtggtcccaaggaaagtgccattctcgtcagtgacgtcataaaatcgggtccggccttcggtctgctccaagtcggcgatcggatcatctccgtcaacggctacccactcgaacacgcgaattacgcaagtgccgtggcggtgatgaaagacgcacagcaacttaacatggttgtgaagcgacgagtgccagtgccttttgtggagtttgaacagcgaacgctgaaattcactctgtccaagtcgcgcaaaaaggatgacttcggcatcgttttgggctgtcgcttcttcatcaaagagattttgaacccgaaattggcggagaaagagccgggactgaaggagggcgacacggttttgaggataaacggacagacactggacggattcactttggacgaagccgcgcgactgttgcagcggtcgcgcgagaaactgtctttggttgtgcagcgggacgtgccgnaagggaacggccggnccggtcccgctggccgagccaaacgacggngnacgaacgttttggcagtgtgccagcgaacgccccgccagtcgcccacccccgtt

SEQ ID NO: 91901 - DNA, 578 bp, Heterodera glycines
cgctttcatatgatcagcaaaaggcgacaccaaatgaatcattttggccgaattttcattgaatttttctgctttgatgtcattcagaatggtgccaatgccattaacctaaatttaattaaattattggcaaatgccattggtttatttaatattaattcattaaaaaataattagcaaatgcaattggcttaattttatattaataaaaaagcgatgttttcacattttcattcaattctccgttgatcactttcccattggctttttctcggattgcgctttgctggagatcgatgccaaattcgagaaagaaaatgggaatggtttcttttatctccataatttgttcaacggaaattgggaaattgcgcgtcattttgatgcttaattaacccaattaagtaaaattaattaatgacatcatttaatctctctcatcattaattgacatacaatttgtctgtggtagaaaggttcaagaatgtttcaaagacaagcttctgttccttttcatcccgatggatgcaaatttgtacagaaaatccggcaacattcatttcattaagatggtcttg

SEQ ID NO: 91902 - DNA, 656 bp, Heterodera glycines
tttggtacttcggaattcagaaagtgaccgtgaacacgggtggcggttcactgcttgagtcactcactgatcagccaagttgggccaccgataaagtcgatgtgactttcgacgacgtgcgcgggatggacgaagccaaggcggaggtggaagaaattgtcgattatttgagggacccgcgtcgttacacttcgcttggtgctcgcttgccaaaaggtgttctgttggttggccctccggggacgggcaaaacgcttttggcgcgcgctatcgcaggcgaagctgactgtccattcttccacgcggtcggctccgagtttgacgagattctcgttgggcagggcgccaagcgagttcgtgaactctttcgtttggccaaggagaatcagccttgcgttgtgtttatcgatgagattgactcggcgggctcgaaacgaacaaacagtgccattcatccgcatgccaaccaaaccatcaaccaacttttggccgaaatggacggctttgaacagaaccagggagtgatcgtgatcggtgccacaaaccgagttgataatctcgacaaagcactgcttcgaccgggcagattcgatgtgcaggtcactgtatcgagggcggacttgccgagccgaaaggacattttcagactgtatttg

SEQ ID NO: 91903 - DNA, 658 bp, Heterodera glycines
cacggattagggaaaatgcccatccgaagggattttaattagggcggcaacttcataagggagtcgaataggtttggttcaaaggactcccttcctatcgggttgggcttttgcggtaaaaccaggtttggggttggggcggctacttcaaagactgtactccttcataggcacgggatgggcgagcgatacccgcaaccttttgacagtctgtgcaattttatatagggtatatatttcactgataattaggtatttcatttcacatcagcactaatttaatgaattcatcatgtcattttgctaacttcttccgccaaaatttgaagggcaggcaaaatcttaaaaatttataattttaattgttaattagttcgtccttaattacttgtttggccaatttgtttatgcccttttccgggtacacaaactactcccggtcgcggcatctgaagaaaaaacaaaataatatattcaattattaattaaattaattaattacgcacataaaatttcatcaccgtgtgctcatagtcgtcagggtttacagatggaatctcataaatatcaagttggtcgagaattgaatgtaatattgtcggttgcgagctaaaaaaaaatataattacttgattaaactaattaattaaacagaatc

SEQ ID NO: 91904 - DNA, 679 bp, Heterodera glycines
ctcgtctcgccaccgatgccccaaatgtgcaggtggcaattgaccagcgacttgccgaagtgcttcagggcgtcgtgtcgttactcgccggaatttcggtggccttttactttggttggaatgtcgccccgattggactcggcacttccattattctcgtcatcctccaaagcttcgtctccaattacttaaagcgtcgtggcatgcgcgacttgcaagcggctgaagaagcctccaaaatggccaccgaatcgttggaatatgtgcggacagtgcaagcattgaatggacagggaaaagcgtaccggacattctccgaggcgatgcgaaagccccaccgaatggccatcacccgaggcctttggacttctctgtcgttcgccctcacttcctccttcgtcagcttcaacttcggcttcacctattgcctgggaatgcttctgatccgtgccggtcacaccaccccttttgtactgttccaagttgtcgaagctcttaacatggcctccttcatgataatggccgcggcagcgtatttccccgaatatttaagggcacgcttttctgcggggcttatgttcgcaatgatacggctaaagccgcgcattaacagtctctccgacaaaggaatcaaaacgcccatcgaaggccgtctcgaactcaaatccgtccaatttgc

SEQ ID NO: 91905 - DNA, 501 bp, Heterodera glycines
gtttgccagagaacgaccggagaaggtgcgtgactgtttcagcgccgcccttcctttccgcgctcatctgtccgcgtcccatcgccacacattggctgagctgaacaaaattgcagcgcatctttcgtccgggtcgaatccattgcaaaaaaaaaagtcgcttcatctttctttccgaggaacgaaaagcactcatttctcaaatgaaagggaagcgcaaaagaaacagccaaaaacgcataaacgacgaccccaaacgacgaaagagcgggacgcactgacgaagatttgccatgctcaaaagttgacgcagcaattgcgacgtgtccaaagcgactgggaaagcgcgtcgatggttctgagaaggggcgacgcagtggtggtgaaggcactccggcaggacggtttcagtctctgtgacaacgccgtttcctccggactcgtccccgtcgctcttttgggtccatttgacgagaggttcaccgctccggtctctcccga

SEQ ID NO: 91906 - DNA, 633 bp, Heterodera glycines
  unsure (1)..(633): unsure at all n locations
gctgattattttggtttgtaactttcttgaaatgttaaaattctcttgttttctcgtattattacattattcagactttgtgctttcgaatgatgccaaaaagatagggtttattcaaacatcaacaaagttattgtataaaaaccaggtattgtcaattgattggactcataaagtgcactagagccgtaaattttacccataataaattcatataagaatttttaggacctcactgacaatgaacactcaagaactattacgttgctaggaaacacgagtgttggcgaggtttaattacgctcttttttgatttttttttaaaatctttttaggcgcctgacaaagccctgcataaaacaggcaaaatgattgaggtataaaccaggcccgtgcccaggagagggagagggggacactgtaccattatttattgaaaatttgacccataatggcaaaacttgtcgcttttggtgcaaacccgctaaaaagtcctgccttttctcangcgttaaaaatttaacgggtgcccccttgaaaattttttttggatatatgaaaggggtctttttaggatttggcttctctgcagcacaatcggctcagcaaacctatccaaccgacactctctga

SEQ ID NO: 91907 - DNA, 701 bp, Heterodera glycines
aaaaaacaaagttcaggaagaatttccgccgctttgaatggctcgtgttccaatcgccgattgtgcgcattctgctcgaaattctgaacatcaccgtgtttatggtgaataaacatcccaattaaaatcgaaatctaaataataaatataattaattaaacaaaattgacattttattaggagctgagcagtcgctccaatctgttcttccaactgtccaatttgataggcatcatctctctttttgtcggctcctacggctcctacataattgtgccaatcggcgcttcgctgctgcacgaatatcggcacgtttattttaaaaattaaatttttatatttttatatggaaaagcggcaaaatgtttccaaattaattctcaatcaaatccgattcaattatttccgataaaaaggtaattaattttcaatgcaataatccgacacgattagtccgttattccgtcgcattattatttgacttgcaaaaacccattcgcttatcccttggcattaattggataatccctcctcaaatcttccgaattagtaattaattacattttgaaaagcattgcttcttttggcttaaatttgtctttcgcttttcctccctccgaaaataattaaaatttattttttttaatttcagttttttgcttctgttccgtctcgtcgacttctgccaattgttctggtcc

SEQ ID NO: 91908 - DNA, 619 bp, Heterodera glycines
ctccctctcaaaatgagttcttcgtccattttcctttcctttgcgtcttattctttgataattttggcattgtgccgagcccaaaatgaatcagctgcccaaggcgatgcgcagcccccgccattcttaacagaggccagccaagagaaaatcaacgaattctaccaatacgtcacgagcctggggcatttaaaagaaacggaaacagcggaaaaagtgaaggaatgggtggacaaacaatcggaggaaattcagaagaaatacgtcgagtttgagcaggaaagggaacgggcgaaggccgagggcgaagcggcgcacgaagaagcggtgagaaagttcagcgaagcggcgaaaaaggcggacaaggaactgaccgaaatcgcgaacaaccccaatttgtcggcaaatgataaggcggaaatgatcaacagaaaagtgcagtcactgcccaaaaaagtgagggacgaaataggaggagcaatgggcggaggcggaggaggtcaatagcagcggaagaagtgaagaggaaaggaaataataagaaggagagggaaaggagaggagcgaaaaaagagtgatgggacaaaaaggaggaggaacgagaagaaaaggaagagga

SEQ ID NO: 91909 - DNA, 593 bp, Heterodera glycines
cccaattttggctttttggctaaaaaaaagtcctaaattaaaatgaaattgttaaaatcggaaaacgaatatttgaaattaaagaaatttcttataaattttagattattgtgaatgcgagtgccgatgaattttacaaacagccaatgttttatttcttggcacatttcaggttgacaaaaaaaaaaattttaattcactcgaaaatttatgttttagtaaatttgtgccgccaaattcggaggttatttcgtcaacactttttgacaaaaaaggcactgaattgccagataatccggtggaaaattcaatttcctacgcttttggtaataattaaattaataatatttaataatttcgattttatttttaatttggtttcgttttgttttagataatttcacgaaattgaacagcgaaatattatcggaaaagcaacaaattgaacacatcgcctttgtaacacctgaaggtggcgaaactcacttttgaaaattaatttataaaaaaaaaattagaaaattagaatttaaaattaagaaaatgttttattaccattatatattggttaatttataaattataatatttta

SEQ ID NO: 91910 - DNA, 569 bp, Heterodera glycines
agaatgtagccagcagacggggacgaggaggaggaggaggacggacggggaaaaaaggggagaaatgagcgaggggaaagggagggaccgactgatcacaattaaggagggcttacaaaaaacaatcataatgcatacatacatagacatataatatttcctttttacaatacaacacattatgttaattgattcctttctagaagcagaagaagcagcggagggagacaagcagcggcaggtggtaaagcaaaaaaaaaaaaattgctttgctgtgttaatgggggtatttatttattatgattatgaatagtgtcttggaagagatttgaacagaagagaagcaaatacatattggaaaagggtaaattgttgttgtcgggcccaattatggtaatgccaaatacaattaaaatcttacaatagaatggatattgaaaagtacaaacatccggcaggggtacttttgttgcagtttaattggactcgatgataaaccatagggaggagaggaccattttgatttggaatttttcatcaaaattaaatcagggatttgtcggaatgcc

SEQ ID NO: 91911 - DNA, 623 bp, Heterodera glycines
caccaattcatgcaagagataaataaacaataataattgttttgaaatatgcagatgttataattctcttaagaaaacaaataatttaaagaatgaaaagtaaatattattacatactcaattatataatttaaatgcattatcaatttatagtttatttcaacttaatttcaaagttaaatttaatttttaaaatgcaaaaataacattataaaaacaaaataattaaaatttttactgaactattagtacaataattaggacatatttaaaaaatctttgattcggaaaaaactttttctgattgtcaatataatgacaaaagttttttgttgttaatttgagggttaatccttttgattaaaacaagaaaagaaatatggtaaaatttaagaatttaaaaacggcttgaatttattaaatccttattttgttaacttaagattaatatattttagtaacttttagctcgatttcgttactcatataggtatttttgcgttgcatcagtttccctccatgtagatgttttcttcgaattttcaaaattattccttatccgatgagaattcaatcaaaattttaacattattgttgctccccgaccccgagcccaccgaccg

SEQ ID NO: 91912 - DNA, 620 bp, Heterodera glycines
atttccacctccgtccggttctcattgggtgatcaatgcaaaaatgaattcgcttttgctctcctatctgatcatttgctgggttcatcttggacgcctcgacctcgtcccccaacttattgactgcctcttggagagaccactcggctcttccgacgaagaaaatgcctttttggacattgctcggtcccttcattcaactcatcaacttgtattggccgttgaatatatgcagaaattgagaaaggaaaggcccgagttcaatgaaagcaccgatttttggtttctaatcggctgcttacatcaggctcttggtcaacttgggcttgcacgaacggcgtatgagactgccatctctttccaaccggggcacatcgacgcacggattaacctctcaacaattcttcagcaattggaccagtccgaacttgcactcgaaaccctcaaagacctcaactatgattcttgctcccacatccctgatgaacggcttctttgtcgtcaagcggaggtgcttttggagcaacggaaggccgaccagtacatcagctgcttgcgtctgttgttgatacctcatttttatcaaatctatcgttccgacgacgcatgttctgtttctc

SEQ ID NO: 91913 - DNA, 633 bp, Heterodera glycines
gtaacatccagatatgttcaacggcaaaattgtgcaaaggctttggtgaagttccaaagccatttggagaccttcgatttgaaggtttaattggacaggactaaatcctgtcaaggcaattacctttctcccagtatttctgagttggtaatttttgatgtttaatggaagtctcctctctggactttccattaacttttcaaggttatgtgaacggcaattgcagttcactaaacctgatgaatggtcaggtatgcaatcagtgcatgcctgaactccaagactgcaattgaaatcaattgcttcttgccgatttttacagttgaagtcaattgccaatggctctcgggtcagagccatattgctcccgtcaaaaacaaaatctgagtttaagacgggagcgggcggaaaagttactccgatcggagtaatactgatgttgttccatttcagggttcttcctggataaaggaacacctgagtggacttgggtttttcgcccaaagtttccaggcgaattattgtataaacaataaattcccaggaattacagcccatgatttcatagactgtcttggacttttcctgagcataccaacgataaaaaaggcacgcactgccgcctaagaagca

SEQ ID NO: 91914 - DNA, 502 bp, Heterodera glycines
aggaaaagacattgctagcaagacacttaatattccatccagaggtttttatttgtacgtcaagcccactgatcgtggacgtttcgtcaaattggctgaggatgctatcaatggtcgaaaaaatcgtttgttcctgtcaatgcaaatttgcaataatattaacgaattgttgcggaattttgaggggctcgtgccagtgtcagaggatatgaatggcacaccgtacaatgtgatcattcgatctgaatctatcgtgaccgatagacgtcaatattacatcgaccttcccgaaggtcggcgtggatcctttttgcggattactcttctcgagacgcattccgcgatcctgaactcggtggtattgcccttggaggggatcggccccttgcaccatgcactggactctattctggacgactatggacgaaggttccttgacgaggcaccctaccttcgccactctctgatgattcgcactgatgcgaaaagatttttttttgat

SEQ ID NO: 91915 - DNA, 535 bp, Heterodera glycines
gttaccacaaattttgttcttttttagttgtgatggaaagtgctgacagcaaaggtggaaaagacgccgaccttcagaaggctttgtgcgtctcgacgatggctgtcgcaagtgccgttttcgagcacgcgcttccacctccacttttgccacttgcgtcaacagttgtctccaaccccaacacttcgatttattttctttcgagtggaggcaatgccgatgtccgtattcgctgcaattcagtcgccgaagattcagtgataagcgaaagtggaaatgaaacggatacgcaaatgggcaaaatgagagaggacgacaaaatgacggaaaaaatgggaggggaaagaaaaggaaagggagaaaagaaaaggcggaggaggcgacgacggaattctgccgggcaacgccaattggctattcatcagcagagtctgaattccctttttcggcacatccaagtgtttccactgaagcaatatcgcgagctaagaatggattatttgcgaattaagaaaatgaggatgggaacactgaa

SEQ ID NO: 91916 - DNA, 459 bp, Heterodera glycines
ctggaacaaacagccggtgaaggtgctggtcggaaagaacttcgaacaggtcgcgcgggatgacaccaaaaatgtgctggtcgaattctacgcgccgtggtgcggtcactgcaaacaattggcacccatttgggacaaattgggcgagaagtacaaagaccacgagagcattgtcattgccaaaatggacgccacaggcaacgaagttgaggacgtgaaaattcagtcattcccaaccattaaatacttcccagcaaactccaaaaaggccatcgactacacaggtgaacgcactttggaaggcttcagcaaattcctcgagtcgggtggaaaggacggtgccggcccatcggaggaggagaaagcggccaaagaaggcgaggaggggggagacgaagagggacacaccgaactttgaggaaacggaagattgcggaagaagaggagggagaggagagg

SEQ ID NO: 91917 - DNA, 451 bp, Heterodera glycines
gattaagtacatcaaggctgcgcaccccggcctggacgtcattgccggcaatgtggtgacgggcgcccaggcgcggcgcctgatcgaggcgggcgcggatggcctgcgtgtgggcatgggctccggctccatctgcaccacccacgaggtgtgcgccgtgggccgcgggcaggccaccgccgtctaccacgacgcgcgcgtcgccaacgagctgggcgtgcccatcattgatgacgggggttttcacaactcgggccacatcgccaaaggcctggtgctggacgtcaatgactgactgtgcggctccatgtttgccaccaccacagacgcgccggacaagcacttcatgatccccgaggaccttgtgatgaagaaccacggggaggggtctctgcaggccgtgtccaacggcttcgagacccactacgactttgacacgcaaagcctcaag

SEQ ID NO: 91918 - DNA, 502 bp, Heterodera glycines
attttgaggaagagagcttcgaaaagttgggacaaatccgagatgcgctgaacagtgttaaagtaagggcgtggcgagggaccagtgccgtgttaattccgtctgcgctcggcacggcaccgaccgatggcactcgttcacttccttcacccatccgttgaagggccttcccgcgtgggtgtcctctcgaattattgattcatttgctactcaacaacagaaaaatgggtgtgaggcgttgtccagctcggcactgttgttgtacactcaggctttctgcaagtttgttcagctgatcgatgcccattccgaactgttggccccgttaaaacaatgccaaaacgggcggagtttgcctcgttctctgcacctttgtgaacttcccggcgcatttgttgctgcgctcaaacattcgcttcaccctgaacagagcaacgctttgcaatggttcatcaacggtttgaatccccattggcaatggactgctccgactttgcccagg

SEQ ID NO: 91919 - DNA, 588 bp, Heterodera glycines
gtccaattaagcccgcaaaaataatcgaatattttattcaaattcatcatggaggatgaatgtaacggtaatggtgcctcttcgtcttcatctcttttgggacggctccgtcgctttttgccccgaattgcagccgcaaatgcagctttgtcagacacgatgggtgccggcggtggtgatggtgctgctgttactgtactggacgacgatgaggaagacaactatagaaacggcggtgcccatggaactgacggcggccacgacgacggcaagcagtacaaacaaaaacagcagcagcagcaggaagaagcgccggcagtgactgtgcatgtgatcgactcggacgacgacgaagacgaggaggaggaagaagaggaagtgattagcgaggatgacgacgacggtgccgagatggtcgttgagaatgggccactaggaggagaaggcggcattggtggaggagttggtcgtcgggagattaagcccaagcagttcatccaatttgacaccattctctacaaaattgacgacgacgaaaagagtgaccatgacaacgtcggcgtcaagacggagggcaacaacaacaaa

SEQ ID NO: 91920 - DNA, 235 bp, Heterodera glycines
aaagaatttctacgaagttcatgaaaatgttgtcaaaagagagcaattggaaattgacgaatggctggcaaagaacagcagcaccattagaggaaaagatgcgccttcgtccagtcttggggttgatgagacgggatttccaaacaaaataatcgaacatttgggcaacatttttgacaaaccgaccgcaatttccaacattgcttggcccatttgctttaatgggccggaaatt

SEQ ID NO: 91921 - DNA, 641 bp, Heterodera glycines
attgtatttacattttatgtgctattccattctctgatatggattatgtccgtacactgacaagtatggtcgatgtttgtctaacgctggaaccaggcttttccactcttgaagatttggcatttctcgacttggccggcggcgccgtccatctgctgggcaccgcttattcgtcaaaagatattgaagcgatcaaggagttttcgaggtccctcatatggtttacatatcgcaaaaattggccggcacccatcggaggcttcgacgggccaacctctgacagaggctggggctgcatgatccgagttggtcaaatggtgttggcgcaggcactcatcaaattccatttgggctcggattggcgatgggccaacgaaatggtggaccaacgggcggacaatgaacagtttcaagcctatctgcgcctgttgaggatgtttcaggacaaacgaactgcacaattctccatccaccaaattgcacaatttggcgcttcggaaggcaaaccaattggcgaatggttgggcccaaattcaatggcacaagtgctgaaaaagattgtcgtctacgatgaatggtccaatttggttgtgcatgttgccatggacaatgtcctaatttcggaccacgttcacacaatg

SEQ ID NO: 91922 - DNA, 681 bp, Heterodera glycines
agcagcagcagcagcggtggaaaatcagcagcaaatgcttcagcaacagcagcagcaattgcaccaccaacagtcccagggcaatctgatgagcggcggtgtactccttccgccaggtgcccatccgccccatttctcttccggcgcattccctcccctttcttcggcgggtcagcagctttcatttcccatggaatcagcaacacatcaacaacaacaagtactgcccctccaccattcacaacaacaacaacagcagccggcggcattgatcggaatgtttcagaggcaaagtcgcgaggacgaggggcagcaacagcagcaccaatcacgacaaaaccaagctgggcaaatgcagcaacagatcaaccaacagcaagtggaacaaatgggcaccgctggaagcaacacaaccgcaaaccaacagcaacagcagtccacgcctgcccccttgtccgtgtcgtctgtctcttctgctgccctctctccccatttgatggttccgttttcctgcccgtccacttcttccccaattgatccttccactccactgcaattcatttcccatcatccacaacaccaaggcgttccgccgccgcctccctacaaatgcatccgatggccatgtcggaaggacccgttgggcccatcccttctcatgctgcttttcctgcctcttct

SEQ ID NO: 91923 - DNA, 647 bp, Heterodera glycines
gcttgtttaagacgtgccctgtgaagtgcaagcggtacttccatcagacgtgcagtacggtgtgtttgtgccagaagccgcccaagaagaagaagaactgagaagactgcagtaagaataccggctccgactaatgtatttttgggtggccccctatagccaagtgacagactgcaggccgacccctcccttcacccctttctttccttcatcatttcccgtttgccctaattttctcatcatttcatccatcaatcactcctcgttcgctacttcgttcaatcctccccgtcttccccatttgtccgctcgacggacattcgcggctaacgttcagtcgcgacaagagaattattcataacttgaccttaaatgaaccaaattttcaaattttgatatctttcgtagcactaaatttttctattattctgcaaaatttcaaaaattcgttaagtttcaaaaagtcataatctaagaaactgaaaaatttgaccaaaatgaatcaaattttataatatgtatcattcgataacctaaatatttaattttttcgtaagattttgattattttaataacgaagccagagatttcgcggctgcttctcatagagcaattacggaagcaggaaaaattaagtctcgtcatc

SEQ ID NO: 91924 - DNA, 674 bp, Heterodera glycines
acattagtcgacgcactcgccaccaatttaaagaaggtttcatccagccttgttgcgcgacagatgctggccaaacggaagcaacacgtcggcgaaagcttagacgaatttgcccaagagatcaggactctagtatcaaaagcgtacccggatacgtcgcttgaaatgaatttcgatgcgttagtacttggagacatggaggaagacgcgaaaagggaacatgacgagcgactaaaaagattcagatcgggaattgccaaggattttttccgctcgaacatgacggcatcaatcaaagaaaaaattctcttcatggatgaacctcagtcatttgaagaagcgatcacacaggccaaaagggttcaacaaatgcagggagcgttggcagaagatctctggaaacaaacacaaggaaccaaagccgaagttgccttggccgaaattaatgccgtccggactgaattgaacgaaatgcgagaagaacaaaaaaagcaagaggatcagagggtcaattttgtccaacgtactgacgagatggcaccacaacgctacggccaacaaacgcaaaacgcttatatccagagggggaacagcaacaggggatttagagggagaactcggggattccagagttaccgtggaagttttaatccaccaaattcaaatcagacacc

SEQ ID NO: 91925 - DNA, 409 bp, Heterodera glycines
gaaaagtgccgaaacaatggtactacggctcacaatggttcgccccgccggccgaaacgacggactcttaccggcaaattacccaattgatggagtcctgcaatggcccatatgttaaaatggtcgcaaaatttgggcatttttttagacggttttaatcctaggccagtttgccggacgatgcgcggatgatccgtgggctttgtgcgcctcctgcaacctccgcgtttgcgcttcacagggaggaagagcacgttcatcatttgaactacaacttggggccgggtttaaaggttttggctgcctaaaatggagaaaaaaatccaattttgttcagttgtggctgtttgttgatggccaatgggagaagaaggccatggagctggggaaggcattgtttggcgaccgt

SEQ ID NO: 91926 - DNA, 684 bp, Heterodera glycines
gtataatttgacaaagtactcgcctaccatctggacgatatgcaatttgcatttggtaacgactgattcacttttgcgacttattcgataatcattttgtgcactctgtacccatgaatttggagatcgtgcgcacaaatggcctcatgggcttggacaggtggcgcccagatttggcactccatcgctttcatttgggtgtcttctgtcgtggagacgctcatttcgttgccattctcatattaccacacatttttcattgaacaaaagcacggatttaacaacgaaacagtgccatttttcttcaaagaccgtgccatgaaattgggtgtcagtcttgcgctcagctcaccggttgtggccctgttggtgtggatcattcgaaatgggggcccgaacttcccgatttatgcatggcttgccctttcgctcatcatttttgtgatgatgtttgtttaccctgaattcattgcgccccttttcgacaaatattcgcctctgccggacagcgaattgaagcgcaaaattgaggcgttggccgaacgtgtgggctttccgttggccaaactttacgttgtcgaagattccaagcgttcctcgcaccagaatgcgtatatgtatggcttttggaaacaacaacgcatccgttcttttcacccttttatgagtaaggcaatgaacgaa

SEQ ID NO: 91927 - DNA, 521 bp, Heterodera glycines
tggtttgagccgcgcgtgttgcgttccgcccgtccctttgtgcccagcggcggcgaacggcgggacgaagtcggaaaaacgggcgatgaccaggcagtggttcagatgatgtgcgatttggtgttgggcgagattcaggcggagatcagccgagtggagaaggaaatggaacgactggcgactgctcaaagaatggcacataaaagttcgctttgcggaaagtcgggacgaagttttggactcatttcgggcattggtcgacgaaatggcgagggaacgaatgcgaagaaaatgcgtagtgcaaagtgtggacgaacagcaacaactcggggagaacaacgcagcgaaggacacgccggcgagagaggccaaacagccgaagcagcgtccgaacacggcacgcactccgacggtactttcggcattcgctctgtacctccccgacggaggggacgtctgacggacaaagagggaattgcgcgcagactgacggcgatgagacgggcggtggaaggggcgca

SEQ ID NO: 91928 - DNA, 615 bp, Heterodera glycines
tggagagtcatttccagccgcttcaaatgttccgcggcgttgggggctgacaccacaatatcgtccaagcagacggcgactccgtccattccacgaaggacgtcttccatcacttgttggaaaattgctggcgctgacgcaacaccataaggcatacgcgtaaattggtataagcctttatgcgggcaaatggtcaagcattccttggctttatcatccaacattagatgaagataagcctccttcaaatccaactttgaaaacttttcgcctccgatcaacacgctgaacaattcttctgggcgcggcaacgggtattgatgaatgtcgagccattgattaaccgtgactttgtagtcgcaacataagcgaattttgtttccggctttgggtacaatcaccaacggtgttgcccactcagacgttgtcacctgctctaacactccatctttgacccagttgtcgatgaccttctccacttcgggtctcaatgcaaaaggcacgggggcgtggcttgcacttcttcgattgcacttccggcttaaatttcaacgaaatttgccttgtgcatcggccgagtccgtcattgaagacctcaccggactttagaagcac

SEQ ID NO: 91929 - DNA, 679 bp, Heterodera glycines
cctacattctattggtgccgctcaaagagcacgggatggacgaacaaatttggaagaagttggcatcgaatgtcgtcgaggcattgaacgcgtcacggcaaaatccgttccaagtggaccaagcattcaaaattgacgacctcttcaacaaaaacattccaatggggggacaggcgcagcaacatttggcgattattgaccagtcgtgcaattttcaacaatgggtccgcgttttgtacttcttcatttgtgacaagattggcgacccacttttgcgcactttgttcgcctctttgtgctgtgtgaagcacgacgcttcaattctgggcagaacaatgtgcaaaaacatcccccacatgatcatccaggctttggtcgaacaaaacgacgcaattcttgacaaatttgagcaggaggcacttgcggtgttttgcgcggtggttggaggccaaatttgttgggccaacgacgcgatggtcgctatttgtgccatagtggacgcaatggaacgcttctttgttggccgcactgctgctgcaattgttggcacgaggccaaaggacaaagatgtcctttccgaacggtttgatgcgttgatcagcaaaatccttgcccaacccaacccggacagtctgacggtggtgccgttgagtgtgttggccgcccaaaagtgcaacta

SEQ ID NO: 91930 - DNA, 641 bp, Heterodera glycines
tttcagaccagtaaatcaaacttggacgacgatttaattcagttgaaatgcaactgaatacaagcaattatcattttttcaatggccagccaagcccagcgggggccacccaaagcaacaacaaaaatttctttagtggacaaccaaattacagcaacaataacagtaattggaacagtccaaaagcaaacggcactcagccaaaggcggcttcgtcatcatttgccacccaatcggcgatcaaaaaggacaattatcaggcccacgagttggtgctgaaccgtcccaaggccgaggtggacaaatggatggcggacaacgaagtgaaactgagtggccatagtttgacaggaccagtgaccagtttccaggagtcgacattcccagcaccaattgttgcccaactgtccagcgtgttctccgcgcccactgccatccaggcaatttcgtggcccgtcgcgctggccggaaaggacttgatctccatcgcaaaaacgggcagtggcaaaacgctgggcttcactttgccagccattgtccacgtgctgaacaaccaacgaccgcagcagcagcgtcgtcctggcgaaagtccggctgttgttgtgctgttgccaacccgtgagctgggccaacaggtggag

SEQ ID NO: 91931 - DNA, 511 bp, Heterodera glycines
gagggacatggtggtggtggtggtggtggtggtggacgtgggggcatattgaccaaacgcaaaggcagtaatgccgctgctgttgctattactgctacaagaagatcaaggggaaggaaaattcgcggaagcggcggcgcctcttccgcgctgctgctgcacacatttaaaaaggcggcgtttggaaagaagcggatcggtagtgctcttttgttcaagccccaactttggtgacacacaacacttactcgcacaatgagaaaactacgcgtgaaaagcacaaacaaagtcaacagcaacaacaagaatgcagcactgcaggcccaaaaacgtgagctgttggttgaaaaggtgttggatgagctgtacaaggacatgcggtccaatgccgcgttcaccagtgtggagccgctgctgcttgaggcacgtccacaacaccccgggcgacacatcagacgggccgaggtgcgccgttatttggctcgccagcgcgtgtacaccctgcaccgtc

SEQ ID NO: 91932 - DNA, 526 bp, Heterodera glycines
cgcaattccagtaaaagatgagaaaggcagaattgtgatgaaaaaggtcaaagtgcagcgctacatggccggcaaaatcccagaatttgctcaagacttcgattctgatgaggacgcacaacaagcggaagaagaagtggagacggacctcagacagtttttagaagagaaaagagaacgcgaacgacgtgagaaggacgaacacagacacaacagaaaggatgggaaaaggcatcgcgaaagacgtgaccagcagctggacgagttcaaaaaggagctgaaggaggaagaggcattggcacttggggaggtggaggaggaagacgaacaaacgcgggaggagcggcaccaacgggcgatgttaaggcacagacggacggagcgggaggaagcgccgttggaacaggaggacttggaggaggaggctgacgaggatgaacggcagcggaggagggaattgctgaagcgaattccccaaagacaagaggaagaggaactgctcgccaaacagcccgacgctggcgaa

SEQ ID NO: 91933 - DNA, 611 bp, Heterodera glycines
aaattattattcacctttgtcgcccttcttaacactgtatcgtggctatttatcctaataactcacttcaatctgaacttacgataatgtaattgattctatttgaaagagcatgaaattctacacctgaataactgctcagaattttaaaatctctttaattagaattttaaaaaattattattaaactttgtcgcccttttttggtcaataaagctgaattagttgaaaactgttcctcagcctctcatcatatcaatatactttattacaaggacaatttgaacgtgtacttgaagcaattttataatccccggccccatttataagaccgatttttaaatagatttctgcacctgaataactgatagaattttaatttctctttaataaaaattaaaaaaaattattattcacctttgtcgcccttcttaacactgtatcgtggctatttatcctaataactcacttcaatctgaacttacgataatgtaattgattctatctgaaagagcatgaaattgaataactgctcagaattttaaaatctctttaattaacattttaaaaaattattattcttctttgtcgcccttttttacactgtatcg

SEQ ID NO: 91934 - DNA, 669 bp, Heterodera glycines
agcaaaataagcaggttaattgaatttactatgatttaaattaggtgattgcaattacagacaattaaaactatttttatattttaaatccttaatttggtgcccaaacttcctcctcacattcatttataattttgcttacaataattcattaaataaatgtttagataatttatagttctttctgtacttattacatatgcttcttcattctttcacaaattctttctttctttatccactaatttccgtccattctcttttcacatggcgaagcagaagttgaagagaaaggctaaaacaatgtaatataaaaaaaatttaaaaaaaacatattttattaattgtttttccaatgaaaaatattatgtaaaatcgtttgtcattttaaaaagcaaaaaataaaacaataatccatttaaaatgtaaaaaactgatttaaaatcaattatatttttaaaattttatggatgtaatttcgacggtcctaaaatttaagtctggagtcggaattgctctcggaaagtgcaaataaagggaaaacattgaaagtagttttaatttttaatttaaaatgttgtcttttaccatgcaaaatgccaacagccaaaatcagggcaaaggtgccaaagtgattgccaaccgtccacccaaccatcgcaccgttgc

SEQ ID NO: 91935 - DNA, 667 bp, Heterodera glycines
gttgtataaaaatcagatattgctgctaactcatatgtatatattttatgaatattcctttttattgcatatgccatcgcatgttatgtaatgcctatttttatgaaaatgagcccttaattttacataaatagcgcctgattatggcctttttatgaaaatgccatcttaaattaaggctgaatgtgggcttactctaggttttcgcttgttgtgttgagacctcgatttgtgggggtgaggggatctttgaccttttcatggcgcaaaaaggcactgaatggcatattatgcataaaagtgcaatgcacaaatataagatatgagatgaaaaaagatgaataaaagtgcataggcataaggattgataaatatacacttatgggttggcatatgcataagagtgcaccttcataaatatatacataggagaggcacatgcgtaaaacgtgcatattcacaaaatctatacatatgaaatggcatatgctgcataaaaatgtatattcataaatatacacttatgggatggtatatgcataagagtgcatcttcataaatatatacagaggagaggcacatgcgtaaaacgtgcatattcacaaaatctatacatatgaaatggcatatgctgcataaaaatgcatattcataaatataaataata

SEQ ID NO: 91936 - DNA, 680 bp, Heterodera glycines
attcgctgttccctttggccaaaagtgtctttttcttttgctccttttcctccaattcggcaatttgaatttgcttcaggtgacgggcaagttcttgaaaatacagcaattcatttttaaaaaagcggctcaattaaacaaactttcaaatttttaaaattcaaaatccccctctttttttcaccggtgtatcgcagcaacaaatcggcgttgatctgattgaactgggcgttgtccgatgggttcatgtattccgacattttggtcttcagatagtcgagcgcgaacgaattgggcaacaaatcgctgatggcaatggcatggaaataatgctgaaaattcaaaaaaatgttggaaatagcggcaaaaaggggcggggtgggtaattagtgtaattagctaattagactcaattttgttattagctaattagactcatttggtatgtctttaccgaaagatggtttatcgagcggaggaggaacagccgtgtgacggggtccggcaaatgctgcaagtgcttcttcagcaaaccgacccgattttggtattgcgcttggtcgtccaagttggggaatgcaatgtcatcctgttcagaaataaaatgttttgagtaaatgaaacccttcccaaagggaaattgaaaagcctttaatttactatcgccactaattacccta

SEQ ID NO: 91937 - DNA, 537 bp, Heterodera glycines
cactgcttttgcatacattcattctcgcgcattacaaaatgtcgattatatcaaataaaccgatgaatatctcgtttagtaattcctgtagtccggattgcccgggcctcacgtggtgctcctgacatccctaacagtgagaacatagacagagatgcggttgctggtttagtaaaaagttgtacaaagatttcgcgtccatttttaaagttcactcactcccttcccccaaattctggtgcatgtgttgctgagggttggtgttgtcatctggcggagaagaacacgttggcactgtttattccatccaaacttttctcatctactttatcgcgcgagaattttgtcgatctgttggagtactgtgaggagcacttgaaggtccgtcgcattttggcttgcttcaacaagtcggacatcaatccatgccagggcattccacgcgccctccgttgcattggcttcaccctcctcccgcccgaacgttaccccgctggcattgacaagaacaccatttttgcgatgggttacaaaatc

SEQ ID NO: 91938 - DNA, 575 bp, Heterodera glycines
agcaggaattcgcggcggaaaaatacggttacactgcagtgaaacaccaacgcgaggtcggcaccggctatttcgattacgtcggcctcgccgcggccggcggtgtgtcgtctaccacggcactgaaggacagcacggaggaggcgcaattctacacggcaaccgcgtcggcagatgaggacgaaattgtgaagatcacggcacaggaaatgccaggcgacgaacgaattttgacgcccgcggcacttcgctttctgcgggaattgcacaacaaattcgagcagcgtcgccagtcgttgttggcacagcgcaaaattctgcagcacaaattggacgagggcgactacttccccgacttcgacccgaacaccgaagaactgcgggctgaccgcagctggaccagccaggccgaaattccggtcgacctgcaggaccgacgggtggaaatcaccgggccaaccgaccgcaaaatggtgatcaacgcgatgaacagcggcgccagggtgttcatggccgactttgaggacgcaaattctccaacttggcgcaatcagattgaggggccaatcaaattg

SEQ ID NO: 91939 - DNA, 458 bp, Heterodera glycines
cattttctttttccttttcctccattttttcttccattgcctctttttcttcctctttttttgttctttctttttcgctttttcctttttcttcaattttactttctgttgtctcctgagtttgttcactttcattttcttcgttcatccctaatttttgtccatttttcttccttcgatttttcttccgctttttcttttgctgatcttcaattttttgatccgaaagaaatgccatttgtttatcagtgccctcaaattctttttcatcaaatggaatgccaatatgttggaaaatttctttgatctgttccttgttcattaattccttcaaatttcgtcgataatctttgctctgttttaacacttaaaaatttaaaaaaattttccgttacttgccaaaactttataattttaatttactttttattatatttccaatttttctctgaaccagc

SEQ ID NO: 91940 - DNA, 644 bp, Heterodera glycines
attttcctgagttattactggtcatacttatccatttttctgagcagattcaattccaattactgagctattactgatcatatttatcctaacttttttctgatcacttttgattccacccgtttcgcccaactcacttgtcctgcccaaattggacacaatgcgcgcgaatgtcgtcttggcatgcttgcgtgaagcggtagctgaagtggtagtcccgaagcgagatcagctcaaagtgattgacgtaggagcggcatttggtgctcatttcgtccgcctccttatgggctgccaaacactcctttaaaatatacggtatgccaacaaatgtgtgatgcaggatactgtaaaggcgttcccttgccaatgtaggttaccataatttgtttaaaggaacggttttgttgggtttttgaacaaaacaaaaaaacaatgaactgacgaaatacggataaatgttcaaatataagtataataattaaattaatttttatttctctcttccacccactttttagaagtgattttaaaaaaagcaaaaacctattaattcaaaatttatgataggcctttttttaaaaaacaaattaaaatttcatttttattttatagttaattagaacgggtcacgccgttttcgc

SEQ ID NO: 91941 - DNA, 575 bp, Heterodera glycines
cgacaaattggcactaacgaagcatttgacaggccagcggatgcggcactgcttttcgaggacattgacgacaaggacgtgacgtatgcgccggagattcagtcgttggaagttccgccggaccaactcagccaggcggactcgctgaatttggtggacgaggaacaattctcggaggagcatcaacgggtcattgtcactgatggtgaagacgaagtgccaccgaaggaagccgagaagcaaagagaacggcatgaaccagaaaagttagaggagcaagaagccggagaagcaccgcagcgagagttgacgccgcatgaggaggaaaatctgcagcggatcatcgacagattgcgcagaacgccgtcgccacggcctcatcggatggaccaagcgcaggtgccacaggcgccgcaatttttgcgcagttacttcaacgacgagtccacctcatcactgtcatcgacgtttcagtccatccggcaaagttcgcttctcagtgccctgggcgtgaccagcacccaggagatgttgcttcggctgaccagcctgggggcgttgtcagacgcaatgcg

SEQ ID NO: 91942 - DNA, 534 bp, Heterodera glycines
tgaaaaaagggaaagtgtttaattagggtaattagtgacaaaatgggtggcagtgattagctgataggatttaagataatattttgatcatattgtttgaattggaacattattatcacactgattgaccagccgggcagattaatttgacagtgcaaaaattagtagaagtcgggaccggaattggaaatcaggccaggatagggttactagatttaaatccattttgtcgggatcctgatcaaacatttttcagaataaatcgggacaaggatcccgggaaaatcccgaagggctccccgatcccgttcggtctccaaatatcagtaacctatgacaatcctcataaaaacttgatcaaccacccattagcagagctaataggcgtgaagccccggggccacctgttgctgttggtggatgagtgacgcggcagcagctgcaacattagcaaattgctgttgattctgttggttgtgatggttttgttgctgttgcgggtggttgtgcatgcccagcggagacgacatcaaa

SEQ ID NO: 91943 - DNA, 630 bp, Heterodera glycines
cgcttttccagttcttttgttatgtgataaataggtttgagttggtcaacaagtgtacgaatcaattcccaatcagtttcttaaaaaaatgtgtgaaaaaataaaatgacaaacaacctgaaaacggctcaatattaatattagaatttccaataaacagtccaatagccgtcttgttttcataaaatctctcacacatttgataaacagagttccatctttaaaatgaatttaagaatttttatcaaagacatttaactgacctcacttcagttgatttaattaaaacatgatttggtaaatccatttcctgttgcagtttttgaaaatattctctttgaactgatgatttccttattttcctaatgacttttttgattttttcagaaagcggtaaaaaatccgagtaaattttaataccatcaccgattgacttaatttttcatttttaactagaagaaaacacagacttacaagttgcattttatgtaaaaaacaatcctgggaatcacatccaaggatgtttgtgccaagcttcatcgccgactgagcatcacgtaaaacaagatgtatttttgaaatgtcaatgccaaatttgtccaaagattcttgcaatttttcacaaatttt

SEQ ID NO: 91944 - DNA, 646 bp, Heterodera glycines
ataacatccccatttttcagacttgttcttcattttctttgtttttcatttatttttcatttgtttttcattgtccctcccccatttgtcccgtctgaccccaatgccttcgggctccctttctcccctttccctccccatcattccccagccccaccccctatcccgactctcgacacgacccgtatcccaaacagctctctttagagctcaccccgcccccctctctctctctctctcgccttcttcgtcttgccgtttgacggttggcaagccatcgaagaaaggtcagcagcatttcttgtgtaaataatctcaaatattccttttttacagccaaatttgtcccggcccctgccacggcaaccggcttcgtcgggcccgcacggcgcttggcccgcgcacgttcgccaactccaactggcgttcgtgtcgctgcgtctccggtccgctcgtaccggccgaaggacatcctcgccccgccgaatctccccaaggatatcgacttggggattttcaaaaagccgattgccgtatgtttgtagtcaataattaaacaacattttcttaaattattctcaaatttagggccgggactggagcgaggactgtgccacttgtgcggcattcatgggcgccatgtcag

SEQ ID NO: 91945 - DNA, 639 bp, Heterodera glycines
attttttcaatgcttaagccacggccactgtttcgtcaatttgtccaatccaggttttcgtccccaaattcgtcggttgaaccccacaaaaaaataacaactgtgccaatctctgcaaaaaacagtgccaccattctccacgagtttgtcaactctctaaaaaccgtcaatttgccgccctcggcggtgccaaacgcgagcattttggacaaaattgtgccaaagccgggccaacgcatgcgcattactgatcgcattcggacatttgagcaaattgtgaccgaaattgactttctttacactgtgtccacggaagtgccatcggcactctctgatgagcattgggtccaattgttggacacggtcagcgctgctgaacgtgaacatttgctgcgcaccattcactacgcccagctggtggagaaggcggcggccgcggaacgccaaacactgaaaaatggcacaaaaacgttggacgccattgctggagttaatgatgatgatgatgatggttgtgttgctcattcttcctcctccgccacaacagcaacaaactctccaaattatcagcagatgtttggcgacgaattctgtgaccaaagcgcactgaaaagccgaatggacacacatttcgggttg

SEQ ID NO: 91946 - DNA, 641 bp, Heterodera glycines
gattaaaaaaacctaatttcgaaattttgacttttcgactttttgttcgattcgggtccgaggttcgaaattgagaacgattttcttatagaaatttatttctatattaaaatattaatgccatagaactttattttaaaatatttgtatcactgacgtattttccactgaccgattttccggtcacgaacagtcttggtatcatatgaaaaatgttaaaaagtcatgtttttttacaactttttgcaggctagaaaatcttttcgcctgcgccaaaacgacctggtccctattttattatatatttttttggaaaaccctaattattctagaaaatttcttctatgtttgatttttcggtggaaaacaactgctctcagtaaattacaactgcttcaaatttaaaaaatttgaaaaataatagcgcagcaataaaacttttttgatgaaaattgagactttaacttgtgaaaatgtggaaaaattaaataaaaattcatccctcactctgctatttttttggaccgggattcccgactcatgttcctggaaatactccccctgtggttattaaatattatattttcaatacagcaaatgcgacgcaaaggaatgattcggaagcgaatgatcggcgacga

SEQ ID NO: 91947 - DNA, 631 bp, Heterodera glycines
aataagcaatttgatatctcagaaaaaagttatgagagtttcaaatttttatcaggttgtaactcaactccaaaactgctgttttctaccaaaatgcgaaaaactaatcattttttattgattctaaatgtccaaagagattttgtgtccttataaccaaaactattcgaatttgcaagttccatctttttcatgtgttagagacacgaaaatagtacgccaaaacgagagggagttgacccatagtgcgggcattgcgctgtgtcaatgtgtatataagcaagcgctgtaagcaaaagaaatcacttggcttcactttcttttttcctctttttttcttttttttaactgttctttgtctaaactcgcgttttataaagtcctgttttagcgtattcagaagtgccgcaaagaagtctttacgagcccaatttgccgaatcagaagtttggaaatggaattgagagaaacgaaacaaatggacgtggtgacaaacttggaaaatgtgagtttaaaaattagacagagacagttaaaaacaacaaagttcaaattttcagaaggctcttcaggcggagttgaagcatcagaaactgttgaccgaacacaacgcactgatggtgaaagtggc

SEQ ID NO: 91948 - DNA, 529 bp, Heterodera glycines
agaagaaaaagagcaatttaccagtgcccgaagaactgtagaaggtgtatttagagacataattaggttagataacgaagcaaaagaattttctttttctgcacataataccatggttgaagcccaaaatataaaaaataaaaaccctgataaacctggtgtaaatttttggcatagcaaattattagatggagttttaaaaattcatgccctatttgacaaaataaaaaaagaagaaaaaaatatgaaaaatattaaaaaaggtatggaaaaatgtctagacagaaaagatttaactatgtgtcaagaattagcagaagaggccaaacaatcaatcgaaatagccaaaaattatcggcaagaaattgggcatatttatcggaccgcttactcgcagcccgatttaggcattggagacttggcaaataaactaaaagaaacaatgcgcaaaaaccaaatacggtttgaaaggcaaagacctcaggaagaatttagggatgaatttattgcttataaaatttaagaaaac

SEQ ID NO: 91949 - DNA, 649 bp, Heterodera glycines
gatatttgttcactgataatgcgagaacgaatgtgtgggaaatgtgcggccatatcgctaagcaaagtggtaaaactgaatgcgaactgctcatggatggttatttctaaaagaaaacaaggaaaaaaaaaattaaaatatacttttagaaaaaataaataaaatatacttttaaaggaatgcatttaaatcaaaaaacacactgttcgatttgtcaatcgctccatcatcgtactaacgcaaatttgtcaacgacctaaacgatattcagaagcaattcatggaagcacaaatgaccttaatgcatcggcaaggaaattgccaaacgtttcggcatacttaacaaggataattaacaagaagtcggccattgtcctaccttcccatgtgagtacagcacataaatgccagtgcaaagcaaagctgaacgaacgttgtgattgaaaggatggccgctgattcctgcagtcaatcccccgaggagctcattttgaagacgcgaaagcgaaagatcattttgattagcaaggcacagagcaacacaataacgattcgagaaggcaaagtcattacacattggagccatcaaaaataaatgattaattaaggaaaagcaagcaaataatatataatttggaaaaaaaaccca

SEQ ID NO: 91950 - DNA, 390 bp, Heterodera glycines
  unsure (1)..(390): unsure at all n locations
gcttaaaagcattgtacagcatacttaaaagctaatataattttcgtatatttttcacaatttatttcaaaaagccaaaaaaaatgattcaattttgaaacgaaatagtgcacaaaagggagggatggttagacgaaaagaggaattttcagaaaagagcgcaccccatctgatattcccatttttccgttccacaactggccaaaggcgactatgctcattgacacgtagttgttcaataaggtacttggactttccacagtaaaatgtggtacaaaattttggaactgtcccgcctcacggcggggcttaaaagcattgtacagcataattaaaaccgaaaataattttcgtatatttttcacaatttatttcanaaaaaaaaaaaaa

SEQ ID NO: 91951 - DNA, 642 bp, Heterodera glycines
atgacctttataatgcctatttttgcttctttcggggatttttatgcttaatgattaggcgcctattttgtgccaatttcgtcatttttggaacctattttcaggattttcggaagattttttttcttggtaaaaatttttggttaatcaattatctcaattatccttatacgaaaaaaaaaactttaaaatatttaatatttcatttacaattaaaatatataaccaacattattttttgattgagttttttgtgttttgctaccaaaaaagtgttaataaaaaatttaatttgcctatttttgcgcctatttaatgcatattttgcgattttttctgcctttttatgtgcctattttgcaaaaaatattttttttattgaatatttattaaaaaaaatcttttatttttacattttcccacagtttgtcaccatctttcaattggtcagctccgcgtgcattttacacagtttgaagccgtcaaatcggcgtcatggccattacacttattatttggagtttgcaaatgggacgcgaatccggcaaatggcggacgtcatttatgacgaacgacaaggtggcaaatttgtaatatgcatgagtttgggacagtatacatttgtatggcgatcagggctgc

SEQ ID NO: 91952 - DNA, 642 bp, Heterodera glycines
cacaaaatttgccacaaaaatcacagttttcacaaaatttgctacaaaaattacattttcaattgccttttaattggaaagaatcggagggcactcgtcaattaacacttttaaatttccatgtactttttcccccatttacaagttcggattcgctcatttgttaatttaatcaatgttttcctctattgttcatttcaatgtcactttttgatttgccattgaccgaccggttgataataataatgcctttctttttgcagtcatttattaatgggggcaatgccattcaatgcccccccccccacttaaagccgtccctttacaaatggcggctgtccttggcgattgaccgccgttttgtgcttcattcattaagggaacaaaacgtagctgctgaagagcacaaatatccgtttattaggataattgaatggataaacaacaagagaaaatacttgggaatgggcgaatatttcttaaaaaatcggtcaaaatttaataatcagtgacaaattgagggcagcaaaaggatattagcaacaacctatgatcacttgaagtgttaattgagtgattagcatgtttttcaactttccaccgttgtcattacgtctatcgcatttcgtccgtgagtgcttc

SEQ ID NO: 91953 - DNA, 589 bp, Heterodera glycines
ctattgtggcacgaatgtcctccgatttatgttcccctctcattagccaacaacagcaacaacaattcgtggcacagcctttggcccataatgttcaacagcaagtgacgaacactgagttgggcgctaatttattagtcaacgcaattgctgctcagcaacagcagcagaaccaaatggggccttttctggaactgttggccaatttgaacacatcgaatcaatcaaccgcatctgttcaccaaccgcttcctcagtttaacagtcctttggccgactctcaaagttcgtctttgatcgatgggtctgcggcactgaatgcttttcagttggtacaacagacggcacagcttaatcaccaaaaaatgctggttgaacaacaacagcatcagctcatttccgctgcaacaatgtcaatcaaatcgcctttgagttcgcaaagtgccgtttttgccggttccgaaggtggcattcctgcgctatttaatcgattgtccgcagtgccatcaatttttcgttcgatgggtccaagtcactccaagccaattccgttgctggatgaacaaatggatctgctacagtttaagcg

SEQ ID NO: 91954 - DNA, 455 bp, Heterodera glycines
tgcttgaccacgtgacggacgcggccaataatatccattcccacaatgacgacgactctctgctgagggcgtacattcaggaatgggagaattactcccaactctgtcggtaccttcccctgcccttcaatttcatcgagaaaaatctcgtaaaaacgccttcacgaccaaagacggagtcgcaaagagttcgcaatgttatgttggactattttttcagacatgtttttgccgacatttctcagcgaattctcaatgccgcaatgggaatggtcgagcgggagagaaaccgcgagttggtcaactcacaaatgatcgtcggagttcgagagtcatttggtgatttccaaagccaaacataattacaatatctgtttttgtcccggctgcccaatgtttgaattgaacgtcgaagccgaagacccacttcacagttacaaagagcgatttgagcg

SEQ ID NO: 91955 - DNA, 226 bp, Heterodera glycines
aatccgaagaaggaataaaatgacgccaacttttttggaatacatgtttatcgttatggaaaactgaaaataagtgtgccttaaatagtgatgtcagtgctgatcgatcgatttttatccaacatcaccagcgagtcgtttttttttatcaccaccaacattattcctccagcgggcaccgcctgattaaatttgatgctcactgctgtggtcccgttccttatca

SEQ ID NO: 91956 - DNA, 96 bp, Heterodera glycines
ctttttgacggctgattagccgatatgtgaagttgatcggaatacaatggcctcacattgccatctgatccacgaaaactaaaaaaaaaaaaaaaa

SEQ ID NO: 91957 - DNA, 624 bp, Heterodera glycines
atttccacctgctgcttctgttgtttttgtgcattgacatcttttgcgcgacaatcgttttgtgttcgccgtccccgcccaaaaagagaacatttccatttggaaaaggtttaggaaattcgctgccaatttcagtgccggtttggccaaattcgttgtcccattattatcaataaccgatcgaacaaaacgcagtcagccggggtgtatggcgcattaacgtgcaatggaagccccgctggtggggtcagagtgaaattatttgacgtcgaccgctggttcgaatcggacgatctgttggccgacggatggaccgctcagaacggcactttcgctttgtatgggtccgcaaaagaggcgacaaaaattgtgcccaaagtgaacatttaccacgattgtaacgacacgaaaatttgtcaacggaaattttcaatctttgttccacttcattttgtgaacgaaggaaaaattccgtcgcaattttaccatttgggaacgattgaattgtcggagaaattccctcacgaacaaagggactgcttacactgataaatcagtgcaataattatattttattaatatgcaaatggtttttttaattcattttgtaaattggcaaagtca

SEQ ID NO: 91958 - DNA, 644 bp, Heterodera glycines
gaagtggaagacgtggcaagtgaaaaatacatttaaagagcctttaatcttgggaaattggcaagggtaaaagttgtttttgtgaccaggaaggaaatccaattcaaatcgaacacgataaaacagtatatgtattgttaagaaactggttttgggcaaccaacattcgtatttccgcaaattgagcgacaccaagcggaggcaattcgctaatttgtaccaaagggcgctggtttatttgatatctagcgattatgaactgcacggaatcctcataacaagagtcagattaaattagacaaatggattaaagaaatatgtttttttgttttaaattagttacaattcaaatcctatgggctggttataaaaagatgcgtttcagatagaagtgcccttgattttgaagcacattcaaatccattggcgctgcaccggcgacgtgcagcgcgacgaagaaattgactaattgttggaaaaacacgcggattctctgcgcagaaaattaagcgaaatgttttttcatacgccaattcctccatttgtttttgttgaggaccggcgacatttgtacgaacaggaattgagcaaattgttggagattgccgactacggcatgcagtacagggcggtcagccacgtgg

SEQ ID NO: 91959 - DNA, 650 bp, Heterodera glycines
tccaaaaaaaatttgaaaaaaataaatttcagataaaaatatatatttccgaaagattaataaattaaattttaaaaaaatgcaaaacctaggctttttaataataacgtacgttctatagaaacctaacagatattctcattttttaaaatacaagaatttagtggataacaaattattatatattattattttctttggttgctgtcgatggtcacagaaatggataaaattgctcattgcttgctggtctgctgtttattaataatttttttttcgattgtacggactatggagaaaatgaaaaatgtataaattaacatttgttgcattaatcatccatcaatagggatgcgatttttaggcaaatgcctaaaatttttgcgcacttaatacttacagttaagcacgaaaaacgcattttccgcttgatttggcgtgtctacgatgacttttataatgcctaactttgcctattttggattttttgtgcttaatgcctatttcgccatttttgacgaatttttcaggatttccggaaaattcgttaacaaaaatgcaataaaaatgaaaaatacaccccctaagaatcgacttgaaaattttttagaaaatacaaccccctaagaattgaaaaaaaaaattcacaa

SEQ ID NO: 91960 - DNA, 653 bp, Heterodera glycines
aatgtccaccttcctgagtccaatctttggttgcgctattaatttcaaagtgtgcgaaatgtttgaagacattttgcagacattgagcttgttctcgggggattataggcgccatcgaagtcaaatgtttttttaccaaaacgaagtgagcaaaggcatctaacgaaagagggaaaagggcagtcaaagagactgacaaaagagggaccattggaggggggaaatgtctcttgcgattggtccgtcccgccccattgcccaagccgacgcagagagaagagcaaatcgcgatgcaattcacctaaatctatttgtttggataatattgaaaataatcatttcgtaaaatgtttatttttatgtcttttggaatatagatccgcgctcatttgaggaccgttctgttcacgaagtcgttgaacaatcccagtgttttcgttgattcttttgcaattccaacgaacatcggctccagaaaagttggcatgaaaaaaatatccgagtttattgaaggaagcaaaattagtaaacctaaacgaaaatcttaaaaataatagagcttgaatttttgtgaattgcataaattcttaacgccaagaaatgcatttaaactctaattcctaatcagcccagcctcactcaccaattgacga

SEQ ID NO: 91961 - DNA, 250 bp, Heterodera glycines
actgcttctcgtcaatataattgcttatgagctcaatccatacaatactttgggaattcgtcggacagccggtccaaaagacattaaagatgcttataagaaattagccttgcaatggcatccagacaaaaacaagaatcccgagtccaaccagcggttcagtgacgtcaaacaagcttatgaaattttgtcgaaccctcatagaaaaaaggcttatgatactttcggcttcccagatgatcaattcgaa

SEQ ID NO: 91962 - DNA, 655 bp, Heterodera glycines
gtcacttctttgctcaatgggaactttcgagtggaagaacaaatggtcgggggagttgagaacggagaagggaatcgcgaagtgatggccgcgtgggccaacctcgagaatgggttccactgatgcgagagagagagagatttctttctttgtctatgtttccgaatgaatggctcaattttcttttgcctttactcagtgttcgcaagcttttctaacatgacaatccaagctaattcaggtttttataataatctcttgcactttgctccttagctgagaattttccatttcgaatatttacgaacactgctttgttttatttgtgctgttctcttctcattttttctcctgttttttcctttgtaagacgattaccaattttatttattcagtaattaacattttacaatttctctatttattgtatttattttttacaaataatcagtttttacttgtttttttttgtagtttttacatagttaagcgtaatatattaccgttaatccatgtttagagcattatctgtcccatcatcttcgaattgccggttttgtttctctgtccttccctcgtctctttctctgtccattgcctttgtccgttgtccccattggctgcttaacattgccaataacatttggtcgatgtc

SEQ ID NO: 91963 - DNA, 302 bp, Heterodera glycines
atttgcttctctcttcgtccatttctctgctctttcatccccatggtcctccgtacccccaatccgaactgctccaactccatttgcgcttgcaacggacgcaccgccgcgcgatgcgttgggcgcggcttaacactttcgaggcgggcgccggcttcaaatcgctgaaagattggggggggggggcacaattagggcgaggaaaaggtaatcaattaattagtctactaattaataacgggaaatggtaagacttctgctaacaaaatgagtgactgactcttgggaaaaaaaaagaaaga

SEQ ID NO: 91964 - DNA, 631 bp, Heterodera glycines
aaattttgatattttaatcaattttattaattaagaaattaacaaaaaacatgaattcatcacataactcattaacttaattaattttttgtgatttttaaatgctttttgctttttgttaaggcctcgccattgccaaggcgtcgtcgccgcccgttgcgcgaattgttttgaatgccgacgagaattggtccacttttcaaacacaagaagaggtgaaagttaaatattgctaatttaacaatttattttttcagggaaaaatcgacatttttgtggtaaactaaatatattttttcgaaaatttttggcattttttgccaattttgaggttttactccacgaaattggccatgcgcttggccttcgccattcgggagacgaacattcagtgatgttcccaatgtttgagcgttctgttggcgaacatgtaaaattaaattaattaatttaaaaattaaaaaaatatttaaataaaattctctaatttatttcagttgccagtcatttcaaatgatgatgtcgagcatttgagagcactttacggtgattaactgctaacaattcattaattattttcttaacatttgtgtgtgtttgaagtgctaattaaaaaatggaaaattctaac

SEQ ID NO: 91965 - DNA, 647 bp, Heterodera glycines
cccattcgcggaacaattggaacgcgaatttcgcgaggcaacgatggctgacaacaacagcaacaaccgcaccgatgaacgcgtggatgagaaattgacggcggagagtgaaccgaaaaaggcagacgaattcgtgaaggaagttggacaagaaccggctgccgaggtttatgtggcacaaattgtggatttgaccaccgaaaaagatggaaagtcagaaaaatcggagaagaccactccctgtgtccattcggttgtgatgcgcggcgtatgtgccggatgtggacaggattttcgtcagccaaatgaatttatcgggaactcggctgctattttcaactttgaacaacagcagcaaaagatgaaccagaccgtgcccatttctggttccttcggtgttgatgaccaccagaaaactgcaaaaaacatctatccgtctttggaactattggaaaaagaaccacgcggagggacactgatgggctgcgtggatggagaggaggtgtgcaccgccggactgccctacccgggctatcagaagccaaagggtcagaagcacagtcgtcactgcgagtggaagcacaaaaatttggtcatccagagtttggttgaacagttggtcgggatgggcttcgacaactgcaacg

SEQ ID NO: 91966 - DNA, 631 bp, Heterodera glycines
attacattcgcacttgcgtccatcatgcccaggagaagggctatcgttgtgcagttttaaatcacattggtgttctgaaaaatgttcagcttacgtcacaacggattttttcttatggtggaaatggtgaaatggaagcgatgttcagagttcttgccaagttgtacccgcgaacttatttcattggcattggcttcagtatgggtgccaatgtgctgactaactgtttggcttctggactcgatccttctatttcttcgcgcattcttctcggcatttccgtttgccaaggctattgcgcttcggatgcttcttcccttttattcgattggcaaggcgggcgacgtttgtacaattacataatcactgaaagtgttaaacgattacttcgacggaattacgcaatggttgttctgccccatgtgaagtcgggattggtggatgaacgaaaaatctggtcgtcgacttcgcttctttggcttgacgaattttacagtcgtcgggtgcacaactttgcttcagtttcggattactattcccatataagctgccttccacgcattaaagacataaagattcctatgattttcatcaacactttggacgaccccctcgtgcccgaagctctttg

SEQ ID NO: 91967 - DNA, 647 bp, Heterodera glycines
cttttgcttgttttgcaactgttaatcccccaaattgttcggatgatgtgagtgccaacgaatccctcctctgattttccattttcccccgcaaattcggcacgccgtcctttttttcccggcatggacaacgaattttcttcgctggaagaaattttcgcccaatttttcccgggccaacaatgctccgccgccggcagcagcaattggcgttgggacagaaatttggcagaaaatttgcttctggagaagactgttcgcttcaaagaggatggcttctgtgtgcagtttcacccacttttttcttatggtacggccgcggtttggggcgaatgcgcactggacgaattggtacgggcctattgggaggtggcggaggacgaaatgtacggctcgtcaatgatgttcggtcttggcacacgggatgccctccaatcggtgccgttcggttatgtggatttgatcggtggcgttggccaactcggcgaccaggcttacggactgacgcataacggctttgtcacccatgcctgtgagagtcgaccattctgtgagcagctgcgaacaatgaacgacattcattgcacatgcactgttggcattctgtttgatggtccttccgcgcggattggcttctcattggacgg

SEQ ID NO: 91968 - DNA, 132 bp, Heterodera glycines
acacttccctggtcaaagtgcactcgctgttttccctgctcagtctcaaccgtgcctatgtgactcgccgtgggcgtttgattggcgttgtcgcacttcgcgatgtgagcaaaaaaaaaaaaaaaaaaaaaa

SEQ ID NO: 91969 - DNA, 632 bp, Heterodera glycines
caaatgccttccgctcgaacttctgtacgaaattgtgcctttcatccctgccgaaaatgccgcccctaatgcgctctcgtcctgttcgctgctgcacaaacttttgctgccacgtgtcatcaaatggaaagagaaagcgatggacgaaagaataatcgagctatttgaccaatttaaagaagagatggagcagaaattaatgaacaaattggacgaaattaaagaatttttaagccttgaatttaaccaaaaattcgacgctttggagcaaaaattcgagcaaaaattcgacgctttggaggtgcgcgttggccgcctggagcgaggcactgccacaaacacaaatcaaggaaaaaaatcgctgaacgtccatgaaagattggacctcatctttgaaaaattggggataattcgtgtaaacaaatcgcgttcgcctgaaccttcctgcagcaacactttgcccacatcggaaacagcaaataatacaaacaccggcgggctcgaaaatgacggcaacagaggaggagaaagtgagaaggaacagacgaagagttccaatgacggtgctctgccaccaccaatgcctcctttgcgctcgagtttacagggaaagccaccgcccgttccaacgc

SEQ ID NO: 91970 - DNA, 639 bp, Heterodera glycines
ctaagtgtgggcagtgtggagcagttggaatcggaagacttggaggacattggagtcaaaaagctgggccacataaagcgcatttgcttggcactgaagaagctcagaaattaccgtgccgaattggtcgacccacccttggccgtatgtccgctgctctgtcctccctcttcgtcttcctccgtttgccctttgtcttccgtcgttggcattcctttggacattcactcgtcggcattttcatcagaaaatctgtttgtacagtccctcagcagcaaacgacgcaattcgcaagcgcaacaatcgaacagtcagctgacggcggtggaaattaacgagaaaaattgtcagcgaatttcctttaccaatggcatttcgacggatggcacgcgattaatgagcaaatggacagaagatggcggccaacgagttcaaatgcgaaatgtttcctttgagagggattcgctggacgaaaggacggcgacagacaaaggaccgccacggctgaatttgtacagaaccagccaaatcattgcgcagttgcccagggatcctccgcccgaattagacgaggccgacgaatgggaagacgaacggggcacaaatggactgcacggagatgggcaccatgggcagcct

SEQ ID NO: 91971 - DNA, 481 bp, Heterodera glycines
  unsure (1)..(481): unsure at all n locations
ggcngaannggacccncnnagcaggcgaanannggccacngagaaacgaccgcccngngaagngcaagnngngacncncgcngaagggcgaaangnnaaggaagaancgccgagattttttttcgaagngcaaangatnagcgaactggagccgaaatactctgtgcttcccgcctcagtttttgccaagattttgcagagagttggtcaatccacaaaactaaatctatccggccgtcctgctgacagagatgtccaacttttgagcacatcccgtctttatcatgttgggaataaacttgttgccttcacacctcaatttatggacgtgaggcgttcgcatttggtgtacgacattcgtgtgctaatggacgaatggagttctgaacttcattacatatacaacagttggaaacaggttagcatcagaggacgacccctcgtcctgttgatgatttcagacaacatgctccaaacggac

SEQ ID NO: 91972 - DNA, 653 bp, Heterodera glycines
gttttttattttgtaaaaaatctatgttagcatggaagaagataatgccggagacataataaaatggctctacaaagattcgacaaaattggattgcagcagtgaaaaagtgaaagttacaagcgaacatttgcattccaaactttgccaagtcaaattgcgagggaatctgctcggttttaagccattggattttgcttctgaaccttttctgattgtatgtgaaaaaataaacgtccaacgttcggaacaaaacaaaaattctttggccattcggcaaagcaacaaagaattgcacttggaatttcagtcggagaaacaatgtgaccagtgggtagttaagcttatgacttgctctcatcgtatagtccaagccgaatacgaccaggtcctttacaatcgcttcactcagcctttgcccgcttcgtctctaagccaacaaatggtcaacaatttcgcctactttctcaccgccccttcagtcgtgaacaattcttttctttgtctcagtctcacaattttccctctcgtcaaatcaaatgccaagaagtgatgtacgagagcaaattgtccatggtcgtgccgcgagaaatccttcgactttcgcataaatgggcgacggaattacgcgacgaattattggacaaactttg

SEQ ID NO: 91973 - DNA, 659 bp, Heterodera glycines
cagatagatccatgccaaactctctacatattgtgccaacaatatttcggcatggcttggcgtggtgatgccgtaccgtttttccggggcttcctcgtccgttttttgtttggccgtttttgtccacgggctcggcggttgtttccaactcggacggacagatgcgttccgttcggttctcgttgcagccgctttccgggcaaacttggcacttgtgaatagttaagggtggtgggcaaaatttttccaattctttaaagcattttttttcttccgtggcacatgcgttgagcacaaagttatcatcgcccttctctgatgagagataagaagcattaaaaatgccgccggcggatgtttaaaaaaaataatagtaaatttttatataaattttcacaaagttttcaaaaattgtcggttcccggttccggaggaaaattgaggtcccggtaccggcttcataggcccgggtcccggttttgccaaaaattctcggtccgttcaactttacgtgtgactcaccgtctttgtatcggtaaatttggcattccgacccccctccccttacatccaattttggcacattttggtgccattttgctcatatgactcaccaaaaattttttttcttttaaaaaaaagcaccgtctttgcatcgg

SEQ ID NO: 91974 - DNA, 644 bp, Heterodera glycines
caattattaggcaattgccattttttctaaaaatgtcatattatttcatggtcgtttaatagcaataagtcaaaaaaattttatttagaatcatccttatgccgcccctagataaaattttcagttgccgtctcaaaggaattgaattgaatatttttcgaggggacattgtgatggctgaaacagatgccattgcaattttatgtgacccagactttaagctcaatgcgggtgtcggaagggctatcagaaacacaggtggtcaggacttcatgaattctttaaacgaggagaaacgcaaacagcgtggttcacgtgtgatctctgttcctatttcaagtggaattcgctctgcttctgtgctgttggctcccgtttctggcatggaccgtcattctctcgaccaagtttattctgcaatcatccaaaaagctttggaccttcggattgagagtctttcgatgcctctgcttggaagtttattttcctcacttgataccgcttcaaattatttgtgggcttgccttcagcagttttcttcatttggtcgtttaaagaaaattcaaatcgtggacaccaatgatttccatatgcgatctcttcacaaattcatcattgccaaattgcgtgctcaatcacaactc

SEQ ID NO: 91975 - DNA, 568 bp, Heterodera glycines
atgctccaatcggcggcacattccaatggcataaccaacggcaacaatagcaatggaacaaaaagcggcggaaaaagcggcaaagctaacggaatcggcacaattttaacgacgacaacatcaacaacaacaacaataacaacaacaaccaatggcatttcggctgccgctgtttgtctccaatcgccaagcacttccagcagcggtgttttcttgcactttggccaactcaccgccgtcctcctcctccaccaccacagcgccgtcgtccgcttcaagcgtggcgggcgctggaatggcgcccattttgccacaactgttcgccggcgtcgacccggcgctggtcatgcaactgctcggacttggcccacagttggagcagcaactgttgctgcttgcggtccaggatcggctggctcagcaattcgccataggtggccatgccggcggcattgacttgcagctgtggcaacagttgacggcactcgggttgctcggcggcggtgccggtgccgtcggagtgccaccacaacatcagcagctgcaccacgcactgctcggcggtgac

SEQ ID NO: 91976 - DNA, 663 bp, Heterodera glycines
gtttgagaaacgaccataaagtgctgtaattcaaaatttctttcctaattaaacgaattttttcaacaatggcaaacggctctaccgataaattcagtaaattgccggagttggccaagccgtcactctatcaaatctttgtcagtctcaatttgaatacattcaaattcaaaggcaaacagacgatccatctcgagattacgaaaccaaccaattatttgaaactccattcgaatgctttggatgtggagaaggcttctctgaagttagaggatggcaccgtctttccggacttaaagcgcgaaattgatgcaaaatggacactgctcaccgttcagctgcctcaagagatcaaaccgcagaaagccgagttggaatttgtgtacaatggcgaattgacaaccaacatgaaagggttttacaagtcaacttacaaagacagtgaaggcaatgaaatggctgtcgcctccacccaatttgagagcacttacgcccgcaatgcctttccctgttgggatgagccgacttacaaagcgcagttcgacattaaattggaggtggacaaggccctgactgcactttcgaacatgaatgtcacggaggagaaacacacggagacaggcactaaaacggtcacttttgccaggactccgcttatgtcta

SEQ ID NO: 91977 - DNA, 298 bp, Heterodera glycines
aaagagaaaaacattcacaaaaatggtaataataaagcagcagtctgacccgttattattcggctgtaaatatgacatcatgtgcggcgtcgcgtcattcacaattaatatgtaaaagaacaattaatgcactagagagtgtgtgtcgtttgtgaatcgaaagagatggagagagaaagcgaaaagtgtccatttggtggtcaaaatgaaacaccaaagggtgaaggagtggcggagattgatcagttaagtacacacaataacaacggttatataatataaaaaaaaaaaaaaaaaa

SEQ ID NO: 91978 - DNA, 160 bp, Heterodera glycines
aaatcataaagcaaaaatcattttttttaattttattccaaatttaaaaatcaataaaacgcttttttgaggcgcgctttttccaaaaaaaaactttttgtgaagagggggcaggcggcgccgccaggaaaatttttgaaaatactttaaacttaatatt

SEQ ID NO: 91979 - DNA, 650 bp, Heterodera glycines
attgaattcaataccccttcaatttggctatcatgcaaatcttcgtcaaaactctcaccgggaagaccatcactcttgaagtcgaggcgagtgacaccatcgagaacgtgaaagcgaagatccaggacaaggagggcatcccgccggaccagcagcgcctcatcttcgctgggaaacaactcgaggacggacgcaccttggccgactacaacatccagaaggagtccactcttcacctcgtcctgtgtcttcgtggagggatgcatatcttcgtcaagacgctcaccgggaagaccatcacccttgaagtcgaggcgagtgacaccatcgagaacgtgaaagcgaagatccaggacaaggagggcatcccgccggaccagcagcgcctcatcttcgctgggaaacaactcgaggacggacgcaccttggccgactacaacatccagaaggagtccactcttcacctcgtcctgcgccttcgtggagggatgcagatcttcgtcaagacgctcaccgggaagaccatcacccttgaagtcgaggcgagtgacaccatcgagaacgtgaaagcgaagatccaggacaaggagggcatcccgccggaccagcagcgcctcatcttcgctgggaaacaactcgaggacggacgc

SEQ ID NO: 91980 - DNA, 505 bp, Heterodera glycines
agggatgacattgtccatttgctgtgcaccattttcaacctacagacggcaagaattggcacgctaattctaacaagtgctcggcgaagatttttccttcgaactgaagaaggcactctctggggactttgaggaactgattttggctttgttggaacctgctgctgtttaacatgcgcagaagatgcgccgtgcgatgtccggtctccgcactcacgaatcggttctgattgagattttggtcacgcataggaaccgacttattgctgagatgaatcccgggtacgatcagttgtacggacatccgctggagaacgacatctgctgggacaccacccgcgcatatgaacgactgctcgtgtcgctgtgctacgattcgcgcgacgaatgttggagctctgacccgctcagagcggatacgacagcacgtgctctcgttcaagagagcgaggtggatagcggggtcaacgactttctgttcaagcaagtgctggccaacgaggat

SEQ ID NO: 91981 - DNA, 649 bp, Heterodera glycines
taaacgaaccaaaatttaatttaaacccgggttatggcgataaaaccgggttaagaactagggttgcacccccgaccccgcccccgaccccgaaccccgacagttttggccattttcggggaaaaccccgaccccgaaccccgacgcttccaaccccgacaaccccgaaccccgacccttaaccccgatcggggtcggggttaaatatacacccttaagaattgcatttttgtaagaaaaaaatttcaaatttatttaaacattttgccaatttttaaattatctatatactagtacttagatcaacaaatttttcttgtttctgtacttttctggttgatatgtatgtactttttctaatttagataaaatgtctgaaatatggttcttttataaaaaatcgcaaacatcggaaacggctttatgtaacctttgtcacaattctttttcgtgtaagaaatcgtcgactaaaggattgtgggatcatttaaagatgaagcataatgacgaattcgagcaattggaaaaaaggaaaggaaaaacaaacaaagaagtaataaatttagaaagttctattatttttaaaattatttaggggcaagaaaacaaaattacgaaattttttcaacaatctgatcaacaaaaacaa

SEQ ID NO: 91982 - DNA, 634 bp, Heterodera glycines
ttgctgggtgtgcacatatcaagtcggagtacgtcgtattacgaagtgaaacgcaacagcaagaaggaggcaacaaaccaccaaatgaatccaatccattggaagggaattcgcacgagggaattctgccaagaaatgtgagggcacgcggaatggaccgccaaagagagcaaaaaatggccaaggcccgagcggaaaaccgtcaaaaaatcgtaagaatttgtccgtcggttctttttgagagcgaaggaaggaagtgcaaatatggagagaaatgcgacgcggagcactcgctgacaaaatattgggcgaagaaaccgccggacattggcgagttttggcacccaacgccaaacaccatctttctttggaaggtccgtcctgctttttgttcgaccaaatgggcaagtgctctttctcattgagctgctgtttcgcccgagcccatacgaatgagtcggatttgagccagaagagcaaagcggggcactcggaatggcagtccgttctcaacacgcacactttgcccattcagcaacagctcagaaaacgcacttacgacttttctcgttctgaacgtgctctgcatgaatcaccatcgggttgtatggaacgcgaagcaccgaagtgggac

SEQ ID NO: 91983 - DNA, 545 bp, Heterodera glycines
ggaagaattgttgctggattggtttactgaatggaagctttgaagtgacaattggagaaaaatgctgacaatttgttggaccactgaaatgaaaccaaaactgggcctttcctccgttcgtcgcccttccgccgacctttctcttcctcaaatgttttgtctcttcacaaccgtttcattgctctgcttttgctgttcgatcagtttactgatcagtgatcgcatttcgccgtccatcaaatttattgacatttgattagccgtcaaaatctgttggaatttcccctcctcagccgctgctgctaaagctgcagggatggcgtaaatgaatttggtcggcctttctctcgcgccatcgctttgcgaaatgccatccgccgaattgcccagaggaatttcgacgattgacgttggccctacgaccacttccgctcccgaaggaaatgccaacaatggcgttgtaacagttgctgcatttgccactttgatgcaccggcgcaatttcgagtctaacttttgtcccctgggagttgaaccgttcataa

SEQ ID NO: 91984 - DNA, 579 bp, Heterodera glycines
gttcgccaatctctcgtcccggctcgtagcattgctttggttggaaatcagtcaggttacggtattcccctgagcattactacagtaaccgtgccttatactgccaaatattcatgcggaaaaagccgcagccgagtcggccaaacacatcctcggcacagccctgtgaattagcgtattattttttggcacttttcactttgatttgtccctttttcaatttccacttagtgcccaattatttccgtgcccctttttctttaattgtttcgtttggttcacttgctgttcgcatccgctgtccgccatgcacatcgccttcatacagtccgaatcgaattcaactgaaacggcaattaattaattaaagtcacattaagcacccaatgaatgggataggcttaactgttgtggaaaatcaaattggccatcacaaaattgcataacaaagtgataatgaggagagggagcaaaagggcggacaattggacggtcatttcgggggatcaatttggggagaacaaagggagcagagggagcagtgtctggtgaggaacagcaggtcggacaatggcagca

SEQ ID NO: 91985 - DNA, 645 bp, Heterodera glycines
attcaattggccaccccctctcatttcgcctcaaagggccaaattgatcgggttggcctcaaccgtaacaaattgttcgttgccctgcgaaatgcgcgtgagttggagctttggtcagtgcactgtttggtcccgtgctcgtggaagtgccttttctcttacaagttccacgaacttttctatgctcattgtgcactttcctctcaacaaaatgcaattttttcgatggtcgcagcattttttaatattgatggcaattcagcagaggatggcggcatcaaaattcttcgctatgatttaacttacgaaaagctatccgaattcgatttggacttcgattgtgtggacactttcgagggagtcactctcgaaagagtggcaatgggctgcggacagacggaaaatcggctgtttttgtacgaccggacaatggttaccggcgaaatccctttctggcaaatttcgctcgattggacaaaaatgaccttttccatcaaatcagtcccaattttggatggtcatcatttctgtgctcattgcattcgctttcccgttgttttggatggcgacagaagaattattttgcgaattactgaagactttcaagttgtcgtttatgaaggaaaaagtgaacgatgggaggag

SEQ ID NO: 91986 - DNA, 654 bp, Heterodera glycines
gagagattgaccaatcggtggaagggtgatcaatgacaataacactactgtctgatcacagaatgataggcatgaacggaaatgaataaatcacgaatcattcggatgaaaggcgacggttcgccaacgccgccgcgcaaatgcccccgggcgttgtcagccgaatggtgagaatgaagaacagtgttggcaccgggagaagcccacctgtgcaaaaaataatgggcaatttctaaaatgaatagttcccaagtttttacaaataattagagcccggaaccgggatttcgatactgggtcgggattgactttcacattaactcaaaaacttttcaatgaaattttttgtaaaaacacctaagcttacaatttattaattgaaggaaaaattccagcggtgggcatactatgccaaaattccagttttgccaacatagcgccaaccgggattattcgggacgctataacttcgatttaaaaacaaataataaatcattttttctaaattttaacttttaagtctaaagcagaaacaaatattattaaaaagacaggaaaacccaaagaaactgtatttttttgtgcacaattttctattttttccaaaatttcaaatttaaactaaaatttacatttcatttttaactaaatatg

SEQ ID NO: 91987 - DNA, 279 bp, Heterodera glycines
ttagtacttatggggccggttgcgtctcaaacattttgttcggaaaaatatttttttttgatttatccgaaggcgcaaatattaataatttttttcttaaaactcatacgtatgaaaaagttacaagcatttttctaattcggagtgaaattgtgcggggtggaaacatagtgcacccatatcagaaaattgtttttgcatttttatacatttcatttgttttaaatcttttaatatagcccgaatatggaaaacaatcaaataataacgaaacgaaac

SEQ ID NO: 91988 - DNA, 628 bp, Heterodera glycines
caacatttgacagagaacagtcttctaaaccacttaataccactgccatggctctcgaaaatgccgcagtcgcattttttaaaccgaaaggcatgtatcgcatttgatacacattgtcctctgttatgacgccacatttccatgatgtgtcatcactgagtctgatttgcatatatcctgaggataaatctaagctactgtaaaatttgcaacttccgactttttccataattgactctaatctatggagtgggtatcggtcgggtatcattacttcatttaattttcagaaatctaaacatggtctaattccatcatcctttttctgtacaaccacaaaaggtgtaacccatggtgtctcagattcaaccattactcctttattaagcaattggtcaatgtgcttctttaattcatctctgtatttatatggcattcgtcttggcagtgaagaaattggagcttcggttgtcgtgtcaaaatgatgttcgccacctgaaaatgagcctaaatcatattggcttttgaaaatatgtccttaaattcttctaaaagatttttaagtgcttctctttctctttcataatgtcagattttgagaggtcaagccttttgataaaatcttggg

SEQ ID NO: 91989 - DNA, 623 bp, Heterodera glycines
caaataagaattatgaacttgaaaatttttgatgaaaatgccgaataaatggagaaattttgaaaatattgacacaaggtgaagaatggaaattaaggaaataaaatattccagaagtttcaaaccaagctgaaaatatttttagtagctttttcggctgaaaaagtgtattaatatgaaatccaataaatttgggccctaataaaaattttaataaaaagaaaaattgaaaatatatttttttgcctttttttacttaaaaattctaaaaagtattaatagtaaaaaaaggttcattaattaatagagagaacttggcaatggaccgggaaaagactcgtcaaaatatttaaattttctttaattttttccaatgatgatatacacactctttttggtctttaaaagttataagtagagcttggattttaagtttttacttattttttacgggtagtatacttcacacgaaaatcatattttctccgaacaatttaatttaaagcgactttttagcacctaaaacgcctaaaacgggggttaacacctattttggcattttcgaactttagcacctattttggcccttttccagaaatttcatagcaaaagtgcaataaaaa

SEQ ID NO: 91990 - DNA, 575 bp, Heterodera glycines
cgataataaaataaattaaaatttaaatatctaaaaattaaaaaaaaactaaataagaaatttcgttttgcaagcgataataaaaaatagagaatttactaatgcacaaattccattaaatattagcaaaagaatgtaatttaaaatttggtttttacgtcaattttgtattttctacagttttttacaggtgaaaaagaaaatcatcgccttcaaaaaggtgaggaggcgttaaaaaaaataaataattagaaatcgtatataaatgtcaattcaaataaccatataatctaaattataaaagaagaattatcgagtttcttaagctttcgtatatttaaaaatgaaaaaattatttattaaatttacacgaaattattgtttttgatttattttttatcccaaaaaaaacgaataaccacaaaaagtgccaaaattaaatgtcatcttaataaaaacaataacaaattacattataattttactttaataataatatttattcgtataaattttcttgtaaagttatgatttgaataaataaattaactaattagtccataattatggtcgcg

SEQ ID NO: 91991 - DNA, 533 bp, Heterodera glycines
cccatccttaataaggcaaaattgcgtttaaaaaataaaataattttaaattgatttatttatttttatgtttaatgattacagcattgaaaaagcgcaagcgataagtgataaaccgatgaagacaaggacagcctttttccaacctaaaaggaaactcaaataagccaaagtctttaggtttttatgagaataatcgctttaatttgaatattgggcggagaaatgtgtttataaataagattttccaagtccgagccctgctgcttgtgggtatccaccgtaggcatatgttccagagaaacaaaattctcgacacgaggcagagattctcaagcatcgacaattgttgggagcagctcctccccccccctccccgaaaaatgaaaatttaatttcagtttttttaatactaaaactgaagaatatttacagattttttattagaaaaaaatttattttgtaagaacttagaaagacgtaaaaattttagttttttcgagcgggggatgatgcggggaaactaattagga

SEQ ID NO: 91992 - DNA, 657 bp, Heterodera glycines
tgcacaataatcccgacctcgtgatgccgcctaaaccctccgacaaagaaaaagctatggctttctacaacattgacttttccctgtccaatcagcttcgtttggctggacaaagtcccggttcttcagtggactcgcttagtcctaacaaaagtcaacaaaaagactacatgcaacgcaaaaaggactttatacggcgccgaaggtgtcaagcagaccaagacagggcctctaaagtcatctctaaggaatgtccaaaatggcacaagatgcacatgaaatgaatcaatccgtggagaaagaaaacgacgccaatttacgcccagttattggctggaaagagaaaatggagcagcacaaaccgcgattggactattcggacgtattcgacgctgtcgctggagcggatgctggtctttgggtttgggagattgagaacttttatcctgtgcttgtcgactcgggttttcatggtcaattctatgaagctgactgttatttggtccttaaaacaactcgggagacaaacggagcactgacacatgccatttattattggattggtgaaaagaccagcctggacaaggccatgtgcgcggcggtacacgcagtcaatttgcgaaatcatttgggagcatcttgtcggacaattcgtga

SEQ ID NO: 91993 - DNA, 659 bp, Heterodera glycines
attcccccacttcatcttcaaactccactgttcttgtcgcactgtttaaagcactccccgaagaattatacagtcataaacttaaaattggcgaaaacagacgaactgaaatcgaagaagaattggcgaggcatacggaaacactgctctctaaattgtttcatttgtgctctttggatacttctttgtctgaagaaaatggatttcgaacgaaggtttctttttttttctcctttagcattttcaataaaggccgtcgactgcttggcttcttggctgctgaacccccgttgtcctgttgccgtgctcactcgttcccctttcttccgttcggttctttccgtgctcagccaacccaacacttcgcagcatttgcacgacgcggccacagaatgtgcggttaatgcgttacaattaatcgacgattcgaaagttgccttgacaatgagcggagagctgagcgaatttgcccagcttttgcagcagagcatttttgaaactgccgacgtatttcgattggccatgcgggaagaagactcagaaaagctacaaaatttcactcgcctttacgctgaacagtccaacgcatttctttctgcgatggccaataattccccgcagggatttggcgatttgcgaatgttggatatgcttttgat

SEQ ID NO: 91994 - DNA, 469 bp, Heterodera glycines
cagccgcgcggcgcttggcctttgccaattggtgttggtcccgcacaacattttgctgctcaaatcgacgcgagacgcgtggcggctgaatttgcgcgacaatgagctgatcgttgactaggcgcacaatctgttgcagacattggcctccatccacgctgtggagctgagcacgggccaactcaatctctgctccgcgcttatccacgactatttggagcgcttccgaaagcggctttttttttttaaccttctgcacattcgccaattgcattcgcttacggtcgctgtgcacaatttggccacttctacggcaaaggaggacgacggcggtgccaaggagagagtgctcaccctgacccaatttatggccaaattgggctccgcctcggacattgacctggtccgtctgctcgactacctggatcagtcgaaactttgcagaaagttgcgcgactttcgtcttcag

SEQ ID NO: 91995 - DNA, 534 bp, Heterodera glycines
aaacaaatttaaaaaacggtcgcgaagcgcccgcccaagcccaacaaaatttgaaaaaaaggcgtgaagcgcccgtctggccccaactaaatttaaaaaactggcgcgaagcgcccgtcctgaggccgcgaagcggccgaatgttcttaataaaattaaaaacgggcgcgaagcgaccgtcttgaggccgcgaagcggccgaatgttcttaacaaaattaaaaactggcgcgaagcgcccatttatgagtccgcgaaacggccgaatgttcttaataaaattaaaaacgggcgcgaagcgcccgttatgaggccacgaagcggccgaatgttcttaaaaaacgggcgcaaagcgcccgtcatgaggccgcgaagcggccgaatgtccccaaaaaaattaaaaaacgggcgcgaagcgcccgtcctgaggcttaacagccggccgcgaagcggccgaatgatcccataaaattatgaaatgggcgcgaagcgctcgtcctgaggccgcgaagcagccgaatgttcttaaaaaatg

SEQ ID NO: 91996 - DNA, 473 bp, Heterodera glycines
agtaacagaactctgaatacatatcaatgtcatttcaaactaaatcctactcagcaacaatacaacttacggatgaacaaagggagcggattaagcaaaacagggaaagggcactgagaatacaggcggaaaaggccgagcagagaattaaacagggtccaactgcagcagcaagtcaacttcttccccacgtggatggaatggccatttccaacaacaaaccaccaccgctaattggagaaagacttgtgtgccctcgtcacattcaaattcaaccccctattacaacaaaaaattccaattcgccccgaccttcgacgagttctgtgcagaaagtacttgttcaaatggacttttcgctaattaacgcgaatcgctttaaggtgcaatttactccttttaatagtgatgtgatggacaaactcaagtcaattccttcacggtccttcaatgcagacgacaaaacatggtct

SEQ ID NO: 91997 - DNA, 625 bp, Heterodera glycines
cttcattacgcaattgagcgcaataatttggatatggttcgtcttttgatgtggtacggtgccgacatttccttgccattctcgcaatgcccactttgacccgttgcgactttcgctttgtgtcaacccgaattcatcggttcaacattggctttcaagtcgcgtggacgctttgtcaaataaaatccgcttttttgttcgtcagttatgcgcccgctgtttctccatccgatcagcactttcacctgtccattttattcggtttggtggccgctgctggccgtttcaacagaataatgcacaaattacgcgtgattgtcagcttaatttacgtgcgaatggttgctcatctctcgctcagttgctcaaacaaaatgccaattcaagaattcttctctttattgtgcccgtttcgttccgcacctccgaccaattttccgctgcttccgacccaaaaattgttcatgttgaattcccagacagcacattcattatttcgacctcaattatgtacaactcgcaaccgccggccaaggcattgaataacactgtattcagccaaagacacaacagccatttctatgcgtttgaccttagttcttcgaccagttgtgttgaagggctg

SEQ ID NO: 91998 - DNA, 636 bp, Heterodera glycines
gcgagacagagcatttctgactgaattcgctttagacgggcgatccgacgggccgtggcaccggcggacagtccatttggggcggtgattttgaggacgaatttcacccggcactacgacatgacaaagcattcagtcagtcttcgcactttttctgtctgtgcttttacaccttcgttttctgtcttttcaggagtttcgatggcaaatgccgggccaaacactaacggttcccaatttttcatcacaatttgcccggccgaatggctcgacggaaagaacacaatttttggccaagttgtggaggtgattttgtgaatttggatgagtgcgtttcacttttatttgctgcagggattcaacgtggtacaaaagatcaaccaagtgcccgtctataaaaaggtatttcctaattgtaagcgaattttaatttaaaatttaaaatttttagagtgggagaccccgagaagagatttcaatcatttccatttctctgaagagtgtttagcttatataaattcattgctttacaataatgaacgaatgaatgctctcattttgttgggccaatccgaaattatgtttttacttttaaattccaccaaaaataaataaaagtgccacagaatggatgtg

SEQ ID NO: 91999 - DNA, 530 bp, Heterodera glycines
tcgagcataaatgtggccaattcgatgtctccaattttggcattttcgaacatttcccttttggtgggcaattccttggccaaaatgctcaattttgtgtccattatgcgatttttcaaaatctgcttgattcttatcaccgccccgtcttttccctttttcacggcttccaattctttttttgccatttccaaatatttcacctcacaaaatgtttcatttttctttataaattcgatgagattgcccaatgtttgctcaatttcatttttattttcacggacatttgatcaaccaaatacgcctcaacttcaaccaccaaagtgccaaattgccttccaaactcattaatgattgcccgcatggacgacagcaattcggcattactaaagacgggaaaaggtcaaatttggcatcgctttccgccggcgttaggccgtggaaaattttaacgcagaaatcctacaaaataagaatgccaacattaggaaaaaagaaaaaactatgccagtttttgatttattcctttt

SEQ ID NO: 92000 - DNA, 565 bp, Heterodera glycines
  unsure (1)..(565): unsure at all n locations
gctcttcgctttgcccgccggcgctttaattggctcttacgcttttggcgcgttgaatggttttgaacagattcatgccattggcgcgttcacttcatctctctgttgtgtcggagcaatttcgggcctttcttctcaacactctgcccgaattgggaattctttaggttttaacagcaaacattattttaatgacctgttcaattaggaatgattggagtcagtggtgccttactgaccacgctgggcacattgaacccggacccgcagacattgagccaaatgtgtgctgccatcgcttccggttccctcatcggctcaatcgtcgccactcgcataaaagtcaccgatttgccccaattggtggcactttttcacagttttgtcggaattgctgccacgacgacgtgtgtcagcaattacctagccgagttttcgcactttttggccgaccccgcangcacggctgcggtgaagacttgtctctttttgggtgcttacatcggtggagtcactttcaccgggtctttgatggcctatggaaaattgcagggttattattttt

SEQ ID NO: 92001 - DNA, 645 bp, Heterodera glycines
caaacacaccgctagttacggcacgtaagaccgggaacgaaaccaccatccccagtcagtgtgttatgtgcctgctgctacgtccgtggccgtgatgagacgacgtggtagggcccgtgcttggcctagcacgtggcttaagactcaatgagtgtcagctcgggcaccgccagctttttcttttttttcattatttttttttacacttctgttgaagaatgaattctagtcttatcggtggatcactcggctcgtggatcgatgaagaacgcagcaaactgcgataattagtgcgaactgcagaaaccttgaacacaaaacattcgaatgcacattgcgccattggagttacatccattggcacgcctggttcagggtcgttaccataaaatgcactgcttgtgcgttgcttcgtgggatcatgtacttgtacgtgttcttacgttacttgcttagctcggctgtggggttttggtgtgctggcgcgaacttgtggttctaattcgcgttttacggaccgtaactcgggcgcaccaatgctttgcatgctgtggcggagtgcctggattactggcattcctgctttgatttttcgacctgaactcagacgtgaacacccgctgaacttaagcatatcagtaagcg

SEQ ID NO: 92002 - DNA, 631 bp, Heterodera glycines
tcatgcattttctgtccgtcccttggaaattgctcttcgccacaatccctccgaccgattattggggcggttgggcctgttttactgtgtccattttaatgattggcctgctaactgcggtcattggcgacttggcctcacaatttggctgttgggttgggctcaaagacgcagtgacggcgatcagtttcgttgccttgggcacttccgtgccggacactttcgccatttaattgtcagctgttcaagacaaatacgccgacaattccattggcaacgtgactgggtccaacgcggtcaacgttttcctcggcattggcatcgcgtggacattggccgccgtttaccattggttccagggctccgtgttccgcgtcgacccggggaccctcgccttttcggtgaccattttttgcatcgaggccgtcatttgcataattgtgattgtggctcggagacataaggccattggcggcgaattgggcggtccgcgcaacttccaaatggccaccagtgcgttcttcgcctgtctgtgggccttttacattggcatctccgccctcgagtcgtactgtgtcatcgccggcttttgaaccactcaattggcactctctcactctgtccgtccgtt

SEQ ID NO: 92003 - DNA, 541 bp, Heterodera glycines
agcttaaaaagaatgaaaaaagcttatttaggtagaaaattttttactttgaaccatcacaaagtaaatttttatgcaaaaaattcgtggaaacgttgtaaacaaaaaataaaatgactagtattaagctgcttttagaagttatgcatgttaaggacataccgaaagagacggacgaacgaaaacatattgaaagaatgaataggaaataaacggcacaaaaactgatgacggatgacttctggctaccaaaagcgccgttcagagttccaacgaaagccggcggcattgggagaagcggcggcactcgaacaagagtcggcatcttccggcgtcttctgtccattggaattgggcgaagagttcggtggagagtcgatgcacggtggttctgtcccttgctcaatctgcggtttgagaaaattgaaaaacaatttgattttataaatttgcttaaacttgccgcgatcaaaatgtcataaagatgaagcagtattaagtcccagttgtccagagtgccgtaaaatgtgacaatggcggc

SEQ ID NO: 92004 - DNA, 588 bp, Heterodera glycines
ccatcagcgccactcacatttcgtgccaccagcagtctccattcgtcatgcgatcggattagtccccatgccattcaagaactactagagttttcccggctgtcgggtcgaatgagacggacggtaattggccaacctgctaattattttgtttccactaacactttccaggccagccccgattcccgactgtccagcagaagtcccagtccgtcctgtctgtccagcggtcgtacttcgccagcaatgtccggcattgtttcccgcctgaaaaccaccaactttttgccgtccaccggtgggatgcgcaaattgagcagcagtccgcatctgctgggtatctgtgaggtgggttttctcctgactcattcattcaatgttaaaattgcttccaggagactgaagaaggcggagatatgcaagacttgctgggccaaggcaacagcgccttctgccccgacacattcatcaccagcagagccaacggcacaagtcggcgtcaagactttcagtgcaatggcaaaagcgcttccgcggtcgtcgttcgcagtgcgcggtccgcctccatgggattgggcaccatcgggg

SEQ ID NO: 92005 - DNA, 526 bp, Heterodera glycines
tcagcttgtactcgcctgcctcccggtactcgaccacctccaacttgcggccgtccggctgcaaagactcgccgttgcggaaccactgcacgtcgggtggcggctgtcccggcttgccggcgcccagcacccgtacacacatttccgcagtctcgtgctcccggacgcgctgccgattcagcccgtccacaatgcgtgggcgttcaatgcccggctcagaggcgcgcacagtgcactcggacaccgcttggccaacactgttcttggccaccgcgcggtactgacgaaagtcgctctccaccacgtctttgatcaccatgcgccactgcgtgtgagttgcgtcgtgttggatggacacacgcgtgccggtcagaatgcggaaactgtcctgcacagtatggaactcgatggtcggctggggaatgccagtcacgctgcattccaacaccacctggccaccgatctgcgcttcctggtccgacagaatgcgtgtgaactgtggtgcttgggctgcaaaatttaaata

SEQ ID NO: 92006 - DNA, 651 bp, Heterodera glycines
agctattaattttttatattgcttatgcttaattgagtttcactgttagactaatgaagacttccttaaaaaccaagaagaagcatctcataaatatttgagtacaaaagcggatctcaatcggtcatgaattttagcgcaaaatatgaaaaatcatttactgtaattttaacataattaattaaattttaaataatgtaacttcggatcattaaaataattattttgcttttaatttgatcactttcacttttcgtacttcgccactaattgcactttttcgtacttcgtctcagtacgacacgaagcatttaaataccgtaaattttaaaaatatcattaaaaatggaaatgaattttcgaatattgaccatatatttataaaaatggaaagaggatcagataaaaatgcaacagtctgaaaaaaacaaaatgttagtgaacaacggaatcgaacccgcgctttaacacaatgcgtattacgcactaaccactgaactaccattgctcaaaatttcgacagcttaattattacctaaatcgaaacacgtgaccatttcatacaaattaccttccagcttctcgctgcacaacttcgtccgcttcacgtcgcattgtgcgccgttcggcagtcgatggtcgccagccgaa

SEQ ID NO: 92007 - DNA, 665 bp, Heterodera glycines
agcagcgctcgttgaccagcagctcttgcgttattcaaattaatgctttaacaaccaaatccgaagcaataaacaccaaaacaacaacaacaatcaaacaacaattttttgttgttcggtcattcaccaacaaatacataatttttttaattgcgtaaatccgtgcatcgcaaattgtgcaaaaaagaagaaaaatttgaggaccgaccacaattttgcgttttatcttgcggcctttgttagcaaaatgctgtcacctgaccaattgcctgacgaggtacgagggatgctaaagccgttcatcatttccaaggagcgtttggtgaaaatcagcgaggacattgagacggaattgaggcagggcctccaggaaggggccaccaccaacggacgcacttccattccgatgctcccttcctatcttccagcccttccggatggaacggagaccggaaaatacgttgccatcgatctgagcggcaaaaaccttcgcattctcatgctgacactgcagggcaaagacaaagagccgataattgccactaataatttcgttgtcccttatccgatcatgaagggcagcggagagcagctattcaatttcattgtcaactgtcttcaaaagttccttcgcgagtttcacttggaggaggccaacctgccca

SEQ ID NO: 92008 - DNA, 306 bp, Heterodera glycines
ttcttgactttttaatttttttatttcttgcggctagtatcttctacaataatttgtcagtttggtcggatgtgcgtcaaacggaaaaaataattaaaattttttgggggaggttgtctgacgggccatgaaactcacatcgccaaaatttcttaagtccatctgcgctcaattggtcgaaaacatagagtgcgccgtcatgttctaacttaactttgtttcgttttgttttaattttttgctgctggtccatattatataatttaaatagccttaatttagtttataaactcattaaattataaa

SEQ ID NO: 92009 - DNA, 649 bp, Heterodera glycines
ctttactgacaaatgagttaaagacttctaattgagatgttcatgttgataacatgagaaatttcggtttgtcttctgatcagcgtccattgatttggagccgaacagacagaaggttttcacacaacagtctcgacccaaatgaagatcccgtcagtggaatagagcgagtttcgtccacatcgacccttttttcaagacgaaggagagaagaacggctgcgagaacaagaggaagtgcggagacggcaatttagtggcagtcggaaactttctgatggcgcatcggaacatacactttccgagaaatatgaaagtctcgactatgaattaatcgagaacgaactttatcgtgctgctgaaaaggataaagggcatcagcgaaaattgttccgacaaacggtcgaccgatggatcgtttgttttttgattggtgttgcaaccgcttcagttgcagcattcattgacgtgctcgtttattacaattcaaagctaaaattccacctcatcatcaacaatttaattcactcttgtgaggagggcagtgtcggcagttcgggttgtacgtggacaattctttgggtttgggcattatacaattgcgctttggttgccgtggcatcgtttttggttatcgttgtctccccagt

SEQ ID NO: 92010 - DNA, 634 bp, Heterodera glycines
ggcgcctattggcaccgccgtacccccccccccctctcccccacaaaaaagctttaaataaatacaccgcaaaaaaaagcggtgtgaaaaataaaataaaaatatcctcgataattggctcagaatcgcaaaaatcggcctttttggacaaaatctattgataaattgtattcaaattttcccaggcggcgcttgtcgtcaccccggtgccgcaaaaaaatctgttcgaaaagcatgaaaatttgttttttaatttatagaaagaagtctcagtctcaggaattttcggtctcgaacagcctaattttgatcatgattttttgttacaaataatttttaccacccattaaaattttgatagggaagaaaattattttctcaaaaacttcgtgcttcgagctttgaaaacttcgggtttttggggcttcgaacttcgtgctttgaaaaaaattgggcttcgccttcggcttcgagtgctaagccgagcttcgcccgtccctcgcatttccttcttcatacttcaaaatctgaaagagattttaagtgttttttgtcacctaaattattatttctaatcagtcatttcagtccataatttgacccaaagtgctttccgacaaaaaaataatacatt

SEQ ID NO: 92011 - DNA, 646 bp, Heterodera glycines
ctcaatatttgcactttaattagccggacaattggcaattaacatgcacaatgcgattagacgagcagatccctccggcgattatgagcttctgcagagagtcggtagtggttcctatggagaagtgttcaaagcccgtgatgtccgctcgggagaattcgctgccataaaaatcgtcaaattggagacgggcgacaacttcgcagacattcagcaagaaattctcgtgctcaaagaatgcgtacatccaaacatcatttcgtattatggcagctatttgaagcgcgacagactttggattgtgatggaatattgcagtggcggctctctgcaggacatttacgaaatgatcggacctttggcagaactgcaaatcgctttcatttgccgagagacattgcacggccttaagtatttgcaccaaagagggaagatccatcgcgacgttaaaggggcgaacatccttttgacgcacaatggcgacgtcaaattggcagactttggaatcgcggcacaaattactgcaacgattgggaaacggaagtcgttcatcggttcaccctattggatggcgccggaggttgcaaacgtcgaacgcagcggtggctacggctcggagtgcgacgtttgggctgtgggaattacg

SEQ ID NO: 92012 - DNA, 648 bp, Heterodera glycines
aaaagataggccactgtttttatgacttcgccaaattccgcttttcgccatgagagtccggaagacgtcgttttcgacctgttcaaattgcctaaccgtgacgaagcgtcgattggcaaattgatttcagttttacgcggctttggccttcagccggacgacccgcggctgcgcggcacaatggacaaaatgcgcgaggcggagggcacacacgcggaagaacacagcgacgcatggcgtcacatgatccgcgagcagttcaaaacctgtgttcatccgtgcattgcactgattacgcgtgccattcgcaatcagttgatcattccgaattggacggaattcacaggaaaagtccgagaactttttgaggagtgccatgcagaaactggtggccaagtggccacttacattccccaattggcacgtgccgacccggaaaagtggggaatggccatttgcacaatcgatggccaacagttttctttgggcgattcgctggcaccgttctgttttcagtccgtctcaaaggcgttcaattacgccatcgttgcctccgatttgggtgattatgtgcactctttcgtcggccacgaaccgtccggtcgattgttcaacgaaatttgtttggacccaaacggaaaaccgcac

SEQ ID NO: 92013 - DNA, 632 bp, Heterodera glycines
aatgtcggaagcagctatttctctgaaaactaaggcgatgcaggaagaagctgaaaaaaatgaacagaatttcgaatttgtatgtgagaatgatggctttcgctattacaaagatgtcaaaaccggtcgccagtgttgtttggactctgccggtttttggtacattctcaacgaagaaaaaggagcttttgagccaatggcatcgaattttgtggcagagaagctagccgaaaagccaaggcggaagcaggacaaaatgcagagcattctgaagaatgtggagcggttcgggatcagatttgaccagcatggaaagccggtgtttccgaagaacgaaaagggtcatttcattttgccaaaggatgagaaagggtcgcccttcttccccgttgatgatcgaacagtgcctatttttccatgggaccacgagaaaggaatgccaacatttcctgtcgatgacacggatgagccaattttccctagaaatgatcagaataagccgattgtgccggtggatgaaaatgatcaaccaatctttcctgtcgacaaaacgggaactttcatttttccggtggatgagtcaaactgtccgatccccgcgctcactgtctatggcacgcgtgttgtaccga

SEQ ID NO: 92014 - DNA, 639 bp, Heterodera glycines
tttatgcctcacaaataattttggtgtgtagctttaaaaattctacgggcccactgttgatttaaaaaaaaattcaatttttggccccaaaacggaaagtacctattacccacttatcccttactttttttttgctttagattagacctgtcttcgttacatatttcgcataccaattgatgtccgcctttctaaggcggagaatgcgcggtttactccgtacgacattctctgctgcgaattcgaccgacacggtcagttcgtttggtggcaccgatgagcagcagcaacaacaattccagtgtgacgaagtggaggaggaactgatgcttatgatgaagctcaacgggcacaaaaatggcgtgggtccttcttctgagtccgctacggtttacgagcagattttgaatggaaagaatgggcggagagttgaaaatgaaccagaagtttattcggtgggaatagcactgcaaactgacagaaagcataatggacaaagaattgactcattcagggcaaaacggggttggatttgccgacgatacatttggataaatttgaaacggaagtgaaagcttgtcacacagggcccgacggaggactcacaaaagttcaacccatacgacaaagagccatcgc

SEQ ID NO: 92015 - DNA, 654 bp, Heterodera glycines
attaattgttacctattttactaatctccatttgaatatggacgaatcttacaaaaatgttcattatggttattggatacgaaacctccatttactccaagaaaacgctccaataccacggccagtcccgtgctattgccgtttgaaagtaaagccaaattattatggtcttgaataccatggaccaatttcgcgcgttgaaactgaaagggtgttatattttcccactcaatcgtttaaatttttagaattactaaaatttagttacttctggaattcggagaaggtgcttttttggttcgcgaatcccatcgttgtgccaatgccttcactttatcgatgaattttgagaacagtgtgctcaattacaaactcttctacgacgcattgtgcggcaaccattatgttggcgaaaaaaggtttgactccattttcgagctggtccaagatggtctgatctgtatgtacgtggaaaagcatgcgagtgattacattgaccaaatggccgattcggcggagtacgaattgagtccctattccttttacggctcatttgtggccgggcagaatttcgtgtcacaaacgcacccccgtgggcacaattggcagatttttacctttaaaataccgacctattgcgacttttgcaggaat

SEQ ID NO: 92016 - DNA, 642 bp, Heterodera glycines
ctttctctcacagacaccgattccttttggcatcacaaacataaaatgctaatggatcaaattatatcggatactttgtgccctaggcaatataaaaggagggccgaatccacacaaatcagtcagaaaaataaaattaggttgggggaaatgacgcttcacaacgtttgctcttttaaattattcaaaatatgaataaaatttaaaaaatgtaagacttttgtacattttttttattctccaacaattctcagtaattaaaaatatttgttgttaattattttaaaattttatccaaaggactccatcaccccaatagttgttaaacgatgcttctcaactgctatttttcatcttaattatatgcggaaaagtctccacccgaacattttgaaaaatttaatttttgcatcagaatttgaggattttattatgcgtaaaatttgtttgaaaattttcgtgtgtttttctttcttttcgttcggtttttaattttcgtgaaaaataaatatttcgttccttttgaaaagcatttttttttttggtttttgcacaccatggtacgggttggtgcggttgctggttcgaaacatgccggatttttttggcattagggcagcgaaaaaactataaatttgcaca

SEQ ID NO: 92017 - DNA, 553 bp, Heterodera glycines
aattccatcgccaattcgtttcgggccaacaaattgcgtcgatcaccaccatcccagcaaatgcatgtctgttcgtttcgatcattgacactgttgctgacgatggaggacaaatggcgagggcggacgaaaacggcacaaaaacaacggtttttttggaaaagcatcgcattgaaggcactttgttccgccaacacttagccatcagtggaggcaaaaaccatttggattcaaacatttacggcccaagccaaaatcgaacatttgcggcttcgcacataacatgaatctacgggtcttattcattcgttctgatgcggtgtttgacttgcacggacatttgggcgccgtcgaccgttggctgctgggcgcggcggtggtggtcacgccacggccggctgctcacgcggcaatgcgccgcagtgagcagcgcctgcttccgctccatttgaatgtgccggcgccgagcgtcgaccgttggcgcgagttgccccctctgttgccggtgatgcgaaaatactttgtccgtttggtggccaatccggcactgctc

SEQ ID NO: 92018 - DNA, 639 bp, Heterodera glycines
cagcatggaggaagtgcgacgccatgggaaagacgctgacagaatttgggtcattttccaccagggggtttacgatgtaacagaattcattgcaaatcatccgggtggcgacagaattctgctggcggcgggggcctcaattgaacctttttggacagtttatcctcaacataagacggacgaagtgatggaaatattggaggaaatgcgaattggatcgttaaggcttgaagatctccaggaaattgaaacccagcaaaaagatgctccgtcgggtgatccttttgctgccgacccgcctagacatcccgcattgatcgtcaacatgcaaaagccatttaacgcggaaactcccccgtcgttgctgatcgacagttttctgacacccaaagaactgttcttcgtccgaaaccacatggctgtccctcggacaaatgaagaaacgcacaaagtgcgcatcgatgggattggtgtggataagcaaattgtactttcgcttgaccaattgcgcaacaatttcgagcccgtttcaattgtttccgccattcagtgcgcaggaaatcgtcgatccgacatgaatgaattcaagaaagttcaaggcttaatgtggacaggaactgcgattagcaacgcacgatg

SEQ ID NO: 92019 - DNA, 651 bp, Heterodera glycines
gtttgagctatacacccgcccccgccgcctccggcgcggcgccaccggtgcctggggatgatgatgaagtggaagaggaatgagcccgcatttgagcggccgctcgaagaatggcgggagcgccgcaaccaacacgcgcaaaacacaattcacccgcctccggcgccaccgcaggaggaggaggaggagcactgggcccaggcatggcctgaggaggaggaggtggcaaagattagcaacgaggaaatggacgatgaagagggaaaattggcgcctgaatctgaattggactatgacgaactaaaccgaggggatttctacctaatcggaggtgtccatgacccgatcaatcttcgttttgaggctgcgatttgcgcgagatgatgcggaacgtgtggcgccgcattgacccttcgaaacgtgccatgttcggcggtggccgctcggccggggtgccttcgcacggcggaggagcgcgtggcgggcgcggcggtggaaacttggccgaaaaatgaccaacgggaaaggacggtttaatttatctgatacatggcatttatattgagcctgcaattgtttcgttgctttatcctttttgaattgattgtctgtttttgatttttaaaaactcagattttttaaaaaaaaaaa

SEQ ID NO: 92020 - DNA, 433 bp, Heterodera glycines
ctcagtcggcactttctcttttccctcacaattttgcatctgttcgccccccttttcgtcgcttctgccctcaatttttactttcttgtgattatttttgtgcgcactatcattgaggacggatcaccgaagcgggcgatcgcaggaaatgcgttacattttttccgggtcacaatggttgcattatttgaaatgattttatgccataaattgcaagatgaattcgagcggggcaatcagcagatatccatcgaaacgacttattttatgattatgatgcccttatgggctctcctcattgctttgtcagtccatgcatgtcgactattttagcaagaaaatgagtaccaaatatttattcgttttacaatttatttcttattctatatatatgtatatgcttattattttttgtataaattagtgaaatgcc

SEQ ID NO: 92021 - DNA, 658 bp, Heterodera glycines
caaatatggaatttcgaaaaaattctcatatgataaatactacatatacccaccatgggcagtggataaaattcaaattgaatccgttgggagaatggaactcaaagcatttaaaatcaaccatacaaatgccaatataacggaggaggagtgggccaatgttcggcactttgtccgagtggttgacaaggaaaatggccgactgttaagcaaagatgaacagatcaatgtgaaaatcccgaacaaaccggacggatcgcttaaattttgggtttatttgctgtacgaaggcctgcgatggcatccgttcattggtaaaacggccatgaagatgatttttgagggcacaaatgtactgtattttagcagctataatagtatatggcacgaaaagaattttacgctgggcaatttgaaaaactgtaacatcacagagcagttgggcaagtcaaatataacggaattcaacattggcattcacgtcatggacaatgccggcaaatacaatgtgacatttgacacgggtggcaaagtgacagagtgccaatacgaaaatccggaaatgccaccatggacagtgcaatacatcgcggttatacttaaaaatgaccctcagcagttaattaagccggaaatcagttgtattccgcaaaatcgt

SEQ ID NO: 92022 - DNA, 643 bp, Heterodera glycines
ccgtcctttcttctgtcgtaattggtgaaattcagcagcagcaatcgccggattcatttgtgccaacatcttttgggaggcgacggcattgttgggtgtgcaacgatgtttggatggacattttgcccctttttgaccatgcccaactcggcctcaaattggcactgatttcgccacgtttcgatgttttagtggacgcccatttcaatggcaaaagcgaattgacaatttggagacaaatcacaattcaaaggttcaaaggaccaaaagcgaaactgtctgaatggatcgatgacaaatgggtggcatttcctttgccggaccgtccgctgcccaacaaaattcgttttaggaaccttcggattgagaaccccgaccattctgtgctcgcatttctccgtgccaatcagcaaatttttgaaaaagccaccaatttatgtttgtctgtttcttcatgcttccatgattgccttttttcattcgtcgacaataatgtccagccgatttgggatgtttttgcctgtgaaatttggccgatttttgcgccaaacattcgccgctttaactttcgcgatggtgatcatttggacaatttgcgtcgccgcatttcgcccacaattctcaccgatctcaacaaccttag

SEQ ID NO: 92023 - DNA, 375 bp, Heterodera glycines
gaacaaatgcaaagcgtttcttccgctgctgctgctgatggccgttcattgagtacgaaagcgggcgcaagcggcgccaatggggaggaaatgggagaaacgccgaaggggcggagacggaaggggacaaaatgaagcgaaaggcaaacaatgaaaggcgaagaaacacatctaattaatgaacacggcgtccggaaactgagctgctgtaccataaaagatttgtgtgtggcgaagtggtctgtgagaaggtcaccaaagggggggtgggtcccaggttcgattcccagtgcatgctattgatgtatttcgatgattttaatgaataaataaaaggaaaagtgaaaaaaaaaaaaaaaaaaaaaaaaaaaaaaa

SEQ ID NO: 92024 - DNA, 268 bp, Heterodera glycines
tgtcggggctccagccaaagtgaactttaaattgatcatagcttaaattcgaataaattataccaaaagtggtttaatttaattgcacattaaagatgttacacatatacgaatttggtcaaaactaccttagtatgctggcggttttatgaaacgacattttcaattagcacgctctttcaaagcgattgacccccttccctccccccttttcaataattttattattttttttattcgcaccttccaaaattttataacaccaatg

SEQ ID NO: 92025 - DNA, 378 bp, Heterodera glycines
cgacaaaccaactgaaaatgtgccaaatttttgacgccgaagggcgaaacccgcggaaagacagcgaaagccatgcgcccatttccaccacttattttgcgagtgattccgctggatttgcttcgcctgcggagcacaaagaaggcggagaagacgactcaggactgtccctgacggaggaagaagagaaaatgccggaacagagccgaaaagcgtcttcctcctccgccattcccacctttttggtctagtcgtcgtcctccgtccgtcggaaggacgcgtccgccgtccgtcccttcacctccgttcatccgccgcgttccttcccccaaaaattggccatttccgccacggccaaatcgccgttgagtgtcctgc

SEQ ID NO: 92026 - DNA, 432 bp, Heterodera glycines
atttgagcctgaggccccagcccaattcgattcccaagaaattgtttgaattggtcggatttgccacctttgttcaatttgtcgttgtgctggtatccaacattgcaaagctggtcaaaaaagcgacagaaaagcattcattggcacaaagtgaaggcaatcggcagcaaaaatcgggcaaaaatggattttcctgcaaaatttgctcttcccaaattgccttcggccaaatgcgtcgctccgtctgtttgccctgcggtcactgcctctgttccgattgtctgctcactctctcctcgaaagacttgtccaacgacacttcttcggtcgaatgccccttttgtcgcatcaaatgcccctcaaatcgaattgtgttccctttgaatttgtaattggtcaatttgcttttcaactgagctgaaaatacatgaa

SEQ ID NO: 92027 - DNA, 151 bp, Heterodera glycines
ccctgaactctctgacgtcctcctcagattgcaccgactcggacgcacgtccttccggaagctgaaggataagcgcgactaccgacgacggcgtcgcttctgctcgtggctttacctctccaggttggccgccgccaaagagattccgttt

SEQ ID NO: 92028 - DNA, 646 bp, Heterodera glycines
tgaaaggccccaattgtcgtgctgtctcctgcaccaaaaactccaaatgattaacttttgcatttcggtgaagaaacgaaagcacaaagaaatggaagcgaacgaaacggagaatttgggcggaagtgccaaagatttgccagcaaatcgaaacactgcggacgacgagtttttcgatgcgattgaatcattcgatcaatttgacgtcgccatttcgtcggagtgccctcgggggagaagccttccactcgattcgaatgaatttttaaagagcaatccaaaccaacgaatttttgttccttttactcaggaggagggcccaatgacggaagaccaaattgagcagagagagtcctttctgtgcaatttggaggacgccaatttgaggacgaaggcgcagtccgagctgttgttgtccgacatgcaagcattcaaagccgcaaatccgggctgtgaattggtggattttttgagatggcattcgccaagggatctgacggaagaaggcgaactctctgatcggatgaaaattgctgggaatttttggcaagagacttgggactcggcccgtgcgattcccgcgacgcagcagcaacgcctcttcaacgagacgcgagaagttgagcaaattcttcaatatttcgcg

SEQ ID NO: 92029 - DNA, 411 bp, Heterodera glycines
cccgcagacgccttgagagcaagtgcacccgcctccatgcatttttttttctggcggacagcgcgggaacaatgggccacctggacccccgggagcgccaggagcacccgggcagcccggcaccggaggaggacagccggaacccggagagcccggcgcacctggacccaatggccagcctggacaagccggagagcccggagcgcctggacggcccggacaacgcgaaaacccacggccaacggagacagcccctgcaggcccacacgggagaggctggtgcaccgggacagcccgggtcaggatgggagcccagggaaagataggcggggccgggtaggcagggcagaaaaggactgccgggaagcagcggacaggccaggaattggcgaaagcccagggccacccggg

SEQ ID NO: 92030 - DNA, 631 bp, Heterodera glycines
caattaagcattataatttataatattttctttgcctgtactgataaatgtgtttcggtcgaaaggagaagaaaaagcggccaaattcgcctgcttacgacaaaaaacccgtccatccttctgccgcgggtgtcgtcgtttctcccactccaatcgcgccctcgggcccttcttcggctgttccgccttcgcttgttcctcgtactgctccaacttctgctgctccgagcgcgccgaacaaaaaagccgacctaggcaaagctgtcgtccgtccttcgcgtcctccgggctcgaccaaaccactcaaatcaaccgcaaccacgccggtgggccttccgcatccgaaaaagggcgttagcgcgggaatagatgttccatcttctccgtattcagcggatccaattgattgtgcaaaaacaggcaaatggaaagctgtttctcgtcctccgccgccgtcgtcgggcaaaaaaacggatgcaaaaaccaaagctgtctctcgtcctccgccaccaccggccaagaaaacacataaaggcaaagtcgttactccgccgcatcgtcctccgccttcggataagaaaccattcgtcaaagccaaaactctttcgcctcgttttccgtcactgttcac

SEQ ID NO: 92031 - DNA, 639 bp, Heterodera glycines
cgccgactggcgaagaattggcacaaatcttgctcaaggaggactgcagcaatttgcaaaataagctcgtccatgggcaatggattaatgttttgtaccgacgattgaatgatcaggatgttgagaactcgcaatcaaaaattaacaataagaccaacaaatggatttgtcccttttgcaaacgcgacaatttctcgactcctgacttggtcaatgagcacacgcgccgtggcgattgtcccgtttctccgattggaattcgtgttaaacttgacaacggactcaccggacttgttcccatgaaattttttagcagcgaccaaaacaaaacgttcatggacccaaccaaatttttcaagcctggccaatcgcaatattttcgaatcatcaattttaaccccgaacgtatccaatgcgacctttcgtgtcgctcggaggatttgaagggcgacgagcaacagcaaaagttcgacccgtattttgaccacgtgcaaatggaatctgttcaaaaagcgaagaaaatcaaaaaggcccaaaaggacgatgaaaacaaaaatcgaagaattttccaatatgaatattttgcaaattatacggatgagaaggcagcggctgcaattcgccggatgaaacagggcg

SEQ ID NO: 92032 - DNA, 654 bp, Heterodera glycines
gtccaattaagcattttatggaggaaagcgagaggataattttgtgcagggaaagggaatgtgctcggcgtggcatcgccgttcctccgctttttgtggctgctccgatggtccgttattcgaaacttccctttcggcgattggtttctttgtacggctgcgacttttcctacacgccgatgatttacgctgactgtttcatcaaatcggagaagtgtcgacaggtcgaattcgtaccgtccccttttgatttgccaattgtgcaatttgcggccaaaagggcggaagaatttgcgagcgccgctcaactcgtttatggacattgccgcggaatcgacttgaactgtggctgccccaaaagtgatgtgcgctcggacggatacggctcaaaactcttggaagacccgcaattagtggccgatattgtgcgacagtgccgcgcttccatcgccgatcccgactttaccatttccatcaaaattcgcattcaatacccaatggaaaggacagtcgatttgtgcagaaaagtggagcgtgccggtgtttctcacatcgctgtccatgccagaactgtcagtcagcggtcggagccgccggattatgcggcggtggcactgctgaagcaatgcttgcaagtgccaattttcgctaacg

SEQ ID NO: 92033 - DNA, 497 bp, Heterodera glycines
tctccaatccgtcctttcgaattctgttcaaaaggctttcagacaatcattgtcgcctttccctctcctcccaaatgcacaccgtcgtcccaacgacaagtgattgtgcaacgaatgttcaaaagtcgtcagtgattgggcccatcggacagccaatcgctgcgcccgaatcagtcaaaggaattggcctcaccgacggcggcggggcggcaacggaggcgacgtctgcacggataaagcaatttcccactcctccgtctcgtgacctttgctgtggttcgggctgtccaaactgcgtttggattcaatttgctgacgaagtgatggattatgtgaagagtttgcctttgcacgacggagtggaaaaacagcagaagaaaatggtcggagatgcattaaatcaaaacgttgaggacaaaaattagcgcgtttatttgttaatggaaatacaggccaagggattttaaacgaaggcaaaaataaaaatattattctgt

SEQ ID NO: 92034 - DNA, 616 bp, Heterodera glycines
acaaaattaaaaaacgggcgcgaagcgcccgtcctgaggccgcgaagcggccgaatgttcccgacaaaattaaaaaacgggcgcgaagcgcccgtcctgaggcagcgaagcgtccgaatgttccccacaaaattaaaaaacgggcgcgaagcgcccgtcctgaggccgcgaagcggccgaatgtcccccaaaaaattaaaaaacgggcgcgaagcgcccgtcctgaggccgcgaagcggccgaacgtcccccaaaaaattaaaaaacgggcgcgaagcgcccgtactgaggccgcgaagcggccgaatatcccccaaaaaattaaaaacgggcgcgaagcgcccgtcctgaggccgcgaagcggccgaatatcccccaaaaaattaaaaacgggcgcgaagcgcccgtcctgaggctgcgatgaattgctaaattacatcaatttctagcgacgcggcgaagccgcgtccctgagcgcgaagcgctttccccacagcaacagaactcaattgataatgttttgtatgttttaaaataacaaatgaaggccatatattaccaagccacgcatgcacaccatagccaactggtcaccctagttatatatacgttatat

SEQ ID NO: 92035 - DNA, 397 bp, Heterodera glycines
ctgtctccatcctccgaatggcccgtacggccactttgtacatggctttgcccatgggggcgcaggacagtccgtacaccctgtccacgctgacaaacctgcctctccttgccttggccagattatgccctgcccactgtgcgaagctggtccaagcggccgcccggaaggacagtgaccaccctgtcagcaaagagatcctggacgaccgagtacgcccgctcgttgtggatgagatcgagacgctattgccggcggacccccaagacaggcaggacacgtcggaagcttaggatccgctagaccagccagacatcctgctagtgagggatgtgtctcacgccctacgcctggtccgattggaccgtctggaacgcctggacgcaccggaaacgct

SEQ ID NO: 92036 - DNA, 647 bp, Heterodera glycines
gtttcatggcatcaatagcaaactcaacaaagctcacaattggctcatttaaaactgtgccacggatgatttctccttttgttacgcgatttggtgtcggtggtttctgtgctccaaatttggcaattgccaatttgacagtgaggaaaagcttcgcgagctgcgcttttcccccggctgaatgtgaagacgttgactacgcttttgaaatgatgagctcaactttgcgctgtggcaacggcgtgaccagcgaaattggcttcgatgtgcaaaatttgggctccaaaaatgcactaattgtaacagacaaaaatgtcaccaaaacgagggcatttaaggaagtcgccgcttcgttcgcccgtctccgtttgtctttcgctgtgttcgatgaagtcaaatgcgaaccatcgcaacaaagcattcaaaaggcaattgattttgcccgagcgaaaagttacgattgttttgtggcggtcggtggcggatcagtgattgacacggcgaaggtcgccgctctgtacgcgagcaattgtgagtccgactttttggattttgtgcagaaacccatcggcaaaggaatgattccgaagcatccgatgctgccccttattgctattccgactacggcaggcaccggcagtgaaacg

SEQ ID NO: 92037 - DNA, 654 bp, Heterodera glycines
gttgtttcacagtcacttcctcgcgcctcccctccccccgtttctgtccatcccattgccccacttcgattgactctgatgcccatttatggtccccctcccccttattctgagactgtttcccgctctgctgctacagtgccatcatcactggacgaaatccaatctcaggcaccgatttggacagttcatcgaccggaatccatcgaaattgtctggcccccgagctatgcggagagtcagcggattagtagcatttcggcgggtggccgtgccttacggtggaattcgcagcggcactccttgggcagctgcgaagttaactccgccacgtcaatccgtggcgttttgcacttgccgtcctccttctttcgaccaccgttgggtggaccacccaataataataggccaatcagcgactgtgccttggcctttcccacagaaataacagtgggaaggtcgacggcaccaatgccgacggagggcaccgccgccgcgggagagacgcgctttgcgaatccatgggcggacagagtccgcgacgttttcctctccctgctgacgcgcattttgctcatctttctgttcattgtgttcaccaggattttgattgcgcagctgtcaccaaatgaggagtaaaaggtgccggtgatt

SEQ ID NO: 92038 - DNA, 558 bp, Heterodera glycines
tcatgccaaagcaatgccaaggacatctggtcagaagtgagtcagctgaagggtctgccgttgatcgtcagcggaaaccgtacggcacgtcaagtgtacggtggcagcggcggctacggaagctgccaagactgttgctcaggcggaggacccggcccggctggcccgcccggacagcccggacgccccggaaaccctggagctcccggatcgcccggacagcccggacactccgtccagactccctgtgagcaagtgcacccgccaccatgcacaccttgccccggcggtcagcccggaaaccccggccccccgggaccccccggacagtccggagcacctggccagcccggcagtggaggaggagccccgcaacccggagagcccggaccgcaaggaccccctggccagcccggagcacccggacagcctggagcacctggacaacccggacagcccgcaacttctcaggaagctggacctgctcctcctggcccaccaggagaggctggtgcccccggacagcccggtcagcctggagcccccggtcagcccggc

SEQ ID NO: 92039 - DNA, 487 bp, Heterodera glycines
ctcggttttcaccagtgatgacgaggaacgtctgacgaaggaagtgttcgaaggtgacaattcgctgaaccttccgcttcacagtgattcacaaccgatcactgaccgcatgacacttcaaacggagctgcagatcactgtggatgatgacgatcagataatgcacacaagtgtttagcacacattgttctggaaagaccttcaaatggcgtggagtcccgacaattacataggcgtcgaacagcttcgcgtgtctccagacaaagagcagtataacgttgacgaccgcaattaccaactgccttactggtccgatgtgatcatcaactaccttgacaatgtggtgacagtccctccagacgtgtacaaaagtacctgcattaacgacgaggaatacttctctgtcgacgaaaaagtttgccatttcgtgttcgactcgtgcacataccaccaaaatcaacctaccatggaatttgcacacgccgac

SEQ ID NO: 92040 - DNA, 433 bp, Heterodera glycines
agacggcgctaagtgaggaattgaatgatcaggaaatacttttaattagtacacgtgaagctctacattgtttctactgccaaaaatcggaagttgcaacaccaacagaagttttgataagaaaagatggcacaggaattacaagaaggcggttccataatttgttgatgctcggccgggacgaacatttattcgaaattgagtttgcgctgactgcgaccattggtgaaaaaatgatattcggccagaacttcgatgggtgcaaaagtgacattgaacaggcaacaagtactctcaaattaattctggaagaagatggcttgaaaaattttggaagcatgatcgacacaaccgtatttctttttttgcgttggaaacagacaaaaaaacaattatttggcatttaattcaaaaaatttgcagaaaaaggatc

SEQ ID NO: 92041 - DNA, 652 bp, Heterodera glycines
caaaataatcgatgtgttcagacgactgacacttcaagcacgccatggccaatgccaccgacggatgtgacaacaccaaatccaattcggccagtacaatcctgttacaatgagcacgaatgctgttctgtatggtcacaaaagggtgaatgtcaacgcaatccgggcttcatgaattcctggtgtaaggccagctgtcagcaatgtcaacctgactatgatctttaccaagaatgtgatgatcgtcatccgaattgccaaagttggaccagccaagggcaatgccaacagaacaaattttggatggcagaaaattgtcgtcaatcatgtggaaaatgccgcgtttcacgtcaacaggtgtgcagcggagggcgcgacagtcagcaaaatcaggatcgcattactttggcaccaccaaagaacagatgcacttcgccaagttgccacaatgaaaatatttgttgccagctttggggcttggccggcgaatgccatcgaaatccgacatggatgggctgtttttgcaaagtcagctgtggtcgatgtattccgcaagactacgattttggcggctgttccgattatcaccagcggtgccgtttgtgggcccagcaaggtgaatgtgggcgaaatgcgtggatgttggaaaatt

SEQ ID NO: 92042 - DNA, 624 bp, Heterodera glycines
tgttccggcgcctgacatgggaacgggagaacgagaaatggcttgtattgctgatacgtatgctccaactgtgggacacactgacaaggaagcatcggcttgtgtcacgggaaagcctattgttgctggcggtattcatggacgtgtttcgacaacaggacgaggactctggaagggcttggctgttttcatcaatgatgaaaagttcatgactaaacttggccttaccactggcttcaagggaaatacattcatcgtccaacgattcagtaacgtccgcttgcactcccaccgttatttgcacatagatggtgcaatttacatcgtagtacatcaatatgactgcgcaatttacaatcctaatggaatccatcccaaagatcttgatgataggaaaatagcaaatggatcaattcgcggctatcctggagccaaggatttgaagccattcaccaacttcatattcgagaactgctacatccttgtgccggccgcttgcgagaaagctattctcttgtggaatgcacatcgtatacaaccaaatgtcattgctgaaacggacaacagaccgacaactccggatgctgatgcaattttgatgaacagaggcgactgtcttattgt

SEQ ID NO: 92043 - DNA, 637 bp, Heterodera glycines
atttgctttaattatattcatgaaaaaaatcgaaaatgctacttctgttgcatcgaagttaacagaactttggtgcgaaattttctcacggcccccgccagaaaatacaaacaaattatgggaagaatataacaaaatcaacagcgagctgcagctgttgaaacttgttcgttgcgatcaatttcaaagacaaagtcggcttgagcaaatcccttctttcatgaattggtgtgtggaaatgggaattcggcattcgggcttggatattttgtgttcaccccacggactttgccttagtgctacagaacctcttgaagagggagcaattgttgccgaagtccctttatcggccattttttcgacggacgtagctgagaatattgtttccctcaagcacattttacaagataaattgcttcaaagcatggagaatgttgctttggcaatttgtgtggctcatgaagttctgcgtgggtcggaaagtcaatgggcagcttatttcactacgttaccatcgaccttcccaactccacttttctacagcgaagagcaattaactgcattgaaaccgtcgccggtatttgaggagtctctgcggatgcatcgtgccattgcccggcaatttgtctatttttac

SEQ ID NO: 92044 - DNA, 124 bp, Heterodera glycines
attttgtcgcttccaaaagtgtctcaaagaaggaatggtgcttgaggcagtgcgcgaagatcgaatgcccgggggccgcaatgggtcggcaatttaccacatgcacaaacggagacatcgtaaa

SEQ ID NO: 92045 - DNA, 313 bp, Heterodera glycines
taagtctgcgctgattgtcgacggagtggcacggggtttaaacgaagcggcacacactttggacaagcgtgacgcgcacttttgtgtgctggccaaaagctgtgacgaggcgtcctttgagaaattggtgcgctcattgtgcaaagagcacatcattccgattttggacgcggaggacaaacccgaactctttcttttttttggccagggacaatacgaccaagacggaaaagcgcgcaaaaccctcggctgatcggtggcggtggtcaaaaactaccgacgggaccaagaggcaaacaatgacttgcaggaa

SEQ ID NO: 92046 - DNA, 640 bp, Heterodera glycines
atttcatcccgcactcgcctctctcttattctacgtcttattcaccaatttcgccccttaaagaacagcaacaagtgaaatgcgctgatccttccgtcgctgacctggggaagacaaacgttggttttgggccgacgaataaatcaattctgaagaatccgacgacacttttcttcaaggaacaacacaaaaaatttatgaaaagcaacgaaaatttagtcgactcggtcaaaaaggcaacggaaactacggcggcgcgaaaggaagcgctaaaaacagttgcatttggactgacaacacgccttgaagataccgttctggcgaataaatctgtgccgtcttcaagccgactcggcaaaactgtgattttctcccatgaagcgcaatctctgcataaaattatattggctcaacaaacagaaattgccgaactcagagggaagatcgaagaactgactgcgtcggatgatcgtcgtcgtggcgaggaacgtgaacaaaagaacacaattgccgagttggcctcgcgtttgggaatggtcgaaagggcattaacaaacatttcaaacaccggtcaaaaatgccatgaagagaatcgtgaaaatggcaaaccaaaagcctacaaatgcactggagcggacaa

SEQ ID NO: 92047 - DNA, 653 bp, Heterodera glycines
cagcaacaaaatcttttaaaattaatttattctatatggaagagcgtcgtcgccgtcaaaatgctctattgtcaaagttcaggaagcgcaccaagacggatttttcatcttcaccaacttcgagcagtatgcctgccaacgatggtgttctggcggagagcaatgtaacaaaaacggataatgattgtggagggagcgacgaggacattcaaattgtggagacggatgaacagcggaaaactcacgacgaattaagacaaaaggctgccgaagcactgatccgtgaggcgaaaaggtcggctcaacgtgcacaactttatggaccacaaggatggtaacaaaatttgattttcatatcgaattggaattgcacttcgcttcggtttaggataaagccgagagttctgaacacaaacaaagcatttttggccaggactctcaaatcagtggaaattcatcggagagaccaacagacggagaaagaagcgaagagagcgcggaaagtgagggaacagacgggggaatgacagagacgaacaaaaacaacagcaaagataggatcgggagaaagaacatatcatcgcctttttgtatatttttggtaaaaaagaacttcagaacgtacactgaaatctgtattttgatattgtgtc

SEQ ID NO: 92048 - DNA, 658 bp, Heterodera glycines
ggcggaaatgtgcgttcgccagatgcaaagtgagggactgtcctttgaggaggcgtgtggccaaatttacatgatggacatcgacggactgatcaccacacagcgcaaaaacattgagccaaggcatttgccgttcgccaagaatttgcccgactcgcagtctctgcttgaggtcgttctgtcggttcggcccggcgcgctcatcggcgcttcgacggttcgtggcgcattcaccgacgacgtcattcgcacaatggccgagcacaacgcacgaccgatcattttcgcgctgtccaacccgaccagcaaggcggaatgcacggcggaggacgcctatcgagtgaccaatggcaccgcgctgttcgcctccggcagtccgttcaaaaatgtcgaattgggtggcaaagtgtacaaaccgggccagggcaacaacgcgtacattttccccggcattgccctcggcgtcattctgttcaaagtgtccaccattgacaacaaactgttccttatggctgcacggatggtcgccgagtcggtgaccgaaaagagtttggccgatggtcgcgtgtttccccggctcaaagaaattcgggagatttccatcagaatcgccatgagagttgcggaagagtgttaccgggacggcacggccaagctg

SEQ ID NO: 92049 - DNA, 418 bp, Heterodera glycines
tctgttgggtatcatcttcacactcatgactctgccatcttggtactccgagatgacccctatcgaacccccgattgcacaaacggacctcataccttccgcggcagcatccaacttgggccgaactgacttgattgaccttctaatggtcctgaccccaacctcataaccacgtgatcacccattcgactgcttgttccgtgcgaatcctcaactgcccccacattgctagagcgcttgcctcccagaagcaagctctccccctggtaccccctgaccgtccagaccacctggacaccccagacagcctgcacccccatgaaaatccagagatcctagacagcctggataacccgctcctacatgttgcccatagattatcacctgcccacgatggcctcttcgtccgctcagccgc

SEQ ID NO: 92050 - DNA, 641 bp, Heterodera glycines
tgatcacttactgtcaaatttacgttccgatcaggcgattttcaactgcttactacgcacactttcggcatttttgcaacgtccgtaccttcgcctatttcaaactttcgttggcgtacggcgatgatcgcgaaatgctttttgttttggcctggcgttggcagaaatattcgctttgcttcggacaggcgcctgtgcccgcggggagcgcgtgggacggacgaaaagcggcgcgacggcgttggaatccgcatgtgctcgtcactcagtcgctcacagaacgtttcaaccgcgacaaggacctgacttggctagttaattacctgatcaacacgcatcgttccctttgctcaatttacgatttcgcacgcacccaaatgcattccacgaaaacggcggcccaagtgcacggcacagaagccgcttttccggctgaactgatgtgccatctcagtgccttggatgagagtaccattcgtctctcatacggctctcggctggccatggaatttcttcttctggacgacaaccgcgtggctgtccgcgactgcagcgtcggttccgcgcgctctatcggcggcggcggtccttcgctggccgacttttggcatttttggcgacaaaaatgtgtgatggcatgt

SEQ ID NO: 92051 - DNA, 650 bp, Heterodera glycines
caaggattaccgtctgtatctgtacaaataccagcaaatcgggtagttctgatcagaatcgactaggaatgggcacagagcgtcggccgtcgtcttttgttttgcgaatgttcaaccatttgtttttactcctttttgttttttcttttttgtttgtttttgttgacattattaacttgaaccgcttgataaggctagcgcgatatttcggccgaattcgatcacattttgttttgccaccgtttgttatccctttctcccattggtccctctcttgtgcccagtgtaaatttgtccaaccaattcacatatgaacagcacaattaccgcctcctctcgtgcctaattggtacggtgtcccacaaggaaggaattgctgcttctgttctatgtccgttccccgggctttaccacttgttaatacgcttgtccttccactgactcgttgtttgtttgttaatttctgtaaaatttgtgtttgttttttttataattttaattaaacagaatttctcttgttctctaccattctcccttttcctcacactctttcctccttttttttgtttctctgtaactctgtgaatatgcgttgttctctctctctctgatcaccgaatgaatccaccaaaaaacaaaagcaaaaaatc

SEQ ID NO: 92052 - DNA, 429 bp, Heterodera glycines
caacagcaacaccgtcaccagcagcaacaccaacaacatcatctgaaagcagcggcatcggcaccgcatttggtggtgacggagacgacgagcagtgccagcaacacaaccacagtaccatcaattacagtaacatcaacaaccgcagaaacaataacaataccgccgccattatcagcatcatcaccaccaccaacaccacaattatctgttattaatagccatgatagtaccaaggatggaggaggaggaggaggaggagaaggtggtgggaatggcgatgcggacgatgaccaccgtattccaataccgtaacgcatgatggacgaatggctaccaccatatgccatttgtgtgtctattgtcgtcgttactactgttgttgattaaactgtaaaattggtataaaaaaaaaaaaaaaaaaaaaaa

SEQ ID NO: 92053 - DNA, 598 bp, Heterodera glycines
caaagattgcaaaattggcaaattgctcatcaaaacgaataaattcactagcgagcccgaactttattatttgcgtttgccaaaaaatatttgcaaatacaaaatctttctgatggatgccattgtttcttctggagccgcggcaatgatggctattcgcattctgttggaccacgacgtgttggaggaggacatcgttttgctttctttgctgatggccgagcgcggagttcattcgttggcttacgcttttcctcgagtccaattgttgacgatttccgtggacaaacagatcaacgagcattaccgaacagtgcttggagtggacgattttgatgagaattgtgttgggcctgattgtgaggtggttcagttggttgcttcggacgacgacccggacgaagacggcgatgacgactcgtcctcttcctgaactgacactttttgttgtacgcaaatgcgtccccacattttgcttgttttcattttcctggttctttcaccactagtaattagagcagctgtttcctacgaaacccattcaggtttttcaactgtttttttatttgtttgtaattgtgagacacggttcattatt

SEQ ID NO: 92054 - DNA, 648 bp, Heterodera glycines
cggcagcaaccccgccttttttcagcagttgatgcaatccttccccggcttcaacagccccgaaattgttgaacagatccgcaacaacatgccgcagctcacttctctcatgaccaacccgcaaatgctgcaggtgatgtccaatccccgcgtggtcgccgccctgcaacaaatccaacaggcatctcaggtgcttcgacaggaggccccacaactttttaccaactttcctggggcggacatgttctctaaaaccttggtggtatggccggccttttcgggggcatggctaacgctgcgagtcaggcacagcctccgacttccgccggtgcgactgaggcgggcccacagccgagtgcccctcctggtcaaaacattccgagtggttttgcggaattgcttggttctctgatgaatttaagcaccacagtgaatagcagtcagcccccggaggagagattccgtgcccaattggagcaactcactgcgatgggattcactgatcagcaggcgaatattcaggctttgttggccagttttggcgacctttcgggtgccattgagcggctgctgggcggtggcgggcaagggaatgccgataccttttgagagtgacgaagtgctttgaatccattcctgaaagagagc

SEQ ID NO: 92055 - DNA, 624 bp, Heterodera glycines
gagaacgcggcctactgctgcttcctcgtgctgctcacccgcgtgatcgtctcatatcgactcacttttctcatcccaatttcgttggtcaccgagaacatgcagcgcgctgtgcgccgtgatgcgatcagcacgcaaaagttgcacttccgcaaaacgctggcccattgttggcacacgccggagggcaaaccgtgccccgaggggcgcccgccggccgagccggagcccgagccgtacgataacaacgtggccgagatgagcattgacgagattgtgaacgggaacaccgattttcccggcctcgtgccgctgatgcttcagtttctgaactcggccgacgtcgacgtggacactcgttgcactgtcagccagtacctgtcatttatccggaagcgcgctcggggagaaatttggacgaccgccaaatggatgcgtgaatttgtccaccagcatccgacgtacaaaaaggactcgcacgtgccggacgagtgcatttacgacatgatgaagacgatggacaagatttcgcgcggggagcactgcgagaagttgttaggctgtttcaagacgaagacggaacagcgtatcccatccgctgtgaagcgtgccgaggaggagatg

SEQ ID NO: 92056 - DNA, 580 bp, Heterodera glycines
cccgtcagctcaaaattgtcaagcccaatctgagcgtcgttcttctggagaaagagagtcgcctcgcttcccatcagagtggccataacagcggagtgcttcatgccggaatttattatgccccgggcagtttgaaggccaaactttgcgtcagcggaatcgatttggcctacaaatacttggaggacaatgaaatcgcccacaaaaaatgtgggaaactcattgtggcccttgacgaggcggaaattcgccgtttggaagcattgttcgaccgtgccaaacaaaaccaatgcaaaagcatcgaaatgattggcgaggatggcatccgtcaaattgagccgcactgtcgcggtcgaaaggcaatttggtcgccgtacacgggaattgttgattggacgatggtcaccagaaaattcgccgaagacttccagagaatgggtgggactgtcttttgcgattggtccctcgagggcattggcccttcgaatgactccgcccatcccttgcgactgatcggtgcccccaacggcgcccaaatcatcgactccaaatttctgatcacttgcgccggtctcttctc

SEQ ID NO: 92057 - DNA, 484 bp, Heterodera glycines
aaaagaaaaaaaacattttcttccaagaaccgccgcaataattgcgaaaatgaacatcaatcgttgggctcacttatgacgtcacttggaaaacggcgaagtttccgagtggccaagaaaacgaaccaaccgttatggacgaagctgaaacgctacatttgcaacgatgtttggatggacactttcccattttttaacaatgcccaactcggactcaaattggcactgatttcgccatgtttaaatgcgctggtggacaaacatttcaacggccagtgtttatggaagaagaagtggggcaaagcaactcataactgcgcggaattactgaatttcttgagaaatgttctttatttttaagattattgagtggaaaaattgatctgatcatttttaatttgcgcgactgtcgccggagttgaataatttatttactcgattgtctgacattttgtttggcaaattattaagagttttgtgcact

SEQ ID NO: 92058 - DNA, 662 bp, Heterodera glycines
tgagaatgaaagggccgccatgctaacatccaacgaaaggctgtcggtgccgctgccccaaaagagagactccgtcgaggcggtccaaatgccactcgtcacccaaggggtcgaaatcgaacggtcggtgcattcggagggccaacgaacggacactccgacggaatgccccgttcagttttgacaaacagtcatttgctcacaaacggcgtaacaccttctcaaatcgtccattcctctcaacgctcgaactgttggccagcagacagaccattgacaaaccctcgtgcacttccaactccaatttggcgttggaagtgagcaaagcgggcattgccgacctgaacaggccactttcccggatggacatcttttattccggttccactgtcactttgacaagccgcatccggcgaagagaagcgacgatcacctcgacaaatgccgaggcaggcggagagctcaccgcttcagccatcgacggcgcagtcgcggcgcccgcccggtcgaccctttttctgagcagtgccggcctcgccgatgtggcgaccgcgcgaacggcaggcggcggaatttcgtccaaatggacgtggcgcattatgaagtccatccgtccgatgttggacctttctctgctgcaaagtcccactttcattctgctc

SEQ ID NO: 92059 - DNA, 646 bp, Heterodera glycines
ctttcatctgctgcttcacctgctgtcatcaacaacgcaacgccatggtgctcttcgcattgctccctgtccagctgatgctcgtcgtcgctgctgtctgcctggtgatcatcacccaatgctgcggcggtggacagaagaagaacacggaagagccgcaagtgccggcggaaccggaaggagcggaagccagcgccaaaccgacgggacagagtgcagcacctggtggaacttcagcagccggtggaacttccgcagcgggacagccagccgaagcctccaagaaatcattagctccagcggggaccggatcgacggtgccttcagcgtacgcggcgcccggcacggggacgaccttgggcgcgacatcgcagaaagcagtggcggcatccggaggaggaacatcggccgtgggcaccgcatcacagaagtcggcagtggcacctgctggaggagcgtcggcgctgggcaccgcgtcgcagaaatcggccgccggaggaactacgtcacagaaatcggcagcggcacctgctggaggagcgtcggcgctgggcaccgtgtcgcagaaatcggccgccggaggaaccgcgtcgcagaagtcagccgctgggggaaccgtgtcgcagaaatcggcagctggaggagc

SEQ ID NO: 92060 - DNA, 641 bp, Heterodera glycines
ataacaggcatatgcttcccgatgctgctaaagagctttacgctggtggaaccgtgaacaatgtaattgatggccttgcttttcattggtattcaccgcctgattgcccctacgaagtgttgtcagaattccacgagaaatatacgggcaaatttttgttagccaccgaagcttgcaccggcgcggcggaacgtgccgaggaaaaggggccatccatgggcaattggactcgcgcattgttgtatagccatgacatcattgaggacatgcgcgattgggcagtcggatgggttgactggaacatttgcttggatatgaaaggtggcccaaattgggtggacaatattgtggatgcaccgataattattagtgcaaaggatgatgagttttacaagcaaccaatgttctacgcaatggcacatttcagtcgcttcattacgccaaatgctgtgcgcattggttccgaatttggtggccatttgtcgtcatcgtcgtacaatgccaacaataaacccattgaatttgtggcattccgtagcccggacaacaagcagcttgtcatggtgttgttctcgtccgtcactcagacaaccaaagtgaaaatccatgacgggaagcggacaattccgctgacaatacca

SEQ ID NO: 92061 - DNA, 660 bp, Heterodera glycines
atttgctgggtaatcgagttaaacccaaggctttaaagccagaaaaattcatgccgccaaaaagggatgaagttgaactgttcgatgaaagtcgcatgattcgatgtgggaaacatttccttgacgctttttccgatgagagtcaaatcactgtgctcaccggagggggaactacacaaattgaattgattcggtctttcgacgaatgcgaacttccggagccaataaagcgtaacatcgaattgaaatagtacactcaacctactccaatccaaaaggcggtcatcccactgatcgcaaacactaaaagggacataatgggccatgcccaaaccgggacgggaaagacggccgcctttttgctgcccatcgtttgccacgtccagaaattggtggaggcgaggggaagcggagttgtgaacggcactcacccagtcgcgctgattgtggtgcccaccaaagaattggcggaacaattatatgaagaggcacgggcattcgctgcggggacctccgtctccgtctgtcacacttacggccatatgccaatggcgctgagtctgcgcgaaaaaagcgacggctgcgacattttcatcggaacgtgtggccgaattcagcaacttgtgtaggagagattattcaattggaacattttggctt

SEQ ID NO: 92062 - DNA, 654 bp, Heterodera glycines
caataagaaatgcacagaacttcaatttatgcgaaactgcaggtgaagtatagtcgtcgtgccaagtttaccccgagggttgctcgcccgtggcgtcagcgggtcatcgcctgggccggccccgacgccttctcacgcgaccgcttttatgaactagactcgtggtacaaagcacggattcagagacccgaactgctgcccaagttgcatatcattgacccggatttaatcgtggacaattactaaagcaaaattcaacgacgcaaggaacggacccttgacattgggtttagaaagaatgaggcggcgcctgccaaagtgacggaggaagcgatgcaaaagttggaagagttgtccgcaatgaaccaattggtcatcgatttggactccgtcgactcgtccgaccaactgagtcttgcggaacatttcaacattttcgaagatttgttcatgccgggcattttcttccataatgttcagtccgttgaagtgaacttcggaggaaacaacccacaacaaaaaatgctgtttggtaatacgattcgcgcctcgactgccgcacatcctccgacggttaccatcggaggacctcggactgaggcgaaggcatttacaacgatgcttctgctgaatttggaaggtctcggccaacaa

SEQ ID NO: 92063 - DNA, 650 bp, Heterodera glycines
cacgcgctcgtccagtctgggtccaatgtgtttctgatacgtactgagccaattctccacgaattcttttatcaattggtcatcttttccttcggtaacatcggttcctacgcgttaaagttaacttcgtctgactgttgtgactctgctgggcgtccgcttcccatccgcgaactgctcgccctttatttgaatgacaatgagcagcgcaacgaaaacagtgaaagtgacgacaccgaagcgcaaataaagacgtcgacaaaagtactgctcgagcacaaggatttgctgtgggacttcttctccattcaaattgttgaatatcattcagaagaagacaaagtgccatttcaaggacatccgaagccaatgttgagtgcgttaccctgcattttggaagggtatttgccccaaatggcgtccatccccgcgcttattaatcatttggcaagaaatgttgattactctgacgaagtgctctgttattcgtcaattgcgcgagcactcagcgattttttcactccttttgtggttgaaaataactttgacgaagaggatacaaaagtgatggaagagcaccgacgaattcagatagtgcttcgttcaattattttcccaactctgaaaagtcgtttccttcccccgtcttc

SEQ ID NO: 92064 - DNA, 657 bp, Heterodera glycines
gccgaaaggacattttcagactgtatttggacaaaattgtgcatggcgacattaacgttacccaattagccaaaggaacgaccggatttactggcgcagacattgaaaacttggtcaaccaagcagcacttaaggcagccaaagaaggggcaaaggaagtggacatggcccatttggacgaagccagagatcgtgttttgatgggacctgaaagaatcaaagggcgactgccggatgaggaagagaactgatacaccgccttccacgaagcgggacacgccatcgtcgcccatttctctgaccattcgaatcctttgcataaagtgaccatcattcccagaggcacttctctcggccatacatcgcaactgccggacaaggaccgtcaccaggaaacgaaagcacagcttctcgctcaattggacgtgacaatgggcggccgtgtggcggaagaattggtttttggccaggaacacatcagcacggacgcaacttcggacttgcggcgcgccacaaaggtggcggaacgaatggtgaaattattcggaatgagtgaccgggccggacttcgcgacttcactgtggaaccgattgaatctgagcaaggcttttgtgtggaaaggggcccgagcaccagcgaaacgatcgaccgggaaa

SEQ ID NO: 92065 - DNA, 573 bp, Heterodera glycines
tggccctttgccttttggccctccccgtcttttccatgtcccaattggaatattttgtaccctcacttccgcccgcgtttaccagccacctgttggtgttctgttacccggtcactctgatggcccagacgatgtccgtgtggattttggtcggcattacggtggaccgcttcatcgccatttgttatccgttcactgtgcgcatccattgcactgtgcgccgtgcccagctgaccatcgttgccattttggtcttttccgtgtgctacaatttgatccgtttttgggagtaccgtatcaacaattcgtccgatggcgacggcaccgacgccaaaaatgagcaaatgccgccggtggtcggactgttgcgcgagaattacctgtacatgttgctctaccaaaacgtggccacaatgctgtcacagtttctggtgccgctctgtgtgctttgtgcattgaattttcaggtggcgagaacaattttggtggcggtggagcaaaggcgagaaatgtgggccgaactgagcgcggcggaacggagagagcacaaaacggccaaaatgatgctaatgg

SEQ ID NO: 92066 - DNA, 566 bp, Heterodera glycines
catccccaataccaacggcttatccatgccgaaattgatgccaaatgccaagaaatgaatgccaagggaattgtggaggaaatttcgtttaagccagcggatgtgaacgaactgcgctacatggaccgctgcattcgggaaagtcttagaatgttcccggcagtgccagtggtcgagcggcaactgcaaaatgatttggcggtaaatgggaaagtttggccccgcggggcattggccgttgtggcaccgattctgattcaccacaatgagcaagtgtaccccaaccattggcaatttgacccggacaatttcctaccggaaaaagtggccaaacgcaatgccttcgattacattccattcagtgggggtccacggaattgcattggtcagaaatttgcaatgctgcagctgaagattgtcttggcacaccttttctgcaattttcgtttttctaccgaagtgccattccttcaaaatttgccagccttagagccaatccttcgtccccaaaacgggcttcctctcaaaataaccaaaagaaagtgcgaaattattatgaacgaaga

SEQ ID NO: 92067 - DNA, 630 bp, Heterodera glycines
atcagtggcgagtctttgctcgtcggatggcttgggaattgggccgattataacggcgtccaaaatttccctacggcgctcactttgccgcgagtgctcaaattggccccgagcagaaactttcttttgacccctccccacccatccgtcgtccaactgagggaaaaagaattgaacatggacgacttccgaacatttaaaattacgcaattgccgaaaaacggtgccgtagaaattttcttcgaaatttactattggcgactgcgaatttacggttcgatagtgctagaaatgcaacagacggacaaaggcgaggagggcaaaatttcattggtggcatcgaaggacggattggaaatgattttgggatggaaaaacggaacacaacacagatacattgagaggaaagccaggccaacttcactgcaaattttcatcgatgtcggatcagtggaagtgttctcggaccaaggcgagtggagttgcaccgcacgcatcccagatgaaggccgagtcgacaatattcgactgattgggaggagcgaagtgctcaactcgcaatcggccaaaatgtggtcaattaaatcggtgactcaaacggacgaaacgacacaataattttaaaaaatg

SEQ ID NO: 92068 - DNA, 453 bp, Heterodera glycines
agcaaaaatgaacccacttggacgagtccagatggactcagcagcgcggaagcgcttgatcgccgacgatgaagaggcgcgatcacgtcaagcctgcgaacgaacatgggcgcctgggcgtttgtgcagccgcgcttcctctccttcctgaagcatgaggaccggcgcttccttatcttcctgaagcgtaagccccggggcctcacttacgcgggccgtgcgccgagcgcgtcgaccgccgccggcaacgaacacacgctcgagtgcgaaaatatgaagatgatggaggccattctgaagaagccgatcaacaatgaggacgaataattgctgggtgattatgaatgtgattattggatggtttcctgattataatggtcctttaggatttaaaaaaaaaaaaaaaaaaaaaaaactcaagggggggaaccggaacccaaatcaaccaaaaaa

SEQ ID NO: 92069 - DNA, 226 bp, Heterodera glycines
tatgttggctatcatcttcgcagtcgtgactctgtcatttttctcctcggagatgagccacatgaacagcaaagtgcgcgaaggacttgaggccttgacgatccacatcaactccgcctgcactgacttgatggacgtgttacgggtcgtgacgcctcggtctaggcccggcgatatccccttgaactcggtcttcagtgccccacgtcaactgcccggacactgc

SEQ ID NO: 92070 - DNA, 216 bp, Heterodera glycines
gttaagcaccgctcacagtcacatcaagtggtcgtagtgtgaagccgtctaagagaaaatttgaagaaaccgagcctaaaaagccaatgtcgacaaagggacagacaaaaactaccactccaaaagcagcgaaaattgcagcgccccatgaaacgacgactccgtccttttctgccaacgatcgcagcaacaattcggcggagaaagtcaaagctg

SEQ ID NO: 92071 - DNA, 602 bp, Heterodera glycines
aatcaatcaacagatgttcagctatgacaaggagaaatggactctcgaggagaaaattcgtttgttggaattgttcattgacaaagacagtggtctttgggaagacagagcaaatgcactccaagaggaattcagtggtaagcgaccgactgactttttcacgcaaacaactgttaaacgtgaattgaacaacatatttaataagcctaaccctgagcaccacatttttggcatgccaacgcatccacgcggcaaggaagcggctgaactttggctgaaacacttccgaagggaattggaagagggacgagagaggcgaaggcaaatgttcatggtcgcaatgcgcaaacaattggacataatccgacggtaccagcaaggcaaactgcccaaagaggagttggatgcccttttggaagaggcacgacaacgggacgcacaacgtccagacaaagagcagtacgaagagaagattaaacaacacatggcaaaggcttatttcgaagatgttaaaaacgtacaccttttaacattgtttcaattgtaagcattcttacatcagtttcttattaattaggttcgtacctttgctgactactttc

SEQ ID NO: 92072 - DNA, 611 bp, Heterodera glycines
gaataacgacccggaacgagcccaagctggggctgttcaggacgacgacgacgaccggcttggccgcgtatcgaaaggcaggaaaacagcgcattgcccaattacggacggaattggccaatgaacggacggcacgtgcgcatgaacgggcggaacttcaaacggcattagcctttgaacggacggcactggccaatgctcaaacggctttggcgaatgaacggacggaacggacgcaggaacgggccaatgctcaaacggctttggcacacgaacggacggcattggccaatgctcaaacggctttggcacacgaacggacggcattggccagtgctcaaacagcattgacgcacgagcgggaattgctatttgaagttgagaatgagcgcaactttttgcgccgcttgttgctcgaatcctttagcgcagcaaggaggcgctcaattgcagggagggcaattacaacaagcacaagatcagcatgttcaccagcctgagtttaccaaattgccgatgtaatagaatgcctccgccgaccatgatcttttttcgcgtgtcttaattggcctaaaatgttgtctcattgttgataaaaaagtgttgtaaaa

SEQ ID NO: 92073 - DNA, 481 bp, Heterodera glycines
tcagctgtttcgaatcattcgagacaaaattctcacctcaaggccaattacggttgctgaatacatgcaaaatagcgccgcttctcaacttggatattatgctggtcaaaatgagatttttggagagcgtggtgactttgtaacttctgccgatgtgactcatatattccgagaattcactggcagttgggatgttcatgacttggaaatgacctcttggaacgaccggaggctattgggcgaactcgggccgggctcgggcgaattgatggccgatgtgcataatgtgctgcgccaatttgatgtattacaacatgtagaagtttgtttggatgaaagttccgagcgtttagtggagcgccaacgacaaactttggagaagaaattaggagaagatttacttagaaccattcgatggtacgattcattggatgatgtaccacaagggttctccctgtgactggccgatgaattcctcgac

SEQ ID NO: 92074 - DNA, 626 bp, Heterodera glycines
cgcattttgtccattttgcaggaggcccaaaccgattgcactgacacagagtgttccacgagcactggcggcgaccccacgggcactgccgggtccaacgttctgctgattgccatggcctggggactgtttgccatgcttatgtttttcatgcggcctgcttcgatgcgttccggcggaaacgatcgcgaaaatggccaaatcgcgggcaaaccgtcgtcagcagcgaacggacacaacaacgatgatggcaatggcccaccgcccggcgacgttttctgaatacagcgaaaggaacggaggagacgaagacgcaaacatggaattttttgaccagcgaatgccttttccgtcgacgatcactccgtccgtccttcgatttgtcctccatcactttccctccctttttctgtcgctttgcctttcctttcgtttcgctgtctcccaaaaaggctgatgaatggcatttttcaactttgagctccgtctcaaaattggattgtttgtctttttgccggtgcttctcccccccccccctttctcccacatttctttctccgaatttcgtgcaaatgttttattccaaaaagaaaaatgattcttcgattaaaaaaaaaaaaaaaaaa

SEQ ID NO: 92075 - DNA, 650 bp, Heterodera glycines
gttgattatgacctacttggtgaggtcaaaacgcatgagctgaaggagaatgggactgaaattgctgtaactgaggccaacaagaacgaatatattgaactgctggtggaatggcgtttcaaccgcggaattgagcaacaaacagtggcatttttcaacgggttcacttcggttttccccctccaatggcttcagtatttcgatgaacgtgagttggaactgctgttgtgcggaatgcaggagattgatgtcgatgattggcagcgacacactgcctatcgccattacgctgttcaaagcaaacaagtgatttggttttggcaattcgttcgctctttggaccaggaaaagcgttcaaaactgctccaatttgttactggtacatgtcgggtcccggtcggtggtttttcggaacttatcggttcaaatggtcctcagctgttttgcattgaacgcgttggcaaagaaaattggttgcctcgttctcatacttgtttcaaccggcttgatttaccgccctatcggtcgtacgaacagttagccgagaagttgacagtagcaatagaaatgacagaaggctttggcaacgaataaaaatggggacaaattgagatatcgactctctctaaataaaatgtgtagtgaccttg

SEQ ID NO: 92076 - DNA, 619 bp, Heterodera glycines
ctcaaagcgagttcatcaccaccaccaccactagagccaccatcaacgccacaaacgttcatattcatccacccgccatgtgttgatcaatttcggcttccaatttccgcatgatttcaaacttggcagtggtcgttacagcaaagtgaacaaaggattttaccgcgaaccaaatcgttattttgcaatcaaaattaccgacttggaagccgtatctgacacattcaagcataactttgtgccccatgaactcaaagtctggcgcgagttgagtcacccgaaccacctccgtttgtacaaggatttcatgaacaatgactttctgttcgagatcatcaacttggctgttggcggtgatatgatcaattatttgcggaaccatggaccggtcaaagaagcggtctgttctggctggatgcttcagctcgtcgacgctttgagttacctgcaccaaaagcgaattgttcaccgcgacttgaagctggagaacatcctcatttttgacagagatgtgatcaaaataactgactacggattctgcaagcagtgctgtgacgacgaactctcttcaaccttttgcgggaccaagtcttacaaagcgccggacatcctgcaaagc

SEQ ID NO: 92077 - DNA, 639 bp, Heterodera glycines
tgcatgtcgatggagaacactccgaaacgggcaaaagcagtgcgtcctccgacaacgaattgcaacggaaagagccgtctccgccgtcaacttcgaagtcatcgatcgccggaattcccaatgattttcccaaattgcccaaatttccgctttctgcgctccctgccgaaattcggcgtcaacaaccgatggtaatgcgacaggcgccggagattccgaagttcgcttcaaaacccgaagtgcccgatggtgggcttggcctcgccggagagtccgaacgaccgaattccgtttccgagacaagcttaaacaccgtttcaaattcggccgatgtttcggagtacggtgggctgtcggatgattcaccggcccctgggggactgatcggaacagttttggatctgttcggcttcaacaaggacggtaaaccaacacccgacgctggtggaatcggaagggcggttggcaatttgttgggcggtagcaattcgccattgcccggcaaacaattcatcaacaatgttctgtacaaaacactgacctccggctccgtgctgccctcctccgcctctgccaatgcttccgccgaccccctcaacgccacttcggccctcggccttccctttcctcagtccgtct

SEQ ID NO: 92078 - DNA, 602 bp, Heterodera glycines
ataatggtggaattttttttgaaaaagccattaaattaaaaatccttccctaatttagtgttttctgtattaatttaatggttttcttactcttactgttgtacatctttccactttatttcttggtgccttttggtgctgctcattgtcatgacactctctcctattacgaagattttgatccgagaatgtcagatttttgctggcttccgcctggacatgatgattgtgtcgaagcgagctgcttatttgaaactgcgggaaaaagttggacaaaagtgtcaaagggttgcactttcaacggcactagggaatgcgctgagcttgaacagaaatgcttaaccgatggtggcaaacttttggtagactgctcagtttgcaattccacctcgtattgtaacgacaaaattccaaacgaaattgttgtgtgtttgaatggaactatgaatgatggcgagaaaaaggacgaagcattcaccgaaattaggtgtgaagatgcgcaatgcttctcagtgcgttgcattgggacggacaattcgacgcttttccacacaaaaggatgtgttaacatggacaaattgtgggatgttaaactgccactt

SEQ ID NO: 92079 - DNA, 629 bp, Heterodera glycines
atttgatgtattctactgtaattgaccctttttcaaagtctgaccccgaaattgggatcagaaatcaatttaaactttacaaaaacaaaagctacgattggcgatccaatgttattgaccctcacaacaacagtcgtttttgttttctgcagccattgactacgtacactccttggatattcgagaccactgatcaaaattttcattaccaacggagcaaaatttatgagcaacgagaaaaattggatgggctaaggcccttagatgaatggatggtctccactttaccgagtcgaccaggattatacattctcttcggattattttctgaggagcaacagcttcgttggctgggaaggagtctttttgagtaccccgaaccgcctaacatcaccaatttgtcgtccaatggcacttattccggcagttccgtcttcaagacatgtggagctgagaaattgcgatggacgacacttggcctcgattacgattggactagcaaagattattcgatggaagaaaaagcactgccgatggaaattaaacaaatttccaaattggtgatcgatgtgcttggttcgttccccctcgtgccggatgctgcgattgtcaattactatccgaagaat

SEQ ID NO: 92080 - DNA, 628 bp, Heterodera glycines
ttttatcgatggtcgtttcaatccatgccattgaaggtgaacaattttgtgccgttgtctgcacaaattcacacatttttgtgcttaaatgcgccaagaacggttcccaatctgtcgaattggcttttcaagtcgatttgacttttccaaatgcggtgaataatcagcagaagttggggaaggacaacgaatgcaatcagtcgattctctcttcagatgtttcagccgaccacaaactcctcgcggtggcaacgaccacaaaacacgtccttctctttgagttgcaatcgctgggaaatgcaattggtggcacttgggaagaaacgaaatgccaaaccattcccaagacaccgaccgcaatacatttttccgcttgcggtgacactcttttggtcggcactcggtccggttctctgctgcaattccgcgtcaatgatgccaatttttgccctggcggtgccatcgaattgctctcccatttctcaatgcttctcgaccattgcctttcgccgggaaggcccaatttccttctatccgccgatcgagacgagaaagtgcgcgtttcgcgctatccgaacacacaaatcatcgaatgcttttgccttggccacacttcctttgtcaattc

SEQ ID NO: 92081 - DNA, 603 bp, Heterodera glycines
ggcgcgttggccagacgaatgctgaacatccaacgcatttatcacactggcgtgatgcattccaaattcatcgtggccgatggtcggcacttttacctcggctctgccaatatggactggcgttccctttcccagaagatggaattgggtgtgatggtgcgcgactgtccctgcttagcgcaggaccttctgtccatcttcgacatttattggcgtgcttctgacgcgaaaacggccacggaaatgcacgcgcaggtgaagaagttggctccagccaaatttaacccacaaaggccgttgaaactgatggacggcgagcagcgattggcagttcatttggcggcatcgccccaggcgatgaattgcccgggaagggcgtgggatttgacgggaataatcgacgcaatcaaaggggcgcggaagagaatatttgtgcatgtgatggattatttcccaatgtttttgtactctcagaatcggaggtattggcccgaaattgacaacgctttgcgtgaggctattctgcgcggagtgaatgtgcggataatcgccgccgcgctgcacttccccaagacggggctgcgcttcctcaagtcgctggaa

SEQ ID NO: 92082 - DNA, 630 bp, Heterodera glycines
ccggcggcggcgacggaggcgtcattgacaaaattgagcagatgttggaggagggcatgtaccgaatcgagtgccaaaagaggcctttccgtgttcggcgaaagggacagccgactgtgtatgtgagcgttgctgacggcggtaataacgcgactccaacaacaacagcggcggatagtgtgaagaagccagtggtgaatgttgtcgttgctgaccaagaggagcgggatgatgatgccatgccaaagaaagcagtcgtgaacgagtacctgaatgtgcccagcagtgtggatttgttgctgcgtttgcggggattggacggcgattgatgaggcgcgcgcccctccccccaccggcggcctttctctttttgacttttgtgcctcccttttgcccgtgttctaatgtatttcttcctgctggctttctctcctcctctctttcactttttttttgttttgtgtgtgtcttacaatattttcctcattttctctgcccttccgtggcttctcattttggcatatatttcccctggtttgatcttttttgtccttttcgccgatcggcagctttttcttccaaaataagcagaaatttgcttgggtttcattcattattaataattacggc

SEQ ID NO: 92083 - DNA, 542 bp, Heterodera glycines
cgattccacaattattcgagcccaccaaacaatgaatggcacaacaatttcaaagagaaatttctgcgtgccatcacttcggtcagctacaaaatttatttcaacgcgaacgcggactcatttgaaccatttgaattggtgaacgaacgaacgcaagaaaagctcagattagtgttggcaaatcaaacaatttggggcagcaatgaatggataatgaagcgatgcccaattggggagacggcggcggcgattcattgggaggatgaaaatttggacgacaatttgaacaatgtcgacttttgtcgttatgctggctttaggtgcattgggccattgtctccgccacaagcagcagaagacgaagaagcgggacaaagcagcgaagaggcatcttctgacaatgaatgacggacacagtaacaacgacaacaacaattatcgccagaagaaatgaattaattaattaagaaatgatcgatcattatgtacatttaagtgatcaaatgtattctatggagaacaattgcaaatacatgtgataa

SEQ ID NO: 92084 - DNA, 637 bp, Heterodera glycines
ccaatactccgtcagtactgctgatataactgccaaaattggccaactccatcatttgggaccttccgaattcgcacagccggccaaagaagtgcgccatttgttggccgacgtggaggaactgctcgagcagatggaactgagcgcgcgcgaaattccttcgagcagttcggaacgctcaaaatacgaaacgcgagtgaaaagttatcgcaatgacaaacgctaattggacgccgaactgagaaaggcaattgaaagggcgaaatcaaacgccgaacgcgacgaacttttccaatgcggcgacggatcagtgagcggtgaccagatggacaaactcattacaaacaccgaacgtttggaacggacgtcgcgcaaaatcgaagacgcatatcgcgtaacggtggaaacagaacagattggagcggaggttctggagaatttggggcagcagcgcgaaacactgacacgcgccaggggacggatgcgcgaggcggacgccgacctgagcagaagcaaccgaatgctatcgcagatgattcgcagagtgattcaaaaccgactgattctgctggtggttgcggtggtgatgatgttctctctactctttctgctctacaaggcactttgaaaaaaactc

SEQ ID NO: 92085 - DNA, 629 bp, Heterodera glycines
cgcttgccttttttctgtgtttcagcgaacaaacgaccaacgtcctaatttctgaaaccaccattctccaaatggctgctccctccattcgtctcatcaccacgtccaaggcgcctcctgcgacgggtcacagccaggcagtgctcctcaacaaccagacgctgtacatcagtggccagaccgggatcgcggcggggtcgacgaatgtggtgccgggtggagcgcgagccgaggcgaaacaagcgatgaccaacattggcgagattctgacgtacgccggctcgtccttcaagcacgtgatcaactgcaacatcatggtggccgacatgagcgacttccaggcggtcaacgagacgatcaagaacttcttcaccgaggacacgtaccctgcgcgcagcttcttccaagtggtcaagttgccgaagagcgcgtacgtcatgatcgacgtggtggcgatcgttcagggccagagctgagctgaagaaccggagaacgagcgcggcagacgaataacagagatgtgcataaacctgtctattgtatatttgcgtgatcaacgttcatatcgatgtattgtccttttctgatcactgctatgtgtatatattgtatgtttgctgtgttgcgcc

SEQ ID NO: 92086 - DNA, 458 bp, Heterodera glycines
ccagccttcaactcaacgcaacatcaacaccagtgcgcgccaagctcgtctacacatttcgtcgcgacaactcatcacttcatcatgagcgacatgagcgcctacatgggatccggccccgccgagcctgcaccgtcgtccggcgccgcggaagcctctccatcgtcaggagtcgcgagcgcctacatgggagcctcgcccgcgtacgagccgccagcgccggagaagtccccggatcagagcgcctacatgtgagaagatgcaacaacgaccggcggatggatggacgaaacctgaagagcgagcgacctgtcagaagatgcaaagataaagaagatgtctcataatcgtgatctgtatttattgatgtattgtacatttgtatgcatatatcatttgctgtgtattatcactttatttccatctgtgttccgaaataaattgaattgatggtcaaa

SEQ ID NO: 92087 - DNA, 630 bp, Heterodera glycines
ctaaaatgcaagagactcacattgttctcgggattgcctcggtgtgctctctgttggctatcatcgccacagtcgtcactctgccatctctgtactcggagatgagccaaatgaacagcaaagtgcgcgacggagttgaggccttccgcgtcaacaccgactcggcctggactgacttgatggacgtgcaagtggtcgtgacgccgccgtcgaagccccgtgataaccccttcaactccatcttccgtgccaaacgtcaactgcccggacactgccagtgcgctggcctccaacagccaagctgtccccctggtccgcccggcccgtccggaccgcctggacagcccggacagcctggaggcgcaggacagcccggacagcctggacagcctggccaacccgctcctccttgcccgccccagaacatcccctgcccacgctgccctgctggcccgcccggccgccccggaggacagggaccgcccggacagcaaggagcccctggacaacctggtacgcccgctcaaggtggaggacctggaacgcctggcgcgcccggaccccaaggacagcctggacagcccggagcaccgggacagcccggcaaggacagcggctactgtccgtgcc

SEQ ID NO: 92088 - DNA, 625 bp, Heterodera glycines
gtttgtgccttctcctccgcaacgctttttgggcgcgtcgttgggtggcggagttcaaccgccttccaagccatcaattgggcaccaatcccaagtcaagaacagtcgcgggaagccaccgccgccgccaactccaccgacggttattcaacagcaaaaagaacaaagtccaccggtgccaaccgcggcgagttcggtagcatctcctcagcaaagacagtcggtgctaacagcggcgagttcggtggcgtctcctcctcctccaccacctcctccgcccccaccgccactgttccaatcaaagccaactctgtcggacaattcagtgccttccaccagcactgaatcaaaggcgtctttcgtcgatccgactaacaataaacgttccgaccttctgcaacaaatccaacaaggcaccaagctgaagaaagtgggcccaccatcaactgaacgaacgcccgtgccaacaaacgcaccgactttacgggacaacatgatggaacagattaagcaagggactaccctcaaacatgtcgatgcatctgatgtggaaatcaatcgtcgttctgtaggaggtggcgttcaggaaattggtgggctcgcaggcgcattagccaaagcgttg

SEQ ID NO: 92089 - DNA, 352 bp, Heterodera glycines
gttaagtcgaacttcaaaaaatgctaactcgttggcactataattggctgtccttcggcttggtgccatttacatgcacgttaatcccacttacacgaaacgggaaacacagcattttgtgaacgacgctaaacccaaagtgatggtttcgcttaacgcatcagaggacgcctcatttactcaggccggctttgatgttaagcatgtgctgtgtgagaagcgatagtgagaggaggcactgaagcaagagcccagctgtgaggttgaacccgcacaaaaggacgacgtggcatgcattatgtacacaagcggaaccacgggaagaccaaaaggtgccatggtcactcacgga

SEQ ID NO: 92090 - DNA, 582 bp, Heterodera glycines
aaacggtgggccaacggatgacggaagtgaacaatcgcattcagcagcagaagacggcgaacagttgcagctgaagccgcaaagtggacgagctgagggcgcagttggagaagaaacggtacgcccaagcgcaggaattgtaccacgggcaaatcgattgaacgcaaagtcacagcggaagcgattgattgtgatgatgagcgttgaccaagtggacattgacatgcgcgaccggtgcagtgccggacaaaaggtgttggcatcgatactcatccgagtcgccctcgccgacgtttttgaggggaactgcaggattttggcactcgatgaacccacaacaaatttggacgaggataaggtgggtaggcgcaattggcactgattgggagagggaatcactttcattcattcataggcactttttgattttggtccaaaaatttcccatttttatggtttctcccctttttcggctaatctgtcctctgttctgtcgcgtttgtcaaacacattccgtttcatgtggaaaacattggcgaaacgttgaaaagtttggtccaaattttaaaaccgacgccgtcg

SEQ ID NO: 92091 - DNA, 598 bp, Heterodera glycines
gcaagcaccaccatcacatcacacacagccgcagcatcgttctgcttcatcattcattcattcatcggttatcgtccgtcacgcgacgcatcatgaggaagttcgcctacttcaaactgtgccaggccgtgctcacttccgtttttctgtggcaaattctctcaacccaccaattctgtggcgaatttgacgagcctacggccttcttcaattccgctgtctcctcttcctctgctggcggccattgcgaccaacagttcacgctcatcggaatggactccaccactggcgaatacggtgccgtgccggacaagcagaagtggcacatgcaactgatggcgagcagcggcggcggacaaggccaaccaattgatgaacaacaacagcaacagaagaatcagatggaggaattttcgtcaaaattgccgactgttggacgtcactgcattccgattgcgttttctctcgtcaacccctggcttcacgacaacaaaagtcatctgcagaaggtcgttgatctgtttgccatccaactgctgtgcggcgtgctgtctctttttggcattgccattcacgtgttggaccaaccgcgctcttg

SEQ ID NO: 92092 - DNA, 581 bp, Heterodera glycines
caacttttaagtgctttggtcgcgaaccgcccggatgataattgaaggggaaaatttcaagaagacaaatgatgagaaggacagaaagaagaagtggtggcaatttccttccggctgcaaattattcgctgaacttttcttccgcgcttcgatggtcgccgtgtgttttgcatttgcttatgccgtgccaactttggacgatttggtgcccttagtcggcagtacttccggaatgctcctcgccttcgtttaccccgccttgatcgatttgttcacttttgtccctcattaccgtgcggaaggacatcgtcaaaaggcttgttttcgccttcttctgaacctttttcttgccagcgtcggattgtttggcatggtggccggtttatacgcgagcgtcagcaatttgataagtcatggatcgaatgaatgcaatgcgatgacgacgactgggacgccaactattatgtggaacctttataatgggacaactttgtctagcagtattcagtgatagcccttctgtttcatttgtaaatatgttgtatttgattgtctgtacataaacatatgaataataaaaa

SEQ ID NO: 92093 - DNA, 499 bp, Heterodera glycines
caaacttctcatcactgcacttcgtgaccaacacccggatgttccgattcacgtgcacacacatgacacttctggtgcaggtgtggccagcatgatcgaatgtgcccgtgcgggtgccgacccgatagacgcggctatcgactcgatgaacggaatgacttctcagccttcgatgggtgcaatttggggtttcgttggaacgggaaccggactttcaccgggttgggaaaatgaccccgttttccccaatacaacgctttattggggaaccggcccctacatttttcccaacccctccaaatgcccccggaacaataaaaaaggggggaactccgaatgtgaaaaaaacaccaaacccccgcggggggaaatttaaaaaatttcattttccgggtttttttctcggggggggggaaaaaaattttcaaggggggaaaaaaattatccccgcggggaatttttctttgaaaaaaaattaaaaagatccccctcccacaaa

SEQ ID NO: 92094 - DNA, 587 bp, Heterodera glycines
cactggctgaacacattgccaaagtgcacttgcagcaaaagccattccctggcggcgttcacgtgcgtctgttgccgaacagcaaaaacaatggacgaccactgattcagtcggccaacatcagcagcaccaatggagaacaacagaagaatctgatcgccgtcgtcgagcagcacttggagcagtacaccaaggacctcgttaaggaagggcagcgcgaggccgaactgttcggtctccgacacattggcgacggcacaccgttggagcagaagcgagtggagcaagcggcgaatgacaacaacgccggagacgaagcgcaaactctggcgaacagtgcggagacgacgagcgaaaagcgcgaagcgatgcacgactggctgaacaccttcctgccgctgcttcatgccaacaaattggacacgcaatgtgccaaccagccccagtccgagtcgacgcggttgttcatggcgttgaaggcgcaggacgacgcgagggagggcaacgacgacggaactgctgctgctccgcatgaattgttgttggccaagcagcgaacgacggtggaggaggagagcagcgagttc

SEQ ID NO: 92095 - DNA, 271 bp, Heterodera glycines
tgttcgcgggattgcctccgtgtgctctctgttggttatcatcgccacagtcgtccctctgtcatctctgtactcggagatgaaccaaatgaacagccaactgcgcgaccgacttgaggccttccttgtccacaccgactcggtctggactgacttgatggacgtacaagtggtcgtgactccaccctccaagccccgtgataaccccttccactccatctttcgtgccagacgtccactgcctggacactgccagtgcgctggcctccaa

SEQ ID NO: 92096 - DNA, 654 bp, Heterodera glycines
ctgtctccttcttcattttgttccccttttgactgcacttcagcaacaatgctcatcagagaatatcgcatcgtcatgccgttcgccattgaggagtatcaaattggccaattgttttctgtgaccgaggcatcgcgacaggagaccggcggtggcgaaggcgttcaaatggtgcgcaacgagcccttcgaaggccaaagtctgttcaatggccgcttcacgtccggacagttcacgcacaaaatcatccacttagatacaaaagtgcctgctcttctgagggcgattatgccaagaggttcgacgacgctgcatgaacggtcgtggaacgccttcccgtactgcaaaacggaggtgaccaacccggactatatgaaggacaactttctgatccggattgaaacaatgcacttgagcgaccgcggcaccacaaaaaatgcactcggtctgtcgaaggatgagctgaacgaacgcaaagtggtgcgcattgacatcgccaacgacaacgagtttctgaaagcagccgacatccttgacaacacccgaccgtcgacattccgttccgtgaacacaggccgtggtccgttggagcagcagtggcagaacaactgcgagcccgtgatgtgcgcgtacaaagtggtcaccgtcaatttc

SEQ ID NO: 92097 - DNA, 600 bp, Heterodera glycines
cgctttcttctgttgtattcatttattttgccgctcttttgaccatttacctgcgttttcccgaattgaggccggaggaacgggcgcatttccgataccctcagacaattgatgacgccaaaaggcttggccgtgtgcttatccattacaaagaccaacatttttacaccgttctttcgggcgtcgccgccatttatttgatacttcaatccttcgcaatccctggctccatctttttgaccattttgtccggttaccttttctcctttccgttggcgttggccctcgtctgtctctgttcggctgccggtgccaccgtttgttatttcctttcgcaaatgttcgggcggagtttggtgatgtattatttccccgagaagttgtcaaagtggcaaattgaggtccaaaaacaggcagacaatctgttcaattacattgtctttttgcgtgtcacccccattttgcccaattggttcattaacttggccagtcccattgtcgatgtccccattttgcccttcttcttcggcactttagccggagttgctccgccgagttttctgtttatccaggccggcaccacccttcaaatgatgtcca

SEQ ID NO: 92098 - DNA, 502 bp, Heterodera glycines
  unsure (1)..(502): unsure at all n locations
ggcctcccactcacttgccattggatttggagctgttcaccagaagcgggacttacaatcgaaattccnagcttagggagacgaattggctggcgaactcatgcatccatttaccacccaattggaaatgttctctcaaaaattggaagattttggcatgaagcatcgggaccaaattcttaaaaattctcaatttcgacggtatttcccggagatgtgtgtgacagacgaagtcgaccctcttgcgtctagtacaggcttttgggccgaaaaacttggagttggcactttttattatgaattggctgtgccaataatcgaagtttgcatgtcgaccacacattttgactgagggctaattaccatctactaactgcggaacctactgatgctgtcacggaaaagaactctgatagtgccgattgcccacgacgacgtgattcgtgccgttaagaagctgacggttctcgggcacggcttcgaattgatcgcacttggcgct

SEQ ID NO: 92099 - DNA, 632 bp, Heterodera glycines
taaaaactcatatttttttgtaaacgtaacatttgtaagattttgataacttaaaacgaaaagttgcgctttcgaatgatacaattaataaatttttggttactgcccggatcccggccccataaatacgctcgggttcaggattcagacagatcgggatttcaatcccaatatactcaaaatttcatttaaatcaaaatttcccctttactttaacaaaaattggttttctgcaccgctgtgtttgtatttcaccgattaatgcatgcgttttgcgttttccaggcccatttagacgttcatttgaagcgcgaggaggaggagcagaaactgcaacaggaaaagaccagcaaaaaggagacgaaaaaggccaagaaaaaggagttggaggaggacgtcattgaggacgaatacgacgactacgatgagcaacttcacagatattgaggacgtttccttttgttcgactgactgactgatttgagattccgactgattcattgatcgattgatgtttggtctgatcattttatttgctgttgcctttggtttctacaattcgtttcatacaaaaaagaaaagtaaattaattcgaaattgaatgatcgaaatcaaaaaatgttgtcggattc

SEQ ID NO: 92100 - DNA, 556 bp, Heterodera glycines
cacggtctcgttccacgagttcatctgaggattcttcaaagccaaacaccgctgttctgagcgggtggacagaccatcgtccatgcggacatctttacaccaatcttattgccattgagatgaagattttggcacatcaaatgatccaatgggagccgcatgagattctcaggcatcacgccgtaaaaatcacatactcatgtgtcatccatcaattttaactcaaaaaaatcatgctggacaccggcagattcgacgaattgaagctgcgggaggaggaacaacgggagcaagcggaggaagacaaaacgaatgaagaaaaagtaatcaagaagctgacgtcgatgtcgttgactgatcgaggattaatgaatgccaacgctgacgccaatgacaaagcgtcggcacaaattggcatggtctcactgctcaaaaaggccaggggcggctcgctggagattgactctgtgggcgaaatggtcgcagtggcgacggaggcggcgatggcactgaacacggcactgatgggacggctgaagcaaatggaggccaaaaa

SEQ ID NO: 92101 - DNA, 454 bp, Heterodera glycines
  unsure (1)..(454): unsure at all n locations
gcgacccgaatccggacagtgcgctggagatggacatcgcgattatctaccgcaacgaccgcgagcagtacaaccgaaatgcccgtgaatggacgcagaagcacgcgatgaaatgagacgacaaacgaccgatggatgggagaggatgcagaagacaaccgccgaagaggaaggaggaggaggatacattcaactgaccctattcccatatatgatcccaactgtacagattgtattattgtatctcactgtatgtacagtatttgtcgcccggttatcgtttaagcgaccataattgtctgttgttggttgatcaccattatcaatgtgttgtatctctgtgttatcatttcaaatgatttgtgattaattgttggcctaatgtgtgtaaataatgtgaagaatccaaagatttgtttgtgaaananaaaaaaaaaaaaaaaaaaaaaaaaaa

SEQ ID NO: 92102 - DNA, 531 bp, Heterodera glycines
gctcaggcagccaagtgcgcggacgacggtttcaagcaggtggagaatgggtgcaagttggagtgcgcacattggctggacgcgtacgcgccgacgccggccgcgggcaaacagcgggacgcgcatccgctgaccaattgcttcgggcgcaacgtgaagatggaggcgatgcctatgaacgaatgcatgcgcaagcgcgtggacaattactgcacgagttcagcaacggcacgaatttcggtgcccgcgccggactacgccggttggatggaacccgccatcgccagcaacgacaccgcctttgagcagcggcacaaaagcgcctttctgcacaaggcgcgtgccgctttcttcgcattccgcaacttccaaaagtgcatgaacaattgcgccaagaaacggtctatcaaatgctttggcgacgaaggttgtgccatttctcttccgtccgaccgtgccttggctaaactgttctataaccaatgcacccagcagcaaaatgtgccgaaaaacgcgcgcgatgcttgctat

SEQ ID NO: 92103 - DNA, 643 bp, Heterodera glycines
gccccttcggcttaattctcctaaataaaaatgtgcttctcaccacaaattgatgacacacgcaccaattgcaaatttgtcttccagcaaccttgtcgatgctctatcaaacaactcgaggccatcaaattcagcaaggtggtaagcggtcgaaacaagagtgtaggatgtaatccgactttttgctgcttttgctgtggcatttttggccttgtgatgttcgttttactgttggtgctgttctgcgtcgcgcaattctctgccccaaattcacctgatatagggatttctatatcttttgtgtccatgatcttaattgtggtggtcattgttctgtgctgtatgtgtggagccgaattcggtcacagttcgttggaagtactgtacaaatgtccgacgtgtggcaaagaaacgcacagaaattatgagtgcttcattgacgtctcttacaactggggccgacgacacggcgatacagaaatgtttcgctaccgtactttcgcgggcagtttgtggggacagtacacgaaaaatgtcacaaaaacgatactgcagaagcggatgaccatgaacaactttgaggtggtggagcacaaatacgatgtgatgagcattgttcaggacaattatttcaagacaaccg

SEQ ID NO: 92104 - DNA, 349 bp, Heterodera glycines
gcacatcgacgcagtcaaagcgtatgggatgtctggcgaagtgtcttatgacgtcgaagcactcgctttaggtgaggcgcatcggtcgctgttcagaaattcgttggagtttggcgacatcaaagagaatacctgcattatggttgagttccgagatccccaattcccaatgcacttcatcttcaaagccaacaggctggacggcatcaaggaattgcctcgtgtgctcaaaccgaacgattgggaccaacgacggcacggctccttccaaccccaaatcggattcagtcgtgacatcccacgtgcaaatctctccatggcgggccatcgtacgctcaaacaccacata

SEQ ID NO: 92105 - DNA, 588 bp, Heterodera glycines
gcaaattgcgtctcgttaccataacaaacggaagagggcaatggaccaaatccaacaaatggcgccaaagacgccaaaattcaattctgttcgctcttccggcggtcgtttggccacaatgtctcctgccgcccgcagtcttttgggcgataaacttggcattcgactgggcactgatcggatcaaagtttctccaagtccgaggggttcggcttcgagaacggtcttcagcccggcaatttatcagatgatcaaagtgaagaatgagcccaagtcgggcgcaacgacgcccaaacgggcggcagcgacgccgacttcgagcagttcatcagttacggacgacctcctgagaattccttcacctggtccttcaacactaatcaaaaacaaagaacaaagagaagcgcagcaaagaaaagtttcggaaacggaagaaacccaacaaaatatggtaaaaaggccatcagccgcggatttcttctgatgtatgaattcaaatctacatgttctcctagcaagtgaaaaagtgacgtattttcaattatgtttttcccatttatttttttcaacgaataaatacagtgatat

SEQ ID NO: 92106 - DNA, 591 bp, Heterodera glycines
agcagcaaatccagcaaggccgtctcgacgcttttcgtgctcaaatttgtgcgccaaaggacgcggcgatgacgcacaatgccacgacggatgatcagatgctgtcgctgtacgacattttgccgtttgacaacccggacggcggggtttggaagcagggatggccgatcacatacgacccggaaaagattcggacagagaaacggctcgaagttgactcgcacaacgacccgggacgtggaggacaatttgttgacggagagtcgcttccatcttctgctcgagcacttcgaccgcttctcctcccctccgtcttcttccgccgaggggacaatcgcttttcattcattggccgcccaccattcgtcacttcgtctccattatccgcccatttcactcgctggacaaatggacgaccccaaagagtttaaagcccgtcgtccatttgggtccgtccttcgccattccttcccctgcaactttcacccggtgactctgcgaatgcttagccatccgacggtttactcgcccaattcctcctccacgcgcccccgggacgaagcggcgctcattttgcaccgatttggcatc

SEQ ID NO: 92107 - DNA, 651 bp, Heterodera glycines
taaagacgccaccatggctatgacgtttatgcttgggaaggacaacggcattggcattgttggtgtctcttctgcgaatgccggaacatcgctgcccattgctaacaatgccatcgctacttcggcgtctgagtcggcgagttgttcctccgtgacgccttcaccatcgccttcaccgattgttgccttcaatgctaccaacgacgctctcaattcatcatcacctttcgtaactctccgtaaacagccgcaatgtcagcagtcgacgccaccgactcagccaatttcgagtagggaaagtgaagcggagcgtaaggccaagtcgcgtctgaagcgttccacccgacgttctacgcagggtgttactttggaacaattgggcgaggtgaatatgcgaaatcattcaccaaaacaccacggacgagcggagattggcaaggaacagaagcaaaggatggcaattggacatgacggcaactgcgaattgcaaatgccggcttctccctgctcgtctacgtcgtcgtcctccgcctatttgacggccgcctctcaccgcgccgttgaccaacataattccaaagtcgaacgcgtcaaggagaattacaatagcactaaaaatgaagctactccatcgccctcttctaccgcttc

SEQ ID NO: 92108 - DNA, 604 bp, Heterodera glycines
gattgcctcggagtggtctcggttttctatccgagtggacatcgtcactctgccatctctgtactcggagatgagccttatgaacagctgattgcgcgacggaatttaggacttccgcgttaatacctattcgacctgtactgactggatggacgtgcaagtggtcttgactgcgccgtccatgccccgtgataaccccttcaacttcatcttgcgtgccggaactttatttttctgacactggcagtgcgctggcctccaaaagctaagctgtaaccctggtctgaacggcccgctctgatcccctggacagtccggagattctgcaggcacaggacgagcgcggaatccctgactgcctggaaaacccgttcctccttgcccgccccagaagatgaccggcgcgcgctgccttgttggcccgctcagccgccccgtatgacagggagcgcccggtaagcaaggaggcccagtagtagctggaattctcgcgcaaggtggaggactttcaaagtcgggatcgattgggaacttaggacagcctgtactgtctggattccgaggagccgctggccaaattttgatgtctggagctaacggtatt

SEQ ID NO: 92109 - DNA, 607 bp, Heterodera glycines
atttggccgtttaatgatgagcaaggagctttatgagcgcaaaatgcgaaaaattgaagcacaaaaagaagagaaagtgccagaaaaattcttcgccaaagttcactactattttaaacgttattggtacatcgctttgcctgtgcatttcgcagtttgcagtgtttggttcggtgcactttactttgccgtcaaaagcggcatggacgtggtggcactgttggaacgaatgcacatgcccgaccattgggtggacaaaatccgaaatgtgcccccgtcggctggcttcgcagttgccgcactcattctctataagattgccactccgttgcgttatgcctgcactttggtcggcattcgtatcgctttcaacactttgcgtcgtctgggcaaattgcgcaccacgcgcgagattgacctgacggtgcgccaacggctcgacctgctcattgagcaccgggatcagaaacggagtgccaaaagggcagtacggcatcagaacaatagcatgaagaggcattcgctgtgttcctcgcggacgaggacaaagttggactaattagtgcctttgaacttattgttgtagcatagagaactgctgaccgac

SEQ ID NO: 92110 - DNA, 505 bp, Heterodera glycines
tccgctgttggacgtcattttgttgcttgatctgctcggatttacactcattttgcctttgattccgtcactaatcgaccatttttcaaaacgacacacaattaaatctgatccaatttttgctgtgtttgattctgttgcgcatggccttaaaacttttctaaacgttccttcaattgaaccaaataatggcgttttctttggaggaattctcggctcgctgttctcatttctgcagtgtctctcatcgcccatttttggctcattgaccgatttgcatggacgaaaatcgcttcttttggttgctgtgattggctcactgatttcatattgcctttggactctgtcatccgaaagtttttcaattttctttgtttctcgactgatcggaggcttaagccacgcgtcagtttcggtagcgatcgcaattgtcactgacgttatgccaacggaagagcggggcaaaggcatggctttaattggaggctccttctccctggctttt

SEQ ID NO: 92111 - DNA, 628 bp, Heterodera glycines
cggcaattaacagaagtcgtccctttgtcgcaatccatgggccaccggggacaggcaaaaccaaagtcattgccgaaatcgttttgcagcatgtcaaaaagggcaaaaatgtgttggtctgtgccccgtcacataatgcagtcgataatgcaatggaggcgtgcaaaatgaatgggttggacaattttgtacgtttgggggaagaggcggacgacggcgcactgagcgaatatcgaattgggaaattggcacaaaaccacgccgaatacgaacgcattgagaaggacattcggaactcacgagaaatcaaaagtcaaagggactttctggacaagtcgcggctttgtaattccatttgaaactttcgccttcagtgaccgacacattcgccgttttcattcgcttttgaggaaaatgggcaaaaggaagaacaaaatctgcgaaagcatccgaaagggcacaagtgtgattttctgcacgtgcacctcgggacaggcactgcgctttctactcaagcgttggttctgccccgacttggtcgtgatggacgaggcgtcccaaatggtccaatgcgccagttggattatgctgcttcacgtcctcccccccccccctttttcacgttctt

SEQ ID NO: 92112 - DNA, 623 bp, Heterodera glycines
ggaaagtggaggtgtatgctccaggattggacggcaacaagaaatattacgtacacgtggagacaaggattggcatccacgggaagccagagagatgtgtgaaccctgacaaggagggatgtggcggcatagggtcgtgtgtccactgcgacatttgccaaacgattggcggttttcgccagttcatccaaatcttcaaaggggataagccggcggaatgcagcgccaaaggccttccccccggcacttatgacaatttgtcgctcaaagtgtgccttcccagcaaagacgagctgttgcccttcctcgaccaaaattcgagtcgggctgaacaactttgggatgttttcgtgagcagtcgcgctcgttctggcggagaaatccctttggtaatcgccgcccgcattttcgaccgcccaatcaacaaactttccatcaaagaactgaacgacgcactgcacaacaccaaaaagggaatgattgggtgccattggatttacgcaactgtgagaagtatcaaccaagactgaccagcgcaactgtccgccgttggctttgcatttcatcggcccattaattcgctcatttttgtccattcacacggaattcgacacgaaactttt

SEQ ID NO: 92113 - DNA, 640 bp, Heterodera glycines
agaaaactttgcaaaaaaaaatggccgacttcgaagggcgtgtcaaagcttaccgtttcgtggcttacacgacggtttctttctccatcatctcacttttgtcggtgtgcttgacactgccaatgctgaagagttacgtgtccaacgtgggcatgaaaatggactctgagctcagctcatgccagcacaatgccaaagacatttggtccgaagtcagtcagctgaagggaatgcctctgctggtcgccggaaaccgtactgcgcgtagcgcatacggtagctgccaagagtgttgctccggcggtgcccaaggccaacccggccaacccggacagcctggacgacccggaaaccccggagcgcccggctcaccaggacagcccggacaaaccccgcagacgccttgcgagcaagtgcacccgcaagcccgccgccaacggagcccgctcctgcaggcccacctggagaggctggtgcacctggacagcccggtcagcctggagcccctggacagcccggcgcggccggacagcccggcccgaagggacctcccggaggcccaggacagccaggcaatggcggagccccaggccagcccggccaacccggacagcctggaaaccccggagagcgcggaatc

SEQ ID NO: 92114 - DNA, 400 bp, Heterodera glycines
gaaatggtactacccttaccactacccgccgtttgcctcctatttagaactgatcgccgatttccaaccctacttcaacatgcccacgaaaccgttcaagccattggagcagttaatgggtgtgtttcctgctgctagcagagctcatattcctgaccggcggcgttggctgatgaccgactcaagttcgccgatcattgatttttacccggaaacttttgagattgatctgaatgggaagaaatatgcttggcaaggcgtcgctctgctgccatttgtcgaggaaaaacgtcttttggatgcacttgactcggtgtacaccactctcacaaccgatgaaagtactcggaatgacaccggaccagaccgtctttttgtctgcaataaacacaaattgttt

SEQ ID NO: 92115 - DNA, 568 bp, Heterodera glycines
gttctcttcatctctttcccgccaaaacactgtcctcaatgtcatcaaacaaagatgagttcgataaatcgcaggaacgtatgaaggatgcggttaaccaagttgccgaggaacttgatcttagttatattcggaagatgcaatgcgagatgcatttgtgctctgccggctgttatgaaggacgaggcgctttgaaccgcaaacaaattgatgactgtgaggagcaatgccgaataaagtaccaagcggtggttgccaaagtggacgatgagttttcggcttggcaggatcaacttaaccgatgcataagcacttgccaggacaagcagcatcagcaatttggcaccgacttcagtaagctgtccgagcagcagcggaagcagttcagtgacaatttggccaagtgcgctggcgtttgcatggacgaacatgtcaaacatttgcccaaattgaaagaccgaattgtcacatttttgaagaaaagctcataggatttgatttgattttttgttttgtttgatgatactttcagcactttgccattttattgtggttaaaatattgttcg

SEQ ID NO: 92116 - DNA, 443 bp, Heterodera glycines
aagtaacgctggagggcagaactcgactcccgcagagagtgcaggaactcgtgatcgacattggcaatgccatgacaagcattcaacaaacttcgggttctacagatttactgattacttcgattcgaaatttcacttcttctgatggaataatggcaaattctgaacaaaatctcgtcaaaattcaaaatcaaatggaccgaattgagactcaaacgaatggcgctgagcaaaaccttaaaaatgtttcatcagtgaacaattttcttgatgctttggagcaaagtgcgtattgtacaaattttgacgacaaaaaaaattgaggatgaaaagggggaagaaaagagggaggaacgaacagcagaagaatttcaaatgatgatgacccaattgtgtgcattcgtttttcagtgattttgaacacaatgaaaataggcaaataa

SEQ ID NO: 92117 - DNA, 576 bp, Heterodera glycines
ggacaatttgtacacatatgccacaagaccatcgtgtacagcaacaaatggatgcggatcaccttatcttttctgtgatttgacaaagcaacaaactcctgagcccttatgttgtgccaaaataaagtccggaggcgattgctcaatttttcaggggaacaatgaagagccatgttttgattccgtttgtattaatggcatatgtacagcaagcgaaaaaggcacgacaacggaacatggtgaaacaacaccacaaaccgagacaagttcaaccacgcttggtacaactcaacttggtgagacaaccgcaacacctacgacagggaccagttcaaccaatattgatacaaccctaattggggaaacaacttcaacggcatcggatcacttctctactgtgttttctctgtcaccctctcttttgacgacagaaccaactgatcagatcaccctttccacgataagcagcagcacaaccttaggcacattcacacccaacactaccgtgtcctcatcatacactcaaaatccatcatgttgttgtgtgtgtaaggaatgtgatgaagaggaacaata

SEQ ID NO: 92118 - DNA, 623 bp, Heterodera glycines
ctgaaaacaaccagaaggaggaaacggcactgattattgaggagaaaataaaagtgaaggagggaagtgagaatggcgagcaacaaaaagagaagttcaaaatgaaccccgctgccgccccatttattccaaagtcaaaggatctcaatacaagttcggctgttgtcactgcaaatacgagtccgctaatgtccaacccaattcctcctttcatccaattgcctgcttcaattccaacccagggaatctcgacccagaacattgttttctatcatcaacaaccccaaaccgttgtctcggcgcaaataccttcaaatgctgcgtcatatcaccaacagacacaaaacgttcttcctgcacaaatcccttcctcagtggcttaccatcagcaacaacaaactgttgttccggcacaaattcctccgaatcaaattttctatcagcaacaaccgcaaaacgttgtgtcggcacaactcccttcaaatccgctttatgctacttatcctgttgcgaatccgggacagtcaatagttttcgtttctcccactgcaccaaatcaggcggttattcttcagccgggtcttgcacaacattttattccggtctccgctgccgcatttcca

SEQ ID NO: 92119 - DNA, 645 bp, Heterodera glycines
tgtctctctgggtcttgtcgatgggcgaaatgtttggctgagtccgctgcgtcagtgtcatgccaatgcgttgcgcgttgtgcaaaaattggcaccgggacgcgtgttggtcagcagctcatgcagtctgttgcacgtgccatattcgaccaaatttgcgcaatcgttgaccaaaaagccggtgaagggaatgctgacggggccaatgaccattttgaagtggagctttgtgcgcaacgaccaaccgcagaaggacacccttttccaggttgcgttggcattgcgcgacgatgtggccgagttggagaaggagggcatcaattgcatccaaatggacgagccggcattccgcgagggattgccgttggacctggcacagcacaacgaataccttaagatcaccgtacaggcattcaaaatttccactggttgtgttgcggactccactcagatttattcccacatgtgctactccgactttggcgacattttcacgcacattgccgagttggacgcggacgtcctttgcattgagtgctctcgctcggatttgagtctgctctcctgctttgaccgctttggctatccgttgatggtcggccccgggatttacgacattcactccccgcgggtgccgtccgtcga

SEQ ID NO: 92120 - DNA, 499 bp, Heterodera glycines
ccattgtgtgaaggtgaacaatttgtgcaccaaatattgtggctgcctcgactgtgacaaccgtttcccgggctgccgatgcgctccgggcaattgccgtaccaaacagtgtcactgctattacccccgttgggaatgcgacccggacgtgtgcaagtcctgcaactgcgacaaattggatggctccggataaccaatctgcaaaaaagtgtccatccaacgtggactgcagaaacgactgattgttgcgccttcccaggtggccggctggggatgtttcgtcaaccaggacattgaaaagaacgactttgtgtccgaatattgtgacgaagtgatcagtacggaggagagcgaacgccacgacacaatttaccaccgcgtcaaatgcccttatatgttcggacttaacgatgagcaagtggtggactcaactcgagtggacaatgtcattcaattccccaaccactcccaaaacccgaactgtcgtgccgaagtgatt

SEQ ID NO: 92121 - DNA, 638 bp, Heterodera glycines
gataagtgggctttttgatgataagacggaagaggaggaggaagaagaagaaggagagttgaaggaggacaacgaagaagcacttacaagccttgaaaaatcgcccattaccgacaacagaatcggagaatttggggatgaacagcatgaggaagaacaagccgaattcactcccatggggtgcgtactgaaagggggatgaattgaattgcaaatccattttaaatcccagcattggctttcgccagaaaatgggaaaataaactggacttgagccaatcaaacaaattgatgtgttttcgaaatcttcacctcatcagaatcgcaatggttcgtatcggtcggttgaagcgcgaattggagaacgcacaacagtcaggcgacgatcagctgctgttccgctgttgtgatgcgttgatggaccgtatgccggaccaattgcagttggactcggatgagtgtactgtggcattcgatctcgacaaatttgacgagggcgccgtgcagactttggagcaacttctgctgatcgatccgctgactcctctcaatggcaatagctgatctccgatataagaatacatgtgttttttagactatgtaagaattttagcagatcttttatacagtattcattc

SEQ ID NO: 92122 - DNA, 559 bp, Heterodera glycines
gtccaattaaggaattgccctgaacatggcacggtgcccgttcctgttcatcctcctcatccctcttctcctgctggtgctcatcaatttccctccaattttggcatggatattgaagcgagacgatgtcctcttagcttattctccaaatgaacttaccacagatgaaacgaaaattattggtgaaaagcaattgtgcccagccagagaatggtctttggaaaaaacttttgggcttcccattgatccgaattctgaatttggcaaaatgttgcctggtctttctacagaattcaaccatgcacttcccggcattggaaaatctcttgaatacatattatgtacctttgacaagatgcactgtcgtcagcgtttttgtcaactgaacatccttgcatgcgtccgttccgttacatgcacccgtgagtcggatggaagatgcatgccatgctgcatggatcattttcagtacacttgtgtcaacgattggaaggaggttgaggcgatgtttccgaccacaaccacaactacgaccacaacaactacaacgctggcccca

SEQ ID NO: 92123 - DNA, 647 bp, Heterodera glycines
atgatgttaaaacaaatattttctgtcctattttttgtgctttctgctccgatttcagtcggacagtcggaggaagtgagcgaattcgaacaacccgtggtaacatttggtaattgtgaatcgaaacggtaaaacaaagtgtttggttgagtgactgacaatggcacattcgaagcaaaagcattgcctatttctgatcagtccaattccattcgaaggattgtggcacagctgccacagaatggaagccgtgcattgagcgtcggttggctgatcaggtgttcggctcgtgctgcgaaagatttgtgccgcccgaatgccgcggcctttgcacttacgaaagtcacccaatcgaagcgcgaatattattgatgcacacaattcagccgagtcggtgccgtatgtacaaatatttgagtgccattgtccattgtgccgcacaaacgcacgacaatacgcattgttgccgcgaaatgggaatggaagagattgggcagaactgcttggacttgtgcagacctcaacaaaatccgcgcattcggtgggggcgtcaatcgctgcggaaagacctcgtccaatgtttgtcgaaatgggatcaagtgatgttctgtcatcaggggggcctttggtcgcgaaaaatttcgaaa

SEQ ID NO: 92124 - DNA, 629 bp, Heterodera glycines
aacaaatcaaacatcggttcaaacaaatcctccaacaatttcattgtttgtgccaacaaataatacagttgaagcattacctgcatcccttccaacggcatcccaatcacccatattaacgcaagacataaatggaacaacatttagtagaattccaaaaccattagaaacgcgcaagtccccggaacaattaaggaaggaagtgcaaaaggaattgccaaaagatacaaaagtgccattagaattaacgccagaattcaaacagcaaaaagcagaggagcgaagaaaagatgccgaagctgcacagcttgagaatgattggaagggaaaaattgccgagttggaccgcgctcgtcaggcacttggtgaggaggcacgcgccgctgcacagggccaaagcaatgacgcactgttccaaggccttcaggcagattatcaacggaaattagccgaaatgacggaggcaaaacaacgtaaagaacaagcacaacgcgacgcagccgaacaagcgcgaaagatggaaatgctgcagaaagaatggaagaaaaagatggacgaacttgacgctgagagacgccgccaggaagaagaacacaagcaaacgcattggcacagtcgcaagcggaggc

SEQ ID NO: 92125 - DNA, 331 bp, Heterodera glycines
ggtcaagacattgtggattgtccgacacgccgaaagagaagacaacctccactcgaattggccaaaggatgcgaagcctccaaaattgaaatcggataaccgtccattatcggcaagaggcatgcaacatgccaccgaattggcagacaggttttcgaatgtccacatcgatcatagttttgcgtctccttttgagcggactgtgcaaacggcgacttttcttatctcaccgaggaaaattccgatccaagttgagcccggacttgcgcaggctctttacctttgcgaaagtccggctggctttgaggaatcggatgaactccatacgcgg

SEQ ID NO: 92126 - DNA, 598 bp, Heterodera glycines
ccggcgggcagcttttgtttttttgaatacttaatttttaattatggagtcgtcatacttggccagacaaattcttgatcggtgcaacaatctcttggcaaatcgttctcgatacacaagcaaggaagaattcgctcgcactgttcttcaaacgctttttggtgatccatcagttgatcttcttcttctaaaaccgcacttcgattctctacatgccgatgcgcttaatcgactgaacgcattgattggttttgagtcgaccgtttttatgaccatttacgtcaatgatgcactttttgacgagttcatcgagctgttcagtcgacactgcattcgttcaccagctacggttaaggaagcgactgagagcgtttacatgtggcttttggccgattatttgcaatatctgttgcccgtcgatgaacagaagctgaacttgctgaagaactctacctggatttctgctcctttctcctctttaccaacgtcggcagtgacgagtccgcgcagattgctgcgccccgaagtgttggcccaatgtgccccacttgagcacgtttctcttcggtcgggcgccttcaaaacgctttacccgcga

SEQ ID NO: 92127 - DNA, 277 bp, Heterodera glycines
gaaacacactctgattgctctatggattgcctctgcgcgctctctgttggctatcatccacacagtcgtcagtctgccatgtctgtacacagaaatcagacgaatgaacaacagagcgaccgactgaatggatgccttccccatcaacacccactctggatggactgacttgatggacatgcgagcgggactgacccctccaaccaacccgatagataacccctctaactccatcttgcgtgacaaacaccgactggacggagactgtgagtgcgct

SEQ ID NO: 92128 - DNA, 614 bp, Heterodera glycines
gtctatatccgccttttttgctcctcttttccactattttctcgctatttcccattctttcatacattgcccacaaatggccgaataattccatattttccataaatttgccttttttttcttccattcttttacaaattatttacattaatttttgttttcatttcattcattcattcttccatcctcatcatttatgtcgtatccatttattaattagttaattagttaattgcctctcatcaaaaaaccttcgctttgtgccaaaatttatgcctttcgcttcagcttcatcatctattgcttttcatcattacaatcacttttctcacttaagttagtgtttgttccctcaccattctgcagatatcaaacagtaacaaatatcacagtaaatctccaaaattacattaccagtaaccaatatcttttctgtttttaaacgtgcaaaatatttctgttttcgttttatttttttaatgttttgtactttcccattacgatattaaagttattttctgctgttcgctttacttattgtatagcccatttgccattctctgactctgtattgttaattccaataattgctttgttttaaaatatttttttaa

SEQ ID NO: 92129 - DNA, 621 bp, Heterodera glycines
cataaatccgaagaaatccctacaaaaatgtcttcttccccgtccgtctctgtgctcgccatcgtcgcaattgtctgtttgatgtgccaatgttgcttttcggcaccgcatccgtgctgtcccggcagtcaaaaagtggtttcacttatgtccaattacgttggcacttttgccaattccatttccaagtcatcgctttgttcggatgcccaaaatgttgcggacgcgttgaaaggccaactgatcggctgctcgaatggcggcgatcgaactcttttggccgacatcgaagcatctcttgccagtcattctgctgatgagtgtgcccacagcctcggcttcgtccgtgccatgttcgccattgccgcctctgcttcttctcatgccagcaacaacagcgaatggcaggcattgagtacacagtttgttcagaaagtcactgaaattgactcgaaatgtgcagagtttggcattagcattggaaaagtgcccatcgatggccccaagggagaccactcccaacgaaatgtgcctagtacggacagtgtgatttccatgcccggattgaccggctcacaccaacattgaactgaatgatgagtgacggaatggaataaacta

SEQ ID NO: 92130 - DNA, 449 bp, Heterodera glycines
atttttattcaaagtcgacctgatcagacagctgaagacggacattgagttgctcaatgcgccgaccacttcccccggctccgcccttctgacgccaaacgcgtcgacgcggacgcgcgaaagcgccgcgcaagggacggcgaagcgcactcagaacaacgcgcagcagcagcagctgcaaattccaaatgcaaagaattcgccgtcttttttcgttttcccttcgcccgcggcgcaaacgaaaaattttcaaaaaacgcaaagggaggggaggaaaagctcatcagtgtcagcagcggagaacggacaaatggacgaacggcgatcgctgttggacggcagcatggaattcacagtttaaatttaaagagacggagcagcgaaagaaccgtttaaagaacaaaacaaatttatgtttcataaacattttaaattttatgaaataaaat

SEQ ID NO: 92131 - DNA, 395 bp, Heterodera glycines
ggaacattttttccaattggaaaatgaattgggcctggagaatgtcggcatttgcttggtggtgttcgccgacaattctaacaacacttggcgggtgcaggccatccctgtttcggacgtgagctcttttgacaacagaatttcttattctgtggaggggacaccgcgatgatcaattggagaaagaatcgggcatcgaaggggccatttttgtacacgcaaacggattcattggagggacaaaatcactggaaggggcaatgcgaatggcagaggaaacgttgaaaatgaattaacaatcaaacgcgttaatttttttgttatttttactatttgttgtattcattttatttaatgtaaagtgagaaattgaaatacaagtcaaaagatgtgaa

SEQ ID NO: 92132 - DNA, 631 bp, Heterodera glycines
caactgaaaagatgcttgacttccttatgagttgttgttcattgaatttgttatttcttaattaacccaattaaactcagaactcacatttgtctcggaacaaaaggaagtgttggaaaatgcgatgaaaattggtttcgatgtgcccaatttgtgccgcgatgtttacagacgcttcaaagacaaacacaattttgggcaaaacgtcgcgagagaggcgcttagaaaagcggcggaagagctaattttggcatggaaatggttggcattttgcgaaactgaaactgtttgggatgccattattgaagcaaattttctgttgcgtaaattcttttgtgagtttttcttaacagaaataatttgaattgtgagtgtttcgtcatttcaattttattagattattgattttgttaattttacgatttgcttttatttagtgtacggtttaatgtcggaagcacttcaattgatgcaattggcacccgaaaagctgcccgaaattgctttgagaacattccaaacggaatttccggacaaagaaattcccatcaaattaaaagacgcgcaacgcgaattcgactgttaccaactttattttgaagcgatcagtcgttacaccgaatggcaaaat

SEQ ID NO: 92133 - DNA, 641 bp, Heterodera glycines
attttttataaatgaggaagaaaagaagtggagttcacacgccgaacagcatctgtgaaaaagagcagaaaaagcctaaaattggaaatgaatctgctgaagtgtgccatttccaagcggagaaatttgttggagaatattgcactgtccacacgcggccatctctcacagtgaaggcactctccttcaatagctcaattggccgtttgtgtgtaatccgtcaaaatgaatcgactgtcagccagcagttcccgtctcaattgtcccttgttgaattttacaatgcagacaatttgccattgattttcctggaaaaaagcattccggtcaatgaccgatttgaaacgcttgtttgggtggacaattgggcggtgtttggagggttgggaggccgtctgaccgcactgtcaccattcaccagcaaatttggtcgtgttcaactgtgcgtttctgatattcttgtgatgactcgtgctggagaaaaccatcagtttgttgctgggaacacttctggtgaattgctcgttgtaaacaaccgcgacttcgacgaggagggaaagtgcaccaacaaagtccccactttttcaactgtccaaaccattaaattgtccaccgatgagcacattaccgccattggatgt

SEQ ID NO: 92134 - DNA, 646 bp, Heterodera glycines
cgacgatttgcttacaccgacagaggctgatggttctttttccttcaaaaatattccttctactgaaatgacaaaatcatttcttgagagggacaattttgagagcgaattgggtgcaacgcagcaggatgacccttttggcgaggatttttgcgatatttcaagtaacgaaataattgacgtgttcgctgatggggatttggccggaagacctgtcatcgtattttacgctcatcgattgccttctaataaaaatttcgaccattacaaatttcttcgatttattcaatttactcttgacaaaattgttgattccgattataccatcatttacttccattacggactccgctccaacaataaacctccattgaaatggctcatccaggcgtatcagcttcttgaccgaagatacaaaaagaacttaaaggctttgtatcttgttcatccatcgcgattcatccgtttcctatgggcggtttttcaaccgttgatttcctttaaatttgaacagaaaatgcattatgtcaacagtctcaatgagctgaattcgatcatatcaattgtcactctcaatctaccagaaccgataataagatacgaccgctctttgcattccgcaacttccaacactgtgtttgaccac

SEQ ID NO: 92135 - DNA, 445 bp, Heterodera glycines
tactctacttgttctggggattgcctccttgtgctctttgttggctatgattttgacctgcatctttctgtggtctgtgtactcagagatgagcttcatgaacaacttagtgagacaccgacttgaggcctttcgcgtctacactgattatggctggaatgacttattggatttgtaagtggtcgtgacgaccgcttccacacttcgtgataaccccttcaactccatattcagtgctatatgttctctgtccggacactgctggtgcgctcaggcctaacagccaacctgtccccctggtccgcctggtgcgttgggactgcctgcacagactggacagcttgtaggcatacgactccccggagagcctgcagagactggtcaacctgctcctccttgggcgcacctaaacatcccctgcacaacttgccctgctgagacgcca

SEQ ID NO: 92136 - DNA, 632 bp, Heterodera glycines
gtttgagagtgccaaaaaagtttgaaaaatgccgcctccacctccgccaccgcaagccaaacagcagccgcaacaagcggcaccgccccagcaacagtcggttgaggaagagcagcaaccgcaagacccaaatgcgctcaaaattgttgtggccaatgttgacattgcgcaggcggagggcaacgaccgtcgcaccaaaagtggcaaattcactttggcccagctcagagccaccgacggcatttgccctctccaaaacggcaccaatcagttcgactcgcagaagctgatgaccaactttggcacgccgcgtgacgtgaagggcaaacatttgaagcgcatttgggagttggagtttccggaggaggcggctgactatcagcaaccgacggcgccggtcaatgccgcgccacagcagcagcaacaggcggcacagcaacaggcaccgcccaacttccgttgagtggcgcaggcggtggcacagacgcggaacggacagagagcggaaagaaaacgagacattgttgaacagagaaagagagaaatgtacggatgtgttagagagcattgtgacgacggcacaattttcaatttattttttgattaagcaaaactttgtacgaataaaagcg

SEQ ID NO: 92137 - DNA, 386 bp, Heterodera glycines
tttattacatggcggacaacgacgaagagcatgagaggctcgccgaacaggggcgcgagtggaaagctgcgcgccgggcggagagcattgccaacttgtttggcggtgcgccgcccccggcccaggatgaggaagacgaggacgaagaagtggaggacgaaggggtggaggacgagcagcgccctcgccgtgcgcgaagcgcagggcgacgcgggggtgatgaggacgaagaggaagatgaagggggtcgggggcggcctcggcgtcgtggggcgcgagtggaaagctgcgcgccgggcgcagagcattggcaacttgtttgccggtgcgccgcccccgcccccggcccaggaagaggaggagggggtggaagaagaagtgtagga

SEQ ID NO: 92138 - DNA, 651 bp, Heterodera glycines
catcattgttttctatttgttaattgtgtcaaagcatcgttctgctcatccatctgtcacagcaaacggaagtcgtcaaacgcggcttcagcatggagaagaagatcgtctacttcaagctggtgcaaattgtgctcactttggcattcatttggcaactcctttcacttcaccaattctgcggcacttttgccgacccaaaggccttcatccatgacatctctgttggccattgcaaacgctttacgctcatcggaaaggaatcaaaaagtggcgaatttggcgctgtgttcgaccaggacaaatggcagaaccaactgtcgatgagcagcaccaatggccgaccaattgaagaacagcaacaccaattcatggacgaattggcagcgaaattgccatccgctggacgccattgcattccgataacgatttcgctttttgactggattggcaaagacagaaatcttctcaacaatggcactttgttatttttttccctcctattgtgggccgcattttggtcgcttcttccccttggcattgccaccatcatagtgctacactctgtggaaggattccccgtctatgtctgtgccttcggttctatctacttctggtgtgtttctgctgcggtttcaccaatttgctgct

SEQ ID NO: 92139 - DNA, 622 bp, Heterodera glycines
cacactaattgcggaggccggcttcgcccggtgtttgtcggcactgaaaaaacagagaatggacgcgtcgaaactgctgccgaagccatcgaaaaaagcgagcgatttggtgaaagacagcaagaaatttctaaacagcattggcagtgcgttgtacgcctccaaggtggtcagctacgcccagggcttcatgctaatggctgaagctagccgcgagttcgactggaatttgaattacggtgccattgctttgatgtggcgcggcggttgcatcatccgttctcgattcttggaccgtattcaaaatgcttttgaaaagaatccgtcgctggtcaatcttttgctggacgactttttcatgaaagccattggagacgctcacgactcgtggcgtgaagtcatttcgaccgctgttcagcttggcatcccaatgccagcgtttagcagtgccttggcatttttcgatggctatcgtactgaagctctcccggccaatctcatccaggcccagcgcgattatttcggtgctcacacttacgaactgctcgcccaggccggcgttgctgtgcacaccaattggacgggcagaggagggaaagtgacgtcaaatgcgtactccggc

SEQ ID NO: 92140 - DNA, 283 bp, Heterodera glycines
ctgtgttggtcggctcaaacaggtgcgagcgacggccggcgcactcaaaggagacgtttctaacggaccaaaagcacaagaacatcggggacggctatcgctgaaatacccaacggaacacggaagtgcgacagattggaacgacatggaaaaagggaggcaggacatctttttttttcagcaccagagagccaagccaagtgagcaaccggtgtcgctcaccgaagctcggctgaacacgagaacacctcgggaaaagagaggtgaaactatctacgaaacg

SEQ ID NO: 92141 - DNA, 637 bp, Heterodera glycines
caattaagcaacaccccccaaaatcagccgactccgtttgattgttcttcggtcgttcactctttgaaaaaccttctacagttgaacagagctgtccaaaacattctcgaaagcactgacaaggcccaacctgagcttttcggtcggatcaatcaggtgaccaattcgttgcgatcgctgcgcgaaaacgttggacaaattgaggacatcgatcggagtgaggaagagcagcgcgaactgatcgaggaccttcagcggcgattgaagaccaaaaatgacttcttcagaaacatcggcggagaaaatcggaacggagaagggacagcagcagacggagtttagcagagaagaggaagttaccgccgatggccgtaacattcgtcccgttttgtgtccccattgtccttccgtcattttgcgtcctctttctgcgaattttttgtcttccgccgacggtccgcgcattgcgttgccattgccgcgtcagaaaaaaagggcagacgaaggaggagacgaagcagtacagacaacggaacacagccaatggtggacactgacggacatgatgcaattcgagaacgttggtttcacaaacgcctttcgtggccgacgtttcttggcttgcgctgactgcgaa

SEQ ID NO: 92142 - DNA, 629 bp, Heterodera glycines
gcaaacactgctgagagaggcaggcactcacacgccagaaaatactgacaatcatcagagagaatggactggcccagggtctgctgcaagtgcttctgttgtccctgtccgcccacatcacccaacagttgggcatggcgcctggcggcgaattccgcgccgcgcacgccgcctccaaattggtgcccggttgcggtgtcattctcggcgaccgaccgctcaatgtgacgctgcaacgcgcgctcagcgctttgaacatcttccaacgcatgaaatttttcttccacttgaccgtctcgctgggcatggaaattgatgaggccgaagttgaacgctgcaagaacatggacatgctggaagagatgctccaacagatggccggcgaatttccgcaagtgtcgcgcattttggtggacgaaagagaccagtatatgacccaagtgttgcactcgctgctccaacggagcaccatggagaaactgtacgcaagcaaaaagtgcaatgcgccgtttgagcctgccaatgttgtcgcagtcgtcggcatgggtcacgtggctggcattcgggcaaattggacaaagcacatcgactccacctctctcttgaccgtgccacgtccctcgatgaaa

SEQ ID NO: 92143 - DNA, 558 bp, Heterodera glycines
gttgccgggctgtacgcattcgaacgcctccgatggaacaacggggccaaagaggagcgactgaagacccaattcagacagcacttggaacaacgcctccatcaaaccgaaagtatccacaccagcagctgtgagcagcaagtgacccgggagctggaccaagtttacgaaggactcaaaactgtggttgggggttttcatcgcgagatgaaagagggaattgaccagtgcaagtgccagaaggattcgctcgagggaatagtcaaaagtatcaacacaataaaaaacaagaccaactttgtgggaagcaccttagacgaattttcaaggcgtttcttgaatgcgttcttctgatcgacaatatttgcacatttcgaagtgattaattcagttggtgactttgctttaggtgtgcccgttgattgatcccgaacctctcatgaataattgtgtatttttgctcaatgcccactttcgtttttgaatgtcatttcatttttatagttatatttgtgtcttagaatacgagttctgttcaaataaacaatggttagccaa

SEQ ID NO: 92144 - DNA, 629 bp, Heterodera glycines
acaccatcaactcaatgctttaccacatgcataggattggattctttgtgataaaaattggccctgacactccagcagttggccgactaatgcgtttgacctgtgaatcgggcgacgaagatgttttcctcgacgaccatggcgttgaagatgaaaatggcactgtcatcttcaggaaaagaagccgaatgagcagacgtcggacgaaacgacaagaagaagaagaggaagacctcgttcagacaatgattgacacgggcatttgtattcgcagtcttttgccggcagcagctgatgagtatcctgacgagaaggttgacctcaccatgagcacaatgcgcgctccatcagtctcaatttacaaaaattctacaattatcctggagcatattgccaaattggaattttatggtcacacaaacaagaagaagttgggcacatttaaagcaacatcagtggcacaaattgacgtcaaaacggagggcgatttgatcaaagccaacctaacactgcccactttggtgctcaccgacattggcactgacataaaaagtggcatgacccaagatgggctcgactcactgaccggcctggtgaaggacaaagtgcccgagtcggccaacaaaaaa

SEQ ID NO: 92145 - DNA, 145 bp, Heterodera glycines
gatagacaatggttcaggcgtggtcaaggcggggttcgccggagagcagtcaccgaaatgtgtgttcggcaactttgttggtcggcccaaacatgtgcgagtgatggccggcgcactcgaaggagacgttttatcggaccaaaag

SEQ ID NO: 92146 - DNA, 496 bp, Heterodera glycines
atctctgtactcggagatgagccaaatgaacagcacagtgcgcgacggagttgaggccttccgcgtcaacaccgactcggcctggactgacttgatggacgtgcaagtggtcgtgacgccgcggtcaaaccccgtgataaccccttcactcatctttcgtgccaaagtcactgcccggacctgcccgtgcgcttggcttccacagcaaagtgtccccctggtcccccgggccctctgtgcccctggaaatcccgaaaaacctgtaagggaagagaacccccgaaaacctggaaaactcgggaaaccggtcttcttttcgccccccaaaaattcccctttcacctttccccggttgtccccccggccgcccccccagaaaagggggccccccgaaaaaaaggggagcccccgtaaaaaactgttatcccccccttaagggggggggaaattggaaaacccttggggggccccgggccccccggaaaaacctggagag

SEQ ID NO: 92147 - DNA, 577 bp, Heterodera glycines
  unsure (1)..(577): unsure at all n locations
cgcgatgacatcagcaacaatttgacgaccgtaagcaacggatacgccgcctttccgcccgccccaccgcgatttttgggcggcccattacgccatgccaatggcggcgcttccgtggctcacccgcagcattttttggcaccgccgtcgcccttccgtcgtgccgcgccgtgcccaggcgacagcagcgagccgctgctgcggcgcagtctccgctcgccgaccatgcgacggctgcaggagtcgctgcagagtttggcggaggatgtgccnggtgtcgccggcggcgctcgtctgcgcccgcggcgacgtcggcagaacggagacgccaaagccgttcaattgcaggacttcccagtatcgttcgctgaatttgaaacgcgacacagaacgccaaaagcaaattttgggacatttggcgcaagtgcgagcgcagctgaagaacagccaagtgcaaattgagcggacaatcagtgagaagcagcagcaaaatttggcctagagagagagaaaatggccaacggaaaagaaagaaaggaaggacagacaatccaaggacacagaaccacttattaat

SEQ ID NO: 92148 - DNA, 322 bp, Heterodera glycines
tgacggagttaaggtcgttccagtcaacgccgactcggcctgaacagacttgttggacttgatgatggacgtgacacctccgccgaagacccatggagacagcttcaactccaccttgcataccaaacgtcatctgaacggacattggcattgtactggtctgccaaccccgagatgtctgcctaggatgcccggaccgaccgaatcgactggatagcccagattacctggacgcccgggacagcccggaccgtgtggactgtgaggcgcaccaacacctcagttgcccgttgaggaacagaccctgccctgcatgccccgc

SEQ ID NO: 92149 - DNA, 641 bp, Heterodera glycines
cggcgggtcagactccgttggcgagtcagtgccatccgccgcaaattccgcgccgaaactcatttcaattgatcacaatcagaaatattgttgagggactgcgcaatgcatcagagcctatttcaacctcacaggaaaagctgagcagatatccgtgcgaagatgaagcaaagacgctgctttgctgtgcactgcccccggcgctcccttcgccctccctccgtcccctcccctcccatttccaattgttttcgcaaccgtcgcccgaccaattacccaccacaattagcgatttgagcagaacgacgacgccgcaaattgtggagccaaaaaatgaggaggaagcaaaggaaagtgatcaacagaagcaaaaagggacagggaacagcagagagagcgaagggacggagaaaaagcaatcaatcggtgggctaatgggggacaatggacaaaccacgcaaaaaacgaagcattgaacgattaatttctcacccacgcacttttcatttgttttgccattttggcatttttttctcttcccttcccttacttcctcttcctctactcatcccttttcttcccttttcggctgctcctccgacgactttcgcgccgtttctccgtcctcccctccgtccccc

SEQ ID NO: 92150 - DNA, 607 bp, Heterodera glycines
gtcggaataaaacatcattcccctgcttgtctactgtttgtcccaatttctattttgccaaaatttttgccgggccgaatttgcctctgtttggtcccgacaagtggtgcaacggccgggaacctctgcactgatgaatgcttgtgatcagcgggtggcagacgctggtacaagggcgacaggacggagatgagtcagtctggtcaactgatcgctgtccaccgccgcggagcggatcttcacaagcaacaagggatcagcctggtcaactgatcacctcacagattttacgattaaccaaaatcaaccgcccgcctttctcagcacagacaacccggaatgaggcataagaaataaaacaacaacatacaggcagacttgcagcaactgaaccccccgacaactttgctgtggggagtgtcgcgactcacgtcacgagaaataaaatggaaatgataaattttataagcatgatgcaatttcattaaaaatggggaaaaccttaatttaattggaaatgttccccctcttcgtcgttctattcaaaaaatatttgtttgtttacattcaattcttattcatttctcacacaaaaatgtattaatca

SEQ ID NO: 92151 - DNA, 439 bp, Heterodera glycines
tcgcattggtttcaggattgcctcggtgtgctctctggtagttatcatcttcaccgacctggatcagccgtctctggactcggagatcagccaaatgaaccgacaattgcgcgacggatttgatgtcttccgcggcaacaccgactcgggctcgactaacttgacgtacgtggaactggtcttgacaccgccatcgaagccccctgacaaccccgacaactccttcgtccgtggcaaacggacaatgcccgagaccggccactgcgctgggcgtcttccgccaagccggccctctggctcgcccgggccctccagaccgactagacagctcggacggcctggatgcgcaagacagcccgaaaagactgtacttgctgggcaaacctctccaccttgtcgctcgcatagcctcgcctgctcacgatgcccttctgcgccg

SEQ ID NO: 92152 - DNA, 605 bp, Heterodera glycines
gctttctttggttgaccctccattttacagccttctctgctccctactgatgtttccccctctcccatattacatcgccaggcgttgttcatcagcttcgtcctcctcctcctcctcacccattgcgttgttttctgccgcttctcctcccacgcttaggccgccggcgttggccaatgcgcggcctccgcaccaccaccagcagcagcgcttggcggagaaggcgggcaccaccgtgctgctgctgcacggcggcgaaccccgcacaaatttttatgccagggcacatttgggccgagtgcttgtcgaccgactggccgtgccgaattgggttggcatgctaatcgctgacttttacttcgcctgttccgcttttcccgcccgttgcattgccgactctgtgcactttccgcagaatgttgaccagctcaattggctgaggctccgtttggagcgcgcattggcacttttgttgcccgaatttggccccttccgttgtctgccggccacgggccaagccgaggaccaaaccaatgttggacgacaattgcacagcgcaatccgccatggcatggacaatttgctgctgtttccgctccaaccgc

SEQ ID NO: 92153 - DNA, 651 bp, Heterodera glycines
tgcttccctttgtccaaatgaccctcattagcaaatgttcgcttctcctccttttcgtcgcgcccttttcccatgcgtttttctccggctttgaggtttctcccaacgcggcacgtctccgtcggcagtgcggttgcggcgggtgccctcctccgcccagcggcggtggctctgtccaactcggcatcagctgcgactcgccgcgccctccaccgccccctccgtgctgcggttgtcagtcgtcttgcggctgcggtggcggcggtggcggcggatgtggcggcggttgcggcggcggtgccattaaactgacaattggctgcgactccccacgccctccgcctccccctccgtgctgcggttgcgggtgcggctgcggttgcggcgggtgccctcctccccccagcggcggtggctctgtccaactcggcatcagctgcgactcccctccgccccctccgtcctgcggctgtcagccctcgggcggctgcggttgcaatcgccgcaagcgcatggcttttctgcgccgcgccgttgctcagcgctctgttggccgtcattaagtgcaaaatgaagcttaattaggcactgcttattgatgacgtcaattgccgacccgaatgatccattttattattaatattttgtaac

SEQ ID NO: 92154 - DNA, 633 bp, Heterodera glycines
cagactgaacctgaagagaagcccaaaacatttgcttttggattgcaaactgatcaaaccggtttgatcgattcggagatgcaaacagtttcagaagagaagccgaaaacggtcacttttgcaatgcaaactgttcaaaccgatctggtcaattcggagatgcaaacactgtctgaagagaaaccgaagatgaccaacgacgaggttcttgaactcaatgtctcgaaattgcctatggatgattcgtcatttctcagtaatcaaggacggagttcccctttgttggacgaatcattgcgccgtaaatacaatgaaaagtgtgaagaaatggcagaattgcgtcatgcatatgagtttcaacagtcaatcatttctaatcaactggacgaaattgcgcggctaaagcaacaacaacaactacgaaatggcgttcaaaaaaatggaagtccgtcctcgactcgtcacccaaccattactgctgctgcttcgccgtcgtccgttttccctagcggtgctctgcccaccatttcgggtcgaccacgcgctgcaaggcgaacttattgcgaacattgcgaaatgtttgacgcacacgactcgtcagagtgtccaaaagaagaggcaaaaagagcagaa

SEQ ID NO: 92155 - DNA, 583 bp, Heterodera glycines
agaacgcatcgcaaagtgagcagtggcgcgagggaggcgacggagtgccgcccttccgttcgaccgcaaaacttttggtcaccggcggacgcgaatgggatgaagcgggcggatgggcactgttgcgcattgtgccacggaacgcgagcaccacagctccgatttacacacttcactgatgaaaatgatatttctgaaatttaaaattggccttcggaatcaatgatactgtggattctggaatggaaagaaagaaacgatttggggggggagtgatcggataagcaaactctgctgttttattcttttggcagttcccacgcgatttgtgccttttgttatgctacagaatcctttttcaattcaatatcaaaaggctttttccgtcggtttaattaaattaattttatttttcattagttttggtagaatcaacactgattaactaattgcgtcttgttaagcattgcccgccgaatcgcttttcccgtctcagcattcgtccatcttcttccgctgccaatgggccgtcctctcaattcgttcctttgcccgctgatttggccgaccccgggacagaatg

SEQ ID NO: 92156 - DNA, 645 bp, Heterodera glycines
ttatcgtccatcgtctacaacacttcatcacacacgaagcggacgtggccggcgcaacaacttcaatggaggattactgtttcgacgcaacggcagcagcagcggcggagcagtctcggcgtcaatcgggagcggcatcggaccttgtgcaaggagacggcctgtcaagcggcttcctggacgcgatcatcacgaaggtcaaccgctcgcctcctcatcgcttcacggatgagatcagtgacgatgaaatccgccagctctgcaaagcggccaccgacgtcttccgaatgcagccgacgctcgtcagaatccacccgccggccgtcatcgtgggcgacatccatggacaattcgcggacctgaagaagatcttctcaacgcatggcctcccgccggagcagcagtacgtcttcctgggcgactacgtcgacagaggaccccagtcgttggagacgatcatcctcctcttctgctacaaggtgaagtacccctccaacttcatgctgctgcgcgggaaccacgagtgcgccaacatcaacagagtttatggcttctacgaggagatcgaccgccgttacccgcgaacgggcgctcgtcgactcttcgacctcttcaatcaagtcttcgcctggatgccattcgtcg

SEQ ID NO: 92157 - DNA, 634 bp, Heterodera glycines
  unsure (1)..(634): unsure at all n locations
gaaagtgataattctattaatttctcaatatttttgttattcattttatgtcttgcgtgtccttgtctccgctcgaccaaatatcaaatttggatttcatttttcgctttgttttcctttttgtcatctccttgcaaatgtcccctgcattctctgctccaatttttctgctcattggcgtgctcttcgccaatgggtcgaccgaaagacgggccgaccaaacttcgaatttctcaaatcgaaattcggcacagaatctgtgcccattctgatcggcacggacatttgtccaactcaaatgccttttagctcatttattgacgaatatttcggtttttctccaactgacaatgaaacaaagaacaaagtggcctatcttaaagattggcacttccaaaattctcatcccgaagagtcggatttgtacgaattgcccgcctttttacgattcgattgggccaattacgaacgatggacagtcactgatcaacagcagaatccattcgggggcgattaccgttttggttatttcggcaccaaagggagttggacgcctttccactcggacgtgctcaattcnttctcttggtctgccaatgtttgcggccggaaagtgtggtatttgctacggccg

SEQ ID NO: 92158 - DNA, 631 bp, Heterodera glycines
cgacggcgacatcaactataaaaaacggtgccgtcgatgaacagcagcagcagcgacaacggcacagttgcggtggatgctgtgccacttctgctggtggtggtaccgccccacaaacgatgccaacttcgacgacgacgccgttgttgccccggtccagctgttcgacctatcgcattgcgccaaaccggtattcggatgaggaaattcccgagtcgccggagacatcgccggacgaggagttcggctccatgctgaagccggacgattgggtgggcggcgccggcagcggggccaccgccacgaggcgcatgaagacggggcagaagttgatcagttgggttgaccgaattgcgcacaccaagtatttccgggaagcgtcggagctgaagctgatccgcaaaatgatggaggagatttcgtccatgcgtttgctgctcaatgtccaagtgaccatgctggaggggcgcatgtgctgcaattttccgcctcctccgtccgaccgactttggtacgccttccgcacgtcgccccgaatgtcggtcaaagccgtgccgcaagttggcgaccgctccgttgaactgtcccttgtcagtgaatggattgagaacaaactgcagctgatcctgga

SEQ ID NO: 92159 - DNA, 640 bp, Heterodera glycines
ccaatttgtgcgagcacagccgatcgggtggagaaattcgcaattgggttcagttgtctgttcggtcatttcgactatggccttggcacttccgatgcaaaagcgatgaattggcacaatttgctccattctttgctcatttcgtgcccccaaattaaaaccattgacgtcaaaattttcttcgaatttcgtccgggcgaacacgagggttttttgcaccattttgctgaaatggtcacccaatttgtggacaacattttcacatcgctttccgaaggcagcgcaaaggcacaaattagcgttttgttggagttgagttgtggcattttcgcatatcaggatctctccctgaacacgtgcgatctcttcaaaaggggtgaacatgtcgacttgcaagatgcatccgaagaatactgcgcaagggaatgccgggtggtcgacccgaaggggagggagcacaaatgcgtgtttcaggtgttgggccaggaggtcagctacggttcggatgagctggcggatgtgctctcccttcagtcctatgacggtcattattcgtattacgatgccaacaatgattgggaaaatgattacgatgaagacattgattatgatttgtacgactccgattattattaggagg

SEQ ID NO: 92160 - DNA, 618 bp, Heterodera glycines
gttggattcgctcgtccgaattcattctcagtcccgactgaatcagcgggtggacaatggtcgtgttgaaccaaggcaaaaagcggaagggcaaactgaacggaaaccaaacattgttaaacggcgactcgagtaccaacgctttcggcgctctgccggcgtcgctcagttcggcgacgagtcgcgtggcgacgcccgtacccttgaaaatggagtgtaaattagcaaaaaagaaagcggtttgtttgacatggctaaccatggaatggccccacacataaatgtccttcgacggcgcttttagtctggcgtagtcataaatggcatgcgcatcggcattcacgccgtcctcattcggatgccctgtcgagtcaccataacctaacaaatgccattttcccttaccgcaatggcactttacttttgtttctttcccactcaccgcgatagtccacggcaagcacgtggaaatccatggcggacaaaatgttgtacaattcgcaccggtggctcgtggtccgatcgaaggaatttccgtgcaggtaaatgaacaatgcgttgggcccttcattcagcgactgctccatctccgcgtcatccatcgatcgttccttctca

SEQ ID NO: 92161 - DNA, 630 bp, Heterodera glycines
gacagacggacgacggcggaagaggggacggaaaaggcagcaacaaactcaagcagttcaaagagctttaaaagcagaaagccgcccccctccgcttcgatacgcgtcgtttgtgcgacttttgttaaccattggcggagtcgcgttggcggcgccggtctccttctgttactgctccaatttctctgggtgcctccgtatctttgcttcgccaattatctcgagcgttgtttgcttccgttgcgcgtgtactgctacaacgcccccgacctgttggccgtccgaactccgctgcgcgttggccctgccgcttgtgccacccacttttttgccaacaacgcggcccattgggcacaacggcactcaaaacaacgatttccgtcccccaattcgacctgttctctgaatggcactttgcccgtccttctccgcccgtggcgtgccatcgcggacaacgaatcgtcaattcaacgcataatcgtgattcgcagtgccccgcgagcatctgagtaccgtaagtacattcgcgacagttggaagccggcggtggagcggctgaatgggccggtggttttcgtgtcgggcagagatgggactgaactggcagaggagaatggccaacatggggac

SEQ ID NO: 92162 - DNA, 460 bp, Heterodera glycines
tgttctcgggattgcatcggagtgctctctgttggatatcatctccacatgcattgctctgccatatctgtactcggagatgaccccaatgaacaaaaaagtgcgcgaccgatttgaggccttccgcgtcaacaccgactcactctgcacagacttgatggacgtgcaactggtactgacaccgtcttccaatccccctgataaccccttcaaatccatcttccatgccaaacatcaactgaccggacaatgccagtgcactggctctcacaacagtgaagatgtccctctggctctgcccggcccgaacagaccgtctggacagtccggagagtctggaggcggacgacagccaggacaggcagcacagcctgagcaaccagctcctccatgaccggcccagaacatcccctgcccacgcatgccctgctggctccgcccggccgccccggaggacagg

SEQ ID NO: 92163 - DNA, 415 bp, Heterodera glycines
ttccgctcactttcaatttcaaaatgttctccgtccgtttcttcgctttccttctgctgctggccgtcctttgcttttccctcgtcgagtgcggtctcatcggcattggtgccactcccattgaagccgcttggtgcggcgtcatcggccaagagtccacccattgcccgggaggtgcccttcacggcggatttcccgccgtcggcggaacatacggatttggccgatagaaagcggcgcatttggatacggattcttttggactactgacaaatcgctgagagtgaaataaataagttgaaataattgaataaatttggatagaatatcaagcttttcactcaaaattgttcatttatttgtggtttcaattacttaatgatcttaaaaaaaacgagaattgaataagaagaaa

SEQ ID NO: 92164 - DNA, 418 bp, Heterodera glycines
ttcttcaccttcggaccatttccaccataattggtttgactaccccttttggcgcgatttgtactggcgttgggccgagcccatctttgaagatggcatccacgtctaaactaatatcaccaacgacagtaaccgattcgcagtcgaaatggaaacttatcaattccgcccagaggaacttcaggtgaaaacgatggacgacactttgctgattgagggacggcacaaaaatgttcgagacagatacaattacaccaaaatgtatttcgtccgcaaaaacgaaatgccggccaatgtggagacccactcgatcagcagtcacatccacagttctggccgtctgagcgtcgaggcccacaagcgttggcaggccatggaatgcaaacgttccattccaattaacagcggctcgcgtcgt

SEQ ID NO: 92165 - DNA, 624 bp, Heterodera glycines
aaaaatgttgtgctgtgaacatgacggcgttcggccggacattgtcacattgggcaaggccctttcgggtgggctttatccgatttcggcggtacttgcggacgacgaggtcatgttgaccatccggccgggccaacatggctccacttatggcggaaatccgttggcatgtcaaattgccattgaagcattgaaagtgattgaggatgagaaattgtgtgaaaatgccgagaaaatgggcacaattctaatggacgagttgcagaaattgccaaaacagaaagtgaagagtgcgcgagggaagggactgttgtgtgccatcgaattggacaacggcattgacgcttggcaaatgtgccttcgtctaatggacaacggagtattggcaaaacaaacgcacgaacacacaattcgatttgctccgccattggtaattaatgaaaaggacacacgaacagtggccaaaatcatcggacggacattaaatgcattcgattgattgtgaaaattgtgacactaatacatatccaccagggatgtgccgagccagacaaaatccgattccgattaaatcgccgattccgattatggccaaaaatccgattaattgcgattccgattcgg

SEQ ID NO: 92166 - DNA, 220 bp, Heterodera glycines
gcaagagactcacgttgttctcgggattgcctcggtgtgctctctgttggctatcatcaccacagacatcactctgccatctctgaactccgagatgagccacatgaacaccacagagaccgaccgacttgaggccttccgcgtcaacacccactcactctgaactgacttgatggacgtgcaaatggtcatgacaccaccctccaatccccgagataac

SEQ ID NO: 92167 - DNA, 648 bp, Heterodera glycines
atcccccggtcactttgttgctgcaaatgtcttcagaaattctttggtctactgtttttcttctattggtcgattgtgccaccattcttttttggttcttttttggccatgtcaaaaaacgacgacgcccacataaaaacgaaatctttatctgcggcgactgttggcttttggtgttcgattttcttgcgccttctcaactcggcctcgaaattgcactggtcaaccgccgctttaactgcatcgtcgacgaacacttcaagacacgcaaatggaaattgggctgcatgcgaatttgccacaaaattggagaaaatggcactaagcaattgcaaattgtcaattccgatgcaaagccattgccaattccgcaaaatccgttgcccaacaaagtcctcggattcagacacattcagatccattacatcgatcaaaatgtcatcgcatttctccgccgttttcaccgtcgtattttcgatgtttgttcaatggttttgtacattcacacagacaatgaccgcattttggactactttttgctcaacatttggccaatgtttcgtcattcaatgcgtctgatgaatttgaattccatctctttacgccgtctgcgccaattggccggcccgtcactgctcagcgattgtc

SEQ ID NO: 92168 - DNA, 56 bp, Heterodera glycines
aggtgagatcagcaattgtggacctggacagttggaatacgggggcggctgttgta

SEQ ID NO: 92169 - DNA, 637 bp, Heterodera glycines
ccctcactttcgcttttcctccgatcgtcccaaatgccccgtccattgcccccgcatttattagcccttcgctttttcctctgcttctgttgctcagctaatttcctgcaattactgctccaacttgtgctcgccccgcactttgtcagtgcgttcagcgcaagtcaaagggattgccaagtgaatgagctgttcattgagtgcggcacttgcgagggaagctgcagggagccgatcattacaaactgtcgcaaggagtgcaaaccgccacgttgcgagtgccgtgccaaactcggctatgtccgagcccacgacggagcgtgtgttccgttcagcgaatgcgcaacatataagggcacttctttggccaaggaaggcacgaggccattgaccggtggtgtcaacgctaacaaagagcaaaaggaaatgcacagccaattgcgcaatgagggcaaagaagcagtcgctcttccgccctccatcagaccgccctccgcaagcttgcatcattcgaccaaacagcacaaattgcaagaccaagtgatccaagttggtccatcgccgccagtaatcgttaggccaagcggacagagccatccggtgggcacttcccacatgaatttgtttgccgatctcg

SEQ ID NO: 92170 - DNA, 634 bp, Heterodera glycines
cgagcccaccgcttaattatctgaacgtcacttcgcatgcactcatcgaatttgtgcacgacttcaacacgcgctacggcacgcgactcgcgtacacttttgacgccgggcccaactgctgtctgctgttcgaattggaaaccttcgacctgcttcgccatgcgttcaccaaatgcttcagcttcgggtgcccatttcctccttctgaaaacggcgaaacggcaacacaaacggagcagcagaaacaacagcaatcggacgaaaaagaggaagattctcgaaaggatgcttcgttggagccgaacaacgaaaacggcagcgaagaaacgaacagcgaaacttttccatgggctgaactgcgggacatccaaattgagcggatagtgctcagcaccgtcggggtcgggccccgtgtgctctccttcaccgcttcttcctcctccgcttcgtcgttgtcctcctcgtccaacgacagcaacggcaacatcgccgcctccaattgcggtgcgggcgccggtggcgggagcggcgcttttggcggtgccgcgcgcgtggactgcaaaatgctctgatggatggcaccggccgatcgattggatttccgtggctggctgactggtgatgatggtgatca

SEQ ID NO: 92171 - DNA, 638 bp, Heterodera glycines
ttcacattcatttttgccatcgccaccaattgtgtgcacgcgtaatttctgagaaaaccgacagttgctcacgttcaacaacagcgccattttcaacaacatcgcaccaaaatggcacgccgacgaagaaagaaggagccgcgaaaggtgtcttacaagctgtacgttcgacgggtgctgaaggaagttcatccgggcaaggaaatttcaatgcgtgcgttgaacatcatgaactccttcgtcatcgacgccttggatcgcattgcaacggaggcgacgcgcatggcccactacgaccggcgcaagaccgtcacgcttcgcgacatggagttttcgtgccgactgtgcctgcccgacatcatggccaaacatgcgaaccaaaaggctcagaagacggtgaccaagttctacgctgcaaaagtgcgggaccggatgagaaggacggagttgcgtcgtggcgaatttgcgatgatgcagatggcagcgatgtgagcacactcaacttttggacgaccgccggatgataccaccttatattgttgatgattgttcctatattccccgtatgtgtatatattatgcaatgtacccaccccccagtattgtatgtgtatgtattattcttggctcccggtaaa

SEQ ID NO: 92172 - DNA, 624 bp, Heterodera glycines
attttccaatcacacgtcacagccgcagcatcgttctgcttcatcggtaatcgtcacgcaccatgaggaagttcgcctacttcaaactgtgccaagccgtgctcacttctgtttttctgtggcaaattctctcaacgcaccaattctgtggcgagtttgacgagcctacggccttcttcaactctgcagtctcctccagccattgcgaacagttcacgctcatcggaatggactccaccactggcgaatacggggccatgcccgacaagcagaagtggcacatgcaactcatggcgagcagcggcagtggccaaccaattgatgaacagcaacagaatcacatggacgagttttcgtcaaaattgccgactgttggccgtcactgtattccgattgcgttttctctcgtcaagccctgggttcgcgacaacaaaagtcatctgcagaaggtcgctgatttgtttgccattcaattgctctgcggattgctgtctctgtttgtcattgccatgcacgttttggaccaaccgcgctcttggggatatgagagcatcgactacgaacggaccactttttgtgctgtgctctggtgctgtcctgccctggtttcatctgttttgctgc

SEQ ID NO: 92173 - DNA, 627 bp, Heterodera glycines
attttttcttgaaaaattaggagttttgggggcgcggcggtgccgataggcgccgccgggggaaaaaatggaaattttgatcatttataaacaggttttcactgaaaattagccaatttataggtaaaattttgaaaaattttatgggaatttaatccaattcttaggggtgtaaaagtcgcatttcgcgccaaaatgcgaaatgcgaaacgccaaaaaatgcgaaaggcgaaatgcgaaaagcgaaacctcggcccatccctgctgctcacccatcagtgaccgttttcacttcatttggccaatttttcggattcgtcgttttgtcacttggcagtgacgcaaatgccctgttggactggcattccgttagccaatgagagaaagccaagtgcagcagcagcagcggatttgttcattttttgttccttttcctttcaaatttttcaattggcatatgatgctgccaatgaagcattcgacatttatttatttaaattatatttaaatttgtatattattttatctcagcagaacgtaatgttttgttatgcccaacacaaatttttgttttaacgctcgctttgacccgggtcaaattgtatttgttatccacataaatcaatg

SEQ ID NO: 92174 - DNA, 319 bp, Heterodera glycines
gcaagagactcacattgttctcaggattgcctcggtgtgctctctgttggctatcatcgacacagtcatcactctgccatctctgtactctgagatgagccaaatgaacaacaaactgcgcaacggacttgaggccttccgcgtcaacaccgactcagcctggactgacttgatggacgtgcaagtggtcttgacgccaccaaccaagccccgtgataaccccttcaactccatcttcagtaccaaacataaactgcccggacactgtcagtgcgctggcctccaacacccaagctgtccccctggtccgaccagcccg

SEQ ID NO: 92175 - DNA, 634 bp, Heterodera glycines
ttgagattttatcggtattatcatgtgaaaagtgcgcaattctgtcaggagaaaagcggggaaatgttcgccaacgatggaattaaattcattcgaggaattcgcgcagttcgctgtttttctatttcaaaataaaattgacgaaataataactgtcatcctcacgctattttgaaatttcctcatcgtttttttcgcataatctttgcccaaaatggccaatttgtcggccacgccttcccccgtcgtcccctcccatttcaatgcttcatcttcgctgtttcccactgccacggcttttccctcccccgctgcttcttcgccgagtttggccactgctccgttgaatgcctattccgtggtgaacatttgcatttgtgcgccgatgcttttgctgcagctgctcactttgcccattttccttatcttccccaattaccgtcgcaatgtttgctttcgcattttgttcacaaatggcgtcaccgactgacttcagttggccccgttactcatcttcgccgtgcttaatctgatcaccgatcaaattcccatttggttccaaatgtttggcagcagcattgtgctcaatgcgtggaaccttctcgtcatgcagcactttttgctggccatcaac

SEQ ID NO: 92176 - DNA, 627 bp, Heterodera glycines
atttttgcatcaattataaacatcacacaatcaaatgatgcagaaaaaccgaaggggccaaaagtaacggagaaggtgtattttgacattaaaatcggcgatgaaagcgttggtcgcattgaaatcggcttattcggaaagactgtcccgaaaactgtggaaaactttgttgaacttgccaagaaaccgaagggggaaggttacgccggcagcgttttccaccgagtcattaaggacttcatgatccaaggcggtgacttcaccaagggcgacggcactggcgggaaatccatttggggcgagaaattcccggatgaaaacttcaaattgaaacattacggcgccggatggctgagcatggcgaattccggcaaagacacaaacgggtcacaatttttcatcacctgcaaaaaaacaacttggctcgacggacgacacgttgtttttgggaaagtgctttccgggatgtctgttgttcgccgaattgaagccacaaaaacattgggcggtgatcggcccgagaaggaagtgacaattgcagcggcagggcaaattccggtggaaacgcctttttctgtgcacaaagaggacagcagagatgagctgtaaaacccaaccaaaatggcg

SEQ ID NO: 92177 - DNA, 637 bp, Heterodera glycines
gttcgaccatggtaatttattttttgttctctcttttcctttattcttcgctcgttccttcattttcgttggccgattctctgagtgattttttcagccgttcaactcacacaaacaattgggctcttttggtttgctcttcgcgcttttggttcaattatcgccacgttgccaatgtcctttcgctgtaccgttcgttgaaacggcttggcatgcccgacagcaacatcattttgatgctttccgataacattccatgcaatgcgagaaacccttcccccgcgtctattttcaacaatgcctttgcccatcagaatttgtatttggaggacactgaagtggactatcgcgggtacgaagtgactgcggaaagtgtcgtgagaattttaacgggcagaacacatacggacacgcccagaaacaagcgtttgctcagcgatagccaaagtaatgtgcttatttatttgaccggccacggcggcgatgggtttttgaagtttcaagactcggaagagttgacaaacgttgacttggcagatgccattgaaacgatgcatcagcaaaatcgttacaatgagttgctgctaattgccgacacgtgccaaagtgagtcgatgtatcaacgagtgtactcacc

SEQ ID NO: 92178 - DNA, 405 bp, Heterodera glycines
gttggtcgatcaaaaaaaaaattttactaaaaatgtccaaacaatttcttctgttggctttgctgcttttattgctcccaatcggcacattgcaagaatgttcttgggatgtggatctgtgtacgggcagttgctcaacaggatgtgaacaattaagtgaaccaaactgtttttgtggaaaggaatttaaaccattcatcagagaaaatccacggcacctaaaaagcgctgttaattaaagcgtgagagaagcgcgagaaaaagcagaaaaaaggggcggatgtgatgaagacgaaaatggaaaataaattaagtaattaattgggaagaaaattattaagcatgataatttatttttgtatgactaaatggactatcaatcaaaagtttgaataaaacgatgaa

SEQ ID NO: 92179 - DNA, 590 bp, Heterodera glycines
  unsure (1)..(590): unsure at all n locations
cacttattcaattatattgcgattattctcggctcaatgtgcagcaaatttcgttcaatgatggccaattctgaaattgaggtgaaattgccgtcgaacatcgtcccgttgcgcgaattgcaacgctatccggcatacaacaacgatttggtggctcagaagatggcacgttttttgttcgtcaatatgatggaacccttttcaagaacaaagctgagccttgacgaatttctgctgctccgtgccattttgatatgccatccaggcgctccaaatctttcgcgaccggcccaaaaacttctgcagagtgaatctgaacgctatgcgtgcatcttgttgcattttttgcagttaaaacacggatgttttgcgggtgcttcccgctacgcggaaattatgcaggtggtcgagagtatgctccactcgcagagcaagcagttcgcttatctgggacacctggcggatgttatgctagaggcgccaaaagagtagaaattaccaagaccaaaattgccattgtaaagaccccacaaaaaaacaattcaaaatttgaccaaaaactcataaaatgacttctttggtaaanaaaa

SEQ ID NO: 92180 - DNA, 623 bp, Heterodera glycines
aaacggcggaggtttccgtcccgagtccaaatcatttatttgctctgtcccgcgttggctctgattttgagcattacccaagcattgaccattcacgtgaccgtcactgagtccatttacaccgtccgttttctgctcgtcaaattgctcggcgttcttctggaggtgaacagagcagggcgcttcagcatcgagcagtacttcgagtgcgagttcttcaacgacgacgacattgtgaagccgccatgtgcgggccaaatccacgactcggtgctgtccaagtcgacgatgaccgtggtgatgaccatccacgtgatccccatcgtgatcttcatctatttgctggtccgcaacttgaagtccgacaaattggagcatctgtttctgtacatcgaaagtgtggggacggacctttcagcgatgccgggagagtacggcgacgcggaaaagggcggatatggcaaaatgacacatggagcttattcttcgcaagagcagcagacacttaaggaaacacttaacgaccttttgctcgggtttaacgccaaatttatgccgaaaagggttttttgcgattcaatgtccaaacaacagaaagttaatggcagcaacagttcaagcgg

SEQ ID NO: 92181 - DNA, 476 bp, Heterodera glycines
gccaaaagaacgtgtctgctacgataatcacgagtgctgcgcagtgtgggccaccaaaggcgcgtgtaaaagtgcgccccgttacatgaacacgtggtgtccaggcgcttgccgctacgatggatgtcttccgcaggcggtgaaacgcgcggcaggccttgactattattctcaatgcaagcgttggtccattttccatgaaaaatactcccacgccgaggggtggcgttcgtacagaccgaacttggtgttacgaagggagaagttgcgcaacgaatgtgagcgcaacccgcattggatggcatgcaactgtccgcaggcttgcagcaaagtgaagcgcctaaaggaggactgcagccaaaacatgccaaaggattatgtgctggaaccagtggacaatagttgataaaattgccttggttgtgatgatgatgccgcttaagcaaatgattttttatcgtagataaacgattatt

SEQ ID NO: 92182 - DNA, 319 bp, Heterodera glycines
ggtttcagctattgcatcttcgtgttctctggtggctatcatctgcaccgacggcgctctgccatgtctgtattcacagattaggcaaatgatcaacacatggcgctacgtacttcaagtcttccggcacctgcaccaactcgtggctggactgacctcatgtcacctgactctggtcctgactgcacctgctaaactacgacatcaccccttcacctccctctggcaagacttacaccaactgccccgattctgccgttgagcaggactccaacagcccacctgcccccctggtgctcccgcgtcccataccgacccc

SEQ ID NO: 92183 - DNA, 606 bp, Heterodera glycines
ttggagggcgacccggctaaaagaggcatcataccaaatgcggcacaacaaatcttcgatgaaattgagggaaggcgtgaacaggcccgcagatctggcaaagtgatcccctctttggaggtttccgctcagtttattgagctgtacaacgaagaactcattgatcttttgtcaccggaccggggctcatcctccatcaagatcatggagaacccgacaagtcacgaaattttgctgatgggcgcatcatcgcgaattgtcaaatcgcaggaggacattatgtccgcgctggtcattggtgcccaaaaccaaacaaccgcacagctgcagcgaaagtacgccgcattggagacgcgtgtgcgagaatacgagacggaactcgaaaacgggcgggagcagatggaacgtgccaagcgctacattgttgaccaggagaacagaccggagaaggacgcacgtcgcacactgctcaaattggctgaaatgttcgagtcgcccattcccacaacatcgaatgtggcccgtttacgcaaacagtttgacgacgacgacaacgatgctgatgacaattagagaccggacactgcttcaatcgattaatcgggg

SEQ ID NO: 92184 - DNA, 657 bp, Heterodera glycines
gaaatttacaaccattggttgaatgatatgcgacaatgggatgaggaatatccttctttggaattcatcgagaaaaagtccaaagagttggtcaccgttttgtccgaacctcccagaggaccgccagtcgatgtcatcagattggctacaatcgaagcagagagagaaaattcgactaaactgctgaaaaaactaaaagaatggcaagaagaacaaaaagttggaaatgcaatgcatcagccttttccgccacctcgtcaacccttttaccctccctctcgtcctattcgattcccgcattggccatttcatcatgatccttcacggccaagaccgcacttgatgtatgggaggtcagtgggttaccatccatatgctaaccagtttcaccggccaatgactcaagcgaggatgcgatctccgttttgctatggcacttctcaaccgtttggcttatatcgttatcctcgtaacattccagctaattccgcatcaaatttccaaccggaagcactcaagaacagtgctttaaagaaatcacaatctgcaatggagtggacgaccaatcgtccggctccctattttccccggaacgattacgcagctttcagtacttcacaagtgggaaacgcgagaggcacttggttctgatttatc

SEQ ID NO: 92185 - DNA, 647 bp, Heterodera glycines
cagcctttctactcacatgtccgagtcggttgggcacaagcaaatgcaattttgcaagcatcgcttggctatggcaaatttgggtacagctggcgcagcaaacgcggcaccgttttccacgatgcgtacgggaaacattttcatggacgagacttccgtcaaggcgatgtaatcggctgtctgattgtccttccctcaccggaagagatagctgcccaagggttagccccgtccgatgtgatgcccgcgtcgcgcaaagactgcgacctgatcaagttcaaacagacctacttcttcgaggagaaggacgagccacagcaagctcagcaacggctgaagcctctccagggctccaagattgaattcttcctcaacggggattcggtcggagtcgcctacgaggacattttcttcggccattacttccccgccatctctctgtttcaatcagcgcgtgttcgcttcaattttggtcccaaattccgccatgcgcctcccgccattcgtaagggcaccgcacaaccgatgagtgcgcgtccggagcaacagcaagtggaacaggcgttagcggacgcggttttcatgacagtcaatgtggaggaattggtacagcggaacgaggattattttgctgctctggcggccaa

SEQ ID NO: 92186 - DNA, 586 bp, Heterodera glycines
ggcggatgcccatcagtcgttgtcccgtgaatccgctcaatgcaataaaaatgcgcaccaaattctacacaaagtgctcacacaattggaggagttgcttaatgatatgaaaagcgatgtttctcgtcttcctaccacattggcccgacttcgtccggtgactgaacgacttggaatgacagaaagagcaattcttggacgtctgacaagcaaagacccagacgcactggctgggcaaagtccattacctccgcccggaccctttgtaactccaatggcacaaagtcgcttctcgggcatacagccgaaattcgccgcacttttgaagcccaaacaccaatcaaagaaagaaaatctgccagagaaagacggaaacgacaaacaaaatcaggaggaaacgcgaccgagcaaagaggaaaaacggactgacgctgatgttgagaagacaagtgataggagtacaaaggaagcggaaggaagttgcaaggaggaggcagaaccagtgcaagacgacaccgtgaaagaagactcaactgtcgaggagaaaacaaaagacagtgatttatcatcagttcagcaacctaat

SEQ ID NO: 92187 - DNA, 581 bp, Heterodera glycines
ggaaaacgcgtgagcgaaaagcgaagggaagtgctgagaaaggctaatctttcctggtgattcaccgattaattagcctcgggtgatcagttgttctgataatttagcacaatttatgccacggatgaaaagccgagcttttcgttgcgaaaaagctgcgcaattcttttgttggaacgcgacaaattgcaaaattggagccaatacatttttggagacaacaattgtgagggcaatgatggggaaaatgatggtcaacaattggcggatggaagcgaatcattgcgcgaaacgcaactcttggcctccattttgggccatttgcaaaatgcgcttgaggggcgaatggcaaattgcgtggatgccgaaggggaaaacgtagcgaaatggcaaattggggagaaggaggaagaagaaaaggggcacgaagaggaagcgaaaatggtggcatcgttgtgggaggaacaagtcgaaattgtgcgcggaatggcacggcatttgacgcccattttggacggagggagcaaaagcggggggactgatcagacaaaagtgacggatcagcaacaggccaattctga

SEQ ID NO: 92188 - DNA, 638 bp, Heterodera glycines
atttaagtcacttttggaattttatttattttaaatatggacgtcattgaatatgaatcgccgagagaacaaacagaaattagtgccaatttgctttccgattttggagtaactgctcagcaagcgtataaaatcgccgttactttttacaaaaacgaagaaaaagcgaatccggtgtccatcgactatttgtacaaattgcgttttatggccctttcgaagcaggcgaaatacgggacgtacagagaagaagtggcggactgtggatggttcgacattatgggcaacgaggcgaagaaaacatggaaaagaatcagcgacctaacttctgaacaggcaatgctcgagttcgtccgacttttagacgtcgtctgtccatcatttcgcgcacaattagaaatcgaacgcaaagcgaagacaaatgagccgaatcaaaaagccaccattgacaatccatcaaaggattccaatggacagtccaaaaacgattgtcacctcaatgtcttagtggacagtgcgtccatccgagcgcaagaagttcttgaacaatttgaacagcaaaaacgacaaatccaagaggcacttaacaaacaaacttaccaccagtttttggcctatgctcaacaaacgcatccagg

SEQ ID NO: 92189 - DNA, 566 bp, Heterodera glycines
agaataggcgaaaatctgctcactttcattcccgaagaaattggacacttggagaatttgaagagcctttacttgaatgacaatccaaacttgcacagtttgcccttcgaactcgtcctctgctcatccctcgaaataatgtccattgagaggtgtcccctgtcacaaatcccctcagatataatcgaaggcgggcccagtctagtgatccaatatctgaaaatgcatgggccctatcggggagttctcaacatgtgatcgttctgctcgcatttttctgattactcaatgacaaaagatgccaatgcctctggactgctgccaattgaagattcatcatttgttgctgtaacataatgtaaagcacaaagcacctcttttgttctttttctcaatacttcagcgaatattttattgttatcttttaatctttcctatcctatttcccgtttcattttgccgttcgttactatcaaaatttatattatgtaagcccgtcatcatgtcagtcattttttgacaggcattattttgtttgccataatattatttacgaatgtatactt

SEQ ID NO: 92190 - DNA, 659 bp, Heterodera glycines
attcattggtatttggcaataattgtaaacgtccgacatggcatttgctctctcaataccacggacaatgaatccatttttcctacttcaagtcattattcaccagtgccgcatcttatcgtgctcaattcactcatcgacccagctgaagacaaacatttggcagttagggaccaactcggagaatatttgcacttggaatatgcagataaactcggacaggacaccaagacttatttcaataagcaaatgatggacgtggttgtgccgacgatgctgccccagcagaagaacttcatcgactgtggactatttctgctacattttgcgcaattattcctcagcaatcctccaaaatttatatcgaggcacagctcatttcgccgctggtatccaacttttaaaatcaagcataagcgagatgagttaagaagtgtgataatgcaattggcgtcccatgtcaagtcctctgatttcgtccaacttccaactccgaaacggaaaaacaaaaagattggccgtcgttcgcaagtggataaaatgcagatgatcttagacggaatggcactgatgggccgaactcgacgttacagcgactcggaattagacggcattatgaaggacgaacatttctcttgtttgtacagaccgcgctcgtt

SEQ ID NO: 92191 - DNA, 141 bp, Heterodera glycines; identical to SEQ ID NO: 79427

SEQ ID NO: 92192 - DNA, 569 bp, Heterodera glycines
cctcgtgccgaattcggcacgaggcgcatttacgggagctgccctttacattaaccttgtggaacagccaagccgtctgcaattggaaaccgctgccgcgttgaaacagtttaaagagagttacacacgtgcgattcccatgcaagctggtttggcaattctttctggcattgttggcatcggtggtacaattaagactggcgagaaggcttgggcttttggcgctgctttaatgttggccaatattccatacacttttctatgcatttttccagtcaacaaacgtttgctggctaccaacgaagcaaatgctgatgaaaacactcgtgcagacatacagcgctggggccgacttcacgcggtgcgcactgtccttggtttaattgccactggcgtttatttatacgcagtaagcaaagaataaaaggagaaaggaactttaaatccgacaacataacataaaatgacatatttttaatgtcaattttgcatattcacaaatttgtgtgcgtacactttcaatcacatttttatatttgcactttattacataaaaacattaaagcgtt

SEQ ID NO: 92193 - DNA, 289 bp, Heterodera glycines
tggcgtgctcgccacaacccctcgtgatggcacaaggcgcaacccgttccagcaagacgcgtccatcattcgcgaccgcgaaatccaatccggacaagtcggtccctgtggccgcacgctcgctggtggcaacaacaacatgcagtccggcgtccaggaaatcctgtccgagtttggcgagctcccacttgtggcccccggctccgctcttaccatgacggttcaccaagtcaatgccgacggcgctggcccttacacctgtgaagtttccatggacggcactggcgcc

SEQ ID NO: 92194 - DNA, 630 bp, Heterodera glycines
aacaaactgaagtaataaatttcaattcaacaatgaaagtggacaaatttttggacaaactttcgcgaaaactttcgagcagttcgctttgcttttgtccagcaataaattattgcgatgcaaactttggataccaccgaaaagcgtcgaccaatgagcggcaaaaggaagaagcggctgaaggggcggcggacgaagcggaccaatgttcacacattagcatcccggttcagtaccgcaaacattcgtccacctcggaaacgtcgtcactgtacgaccaaattgtggaagcggaagttgagaacgaagagacaatgaccgaaacattttgggtccgacgccaacaacagcaccaattggtgcaggcgaccattttcccaattagcaaacccttcgcccgcggcacaatcagaatggcaaagatgccaaagcgcgggtcatcaaaaaaacggcgcaattcattccccgcaggcattttcaatgaacgttttacggatgatctcgtcagtgtccaattgaccatctcagagtttaatatggccaaaaaatgcgaggcactcaaaaatatgaaacaataaaataaaaaattgaattttcatttttaatattattttgataatttaatttaaa

SEQ ID NO: 92195 - DNA, 649 bp, Heterodera glycines
aaacaatcgacagattaatcgcatcactcgtcgattgctgtgtcgtctttaagtttgatgggtggttaatcaacatcgaaagtgaagtgaattcggactctgtcgactatttggaatactttctgttctctttgcggaatgctttgcatgataatgttcacaaagatgccaaaattgtttggtatgactcagtgacaacggacgggaaattatcgtggcaaaatgcattgaatgccaacaatttacgatggttcaaaagtgtcgatgccttctacacaaattacgcgtggaaggaagaacacattcagcaaacggttcgaacttttctttcgacttctgaactttttccgaggaaatcgctgttcgatgttttcgtcggaatcgacgtttttggccgtggctgtttgggtgatggcggatggaattgcgtccaaccgatggaaatccttcgccgttacgctttgtccgttgccatttttgcccccggatggatttgtgaaaaattttccggccaaagtcatcgcatcctttttgacaacagttttcgtttttggaattcgttgagtacatttttgtatccacatgctttgcgacaacggaacttccgaacagattttgcggttgcattcgcatcggaacgccccaattg

SEQ ID NO: 92196 - DNA, 661 bp, Heterodera glycines
  unsure (1)..(661): unsure at all n locations
gtcgcattcattttgctgcttttggacaggaaattaagcacagaatttagggattttcttggtgaaaattggcaatatgaagacggcacgaccgaccgattggccaaatccgcacaaaatcggattcaaagcacagcttgcaaagttcagctaaggaatttcctccatgacatagcatttaaaaggcattggccggtcaaagaaatcgcgaagaattgcgacgatttgttcgaagttccctctgctgccaatgctttgaaattccgtccgttttcccccggcacttcccatgtcaaaattcttttcctcctccaattgaatgggagggattctcgccaactccgccgtctcttccgttcccttttcctcccccgtcacttttattttgtccacgtcgacagtcgccgcgaatttatgctgaaaggtcgaagagtctttgagggcggagggattcgcaaattttcgcgtggcaaagcgtcggatggccaccatttggggagggtcgaatttgctcgaccttttcctttggacggtggcgganacactcggcgaaacgaattcgaattgggcgcaatgggattatattgtgaatctgagcgagacggacatgccaattctatcagtggaagagttggaacagaacttggccgagaatcgcggc

SEQ ID NO: 92197 - DNA, 283 bp, Heterodera glycines
gaagaacgcaacgaactctctgaagtcgaacgagttcgaagaagccatcctcaaatacagcaaaactgttacgttgaatcgagaccctattttcttcggccacagagcgtgtgcttattgtcgcctggagcaatatgatctcccgatccaatactgccctacggcattggcattggacccaaactatgcaaaggcttactggagaatgggcgttgcactttcatgtcagaatccctaccattgcgcgtgtgatgcgtacaacaaggtcttggagttggatcct

SEQ ID NO: 92198 - DNA, 577 bp, Heterodera glycines
ctttatttgaacaatggaggttgacgtgtcttcttcatctgactcggccacaaatgttttgttcagtttacgtgccgatcggagtctgttggacccgacttttgaccggtacattttgcgtacagaaaaactggcaatgttcaagcggagaatggacgacaaaattcgtttcaaattgccctccgacagccaatggggctaccaacaaattcgggcccacactttggcctcccatcttttcttcgaccatttcgcttcctccgttgaccagcaattatttttcgcatttctcgacgatctccgtctgatttcttttacatttgatcgaacatccaaccgttggtccgtccccgtccaagtcgcggacattggcacttcctccgtggcattgtccccctcatttgtctttgtgtctgaggacgacgcttcttcccagtcgttccccgagagtttacactttgtcgactcgcgcacggcgatcactgcgcgcggactgaacactttcagtgtgtgggatacgggcgagcgacgcccgaccgattggacgacacaaaaatggaggggaatgtttcactac

SEQ ID NO: 92199 - DNA, 640 bp, Heterodera glycines
ttttaaatgatgtcttcgagttcttttgagcaattatcgtgcgaaattgccgaattggagaagttacgccaacaatcacaactcccaaatgttcaaaaggctatcgatgagctaattggaagatggaaagtgaaaaaggaagaacagaaaatgaaaacggacaaagggacagcggagacactttcagccccgacagaagcaccgaaactgatcagcggaagtgtccacgttcgtccgacaaagaaactgaccacttacgcgtttgatgagagtgacaagttcgtgaagctgtactattccctgcccggtatttccgactccgtccccggcacaatttcgaccgatttccgtggaaaactcttttccattgtttgctccacctccaggggattgactacgaaaatccagtgcaaggactttggcagggtttttgaaccggaaaagttggtgggaaaccaaaaaacggtgaccaatggttattttgcttaaaaaggggaaagaaccccaaaattggggatcccttcggaaatttggaaaggaagtggggcaaacggggggaaaaacggtggaaaaaagagcccccccccaaaaagttttgaataaatatataaaaaaattttcccaccccgcaaattacggg

SEQ ID NO: 92200 - DNA, 519 bp, Heterodera glycines
cggacggacggatggacaacatgaatgtgtacaaaacaagtgaatgggacgaatggtgtgcatttgcaaaggccaaatggtcgaaaaatgagacaattcatctttttatttttgcaaaaagcaattcttgggaagtgtcaatgacattgccataaggaatattaaaatatttcatttcaaaatttaaatttcaatagaatctctgtacaattcggcctcgtcagagggaggcgtcgaagtcgtccaattttggcttttttgcgcacatcaactgctcctcgtccgagtcgctcaaagccaagtcggcgttcagttggccagacgtgtgcatggcgctctcctcgagcttttcctcggaggaaacaggcacagcagcggagattaaagtgtcttcgtcatcccacactgaaaggatggaaaaacaaaagatgcaaagatgtgaattgcaatatttccctaatccttccgagtgtttgtcacttcacttccggtcaaaattataaattacaaattttaaaa

SEQ ID NO: 92201 - DNA, 627 bp, Heterodera glycines
gtcagattggcgaacaatctttccttcgaggatttgaggcgagagaaggaaacgctggagggacgagtggccgaactcaccaaagcactcgacgacgcaaaatggagggtcggagaattggaagcggaaatgacacggaaggacaacttcgaggaacagaagcgaaagttggagtggcgacttggagagatgacacagtggtggaacgacgcgaaatggagaatcggcgaattggaggcgactttgggacacgagggaagcgcacgcaataaccgaggggaaggcaatggagacgacaagtgaaagggaagggacggcgaaaagcaattggtcggtttagcttagctgagactttgggacggttcagggaactgttgagggacggcattttgctcatcagaaaacagtcacatttggacagagacaagtggaagatgatgaaatatgagcatgcactggagaaggatgttcgtctgaggagttgttggttcgaagtcgattctgaagggcatcaggaagtgtttctgattggcacttttgtgaattgggagtgcgctttgttgtgtgagcaaattcctgaaaagccttcacgtcggggcatttggcttgaccttccccccgggcatt

SEQ ID NO: 92202 - DNA, 650 bp, Heterodera glycines
tgagtttcccaaaatgtcctccattccaatactctcctccttttcacgtgctcttcaaatgcgccaacatccgttgctcttcggcatgattcatgtacccgcattgcccggaagtcccctgtcaaaattgagcattgcgcaattggtggacagagtgagtgccgagacggaaatttatgccgagtgcggaattgacggagtgattgtggagaatatgcacgacttgccctaccaaaaaggaattgaccatgggcccgaagtgtgcgcgacaatggcacgcctctgcgcggcgtgtgcacacactttgggcgccaatcgtcgcccaaagatgcttttgggggtgcaaattttggccggtgccaaccgcgcggcgctggcggtcgctcaggcggcggaattcgatttcgtccgcgctgaatcgttcgtgtttggccacgtagcagatgagggttggatggacggatgtgccggcgaattgctccgttaccgacgcgcaattggcgccgaccaaatagcggtcgtgacggacattaagaaaaagcattgttcccatgcgatcaccgccgatgtcagtgtcgcggaaactgctcgtgcggctgaacttttcctcgccgacggtgtgatcttaagcggtgccgccacgggtgaag

SEQ ID NO: 92203 - DNA, 647 bp, Heterodera glycines
cctctacagtgattcgttggcccgttatgggaagtccccttacctttacccgctctacggattgggcgagttgccacaaggatttgcgcgattgtcgagtatttatggaggcacgtacatgctggacaagccagtggacgagatagtaattgagaatgggaaggtcgtcggagtgcgaagtggcggagaagtggccaagtgcaaacagctttattgcgacccctcctacgtggacagcactcgtgtgaagaaattgggaaagatggtgcgtgcaatttgcattcttaatcatccgattccgaacaccaacgatgcgccgagctgtcagattattattcctcaaaaacaagtcggccgcagttttgacatttacgtgtcttgcgtttccaattccaaccaagtgactccaaagccgtggttcatcgccactgtttcgaccactgttgaaacggagaaccccgaggctgagatacaaccggcacttcaattgcttggacccatttttgaaaagtttgtgacaatatcggatttatacgagccggtggacatgggctatgagtctcaaatcttcatttcgcgttctttcgacgcgaccactcactttgagaccacttgcttggatgtgctggacattttcaagaggggca

SEQ ID NO: 92204 - DNA, 637 bp, Heterodera glycines
tttcgcttttccgtcactacggccacccgcgttttgcattccctttctatcataaaattgagctgctgattcttgtaatcatgtcaatgggtggccattgaccgcttctgcatcggtggcacgcgaaaaatggaccaggcaaaacaatgcctgtcccgtttttggcattggctgcgaattcgtttaattgccttatggacttttcttaaatgggtcggccatgaaatttgttgttgcggcatatgcttacaggaggaggatgatgtggagaaaggacgcacaaagaacccttttgatcagcaagtgacaatttcgacgacagcgatgagtgccggtactcaaaatgcgacaggacagggccacgtgcacaaagtgataatggtcggctcaggcggcgtaggcaaatcggcactgacacttcagtttttgtacgacgagtttgtggagaattacgaaccgaccaaagcagatgctcacagaaagcaagttgtgttggacggggaatattgtgcggtcgacattttggacacggcgggacaggaggactattcggcgataagggacaattactatcggtcgggagaaggtttcatctgcgtcttctccatcaccgatttggattcctttgatcaactcg

SEQ ID NO: 92205 - DNA, 644 bp, Heterodera glycines
cctaatttgtgcttccctttgtccaaatgaccctcattagcaaatgttcgcttctcctccttttcgtcgcgcccttttcccatgcgtttttctccggctttgaggtttctcccaacgcggcacgtctccgtcggcagtgcggttgcggcgggtgccctcctccgcccagcggcggtggctctgtccaactcggcatcagctgcgactcgccgcgccctccgccgccccctccgtgctgcggttgtcagtcgtcttgcggctgcggtggcggcggtggcggcggatgtggcggcggttgcggcggcggtgccattaaactgacaattggctgcgactccccacgccctccgcctccccctccgtgctgcggttgcgggtgcggctgcggcggcggatgtggtggtggcggttatggtgcaaatggcggcggcggctgcggcggttccattaagctgacaattggctgcgaaggcccaaaagccccgccaccgccccctccgtgctgcggttgcgggtgcggctgcggttgcggcgggtgccctcctccccccagcggcggtggctctgtccaactcggcatcagctgcgactcccctccgccccctccgtcctgcggctgtcagccctcgggcggctgcggttgc

SEQ ID NO: 92206 - DNA, 442 bp, Heterodera glycines
aagtgccttacgcggccggcttttcctacaaccgatacaacaccgaattggtgacaagtgagctagctttactgtgcacgaattaagctgtataagctgtattagaaccatctctctctctctctctctctccgcattctgccctatctgtctctttcctatccgtctttcctctcactcttatctttctctctctctctcgttctctctctctctttcgtcttctcgactcctcctccttcttgttagatctttttctcttgcatttctcttcttcaggcagtgaaccgggcgaattttcccttgcggcattgatcaatgaaacgcgagtggctaccgaatgggaagaccccaaatatgtggtgaagccgggcaatgtgcaaagcgtttggctgcattggcccggaatcatcagccgaggccgaatgtacactgtgccggc

SEQ ID NO: 92207 - DNA, 622 bp, Heterodera glycines
attaaaaccaacctggcaagacaaagatttctggaagctttaattgtttcatcgagggggacttcgaccaaaaagagcgatgccgggaataagaaattgcgaactttgatatcagttcgatcgttgcgcgaacttgtgaaccgaatggttggaaatgataaagttgcaacggataaatctgaatctgattgtaaacagcaatcgtccgttttcccctatttgttggctttgcattctgccatcgatttttactcaattttggatgaaaaatttaccgattgtatatcgactgacgaccaaccaattgctgagattgaagcgtgtgtgaagcatctgtctcaaattcaatgtgatcgtactaatccgttgttggcaaaggctttgtcaatactcgaattcgtctatgacaatagcggttcttcggccattgcttcatctctattaaatatcgccaagtgtcgtttggaattaaacgatttcgttggctttttcaatttgaatctgtatcaaacttttgacaataatgctcaagttggaacgccaataactgccaaatatgatgaaaataatttatcgacaaaaattcccacaaaccttttggcaaaattgggtgcaactttat

SEQ ID NO: 92208 - DNA, 523 bp, Heterodera glycines
gccaaatgcacttttcttccgtgctgctccttcttcttgtcaatttcgtccttttgcttcttcttcggccttccgtcgatgcttttccccatcctccgccatgggccggccctccgcgcccgtggggatgggggcaaaggccgtggggaggcggcggatggcgacgacggcaccacggaagaggccgaggggacagcggaagctcagaaaggggaggagggcgctggagggggagaaaccgaggcgacgattcgtcggaagaaaagcacagaggcagcaaataccaacagccgcaacaaaatgcacagtcagtggccgtggcaattgccgtggccggcggcgcgacgggaaacgccgcggggtaaacgcatgacgaagcgccaattaagggaaattagcagaaacaaacgcatttgacgactgaccggccgatggccataacatttattttctttattacactttgtgattgtaaaaatatgaaatttcctctttgataattgtgcccacggcactgtccctt

SEQ ID NO: 92209 - DNA, 590 bp, Heterodera glycines
gcctccgtccgtgccctcctcttccctttcgcccgtccctccctcccctcggccaaactcttacattgacagttccgactgggaccaactgactgggccctacgcgcgacagccgtggtattacggtcacataacacgggaacagtcggacactctgctgaaaacgcgcggcgttgagggcgattttttggtgcgcgacagcgaatcgaagcccggagatttttccatttcgctgaaagactcggccaaaaacaaacacttttgggtgcaattcgacgccgcgagcgcccaatttataattggcaatcgccgattcgaatccatggaaaaattaatattgaattatatgagttcgccgatattcagcgacggaattgtgaaccttttcctgcggaaacctttaccaaaataaacgacggaacagaaaagtgagggggaaaaacagctgaccaaaagagcagcgaatgaaccgccaaagaaaagggacaaaaggccaaagaattcattttcatttttttgattttcaaattaaaaaccaaaaactcatccgtttgaatgtataaaataacagacaagacaaaacatggtaa

SEQ ID NO: 92210 - DNA, 649 bp, Heterodera glycines
atcagtgatcaaccaaaacccttctgttactaagaccagcaatgtgggtgaaaatgccagaatggaattggcccaaaaaatcgaaggtcagatcacgggacgcatcgacggcattcgtttgttggagcgggaggacggactgctcgttgtaaatgaggacagaacgctaagagtgctgctcaaacccgagtcggaaatgttttggccttcaattatccatgacttgccgcacatccccacaaaactcacctgcagtgaacagaaaaacacgattttagtcggctttgcaaatggacagatccacgaatattcaattgaaaactatttcaacaacatttccttcacacggcaatggaattcgcacacccaatccatcagtggactcggctcttcacaaccattagaacaaatagtaagttgctcaaaggacaaaacagtgggttgacaatgcacgtcgaccactcgcaaaatcgcaagttactgtacgggtactccttgtaccacacttcaattcaatggccatgcttccatcgattttgtgggcgattcttcccgagatatgtcagtgcttcggctggtggttgggacgcaacatctaccgctattaatcaacacattatctgctcataccgcggcaatcactgatcta

SEQ ID NO: 92211 - DNA, 613 bp, Heterodera glycines
gcattcctgtacatacctgtacataatacctcctacattcctgtacataatacctccataatctctccctcctccaactcttcgatatttcattactccatcggacggacatgcgcgaactgttgttcaagaccgccaaccaggaacagcacactttcactcttgaggtcgaggagaacgaaacgatcgctcaaatcaagcaaaaaattgaggacagattcggcctcgcgttcgaagcagatgagcaagtgctgttttacaatggaagagagctggacgacgcgctgacggtggacaatctcaacattgaagcgccgaatttcattgtcgtcttcgtgatgaatgatttggttggtgctgatgaaggtgagatgttggtgcagcctatgcacatgaacgatcatccggcggcggcgcaagcgggctatgtgaacgaccacgctgcacaccatcaccaccaccatcatcatcaacaccaccagcagcagcagcagaatgggatgctcatcgatcacaacgtgtggcagcagattcttgctcccgtacaacaactggttcagctgacggcgcaagattacccggccatccgtcgactcatggcgctgggctttcc

SEQ ID NO: 92212 - DNA, 92 bp, Heterodera glycines
tccaatggaaagcgatccgtccgttccatccgccgatggcctaccaaatcgcccaattaactctcgagatgatgtaactcaattaattgcac

SEQ ID NO: 92213 - DNA, 636 bp, Heterodera glycines
gtcgcttcgggcagtgccgattgcaccgtggtgctttggcacttcagccaacacttgggcctactcgtcggggattacaatatgcctggggaagagccgtcgcctcgtgccattttgactggacacgactcggaaatcagtgcaatttgcgtttcggctgagcatggcattgtcctctccggctccacggatggtgcccttctgatgcattccacgcagggggacctgctgcgcagcatcatctgctcaaacggcaacggaacggacacattggcaccaatcaacaacattctgttcagcagagactgttacattgcggctttcattggcaacgattccctcgccaccttttcgaccaatggtcagctgctgaaacagcgcgggtacaaatgtgccgagaagattctctgtgccattttgtcccgcgacggagaattcgttgttttcggcactgacaatggccgcatttccatccttcggcttttcacgttgcaattgctctacacttttgcccaatgcgacagtcctatccgttcgttggcactcagcacaaaccagcggctcatattcggcggcttggactccggggcaattgtggtgttcaacgtggacttcaaccgatggcaccattatggc

SEQ ID NO: 92214 - DNA, 624 bp, Heterodera glycines
cgcttaaaggcactctgtcactgttggagcgggtgctgatgaaggacgtcgtctcaccggtgccgcctgaagaagttcgcgcagtgatcagaaagtgcctggaggacgcggcgctggtcaattacacgcgcatttgcaacgaggcaaaaattgagcagcgcatgggcctggacgtgagcccacaacagcgcatcgaggacatgatcagggtgacggagctgtgcattgatttgttgaaagagaacgaggaacaccacggcgaggcatttgcctggttttccgatttgcttgccgatcactccgaaattttttggtccctctattccgtggatttggacgccgcgttggagctgcaaccgcccgactcgtgggactcattcccgttgtttcaactgctcaacgactacctgtgcattgatcaaaacttgcggatgggcattttccacagcaaattgatcagccaattttctccgatggttgtccgctacattgatttgatggagcattcgatcagccaatcgattgagaaaaatttttgccgcgagaaatgggaagtgcgcaaagacggttgctcaacctcggaggatgtgttctggaaattggacgccctgcatgcattcattc

SEQ ID NO: 92215 - DNA, 181 bp, Heterodera glycines
tgagaattctcggcaccgcgtggaaagcgattcgctgaaaatcagccatcaccaaaacgacgccggaacggaggagcagtgcatcgactggaaggtccggggtacgaccgccgattaaaaagacggccgattggccaaaggaaagggaaacgagcggacgacggaggtcaatttccgatct

SEQ ID NO: 92216 - DNA, 656 bp, Heterodera glycines
aaaaccaatcgccacccctggcgatggccccctcacaaatggtcaaaagcagccaaagtcatacggatgggttctgccagttgctccaccatcagtcacgtcccccgtgcgcttcgtccagcagttcggcttcatcttcgggctacgcgtccatggttaatagcattgtcaatccatgcgcaaatcgtttggccggaattgacgaggaggaaacagcgattggagggggaggaagcagcagcagaaggcaatcgacgaccattggggagagtggggaaaatgagggcgaagagaaagaaacagcggtgcaagaagattggcaagcagttgctgaagaagagcagaagcaacaacagaagggggccatcggcgcatttgcgtcgcccgaggggacaaattgctgtagcagcaaaaacccattgatgcgagatgattttcgccaattgccttcctctaatggactcgtcgaggcactttccgcctcctcctcttcgtccgcttcctcctcctcttccgcctgttgctgtgcggagaatcgtctctttctatgctcaccgcagcagcggggactgacttttccgtccccaattcgcccctccggcgaatgttcatcttcctcctcatcatccgcttcctcttccgcttcatcttcctcc

SEQ ID NO: 92217 - DNA, 313 bp, Heterodera glycines
tggaaagcctctcagagtgaatgtgaccacaatggacgctgacctgaacgagctcatcattgagagggattcgctgggccaacatctgttccacaccgtatgcaaaatcatcggccttcgggagatatggtattttgggttgtgcttcaccaaccgcaaaggcttcacctgttggcttcaaatggacaaaaggataaaagacccaagcgtgcccaaacaggaggacggctcactacacttcctcttcctggtcaaattcttccccgagtcggtgaatgtcgagctgatccaagacctgacccggcatttgtat

SEQ ID NO: 92218 - DNA, 640 bp, Heterodera glycines
gcgtcaccatacccaaaacggctgcttgaacatctcgaccaaagcacaagcgaaggcgccgccagtccatcggctgacaatgagtcacccgccaagcgaccgatgaaagcgttcggacagatttggcccatcgccagcgccggtcgaccatcgacgaccactccaacgcgttggtccaagtcggccagaaggcttttgccaattcatgaaaggggttcgccttgcgatgcgccggagagtgtgcaaaaggcgcagtcgtcggacaacaaatcggaccaatctgagaacaacagcaacgacaaacagcagcacgtggacgagcagctcgagaaactgccacggatggacgagcagcaaaaagacgatgaaatcgttttggttgggtcggcgaatgtttgcgttgtccttccggaagaggaagccaacgaaaacagacatcagcaaaagcgggatttcgagcaaccgaacgaaacgatttcaaatgattctgacaaaacagcgaccgatttgggcaccgtttcgaaggaatctgaagagaatgccgtgcaaagtgaagcgatgtttcataagaaactgacgacggacaacaaatccgaaacatttgagagaatcaaaaacaaattggacgaacaacaagaga

SEQ ID NO: 92219 - DNA, 575 bp, Heterodera glycines
cagcgccggtccgactgcacaaatttatttgccggagcaactcttgcggatgattgttatccaatccattttgacgccgacaggcaaaggctgacattgagttgggctgatggacatgaaagtgcatttggagtccgggaactgctcagttgggcaatgttctcacaaaagcattatggcgaagaatgggaggccggcgcggaatgtccgtcgcgttcgctttgggacgccagagggttgcgtgaagtgccctccgtgtccagttcagaattcgacttcgctctattcgctcgtcttttcattcgttttggcgttgtctctgtcagcggagtgaattcgcgcgatgagcgggcgacgcacgaattgtgtgaaactgtgtccaccatttttggcacaatttttggccaattctggacctttggcaccggtttggacactcaaaacgaaatggagtctcatgatgacacggcctacggaagtgaggcgattgggccccacacggacggcacttatttggaccaaccccccggaattcaagtttttcactgtctccgccccgctccccgcggcggtca

SEQ ID NO: 92220 - DNA, 593 bp, Heterodera glycines
cactgcacagctgcgagatgcgcacccaatatttgtaccgtaactcgaagagtgccgtgggaaactacggtgccgccatgcaaacgatcgtcgccgccacattgcatgcgatggactccaaacacacataccagcaaatcccggcgatgagtgcgagcacggaagagacgctgatgtactccaacagcaaggaagtggatgagaaacgcttttacaggaacggtgacgacgactttggcacggatggaaagggttcgccttttgcgcaagtgccaaaagtgcagcaggcgcagcaggcacaaatgatcaccatccgcatgaatctcgaaggaatgtggcggatatcacctgttataaatgtggcgaaaaaggccattacgcaaatcgttgtacgaagggaattttggcctttttgtccaacaccgccacagcgagcgaccagcagagagaacagccgcgagacaatcaacagaagaaatacgccggcggagaggggggacgaaaacgcaaaatgacggacaggaaaatttcgattgatattttgttttgcaaatttatttgttgctatttccccctaagtgagaagaactgaa

SEQ ID NO: 92221 - DNA, 527 bp, Heterodera glycines
ttttcgtctcttcaaattttctccctgacattaccatctgaaatgagtcttctgttcgttgtgtcaatgtttgtcgatggttgcgccattctttggagttattgggatcgcttcaaaaaaccaaaaaagaaaattttcatttccgccgactgttggctttgtgtcttcgatttgcttgcgccttcacaacttggcctcggaatttcaatgatcagccaccgttttgattattacgtggacgaacacttcaagacgcgcaaatggacgttgaaatctattcgaattcgacgcaaaattggaaagaatggcacaaagcaaatggcaattgtcaattacgattggaaaccattgccaattccgaaaattcgaatgccacgcaaagtcatcggattcaaaagcatcagaatcttatttatcgaccgcaatgccatcgcttttctccgccatttttgtcaaattttcgccgtctgtccaattaatttgtccatccacacggacaatgatgattatcgcattttggagttcgt

SEQ ID NO: 92222 - DNA, 641 bp, Heterodera glycines
ctctgttcttgggtttaacgggtctttccacggacgaacgcttggcgtactgagcataactcggtcaaagccaattcacaaagtggacattccggcctttgattggcctgtcgccaatttcccgcgctatttgtacccattggacgagaacagacagtacaacacggagcaggacgaacgctgtttggcccaagtttcccaactgatcgacactcagaaaagcgctggtcgtgacattgccgcagtgattgtggagccaatccaatgcgaaggaggtgatcacaacgggtcggcccaattcttccgtggcctgcaggaaatttgccaagacaacggcgtctttttcattgtggacgaagtgcagacgggcggtggcatttgcggaacattttgggcccacgagcaatggaatttgccaacatcgcccgactttgtgactttctccaagaagacgctcttgggagggtatttttacaaggacgaattgcgagtgaatgagccttatcgcatttacaacacgtggatgggcgagcccaccaaattggtgctgctcgaaaaagtcgtcgaagtgattggccgtgaaaatttggtacaaaagacgggccaaatcggtgccaaactgttggacggactcaaagcgt

SEQ ID NO: 92223 - DNA, 654 bp, Heterodera glycines
atttggggcagtgaacggcccgacgagtgggtgatgctcggctaccatttcgacgcgtgggttttcggcgccatcgacccgaacagcgggacggccgtgctggcggaggtggccaagggattggcccaaacggtgcgcaccaccgggtggaggccgaagcggacgattgttttctgcgcttgggacgcggaggagcccggactgatcggatcgaccgaatttgtggaggaatttgcggatgttttacgcgagagagctgtcgtttatttgaacgtggataatatttccagcaatgtcacactcaatatccatgctgtgccctcgctttaccaagcagcggtcgatgcgtccaaatcagtccaaaacccaaatggccaagggtcggtgtttggcccgtggattgagaattacccgtcgagaacgagttggctcccggatttccctcacatgggcatccccgggggaggcagcgaccaaaaatcttttctcgactttctgggcattcccgtgatgatgatcacttacattgaccccaaacgtggtcaatacccgctctatcacacgcgttacgaattgccatttgttcacgagcaccttttcgacaacaatcagttggcggtgcataaagcccggggcgaatattgggcggaattg

SEQ ID NO: 92224 - DNA, 527 bp, Heterodera glycines; identical to SEQ ID NO: 92221

SEQ ID NO: 92225 - DNA, 632 bp, Heterodera glycines
gagcaatgagtaaaagaaatgcgtttatggactaagtgtgtgcaactgatcacttatttgctgctgtcctttgtcgccttaactttcgttttatttatgcaccaatcgttacgacaattcaaaaaggtgaattgtctctcattcccttcactttcttcctttgctaatgttttggtggttaaggactttctaaactcagtttaaaataaacaggaaaaagtcagtttggatgccgaaaatcaagcgacagatttggaacaaaagctcagccaattggaaggactgattcaaatcgaacggcgagaattggagaaactgaacagaaaaattggaatcaaagcaaataaataccaaaggaaggaagcccaagtgggcaaaccgtgtggaaacagccaattgccattttggtcttcgtttgcaatcgattggaggcggccaaaacgcatttgcaaaagttaattcgctttcgccgagatcggaaggaactcttcccaataattgtgagtcaggactgcgacaacgattctctccagcgaatgattcgcaatgaattcggcaacgaagtccaacacataaagcacagcagcagcgaaagcgaacatttgaagccgccacgggagcaccgacaattc

SEQ ID NO: 92226 - DNA, 543 bp, Heterodera glycines
ctgaccaacgggacggtatccgcaccgggcacggacaagcagctgtcgctggaggaggcggtcctgcgcaaggatagaatccaccgaaaaggctttttcctgctagtttgggcatgccttctctgctacctcctcagttatttgcccggtgcatctgctgaacaaggcactgttgaagccctccacacgcgctgggagccggaagcaattggccccatcactttctctgacatcaactacgattatgaagactacggccaaacaacagaggagccaccaaccacgactcccccgccgccgtccacaacaagtccgcctcccacagaaccggaaccgccctctgccaccacgccaaatccaacagtgccaacaccgacgtggtgccctgttgtcatcactggtttggcagcgctggtcgtccttctgtgcctctgtttgtgttgctgtccgtcagtgccacaatcggttgcaaattggtgccgccgttttgttcatcgcttctgtacatgtgccggcgaaggtctcccaaggacgactgcccaa

SEQ ID NO: 92227 - DNA, 554 bp, Heterodera glycines
ttaagattttccgtcactaaaaggcgctattttttattacatttttcgaataacgaaaaatggctgctaatatttctgaaaaggatgaagcattgagcgatctcaactgtctcttcgttcagatgaagaacaagaagttcagcttcagtttgatgtcaaaagtggcacagaaatttggcgatggcggagtcgccgcaaaagtccttctgccatacgaagtgtacaaagaggctgtcgatcttttggcttccgctcgctttgaaattgattatcgcgtggtgattcactttcttcccactttcaaagccattttcctccatctcagttttgacgattggcaattggcgatggaacgtttttttgagatcacagaattgcgtcagactcatcgaggctttccacgagaggaaatgcacacgctcagtcactcatattcgcttgctttgttggaaaatgccaatttcaacaaagaaactgagaggacttctgagtttctcttcactgactatggagacttggccaatttcattgacaattgcttcgaatgccaatgc

SEQ ID NO: 92228 - DNA, 484 bp, Heterodera glycines
gcttccgtcgcgtcttctccgagttcagctccacaaattttgtgaaccaatcgttcggatgcgctacccgaaattggtggaaaatgtgatcgacactctaatggaactgatcaatgaagggggtgccccctccgatccgatcaccgtttttcaattcgtcggccttttccgcggcaaatcattcgttgcttttgtggaaaatatttcccacgaagcatggattaactccaatttggcctcggggcatctttcttccattcaaactgtgatggatcccctccggggagtgccggtggtgccgccgttggaaagccttcggcacatcgctttggttctgtccagtgaggagacaacacaaagtgcaacgagttcaatagaaaagtatttccggaaagcctcgtccgacctgcggacggacctcgccgcctgctttttgtgtcttctcgaacacaaaaaaacgctgacgcgttgcggcgcgtgccgc

SEQ ID NO: 92229 - DNA, 528 bp, Heterodera glycines
gtctttggaaaatttaaatactccactaatattgactattctctcggctcattgggacacgaggaaatctcgtgcaattacattgatctttcttacattcgggttaatagtccggagcttgtctctgagttcgacggaaaaataagcatttttgttgacgcggtcgatcgaactgtcagcgacggttatttcttgactggttctgcctcaatatccgccgcttgtgcagctccatcccaaagagagggacggatttacggaattgatcgttgggaaacacttttccctgtgcaaattaaattggagttttaccagcgaaggaagcgacagtggctgattccggaggacacagccccgtgggaagtgtgggagctgcagctgaacctcgttcgcacacttagcaatgaggacttctttcggatgagagagttcactgctgaaaaactcagtgacattgtgtttcacatttgcgaactcatcaacaagcctcaatatttgcctaaaattccttcccaacctgagatctct

SEQ ID NO: 92230 - DNA, 636 bp, Heterodera glycines
aagcagcgcattgatacgctaattgagatggaaaggcaaatgcacgaagatgaccaaagcattgaggagaacaacattgacaccattgagctgagtttgggcgaactccgttcggactttcccaacggattcgccgtcgattggcaaaaactgttcaatgccattgtgcccgatcgcaacttcaccgcctcctccaccgttctgttggtagcgcaaaaaatgaacggacgcactgagaggcaaacgccactcgacgtaatggcggaatatatgcgcaattttgggcccaaaaacgacaccctcaacaagtgggagcagtatgtagagtggctgctgatactgcaacatgccgcactatcggacaacaaaatatttcatcgtattttccgccggcacccgcggtcagccaatgccatgatgagtgctttgctcgtcaacaaatactttttcgagaggcacgacgacgagcagtatatccgggacggcacatcggaggaacgccgcgtggcacaaatccggcacaattgcctggaacagctgaagcatttcttcccagaatatgttgaccgaatgtttgcacttgggttaaacgacgccattgaggaggaggccaaaacggtgctggacaatgtgaag

SEQ ID NO: 92231 - DNA, 537 bp, Heterodera glycines
gcccccacaaaactttattgggatttttatcttttgcccccttccgatggaatttttatatgccgaaacttttccactttccttttcgttagaccctttcaaaaagggttggtttgagagggtcgccccctgctcacttctcgccttttttgttaacaaaaacgccctgatgatgttcaaggggggacaaatttcccagcgcaatgttttcccgccgggggtaaaccgcaattttcacttctgccacttttgccaatcaaatccccccccgcgtttttttcactgcccggtttgcaattttggcgtcttccgccgagaccaccattgttccttcaccgtttcttgggtgggccacttcaatcagcgttattttgttgccgctgtattaaacctgcgcccagtcgtgttttcatgctgcgttagaaattggcatgcgcttttgctccctttctctccaatcagtctgcccgattttctcaaatgggtcttcccgcaaatggttttgctgttccgcttcttctctttccaccatttttt

SEQ ID NO: 92232 - DNA, 630 bp, Heterodera glycines
aaaatgtccaactttattattatgtcgcaaattccatgggaaaaaatcaaatatttttttgtttttttattgtccttaatattcctttttattacctacaaaaactacggctttttatatgacaattcggcattattcaggtttacctatacggaaaacaatagcgttacaatatcaccagaagaatgctgcggtgaaaatatggtttacactttgaaaatgaacgactcgcgaataattcgtggcaaaaagtttaattgctcattaacatggcttttggaacgctacaaactttcagacaaatacgcaattaaagagaaaattgaagtcaaataccctggccatcccaaatttgtgtttgtgacagccgcaaataatcattattacccttatcttcggacgttcattgcaaatattaaagaaaaatttggatgcaaacaaaaaataattgcttatgatttgggaacggtgacaaaaaacaaagaatggatgaatgaattggattcggtgtgcaatttcgaatggcgaattttcgatttcggtcaaatggtggaaggacgggttcgccacccgaaaagttacgcgtggaaaatgtttgtgatggcgcatgttttattggagtatgacacc

SEQ ID NO: 92233 - DNA, 541 bp, Heterodera glycines
ggtgatgcgctccgaagttccggcaccgcacgcgctcggccgttcgcgctcgcttgccgatgtgttccgctccaactcgcgctatgccgagtcccaattttctcccaccgttgtgcccatcggaatgccgtcgaagccgatcagtgtccatcgaccgtattttacttactccgcctattggccctatcgataccatcgaaatttcaacacttacgacaatcaaatcaccgattccttctattggcattaccctttccgcctttggacatcctacaaacacaattggtaccaatacgacagcccctattactatcgccgttaccatgacaattacaacattttctacaacactgaactgatgtcatacggaaatcggtcaaaactgatggagaatttgtaccaaggaacgccgatcacacaatgaaaagattggaacagagaagagaagaagagacagaagagagagagagagagaaagcggaaaaaaaattataagacaaagaaacaaaatgccaacatttttaaaaagattcaattgaaa

SEQ ID NO: 92234 - DNA, 380 bp, Heterodera glycines
cggtggtgggcgtccatggaacggaacggccgcgttttgccattgtgtggagtgccgccgtccaaagggatggcacggacgcggtggaggacgtggaggcgcaggacccagcggatttggacatgggggtcgcggtggacgtggcagcttcggcaacggacaacacatgggacacatgcgccgttgaggaaccgagacaaagaattgcggagacaattctcggaggaggggaggaatgtggaatctgtttttcgtaattttaaaccatttttgtttttcgcccttttgtcccatcccaggccttctggccgtccatcatcctattcatccaaaatttcattccttttccaattacctatttttatgacatttcccccatt

SEQ ID NO: 92235 - DNA, 619 bp, Heterodera glycines
ggaatttgtgttggtcttgctatcaacaaatctctctgtgctgggatcgttttcaatccaatcactgatgagctatacaccgcaattgaagggaaaggcgccttgaaaaatggctttccaatttcagtttcatccgcgaaagcacttgatcaatctgttatttgtcaaacttttggtcagcataacatcaaagaaaagggagaaaaatggttggacaatgcattcggcaatttgcgctccgcagttctttcgggcacccacgggtacgttagttcatttttgagtcatcaatttcacgatcactgaagttgtgcatgtttagggggtctgcgattacttacgcttaatgtgtacatttcgttgttgcaaaaaaaaccaattttccccacactaacaataaataataaaaaatagttccaaatctttcgctgtttctctattattcccgatttaccacccatcagattttgagcaagctttgctcgtttctcagatcggctctgatcgatcgtctgcccaaatgaattcattcgtttccaatttccgcactttgctgggtgaacgaaatgtgcacgggcatcgctcttttggttccgctgccatcaacatgatgttcttg

SEQ ID NO: 92236 - DNA, 235 bp, Heterodera glycines
atctcggcattccgagatgagccaaatgaccagctgagcgcgcaacggagctaaggacttccgggccaacaccgactcggcctgtactgacttgatggactggcgaacgggcgtgaggccgccacccaacccccgagataaccccatcacctccatcttccgagccaaacttctactgcccggatgctgccagtgtgctggcctcctgcactcaagctgcccccctggtcccccc

SEQ ID NO: 92237 - DNA, 595 bp, Heterodera glycines
ccgggttcagggcatcgggcggtttccgcaacatttaccgaggggcaccggcggtggctgtgggctcggctcccggctcggcactgtttttcatcacatattgcaatggcaaggaaatgcttgcgcaacaaattggcacatcaattccattgccattggtggacgcactgagcgcaacatttggcgaattgatcgcgtgtttggtccgtgtgccgaccgaaattgtgaagcagcgcagtcagacgagccgggccagcggactgttacaaattgtcaccgaattgtaccgaacacggggaggcatcagaggcttttacaaaggttatgtgagcaccgtggcccgagaaattccattctccttcatcgaattcccactttgggagtggctgaagcgtcgtgtggcccatcggatgggcagttgttcgccgttggcatccgccgcctgcggcagtttggccgggctgacggccgcggcactcacaacgccttttgatgtgctgaaaacgcgggtgatgttggacagggacagacgcacgcgactgctccccactgcgatacaaattctcaggaatgaaggcattgcccgtctctattc

SEQ ID NO: 92238 - DNA, 387 bp, Heterodera glycines
atgccatccgacgaatggacactgtcgggggagtggcaattcatcccgatggaatgtgtgaggcgtgcgttagcagtggcggcattcttttgaagcgggaagggcgcatgggacattcagcccaattcggtgccgcaatttgggctgaacaatgttctgcttcttcttcttctgctgctgccaactctgactttggcctttcggtagccgtttcagtgtccggctgtggcgaggcgttaacgcgcacacatttcgctgaagcgttggcccagcaaattctgtcaatggatgtcgacgacttggcctttgtgcagtgcatcacccactttttagaccaccattttgtccgttcgcgtcgcctttgctcttttccgtccgatcgtttgc

SEQ ID NO: 92239 - DNA, 484 bp, Heterodera glycines
tgacttgatggacgagacatggggcacgaggccgactacgaatccccccgaggacgccttcaggtccatctttcctgttaaaccgcaactgcgcggacgcagacagagggcaggactccaacagccaagctgtcgccctggcccgaccagcccgtccggaccgcctggacaacccggacaggcaggatgcgaacgactccacggacaggctgaacaccctggacaacgcgctcgctcatgcccgcgccagagcatccactgggcacattgccctgccggcccggcatgccgccccgtaggacatggaccgccccgacaacaaggagccccgggtcaagctgacacgacccaccaaggggcaggaacaggaaactgtttagctccaggagcccaagggactcccggaaaaggtcggcaccaccggaaacctggggcccaccccggacagcggagacggaccgccaacgctacccgggcacgaccc

SEQ ID NO: 92240 - DNA, 218 bp, Heterodera glycines
cggctgttgtcccacagcatggcgccggtgggcaatccgtgcgcgaccttcgcaccgtcgaactgccattctacgaccagatcaaagtgattgtgccaataactgaactgcctccgtatccggtgcctattcgacctggcgatgcgcgtgcttcgcattcgtttagcgtacccagtgaggacatacaaaaggtgcactatcgcattgaggaacaacca

SEQ ID NO: 92241 - DNA, 635 bp, Heterodera glycines
ttttaatttttcaccattcgctaccttcgccaatgcttgcaccaattccaataattgagccggcaactgtcactgttccgcccaatgaagacgttgtgggctcatatgatgagaatcagcaaagagaagaggaactcctggtcaatcaatttgtcatcaattcggaagcgatcaagcgcatattggacgacccgcgctacgctgacaaaaaggtgtgtgtagtcagcgtggcgggcgccttccgcaccggaaaatcgtttattttaaacttttttctgcgttatttgcgttggcgctcagcaccaagtgtcgatgagatggtgaacgattggttgaaaatggacccgaagttggaggggttcagctggcgaggcggagacgaccgggacaccaacggaattctgatttggccagagcctttcctactcgaagaccgcaacagagagcaggttgttgtcctcctcatggacacacaaggcattttcgacagtgtcagcacttttaaaaattgcgccaccgttttcgcgttgtccacgatggtttcctctgttcagattttcaacatcaacaagaccatccaggaggaccatctgcagcacttgcaactgttcacagagtacgcccgactggcgctg

SEQ ID NO: 92242 - DNA, 500 bp, Heterodera glycines
gatcgaacacttttacgagcccgactcgggcgaagtgctgctggacggaataccggtgcgcgactacgaccaccaatttttgcacatgaaggtggcacttgttggacaagagccggtgctttacggacgatcggtggaggagaacatcggatacggttatgaaaacgcaacgcctgaggctgtgcaacggtcagcgaaacatgccaatgcgcatggctttattatggacactcagcaaggctatgagacggacgtgggagagaagggcggtcaaatgtctggaggccaaaaacagcgaattgccattgctcgagctttggtgagagagccggcggtgcttttattggacgaagcgacctcagcgttggattcggaatcagaacatcttgtccaagaagcaatccaaaaaatttgaaaggacggactgtccttttgattgcgcaccgactgagtaccgtggaaaatgcggacaaaattgtggtggttagtgcaggaagagt

SEQ ID NO: 92243 - DNA, 397 bp, Heterodera glycines
  unsure (1)..(397): unsure at all n locations
aattgatcaatctcaccacgaagatgaatgtttcgatagcgaattgttcttcatttcgtccaataaatggtcgccctttcgctaattgctaattcccccgttaattaccccccccccccaaatgcgtcgctatttaaaattttattttaccctccaatgcaaagtgtgcctttgcttgctcagctgctcgccactcactttccccttcaaataccgtccctttcgttttcctcgtgccatttccatttgcttttcatcccatttttaccttttctatgctttttccctcttttctgctactttttctgcccaccgtttttgctcccggcccaagtcgagaaaataaattgttcntcgaaaaaaaaaaaaaaaaaaaaaaaaaaaaaaaaaaaaaaaa

SEQ ID NO: 92244 - DNA, 613 bp, Heterodera glycines
atgcaagagactcacattgttctcgggattgcctcggtgtgctctctgttggctatcatcgccacagtcgtcactctgccatctctgtactcggagatgagccaaatgaacagcaaagtgcgcgacggagttgaggccttccgcgtcaacaccgactcggcctggactgacttgatggacgtgcaagtggtcgtgacgccgccgtcgaagccccgtgataaccccttcaactccatcttccgtgccaacccgctcctccttgcccgccccagaacatcccctgcccacgctgccctgctggcccgcccggccgccccggaggacagggaccgcccggacagcaaggagcccctggacaacctggtacgcccgctcaaggtggaggacctggaacgcctggcgcgcccggaccccaaggacagcctggacagcccggacgccccggagccgctggccaacccggacagcctggagcgaacggagttgtctcacgcccaattcctggcccgaaaggaccgcccggagcgcctggccagaacggaaaccccggaagccaaggtcagccaggacagccaggaggccaaggaccgcccggacctcctggcgcgcccgg

SEQ ID NO: 92245 - DNA, 627 bp, Heterodera glycines
aggaaatttacaaccattggttgaatgatatgcgacaatgggatgaggaatatccttctttggaattcatcgagaaaaagtccaaagagttggtcaccgttttgtccgaacctcccagaggaccgccagtcgatgtcatcagattggctacaatcgaagcagagagagaaaattcgactaaactgctgaaaaaactaaaagaatggcaagaagaacaaaaagtgtagtcccgttaattgttttcttcccaactaactttacttatttttaggttggaaatgcaatgcatcagccttttccgccacctcgtcaacccttttaccctccctctcgtcctattcgattcccgcattggccatttcatcatgatccttcacggccaagaccgcacttgatgtatgggaggtcagtgggttaccatccatatgctaaccagtttcaccggccaatgactcaagcgagggtaagccattgttttgtattaaattggcatttcgcctatagatgcgatctccgttttgctatggcacttctcaaccgtttggcttatatcggtatcctcgtaacattccagctaattccgcatcaaatttcccaccggaagcactcaagtacaaagctactttg

SEQ ID NO: 92246 - DNA, 631 bp, Heterodera glycines
acaaaaaaaattttgaggggggaaacggacaaaaaagcataattgcccttttaaaattccaatccattttagttcaatgtgcaggaagatcagccgccgcggagagtgccgatgatggtactgaagagcaacattcaacgggacaaagtccgtcacaacagattcaagttgcccgagcgttcacacgaagatctttttcgagaaaaagttcgcacaggtccggccatgaaaagtttgtatgaaaacgatgaactgatcgatgtgcgcgggggtgacggaacggcgttaataatgaggcactttttaatagtttattcgacaaattaagagaaataaacacaatgcaaatgttattgaactattggcactgctttttttatttagtgattttgatggttttgtgccccaactgaccaaaaatattgcggagaaaggcattgaacgaccaacgctgatccaaaaatgtgtgatgcccataatacttacgaaatcggaatttgacttgctggcgcgtgccgagacgggcaccggcaaaacggcggcgtttctctttccgatcattcatttgttggagagtgatcgtttggcaattgggacgaagccttccactggaaggaaatcgccctttgca

SEQ ID NO: 92247 - DNA, 652 bp, Heterodera glycines
gtggcacgtcgcgacgtttggctgccggaaagccaatcgcctgacacaaaatgttcatcggcggattttgaccaatctgacgaaagcggcggcgatcaaagcggcgtaagcaatgggagtcatcgaaactgccgattttccatggacgaaaggacaaatgaccggcaaatgttcaccgactcaatcaacaacgacttggacgatcgccgattgcgccgtcaaattgccaattgcaacgagcgaaggcgcatgcagtccatcaatgctggattccaagcgctccgtcaattgttgccacggaaagacggcgacaaaatgtcaaaggctgcaattttagcagccaccgccgaattcattcaatcgttgctgcgagaaaaggataaattattggaggaaaattgtgtcgtaatggcaaagaagcgacggatggacacggaagacgcggagaaagtcattttgcgggaggaggcggtcaggccgaatgtcgtcgactgtttgcgcacaatcggcgaactgcgaaattcgctgcagaaagagacacagctcagaatggtttatgagaaggaaatggccgagttgcgctgccaattgcgtctttccccgccctcctccgccctcgtcgctcttccgccctttccttcgcctcgtcctt

SEQ ID NO: 92248 - DNA, 546 bp, Heterodera glycines
tgatttgaatgggaaatgaaagcacataaaaggagcgaatgaatcagtgaaattattcaactttaatttgactgtgcttccgaattgtcaaaatcattaattaatttatcgcgcaaataatggccaacaaatttttaattgttgcttttattttgacaattgccatttttgtcaatggacaaagtgaggcgccaaacaattcgtcggaaatggcatcggaggagagcaattcggaagagtcgggcagtgaggagcagcagttcaacccattcaaatttcgacaatttgctggccacggcttttttggtccctcgtcgtccaacagttcggcaccgccgcccttcggcttttggcccccttttggacgaatgccgtcgccatttaaccgccccgccaaccgaccgccgtctgacaattgatcactttttgagtgatttttgtccgtcgatcagtgcgaaatgaaaccgttgatgaacaaatgatttacttgtcatttattgttcatttttgactttaaaaggaagaatacattgcataaatttattc

SEQ ID NO: 92249 - DNA, 648 bp, Heterodera glycines
ctcacattgttctcgggattgcctcggtgtgctctctgttggctatcatcgccacagtcgtcactctgccatctctgtactcggagatgagccaaatgaacagcaaagtgcgcgacggagttgaggccttccgcgtcaacaccgactcggcctggactgacttgatggacgtgcaagtggtcgtgacgccgccgtcgaagccccgtgataaccccttcaactccatcttccgtgccaaacgtcaactgcccggacactgccagtgcgctggcctccaacagccaagctgtccccctggtccgcccggcccgtccggaccgcctggacagcccggacagcctggaggcgcaggacagcccggacagcctggacagcctggccaacccgctcctccttgcccgccccagaacatcccctgcccacgctgccctgctggcccgcccggccgccccggaggacagggaccgcccggacagcaaggagcccctggacaacctggtacgcccgctcaaggtggaggacctggaacgcctggcgcgcccggaccccaaggaccgcccggtcagcccggccagcctggaaactctggccagcctggacagcccggagcaccgggacagcccggcaaggacagcggctactgtccgt

SEQ ID NO: 92250 - DNA, 292 bp, Heterodera glycines
gcggaaacgacttttttctggtgttcgccgtttggatgcccattcatcgctgccctactatgccagtggctcttccgatgggtctgttttcctatgggaatggggcgatgaacagcctgtgttcgtcgccctggctgctggctaattcgcacaagaggctaaattgccattcgctcacaacggtactcgctttgcggctgtccatggtgatgcgctggtgttcatatggcaggcgccacctgctgttccgcctaacaaacctttatgtcatcccaaagggtcactccaaatt

SEQ ID NO: 92251 - DNA, 304 bp, Heterodera glycines
caatgaaacattgaatgtttggagcaaccagctcggcttcgcctgggacaactacctccaatggtggacccttaatgaatcgcttccgagggtgaacgcgccgattgcggaatattggacgatgggcacgcgaatgctgtgaagtcaactctgtatgcttctctcctctgcttaccatattatcagatgccattggcctcaacgacgcaaacaatggatgagggccgaccttttccgagcgtctgctgaactcaaaggactggacatgatcggactgtacacttcatggtaccattttccggag

SEQ ID NO: 92252 - DNA, 322 bp, Heterodera glycines
aacccggggcggggcgtggcgttgggcagtggtcgcatgtgcccatatttccaatttcgccggcaactcccggacctttgttttctccgggggttccgggggtgccgggctttcccgcgtcgccggggtgtcccgggcccccgggctggtcaaaccaaccgggcagtcctggttgggcgggaacatctggggacccgttggggccgggggggccacggcggccttcccactgaggggcggaggccgttgagaccgccgggctcccgcgtctggcacacgggggggacatgccgcgtcttgcccccggacccacggggctgct

SEQ ID NO: 92253 - DNA, 358 bp, Heterodera glycines
tcacattgttctcgggattgcctcagtgtgctcgctgttggctaccatcccctcagtcgtcactctgccatctctgtactcggagatgagccaaatgaacagcaatttgcgcgacggagttgaggtcttccgggacaacaccgactcggcctggactgacttgatggacgtgaaattgatcatgactccgccgacgaagccccctgataaccccttcaactccatcttccgcgtctcacatcagctgtccggacactgcctctgcgctggcctccaaaagtcaagctgaccccctgggccgaccggcccgtttggacggcctggacagcctggatggtctgaatgcccaggacagtcc

SEQ ID NO: 92254 - DNA, 582 bp, Heterodera glycines
gcgcacatccctcccggggacaacgaatgtttggagagttggtcccgcaactattaccgcattgtcacacgttttgcgagtacaatttctgcacaattctttggccacacgcacactgattccttccgtctgttcttcgaggacatgaacaactcgagttcccccgcgctttccgtgctttacgttgcgcccagcgtgaccacttttgccgggctgaaccccgcctaccgcgtgtacgtcgccagcccaagcgacggacgcattctcgacattgagaactattttctgaatttgactgcccttgatgggcccgaaaaagaggaaaagccccgctggcagttgctgtacacggccaaaaccgagtacggcatggagcagctgaatgccgaggcatggaacgcggtggcacaacgcattgagcgggagccggcgatggcgcggaaattcaatcgaaattacgcgcgaagggctgacgcggaatgcgacgcgcattgtgtcgcggaacgcgtgtgtgacattcgcgcggcgcacagtaacaaaacggcactgtgcgggggcggcagcaaaacgcgacgcaaattg

SEQ ID NO: 92255 - DNA, 629 bp, Heterodera glycines
cagcaccgaatgtcgaacagccagcaacgccggaaatcattgagaatatggaggtggaggttgaagcagttgcggaagctgaagccgaggaggagttggacccgaagggtcgggtgcagcaactgctggaaatgggcaagtctctggaatgggagatggccgtccaatcggacgatgagcaaatcctcgacctggatgatgatcttgagatgtttccaaggctgattttcctgcagctggccaagttcctgaagaatgcacctgatgggttgaacgaacagcaaaagaaggaactgaaaaaagtgttggtcaattggatggaagagcaaaagcagccatttacggtggatgaggaaatggcacaagtggacgaaactgtgcaaagtttgagcaccttctgtgaccaaattggcaaaagtttcaagggaactcctgccattttggacattttccttgatttccacaaaaatgaaactcttgaaactgagaaattggaattcatgtggaaaatggtgaaccgaaaggtaacgcactatgttaaaagcgttggccaattttacggcggcattaaaattgccaaggaaaatctgaagcaagtcaaaaaaattggcaaatgggcaaaaaaaaat

SEQ ID NO: 92256 - DNA, 617 bp, Heterodera glycines
cttcgctgatggacgaacagttcaaaatttgcattgaattgcattatgagcagaaaaagaaaagggaactgatgcatcaaatccacatgaaggagaaggcttcgctggagttgagcaccaaggatctcaccgaccagacaaagcgtcgagtcgttaatgaacggtcgagcttggacagaaagcagagacaactcgaaagactgaaaagggaagcggaacggcgcggactgcgcacggggggcgactctttgcaggggacgacgcaaaacggcaaaaagaatcagtcgcaacaaaagcaatccccggcggcggaaacagcttcggttgagccgattatcgcgtagaacgaaaggattccctcacttccttcgctgcccgtttttacctccaccgaaaattcatctgggaagaaaaaggatgaatttcgaaataaaatttcggaacgctttgcatcgctcgaggcgaggaagcagcgaatgcgtttgattcaaatgaaactgaacagtttggagaaggggaaaatggacaacgcttacgacgaggcggtgaaacgcgttcagagtcttgacgaaatgcgcaaaaagcttgaggatttgaaatgtaacatggaaaacggc

SEQ ID NO: 92257 - DNA, 645 bp, Heterodera glycines
gcctctgttcggctgatcgaccttggctccgccaccttcgaccacgagcatcattcgaccattgtctccacgcggcactaccgggcgcccgaagtgattttagaacttggctgggctcaaccgtgcgatgtttggtcaatcggctgcataatgttcgaattgtactccgggatgacgttgttccaaacgcacgacaaccgcgagcatttggcgatgatgcagcgcattttggatggcatcccttacagaatggggcggaaaagcaaaacaaagtattttttccatggccgcctcgactggcacgaccacacaacagccggccaatacgttcgggaccactgcaaaccgctttccagatatatggtttcaaccagtgaagagcatcagcaattgttttccttaatccggagtatgcttgaatacgagccggcgtcccgcataactttgagcgaggcgctgcgccatccgtacttcaatcggttggacccgaacatgcgggcacgggtcgacggggttggcttcgacacgtcgttgaacggaaggggcagttacgcctccgcgggttcctcctcctcttgcagagattgacgcagcacagcagccgatgtttgccctcccctccccctttttggattgtgacaactc

SEQ ID NO: 92258 - DNA, 235 bp, Heterodera glycines
tgatgtgttctgcacagtgccgcgtgaactcatggagccaattgaccaaagaatccgtgccattgttgaggacattgactccactcatcatctgttggaagcgaaaacgacggagacagacatcaaagtgttcattacgtcatcattgggacacatcttcgacgagggcaacggcattcagttgcttatccaacatttgaagtgcgacctgcgcgagggcaccattttggtgtgc

SEQ ID NO: 92259 - DNA, 160 bp, Heterodera glycines
gattaaagtgattttagagataggtcctcccggtaggggtaaagggacgctatgccagcgcatcgaaaagaattgcggattcctccatgtgagtgctggcgatttggtgcgctaagaacgcctacgggaaggctccacctctggcgagctgatacaaccg

SEQ ID NO: 92260 - DNA, 437 bp, Heterodera glycines
taaccatcagaaaaatgaagtactcgttcaatgtccgcgaaattcaatccctcctcaacgggttcatgtgcattttcaagccccgtgatgtgtccatttcggccattgaaaagttgctgatgcgccgcatttgtgagcaggcgaactgcttggacccgtgccgtcctttgcccaccattgaaatgccaattgttgaagcccaccccaagagtggtgcattggttgtggttggaagaaaaaaacaaattgactacagcaaacatccgttgatggtaggccagatgttcaggcccgaagacatgcgcattgaagcgcttaattatttggagccttcctgctcgggcgtatgcgtgtttggtctgaacgacggatgcgatcaattggagaaggtgcgggacagagcatgggtaaatgaatacattttgagagggcgaatt

SEQ ID NO: 92261 - DNA, 226 bp, Heterodera glycines
gactcacattgctctcggtattgcctcggtgtgctctctgctgggtatcatccccacagtcgtgactctgccctctctgtactcagagatgacccagatgaagagcaaagtgcgcgacgaagttgaagtcttccgggacaagatcgactctgactggactgacttgatgaacgtcgaaaggattgggaccccgccttggaatctgcttgatgacgccatcaagtct

SEQ ID NO: 92262 - DNA, 371 bp, Heterodera glycines
  unsure (1)..(371): unsure at all n locations
aattattgcacggatcattaagaagaatcttttaatttcctccctaagaatttttccaaaatgtttccgttccgttttctcttcgttttcgctttcgctttgctcactttgtgcggcttttctcacatgacattggcacagcccggaagcaatgggccaattggcgaacctaacaaaatgttgcgcatccgccgggaaaatgaacgcaaggaaaattgacgttttccatggaacgaaccaaagaggatgaaaatgaccgaagaacaaaaaacactattagcaattaaattccgttttcattgttactttttagggtggtgttttggtataaaatcaaaaggttgatcnctanaaaaaaaaaaaaaaaaaaa

SEQ ID NO: 92263 - DNA, 594 bp, Heterodera glycines
ccgccaacttttgctcctttccgtctcctccgacaacatttcgaccgattggctgtcattttgctcaattcgcccccggcagcggtcgttccctgcggcgattttgcatttccggccgattgggccaaaatttggaacagtgccaacattcgcttgtgcaccgatggggcggcaaatcatttgatgaaactgtgcagcgatggcactgatcagctcaaagtacccgaattgatcattggcgacttctactcaatcagtgccgaggcacggcaccacttcggagggtttggcaactgcgaacagcgaaaagtaccggatcagaacagcacggatctgacgaaggcattggaagcgttgggggaaaaacatcccaatttgtccggtattcttttgctcggcggcttccatggccgctttgaccacgtcctcggcgcattgcacgctttgctgctgcacgtgcagcaatggccacaggtgccattgtttgctgtggacaatgaaaatgtcctcactgtgctgccggagggggaaatgctcgtcgaattggatgccgaacgcatcaccggcacttgcggtctcttcccgattgagcag

SEQ ID NO: 92264 - DNA, 622 bp, Heterodera glycines
gttcccgcgagtgttggacaatcccagtctttcgggcatgttcgacttcaaagccatcccctggggattggccaaacggcgccaatccgaccaccaagtgcaatgccaccacggggccaacgaatgcaccgccaatcagttgctcagctgcgccctcaaacacccgtacagcgataagtcgaaacgccatcggctgctcaattgttttatggccaaaatgatgagcaaaagagaacccgaaaatgccatgatcagctgtttagccaaatcggggctcagtcgcaacgaaatcctaaattgcgcacgaacggacgccgtaacgcggcttcaacttgaggacgaaacggagaccgaacacattctgaactcgccccgctttgtgccatttgtgtcgctgaatgggtggagtcatttgactctgcaggcgccggcacaacttttgctgacggaaaagttggcgcattggaacgacactttaaatggcgtttccatttacaaacgtagcgcattgaagttgctgccgacgccgtaccggagctgtgcgcttccgcccgatttttggtgctcttccgattcgtcggtcactggtgcctgttttgacgagcaaaagtgccgaacattc

SEQ ID NO: 92265 - DNA, 623 bp, Heterodera glycines
gaaaaaacaacaacgtcaacaatgtttaaactctctcaattattttttatttttattttttctataaaattaattggaaacaaatgcaccaaaaatggagttgcttctccatttgagaaagttatccaaaaagatgccaacaaatcaacaccaaaaattgcagaaaaaaatgctgagaatgaagagcaaaatccactgaaaaaagaaattgaaaatctaaaagcaagaatggaccaagagttgaacaaaatcattgagctaaagcttggcactcagctgctcaaaatgaatgaaattgccgaaagaattgaaaatgaaaagacacccttggacaaagaatttattcagaaagtgattgaagaaatacgaccattatacgttgaggcgatcagagaccatataaatatattggtcaagttgaactttttggagaatgacaaaggctttaaaaaggacgcaaaaaacatggaaaatttgaatgcacttgagaatcagcttatcgccaataaggcatgcttaatcaaggaagatgagattgtgcaaacctatcacaatgaacgcgcagaattggagcgaaaaatgaagcgaaacgaaggcaacgaaactcttgatgaatatgacca

SEQ ID NO: 92266 - DNA, 550 bp, Heterodera glycines
ctgtttctggccatcacttctctgttcctcaactccatctgctggtggttctttgagccctctctgaccactttcatggccactttgcgcctcgactggtccgcttcagtgatgtccggcattttgatcgctgtttttaatgccgcttacatgacatcggctcccatttggggttttgtgcaaccatatttgaccggtcaaatgaggccgatgttgttgctgacttcagtgggaatggtcattgtcatgcttctgatgggtccgtcgccgctgctcggcttgcccaatttgatgataaccgccgtagcctttgcattgcttggcattgttgctggtgctgcctatgtgcccttgtttaaatggtgcgtcgacgctgcaaacaacgcgggattggacggcacatcgtctgccatttgcgggtgtatctccggattcatacagtcggcacttgctctcagtgctttcttggccacaagtgtcgggggactgagtgcccatcatttgggcctcccgtggacggcgacactcgtggcagccattcaattggcat

SEQ ID NO: 92267 - DNA, 577 bp, Heterodera glycines
tactcacattgatctcggtatcgccactgcgtgctcgcggtcggtgatcgttatcatcgtcgccactctgacttttctgtattcggacatgaacatgatgaacatgaacgtgcgcgagcgagatgaagtcttcggcttccacaccgactccgactggactggctttgtggacatggacgtggtcgtgaccccgacgccgacgccccatgatcacgccttcccctccatcttccttttccgaggccaactgcccctgcactgacactgcgctggccttggactgccacactgtacctgtggccctgccgggccgggcggatcgggtgcacctgcacgacccgctgaaggtgcaggaccacgacaacacgcagaacctgctgagccagccgctcccccttgtccgtgcccgaacctcaactgcccatgctgaccttgtggtgctgccgcgcgccgccgacgacgaggaccggcaccacaccgacgagcccgaggacatgcagaaactggcactcccggtggaggagcaggaactgctaggcctgccgcacccggacgacagagtggacctccacaaccc

SEQ ID NO: 92268 - DNA, 552 bp, Heterodera glycines
gtttgagctttatttgtttgcatattttttgtttgaaatgtgacaactttttccacattaattttttttgatggctttgcggcgtcaacgtcccttttttcgcagttttgtgccattgttgatctgtctgcttccctgtttgatcgtggaactgttttccttctgggcagcgtcctttttgtggcaaataccgcccattttgaacccaaattcagtcataatccttattatttctgatccgcaattgattgggcacataaatgagcctagatggactggtattgtgtctcgttgggacgcggataggtatatgcgacgtgcttatgcattggcgagccgagcagtccgtccggatttggaagtgtttttgggcgatttatttgatgaaggcgttttgctgggaggcgatgaacaacagtttgtcgacacgcgcaaacgtttcatgaacatttttccgctcaatagatactccacaaatcgcatttatttgcctggtgacaacgatattggaggagaaatggagccggtttatgcggaattgtacgaacgttt

SEQ ID NO: 92269 - DNA, 508 bp, Heterodera glycines
ggcaccagcggaggcggcggcggaggctgtcaaccgtgctgtaaccctggcccgccaggcccacctggcacgtctggacgaccgggacgccccggaaagcctggctcaaacggcatgccaggaggcccaggcaagccgccgtcccagccttgcgagtccgtcacgccgcctccttgtaagccttgcccaggtggacctcctgggccgccaggaccacccggacctcctggcgacggtggaggacccggacagcccggccagcctggcagtgactcgggtgcaggttctcctggcccaaagggcccgcctggcccacctggtcagcctggacagcccggctctcctggagagcccggccaacctgcgcagtcacagcccatcattcctggcccgccaggaccaccgggtgattctggaccccctggacctcctggtcctcccggaaaccctggcactgatggaggcgctggtcagcctggccccaagggaccgcccggaccaccgggac

SEQ ID NO: 92270 - DNA, 630 bp, Heterodera glycines
cgacaacaacaacaacaaacaatcagcaacgacgacaattgcgcaacgcttcaacacagcacatccatcgcccgtgcacacgtcgaatccgatcacttctgctgctgctgctctccaacaacacaatgggcttcctcttgtacatgttcgtggctgcggatgcgttcggcggtggagcgtactgtggcatgatttacaacgccaaaggggccaaggcatcggcgggcggcggctccaagaaggacaagaagcagaaagcgtgagccccagcggtgaacaatgatcgactcgaggatggcccccgtggatgaacgaacgaacgatggacttcgagcaacaaacgcttctccccttctaactgctgctgatccccacaatatgacgctgttcccctccccccaaattatatcatttgtaggtgctttatcaccctctgatctgttgtcagtgataagctagctatatgcgctgtccatatcagtgatcaaaccattgtaattgtgtaatgatatatgtatgtatgtcctatatattgtattgtatttgtatgtgctccaatgcaacaaccaatcattatgtgtacataaatatgttgtatgaatgtattcggacaataaaatttatgtgaaa

SEQ ID NO: 92271 - DNA, 166 bp, Heterodera glycines
tcacattgttctcgggattgcctcggtgtgctctctgttggctatcatcggcacattcgtcgctctgccttctctgtactctgagatgtccccaatgaacagcgatgtgcgcgacgtagttgaggccttcctcgtcaacaccgactctgactggactgacattgtt

SEQ ID NO: 92272 - DNA, 533 bp, Heterodera glycines
gcaaaactctgagctgttcggaagaaaataatttcacatacatacgaacggagccgaacatgaacatgaacagcagtagcagcagcaacaggagatgttcagcgccaaactcgacgacacttagagcagctgcttctgctctgctcatcatcatcgctgcttctcttgtcctcccgcaatgtgccgcggtcggcggaatggccgagctgaaggcattgaccggcgacgcgccctatttgggcaccggtaatcaagagcaggcgccagaattttttggcgaagcgttgtcccgccaatactaccagaacccggcctaccggtacaacgactggtacggcacacggtttgcccaaaattactaccgaagcccttaccgagcatacggaggaggaggaggaggaggtgatttcggctgtggcccatgctgagcttttcccatttccagcaactttggcttctcccctaactcatgccaatctttggaacactaatcacttttattttattttgaaactgattacttttttaaaaaa

SEQ ID NO: 92273 - DNA, 514 bp, Heterodera glycines
gttttatacggcgacgcgacaaaatctagaaatcaaccaaaacacgaaggtgggcggccaaggctttaccggcaaacagggcactttccacggccagcaaatgattgagtactgcacgaatgttgtggccggagtgtcaccctcaaaaacgggcactgagcacttgggatagccgatatttgcaacagtcaaagatgcccggaaaaaaactggtgccgacgcttcggcgatttatgagacggcggcctttgccgcggctgccatcgactaagcgatcgacgccgaaatccctttggttgtgtgcatgaccgatggaatctgccaattggacatggtccgtgaaaagaaccgtcttctgaagaacaatcggactcagctgctcggaccctattgtctgggaatcatggcgccgggcgaatgacagattggcataatgccggggcagatccaccaaaaacgggttattggcatcggttcgcgatcggggacactcacttatggagccgttcggcag

SEQ ID NO: 92274 - DNA, 632 bp, Heterodera glycines
gtttgaggagtgaattcatatttatattatggatcgtttctgttcttttgcttttgtttcactctgtcggccccatacagctttttgttgtcgtttttccacttctcagcttcggtcaaattttttaaaatgggacttgcacaaccaatcccaccggaaatggatgaaatggttcaacatcgacacttatcttcaacctagaagaaaatttatccgtctaattgctaatcggtgactcatttcacccggagcgaattttccaaatggggccggattttgcgtgtttggaatggctgatgaatgcgggttccacttctgttctaatgtcggatggcacattgttaaaaagcaaaaaagaaatgcagaattttttgtctcaaaaggggttcgacctgcgaaaacttaagacggaggcccccacggcgaaattgcttaaggatattcccttggccgatgcgttgcgtccctccgccagtgacttgctttacaatgaaaaatggcgtcacatttcgcccattcacatgaaagaaattgatgcttctgattcggtgatcaccgacgaaggctttgcttattttttggaatgtcgaaacatagaaaaactgcgactgaatttctgcgattattttggg

SEQ ID NO: 92275 - DNA, 651 bp, Heterodera glycines
aagggacactcagcttctttttatgatgaagcaggctgtccatgacaacataaacgctttcattggcttatgcgtcgaacggccgaccgacgtttgggtcatttggaggcattgcttccgcgggacgctggccgatttgctattcgtcaactgccagcacaagtggccaaaccctgcaaattccgtcgcaccttttcaaaagacaaaatttgctttagccgtcccccaccccacaattagtcgattgagtcgcgggtgaacgacatccgtgccagtgtggcatccattgtcagcgcacaccaacagcagaggggggcggagggcgacggagcggtgccacgcagggacattttggacaacaatttcaaaagtgccttcgtcagagacattgtcaagggtctcgactttctccactcgtcccccatcggttaccacggcgcgctgacttcgacgcgatgtctaattgacagtcattggattttgaaattggcaggctttggaacttctcgtcttttgtacaaatggcgacacaacggcattttgagcaatggcaatggcacagtcattcagccactgatcccaaacgaagaattgcattattatgcccccgaattgcgcttaacaattcgttcagccgttttgcggaataaa

SEQ ID NO: 92276 - DNA, 627 bp, Heterodera glycines
accgaatgctcgtccacagaatcgctgcctttttcggcttgttgcataatgttgaccaaagtgggcaaaaagtggtggtcaccaaattgccaggcacaaaactaccggacattgagtttgaacaattgataaaacacaacgatttttacgattttcactcggcgcgaaggaacggacaaagcttcgatgagtccaaaggatatcgttttccgatgcgcgagttccgcaaccgattcaacacaaccgccagtgaaggtgccaacggcggcgaattgtcgaggaaccgacgcgcccgctctttcgaaattgacaacgatttgtacgccggttttccgcgccaacatttggcatttcatcgctattccgccacatttgacaatgctggaggggctgacatggccagtgggaattgcagcagtagtacgagcagcacggcaatttctgcccaaatgcacccgctccatttgcccatgttgcaaccgccgtatgccaattcgagcacggaggcttcactgatttctccggcgagtgcttacagcgaacctgccgcatgcgttcggcaccaaactgctcaatttgcgaacagtcaatgccaaattccgtgcaaaaatgtcactgattcgcccc

SEQ ID NO: 92277 - DNA, 547 bp, Heterodera glycines
ttttcctcctacaccaaaaaaaagaaatgtttccatttgtccatttttgtgacactttgtcttctcattagctgcttaatccccttctcgtttgactatgatgacgacctgttcgaaattggcactgctcagtccgtagcagtcaccggaattttgacgtgcaatggacgaccaagtggcggcacaaaagtgaaactgtacgacgtggacacttttgacccgacgatttgatggccgaaggctttacggacgaaaaggaacactttctgctggagggattcgaaacggaaataagcgacatcgactcgaagtgaacatttaccataattgtaacgacgaacatatccctgtctgcagaagttctccattgagatccccgacaattacataaccgaagaaaaacgatcaccacaaaagattttttacattgggaaattgaatttggaaggcaaattctcgggccaacatcgagattgtattaatcggacattttgttgaatttatcaaatacaaattaaattttagaagtaaaataatcgataggatc

SEQ ID NO: 92278 - DNA, 385 bp, Heterodera glycines
cagcccagtcggcactctgacatctctgtactcagagatgagacatgtgaacagcaaagtgcccgaccaattagaggccttgcttgtgaatacggactcagcctggattgacttgatggacctgcaagtggtcctgacgccgccgtagaagccccgtgataaccccttcaactccatcttccctgccatacgttaactgcctggacactgcctgggcgatctcttccaacaagcaagatggccccctatctcccccggcccgtccggaccgactggacatgccgtacatcctgtacgaccacgacagaccggagacgctgtataggctggtctacccgatgcggcttgggcgccgcttaacgtcaccagcccagtgtgccctgct

SEQ ID NO: 92279 - DNA, 648 bp, Heterodera glycines
gccaaatggtcgttgtctcgtcaatggtcgaccaaaaccataagcgacagcagccgcaacagcagaagagcaacacgcgccaaattagtgacgccgccgaaattggccacctctccgagacggatcagcaacaacagcagcagcagaaacaacaggaagaactgtactacgcacaactgctggcagtgcaacaacaggcaattgcaatgagagaggggcaacagaaggagcgggggacggagcaacgacagaacggcgcagaaacggacggagaagcgggagacggaggggaggacgagcgggaaaagcgcgagagagaggtctcggaacggaacaccaacctgatcatcaactacttgccgcagaacatgacgcaggaagaggtgcgcgcccttttcggttcgatgggcgaagtggagtcgtgcaaattgattcgtgacaaatcctccggccaatcgcttggctacgcttttgtaaattatgagcggccggaggacgcgcgaaaggctctgacctcaatgaacggacttcggctgcagaacaaagtgctaaaggtgtccctggcaaggccctccaaagatgacattaagggcgccaatctgtacgtcagcggactgcctaagtctctgacccaatttgagctcgagt

SEQ ID NO: 92280 - DNA, 658 bp, Heterodera glycines
attagattcagtatttgagttgtcttaattttaaaatgacgaagaaacaagtcaccatcgttggttctggaaattggggcacggcaattgctcgaattgtgggcaaaacagtgcaaatgcataactcagaatttgatgactcggcggtcaaaatgtgggtctttgaagaggtggttgaaggacgcaaacttagcgaaattatcaacgagaaacacgaaaatgtgaaatatttgcccggaaagaaacttcccactaatgttatcgctgtcactgatgttgttgaggcttcaaaaaacgcggatgttctcattttcatcatccctcaccaattcttgcacaaagtttgcgaacagctcaaaggaaacatcaaaaagagcgcaatcgcaatttcgctgattaagggcttggccacttttcacgaaaaagacattgggctgcgactgatctctaatgaaatcgcgacctctcttggcattgacacttccgtgctaatgggtgctaatctcgcgaacgaagtggcagatgaccacttttgtgaagcaactattggaaccaaaaacccacagcatggaaatgaattgaagaagttgtttcacaccgacaatttccgaataaatgtggtcgaagacgcggcaacggttgagttgtgcggtgctct

SEQ ID NO: 92281 - DNA, 644 bp, Heterodera glycines
attatttttaatggcaccgcccgtcaaaaaaaagaaaaagttttcctccgacaatcaccgcctcatttcttctacagaaattggtgaacatgaacaacaatcgatgggttcacttacgacatcgtttggaaaacggcaaagtctttttcgacatgcaaagaaaatgaacaaccgaattttgaggaaaatctggatttgcactgatatttggatggacactttcccgttctttgaccatgcccaactcggcctcaaattggcactgatttcgccacgtttcgatgttttagtagacaaacatttcaattgccaatctgaattgacaatttggagagaaataacaattgtcaaggacacaggatcagaattaaatctaactgtactgattggtggcaaatctgtgcaatttcctttgcccgaccgttcgctgcccaacaaaattcgctttgataatcttaatattgattacattgaccattccgtcctcgtgtttctccgtgccaataagcaaatttgggacaaaggcaccaatttgagtttgtatgtgtgctggtcacacaaccagaacgacaacaacaacaatttcctgccaatttgggatgtttttgtttgtaaaatttggcccatttttgcgccaaacattc

SEQ ID NO: 92282 - DNA, 427 bp, Heterodera glycines
tatccatttggtgggccccatttccaaccaagaccggctggaattggcgcgacaattcgaaccattgttcggagaagatgtgtcctccaaactgaagaatgcactctctggcgactctaatgaactgattttggctttgttggaaccgacatctgtataatatgcgcacccaatgcaccgcgcgatgtgcgggctccgcactctcaagggatcgggcctgattgagatgttgctctcacctcgaaagcgaccagttgatgaaatgacccgcgcgtgctagacactgtaccgccatccgctggaaaaggacatcttcggggacagctgcggcgcattcccaccactgctcccgtcggtgtgcaactatactcgcgacaagaggtggagctccgacccgatctgagcgaatatgacggcacgtgctctg

SEQ ID NO: 92283 - DNA, 252 bp, Heterodera glycines
gaaacactgcacgattccctctccaaagaccccgttttccccgtgatcgccttcaaacattacgccgccttggaacggcgcctctacaaaatcatggagtaccttctcgaatgtatggacaaacagaatggagacctaacccaaatggttgtcaacgaatttcacaatccgacggtggcggagcctttgccgggcgaagagttggagacggaggaggacgaaacgaacgacgccccggcagggccaccagcg

SEQ ID NO: 92284 - DNA, 646 bp, Heterodera glycines
ggtcgcatcttcgttccatcagaacgcgccgtgaggaggacagtaacccgcgctttttcatgtccggtgttcaggacagtaacggtctttgagcccttctcagcaacacatgtcccgccacccgggtcaagccaaaccgccgtttcgtccgccgcgtagacatgtgtgtagctgaaaattagtcgtttgaaaaaaaatttctcatttacctacttatttttgtgtatgagttgttgaatatataatatgatgttgatgatgatgtttttgtatgcatcgggttctttttgcgctactgttgtcggtcgacgtaaggaaaatttatgatggtgcatgaatttttccagccatccattactagcctaagagaaaaatgttcaaaaatttttcgaaattttaccgcaaaattttccatgtcttcgtaggcggcgctcattttgattgcttgcgcagcaatcatatttcgtgtcacccgcactttcttttgtcgcaattcagacacccactggaacacagcttcttcgaagttcctgtttggaactttccttccgcccccttccaaacgttttcgttttgacgattcggccctaaattaaacgaattaaaacattgtgacattacaggcatcttactctttcatcaaatt

SEQ ID NO: 92285 - DNA, 649 bp, Heterodera glycines
gatgatgtgacgtgaaccccccaaacgcgacccatcccaattgatgagatgagatgtccattgatggaggagtgtgtgtgtctctttggttgaccaccccactcactcgcacatgacgaggagatatttggagttgttcaagagcgacggtgccgcctttgaagcgttcaaagcgcgtgccaccaacaacattgttccgctgaaggcgttagcccaggcgaccggcgacccgtacgcctcttatggatatggtccggctgcatatgggactggttatgaacagcgtgccgctggcgggcgtccgatgggacgaggcggttatggagctgggggtggtggtccggcctctcaccgatactcgccttacccgagctatcccaactacgggtacggcactccgcgacagcccggcggcgccggtggtgcgggaggaggcggttacggtgctggacgtggcggtggtgctgctgctgctgctgcagccatgggtggcggtggttacgatgacggatacggcggctatggaggtggatacaatgcaaatcccaacgctggaccgaccaaactttacatgcgcggaattcctttccgtctgacagccaatgacattgaacgtttcttttctccgctcgtttgcgtggatattcag

SEQ ID NO: 92286 - DNA, 653 bp, Heterodera glycines
ggcgttggcattttcgaatcggacaataagctgagcccccgcccgttcttcccatggacagagatcaaatgcatttcgttcaaaaacaaaatgttcaccatttgtactgcggacaaaagcaaaatcaagttcagggcacaggacatgtccatcaatcagtcacttctcgacctctgtgtgggcacgcataacctttacctgcgcagacgacagcccgacctgctcgaggtgcaacagatgaagcagcaggcagacgagcagcgaaggcgcagaatggaggagcaggtgcggttgcaccgcgagcgtgagcagcgcgcgcaggcggagcaggagagggaccgctaccgcgcagaactgaaccatctgtcggaacagttgagcgccatgcagaatgtgatcagaagtgccgaggagacgcaagtgttgatcgcggaacgggcgcgtctttccgagcaggaggccattgagcaggcacgtcgtgccagcgaagccgaggcggaagcgcaacgcgcaaaactatcccagctgagggcggaagagaccaaaatgttgttggagcgaaaaatacgcgagactgaaatggccgcacaacgaatggctgcgcttcagcaccaacaacagcaaaaacagcagcagcaacagaatggcatcac

SEQ ID NO: 92287 - DNA, 641 bp, Heterodera glycines
atcgacgaggccgatgtcgccgccatgtcgtcgaacggtgtcgaagaaaactgcgaggccaccactatcacttcgttggacaacgagttggcggacttgttgcgctattggcttccgcttggtgcagcgacggaccattgtctgaacgtggccatgcaatggcagcagcagaaacggcccaatgctgtccttatgtcgaccatttcgcttctgctggtcgcccgggggcacatccaacgcgcatttgagcacattttcaacgagggcgttgaacgacggttggacagcaccattagccaacctcccgccgccgacgaccgttgtgtcgcctctctgttggaattggcctccgcccatccgtcggatgcgcgacgtggcgattggttggccaaactgttccggcaccttttgaaggcattgcccgaggaaacggaagccaaaagtgatgataatgcagcggaattcactgcctccgtcgttcatgaacaaatgacgcgtccaaattcgcaactttttcgtctgctctgtgctatcattgaacagcagcaccaccacgacgacgaacaggagcaggacggactgagggacatccaaattggagcggaaaaaggcacttcggcttcagtgctcgttgccgagct

SEQ ID NO: 92288 - DNA, 627 bp, Heterodera glycines
gttttaaataaattaaatgactgaatctgacgaaggcaccaattgggttgagtctcatccgtgccgatgtggtgccaaaaattggacagccagtcacatggagcgtgtgatggtcaaactttgctgcggtagcgaagaagtccaaaactttggcaataataataatggcgctcagaagaatggcacgccagaacgtaaaaacagtttggcgcctccggagcctagcagagttcggcgtcgctcaattaacaattggcgcccaattgccggcatttttgcagtgaacccaaaggaggaggattttaatgactgtgtcaaaagccaccaggacagtccacatgaggccatccatgttttgttcaaatgcaacaaatgtagccgcgagtttgactgcacttatgagatcattgcagatgagcgtggcaaacgacaaagttttggtcattatgagtctgtttcggaaccgatcacaattggaaactgttgcaacgaaatgcacagctatgaacacattcagcgcatttttgcggccatgtgggacaaggacaagttccaggtccattacaacaactgccgacattggagtgacggattttggtggaaagtacaccctgatgagtaccaaaa

SEQ ID NO: 92289 - DNA, 655 bp, Heterodera glycines
gtaagctttcgttgcttgagttgatcgcgatccaattcggacaattggatcattggcatttcattcaccaagaattgaagtgcattgaggttgaagatgagtctttctccattgatgcacagaaatcccaatttgaccatgtcactgatgtatttctttggcatgcgctcaccaaagctggtcaaaaggcattcttcggtgttgacgatcggaagatcaagccgttgtgccgtatgattggacacaaatgatcgatgactgccagggtcgatgaaaattgaggcgatcatgctgaggtgcggttgtgccggattgaaaatggttgccgtcgttgtcatgagtaaggcgcgagtgtcagttgcattgacggcgtttcacattggttgggtttggattgcagcattttcgattggttgcgggcttggtattgacaaatgtggcatgattgttgccgctgcgatttggttctgcgcattaatgttgcggcaaagtgctgttgggatgaagttgtccgcatttgaaacatttttctcggttttggacagtcaaatgtacgatgtgcgaaaaggcatttgaagcataagccttttgatttgacaatttcaactcgttgttgaattgtgctgaattttcggcaatcggaattccaatggtt

SEQ ID NO: 92290 - DNA, 648 bp, Heterodera glycines
gattcctgtgctaaacaaatggtaaaaacaacaaaactttcacatttgaaaaagtcgcgcaaacgactaaaacccttaactggtcaagcaacttcatcattagcatcttcatcatcgactatttctacaacttcagctcacaaacagccgtttgactgtgttgatgaagcgcgtgcaagtggcacgttgcccactcattctggacggactttactgcgaatcgacgaggatggaaactgcgttgagattccgatgcagcgtaaaccgacttcgcccgtcaaaaaaaattgcttggacattggaaaaccggagatggaactgctgcaagtaaatggtggtcaatgggaatttgtccaacgcatcaccaatgaatcgcaactctatttttacatcaatcgtttcaaccttgtgttcggcagcagcagcaaagcgacggggggacgacgatatttcaattgcattgaacgcggcgggtcgaccaaatgtccctatcggatgatgtacatgttggaaagacaggtactctaccaaaccggggaacataaccattcgttctcactgttacgaaggcgaaagccgaccaaaatcaacataaagggactgcttccaacacccgaaaaaggaggtgatttcgagttgctgtctctt

SEQ ID NO: 92291 - DNA, 512 bp, Heterodera glycines
catttgttggggcatgtgccattggtgacttggtcaaaacgactttagggcctaaagggatggacaaaattctcgtcagcggtaggggcgaacaccaaaatgttcaagtgacaaacgatggtgcgacaattctgaaatcgatcggtgttgataaccctgcagcaaaagttcttgtcgatatttctctgacccaggacaaggaagtgggcgatgggacaacgtcggtgactgtctttgcggccgaattgctcagagaggcggaagttatgattggacagcgaattcatccgcaagttattgtttccggctatcgaaaggctgttcgagttgcgaaggacgcacttgaaaatgctgcccaagcatcaggagagcatttgcgcgaagatttgctgaaaattgcgaagacttcactgggttccaagattctttcccagcattccaaccattttgccaaattggcggtcgatgccgtcctccgactcggccccaacggcgctttggactccatccaa

SEQ ID NO: 92292 - DNA, 659 bp, Heterodera glycines
  unsure (1)..(659): unsure at all n locations
gttgaattacaattcttttgtccaatatttgcttgctcaattctcgttttaaatgtgttctccaacaaagaatctgctcaaatctaatgacgattgcaataaaaaggagtcttttccacctgcggttctctcagtgccttcttcccagcgttgctgtcccaattctccctcgacttcttccggctcatcctccccttcgtcatgttgtcggcagctttccggttaccccgtaattccgcgtgagcaattggaaatcgggaagcaattgggtgctggcacatatggttctgtttttcgcggatggtggactaaaactgatggaaatttgctttgcgtggcgatgaagaaagtgtttatgctggacaaagaagtcgagattttgtcgcaaatccgtcaccggaatatcatccaattttacggcgtttcggttgccaaccctgacttttggattgtgactgaatatgccgagaatggctctctgtttgataatttgcacaataaagaacaaccacttgaattcgggcgcattatcaaatgggccgtgcaaatcgctcgaggcgtcgtttaccttcactacgaggcgccgttgacagtgatccatcgcgacttgaagtccaaaaacattgtgattggcagtangaaccaatgcaaattgtgcg

SEQ ID NO: 92293 - DNA, 637 bp, Heterodera glycines
aaatccttttttgggatttcgaattgccaatgaatttgcgtatcggttttttttttagggcactcgtggcattatagacaaaaggagcttaaaaaatcgaatttggataccctaaaaatagttttaaaaaaatcggaaattgaggcccacgcaaattcaatcttctgctgctgatcattgcaatgaagtgagaaataattaactaattaggaccaacagaagcccgaggtaataaataattcaattggttactgtaggatttttgaaagaacgttcagattgcttactgtatgcatgctgtatactgtagccttgcccatttaaatattttcgaaccattttttaatttaatttttattaattactccttttaatcatcaaagtctgccgcgaacataagtgttattttttcaaggcttttccaccgccgcccccgcaggggaatttcacagctaatttaatgacccccaccccgcggggttttcccgccggtcgccccccggggctctaattgccaacaacttccgccactttcctcgcccctacagtatgccccatcttagtgacttcattagcaacagcagcacagttcgcaaattagtttttttcaaatgtaattttctctccccgccacgaa

SEQ ID NO: 92294 - DNA, 612 bp, Heterodera glycines
atctgtcaaaaaaaacaaatcctgtatcaaaaaaaaagaaaaaaaaatttgatcaaaaaaagtgaaaaatttttcaaaaaaggccactttttaactagcgccgaattatccattccaagatttgttgtcaattctagagacagacgcccagaaatttgtttcaactttcctgacaaataatgcatacacaacaaaatttattccaaccaaatcttggtgtcctcattaggcataaactaacgatcaatgacagaattttttgtgccatgccaaaacggaacatgatttatttttgggtgcccaccaaaatgccaaacatacatttgtttcattcaccttggtatctctcacctgtgttgccgatgcaattcccgaacatgtccaatgaattgttcttgctccgtggttggctgtgcaatatgtgcgctgttcaaatggtccgcatattcgtcgctttcttggtagtcgcccaacatcgcctgggcaataaacgcgcccaaattggcctgggccgcgaatgagacgggcaaactgaacaaattggcaacaaaattatgtgtactcccgtttaactcggtcaaatttttctgaattttacagacatgaaccccc

SEQ ID NO: 92295 - DNA, 658 bp, Heterodera glycines
ggcatacgcaaggaaagtaatatttcctggccaattttatcgttggcaaatattttatatgtatgtatcacactagttttattcattttttatggataagaaaatgaatatttttttaaatgaatatcagtcaaattgcgccttaggcatcgccgctttccctaagaaattttcaaagatttttccatattcaaatgcttatacaaatatttctcaaattttcttgtcttttataactgaattttgggggctttaaatgtattgaaattaagaagaaatgtattgtgcaaaaacaattattattttctcacaattgcttctaatttgtgtttatgtttcggacgcttttcattcggctaaaggaaagaatgagaagaccgacgaaaaaggaagcttcatttttaataaattgaaaggtaaggttaattaattaactaattaattaattagcatttatatttttcgattttagtccaattccaagccgccattagcgaaaatcagcaaaagtatctgcaatttaaacatatatgcttaatcaaatttaaagcaatcctttttgttttagggtagcatcagtcatggcggtaaaaagtatctgccaaatgatgattgatggtgctgaattcaacggatttgccaattcgattgctttcca

SEQ ID NO: 92296 - DNA, 477 bp, Heterodera glycines
gtttacaacttttttttgtgatcaaaatgctccgtttgcgctgcccatcgcgccactttgcctcgtccgccgcttccgccatgaaagcgcgaccgactgttgagccggtccaacaaaaaatctcccgactgcccaccggtttctctgtttcttcggtggaacttcagatcgccaaacggactgcggaaatgcaaacattgaccaccgccaactgttcgtcatcgtttgctgctgaccaggcttgccaattgttggccaaaggcaccgcactgttgtctccccactttcaaattgggaacatcaccaacaagcgcactccacaaattgtcaactcgcgctggttgaccaaggaggcggcactgatcggcgtcaacatcgaacacgacttgcttttggactatgcgggcccaatttcccaattgatgtttgctttccgttccggcgctcgttttcaacaacatgacgaagccggactca

SEQ ID NO: 92297 - DNA, 654 bp, Heterodera glycines
atggcacggcgttctcggcgccattgccaacgggtgaaggcactgtggacacgggctgcctgttttatcaaaagtcgccgccgcggatggccgactttgattattctctgccaatttattcgactctttcccgaattgccatccgtgaccacaacagttttccgttggctgaaatttggcgtctgttccatccgttctccgtcgacacgtggttagccatcgtcttgttcattgccctgcacagttttgtcttcatggtcatcgaaaaaatcgaatttttggtcaaccgccgcactgtcgcacaaatgccaatatttcacaatatcctttggcgccttcttcgccttcaattgctgcagccaaaatcggtccgtttggccaccgtttcggcttcgtgcattgcgtgtgcttcacttcgctgtaccgttcttggattgtcacttcgctggtacagccaaagccggccattcccatcagagatgcttcatcctttgtgaaggacgttcagcagggcaaatacacttttgtgtcccaatacagaggccattggttttatgagagtttgaacaaatccacgactttcccattcaaagaaatgcgcgaaggcggggcacaaaagaaacttttgcaggcacattcgattcaagagtcgct

SEQ ID NO: 92298 - DNA, 650 bp, Heterodera glycines
gccccattttgaaggaactgaaaaatagatccccacagaggctcgaattcaagtaaatttggtgttttacctttggatcaggcagggtgttggaaatttttcttacatattttattcgcaaggatttttctcaaaaccaaaattattaaaacttttttatattcaaaaaaggggaattttttaattggctgataatttcacagtttgctgcttttcctcgtgtcaataaggagaatgtattgccgaaatgccaatgccgtcaccccatcagcagcagtgcctttgtttttggttgacggtgaagtgaattctctgaacaaaaacagtacgccaagaccatcagcaggagaaattcaaatatttgccgaaaatatgggtaattcacttatttatgactagggatgtaaattatattgactgaaatatggacataaaatggactaaaaaagctcaaaaatggccaaatatttactaaaaactgtcaaaatatagttttaaaacctcaaaaattcaaaaaaaggtttatatattcaatatttgcttaaataaaacttaaaaataagataaagaaccaaaagatggatttaaaactaaaaatgcaaattttgtattgtcgtccgttgaaaacacctccaagtttgtcaatttca

SEQ ID NO: 92299 - DNA, 153 bp, Heterodera glycines
ttggaaattcgggcaaaaagagagcgaagttggcgcactgtgaaggaattgcgaatgacgtcgacggaccgtccgaattgggcggggcactttcgcatggacggattggaggcgaacgaacgctatcagttccgattgcgacccttcggcgaa

SEQ ID NO: 92300 - DNA, 640 bp, Heterodera glycines
aaagacgaatccgatggctgttcaaacgttccaaaagaattccatcttcaccaatgttgccgaaacttcggagggcaaagtgtactgggaagggttggaggacgaaatccgcgaccgcgatgacgtcaccataaccgattggatgggcgccccgtggaaattgggcagcccaacgccggccgcccatccgaactcgcgcttctgcgcgccggccaaacagtgcccgatcatccatcccgactgggagtcgccgaatggtgttccgattgatgcgatcattttcgggggacgacgtccgcagggcgtgccgttggtgtttgaatcattctcctgggagcacggcattttcactggcgcatgtttaaagtcggagacaacagctgctgcggagcatcaaggaaagacagtgatgcacgacccgatggcaatgcgaccctttatgggctacaatttcggcaagtacctggcacattggtgcagtttgaagcagccgggccgtaaaatgccgcgaattttccacgttaattggttccgcaaatcgggggcggacggcaaatttctgtggcccgggtattgtgagaacatccgcgtcattgactggattgtgcgccgtttggacaaacagcgagcattggcattg

SEQ ID NO: 92301 - DNA, 638 bp, Heterodera glycines
gacactgcgaatccgccgctcaattcgccaccgtcctcacaaccgcttcactcccgactagcgtttaatggcacaacttcggccaaaatcaatgacacagcacgacattggaagcagtggaattcatcagaggaaatggcacttgcatttggcgagaataaaaaggcacaaatggcggcacgggcgatgttcgacctggtgcatcaatacggggacaaccttcgagaagttctgttccttttcagtagaccgcttcgaacaggcgcacattttacagagtgtagtccgtccttttccatttagggatggatgaatgtgttggattgtcttctttacatgctcaaagctaatcttctgccgtctcctcttgtccaattggaagattttgtggagctgtccggcttcgtttcgcttaaacattgcttcaaacgccgtccgactgcaccgaaaaaggaagagagcggactcctcagttggctcggacttacgggcagttcagccaccggcggcggagaatcggggcaaagccgaccacaaaacgagcaagagaaggagttggctgctaatacagttgccgagtgtcaccctgagcaaattgtgctggacagtcgctatttggccagttcttcgctcaccga

SEQ ID NO: 92302 - DNA, 641 bp, Heterodera glycines
gagatattaatttaaactgttcgtttttctttacgctatcatttaaatttatgaagtcgatcactttctgaaaaagaaaatgccgggccgctcaacggaggcgcatagggcgttggaacagcttgaagcataccacgcgttgctgacacaacccggggatgccgaattgcgctacggcattgagcgagtgattggcattttcaaagccaatctgttccaggcccttttggacatccaagaattttacgacaacactttgctgaacgaaagagttccgttggatatgaaaacaaccgaaactcgcaaattggccgagagatgggagcagagtccccccttcggcgccgtctcccgggcattcactccgtcctccttcgaccgtcctgtctttcccgccacaacaactgcaacacctcacacaaatggcttcaatggcgaaatggaaacagccataacacactcttctcattcatattcgtaccaggagcagagcaaacaattgaccaaggatggatggcatacgcaagagtaccggactcaaacggtggacgggccgagtgggtttcagacggagacagtgaccaacaacggactgattgacgaccagggaaaggcgtgggaggtagaggacgtggtgctgg

SEQ ID NO: 92303 - DNA, 634 bp, Heterodera glycines
gaagatttgaatgcaatttgtgaagcggcccaagccgaagaagagcgaagagcaagaggcgaagagcgagttacgcagcttacagcgtatttcaccttcaacaaggacaatgctccactcggtctgacttatgccaaatgctacaaaaagttgtggtacgatattgcaaagaagcagtggaagccgtatgtgaacagagttgttccaaaattttgccgactcaagaccgtttcgccaaacaaccgcgaacttctggtgaatattatttaaccaattaacacattatggattataataggctattcggatgctcctattggttgtttgtgacccaactggatgggaagccctgaggacgcacaacaacattgtccacggctctttcattgaggctgctcaggcccggggtctgctcagtgacaataacctgtggatgaacaccgttatggaggcctttcaaacaaaaaagtccatccgccagagaatcagatggctcgctgtgttcttcgcgactacaaacctctcaagtccgacaacaatcttggacagcattttgaaggacgccgacaattggcttgtgaacaccagtgttgcaaaggcttcggctgaagatcagaagcaatatgtcctgcgt

SEQ ID NO: 92304 - DNA, 157 bp, Heterodera glycines
gtttttatcaaccacaaaagctacttaaaatattttttattgtcagtggatattgtgaattgtacctgttgacgttttggcacttgacactcttttcgctgcagattttggctacaatataaagaattttgatttaacccaaggctaatctcaaaaa

SEQ ID NO: 92305 - DNA, 644 bp, Heterodera glycines
agattatttaaccgcgttattatccaccggatttaaaggactacctaaatcgaaatatttgattatttgaatctccatccaacgaggccaacgatggcggaccaatggcaggaatatttggcgagggatcaatcggctgatgaaacattccatgcttctgtcaaaacagctgacaatgggcagcagcaacagcaggcgaacaacgtcgccaacaacaacggttcgcagcgtgtcgcacaaacaaacggcgtcggtttgccaaacggcggggacgacggagcgctgcgttttgtgccggaaaggacgcggataaagtcgcggatgaacgatgaaacggacgaatgggcggaaagagaggaaatgatggcacaggaagaccaaatgatgatgctcaaagatccgaaacacaaagattctctgctgtcgcggctggacaccttccgccgtaaccgtgccttctgtgacgttgtgctgttcgtcgacggacgtgaactgttggcccacaaggcggtgttggccgccatttccccgcctctcttcgaccttttccacagcaacagcgcctccattcccattgatgaggaaaatgaacacacccttctgccggaccaagccctcgaattggccaaggccgcttctcaagt

SEQ ID NO: 92306 - DNA, 436 bp, Heterodera glycines
tctgctggcgcttgtgcttcataatgcctgccatgagctgcgcactcgctatgacatgactcgcgagagacttccgcgcttctcgaaaccgaggccattttgttcaatgagctcgtcagactttgccgtgcctttgattttgttcgtcatcagcacaaatgatttgtgcaagtgtttcaagattctttaccatcgctttgggccaagttgtttggacacattaaaaggtggtggtccagcggtcatttatctggtccagaatttgatgatctttttggctattgaaaagtagaggacgagcgcttatatggacacttatcgacttaaaatcctcaccacggcattctttgccgtgcttattttgaagcagaagttatccataattcaatgggtgccactgctcattttggtcgacggggctgccctcacccaatat

SEQ ID NO: 92307 - DNA, 623 bp, Heterodera glycines
ccgatggcttctcagtgcgtttctcctcttcccgtcaaaggttctcgacggaaacatcctctcctggcaaatttgctcctcgtcctcactctgattagcgtatttattggcattggcatcgccttttttgtcagacaattccaaccttctcaaagaaccatcgacatgatcggcttcccaggcgaactgttcatgaacttgctcaagtcgttgatcctgccgctgatcgccgccagcctcgtgtccggcctcagtcagttggacacgcgtcaatcgggccgtatcggcgcgttcgccgctttgtattacgccatcacaatggtgctcgccgttacgactggcatttgccttgtgcttctcatccatcccggcgacccgagcatcaaagaacacttcgcttccgagaacgattcgcacccggcaaatgtgtccgcgttggagaaactgatggatttgctcagaaatatgttccccgacaacattgtccaggccactttccagcaaatggagaccgaatacgtcgaaattcgtccaccaacaaatgtcagcagcacaacagcaattgtacacgcggtgcacagacacatcgacggaatgaacactttggggatgatcatgttctt

SEQ ID NO: 92308 - DNA, 191 bp, Heterodera glycines
tgttccatctgagaacattgggaaaaaaccttatgggagaaagaacgcaacctctttgatttccgtaattcgaagcatatgacgagcagcgcccatatcagcagaaatggtgatctgtcaagtcaattaaaatttattacaataatttttgcgtcagcaacatccaaattttcactattttatgcataagg

SEQ ID NO: 92309 - DNA, 649 bp, Heterodera glycines
ctattcatttggaccaaatgattcgtaataagcttgaaagtctacaaaaaagtcgagagaagcgttaatttcagacatttcaaacacaaatgaggatgccgtgaatttgggagtggagcttggcgacccgaatgccgtgataattttcgacaacgttgacagactttgaacgaggctgaagtcttaataatgaactttgagcgcggaaaaacatattttgggggacattgcctgtggctgaatgctgaactagtgacaaaaatttcgaccatcaactcagaacacagctacgcggctactccaatacaattcggcatcggctcaccggcgccatcaacttttacatggccaaccaccgtgactccacaagaacagcttgttcaatattctttgagctcgctatcgacttcgaaacaacgccttcagttcacgtgtgggaggaagaaatctttcgggcgcccctcttcccaattccaatttggaacatgcattcgcaggccacgtctgccctcgctcatacaaacaatggactggagaaaggtctctgccaccaccctgcactctcggacttcatttgtgaaatcagtgaaagcaccgactgacgatggacgctgcccgatctgagctgctcgccatttcattcgcatgt

SEQ ID NO: 92310 - DNA, 337 bp, Heterodera glycines
ctgctgcacctgcggctgaggcggcagcgcctgcgccagctgagcaacccgcggccgagcaaccggcgccagcgccggcagccgagcccgctaagcagcaagcatctggctactgatcacttcgtcaatgatgggatgtgcccggctgatcacggcgctgatcagtttcttctattttgattgatcagcaccaactttcattcaaacacttttcaccaccatcttgccggtgtttttttctttcaaacttttgctgtcttccaaatgattttcattgtgtcagtgtgtcttagacaacataaaattttgatcaaacaggaaaaaaaaaaaaaaaaaa

SEQ ID NO: 92311 - DNA, 641 bp, Heterodera glycines
cgaattcgaatgatttcatgtttgttgaatttcactgtataaatcacaaaaatgtatgaagcatatacaaacgaagaaattgtttctaaattaccaatcgaagcatcatccatcggaagctatgtttcgaaaggaaaattattcattggatccagacaaggccatctcataacatgcaatcagaactcagcagacacttccaaacttcattatgaatatcaatggttgagtcgcacgatctaattatatgtttaacggatgtacatttgtcaattcatgatgctgtagaaccatttaagctcttggatgtatgttctaagtacaaatcaatttccgcattttctcattttgtgacagagagccaaactattcatattgcaatttccgcaagaaagcatttacacattttcaaatatttattgggtgaactttgtgaaattaacgactgtgcaccgattactcttcctgagaatgcccaagccgttgtgtggtgcggtgtcaacaatttaattctggcatttaaatgcgagttccaattctgggacatggaccatttcctccacagagatgatttgatcgacgaaaaagtaacaaccaatttatttttgtgagttcgtcatttagagcatgagtctcgcaaa

SEQ ID NO: 92312 - DNA, 643 bp, Heterodera glycines
gaaaattattacctaaaacttatggcaaaagaggcgcgaaggaggcaaagaaaagacgagaggagagatgcgagaaggcggagagggcgagacaaggccgatgggccaagaaaactgctccacagccgaatctcaatgccgaagtgccacagcaggacgaagcagggccgtcaacatctgctgcaccgacagaagaagcgatggagccgcctccaccaactccaggaccagtgccaacgccagaaatggacgaggaaattttggaattcgacgacccgccgccgtcgacacctgccacaccaattggcgatttggtgccgtttccgtcaacaccaactgcgccaatggacaccggagagacgaccccgccaccgctggccattgacgagcgatcagagcgcatcgaacagctggaaaagcaactgaaggaccggtatgacaccattcaatttctgcgcgagcaggtccgaaaccgagaagcgctgatcagtgatctgcgtcgtcagctggagcaatgtgcggcaccaccaacggcgacaccaaccaccagcaaaacaacgccaaacagaggaagaccaaggaaggccatcgacgaactccaacgcagctcgcgaaaacggttgacggaacagattttggacgc

SEQ ID NO: 92313 - DNA, 268 bp, Heterodera glycines
gcaagagactcacattgttctcgggattgcctcgatgtgctctctgttggatatcatcgccacaatcgacactctgccatctctgaactcggatatgagccaaatgaacaggaaagtgcgcgacggagttgaagccttccgcgtcaacaccgactcgggctggactgacttgatggacgagcaagtggtcgtgacgccgccgacgaagccccgagataaccccttcaactccatcttccgtgttaaacgacaactgaccgaacactgc

SEQ ID NO: 92314 - DNA, 466 bp, Heterodera glycines
ccaatacctattctatttcaacgtcaacacccccgcagcagcacatcagcgcacttcagcagaggaggaggcagctcatcatcatcaacaacaacacaaacgatgagcgacaagaaggagaagggcggcaaggacaaggagaagaagcggcgcagcaaaaagagcgggaaatcagcgaagaagaagacgaacgagaggaaaacccgcattatcaaaaaggaggaaaagctgagcacgggaggagagcgagaaagagaggaagcggggaggaagtcggcacgatcgcggagccctgcagaaagacgacgacgatgattataaagcgacataacaatcagcaagacccatctcatatgctcattctttgataacagaaaacgcaggacacagaaatgatacagcagcctcaattctctggaagcacaaatttgttatgtatttgcatggggaataaatatagatgccg

SEQ ID NO: 92315 - DNA, 662 bp, Heterodera glycines
gtaaaagatggcaatcatttggggtgcccagctgatcaattgatcagtccatttgcgagtaattcgcctgcgaatgtttcccttccattctgctgctgttgtccatcactaattgattgtccttcaaccaaccagtgatcacttcctcttgcgatggtccgttctttgttcgacatttgtctggcctccgtttgccagcgcagtttggtgttcgatgccgacctttctcttctcccctgcgactgtaaacaacgtttgatggagtttttcgcatcccatgaccaattaaactccgaactgtgctttgggcttatgtcacggccaatgtttggtcggaatttgactcgcctctgcttttacctcagcgaccaattgaatgattcgattttggaagctttggccagttttaaccaaaaccttcgcattatttcgatcgtcgaatgcccccgggtcactgatacgggaattgtcagcgtcactctccgccagaataaactcgtctgcctcgagttagtcggaattccgctgctcacttccaatgcgctcaaggctgtgaattcgaaccgtctgagaagcgtcgatttgagtggatgccgaaagatcgcttcagaaggcattttctacttggtgtttaataatccgtcaattgttagcctttgttt

SEQ ID NO: 92316 - DNA, 625 bp, Heterodera glycines
gtttctttggattcgatggaacgctcactttttgctgaaacatccgatggcaatattgggaacggcggcggcaccgccccacggcaccaccagcaggaggagggccaactttggcatgggcactcggaaagcgcaacttcgccaatggttgcaagcgtttcggcaaagctgctgcacttgccgcccttccatttgggcaacaaactgatcagtgtcaaagcgttcgtccgatgccatttggagtccaccttctacaatttgtctgtgctcgctttgcacgattgcgacagttatcgccgcatggctttgttggccctccatcgttaccatttgcggttggccgactcggggctgcccaatatgagtgttgaccaggggttggaccttctcgcggtgatggccgatgtggacacttttgtggccgattactgttacgatttgaacgaacaatttttcatcgaacgcaacgaacacggaaagacacagctgaacattttgcgtgtccatcaggtgatcaattcggtgaaaacccacggactcggcattctccactctttgatcaattcggcttacaaatttctgcgtgtgcaattccaacgcctttcgcgctgtctttttgacgaac

SEQ ID NO: 92317 - DNA, 623 bp, Heterodera glycines
ctcaaacattggaaggaaatgtcccttatgaaaatgaccaccactttggaaatgcccaatgggccagatgaaagtctgtggcaagaatgtgccaatgattgtgccatgttcaactatttctcgcgggagtccttccaaaagtgtgtgcaaaggtacaacggcacttttgctgaggaaaaaagtatgcgtgtgagttacgaatcgatgcatgccgaggcatttttgacggcattggtaaacacgcggcagaccggacgaagttatgtgggagagttcgaagttgccaattactccaatcatgccaatgatatgtattttttcattgggttgcaccaaattccgatggaccgactcgacctgcgattgatggattggtattacccgcaaatgatcaaaaacttcgtgaaaggaaaagcgcccgacattgggtggaaaccccaaaattggaacggacgcaattactttcgcatcactttcaatgtcagcgacaacggcactctgacggattggccacacggagtggacggataccaggacgtggctgggcttgacttttggcttcacgaactgccccttgtggaacagaacgcaacgcgagagacggaggaggaaaaggaggagga

SEQ ID NO: 92318 - DNA, 601 bp, Heterodera glycines
agaaaacgaccctaagaaaaggattattaagaggaaattgccgcaacttcctgtcactggtgttgtgttgccttttaacagcggagtgaaaccgaacatggccaggaatggcatggcacgtaaagccctcaacccacaggcgtacgaagccagcgcggtcaaacaaatgcaaagttacaaacagacaaagtcaatggaattgtttaaagagcgcgggatgaaattcacttgtgtggactcatctcaacaacagcaggaggagaacagaaacggacgggcgggggggacgagtggcgggacattgtcatcaattggcactgtttcggcatgtccagtcgacatgatggaccctagtgaccgcgaagcaattcagttctatgaaggcgagcggaacggaggccgagaaacgaaaggaagcttagcaaaaagtacggagggaggaggatttggggcttcttcgcttgagcgggccaaacgctttgggcttattccaccaaaatttgaccctcgcattccgccgccaccaatttgccaaccaccgaaacgaaaagaaatcgaacagccgaaggaaaagagggcaattaagcaggagacagaagtg

SEQ ID NO: 92319 - DNA, 660 bp, Heterodera glycines
caaaaaatgagcacaccaccaaaagcagacgacaaaaagaaggaagtgggcggaattctgaaaatcggcaacacatgctgcatgggcgctgcactccaagcattagccaacgtgacggcactcagcaattttctgatggaaaacgaaaaccgactgcccaacatcaaactcgtcatggaatatgcaggcttgggaatatgtgcaaatgatcaaaagcattttggtgttgcgacaaccggcggcgccattcgaactgaaggaagtcatctccagccttaccaatttgttcgctgattcgttccaacatgacagccgactgcgcgacattccgctcgacaaaattgacatttggtgcttcatgcgattgttcaaggacaaggacgaagatggacagggcgaccgcctgatttgtatcagcctggcccagcgcttcactgatgaatcgcattacattatgggagcgtcggacgctggtcaactgcccatggatgtgccgctgatctccatcaaccattgtctcgcggatttcatcaaaccggaagacattgaaggctcacgctgtgcacagtgcagcaacgcaacgccatgtttgactgttgttgacaactccgttgacgaagcggtggagcaggaaaaggcggagaattgtccaactacatc

SEQ ID NO: 92320 - DNA, 654 bp, Heterodera glycines
tttgagttagggcatttttcaccgtcagtttattcatcccattttttcaccaacaaatgcaaatgttggggattcggattccacgacatccgccatggttgttcaactgttgcgtgtcaccgccccaatcggagtttgcttgtctccgtgtcgaccgttcgttgatcagtgggcccagcaatttccgtcacattggccacatcggtgccggcgacaacctttcaacggcggacgatgaaaatgccatgggcgcgttgcttcgctccaagggcgggcccgagtttggcatggaagtgcccgctgagctgcggtcatccgacgtgccgattggtgttgagaaggagaggaatgatggtgccgccggcggcgaaggtgacggcggtgctggtgatgtttagccttcctcccggttctttgtttctcctcctcttcttctttttgtgcggtttctctccgagatgatcagatgaaacgactgaaaaatgactactgctgctgattaattgattgcttaattgattggataagtattttcctttacgggcaccgaaaatcccatcgatcgccgccccccccccccgcccaatgaattttttttacccttttttcatttcctttttgttttaacttttgtgtccccattcttccattgca

SEQ ID NO: 92321 - DNA, 639 bp, Heterodera glycines
caggattgtaattaagtggggagttctcaggttggccaatggcgcaacgctaatcgtccattttggcggtccgcgcttcgacatgatgaatgcgtatttggagagaagcgactttttggttggaccgttttgtgagcaaatatgaaaattgaagagtgcgacttcacaaacgattcaaagttgaagggacggacagaaaaggaaatgcccgaacgatttcattcgcaaaacgctcatcagcaattttagacccacgatttggcatgatcatttggatgatatgcctggagaatacggacattctcttgtccaaaagcatttggaagcgcggagatggcgaggaatacgattgtctttactcgccttcctgcgaagcgcctgtttcttccggttcgtggaagctttgccttcatcaaattgaattggtttggagcttagatgcccatgtcccttttttgtctgctttgtggagacgattcgggccattggctcagcaaactacctcttctttttgtcaaccgcaacggaaagaacgcccgagcactgatggacaccggctcaatgatttcttttttttctttactccttactttaggctcacaaatccacattgtgtctaaggcatttgcggactcctta

SEQ ID NO: 92322 - DNA, 601 bp, Heterodera glycines
cgttatttggcattcattccgttttctcccttcgatggaaaacattcaaagcgatgaaaagagaagcaagccttgcttgtctgtacataatgtgccaatgaatgtcacagccaatgccgtggatttttgcccgcctttcgtcgccaattctctctctctttctgtgcttaggtttgccctctctttgctgctccaatgactttccttgtctgatcgacttcaaaacgccttcgcctcccttcggttcttcgccatgtccgatttctgcgcttcttctcagcctttgatttggcgagcttcggtttccaaaatgttctccattctctcggcttcgccttcgttgtccaggagaatatttctgacttttccccccttttctttttttgtcgttttgtccattttctgttttcaattgccctttgccaccgctgttcgtaataaagaaatcgacgatgagtatcaacgactgattcccctacggaatattccccaggggtgcgaccacgccaaaggcgtacttccggggacgggggacccggcaaaagaatacggttttgttggcggtgggcttgagaaatgccaagtttggcttgagggcgac

SEQ ID NO: 92323 - DNA, 211 bp, Heterodera glycines
tgcccgagtttacattggtcatttgccatctcgtgcaactgaacgtgatctggaacattttttccgtggttatggacgcatcagagatgtgatgctgaagaatggcttcggatttgtggaatttgatgattcgcgcgacgctgacgatgctgtttatgatttaaatggacaaaaattgttgggggagcgagtgatcgttgaattgtcgcga

SEQ ID NO: 92324 - DNA, 481 bp, Heterodera glycines
attgtaataattcccatttttgacaatgctaaaattgggtgaacttttgtttcaattaaaatgcctttgtttcattcattctttttgattttgctctttttaaatttatttttccaatttattttcttaaaagcattgaaagtgccgcgtttcttagtaaaaaaaaatattaaacgaaacgatgcaaaacgaagcgcagacaatcactgaaaagtcgccgcccctcggcgcctccgtttcttccctcggtggcagcgctttgtcctcccttttcgcctcccctctgatcactttggcccctccgatcacttcctccgcttcgtttctcctctttttgctgacgatcaccttccttctgctgatcagtgcttttggccttttgcttttcaaatggcacatgcgcaacggaaagagcgaaaacggagggagcaaagaaaaagcgtggaacgggagaacgccaatcatttcgcagcctttgcga

SEQ ID NO: 92325 - DNA, 665 bp, Heterodera glycines
catttctgttcaggatgccattggcaataaagcaattgtttaccgaaatattcatcttttggacgacaaatttcgcttacgttttcgctttaatgaatcgcttcatacaattggagccaatctgacaacatttattggaaagcttgaaaaacgacttcaaggcgattacaggattatgccatcattaccaatacgagacgaggaaaatccgggacaaaatttcgtcatgtgtttccatttgtggtcaccaacaaataatggtagtggtgatgcaattgttgaatttgcggaaagtgaacggttattgtccacaaatgtacaaaattcgaaagccaatgaacaattgcatagcttatactcagaatacaaagtgatcaacattgagtcatgtgctgctgctgattcgtcgacatcatcggtactgctcaattccgattcttttggctcgtcgatggtgcagccaaatgccaagcagttgctcgtctgcttcactgtttttgccatgtttgtgttgctgtccactgcatttgcttgttacatttgcgtggtgcgacggtacgcggaacgcatgcgaacaaaatgcgaccatttgctggacgagcagcggagcgcttcatacaactccaccgacaatccgtatagtgtttatgcgaaaagcaacaata

SEQ ID NO: 92326 - DNA, 510 bp, Heterodera glycines
ttgcagcggataaatttgctgaaatgccgtttggaggcattccatgctgaatatgaccgcgtttctcgtcgttatgaccatcttttttctcaaatgaacataagcggtgacgaatttaagcgtaaaaaacagacggctgctgcctattgcgaagcattaaaaatatttggaaggaaaattaatgaattgaaaaagtgacgacattttcaaaaatttaatccttaaaaaataatttagaattgaacaaaaagatgagttaatagaacgagacagagaagcacttcacgcaaacatagaattacaggaagaaaggatggaagaggttgagaaggctaaggaactcgtgaacaaagcaattcaaactcttggtcaaacgttggcaaaactaaacgaagaattagatgaaatcaaaccgcttttacttaaactgtacaggaagcgtgacaaatgccgagacgaaatattggcattgcccaaacaacaaaacaccacacacgcacatttggatcg

SEQ ID NO: 92327 - DNA, 475 bp, Heterodera glycines
gactctccagcggaccgaggttgcgttcattctttacgcagaaatagccacaattattgtgcttcttttgccatgggttcggtcgacaatgtggaaaaaagtgtttaacagtcgcgttgtgcacaaactcaaacagttttccaatgtgtacgcctacgctttcatttttgtgctcattcttttgttcattgatgccacccgtgaagtgcgtaagtacagccacgtggacactactacagagatggtgggactagtggccgaggcggacgccgtcgatcacatgcgtctcttcagagctcagcgaaacctttatatgagtggcttttctctgctgatggcactgattatcagccgcatcgacactttgctcgcccgttgtgcccacctcgaattggctgctgaggcggcgatgaaacaagcggaaagggcgggcaaagcggcccatactctgctcggagaaaagggcgatgtgaat

SEQ ID NO: 92328 - DNA, 222 bp, Heterodera glycines
aataaaaatttattaagaatgcataaaatggaataaatataataattagaacaattaattaaatgtttgtttctttgcactttctctgtttttccctcgtccttcactttttctttccaagacctccaaaaaggctgctgagtcctccgagtcccccaccgctgccgaaaccgccgccgccgcacgagggacaacactaatagcaaggaggaggaagaaggg

SEQ ID NO: 92329 - DNA, 658 bp, Heterodera glycines
ggtgccaattaataaattgtttaattcacactaaaaataatggaaacagaaaatgatgccacggcatcgccaaatcggccattgtccgccgccagtgtggccacgtcgaccgcgctgcgcgatggcggcgaagcggacaacagtgacgcacaacagcaccagcaggcgacgcgcgagctggacgaagcggtcactttggcagcgggccgaggcgcccgcatcaccgacttggacagacaaattgaaactttaatgcgctgtgaatgcctaaccgagcaggaagtgaaagtgttgtgtgccaaagcgcgtgaaattcttctccaggaaggcaatgtgcagcgaattgatgcgccagtgacggtgtgtggtgatgtgcacggccaattccacgatttgatggaactgttccgagtgggtggccaggtgcccgacacaaattatttgtttcttggcgattttgtcgacagaggcttttactcggtggaaacatttctgctgttgttggcacttaaagttcggtatccggacagaatgatgttgatccgaggcaaccacgagtcacgccaaatcacccaagtttatggcttttacgacgaatgctttcgcaatatggctcaacggttgtttggcgttgctggacggaggtgttcgactgtct

SEQ ID NO: 92330 - DNA, 628 bp, Heterodera glycines
gttggccttctcatgccattccgaagcgtttttggtccattctttgggttgactgtcgcgttcgttacgccgttctgacctttctttttcccaattgctccatccctctggtcgagccccacctgcacagtcttctgctcacattgcttcaccatgttttgcttgtgttcatttgccttttcttcgtaccaatgagtcggaatcgttggaaatttaacttccaatcgtttctgctcggcgtggtcatcggatggtccatcgccttcgctttggtccattcttctcgactacacacactctgacaaatgttgagtcccttcggccggattctttccttctcaaccattcgtctgcttattggacagctgccatttgttcgtggattgaattttggacgcgggcgtgggcttttccaacgttttgttcattgtatatttcgtcaatcggtgtttgttgctgtatttttggcgaattttttcgcaaattggcaatgtgtcatgcctcagttgggttcacgcaccaaatagcggttcgcaggaacaaggaccaccagttgtgtacacaaggcgtttatgcatttgtaagacacccaggttacctcggttggatggtttggtctgtcggcacc

SEQ ID NO: 92331 - DNA, 653 bp, Heterodera glycines
cccgaacgttcgtcgacaccccaagagcattcttctcttctttccatcaccccacacccaccacccgaaaaccttccaccatgggcaaggacgccaagaagcaaatgtccaccgaggaccaaatcaagtcgttcatgctcgaccttgttgccggcggtgtctctggcggtatctccaagaccgtggtcgcccccattgagcgtgtcaagctcattctccagacccaggactccaacacccagctcgcccccgagaagcgctacaagggtatcatggatgtgttccgccgtatccccgccgagcagggcatcgcgtccttctggagggggaaccttgccaacattgtgaggtacttccccacccaggccctcaactttgccttcaaggacaagtacaagcagattttcgtgcgccacaaccccaagaccgatttctggaagttctttgccggtaacctcgcctcgggcggtgccgctggtgccacttcgctcttgttcgtctacccgctcgacttcgctcgtacccgtctcggtgccgatgtcggcaagggctctgctcgccagtacaccggtatggttgactgcatctccaagacctacaagcagaacggtctcaagggtgtgtacggtgggttcggtgtgtcggtcgttggt

SEQ ID NO: 92332 - DNA, 277 bp, Heterodera glycines
cgattcttctaaagtccctggagggggcaaaaccaccccacgctctgctgctggcggtggcttaagacaaccgcaagctggtggggcggcaaacactggtcgtactcgaactgctggcggaggaggaggcggatgaatgaacagcggcggactgtggcgcttttatactgaggactccaacggcttgaaaaaagaacctgttcccgcgatggacatgtcgcagctgatcatcgcttctgtgaccgtcctccgcatttgggaaaaatacagccagact

SEQ ID NO: 92333 - DNA, 408 bp, Heterodera glycines
  unsure (1)..(408): unsure at all n locations
ctcgttttcgcggcgctcatcagcacgtcgagtgagaagagaaaggagcttcagggcaagatcaatacggtggattactgttcggtgagttggcaccctctgtcggcatgttctgcaaagtgtaaaggagtcggcgatcgggtggaagactatcctacgcgctcttcttacatcgaccatgtgactggccaatgtcctgaatatttcaacaaagcgcctgaagaccttgagcagattaagtacagtgttccgtgcaatgtttgggcgtgtgaatgaacgacgaatgcttatattatacaatatttatcttaatgtttgtgttttctgtgttgctgtctaaatatctgtgttcgatatttacattgatagtaaatgttctgttgttnnaaaaaaaaaaaaaaaaaaaaa

SEQ ID NO: 92334 - DNA, 370 bp, Heterodera glycines
cacgcagcccgccagcggaatctcccagctgtcctatcatatagcatgcgtgtacagtgggatgggtccggaagctcgactactcgcgagaaaagggcggaacattgctatggattaccgagcgctgtacggatagggacttcccgtgcctctactcgcttgccgggtggttgctgccctgcgggaatacacgcggcccggaggagatcataccgttggagttgcattgctcattggaggacgcgactctgataatggagcgcttgtttttcgagtccatctcgcgggtgcctatcatgggaggggaataacggccatcagaaacaaccaccaattgtgcaagatagtgtaggagaatcggtacaatgaa

SEQ ID NO: 92335 - DNA, 635 bp, Heterodera glycines
cgatggcattggcattggtggcggggcggaagacggacagcagcagacgcaacagtccacggcagaaagaattttgctgccgccgctggcgccgcccccactggcggatttcaatctgttccaaatcccaacgcaaccacaactgctccaacaacagcaccaggagcggtccgccgccgtggtaatgccaccgcaccaccagcacatccatcaccatgtgccggccacgcaactgcagcaacagccggtgcaaccctatctcgtccatcaccttccccaattgcaacatcatcagcaacagcatcaccactccgtcgttgtaccaacacatgctcaacacgtacagccacaccatccgacgccgttggccgtgccccaaccgatgcgtccgtcgccgccgcccctttcaatgcccggcactggcgccgcaaagcaccactaccagtgcaccaaagtgcgggcacacaacacatttggactcaaatgccgtttccgacccgacggactcgcggtggccaccacatcagctgaccaaaccgccaaactgtggagttgcagcagcaacacgcacaagctgttgaacacttactcagtgccgggcaacaaatgggtttgggactgcgcattcaccaacg

SEQ ID NO: 92336 - DNA, 633 bp, Heterodera glycines
aaattcactaccgagatggagtgcaaaaggccatttttgacgagacaccgcgacgcgtgccggcggactttgaggacacaaacagtgttgggggagccgccggagaattggacacgtacgatgacgtccgattggtggagccgcaacttgagcagccactgttcatccccgagatttatcgcaatgatacgcgggaaggcaccacaaaagcgccaaagggtgcgaaaggcggcgccgcggcaacaaacgcaaatcgcccattggtatcgccggaagttcagtcccgaccaccgatcactgtccgtacgaccacccctcgcccgagttccgccactgtccgtccgccccatcccttcgggcggccgcctcctccgctcgttttaccgcaacagccacgacttccccctcagcatcctcaaccgccccggccttttcccccgcctaatgcgccccttccgcagcccttccggcaaaattcgcagccgtcacctttgccccattcgccaaacgctgtgccgcgaccaatgccaaatcagcaacagcagcggccgctaaccccaaacattggaatgggtcaaatccggacgggagtgtgccatcaggccattttctatacgccgcagtcagtcagcg

SEQ ID NO: 92337 - DNA, 657 bp, Heterodera glycines
aggaattaagtaatttgccattggtaattgataatcatgaaaatgagcaacaacaacgacatgagtggttacgaaaaattggggaaaattggtgaaggcacatatggaacgttcaaggcaagaaacaaggacaccgagcaaattgttgctcttaagatagtacgactggatgatgaagatgaaggagttccgtcttcggcactgcgcgaaatttgtttgttgcgcgaactacgacatgcaaatgttgtgcgattgcagaatgttgtgcatacaaacaagacgctgaacttagtctttgaattttgtgaccttgatttacgaaaatttttcgacactttggatgggcaaatcgaccaaaaagttgttcgttcactgatgcatcagttactgtccggtttatgctattgtcatgcgcacaatgtgcttcatcgtgatttgaagccccagaatttgttgatcaataatacagtgaaaactgcgccacaattaaaattggctgattttggccttgctagaccgttcggaatcccggtccgctgttatagtgcagaagttgtcacattgtggtatcgacctccagatgttttgttgggtgccaagctatacagcacgtccatcgacatgtggtctgcaggctgcatttttgctgaaatttct

SEQ ID NO: 92338 - DNA, 650 bp, Heterodera glycines
gtccaattaagcaattctcaattttgtattcccacttgtccttgttacatagcaatgagcaatcgccgtggcaatgattcaataaacttcgacgaacttcactctctcaaggtggataatcttccgtatgacgcgagtgtgcatgaattacgtcgaatgtttgaccgatatggagacataggcgatgtttacataccgcgagatcgctacaacaaccacaaccgtggattcggcttcgttcgtttttattcgaaaagggatgcagattacgccgtgtcccgcgtagatggcagaatgctcagtggtagggagctacgagtttcaattgcaaagtatggccgtccaattgatgaggaacgcgaccgtggaaggttcttatttgccattttctcaatccaaatactaattcattacctgttttataattttgttttgagcacaaaacctgaaagaagggtttgccttgggctgtttcccagaggctgttttctggctgccgcttgagatggcggtgatcgcctcatccgagatcgatttataagattgcagggcattgggcggtcatttcggttaaaaaaagaatgccgtgtcaatgagggtcaaaattacattcttcccgcttgcattgggctctgttttgtcaatttttc

SEQ ID NO: 92339 - DNA, 615 bp, Heterodera glycines
agaattagtgccattctttttattcggaatgacctctctttcttaattgcttttcataatgaccaatgtgttgtcgcggcttgccgccaacacttttgggctgcgaattctgacggccgaatgccacgagttcagccacacatggcacccccactgtttctggtctctccgcgaccctttccttcccgcgtggttgttctgtctgaggacttatggcacattgtacgcgctcaaagcgttggtggaccggcggggccgagtccatcgcgtcaattggctccgcgttctgttcaacactctccgctcctccttctttttgactaccaccgagattctgttcttggtttggctgtgcatttttcgacgtttgctcggcttcgccacttggcccaccgtttccgtgctcaatgctttcgccgcctgttcaatgtccgtttggattgaaagcaaagcgcgccgtggcattttggtgccgtatctgctcaatttggcctccgaagcactttttcgccaggcccaaaatcgccgatggatttgccgttctccgccaccttttccccattttcaatcgttgcttttcggcatttccgtcgcttctgccgttgctcttttgtc

SEQ ID NO: 92340 - DNA, 499 bp, Heterodera glycines
cttaacgaaacacctcaacaacttttggaaaccaaacattcgttcattcattcatcgttcataatggccagacccaggggcagtggaagagacccattcaaagcacgcagtgccagggcaagacgtcgcgcgggcaacaaaagaaaggcggccgcagggactgctgcaaacgtgcaagctgccaacaggcgccccatttgtctgatctgcttgaagaaaatgacccaagtccgtcaggtgcgcaccatctgtgaccacgtgttccactacgtctgcttccaccgttggctcaaatatcgtctgttttgccccgtctgtctgctcaactttcgcacggaattgtatcattcgggaaacgccgtgtttgagggcgcgtacaacgatggacacgttgtgctcatacctgatggtgaacaaagcaacagtggataagtgatcggcactcatctccaattgtgatcggacaaaagcgatatctaattttgtattgtacataaat

SEQ ID NO: 92341 - DNA, 549 bp, Heterodera glycines
caagtttgagcgctaaaatgcaagagactcacattgttctcgggattgcctcggtgtgctctctgttggctatcatcgccacagtcgtcactctgccatctctgtactcggagatgagccaaatgaacagcaaagtgcgcgacggagttgaggccttccgcgtcaacaccgactcggcctggactgacttgatggacgtgcaagtggtcgtgacgccgccgtcgaagccccgtgataaccccttcaactccatcttccgtgccaaacgtcaactgcccggacactgccagtgcgctggcctccaacagccaagctgtccccctggtccgcccggcccgtccggaccgcctggacagcccggacagcctggaggcgcaggacagcccggacagcctggacagcctggccaacccgctcctcctggcgcgcccggtcagcccggccagcctggaaactctggccagcctggacagcccggagcaccgggacagcccggcaaggacagcggctactgtccgtgcccgccccgctcttccgtgttggcagtca

SEQ ID NO: 92342 - DNA, 427 bp, Heterodera glycines
gcaagagactcacattgttctcgggattgcctcggtgtgctctctgttggctatcatcgccacaggcgtcactctgccatctctgtactcggagatgagccaaatgaacagcaaagtgcgcgacggaattgaggccttccgcgtcaacaccgactcggactggactgacttgatggacgtgcaagtggtcgtgacgccgccggcgaagccccgtgataaccccttcaactccatcttccttgccaaacgtcgactgcccggacactgccagagcgctggactccaacaaacaaggtggccccctggtccgaccaggccgcgcggaccgactggacagcccggacagactggaagcgcaggacagcacccatattgaggacattgtggacaacgcgatcaaccttgtgagagaaataacatacaatgc

SEQ ID NO: 92343 - DNA, 475 bp, Heterodera glycines
  unsure (1)..(475): unsure at all n locations
ccataaaatgcacggggcaatccgactcaatgagcttattttggaacactcgcgctgcagtcaattggtgcttttttctcttccgaagccgcctttctttgaggacgaagtggacgactacattcagtatttggaggtgatttcggacaatttgcaaaaagtgctttttgtccgggggacgggcgcagaagtaatcacaaccagctcctgataaggggtctctgtgataattgttttagtttttgatttctcaaagtccgttcgttcctttcgcacttttccattttcaatttaattgactctcattttcctctttcctttccttttattttatacggatatttcgagttctgttattcttgacagttttctatgtgtatttctgtgatggaaagttttattctgtttgtcttttttacttctaactaaacaaataagtaaaatgcgatctgtcaaaannnnaaaaaaaaaaaaa

SEQ ID NO: 92344 - DNA, 463 bp, Heterodera glycines
gttttcttaaaatattttgagtgattgtttgctgtcgcttatgctttttgtaagaaaaattaggggattaaaaatattttttggttttaatttttggccttttcctttttaggctgagactcgcgcggaattcgctgaacgttcggtacaaaagctgcagaaggaagtggacagactggaggatgaattgctcgtggagaaggaacgcgtgcgcaatttgacagcagaaattgaacagactgtgcaggagattcagggctcttgaactgttttggcttcttcagaatttgtgacgatgtcaaagtgtggccatttgtcattttcgtccgttctctttttggcattttgtccgttttttggccgactgtcctatgtccaaattttcgttaagactttcattgtccatcattcgttatgagcttatctagctttttgctttcttttgcgtaaaatttacactatc

SEQ ID NO: 92345 - DNA, 91 bp, Heterodera glycines
gacgacaggaacttcatcgtttggcaagccccacaacaaaacccacacgctgtgcccccgttgtggtcgaacctcataccacattcaaaag

SEQ ID NO: 92346 - DNA, 565 bp, Heterodera glycines
atgggaaaaattgaaatttgtttttgttttgccgtctttgatgtttctttctgttatttataaaaattacagtttttcatatgacaattcgacgttattcagctttgcctatttgcaaaacaatagcggtgaattatcatcagaagaatgctttggagaaaagatggtttacactttgaaaatgaacgactcgcgaataattcgtggcaaaaagtttaattgctcattaacatggcttttggagcgctacaaactttcagacaaatacgcaattaaagagaaaattgaagtcaaataccctggccatcccaaatttgtgttcgtgacagccgcaaataataattatttcccttatcttcggacgttcattgcaaatattaaagaaatatttggatgccaacagaaaatcattgcttatgatttggaaacggtgacaaaaaacaaagaatggatgaatgaattggattcggtgtgcaatttcgaatggcgaattttcgatttcggtcaaatggtggaaggacgggttcgccaccccaaatgacactgtcggttggattgacacttc

SEQ ID NO: 92347 - DNA, 553 bp, Heterodera glycines
tttcgttatggtgcgtcccatttccttctcctcctttcccccctttcttcttttgctttttgtcgctgtctttccgcttttgctgggcgctatgaccactgattaccatggctttttcggcactcgcaatgcgccgcttcgccacgaacggcgccattttctgccctcggcattcgtttcttcggccgatgaaatgtcgtcgtccaattctcggcaccgttacacgggccgcgttttcattgcgcgcgacgaattgcgcgccgcgcgtccgtcgccgcaggcggaacagatcagcggacaatcgctggtcgattatgtgaatcgtcggcagagattgtggagggccgagctcagcccaaagttccaatcgtacgacgaagccatcaaatggcgaatgatgggcgtaaaccacgtccgccattcgaccaaagccaaaaaagtgttggggaagacgcgctttttggacttggatttgcccgaatctttcgacgcccgccagcgatggaatttctgtccgtccatttccctcatccgcgaccagtccagctgcggc

SEQ ID NO: 92348 - DNA, 325 bp, Heterodera glycines
aacgatcgccacaaaaagtgaccacaactaatggaacaacaacaaaagcagccaaaggaaatgccaagtcccagcggtgcctccgccgccgcccctccgttgcccaaactttcggttcattccggcaatggcaaattgcgtggcggtggagttcgcgcagtgcgcgaacagtcggcgctgcagcgactattctcgcggttggagcgtcgcttgggcctggcgatggccctttgcatggccaccattttgtgcgcgttggccatcaacggactgttccacgacaagtccgcgccacaatggtgcaactcatcggcacaattgagca

SEQ ID NO: 92349 - DNA, 75 bp, Heterodera glycines
agataatggcaatggacgctgtgtatcagccggcaaagtttgcctaatgtcgacgactttcactgattgactaca

SEQ ID NO: 92350 - DNA, 540 bp, Heterodera glycines
  unsure (1)..(540): unsure at all n locations
tcgttcggcgaattaatggcgaaaatgcggcggaagggcaacgcctcccattgtcaacagaagcaacggagtgtttgttctgcgcttttccatgattattctctcatctttgccttcattctcttcttcattccctccattggttcgatttcaattgacaaaatcgaaaatgccaacggaaaatgacggtacaaagtataccaaatcataccaaattcggaagcacaattgatcgagctgaaccgaatggagcagcaagggacgattgatttttggcgtccgccgcccttcgtcaattcctctggcgatgttatggtcgatgttttgcgcaacggaagacattttttggactttttacgcaaattccaagtcgaattcaaagtgttggtagaagatttatcnaaacttattgaagaaaaggaaattgggccttctccgtacgccaaattgtccaaagatgggccaattctccgcgacactttcgatcgttttgagggggtcggccctcccatgggcgactatcacagcttcccccaattg

SEQ ID NO: 92351 - DNA, 259 bp, Heterodera glycines
  unsure (1)..(259): unsure at all n locations
agagctctgcaatgggttaataaagactaaaccggttgtgatcttctcgaaggagcattgtcctttttgggtaaaggcgaatgatgccattaattcgttcaaactgagatggggcggacttgaaattggcgagctaaaccaccgcaatgactgtgaccaaatccaagactttcttaaggaactcaccgggacccgatcggttcctcgcgagttcatcagtggaactttcgtgtggggcggaaataaacagtcgnagggc

SEQ ID NO: 92352 - DNA, 268 bp, Heterodera glycines
acaggacagattgcttccaattgcaaatatttcacgcataatgagaagagatttgccaacggaaagaaaactttcaaaacacaacacaaaatgcgttcaagaatgtattactgaattcgttttgcttattacatcccaggttagcgaaagatgctcattgcaaaaaccaaaaaaaattatggatgaacacttgctgctggcatttcgaactctgtggtatgacaaagattagcaaccattgaaatagatcctgagactgtatagagag

SEQ ID NO: 92353 - DNA, 612 bp, Heterodera glycines
tcctcctcctccctcatggacatccctccgtttatttttcttctctttctcgtcccaacactttctgtccaattgaccattgacgatgaagagttcggactgaatttgcaactgatcaagcatcagccatgtccgttcaaaagcgacaaaagcaaatgggaccgaaagttggaatttgaagcaggcaacgaacaagaagggcccaagttggtgcaacggccgaacgagccaaattgctacagtatcggagggaaggttacggtgttctccgaattcaagggcgagttcagcatttacttggaactgcgcagctcggccaacaaaaagcaggtgccagaaccgtgccacaatcgcaaagacgacggatgcggcggcttcggctcgtgtttgtattgcgacgcatgccaaacattggaagagaacagaggactgaaggcacaactgctggtggacggaaagtcgatcagttgcgggcaggaactgagcccagggacatacgaaaacatggaattggtcttttgcctgccgaacgcggaggaaatgctcaagagccaaaggctgaccaaagaaacgttccaaagcctaattcagacagaagacggcacaaatctc

SEQ ID NO: 92354 - DNA, 629 bp, Heterodera glycines
aaaaaactatcggtgattggctcgggtttgatgggcgcgggcattgcccaagtcagtgcccaggcaaacgtaaaaggtgcgctggtcgacctgattcagtcaatcgttgagaagggcaaaagaggaattgaaaaaaccatctaacgggtggcgaagaaacaattcgaacacccggggaaacacaatgaactcgtcacccaatgtctttccaatatttccctggagacggatatttcgcaggtcgtgtcgtgcgccgatttggtcattgaggcaatttctgataatttggacgtaaaacggaaactgttcgcacaagtggagtcggctttgccacaaaatgggaaaatggccacaaacacttcttctctgacattggccgacattgcggtcaatttgaagcgcaaagattcctttggggggctgcactttttcaaccccgtcccaattatgaaacttctcgaggttgtccgctttgatggcaccagcgaagagacattcaacgttctgatggactttggcaaaaccattggcaaaacgaccgtcgtttgcaaggacaccccggggttcatagttaaccgtttgctggttccttttatgctggaagcaatgcgaatgttcgaccgcggcga

SEQ ID NO: 92355 - DNA, 309 bp, Heterodera glycines
aactgcctgatgtgtgttattcttggtgggtgcttgcatcattggccatcataaaacgattacattggattgatggcgaatctctcacccacttcataatcgccagtcaagatgatgaaaagggagggatcgccgatcggcctggagatgaatctgaccctttccatactgtttttggcctttacggccttagtcttttgggacataaagggttggaggctgttgatcctgtattttgtatgacaaagaaatctctggtgaattttgcttttgcgtgatgatatgccagctaaataaaaatattttttc

SEQ ID NO: 92356 - DNA, 292 bp, Heterodera glycines
gcgagagactcacattgttctcagtattgcctcggggtgctctctgttggctatcatcgccacagtcgtcactctgccatctctgtactcggagatgagccaaatgaacagcaaagtgcacgacggagttgacgccttccgcgtcaacaccgactcaggctgtactgacttgaaggaccagcaagtggtcgtgacgccgccgtagaactcccgtgataaccccttcaactccatcttccgtgcccaacgtcaactgcccggatactgccggtgcgatgggctccaacaatca

SEQ ID NO: 92357 - DNA, 265 bp, Heterodera glycines
cagcaaaccattgcgaaagactccaaccaccaacgacaactcaaagttgctctactgcatagactgcaacattatattcagcagttcttcttcgaatgacgcgacgaccaagaaattcaacattttgaataacgggcccatccaatcgccgacgaatccgaccgaaatttcagcatatgtggacaaatatgtggttggacaacaacaagcaaaataggcgctgcctgtcggcattgaccagcattatcaacgcttggaaaacaat

SEQ ID NO: 92358 - DNA, 568 bp, Heterodera glycines
gagggaaagggcgacgcagacgcactcggaacacagcaggacgacggcatttgaggaatctctctaaacattttgctctttctctgcttccgcccttctgagaagtgcctcaaactcctgctcccagccgagcattttgaaaatgttggcatttctctccggtgttatgctgatcaaaacccgaccgaatgttgtcgggttcagtataacgtaacaaatcggtgcccgcgggttggagattgatcagcagccggggagtgtcggagggcacttggtcgaccagcgaagcgaacggatggacgaccaacgaagtgcccattacgatgaggagaccgcacttggggaaatcctgaacagacggaggtggaaaaagtttaaaaatggacacaggggaaaaacaacagacgcacgcaccaccaaagaggaactgaagaaacgggagggcaaactctcgccgaagaaaacgatgtccggctttaccacgccctttttgcagccgacgcaacgcggcactttgacggcattcatttgcgctaaataagcggcgaaagggaaaggcacgtgctgg

SEQ ID NO: 92359 - DNA, 634 bp, Heterodera glycines
cgtgcttttggtgctgaaatatgtcacagctaaagatgtgttcatgcgttatcataagacgcacttgagccgaagactgattctcgagttggtggccgaccaagaaaaggaggaaatgctcgtgggcaaatttagagaggcggggatgccagtcgacttcgtcaacaaactcttcagaatgttgcaggacatcgaagtgaacaaagacctcaacttggccctaaggaaatcgctggaaaagggcaactgcagccaaatgattgtgtaagcgtcaaaattctgaatgccggagcatggtcgaggagtcgagaccgttcgcacctgactttgccacgggaattggaggatttgatcccggaagttgaggacttctacaaaaagcagcactgcggacgaaagctgaattgggcccaccattggtccacggggacggtttcgttcaccagcaaagcgggaaggttcgacttggaagtgaccactcatcagatggccattttgttctgttggaacgacagacccaacgacaaactttcctttgcgacgattcgtctcgcgactgaattgtccgagggcgaattggcgagaagtcttttgactttggtgaatttccccaaagtccgaatgcgactgatcc

SEQ ID NO: 92360 - DNA, 505 bp, Heterodera glycines
tacgacctctgatgacacggattcgcggggaagctgttcgtcacttttgatctgcttttcctattgttcttcaatcatatgtttcccttgcgccatttgactttccatccgggtcattcatcagtatgagcgcgctgtgattttccgtcttgggaaagtgatgcgcgaggtggcagggcccggcctgatcttcattttgccatgcattgatgatttccgttgcattgatatgcgcactacttccttcgacgttccgccgcaagaatttctgtccaaagactccgtctccgtcactgtggacgaactgatttatttccgcgtggacgatgccaacaaagctgtcttcaatgttgagaatgcaacaatggcaacacagcttttgagacacacaatctttcccaacatattggcgaccaaaactttgtccaaattgcttaacaacaggaaccagaatcatttcgaaatgcagccagtgttggaaagactaaccgacgtttggggagta

SEQ ID NO: 92361 - DNA, 474 bp, Heterodera glycines
caacaaaattaggcttcttcaccgagacaaactgaagccatgcatgtggctcaacaaacacattcagtcgcactatcgtccgcttgaattgccctggacactttgcatcgttcaattttccaatggaacaatgaaacagtgaatgtttggagccacctgctcggcttcgtctggttcgtctacctccaatggtgggccctcaatgaatcgcttccgtcggtgaacgcgccgattgcggactattgggtgatgggcacggcaatgctgtgcagtcagctctgtatgcttctctcctctgcttaccatattttcgggtgccattcgcctcagcgccgcaaacaatggcttcgggccgaccttttcggcgtgtcggctggactcagtggactgtacatgaccggactgtacacttcattttaccattttcccgagcttcaaaaattttacggcactctgatcggtgccatggtggtt

SEQ ID NO: 92362 - DNA, 209 bp, Heterodera glycines
gataaaagccgaagtgtcgctctgttatttgtcctcatcgacaaatgccgccgacttcttggccaaatgcctttgtaagcaccgcaaacgaaagaaatgaacggcggattgcgccaacccaaagcagcagcaccagcagcattattttaggcaggcacagaagggttgcatcgtcaccagcagtatcgatcatttcggccggggcttct

SEQ ID NO: 92363 - DNA, 354 bp, Heterodera glycines
  unsure (1)..(354): unsure at all n locations
gaactagttccagctgtatttggagcggaagaagcagctgaagcacgaacggaaacaggaagaggcgaagcgacggaaacggcggagaggggacgagcaccatcgcccgacgccgcccaagtgcaaagcgatgagcgattttctgcctttttcgtggacagtgcttttgccattgatcggacttcttcgcattacaaaggcggaaatttggcggacagacaagcgaaagaaaggcaaaagcgacgtcttcttaaaaacaatacagacgcagattagactctgttaacagatttgtcatcaattttcactgatttaaataaatacncngaaaaaaaaaaaaaaaaaaaaaaaaaa

SEQ ID NO: 92364 - DNA, 557 bp, Heterodera glycines
ccctatgatcgctgcggcgaagcaaccttgctggacaaggcgtccgcatcgctacagaagggcagagggagaagaaggaggaagagagggacgaaagccgagatcattttaaaacccacagacattgttggacaaactgttccccagagagctctgttgaaaaagaaaagatttgatttccttggttattattaatcggcatgttgtataaaaaagttgatgctgcgagtgcagaggtggtcaatagcggattggacttcttcagtacaccgccaacaaactgtgcggtgtccaactccagctatcgggagtacttgacgctgaacccgatcagctcaaggcctttccattttaaggcaattgtttggcaatgtgtaactcttatcagtgtttgttcagattcatccgatcaccagctacatagacctcagcaaagtgtttgtgtgcacggaattcaagctcaagaaaatcgcagaagacggagtgtagttgacgtaccagccaacgcggctgttggccttatacaaatgcccggtgcaactttcatccgcaatctg

SEQ ID NO: 92365 - DNA, 229 bp, Heterodera glycines
cgattgatgacaaatcttaataaaaaaattttacaatttaagtttaaaataattgtataaaaaccgtttttcctttctgtttctccgcttcctttgtctccaaattcgaataatttgatattataaatttgaaagaataaaaataaatgcttacaagggaacattccgagctgtgagtgggaaaatgcatataagctatataccattggatagagcggggtcgacttgt

SEQ ID NO: 92366 - DNA, 511 bp, Heterodera glycines
caagtttgagtaattaattaatttacctacaaatgtcgccaattctttgtcagcaatttatccgaaacaaagacactgattgaattcgttcataccttttccttttttaaaaaatggaggagggcggattaccgcccgagaccgcccccggctcagccaccgccgaacaacagcagcaacaacaacaggcaactcaaccgagtggaaacgaagcaccgcttgacgatgggttggccatgttgcatgagctttaccaacgacgtcatgctgaactgctcgcgcagttccagcagtctcagagcattgcccagcaggactacctgctcaacctgcagttgctccagtccgcactgcctgccgctgctgcgatggttgtgttgcagcagcaacaaattgccgtgatgccttccgccgcttcgcagcaccgtccgctgctcggttcgttggcgcacacgagcagtgagcagtccaccgaagagtttgatgtctcggcacagcaaaccgcgcagca

SEQ ID NO: 92367 - DNA, 633 bp, Heterodera glycines
tgaccatttcattagaaagaaaacaaaaaataaatttttttagctattttaaataaaagattttactattaaaatagaaagacagtgaaaaggaaaaaaaggttagaaaatgaaaaaaggaaagatgaaaaaaatggcagaaaatacttctgctttcataaagaaaataatgcaaaatggtacataataatttctttaatacataactgaaattaaaattaggcagtatttactatttgtatttataattattatcttatttaaattaataacttgtaaaaaaattgaattaatttaaaaaaatcattcaaaaaaaaataataaaataatgaataaaaacagctagaattggtgggacccgaaccctcgaccaccaccaccaaaggcaagcacactaaacactccaccactgggtcgcttgactcaagcccatttaattcccttttccctttccttcttttttggaagaaatcccgaccaaaagtgcttgtcctccctttttagagcacttcccggacccggtccaaaacaaccctggtatcattcgaaagccaagagtttgttgatgtgcacaaacatattaaagttttgatttgacccatttaaggtatgcaaaaagcattcaaaaatgag

SEQ ID NO: 92368 - DNA, 479 bp, Heterodera glycines
ctatttttgcctttcgccgcctcttttgtcatcattttgctttgggcctttaactcctccagtgtttattgttttttccaattcaaaatgcctgtgggtggcaaaatgcgcgaagtgatttcgctgcacatgggccaagcgggggttcaaattggcaatgtgagtgacttttgatgggtggccaattgagcagcggtcgtcggttaaggcgtgctgggagttgtattgccttgagcatggcattcttgtgaaagggaagtgccgcgggttaattaggctaattaattagccatccgtcgattgaattgcgtttagcccgacgggcgaatgccgaccgacgaaaggtgaaaaggaaatgggggccgattgcttttgattcaaaaaaacgaatgtttggcgtagtgttggcgtcgaggaccattcgtacaacactttcttctccgagacgccctcaggaaagcacgtgccacggtcgattt

SEQ ID NO: 92369 - DNA, 617 bp, Heterodera glycines
aaaaggttaaaaaaccgtcgttggtctccgcccccgcggggacattctctgctgcggacaatcactgctcatccgacgagggagcgcccaaagcgaaaagtggccgttcctgctcctcctccaccacttcgtccgcctccgtcccatgctttccgaaactggatgctcagcggtcggacaaaaaggtgaacagttgcagtaaaaacatcggcggagacgagaaaatgttaatgggccaacaacatttgttcgccggagggcattcgataaaagttgatcaggacggagtgttctttgtggggatgacagccgctgaatcgggcggatcactggccaatacggaacagcaacaacagcagaatgtttgcgattttgcaccctccggcgtcgtcggcgactgtgccgtgccttccttctccgccgccgtctacgcgccgatgataagtgccatcagtgacatttaccagcagacaatggagcggggcgaagcggcgcacaacaacggcattggcacggcgacaaggacgcgtgacgatgagcaggaacattcgcccgagtcgggcttctccgacgagtcgtcctcgctgatgatgatgcaaggattgttgacgacggtc

SEQ ID NO: 92370 - DNA, 325 bp, Heterodera glycines
tatccatgtgctgaggaccagttgcaaccaacagcggaaggaattggcgcgcgaattcaaacaattgttcggcgaggatttgtccgccaaactgaagaaggcactctctggcgactttgaggaactgattttggctttgatggaaccgccagctgatgacgatgcgcagcaaatgcaccgcgcgatgcccggcctcggaactcacgaatcagctctgattgagattgtggtcacgcatagcagccgacaaattgatgagatgaaccgcgtgtacgagcagctgtacggacatccgctggagaacgacatcgtcggggacaccagc

SEQ ID NO: 92371 - DNA, 578 bp, Heterodera glycines
gaaaaatgtaatgattaacaatgtttgactatgatcgacatttgaaccttgcccaccaggtggctggaaatgttgacgcttcaaatggccagaaaaaggcaatcactcggactctgactgatgatgacgacactttgccctttatgggcccgttggacagctcgccatccgaagacgatgggaaaaaaactgatgacaatgccatcgttcatggccttgaaggcttgctcagacgctgttcgtctcctaacaacggtttccatattggccaatttcgtcaaaaatctgcaagtgtcggctctgaccatttgtactccatgcaatttctgtcgaagcgtccgccattccatctgctcgacacacagcggcataagttcgccagcaatggcacttccttggacatgcaacacacgtttcgtcgtctgagcggtggatcgtcgggagcattggcggacggttatgaatgcgacaccagttcgggatacggaagtcctggtgcgctcggcacgccgttggcgagtccggcgatgggttcggcccaattccatgccgcccaattgcacaaactgttcatggac

SEQ ID NO: 92372 - DNA, 566 bp, Heterodera glycines
accaatcaatcctttttggattttgcccattgtttcgtccccccttagaattgtaccaccccggcttggtgctgtttgttatcgctttgccatgccatctctttcttgccatgatccccgtctcggtgttctttctcactttcgaccgtatctgcatcatttactatggccctgggtacagtgaccgattgcgcaagttcatactgtacgcgtatcagctgctcctgttggtgtgtgttgtgtacaatctgctcggattccatgcggcattgccaatgcctgaaaaaacatgtaaaagattttcttctgcttccttttttggcatggcttttggacttatttattcccatgcgaatgaatgctttttcagtgtgcgagatcaatggctgcattttgggcgaggctgtccagtattatttggcatggcgtgccgtttgtgcccttttcaacgtgtccgtcggtgcaattttcttcataatgctttaccgctccagcaaacagcggttggcccaaacgggaactatgaacaaccattggcttaagacacatcgaaaagtgagacagaa

SEQ ID NO: 92373 - DNA, 595 bp, Heterodera glycines
ataaaagtcaacgtagaagcctcaaaccaagtggaaaatgcgttttttatgcttaatatatcgaaactagtgcgcagaaaaaaaggcatatgcctcaaaattcggtctctagctctgacgttactcaaaaaaccatcaaaataaaatatttttgatataaatttgctcaaaagcaatcaaatttttaattcttgatagaattcgatagcaataagtgttttctattagcatataaaatttcaaaaagtttcgttaagtttctagaaagttatgaccaaaaatgttcaaaaaaaaaattgtgtttttgagtttctcgggtcataacttttttggaacttaacgaatttttttgaaattttgagatgataatagaaaacaattagggctatcgaaagttattaagattataaaatttgattcattttgggcgaagttataaatgattttctgtcaacattttttattctgatgagtgtggaaccaatgattaataggttcctaattttattaattctctaagcaaagctaatgataattaaatgtttaaaaccaatattgtttacgaaaacaaattttaaaaaatttcactgatctt

SEQ ID NO: 92374 - DNA, 494 bp, Heterodera glycines
ccgaatgaatgcatagtaaaataaatatttgtttttgagggaaataatgggaggataaagacaaatgtttgaaggcgggattaagcggatttaaggataattgatgataatgcatattttgacattttaacggttttagggattcgaaaaaattttaaattttacgaggaatttcaattagatttcacttatatgtgcccccattcttcaatataaaaataattatcattaaatgacccgtccttaaattcacttatttttaattattcttttcataaggggaaaaagatattaggaaaattaaaaatgcaaaataatttattcctttaaatttatggattttagaaaaaattttttaatcctcttcaaaatcaagtgcaaaatattaaatttcaatttttttattaggaagcaaatatttttaaatgcatatttaagggcaattgaaaatcctaaagtgtttatttgaacgttttggcgcactttacaaaaaa

SEQ ID NO: 92375 - DNA, 435 bp, Heterodera glycines
gattggttgacccaataaatttgtcaaataccggatactttcggtagcaatgcacactgatcactctgatcgtttaccattccgaccactaatgaaggtttattaactcataatttgccaaaaaaaaaacgattactttcggtagcaaatgcacattggtgctctgatcattgatcatttaccattccgttccgatcacttccccccccccctcctcaattatgcgtcggttatccctttccattgtttgttacgcttaagaaaaggtatcattagcgcagcagttgcccaggttactttgaaaattggtgccattaaacacaatgccaatattgtattttccttcgacacgcgaaaaaaaggcacaaaaaatgggacccacgcgtttcggcgctcgcgtttcggcgctcccgtttccgcgccagctcgtttttc

SEQ ID NO: 92376 - DNA, 339 bp, Heterodera glycines
cttgaggaagagcaccgattggtgaacactgttcgctcgttgatccgcattaagaatccgaatgatcgactttgtttggccagagctgtgttgcttggtcttcacgattggcgttcacggtcaccaggcggaggcggaccgacagcattcaaaagtttcgcaaatcgccagcacacccacgggcctgaggcacgtaacttattgagacgtgccgcaattccccgcaataaacataggtacacaattgatgacgtccaaaaaggacaagattggattgatcaacgatacgggccagtataaattcgaattgcagtttttgagaaggaacgtgtggattag

SEQ ID NO: 92377 - DNA, 262 bp, Heterodera glycines
agtaagcactgctgatcagtgatcaccagcagggggaatttttatattttacttacatatgtaggtatttttttttattcagattgcattttaaaagagaaatcataaaattcacattttggcgttacttccaaataggccgtttgatttttcttaaaaaccaaaggggaaaccgtttggtttccaaattacctaaacttaaaaaaatcgatttgtgctcgagtttggattagggtttagaaatttgttaaaactagcgggg

SEQ ID NO: 92378 - DNA, 596 bp, Heterodera glycines
ccgttttgcccggaaaaatgcgcattaatggggcgatttctaatacttcggctgccaattcgctgctaatcaccgatcggatggaaatgatttcgcacgacttgagcctttttctgagtcggaacggatccaccgactccgaccaaagggcaaaggccgacgacgacgaccaatcagtgctgatcgatgccgttaattcacaccttcggctggtccattccaatcacacaatggcttcattgactgccgcaaaacatttcgtagaaattctcgggggacggccattgctgcaaattttggcgggaaatggttctgaggagatcgaactggttaaagaaacgaaaacggtggccgaactgaacactgacattgtgccgaaagagctgatgaggactgaaaatgccggggactcttttggcagcggaccctttgctattcggactaatgtcacccatcccatcgtgctcaattggactcattctccgcccaatccgtcccaactcggctcttccgtttccgcttcgtccccccttccgtcgtccgttgcgcccgctttgaatttgtcttccctttcttcggcatcgacgccctcccgc

SEQ ID NO: 92379 - DNA, 347 bp, Heterodera glycines
caaaagcaaccttcatcaaagctgcgctcaaaaaagtcgcgtcgcgcattgcggacacagctgaccaagcgcacagagacaacgcaattgttgtggtgttgttcatgtgttcgaccattctcatcttagttcaagtagaaaccaatttgtgctccaccatgtttcaaaatgtcaaaattgaagttgaagtgctgcgtcaaattgtgttcgacccaattgggcgtgtgcttgcccaaacgcagaaagttgttgacgcatacgaaggcaatttcgctgctttgcttccgctcatcaaatttcttgtccgtcatgccaatcaatttgccgctttgtcagagaatgttggc

SEQ ID NO: 92380 - DNA, 622 bp, Heterodera glycines
caaaaacggctgaatggggtcgaatccgtcggacaatgcctccgccgcttgcactttcatttgcaacaagcggaacatcgaacggaaaggcactttgaacggaatcgacggcggtatccggcgattgatcgcgaaattcgcaaattggggcgagaatccgttgcaaaaagggtgtcgaagtggcggatggaggcggaaaatcgacggactgtgccgttgaagaagtcgagggagggagggatgccatagcgtcgtcttccgactgggattgactttggtcggtggaggaagtcggcttctgttgttcgtccgcctcaacttcgtcctccaaaatggccgatggacccggcgcaaaactgtcgttgctattcgctcggctggtggccaacaaattggaacgggcggaagcgtcgcgaggctttgcactgacagcaacgccagcagacgacgggacgacattgaaaaacctagaaattgttggtttaattcgattcccggaaagtattccgtcggtgggcagcgttaaccccgcacacttttcacccccccccactgacctggacgattgccgcgacgaggaacgcaagttgtaccaagacaactcctcctcgctctcctcctt

SEQ ID NO: 92381 - DNA, 567 bp, Heterodera glycines
  unsure (1)..(567): unsure at all n locations
tgcctttttcttcggttctggcggtggctgttcgtgccccgtttgtcctcctccccctcctcaatccaattgcggttgttgtaacacaaatgggaatggtgccggattcagtggagggtgcggcggtggaaacggagggtgtgttttttttatcggcaaacagagcctaaaaagagaaaagggcttttggcatttacaggaaacggtggtgcgaattgcggttgcaacggatgcgccggtggaagcggaggaggtggcgggagcggagcatgccacggcccacggcgggtggctgcggatttgctgctccaagtttccgatgctgcggcggaaattgccgggggccaaactgcaccacaacaggacanaacgggacgacgagcggctcacgccactgccttggtataaagacccgactcccctgcgccagacccggctagacgcttgttctcctcccacaaatccgctccaaactttctgcgctcgctgttctgcctgagaactgcgcgcaccgcaagtatgcgaacggcgaaaccccaatactcgctggacagacaaaccgtggcc

SEQ ID NO: 92382 - DNA, 507 bp, Heterodera glycines
  unsure (1)..(507): unsure at all n locations
ccacaatatggggtgtgagatgaacacaaacccaagaactgagctttcaattggcgttggaccagctggcggtggtgcggtgtccgcaaatattttctcaatttcccttagactagccaatttttcagaagtcgtcagttccaaattttcaaacaaattcaaaaaatcatcagaattttcgttatcctccgttctcattaattcatttccatttccggccatattttctgtttcttgcccgcaggctaaggggataggagaattgttggaattaatgcttcctgacatctaagagggagaaaaaaatgatagttaatgtgcaggatgggagacagaaaatgaaaaaggaatggttatgaggagaagaacttattgaccgattggaggaggaggcggggcaatgtacaagcgcctgctttaaactaaggggctgatgttagcataaatgagtataagggcaatgttagagaaacatgcagtgtaacaaaaaaaaaaaaanaaaaaaaa

SEQ ID NO: 92383 - DNA, 648 bp, Heterodera glycines
atcacctgtgccaaaatgtcccgtcattagcggcagaaaatttttttcctccgatgcattcaatgttgaccgaaattgcacgcgccacggcggcgaattggtggccaatgtgctgaaggcccacgacgtgcgcgaagtgttcacattgtgcggtgggcacatttcgccaattttggtcgcctgtgaacagttgggcattaacattttcgacactcggcatgaggtgaacgcggtgtttgctgctgatgcagtttctcgccttcggcaaaacattggcgtggcggcagtcacttcggggccaggagtcaccaacacaattacggcattgaaaaatgcgcagatggccgagtcacccgtcattttgctatccggtgccgccccgactctgatgaaaggccgcggggcgctgcaggacattgaccaattgtccattgtcaaatcgatgtgcaaattcacggccaatgtgcaaaatgtcggagacatcgtcccaacacttcgcgaagcgattgccgccgcccgctcggacacgcccgggcccgccttcgtcgagttgccattggacgtgttgcaaccgtacggcaaagtgctggccgagaccaacttcgttgtgcacgcggacaccgcggaaaaaaaagcgttcaacgaccg

SEQ ID NO: 92384 - DNA, 592 bp, Heterodera glycines
ccaccgtatgctcttccaccgtatccctcttccccatcgctgatgcgccttcttctctctctcctcctcctcttcctttccccattcatttctcttcctctcttcgtccctttttccctcgcccttccgtccccccaaaagcgttgtccctcccctctcttccgtcagtcgcgaagttcgcctccgcccaacggcacatcgcctcactattcaactccaattcacttcttcgccatcactcaggattgccaattcgttctcgctcgtcccgaccaacttggccaattgccctctctctccgtctctttgtccgtctccgattgtgcgccctcgcgaattaatttgctgtggtctttgaactcgcccgtcccctctctgctgctgctccaacaaagggcccacaaactttgccttctcccaatcgaagtgccattttcggtgatcgctcacagcacggaactgttcaggtattcgttgcgaaatgccctccgtcacttcgccctttgtcattcctccaattcgtcctcacttttgactctcaatccgaatttggcctttgctgactctctttactccgacattttatactttt

SEQ ID NO: 92385 - DNA, 613 bp, Heterodera glycines
ccaaatttaatatctaagcaaaataataaatttattgaaaaacaatttttcgaatttataaaccatttttaatatttatacattagagtgcctttaacgtgtaataattaaaatttggtgcgattttattaataatagaaagagttaagttcaaaattaattaattactgaaaatttttttttcaaattttcatgatttttctatgaattttcaacatttttacaattttttttgtcatttattttttgtttttctttttttatttgtcaaaactttttaatttttttctttgataaataaaaataatagttggaataatttcattttttgtcgtcttaaaatgattttatttttttattcaaatttttcaaaaaatttctaaacttttattttcatattttcaaatattttttcttatttttcttctcttccaaactgtttcttccattttcggaggctattttgatgaatttgtaatgtttttgcaatttccctttcactcattttcggattttttcttttcatttgccaataaatttttattttttccattttttctttctccgttattttactgcgaatgccaaaatgtttcttccatttcttaattac

SEQ ID NO: 92386 - DNA, 648 bp, Heterodera glycines
ctgagattgcacattccacgcaaagcattggagcggccgttgaagaaaaagaaatcgctgaaaagtgcaggcaaaaaaacgatggcattgatgccaacggcagaaacaacgacagcgaatttgggcactccaacggaacaaaatcagccgcaggagcagcagcaaaaggcagggacagcagcggggacaacgacgacagctgcagcaactgacgctgcttctgctgcggttgtaatggaagaacagactgttcccctgaagctccgcgtcccactcactctgagcatttccatctcaaatgtcgcttccgcttcttccattggtcccctctccgccatttcgaccacttcgtccgccagcggtgtgccgccgagttcggcaggtccaaccaaacgccgtggcaccattgaggagactgactatctgatgggaccgctcaaatcggtccatcgccggagggcggacccacgcgtttcgatgggaagcgtactgatggagatactgaacgagctgaagaacatcgccggctccgaacacttcactttccctgtcaacaccaaaaaggtgcccgactatttggaggtgatcaaaaagccgatggatttgcagcaaattcgtaaaaatgtgtcggagaacaaatacgaattg

SEQ ID NO: 92387 - DNA, 651 bp, Heterodera glycines
aaacattttaataattcgccaattctcaatggaatcttaaaaaatgctgaaataattgaccacctatcgaagaaattacaattcgatgaatcagaaaaagcacttctttccattgtcaagcgcaatgttgaccgtcttcatcaattatgcaatgaatggataaataccggacacttctcatctattcccgaccattaccggttattgtacgcattttgctgtgccgttcgtgccaaactcagttatttacttaaggattatttcttgtctctccgacattgtgacgatgtgttgctgaagggcaatgatttggaggatgaaagtctgtccaaattcgcttctttcttgtgccgcaaatttcttcctccgccctcagaagtgccggaacatcagaccgattcaaaaaaagcgcctaatttactgccgaattctgtccaaatttcgtcttcagaattgccttcgctcgaatatttcttcaacaatttttataagcttcaagtccccgtcatcattcgtggaatggtgaatgggcggccggcatttgaaaaatggagcttttcttatttgaactcgatttgtgggcatcgtttggtccctgatgaattgggtagtaaatacacggatgacgactggcgccagcagatgatgagt

SEQ ID NO: 92388 - DNA, 556 bp, Heterodera glycines
actcgtgtcggtgattcattagccattcagaatttgtgtctttatgacaatttgaatttgcctttacgtgaaaattcactttttgcgagttgtcaatacggaggacctttggccattggattgcctggggcatctcctaattcgtggacaattggaatttacatgcaaaatggggcccaaattgcatcgattgaggccagcggagtcttccgacttttttggacaaagtgtcaaaagctaatcgtcgtaaaccaaaatggccgtgtgcttttgtacaatcctttgggtgtccatttggccaccttcgccatgggcaatgaatcgttagcacttggacttgccggggccatggccttttcctatgtcaatgagacggggctggcggtgatcaacgaggccaaacacatcttcgcggtcaattcggtgaacagccgagtgccgtggcgcattcaaaatcagcaaagtgaaattgtttttattaacatttccggatcatccaaaaaggggagtccatccaatcgttgacttgttgggccgtgttgaccagtgctgttaa

SEQ ID NO: 92389 - DNA, 551 bp, Heterodera glycines
cttaagactcccttaagagagactcttctcttctcatgtacctttaactaaaatgttgttggcacaaaaagtaaagggggaaaaagaatacaaatcatccgatcaagggctaagtctcaacagatcgcagtgtaaaagctgctctactgctaacaaccccctgaccagtagtcaagtcgtataaaagtgattttgcgccccgacgttccaccatggcacacgagtgctacggctttggcaatgtgcgagcaattaagcacgcacatcgggccagatgctggggcatttgggctgcaccgcaagcggcgcataagtagtgccccccgacaccggggagcaagaatattgctatctcgcttgagcgggatttcaatagcttcacatcattggtctatcgaccaaacacatgaaccaaatacctgaacctgcggttcctctcgtacttagcaggattactatcatagcatcaggtctttggtagggtaaaattaaccagtctcgcgacggtttaagcctagctcacgttccctattcattggcttaacattcag

SEQ ID NO: 92390 - DNA, 648 bp, Heterodera glycines
gattactttcaacactcacatgtccaccaattttgtccagcaccgactcgggcccatttctgtgcacttcgtccatcagttgttgctggtcggcggcgaacagtttgttcagcgactgtttggccgcgttggatgaaagaccgtggagcagcgcgtcgatgagcacggacacagagttggaggaggagtcaactgagggggaaaattttaaaaaatccaaggggtgaccgaacaagcgccaaaaaccctaaatcacaggacatcgctagtagagaagtgaaattaacgcaaaaaagatttattgttttaaaaaccaaaaaaaaatagttaaaaattttaattatgtctgtctttcccgtccccgtgtcgtccccacacaccccgattttttaaaatttactgtagaaaatttaaaaaaatattgggtttttttataataaaatttcagaaattttttattaccgatttttctaaatttaacgaactgctcccgctttgcccttcccttccgtcacacacctttgccattgtgcagcacagccaggcgcatcgcgttgctcttcttcatgcccttcagcgcatttgccaccaatttgcgcccgtcagcgctgtccaaatcggcgactgtccaaacggtgagccaacagg

SEQ ID NO: 92391 - DNA, 625 bp, Heterodera glycines
gtttgaggaattaatttcttctcctaaacatgtcccgtccaactccttccgaattaacagtcgaaatgttgaaaaagcgtatcagtggcggacggatggacctcagttccttgcgattgaacaaagtaccaattgagctgatgtgtcgttctcttgcaggacaacgaattacttgtgtggacctgtcggacaatttgctgacttctttttctgctcaattcctccaatttttcccagacatacaagaactcgacttacactccaacaaaattaaacgattacccgaaaattttggtgttttgagtagcctgcgccggttggacctgtctgaaaatcaaataaagaaactaccgatcagttttgctgaactcgataatttgcggtggctaaatttggtcaataatccactcgaaaatgatttggcggaggttatcgggagttgctcaaacgatgaagaatgctcattcgctgctaaaagtgcagtgcaatacgtccaattcttttccacggtttcctccgaatcgacggcaattgcggacacagcatttttgcaaaatgagacttcgtcaacttctaacaattcagacaacataaatgtatcggcacttcgacaagcggacaatgc

SEQ ID NO: 92392 - DNA, 582 bp, Heterodera glycines
attgagaagctttgcgggaaatttgctgagccaaagtgtttctatccaacggaagcttgcgacaacttcactatcttcaaacaaaacgcagaaaccactgaactcaacgcggacaatgaaacaaaatggatccagctgaacgacctcccgaccggcgagggctgtctcccaatcaatatttccattgtctccactcttcgaaatggttacaattgcggtgtatcgaatcaattgaaggacactgcggatgcgttggcccgtgtgctttacctgtgcttactgtttctgttcgctctcgttttccacactttggctcagcaaccttcggaagagtatgacctgttcggttatttgtgtgccgcttacagcgtcttggttttgggtttttcgaccgtgacaacgattttggagtcagtgaattggaccactctttgggaatgcaccaatttccgaccctatcagtcctttctgttgttccttttgcttcccagtgtcattctgttctgctcagggatttacgaaaccttctccaactgttctctgcttaaagaaagcgatgccgagaacgcgcaaaagcaaacc

SEQ ID NO: 92393 - DNA, 621 bp, Heterodera glycines
tgtaaagttatgttgaatgatgaaaatatgtgtgacgatttgttgatggctaatgttgcaatcacaacataaattctcaccacatctccttcggacattattattatttttcgtgcccccccccccccccaaaaaaatggtatttactccggaaatgacttctcgactgcttgagcttgttcaagcacgaaaagacaacttgtttcctggttctcgtcatgccgaagctggacgaatccaaaaagaggcttggtcgactgttactgaaactttgaattccgaatttccgatcgacgttcccgcgggtggtctgaaggtacaacaagtgcaaacaagatggaaaaatcttcgtcaggccggaaaagaagaagcgcaaaaaataaaaaagtaaaatcattttgaattattcttatgtgcatcggaacactaggcaccgccttggaacggggggaggaccgcaatcatcggtttctgacacttcgaaaaaagttattgacatgtttggcacatctgctgcttttgccggagtgccaggcggcggggagactagcactgcccgtggtgatattttgcaaatggaaagtgattacctcggtgccgaccagtttgttcccggaaaaa

SEQ ID NO: 92394 - DNA, 622 bp, Heterodera glycines
ataagaataaaactgctcatatgtttatacatggcataacggtaatttttctcactaaaatctttcgttcaattttctatgatataattttttaaattcctattttcgatatctaatattccggcggttttcatttttcggttccccctttttcggggccgtttatctaactaatcgatattctcgccgcgtggtgggttttcatcttgccacaagatttgtccggcaaacacactaattaccactccaactctcttcttctgttgctgtctctccctcccctctcctaatccattttttcttcttcttttgtctcttctttttccccctaatccccctttccgctctcttcttctaccttgtctctccttcctctaactccgcactttcttcttctcttgtctctcccttttctctaattgcctcgccattctctctccttatcttgtctctcccctccctctaactgcctccccactctcttcttctgccattggctctcctcagccccacccccattacgaaggtgaatgatgcttctcctcgcgtcctcgctgcgttccctccctcctcggctttttccttatttttccaacacttttcaaaaggctttttccaacgc

SEQ ID NO: 92395 - DNA, 631 bp, Heterodera glycines
attttcgaaccgcttcgttgagtacgtctcggaactttgtcgtgttccagcgtgccgggtcttctcccttttttgtgaggattgtgcgcaggaatccgggagtgagcttcttttcaagcatgaggaaggttggcggaccttcgatgtcttctcctgagttgttgagttcgcgtgtgagcctttcgagttgcaggaggaattctttggtgtcgcgcaggttcttgcagggcttgaggtttgccaattcgaagtgcagtgccctgatgtgttcgtccggtgcgccgtatgtgtccttcagcaattggagggccgtgtcgtaattgttgtcctccagtcgaaagccggccacgagttcacgggcctctcctccgagcaggttgcgcaggagattgaacttctccgctttgctgagtgcgtgtgtgccgattgctgatttgaatgagctgcttgagcgtcccgctcttctttgtccgccttgctgcggtagagtcgggattgaactgtgagtgtgcttatgaggtcgcgcaagtcgcgcagcttcagtgctgcttcgtcgactttgtctgttgttcgctcctttttctcgaacttgttgaaatctgctctgctggatcgcgttccgttgcaggca

SEQ ID NO: 92396 - DNA, 585 bp, Heterodera glycines
  unsure (1)..(585): unsure at all n locations
aaatccggagggttctgcttgactatgcacatcaaaaggttggagaacgtgtaaaaaacatgaaacatattatttattgattatttttttcccttataatttatgatgtggctatggcaaacaaattgaacttgacaactctctgcaaacaggtgtacaacactttgtgtacaaaaaattcgatgtcaacaaattggtacagaaactagcatctacaatgacccaggcgctgctgatccataccaaataaggcaaaaaaattgtgcaccgagggaccaaaatgtcccatgttgacctgaaggtgggcgcagggccaatgctgggaaaattgtcaaaaattacaatgacttctggttcaagctataaataagcactgtttcacttttggcagattgagagacggcctggcaacaaagtggtcactttggtctccaatttggcttcttttggcattgacgcgagcgcgttggacagcgaaatccgcggcaccggcacatcgattctcgcaacggcacccgcctgtgaaggaccccaactgttggtccaaggcaacgangtgtattcgagaatagtgttgtgcttcga

SEQ ID NO: 92397 - DNA, 638 bp, Heterodera glycines
attaatctaaggcaaataagcagcgaacagcaccgaacggcgagaagttttactatttggcgctcctggacagaacacaaggtaacaacgacatcggttcaaatttttggaggatttcggcattttatcgatctctgggggagacgataaacttttcgacttttgatattgttctctgggggagacaatcaacatcaacaatcgttctctgggggagacgaaacaaaaacgcttaaaaagaacaaacaaaaaccaattgtttgttaagttctctgggggagacaaattcggaaatttttcgacactcaagtcacctggggggtgcaaatagtcgattttgaaatggaaaacttggaacggacactcaatcatactcgtttgactagacagcgagctcaaaatgaagggatattgctcgacagagatggaaatgttttttttcgggagaatccaccaaatagaactttaggcgtgatgaaccaaaacgtggtggtggcggatcccaatttggagaattcggagcagctggactcgatggaaatgagacggcgccttttgaacccgaacaatgacagcgcacttggacagttgcgacaaaatgaacgtgccagccttgacgaaaacgaagaagaggaggc

SEQ ID NO: 92398 - DNA, 610 bp, Heterodera glycines
gaagtttgcttctcagcgaaggcgagcattccactgcgtctgggtctcttgttaacgtccgaatgccgaacataaaagtcttttctgggtcttcacatagcgatttggcacaacgaatttgcgacagacttcagcttgaagttgcaaaagccgctttaaagaaattcagcaataaggaaacaaatgtcgaaataatcgaatctgttagaggcgaagatgtctacataattcagagcgggtgtggagaaatcaacgaccacctgatggagctgttgatcatgatcagtgcatgtaaaattgcttcagcttgccgcgtcactgccgtcattccgtgctttccatatgccaggcaggacaagaaggacaagtcacgggccccaatcacagcaaaattggttcggttatttgcctttttatgcggagctgttctgtcaggtggctaatatgctttccatctccggtgctgaccacatcatcaccatggacctacacgcttcgcagatccaagggtttttcgatattcctgtggacaatttgtatgctgagccggccatcctgaagtacatacgggagacaatcccgcactggcaggaatcggtcattgtgtcgc

SEQ ID NO: 92399 - DNA, 612 bp, Heterodera glycines
tgttgcttttccgttttcaattgtttctcatcagcctttcctccgttctgccttttctttctcttctcatcaactctcttcccacattcgtagccgcctccttctctgctcatcgttctccacaaaaacgaacaaaatgcagaatccgttggaaatgggcacctatcgcgtcgggtccgagacgtaccggcgcaactgtccgttggaaaaggcgtccaccgctgcgccagccgctggcgccgcttttggcgtgacgacggcggagaacgacgacggttccgcggacgaacagaccctgagtccttcttcgtccggccgctgttcgtcctccgaagttcgtcaagcggattttgctgagtcggattatggaagtccgggaaaaagggcatgcatttcaactgagaaaagaacggcgacgacgattttaacagcgaaagcagcgcaagaaattggcgaagtatcgtcggccggagaaaatgcgccgttaattgtgcagcgaaaaactgtcgaggtggtgtcggcacaggacggatgggtgtacacggagcaaatggtggaggacaaatctttggttggaactgtgaaatatgacggggcgaagcagtgctttta

SEQ ID NO: 92400 - DNA, 454 bp, Heterodera glycines
cattaccgcggctgccactttggcttccgctttccttgccagcggggcttctgctcgattcaacctcgttcgccagaacaacactggggtgtactggggacagaacgcgggctatgacactttcggtaccgggcatcaaaaagatctctacaccacatgccgcgaccgggccatcgatgtcgttgatgtctccttcgtcaccaacttccgcggaaaggacggatggccaattctcaatctttccgaccaatgctggactttcatgaccaacaagaccaccggtctacagatggatgtcctcgagtgcccaaccattggtgaccacatcaagaagtgccaggctttgggaaagaaagtcctcttgtctcttggaggtgccacctatcgaagcccaggatgggctaccgtcgccgaagctcgttctgccggcaatgatatctttgccatgtttgct

SEQ ID NO: 92401 - DNA, 536 bp, Heterodera glycines
gcgacattctgatcaagcgcggctatgctttcgttgagttggacgatcctcgtgatgctgatgacgcggtgtatgaccttaacggtcgctcaatgatgggaatgagagttgtggtcgaaatcgccaaaagtcgtccatggcgcagtggcgattcttggagttcacgccgtcgctcgcgttctcgttcgcgctctcgtggcaaacgctcgcgttcgcgaagtcgctctcgtgatcgcaaacgccgcagtcgtagtcgctcgctccgccgtcgctcacgttcgccaaaacggtctcgctcgcgctctgttgcgtcgcgctctgcaagcccgccggaaccaaaaaaagcgcgccacacgccctcacgtagtcgttcgcccgacaacaaacgtcttcgttcggcctctccccgtcgatcgcggtccatcacgcccaatgaccgtggcagtcgtcgtcgcagtgttgccaaggagcgcggtagccgctctccaaaagatcgccgcggtggcagccgttcgccggctcgtcgcacaagtcga

SEQ ID NO: 92402 - DNA, 660 bp, Heterodera glycines
gtttgagctcaatccaaagctcgactttacactttgtatgtaattgaaattttgcatcaatttttaattgaaattggaatggactgttgatcaggcaattttttcacgtgcatacataaatacttgggtaaattgtgtgtcgatggattcatcaaaacaatattacatgcccagtggcagtaactttgataaaaataaagcattgggtcaggttaatgtcccccatcattcgcaaatgtcgcagcaacaacaacaacccaacccggcaacacttctcactcagggtcaaatcttgaatccacaaaacattgtggtggtgtcggcaaatactcccgctttgataaacacagatttgtcagcgttgattgacattgcgcacaaggaataccaagcccaaaactacgccaaggcagagcagcattgtttagcccttttacaacaaaacccacacaacatcagcgttcttttattactttcttccatcgctttccaacaaaagagttatgaaaggtccatgcaattctcgaatatggccatccgaataaatcccgaatgtgccgaagcatacagcaaccttggcaacgcgcacaaagagaggggcgaactaaccgaagcactcaagaattaccatatggccgtgagattaaaacccgacttcat

SEQ ID NO: 92403 - DNA, 551 bp, Heterodera glycines
cttgaaatgggcctttcgttgctcttccgaagcgaaacccaacgggcagagaaagtcgcgataacagcacagctcattcagtggcacagcttctgcacaattattaattgcaaatgacgcgccaattcgacggccaatccgtggcccagcaaatagcaactgtccgtcaacaccaactcctcccccccttcgctttggcattccaaaattgcattttctctgcgaatttcctccgccgtcggtttttgcagcactctctgtgctgtttggtgggcaatgtttcttaaaatggaaaaaccttcaacttttggctttgtccgttgctgtgatttgaatttccgtcgagtaaataaacgccgtgcccttcggccacttcgaccggcgattggtgcgcgatcagcaaaagatcgccaggaaaagaggggacggaaacggcgggaggaaagtgttcgagcacatcggcagaagcgacgaaaacgaagccgagcgacgaatggacggagagaaggagaggcccaaaaacaaaagaatggcattttggccaatttttg

SEQ ID NO: 92404 - DNA, 644 bp, Heterodera glycines
attgggacggaagtccaaattttgagatcggatggccgcgttcatgcggcactcgtcacagcaatcaatgaacgaggtgtcagtgttgaatggatggaagaaggcgaaaccaagggcaaacagttggacattgaagtgattgtcaggaacaacccatctctctttccttcccgtgttcacaaaccggagaaatcatgcgccgacccgaaaactgcgtcaaatggagttgtctcgaacaaaaatcggcactctatcgccgcttcatcaagcatgcaaacggttgttggccgacaaattgattgtggcccttccgtgggttatatcagcaagtcgccgccaccaccaccaccactgcagcctatagcacccgtcaaggacatcaagagaatttgtgccggaatgagcgtcaaaattgagcgaagcaacggacgcgttcaaaccgccctcgtaacgacaatttttcccgagaaaaatggtgctgctgtggaatggcaagaacagggtgagactaaagggaaggaagtcgacattgaaatgctggtgcgcaacaacccagaagtcttcaggaccagcccgtcttcgatgcacaacaagaatttcccatttttggcccaagtgatgaacaatgtgccattgtcaatgga

SEQ ID NO: 92405 - DNA, 107 bp, Heterodera glycines
gagaccagttgccagagtggtagtgtgttgggtttggtggcagagcgaaagttcgagtccactagtctgcggcagaatttttcgagtaaaaaaaaaaaaaaaaaaaa

SEQ ID NO: 92406 - DNA, 617 bp, Heterodera glycines
aaagtgccatctttgagcgcagaccactcaaatgccaagatttaactgattgccaatatgtcaacgtttccgtcggtgcccaccgatgcttggcaattggttttgtggatggttcagcacccgttttggagctgttagcaccgtccgttgaagaacgtgctcaatgggtggacattctccgaatgacacttcggcggctgaactttctgaacacggagagttttgacaatgagcaacagagggaacgcactgacaatgggccgtcgcaatggccacgtgcggcaaacgaatacgtcaccttggccggcactgctaacagtgatgccaactcatcgacgagttcgcctcctccgcaacagactctccccagggcaaatggaagaagggaagtaacgcagtcgccacgggtgccaatgatacaaattccgtcgacgcatttgcgcacactttcgacggaaacggcgcaaagcagcgaaaggagccaaacgcaacttcggaaaggtttggacgattcattgccaccgatgcgccaacactccgagcaacaaacgaatggcgaaaggaaagggacgaggaaaaccgacggaatgacaagcggaggggaaagcgaagagcat

SEQ ID NO: 92407 - DNA, 538 bp, Heterodera glycines
aatttgggtaattttggaagctcggggaagggttaaatgtgtgaagaaaattttcgattttcacatttttggtctaaaaatggctcaaatgatcttttattgaagcaatgttgaatttcagttcgtttccgtgtatttaaacaaagttgaagcaaaaatgtgaaaatcgaaaatttatattttcgactttttgttcgaattcgggtccgggattaggaattggtctaaatgggcgtcggattcgtgatcagcgaccccgaaaaccccataaaaagtgtttttatgacttttgaaaacataaaaaaatttcgaaaaggggggggggacaaactgaactattaccaaaaaaacaaccgccattgctatttttagtatcatatttcgccagagtcatatttttaactttaattggctaatcataatgatgtatttgtatgtacaattgtcactggaacataaaatgaattttgttacatgcatacataggatattggttaaaaacaaatggaagaaaatgcaaaaattaactttgtatagt

SEQ ID NO: 92408 - DNA, 127 bp, Heterodera glycines
gggagtgccctgcttcttctccctcctcctccgcacctccgtccgaccttctgcttctgttagacatgcctcggccgtcgcgactccctccgccgccggtccatctccgccccgggaaattccccgg

SEQ ID NO: 92409 - DNA, 645 bp, Heterodera glycines
ctcaaattggcacttctttcgccacgtttcaatgcgttggtggacaaacatttcaatggcaaaagcgaattgacaatttggagaacgatcgaaattcgtcgcaaggacaaaggaccagaaccgaagctgtttgtacaaatggatgacaaatttgtggaatttccattgccggaccgtccgttgcccagcaaaatccttttaagcgccttcagattgattacattgatcattccgtcatcgcttttcttcgttccaatcaccaaattttcgacaaaagcggcaccaatttagagttgtggatttcttgtgtacgtatcacggatgagcagccgatttgggacatttttgttcgtgaaatttggcccatttttcctacaaacattcgccatttgggctttaacggttgtgatgctttggatattttttgtcgtcgcacttcgccaacaattctcaccgatctcaaccaattgatttcaatcaaatcatttggtcggttgcccgaggcgattggtgatgattttgatgtgccaaatgcaacaatttctgctggccaagcattgtccaaatggttgcactctccgagaaaagatggacaacccaagcgattgcgttgttggcaagggaactttggatggatcaacaatt

SEQ ID NO: 92410 - DNA, 637 bp, Heterodera glycines
gtcgcccgcttcacattttgatgccaacttcgtccgtttgtctccttgacgactgtccccccccccgcccaccaattccctttctgtgccattattcacttctgccggtcgtcagatgatcctccacctgtggtcgtacacttttgtccctttggtctttcgcccttcccaattgaatttccttttccctccatttttctttgacattgattttccgtctcattttgttttctgcctttcttcgctggtaatggacaacctcagcgacccctccgccgttcttccgtcgtcgccttcccccggcgattcttccgttccttcgtcccccttcgatgttgccgcttcgtcttccttctccacacttattcccggcttcaaccactcttctcatcttcaaattgtcgatgtcaaagttcaaaaagcggccgacgccgccttcaccgatttccccgcttacattaccgttctgatgagcattctgatcgcggtcagcttcttcctcaacttgggttgtgtgggcaccattctgtgcaggttggcaggtcaaggaaaagcattccgttgccttttgcccttccccagtcggaagttgcgttgctccatgctttatctgatgttcgcactgctcgctctcctc

SEQ ID NO: 92411 - DNA, 636 bp, Heterodera glycines
cgcacaattgctcggggtgtataggaataagtcgatggaacatgccgtccaactcttcgctctggctaaggacattcagtccgctcggctttctttgctttccgccggcagttcctcctcgtctaattatatccctgcggcgtttgctaccagtaattctttaagttcgaccgatgagagtatgaacagcactgacgacgaagctttgacaaccgacgaaagtgaggaagtgtcgcgcatgagcacctcagacccaattgaactgcaacagaacgccacttcgatggattgctctgccgaagacgcaaatgccaacgaatcttcggcattctctttgccacagacggaggccaacgaaattacacttgaacgatgtcaaagctttgtaaaaagcgcatcgcgaattgccattcaatacggaacttcgttgagttatgaattcaatgccaatttaaagtccattttcgaccaaattgaaccttcggatgtgcgtgcagtgccccctcgtgtccaccccctctgttggtacgcaatttggcgtgcaacagatcgtttccgtgcattgaatgggcgattccccggaagcattgcttcttctcagaagggagatgcaaaggaattgaaggaaatcgtcgg

SEQ ID NO: 92412 - DNA, 634 bp, Heterodera glycines
cgtcttcgttaccaaaagaaacagcaggaaaagggcatcatgccccgacgacagcgaaagcccaaaattgaataccgagcaagttccggagagccgagtttgggtggctgtgcacttgggtagctaatgatgccatttgcttattattgcagaccgaatattggacacaattgaacgtgacgtaatgcgaaagaccaccgaagcacgccaagctttggtacgtaagcaacaagttgagcctaagaaggaggaacttggcgagcatgagcaagtactgttcacttccgtggacgacggcggcggtggcagcgccagcactttgcccgcccaactgatccaaacgacaacatcggctgtcggtctgaacgtaccgcacagtgggcaaaacgtggtccaatatgttcagattcccgctcatggcgttcagaatgggctaatcctcgcagagagcaaatttgttccggcggaatcttctgatgcacaatcccactacgcgttggagcacacttctccccaaaagtttgagcgggggacgagcgggtcggccaacagcagcaactattaccccgtgtccatcatccaacatgaatggcctcagcggacttctgttgtcggctctcaccaccaattgcag

SEQ ID NO: 92413 - DNA, 588 bp, Heterodera glycines
gttttatgtgcagtgggctgtttctatttagtatgggcatacggtgagtactcgacgcagattcccgatctggagcggcagggagttgtcccccacgcaggtgccccgtctgacgagatgctgaaaaagctgccaaagccttgtctgattgtttacgacgacttgatgggtgacattgaggccaagaagttggccgatctgtacaccaaaaagtcccaccataacaatttttccgtgattttcctcacgcaaaacctgttcgataaatcaatgcgggtgccaaggtccaacgcccagtacatcttcctgatgcgggctcccaacgacatgcttagcattcgtaatttggccagccagatgttccctcgcgagcagggattcctgatggatgcctaccgacagacatgtgccctaccgtacggctacctgttggtgactctccacgcgaacaacattatacgcctaaggacaaacattttcccagacgacgaggagagaatcatttttgcccccaaaaatggttaagcgggaacagaagatcggtgagcgggttgtgcacaactacgactatttgaagaagttgggaaa

SEQ ID NO: 92414 - DNA, 638 bp, Heterodera glycines
cgatgaattcgaattcaaaggcttcttctcccctcggcactgccattgctttggccaccgccggaggcgaggtgaccattcaaagcgcaatcattgccattctctacaggaaatgtgccaaactgactcaaatcattcacaatttacagaccgaaaattcgaacacttcgcattctgtgaggaacgaattggtccttttgcgccgcactgtccttttgttggagaggcgaattgcccaaagtgaggccaatcgtaccgaaatgccaaaaactgaaaaggacgacggattgggtcggcacgaaatgtgcgaagaacgaaaagccattggccgagtggcgtcggcaaacagtgcgtcggagggggaatatgcggacgcggtggacgacgaccccgacttttttaaaatgagcagcaaaacgaatgggactaaagtgtgttctgcggttgcggactcaaaatttctggaacaaattgaccgattgcacgagacgggcaaacacagcgaagcgtatgccgaattaatgaaagccaacagagaagagcccgaagtgttgtggcgattggcgcgagtgtgccaccaaatggcgtcttcgttggaactgaaagacccgaggaaaagggaactcctcgacgaagcc

SEQ ID NO: 92415 - DNA, 236 bp, Heterodera glycines
gttttacacagtccccacaaaatttagtttaattttgggggttaaaaataaatttccaaaaataaaaatgaaattgaaaatgctcttcaaattttttatttttgaatgagtcgccgaaagggaaaacatttgatcaatcagaagcaattatttatttatttatttatatttgttaatgggttggccattgccatcggacaatcggagaagcatttgaacagcagcagaagaaaagg

SEQ ID NO: 92416 - DNA, 328 bp, Heterodera glycines
agtccgggactccgccgaccgcttctctttcaatggcgcactcgtcggagccacgcaaaatgcggaagaatccgtcctcgccccagtccgtgttccatgagttggcaaccagccaatacggaatgccattgtccgcgccccatccgagcagtttcaccgcgtgggccccgcccaattttccggcgacatggtaataaacgccgcccttggaattcagaaagtcctcatacacttcgaaaggcacttcaattggtccgttgacgaacaattcgttttggaagggtttcccccaaatggcaatggcaaaggcaccttttgccataaaatt

SEQ ID NO: 92417 - DNA, 648 bp, Heterodera glycines
attggccataaaatccgggccctattcataattaggtaattaattttttaatttttaatttaatcgaataaaaatgcaaaacttccgactgcagaacagagagcccccaacagaaattgaatacataatgtgataaggggaagaaaggaatctaatcgaacttttcaaataaacaattgaaaaaagagatgagagaaaaaaagggaggaaatgtgcggtgaaatgaattgaagcagaagagattcatcggattgttcgaattgcactccgacagttcgaacacggtgattttgcttcccaagaaaattgaaatggagtgaaaactcgaaacgaaaaaccaacttttaccatcttatttttaatcctcggcttaactttgcacaagttacgcccctctctaacaaagcatttgcctacattaaactcttcgttcaaataagttcgtctttctttgttaaatgataagcatgaagaaaaggataatgataatttcgttctacgaatttttttcggaaacattccggtttctaaaatttttattttcttttcattttcaaacttatttttatgtatgttttcgcgcaactctactggggatggacggccaaaaatcgctgcttttatacacttttttacattgcatttgcc

SEQ ID NO: 92418 - DNA, 650 bp, Heterodera glycines
cagacattgtgcccataattcaccggcattttacacgcctttggtctgaagccgacatctgatcacggcaccacaataaaatgtgtcactgttaagcggcaatacgggaactgatcagattaccgtaactgcgggacgaactaatgcaaaacattgataattttggacacgatcacggaaaaaatcaatcctaagtgatcagaaaatgttccgccgatttcggtactttgacgaattctcgtacatcaatgcttctgtggattaccataacgcgccgatcagtagtgatcagatgtattcggtgatcagcaacatttcctttttaaaaatgccgtgatcagacgcgcagaccgtgccggaaataccggcaactctatcatcatcagaggggccaaatgccaacaattaaattaaaaatataaaaaaatcgacgaaaaatcacttcaaagctaggaaacaaaattatttctgatcagtgaggaagtgtgttggcgatggacaaactgattaataaaaaaatgtacaacaacttaaacagaagttgaacagaagaagagggggaggtgattagtgattaaaaagggaggaatcgaacaaaattcaaatgttcacagaggaaaattggcgaaatgccaaattaacaaaaaaaa

SEQ ID NO: 92419 - DNA, 649 bp, Heterodera glycines
gtcaagttggacccgaccagaccatttctgctgtccagcccatcgaatggaatcgaaacggaaagggagggcggagtgtctaaaaacccgggcgacccggcgtacggcgacgtgcacttttactcggagtcggtcaatctttggaagccgtccaatttccccgtgccgcgctgctcctccgaattcggtgttcagtcaatgcctttgcgtgggacaatggcacgttggattggtccgtccgattggaattacaaaagcggcactttggtcagtcggcaacatcaccccggcggcgttttgaatttgccggcaatcgtttcgcaacatttcaatctcctctcctccaacttttcttctctctctttgtccgccccttttttcatcgacaaattcgcttttctctcccaaattcatcaggcaattgcacttcaagcgcaaattgagcattaccgaaggttccgttcccatttggacgaggccgggcttggccacacaatgtgcgcgatgtattggcaattgaacgatgtttgggcagcgcccacttggtcaaccgttgactttgacttgcgttggaaagttggccaccatttcgtgcgccgttcgttctctccgctaatcgtttcaatgtttttggactcaaatggcattt

SEQ ID NO: 92420 - DNA, 644 bp, Heterodera glycines
attctctcatataaaataaaaatgaaaaaaatattatgttcaaatttattaatattaaaaagcttaaaaactaatttggatatgaaaaaaaaaacaaaataattatttacagggttgagggaattgaactttagaagaagaaaaaagtatggaaggcacaaccaccaggccaccgacgctcacattggctttacattctttgaaaatgatattgaaaaggcaaaaaggaaaagcttcatatctcggccagaagcttcatttagcaaaaataaaaaaaaatttataatacaaagggggggggtaatctacctaccctgaaagtttcattcggaagtcccatggtcacttgggtacctctcctttgtaagggcaaaaaacttcgcgtcgtttatgacgcgagtgctcacacaaggggtacaaacagtttgaatgactgtttgtacagaggtccggtacttttacctgatctcatcggaatgcttttgcgattccgatgccccacatttcctcttctcgcggatatccaagctgctttcttgcagatttctttggaaccagaagatagagaagtcacaaagtttttgtggctcaaagacacggaaaagccactttcatcggagaatctgataatatacagattctgc

SEQ ID NO: 92421 - DNA, 625 bp, Heterodera glycines
ttcaagaataattttccgtaaatttaccaattatttaccttcaaaaacaaaaataattttcaataaattttcaaattttttaccattttcttctttaaaatttccaaaattttcttccttggttttttgaaatgctaaattctagtcaattcgagacgaaatttccaaaaaacaaatttgactccccaaaattttacgatttcctctgttttccattttacgaattctcctcccccctgtacatttaacttaccatcgccatggttgcccttcatgtgcatgttgttcatcgtcgccgtgtccgtctcctgctgcaacaccaccacctcaacattgtgctgctctccatactgcggttgccattgttctccagctactgcttccttttctcggcatttccaactgccaatgctttcgttgttattattgttgtgttgctatgataatgattatgatggcgattgttgtaagaatggccatcaccaaactgttgctgcttttcctgctggtactgcttcggcagctgttcatgatgattttggtgctccaccgctgtttctgttcctgcttcaacttctgcgaatgttcgccattgtttattgtggcccttttcaatgcccaaccg

SEQ ID NO: 92422 - DNA, 630 bp, Heterodera glycines
cacagctgtccgatctgttccatgcccgagtcatcgccctgtccgtcgccaatttcaagctaaaaagcgtgcgattaaaatcattagcgcatttggaacttccccccttttttcccctcttttgtccccacttttgtgccgtccccgccggccatcccctgctgttgctgatggaccgaaatggaggcacgtcgtgcactgacgccgccctgctttttgaactctttgcggtagtaataggcggttactgcgggcggaatgttgaatttacgggccgcggcggtggcgccatggcattggacgtaactggcgacagtctgaggagggagagaatatagggagggaacaaagccaacacactgcacaaccccctaccattaaacccatctgttcaaaaatgccaaaaaaatctccaaaatttgaaatcgcccgagaatggcacagacgggcaaaagcccccgggcgatatgcctcatacgttcggccacacctttttctcctccggcgtgcagtatttagagcgtcggccccgcggtgccgattccgcgccgcttccgctcatgtcggcaccgccggcggagaacagactctgctgttgctgagtgccgggcgtcgcgaaagacgacgcgg

SEQ ID NO: 92423 - DNA, 475 bp, Heterodera glycines
caacgacggaaagcattgaatggacggaacagagggagcagcttctgggcaatttgctcgccgaattgttgaccttttctgactgcgaatttcggctcagagaatgcgcttttggcgaatttggaaggccaaaagaaaaatcggaacgcaatttaattttgaccactttggccacttcgctgctttgtgagcaaagagcgtctgaggaatttgttcgttttactcttttcctttcaaactgtgcttttcttttctccctttttcggtttgtgggcccatcgcttttttggatcgcgaagttcattctgtgctgaatgggacggacggtggcaaagggacggagacgcaattcggcgccatgggcggtggaatgcacgcccaatttaatgatccctccgaacgaaggcttttcctcgagactctttttgtccaaacggtcatggactgttctgcttatgcgggtgcagcatccccg

SEQ ID NO: 92424 - DNA, 534 bp, Heterodera glycines
gtttgagtaaatgtttttcgtttacctccgtttagtctccgcttatgttttctcatcagtgtgtcctaaaggcatctctcttttctcgacgacaatttatacgattctcaaactctgaggcgttcgacgcgtttatttcgtcatttccatgccttacctccctctggtgttccagttaatggcctcggtggcgcgacgcccagtggcttggaaatggccaaacgactcgcgcgccacgtttggcctaagggacagtggcgcgtgaagggccgtgtacttttcgccttttccttgctcatcgctgctaagcttctgaatgcgaccgttccgttcgtccttcgcgacatcgttgacttttttaatgggaaactcccggcggagctgtcgctcggattcgcattgcctggcgaagccattctgtcggcgggaattgctctgataattgcctatggcgccgcgaggggcggcacttcgctcttcaacgaacttcgaaacgctgtttttgcgcgtgtcgcccagcggtccatcccgcga

SEQ ID NO: 92425 - DNA, 619 bp, Heterodera glycines
tctctttcaacattttaccaacttctgaccacgaccctttgccaagtctctttttttgatataaaagttcaattggctttttgtcttcaaaattgatcagtgccatcggtttcattttctctatttctgatcgtccgcattggcaccattttttgctcaatctttcaccactttttggcaattcatttttttgagatgacaattttcggcttaattcgccaacttctttatgaattaatgaactttagagtaaaaaaaagaagctaaatttaacttggcacagaaccgtttaattggcgcggtgtggcgattctttttaatggtgaggcaaaagcattaccattctctaaaaataaacaaaatttatgaatggaacaatttatttatacctctaaattcagcgaaaattatttttaaataaaagtataaaaaaagaattaataaaattcgctgtcctttgccataatttatttgttgaatcattcgaaaaattatattataaaaaatttaaaactatattaatgaaactaaaatttattcataaaaaatgtaaaaatgaaaatcatttggtattatagcatataaaacaatttataaacgttaaattaaacaggaaaaa

SEQ ID NO: 92426 - DNA, 336 bp, Heterodera glycines
cacagaaatttacggaaacgcttggaaaataaaaattggtagtttgagttggtccgtgtacgggcgaccgcctcacacactgagtgatattgcccctcattagatttcgacaacttaagcctcacacccgagcttaatcggtctttggttggtgttgtttcatgccgccaccaaactttctcaatcttctcaatccccctccagtgccggcaaccactcggcctatctgtccgcgtgtgggaatcaacgtaagcctcccaatccctcctcagcccctgcccggtgttggcagataaagaaagccatgcacccggcctatcaatccacagtggtggg

SEQ ID NO: 92427 - DNA, 650 bp, Heterodera glycines
agtcccctctctctctttctttctctccttctcccctctctctccttctcccctctctctctctctctttctctccttctcccctctctcccctctctctccttctcccctctctctctctttcctctctctcgttccctcctatctctccttcttccctctctctctctctttctctccttctcccttctctctccttctcccttctctctctctctctttcctctctctcgttccctcctatctctccttcttccctctctctctctctttctctccttctcccttctctctccttctcccttctctctctctctcttcactctctctcgctctttctctccttctcccttctctctccttctcccctctctctctctctctttcctctctctcggtccctatctctccttcttccctctctctctttcctctcctgtctcactttctctatcacatgctcgctcactctctgattatctcacactgactgattcagtttctctccctttcattaaaatatttgcgatacgaaaagggcaaattcaagaccactaaatgtctcagaatttttgacaaagtaataaagactgccgattttttaaacacacccgaaagtgtggaccggtgccaaaacatataattcgaga

SEQ ID NO: 92428 - DNA, 646 bp, Heterodera glycines
gtttgagaatggtaacggtgacacggcgaaaatcatttgcgtgctcatccattgacattgacaacgtaattggacgactgacaaatccaacggtccaagcgaatgtgcagtggcggcacggcgtcgacgtcagcgaatcggaagtgcgtgcgctgtgcatgctcagccgcgacttgctgttgtcgcagccgacgatgttggaattgagtgcgccactcaaaattgtcggcgatatccacggccaattctcagatttgcttcggctgttccacgcctgcggcttcccgcccaagtccaattatttgtttctcggcgattacgtggacaggggcccccgcagtttggagacgatcattctgttgttgtgctacaaaatcaaataccccgtcaatttctttcttctccgcggaaatcacgaagtcgcctcgctgaatcggatttacgggttttacaacgaatgcaaaaccaggatgaacattcgggtgtggaaggcttttcaagacgttttcaattgtctgccggttgccgcactaatcaacggcaaaatcttttgctgccatggcggcctttcgccacatttaaggacattggagcagctgaaacggatacagcgaccggcggaagtccaagagtctgggttgctctg

SEQ ID NO: 92429 - DNA, 577 bp, Heterodera glycines
cactctgagagtttcgcgattgatatgcggcaaacggatgagcaaatcgtcgattatacgcagccttttaatgcccgtttcccctgtttagttaaagacacggccctaatattgcatttttattagaaatgctcactcatggcggacataaaatctttgtgcattgaaacgggaaaagttggttcggacagctcacgaagaaataatttaagagccccggtgagcacgtgaatgtcctcttcgtggtacaaagagtcataggaatctattaaaagtcaaaatcacgactaattgtaatcaccaccttggtcaatttggcatcggattctttggacggccgacaaatttccgttgacgcggtaaagcccatcggactcaagccctttctgttcaataagccgagtcacttcgcagatgaatttgggaacaaatgctttctcccgtgtgcaaatatccgcgagagtgctgccaaagacgggctccgctaaacaaaaagaaaatggcagaaattaaaaaaacgcaataataaactgtacgtttgtaaattccacgctctcgcagggattccatggaagga

SEQ ID NO: 92430 - DNA, 635 bp, Heterodera glycines
gttattttaaaacatatttttatcaagaaatatttttaaaaattgagacgttggtatttctataaatgcatatgtataattgaatattttattaaaaataacttaaaaatgaaatgaataatttaagataaataaactaataaatttctgattatagcaaataaaatgaaagctttaacaattaaaagtctagtcgattatatcactcgacaaaattaagttaatagaattaagcactattcaattgcactttgagaaaattaattttttttaacttataatttttaacaatctttagtcttaaatttaattataattaattaaaaataagagatttattgaaaatacaaaatcaatttaatatgcgatttgccctattgagctattaatatgtgattcctattagctattaattcttataaataaaaaataattagagaattgatgttgaacaatacgatcgttaatgagaattcgttaaaataagttaaggtatgaacttaaatcttcattgggataatcgcccaatgaatcaaaatattcaatttctgtcggcaaaacagcaatccagtgttcaagtatcgtgcccgcccggtcggtattcgccacaaaacagtatggaaaatgcctgttcc

SEQ ID NO: 92431 - DNA, 574 bp, Heterodera glycines
tggacatgtgacggacctgttgctgctggacgtaacgccactgccacttggaattgaaacgcttggtggcgtgctcaccaaactgattacgcgtaatacgaccattcctacgaagaagagccaaggcttctcaacggctgctgacggacagactcaagtggagatcaaaggtttccaaggcgaacgcgacatgggattggacaacaaaatgctggggcatgtttctctcgcaggtattccgcctgcccctcaaggaggtccacaaattgaggtcgcttttgacattgatgccaaaggaattgtgaatgtgtcggcacgagaccgtggaactggctgacaacagcatattattatccaatcgaccgggggactcattatagaccaaatcgaaaacatggtacgtgaggcggttagacccgcagcagccgacgcatgaaagaatgacacgatcgaggtcattaaccatgcggagtcggtgctgcacgacactgagtcaaagatcacggaatacacggaacatctcaatgcagacaaatttattgtggtcaaagagaaacttgaagagttgaagaaa

SEQ ID NO: 92432 - DNA, 321 bp, Heterodera glycines
atttataagcatttgaagggttctcagcagtttccctgcaaaatttggtgagctttcgatcagtctagaacgttggggatcaaatgcaaaaaataatttaaaaaaaataatactggtgtggtaagtgtgaagaactgtgttcctccaggcaaaaaattctaagaaaatttataagcatttgaagggttctcagcagtttccctgcaaaatttggtgagcttctgatccgtctagaacgttgggtgataaatgaaaaaaataatctaaaaaaaataatactggtgtggtaagtgtgaagaactgtgttcttccaggcaaaaa

SEQ ID NO: 92433 - DNA, 310 bp, Heterodera glycines
tctcggcactccaacaatcgtcgacaatgttaggttcgaccccagattgagcgtcaatttccttcacaaaagcatcgaagagaagcgaaaggatgagattatccatttgctgtgcaccatttccaaccaacagcgggaagaattggcacgcgaattcaaacaattgttcggggaacatgtgtccgccaaactgaagaaggcactctctggcgactttgaggaactgattttgggtttgttggaaccgccagctgttatcgatgagctgcaaaggcaccgcgcgatgtccggcctcggtactctcgaaggg

SEQ ID NO: 92434 - DNA, 633 bp, Heterodera glycines
cttagtacagattcaaccttccataccaatgcttcattttcgtctgctctaaggaacccattgaccggcttctacaggccatcgcgttttgatgcgaatgttagcaatttttccaacaaaaatcatccgtttgacgagggccttaatttctttggtaaattgacaagcagtcagtttgacaacaacaacagttatgagccttccttgaacagcaaccgattccgatttcgcgagtttttcgctcgtgagcatgaacaacaggagcaagatcgttttttgaaaaacttggacaattccagaaggaatgactcaattcgttatgatccctattcttcggcgtcgaaaaatcacaggcttaggaaaattctctacaaatccgtggcaaacattgacgatctcagtccccttccaaacaaatatgtcggctttaccatgcacgataaattggctcatctgaaaaaaacaattcgcggattcgacacgaccaatttttcaaataaggagaacagcaactttacgacccccgctgtttcttcgcttggcttccgtaacttggatagcactggttacggcacggctcttgcaaagcgctttagccctcccaacacttcgactcctctggcaactaatcaa

SEQ ID NO: 92435 - DNA, 118 bp, Heterodera glycines
gatgaacgaggtttccggtggccaggcagtggagaaggtcgtagcaaaagtttaccggtggtggccgtgcgcagaagaaagaagcgagcgccagggctggagctgaaggcggtcgtta

SEQ ID NO: 92436 - DNA, 625 bp, Heterodera glycines
gccaatttgaattttttctgaaatttcctagtgaaaaatatggaaaattataaaaaatcaaaatttttaatttatttaaataaaaaaaaaaaatagttttttaaacatatttttttaataatattattatttgctataaaaaagcattaaattcaaaaattttcctcgatttttaatgtcaatttaaatatatccaattttaagaatttttggtctgatttcacttattcaaatttagcataaaaaaatcagctcatacaaagcctatcaaccgaaaatgaaaatgagtgcaatttcacaaattcaccaagcacaaaatgtcataattgcacgttattttctggccaaatttctctccaccgaagcggagcattggcacaatattagcaaagtccattaattgcttttgcatggtgccgctaggcgccgtcgaatttttctttttgaaaatgtagtcgaaatttatgttgctaagtggtttcgtaaaaatcactaattagggtgtttaccaaataattaccataacttttgctcaaaattaacaaaatttaatacttttgataccgtttgacagctgataatgcctgctaaaaattttcaacaactatacaaatttttgtatttg

SEQ ID NO: 92437 - DNA, 641 bp, Heterodera glycines
caatatttgaggagaaagtggcagggcgacccgaacattctgatcgaccgcttcgatgtccgtggttatctcgacaccatttccgagacagcgcccaatgctttggccaagaaaaacattccaaaggatgatgtcatcgaattgcaatgcgattacgaacgctaccgaattctggtatttaacgagtttcgaaaagtcagcgaaaagcaatttctgaacgaaattgccgccaaagagttttggcccgcccaacaacaagccaatcaatcggcgaacgccgcctataggagggaaattgagaagaagagaaaattggcttctaaacgcgcagcaattgcatttaattacgccgactcgacggaaacggcagcgaccggacagtcgaatgcgacgagagaaaataactgcacgtcatcgagcagttcggatgaggaggactttgatgaaatggaagaaattgacagtgtcctcgacaccaacgctttgagtgctgaacaggcggcgaccctcaacaaaattggagcccatttcaacatcacttctggggcttttctgcaacttttgtcgcttgaccgcaaagaacaaacctcgaccgcccaaattagagaaattgacaaagccaaactcgctctctcaggtcg

SEQ ID NO: 92438 - DNA, 649 bp, Heterodera glycines
gtttgattcaacgatggtccacaaacccttttctctttgcctttcagtctttttcatttcggcgttcttttttgtgtattcagctgatgaatcgattaaaccaccgacaagaaatgttctaatcacagcggaagaagagaaacaaagagatgttgaaggtttcttggcaatcaaagccatccatgccgttctcgacgatgacaattcgggctcaattgatcggtttgaatctgccgatttcttgaaagaagatctcaaatttggcggttcggacaaaataaggcgagaaaatgcatttcacagtaacgacgaggcgataactgtggacgatttgtgggagaattggttccaatccgaggaacgcggatggaccaacaaacaagtggtcgaatggttgaccaaccaagtcaaactgccgcaatatgccaacggttttttgagtgctgaagtgactggcctggaccttccgaaaatggcagtgcaaaattcttcgtttctttccacaaaaattggcataaagaattacgtgcatcgtcagaaacttcagctaaaggctctcgacttggttttgtttggcttccaagacacttcttcgattgccaaagacattgccttggccggtctgctgggactgctcgttgccgttttg

SEQ ID NO: 92439 - DNA, 583 bp, Heterodera glycines
acggaaggcagcgtgggggaggagtaggagatattctaaggttattatggagaacaattctaccaaaattaaaatccgctggcacggtattgggtagagaagcactagacaccggaacacgtgtattggacactatagagaaatctgaagcaccaaataaacaatcaaaatcgccgaagtgaagaagggagtggataatattctcgaaaagggaggagttgtcgtcaattcggaacgggaagacgaagaaagagtattaaaaggaacgcgataattggaaaaactgtacctaagacagtgataaacaagagaaaaagatcggacgtatttggaaaactattttaaaatggtctttaagaaaatagacaaagagtcggtaaactctataacttcagctttatcaatattcagccttccaccaactaatgtgtctgtgagtagttcttcagtgcgcgaatatttaccccttaacggacattcctttccactttaaaattcaccctagctccagtttcatagacctaaacaaatgttacatcttaaccgaaatgtccattaaaaggttcgacacctacaccaataa

SEQ ID NO: 92440 - DNA, 654 bp, Heterodera glycines
ctctctctcaatgcttttctcgccgtctgtttttacctgtggctgctgtactctgcccgttttccattttgtcctcttgctcatacacactttctccattatttcaagcgtgtgaaattgatgatgaagcgaatgggctggggagggtaaagcccaaaagtgtaagccaatctgcgtgaaattgagcctgtggattaagtgtaccacctacctacaataacaaagaaaaacaaatatctttttcaaaaagccaaataccaaagccattttgaattgaaaactggcatttctgttccgacaattccgtttcaaccaattcaacctttgacctgttgaaaagctaattaaaattatattttttaaatatgaagaagaagaagccaacaaattagaaaattcactttcttctcgttctatcatgtttcttttactctctctctctctcttccccctctctctctccctctctctttctcttcctcgttgtctctccctcactctagcttcctctctctctctctctcttcctctttcattaacctatatatccttctgctttttcttcctctctctgttcctctctctgaatcattctcttccattgccctctttccctttgcttcctcttcttctctctctctgttccctcctctc

SEQ ID NO: 92441 - DNA, 557 bp, Heterodera glycines
ccaaggtgtcaatttcatggacaacgaccgcaccaaaaatggcaccgcaaaaagcaaatggaacggacatggcgaaaccacggggatatgtacaacagcagcagcccaaacaagccgaacgtgacgaacagaagcccagcatttgttcgatgtgccaatcggccgacccgagcccggcgcaccgggcttctctgctcgtccaatgttccgcttgtcaacaccaaatgcattcctcgtgcattgacatgccgttgaacatggtcgaagtgatccgcaaatacgattggctgtgcattgaatgcaaacggtgctcagtgtgtgagcagcccgaccaggaggcggcgatgatgtgctgcgacgcgtgcgaccgcggctaccacaccttttgcatcggccttgaaatgccgccgaatgggacttggcactgtcccaagtgcaaaggttgctgatactgctcactcactgtccaccgcccgttcggccgaccttccgtcgctgcttaattaatgtttataaggcctcactgaattccttcctgtccctttttttgcgttcat

SEQ ID NO: 92442 - DNA, 628 bp, Heterodera glycines
gtcgtattttttgaaaaaaaaaattttcaaacaaccaattattgatcctaatgaacaaaaagaccgtgttttcttaattttaatgctgattaggctatcagagtttgaaaaaattcaaatttgagtccgattttggacataggcgcaaatgtcggggctccctacagatgaccttttttgcttttgaaaccactttttggagtgccttcttttcaaaaaaaacttttggggaagagcatgggtccggtgaagcatttgatggaagctgagcagaaaatgtgccgaattcgcaaccacggactccgatcactgaatcattttacgaccaatgcaattcgttcgaatcaatttttgcacgtaaattcaatttggttgactgttcctacaaagattcggtcagcgaattcacaaaaaaaaaaaaaaaatttgaatttaagaccgatccgccaaatgctcctcgggcagcgaattttgaaataaatcacttgggacccctcattagcaagtcaccaccatacgtcgccatggatttgatatttgttttcgaaattgtcaaaacctttccatcctttgaacagctcatcatcaatgataaggtaccattttactcggagcacatgcaaaataa

SEQ ID NO: 92443 - DNA, 522 bp, Heterodera glycines
gctcatacagatgcttaaaacatttcttctccttttttcacatgatcacacaatcaatgtttttacctggcaatagtgcatgagatgggtagcacatcgtatccccctgttatatcacgcatcaatatttttctgaactgcacaatcgccttcagaagaatctccgtatcattttggcaatatgattgaagctcgtccggcaaatagaagggtgttgttgttttattttcctcatacctatgggaaatggggaacccccaccactgaaataaccctttagttttgcttaccaactgacaaatttatcgtatttttctcgtttcattgagccagcacagtagtcttctattggcggtaaatgcggaagcctcacgtcatagttttcccttaaaagcattattttttttgacaaatgtcacagctttcggaaaaaccttcggttgaaagcatagggaaaaaaaggtttctctgcacagtccaaattgaaagtttttggcagttgatcgagacgaacaggcatca

SEQ ID NO: 92444 - DNA, 591 bp, Heterodera glycines
  unsure (1)..(591): unsure at all n locations
ccggccccctggtccccaaatcaccaacatttttgcctacggtatcagttcggtgccgactgtttcggcgccgccaactttgaaatgccacaacatttttctttgccagttcacgtagcaaatctgggcaccatttgatagcacaatttgtgctatttgtaaaaaaaaagttatggcatgtagcgctgaaaaagctatgaaaaagtcaattttttcaccatattttttttgtaaattgatgaaattttttgaaatttagcttactaattgtgaaccttaataactatcgcatcatatcaaaaatttaatttggtttataatgaaaaaagtcattaccaactgcgccgaactgggcgtttcccttccatccaccggtctttctattcctcagtttttttattaagctctccaacctcttcattttttcctcattttcccctcattttcccctcaaaaattgacccccccccccataaattgttttctgatgcccattgatcacaatggcaaataaattaatgcgcattgcttttgctttcactccaaattcaatggatgaatagtgcgngaattatctattatattattctc

SEQ ID NO: 92445 - DNA, 652 bp, Heterodera glycines
taagccccttaacttttgtcatcgtcaccagtccaattaaaatctcgtccttatgcctgcttcgcactcgaacaaagaaggggctcacaatcagtcatccgaaggcgcacggcgccatttgcaacttccgtcgcctccacccgatgattttcaggttagtcgtcgggctgtgcttttgtcatcggacgaagaggacgaagacagcgacgaatctccgtcaaagccgtccagttcagcagcagcaccaagggagaaccgtggcagggcaattttattgtccgaggaggaggaagagccgcagggggaggagacggaatggttggggaagaagagtgccgccagtgctggcccatcaaatacggaaaggaaacgcgaaaaaaagaagcccgaagcccatgggatgctgaagtcgttgaagctgaaggcgaagaagttgagggagaagcagaagaaacggcggagaaaggatcggatgcgaagtgacgaagaggagggcgaggcgatggactcggacgggtccaacgacggagacgtcgatatgcgcgcagacagttacgacagtgaggacagcgatgcgaacgaacaaatttccgcccgtcaattgaaattgatgcgcgaattggagcagaaatgtgtggaatttctgaatgag

SEQ ID NO: 92446 - DNA, 635 bp, Heterodera glycines
  unsure (1)..(635): unsure at all n locations
gtttatctgaagactttggcggtgatgagtcagcagcaatttgcggagagaaaagtgatgccgaagagggaatatcagaaggaacttactatggttccctcatggatgatttccactagcacgacgacaacagctgcggcgtcctcttcgaccagcgccgccagtggccaatcgtcgcccggccccgactcgcatctgccgcccttccaccaacatggcgacgtcggcttttgcgagttgccattggaggtcgaaggcaccagtaaattgggcagcgcactgctcaaacacaccgccacccgctcgtacagctccaacccacgggaattcttcaaatttggccgtaagccaaccattgccaagtcgcgcggcggaatcgaacagcaacagacggacgcggtcacaggcggtgccgtcggtgcgagcgtaggcgactccgcggcgggtccgtctggcagcagcggcggtgtttcacagttgcgctaccgcaagtcaggcggaagcggcatgggnagcggggcggtctggcgccgtttcaaaggacgcggagagcaggcgcaaatcgctgggcgcggccgccgcagccaatgctgtcgctgcgggcacaattctgcacagggacagccccgtgggca

SEQ ID NO: 92447 - DNA, 626 bp, Heterodera glycines
  unsure (1)..(626): unsure at all n locations
actgggactcaacccaccaacattccaatcaacgggactcaaaccaccagcatttcaatcgccaacacttcaacgggactcaatccaccagcatttcaatcgccaacacttcaacgggactcaatccaccagcatttcaatcactgggactcaacccaccaacattccaattactgggactcaattctcctgcattccaatcactgggactcaattctcctgcatttctatcactgggactcaacccaccaacattccaatcaacgggactcaatccaccagcatttcaatcgccaacacttcaacgggactcaatccaccagcatttcaatcactgggactcaatccaccagcattccaattactgggactcaattctcctgcatttcaatcactgggactcaacccaccagcattccaatcaacgggactcaatccaccagcatttcaatcactgggactcaacacaccagcatttcaatcaccgggaatcaattctccaggacttcaatcactgggactctactctattctcctgcgtttcaatcactgggactcagnttttatgcattcaaatcactgggactcattctcctgcatttcaatcactgggactcaaccctcca

SEQ ID NO: 92448 - DNA, 596 bp, Heterodera glycines; identical to SEQ ID NO: 82169

SEQ ID NO: 92449 - DNA, 644 bp, Heterodera glycines
gcgagattcaagccaccgaattcttccggccaattgactgggaccgtctgtacagaaaggaaaacgaacctccgttcaaaccccagctcaactccgattcggacaccagctattttgacgcggaatttacccgtgaagctgtacagctcacgccgccggcggcgaggactggtccgctggacacattggatgagatggacgaaatacagaacaattttgtgcaattctcattccatcaggagcaagagttgggtggtgtgccggattcattgcgcgaaaacagcgaactgatggaggagtaatggaggaaaaagtgatcggaataggagcggaggaaaaagtgatcggaataggagagaaggaaaagtgatcggaataggagaggaggaaaagtgaacggaatgagaggaggaaaagtgatcggaatgggagcggaagaaaaactgatcggaataggagaggaggaaaagtgatcggaataggagaggaggaaaagtgatcggaataggagaggagaaaatgacgcgagagtgaagggcatttgcgggttgaatgatcggcgattgtgaagtgaacagagaagttcaagcgggacgaaatagcataggcaaactcaaccaccacggaagaacgcaagcaaaaaa

SEQ ID NO: 92450 - DNA, 528 bp, Heterodera glycines
gcaagtactcgaataaaatcaaaatttttatgtacaatttctccaattttacaaaaggccattttttggaatgaaaatgatcttttttccttcttcttcgtcgtctttaaatatgccgctccttaatcgcagcagggggtttgaagcagcatgcatatcaacaacgagatagccatagggtttattagtcgcaatacgataggcagaaaggaaataatccagttttcccggaaaaagttgcactccaatgttacgaatcgccagtgcggaatttggagctcgcattaacaccaaatattgggcactgcagaaatcggtgaaaagaaatcggaggcttttggctggtgctgtcttggttttggtttgggcttgaggtggtccccactaattcccatagtagctgcagaaatcggagaaaagaaatccgaagcgcttggcaagtgttgtcttagtttcggtttgggcttcaggtggtcgccactaattcccatagtagctgccgaaatcggagaaaagaaatcggaggca

SEQ ID NO: 92451 - DNA, 636 bp, Heterodera glycines
cggaagtgttggagcccattcatcagttcgtcgtccaatttctgagctgcgaaatctgctccaaaaactttgataaaatggcgcgtgaagatggcattttgagtgttcatcgcccaggtgattttggcattttcttattgtaaaatcgtgggaatggggggaggcaaaacaacttttgaaaatgcgtagtttcaatattaacaatttaagtcattccgagaatgtcatgttaaaaattaacttgaccaaaaaccctcaaaataggtgtttaattttgaaaattcactttttgtgagagggggggggggctaaaaaacaaaacttatttcgctcattttttccacggccttccgtttaatgttttttcccaagaggacgtcattttgtggctgtggagaggtcacaataaagtgaacaaacggctgaagggcgaggccagcgaagacccgcacttcccaaaacagcaatttccaccgtccaaactttgttcggaatgtcggactcaaaacggagatttcgatgagcaaaaagtcctccgattccttttaaaatattattccgaagttcggacagaccattacaaagtgagttattcacaattgggattcttttcatttcgttaaatattaagccatc

SEQ ID NO: 92452 - DNA, 643 bp, Heterodera glycines
tgttcaccttttgtcaaatccgtcatcaccgataaaagacgcaatttgattctgtcgagcagtcaatttttgcatctcatttatccatttttcctcatcgcccgctgcaattggacaacgcatgagcataaaaccactttcatcttcttcattccttgtgatgacattgtcaaattctccccagtcaattcgttgatcatttcaaatggcaaaacggagccaattgaagaggacggcggaaagtaaacgcaaatgacgaaaacaacaggagaagaagcgaaggaaaatgcctaaaaaaggacaaatattaaaaaacgaattaattggagaaatcaccgctttgatctgttccacggttgccgaccattggtccacagctaaattctcaatgctgagccttcgaaaaattttcggaatgagtcgaaaacagccatttggctaccgcttggccatccgacgcattggcactgtcgtcgggcggaaattcaagcaaaattccgtcatagaaattgacaacgcgaggatgaacaatcaatcattgagcattgacgaaaatagatggatttcaactctatcagaatagtggtgtccttgaacattggccaaatgttgagcacagtgaattccgaaatgcgaacgtttt

SEQ ID NO: 92453 - DNA, 653 bp, Heterodera glycines
gaactagtctcgagttttttttttttttttttttttttttttttttcttttagcatttattactttaaataccgataaaaaattgcaagtaaatatatgaaatgtaaatgtgtaaaacacctattaattgctcattttccaatattgcccagttgcgtcttccactgtcagcacgacgtgactttttgccgatttgctccatttttctgtttctcctttcctccgtccaccgtgggacgacagttgtgaaaacgtcgatggatgcgcaaattggcggattgtgcgaattgtttatgacagaatggacactgaaaagggcgttcgccggtgtgcaccgtgcgaatgtgcgtcctaaaattgaagtccaacgaaaaacgctttccacagtcctcaaagtcacaaacgaaacgtttctcgcccgaatggaccaacaaatggcgcttcaatttggaacgctcaatgaatgagcgtgaacactgttggcaaatgtgctgacggggcccatggatttgcaagtgctttcgcattgcgctttgtttcacaaatgttttctgacatcctttgtaagaacaagggatcttctgtgtgaacagttgcgagctcaacattggctggtccatcttttgaacactttccgtccgattctttcgctt

SEQ ID NO: 92454 - DNA, 626 bp, Heterodera glycines
tttttctccccgagaatcggagcttaaccttcaaattaaaacaatcagaaaattaattttcacaaggggtggtggtggtcgactgtccatccacaaattttcccaaaaatgcccatttattaaggtcattagggggtgctcatcctctctctaatcccatttcgcgactacggatggcgcaaaactaacaaatccaatttttcaatttcccaattttgagagtgccccgcggggggtaaattttcaactttttgcctccccccccccgaaatttggcgttttgacgcaccggcaaacgattcgccacgccttttaaaaagtttttccgccaaatttgtccctcgtcggcgcgcactcttttcgcgcacatcaatggatgggatgggatgacctttgtttcttcattttccattgtgttgttgtttgggcaaccacaaattgcggcggggcgcttaatgtaacaaaaatgggttgggaaaaggacaaaaatggacaaaatggagaaaagggaattggggggggggggggaaagattgcgtaaatttaatttaatttaatttaaattatgcaaataaattaattaatttaaattataaaaaataaattttaatttaaaacttatgatg

SEQ ID NO: 92455 - DNA, 624 bp, Heterodera glycines
cactgccaccaaattcttcacgccattgtcccccgccgccgccgccaaattctgctgctcatcatcgcattcaaaagcctcaccattaccaccaccattcgctgttagcaatggcaccgcacaaaacttcgtcatttgaagcgcccacccaatcggagttgaagcaaatgttggacgaggcagaatatggctttgtgatggccgacaaaattggcacttcactgttggaacaaaacagggaattgcaggaaaagaacgaatttctggaggcatcgttggccaccagccgtgacaatgtggcacagctgaagcgccagttggagcagcgctgtgacctgttcaaaaagttgcaactccaactcgagggcatggaggaggaggagccgaacgggacagaccaataccatcagacgggaatgtgcagctcaacggcggcgcaattggagagcaaaattaaacgattggagggggaaaataaggaattgcgaacaaagacaaaggactcggatgaattgagagtgattgcggagaagcgcgaggagcagcggatcaacgagtactgctcacgcttgaggggagcaaacctgaagattggccaattggaagtgcaactcgcagaaaaag

SEQ ID NO: 92456 - DNA, 629 bp, Heterodera glycines
tagtcgtaataaaaactaattaattttttttttgaaaatcctagaagtttaaaacaaatgaaaactgcgggggagaatcggtttgttgatcccataaatattgtaaaatgggccttcggcgattggaattgaaaaatgcctcaacaataattaccgccctcacaacaaattatggttgtcgacctgttcgctgttaacagtgcccggggtgtcgaagcaccaattgcccagtttgaaggtgaagtcgttgaggttcatgttgggccgctttttcggtccattgccctcaatttgggcaatttcgtcggcattttccaattgcccatcgaagtatttgatggttttgtccacggacacgggctgtttattctcttcccattccttggaaaatgaaagcaaaattgttggcaagtgatgttaggcgaacccgaaaagagctgccgatgatcccttggagcacaacgtatttcggatgtttggtggtactgaaggccgacctcagcattagggactcctaaatacaaaaataagatgtagtaattgccctcttggtcggttgtaactgtcaggtccaaggcggacttttcctcttggcatttatcacggtctctaaatgtttgatggactgt

SEQ ID NO: 92457 - DNA, 616 bp, Heterodera glycines
  unsure (1)..(616): unsure at all n locations
ggtgtgttggcaatggcagcgaaattcatctccaatcagcgcggtggtcacaagctaatctacgagggccacagctacataaagcatcgtcatcggtcgacccccgtgggcgaagtcacttattggagatgcgaccaattgcatcgcctcaaatgtcccgggttcgcgcagaccaactcgagaagtgacgaagttgtggtcactcggtcgcacagccacgcgccgtcctccacccgaattgaggtgctaatcgccaaaagtgacatccgtcgggcggcagtgaacgcaattagtgcaacgcctggggcaatcgttgccaatgcgctggagggcatcagcgacgcggcaaagcatcagttgccgaagattgccaatctgaaaaagacggccacccgacaaaggaagggcattggggacggagcagcggaaaatccgctgccaagcagagaaacactgcgcaaaagattggtgcaaaactatcgcaacggcagtcaccgacggacaaccgntacagtaccaatgccacaaacatcgcattacgttgcttctgctgacccagcgctttcgataaaacaaagccaaagggcagaagagggacaatgccaaatggcaacga

SEQ ID NO: 92458 - DNA, 620 bp, Heterodera glycines
attatttttaatggcaccgcccgtcaaaaaaaagaaaaagttttcctccgacaatcaccgcctcatttcttctacagaaattggtgaacatgaacaacaatcgatgggttcacttacgacatcgtttggaaaacggcaaagtctttttcgacatgcaaagaaaatgaacaaccgaattttgaggaaaatctggatttgcactgatatttggatggacactttcccgttctttgaccatgcccaactcggcctcaaattggcactgatttcgccacgtttcgatgttttagtagacaaacatttcaattgccaatctgaattgacaatttggagagaaataacaattgtcaaggacacaggatcagaattaaatctaactgtactgattggtggcaaatctgtgcaatttcctttgcccgaccgttcgctgcccaacaaaattcgctttgataatcttaatattgattacattgaccattccgtcctcgtgtttctccgtgccaataagcaaatttgggacaaaggcaccaatttgagtttgtatgtgtgctggtcacacaaccagaacgacaacaacaacaatttcctgccaatttgggatgtttttgtttgtaaaattt

SEQ ID NO: 92459 - DNA, 633 bp, Heterodera glycines
cgagaaacggcttttacgacaaaaatgaggacaaagtgactctggccattgatgtcattgtggggcaagcagaaatggacagaccaatttctgctgatcaaagcaaatcgaaagggacactttttatggacattgaaaaagtgtcacaatttgcgcgagaaatcatttggagtgagcgcaaaagcgaaactgtgacgtgcttagggggacttccatggaaaatatccgttcaaatatttacgattgtgggaagtgccgtcaaatgtttgagcctttttctttgttgtaccgctccaaaagaaggtgaaattcaaataatcatttgaaattatatttaaatttaagacgaaaattggagagccgaatgttcggcaaaattccgaattgtttcgcaaatgagcggagttggggaattcagaaaggaatttgagcacactgtttttaatagcgaaacgaactgttggggattccccgatttcatcacatttgcggtgagaggccaatttgacattgcttaattgacctaattatgacaattaaggaattaatggacccgggccgaggcttatacgacagagaggaggacaaagtgacgttgggcatcgatgtgactgtgatgaaagagcgaaaggg

SEQ ID NO: 92460 - DNA, 636 bp, Heterodera glycines
actttctcttccgctttctgttcctcttccactttctgttcctcttccactttctcttccactttctcttccactttctgctcctcttccactttctgctcatcttcccacaattttgggtccaactgcgtctcttccggctcctcaacctcaccaaaattccaatccgcgcgatcatcaatgtcttcccgttgctgctggtcatcatcattgtcttcaccatcaattccctgctcgtcgtcttcccctgcgtccaatgcctccaaacagccggcaaagtcatcctccacatcaattggttggtccgtttcgtccattttctgctgctgctgttgttgttgctgatcagcatcagcattgttttgctcgtcattcatttgttgctgttgttgttgatcatttccgtcattcttaagcccctcaatttgttccatgttctccacttgggaagacacatcggtggcattcggtgccaaatcgccatcgccaaaaccgtcgccagcttccgctcgtttagcatccgcttcatcgccacccttttgtctgtccgcaattggaattggattgacaaagccgttggtcaacagatggcagccgaccgcgctccaatgggcatggaatgaggccaattgggca

SEQ ID NO: 92461 - DNA, 219 bp, Heterodera glycines
cgtcgttcgccatgaacactacttcttccatcccaatgggccccgttcttccgtgcattggccaaaacaataaaaagtatgaagtgatgaaaaagaagaaggagaaaaatgtttttttttatgaccttggaaacgaacaaaatggcgggtgaaaagcgaaaaaggccgccgagtttgtccgagaaaagtttttccatacaacggccggactggaaagga

SEQ ID NO: 92462 - DNA, 600 bp, Heterodera glycines
atccctgaaaaatggccactgccgcgacacaaagtgccacgatggaccccgccaagctgacgccgttcaagcagacgcccggcgtgtcggcctcgctgcgccagatcagcgcggacgctttctacgtggtcaacgaagtggtgatcaaacggcttgggcccatcccaattttgaagggtgacttccatctgttgcccttcaaagtgcaacgctttgtggcggagaaggcggaactgtgccggccacggggcattttcatttgtgacggttccgaacatgaagcggaggagatgactgacctgcttgttgagcgtggtgtgctgacaccgttggtggcctacgaaaacaattatttgtgccgaactgacccgcgcgactgtgcccgggtggagagcaaaacgtggatggtcacacgggagaaatatgagacggtcacccatacgcccgcgggcgtggagccgatcatgggccattggatgcctccggcacaattcgcggacgaattggacacgcgctttcccggctgtatggccggccgtattatgtacgtcatcccattttccatgggaccgttgggcagtccgttgtccaaaattggca

SEQ ID NO: 92463 - DNA, 631 bp, Heterodera glycines
acagcagtccctgcagctggacaacgcgcctgctcgtgccgccaccattctattcggtctcgggttcaagccggacgaccagcgctagccgacacccgagttttccgggggttggagaatgcgtgtggcgttggcccgtgcactgttcataaaacccgatttgctgttgctggaccagccgaccaacatgatggacatgcgcgctgtctattggatagagaatcatttacatgaatggcacggcaccattctgacagatgcccacgaccgcaaatttttgaacaccgtctgcaccgacattgtacatttgcactcacgtcggctggacgcgcacaacgagaactatgacgattttgacaacgcaatgcgcgagaaactgaccctccaacagcgagaatatgaggcacaacaacagctccgacagcacatccaggagttcatcgacgaattccgctacaacgccaagcgagcctccatggtgcaggcgcgcatcaaaatgctggaaaaattaccggtgctgcaacccgtcgagttcgactcggacgtggtggtccacttcaaagactgcgacaagttgtgcaacccggtgctgcatctggaccaagtggcctttcgctactccaaggaaacg

SEQ ID NO: 92464 - DNA, 651 bp, Heterodera glycines
ttcttcctgtcacaattgctgcttttgtttgctaccccttctgatggtttccgtccaaaatgctgcccaaccgccaaagggccgtctcggctttggcattgaccggggcggcactttcaccgatgttttcgtggcatatccggacggccggaccggcaccttcaaacttctctctgttgatcgtcagaattattcggacgcaccgacagaagcaatccgaagagttctgagtgatttcattggcatcgaattgacccgaggcgaacccatcccaaccgatcacattgcgtggattcgaatgggcacgacggtggccacaaacgcacttttggagcgaaagggcgaaccaatggcactgctggtcaccaaggggttcaaagatttgcttcacattgggaaccaatcgcggccgaacattttcgaattcgacattcgaatccccgaaacactttacgaagaagtggaggaggtggacgagagagtccttttggaggacgacacctgcgaaatggaaatccaaggccgaaaagtgcgcgcgcagaatggccaaatggtgatcgtcgagaaagagttggaccaagaacaaatccgtgccgttctcggccaaattttggcgcggggaattcactctttggccgtccttctccttca

SEQ ID NO: 92465 - DNA, 654 bp, Heterodera glycines
ctcaacctctatgagtacccgtcgttcaagtcgtcgttcatctgctgctaaggggtcacgtgagggcagcgtggcggggaagtcgaaaccttcggaaacggctattagcgactcaaagaagccgtcgaattcttcacccgagaaggctcaagaaacaggaaaaatggaagaggaaaagaagctggaaccagtcaccgaaacagagccagaattatcaacagaggatgaggaaaaatcaatagtggacgaaaaaaagaccactccggaaaagaagcaagaagaagttggggcccgcggtggagcaaccgctggaaatttacgttgagcacacagtgaagactgaaaaacttcatggcattgttcaggagcagtcacaggcaaaggattcggccagttctgatgctcccattgagaatggtcaacaacaaaaaaatgaagcgactataaatgaagaagaaatagtcgatgaagatgccttcatcattacaaatgagtcggaccccgctgcaactcacaaaatccaagtctacactttgagtgacagcggaattcccaatgagcaaaaagcaacgcctagcggaagtaaagctttggtatccgcaaaaccaatgctgggtgaagaagggaaaggggatgaaataacggtggtcaagg

SEQ ID NO: 92466 - DNA, 606 bp, Heterodera glycines
gcgaacgccggagcagagtcgcgacgtgttctgggacaacgatcacattgcgccgttgtattcgatggaagcggcgcaacgcaccgtccacccactgatcggatcagcgtcaaaaataaacatggcaaagggcaaaaaaaccattacgatggcgcctcataagagcaaactgagcaaaatggacgaacggacgcggctggcacacattcggctggtggacaccatggaacataacgtaaagcatgcggaggagctgaaggcggacaatgcgaacaacgaaaacaaagcgttgggcgaactgcgcaagagacaaaaaagcgggaaaatccgcgacggtcggcacatggaagggatgccgtcgacgcgaagggcacccgatttggaacgcgacgggttccatcgccttcgcgagagcagagacggcgaacattcgccgtcgcaccatcggccgaacggcacgagtctcacgtcgccacaccggacgaggagagggtccccttttggcgccggcgccttgcgtcagcccgacccattgagccaaggccattacattggcgaggagatgccgcagcgcgacttgaacccgtacatgggccacattcagcg

SEQ ID NO: 92467 - DNA, 330 bp, Heterodera glycines
ggtatgcaaaaaacaaccaatgcaaaaaaggcagtgatcactgatcagtattttttttgaattagcgcctaaattcgcttttggcattatgaatcattttgtctaacactggatttgatttgtctaacattgatttgaccaataattataccacctatgctttttaagattacgaattagaaaattaaatttgaaaattcttaaatatgtactaacattttcaaattttccatattactttctaaaaaattctctatagtgtcgaaattaccagccacgaaatttggtcattttttgacaaaaatctgttaacaaatggctttaaaaatc

SEQ ID NO: 92468 - DNA, 625 bp, Heterodera glycines
cacctctgctgttgtagttattgctgcgtatcccaccgtttcgctgcctgtctcttccgtactctccagaaggtctctttttgtctccccaattctctctggccggtctctgtttgtctcttccgtactctctggcaggtctcttctgtttgtctccccagttctctccagccgttctctgtttgtctcttccgtactctctggcaggtctctgtttatctccccagttctctctacccgctctctgcttctctcgctcctcattccgctgcttcactctctgctccagcattaccattcgtttcgcctccaatttctcgtctttgaatttgatctccgacgtacgcacgtccatccgcggcttaaacgcactcgaaatgtccgcgcgattgcgcaactcgcggatctgtggcattcgcaacagcccaaaggcattcgcaactccgacaatgttcaagtctaaacggaaaaagaaaaatgaaatggtatttatgagaagaaattgccatcatcagacaaaccgtcgaccctttcaatttaaatgggaaaagtcggcggaaagaaacagcgaaatttgttaatttctcggacaatgaataaacgtttctgttttggcgtacctttg

SEQ ID NO: 92469 - DNA, 408 bp, Heterodera glycines
atgggctgctgcgaatggaagtcacagccccggacaggtccatcatgttcgtcaaactgaatgcgaatgaattagacatttattgatgcgagtacttattctccaaccacgagaagttaaatggcacttttataaatgagggggaagcgtggaatttcgaagaacccaaaggggttttgcttcttttagaaaagaacaaaacaaattaattaccctatttagcaccacttttggcttttccatcaccctccccctccattataaaagggtcgtaaatgcccagaatttgttagctttccattgaaaaaccttggtcatgagcacacacagtcggtagtcccaaagttggatgactccgctgtgcagagaaggcaacacccaccgacgcgtgggaaggaaagaaatggc

SEQ ID NO: 92470 - DNA, 602 bp, Heterodera glycines
acatacggataaagtgaagtgaaatcaaagtacgagatcttctctccatctcgtgcttcatggtaaagcgttagcggtcccgtgcgcccgcccatgaatgcatctctgatcaacagtggtccatcatcaacgtattccgcaaacttttgccgcatctctttgcttctgctcagcatacactgaatttcgcattcccaatacacatccacgtgtgccacttgggagcgaatgaattccaggcgctttgcgtcccgctcgcgcacttctcctgccgactttccatttggtagcagcatgttatcacttggataacactttttgcacccgtgccacgcacaaccttatttttcaaatgaaacgcataatccaaaaaaaaaaaaaaaaatcaattaccattcacttcgatggccctccgctcggcctggatccatccatcaaggctgtactggccaatcctcttttctccttccggtgagtgagcggtttgaaccaccacaccgtgttcctctgcaaaccacttgaagaagcgaagtgccaaaaggctttggttctgggcattgtcgtagccccgctccggcacaatggccagatgatcggctgga

SEQ ID NO: 92471 - DNA, 638 bp, Heterodera glycines
tccctttcccccccccctcaccgtaactttaaaatgattgcttttcattttcctaatctaaaatttaacaattgtggttgatcaactgaactccttgccaaggtccgtgtctcgttgcgtgccaaggacttgctggacgcgctgatggccagtgaggacgtgaaccggtcgctgggcgaggagaaccgcagtctgtggcgcccggaatttgccgcttacatggtggagggcacgcccggcacaccgtacggcggtctgatgtcctgcttcaacattgtggagtacaacatgcgcttgcgctacgacgacgtgtccgcactgttgcggcccaacgagtcgctgctgtccatcagtttcccggcacttggcgcgcccgacttcaccgacccgccggcggtgccgcgcccgactcatccggacagtgtgggccgttcagtgttctacccggacgaggccatctacagcgggcacccccgttttcgcaaccttgtcaggaacatccggggccgacgtggcgaaaaagtggccataaatgtgccgatttttcgcgaccagaacacgccatcgccatttaccgagacctttgaaaacgccgaagcttcacgggctgcacttcccgaccacatttacatggacca

SEQ ID NO: 92472 - DNA, 637 bp, Heterodera glycines
gttgtattaacaaatgtctgtccgtcgggtcatttgtgcgatttcgggtggagttgacaggtcattttttgtggcatttgtcaatttggaatttgttctaatgatttccctttttgctttggtgctgtgagtgcgcttttgctcaaacgccgcggatttgatgtcgtcggcgtgcatatgacgaattgggaccctcaggacgaagcgagtgactcatcgtcctgcccacagagcgaggaccttacggattctgaaaagttgtgcgcttttttgggaatcaaattgcatattgtcaattttgttaagcagtattggaatgatgtttttatcaattttgtggacaattgctctttcggtcggaccattgtgcccgatgttggctgtaacaagaaaatcaaattcaaccttttgcgaaaggttgccttcgaagagcttggagcggatgctcttgctaccggccactttgccagaacttcccaaggggattttttggagaatcatttggctgtgcctaataaaatcaaattattgcgtgcgaaagatgcgttgaaagaccaaacgtatttcctttcctccctctgccattcccaattggaccgagttatgtttccggttggttcgctttacaaaagcgaag

SEQ ID NO: 92473 - DNA, 645 bp, Heterodera glycines
gttccgtcgttctctgttctccaacgacactctctacgacttcctccgttgcgtcgacaccgccaccctcggcctctccgtggccctctgttgccgccgtttcgccaacttcgctgacttcattttgcgtcgtcgtgcccactcgaattgcgcactgatgctttttgatggccaaaaccaaatgttatgtgcgaaatcgaaggcacagagttcggacagtgtttttgccgttcgcttgtgggactccgccaaagcaaacatcagagggcgagggtttgaacgccgtatttacgctaacggaatgactctttacaaagtgattgaccaatggttttgcaacccaattgaacaaaaggccttggaactgtcggagtttgaagtgccggaatggatcaccggcattcgttttctgtatttgcttgatgttgtctctcttcccgtgctgtcatttctccgtcagatttcgccaatgttggaaaagtgctgtattaaattcgagttgacttctttttggtcgaaattgcattcttccggccaacttttgccgtttctttctctcttcaaccctttgacattttctcttcatttgacttttgatgacctttattttcactccgttaatcgtcccaacccatacttcttcaa

SEQ ID NO: 92474 - DNA, 636 bp, Heterodera glycines
caacctacagcgtcttcttcccatgtgatcagctaattagctattaattaaccccaattaacaaaactgtcccctgcttcttctgaaaatggcccccaaatgccttccgcctgaacttttgtacgaattcgtgcttttcatccctgttgaagatgccattccgaatgtgctctcgtcctgttgcctgctttacaatattttgcggccacgtgtaataaaatgggaaaagaaaatgcaaaaacttattgacgaatttggcaaatttcgtcgcgattttgatggattccgaggcgaatttgatggattccgaggcgaagttcgtaccgaactatccacaatgaaaaatcgttttgaagttctggacaagccgtttggtcagttgcctgtcagccctcagactttggagcacaactgggcccaattcattgactatttggtgcaagcgaataacggagtgactgggcgaatggccactctgaccaatgctgtcgagcgactaaatgcgggggacagtgacgaggccgacaaattgtacggggacgtgacggcactggacagcgattgtaccgacctggcggagatggttcaccgaattgcgcagctgccaaatgtggcacaagcgacacaattggcgac

SEQ ID NO: 92475 - DNA, 643 bp, Heterodera glycines
gtttttccgaaatgataaatgggaattgtattttgcattgctttgaaaaaattttcaaattcttattgcgataataagtcagagctgggtagagtggcgcggccgggcgcggtggtcgtgctggcgttgggaattggatttcggaaaggggagggaaagggaaaagtgccacatattcccgaaagatgggtccacggggtgtgggttgccttcccacactcgctggtcacacaataagtggctttattctcgggacgactgagctccgttcgcttgaaaaggcgaacattaaatacaagtgaaaagtgaaatgtcatcgatcaattatcgctgggaggacggtacaattagtaaaaagggaaattaaatgcaaaaagaaataaatgtgaaaataatgaaatcctagagcttcggcagttaaacgagtaaaaacccgacaatttcgactctctcttacacctccaaccttaccaaagaccgtccccggtctcttaccaggattttcaattcacaattacccgaagcaaaaatatttcaaaaaaataataattttgctaatcttcatgcccttttccaattttgaatcaaaattttattcttcgtgccactcactcccaaccttacattggatcgtccctgatcc

SEQ ID NO: 92476 - DNA, 580 bp, Heterodera glycines
ctcatagctgttatgatcaatcttgactaccctatgacacatataatcactcatagatactcaccatgaatgttataagctaatataatcaatcataactatcccatggctgttacaatcactcatcaataaaccatggctgttaatcggtccttataatcccgatcagttttagaatttctctttaatataatcacatattcgattcgttaaataaaataattgccaaccttgccatgtttggcatactcaatacagtagcgatcagtgaatgccgaagcggtggcaaccgcccaacagctggcacatgttgtctggtcctgcaccttgttgacaatgtccgcacagcttggccacttggtgcgcacatcaaattccacatgatttgagcaccgggcacccagcctatggcgccgcgtgttgccgagaaaggcactgaccgggacggcacgcggtggcttggtcccgcgaagtccggtcatacgtctggcaaaattttttttttgggattttcaatattttttaatatattgaatggaataatcataatctcgcaaaattgattaatctactatataaa

SEQ ID NO: 92477 - DNA, 606 bp, Heterodera glycines
cgctttcggcggttccaacatcgagccttccgtccgttcctgcttcgaacataccaagttcccaccgaccatcaacgtggagcagttcctggattggctgcggaaagagccccagtcgctggtgtggctgccggtcatgcacagattgggctcatcggaatttgccaaacatcaggccaaatgcaacgcttgcaaaatgtttccgatcgttggacttcgctaccgctgtcttcgctgcttcaattttgacatttgtcagaattgttttttcagtcaaaggactgccaaaagtcacaaattgtctcacccgatgcaggaatattgcacaccgacaagcgcgggcgatgacatgcgtgacttcacagtgatcatcaaaaacaaagtgcgccagggcaaaagtcgaattggctatttgccggtcgaacaaataaacgaaggaccgccgctcgaatgcaacgaccaaacgccacagaacgcggaaacagaggcaatgcaccagcgaatgcagctgatagccgcgagattggacaagcggcaaaccgaagcggccgaggcttttccgaatgccattgtgccgtctgaagaagggaaagtgaagaacggaaa

SEQ ID NO: 92478 - DNA, 373 bp, Heterodera glycines
ggtgcacccaaaaagtcggcagagacgttgccacgaaacttagcagaaagccaaagatataattttaatttttggcatgccactgcgacgttttgtaaagctaattatatagactaaaaaaaccccaaatatgtggactaaaaaggtcaaaatatgtattaaaatgctcagaatggcaaaatatggactaaaaattacaaaattgacaatcattatcattggctaaaagagactattttcattgaacggtacgatttttatgtttcagacattcacttcggcgtggattatttcggcgtcgccaagtttgaaatggaataactttttcgttattcgttgaagttattaaatcttgcaaattttaagccaaggc

SEQ ID NO: 92479 - DNA, 601 bp, Heterodera glycines
gttggaggtgaaagtggaggacaaagtgcgcaatgagcgcgcaatgtcattcatcaaagtgaatgtccgagcagtgcctgaaattgccttcgaaagacacgcgaccattcgtttgttggtcgactcggcgctgtctccggtcagcgaccttttggacgaggaggccaaagggttggcgtctgcgctggtccgcgaagaacacggcgaaccctctcgccttgagttgttccgtcgcgagatggagtcgctgacccaggcatttgtggaagtgatctcgctgaagcccgacgagcagctgctccaacgtctttccacaaaagtggtggaccttcgcttcaccgctcggaacggcgacgaattcctcgaccccacgcatttgcacggactcgcaatgcgaaacagggagaggctggccacggtgttgagggcgcgcattttggcggtgggcgtggacatgtgcaagtggacgacatgcgacaacggatgccgtacggagaatagggcggataatagtgggcgttgtggtccaagccaaccgaactgtgatcgtcgggctgaacgcctcggcggctgatgtgtgcgaatgtcccgcctattctcc

SEQ ID NO: 92480 - DNA, 253 bp, Heterodera glycines
atcaatcggtcaaagtcccgcataaagtcttcgtcctccggctgcacttgctgctgttgagtgcgcacacggatgtgctgtgcctcgtcatcgtcgtcctccgctgtgatcattcccacttccgagacgtcctcatcctcctcctcgtcctcgtcactaaacatagaacgaattgcaggataaaataatatatattttttctcatcaaacaataatgcaaacgcaaaattttcgtaacaactttaaaacagaa

SEQ ID NO: 92481 - DNA, 650 bp, Heterodera glycines
cccattgagagggtgggcgaagaaaagacggttcctcccctccccacactcgcgcgggagttgtttattgtttacgtcggcggatcccgaattcctacctcacccaccgcttcacggaatgtttatgccaccgcataacggtgaagcaattattaaaaaacggacttcttggacaaggaagaaaaaaagaggatcaaatctcacattcaatcaacaaaataattggatgctgcaacacaattacaattaatttaaaggaacagaagaaaaagtaaatattttttcagaaaaaggacaaaagagggaatataaagacattttgtgttgctcatttgtcagcccattccatttactaatgcttttatgggcggaaagaaaagaccaacaatgagtgcgatgttaacaactcccttttttcgaacattgattatgcataaattaatagtccatttttggcactcgcacagtctttggccaatgtgtggggccaacccaaagagaaaatccctcaaaacagaggaagaacaaaagacgaatgggctaaatgctaaatggctgctccgcgcctgcccatcgcataaagttggcaaatgttgtgccagctgctgctgtaacaccatctagcacattatccatttttatttttggcg

SEQ ID NO: 92482 - DNA, 631 bp, Heterodera glycines
ggaacaccgggcaaatgctgaacaaccatcggttggtcatgagtgcttacggttgcaaattgggactctaaaacgagaaaagggatgggaagcttagccatttagacaatcccaacccaaaaattccacatttgcaaccccctttttgatcaatcctccctcaattactgttaaatttccatcttttggccaagtcccaccacaaaccccaatttccccgatttgcttctgatcacatcacccccccccccctaattacccccctccctaattaccgccttccgtttgacgactccccaccaattgggccaacattcgctcgatttggcccagcttctcaaacactccgtcgatgttcttgaacttcccctgcagatcctccatcattgtgttcgcctcgttttgcaccgagtgaaatgcttcgtcgtcgtcgcctcccctcgtcgattgtaaacggactgaaaaagcgatgaatgaaaacgcacatttaaatatgctcaccggcatgtctttcatgcattcgttgcaataattttctgattggatggtcatttggaatttccaatttttcgttttttcgccgttcgtccaattccaattcccttttcacgtcaagcacttttcggaattt

SEQ ID NO: 92483 - DNA, 641 bp, Heterodera glycines
atcgtgatcagatcaccattctttattcaaaatttaaataattcaaaaataatttacaacgacaaattttgaagaaattgaccaatgaaattaatggaatgtgattggaaatataggaaaagaggcacaaataaacagaaatcaattttgagacattttggtcacattgtttgaagccagacgaattttttgaaactttgcataaccacaagaacacaaatgtttttgtattgcctttatcattcaaaatcgatgtccatccgatttagaatctttttttctgtaaaatttagccccattttacgacaaaaaatcaccatttgttctttcccaatagtgatcttttggacaattaaattcatttcatttcgcccaataccaactcagtccatcccggtcgtctgttgccgatttgaattttaattggtcaacaaattgatgttttggcccgagaaatttggcatcttttcgcgtcaagcatttgccgcttggattttcataatgctgatcatttggacaaattgcccgactcatttcgccaacaattctctctgatctgaacctgaattcaagcagttcacttggtccggtttcccgatgtgcttgctgatgatgatgggcccaatacaactgctggctac

SEQ ID NO: 92484 - DNA, 614 bp, Heterodera glycines
tgcaatggatctcacacacctcaccacggaggaggaagccctctttcaacttcatgagcgtcgttgcacttggctttacgttgtcaacgacacactcaccgcactgcagggaaaaacaccgtatctgtacagacatgaaatgttgcagctgttccagcaggaattgatcactcagaagttggccaaatcactggacaagttgccgcagaagttgaaaccgaaggcattgatgagcacacttcgaatgccggagacacgcgattgctatcagtgtaacgtggaaaggagcatcaatgacgaaaacctttacctttgttgtgccgttcctcacgctgtgctccttttccaatggtatgaaccgctgtctcgctttgtccatcttaagcgagtccaactggacaaactgagcagtccctacaccgacctgcaacacccacacaaacccttcaatttggtcttcagatccggcgctgccaattccgatttgcccatggtgtgcattggcatttctcgggcgctcacttcgcctgtcggcactgcacaagaattgttgcgcgagttgcggaccaatctccaaaaggacaaattcgagctgcaactcgtcgactttaatg

SEQ ID NO: 92485 - DNA, 591 bp, Heterodera glycines
atgaaaaataaaaataattatttttaaatgaatgacaaaagtgagtacaacacaaaactgacagtagcagcgcaggtgaaactccgatgcagaatgtcttttacaaaaaaaaataataaaatatttttgcctcctttggcgtaccgtccgccgccaaccgcctaattgactttgcaaaattaaattacataattaggcataacaaaatgtcaaccaaagtcagtcactgactcgactgacaaatgagtgattttgcgctgttttctcccgccaccgttttaattgcattttatttttctgttgtgcccaattcgccgcgttttgtccttgacatttcgtctgcccaaaaaaagggggaggaattgggcaatttgtccaattttgcgcatttgcactttttttgcttcggttgggaatggggggcggaggacgcgcacctttcccgagtaattattgccgcgccactaattgggcagtttaaacaaatgatgcatgtgcccttgggcggacggacaaacaaagccataaaaagagaaattaatggaaaaaggcggggaaggggggatcacacagcagaatgatcagaatggg

SEQ ID NO: 92486 - DNA, 640 bp, Heterodera glycines
gttagggtgggtattcatgggcccgtcccgtattcatcctaattggggagaggctgagttcacttgcgacggtgtcgcatgcaggactccccgctccctggttacggtgtaaaattttagcatataggaatttggagtgggtgctcggaacggatattttcggcctggaaatggccgtggactttaccggcacatcagcatccatttgcacaatggatgcgttggaaggaaagccggtcccaaaaaatcacctagattttttgcttggcaatcagcagtttcgccgatgtaaattagcaatttttggtcattaaataaaatcatatgtattttcagtggccgcccgattgaatgccaccacaactgaaaccgatcgtgacataatgtgggcttataaaattagcgcaggacaaaaaaatcggtgggtgtgtgtgtgtttttacatttatgctaattttttccaacttttaggcagaacggcaacttgacgcattaattactcattttatgcggtaaaaaaaaggaaaggaggaagaggaggaggagaggaacaaccaagcaacaacaacaacatttaactcattaaaaatacattttttgatcacaccattcattcatttacattttcatttcaaaaaat

SEQ ID NO: 92487 - DNA, 636 bp, Heterodera glycines
gagggtaatttgccttaatttacttttacatatcatcacaattccacatggttttttccattttccggctttattccctttcttttctcctcttccttccattgtgtccaacctccgctttctacaaatacgactccagcttcgcttttttgaatgtccgtagcaaaagtttgcccaccggaggctccgatttctgtgtcaatttccaacaatggcacagccgtcaattgccatcgtcggccgacacaaaaaattttgtccaaattggctggtggaatagcaatttaaacacgaacatttgccttgaaaatgggcacaatttcgccaaaaatgaactcgttccagtcgattatcgaactctgtcctcggagcttttgccatgcaaatttaaagagggcgaggcggtggtcaatgccacgttgaatcgtcttaagccaaagggtgtgcgaaatgtgctgtttttgatggaaaagggtaaacgcaaccgatacggaattcgcgactttttgttttcgcaattttacaatgccgaaattaacgattccgacacttcgatgtccgtgtttttcgtttacaatgacacatttcgacaggaaatcgaacctttactactcaattcgtcttccactgagcttc

SEQ ID NO: 92488 - DNA, 617 bp, Heterodera glycines
cgcagtctcttccgactttccattctcgtatgggttttgctcaggcggtggactctttggctccggagttgggctcttcaaatgctgctccttcttccattccctgttcactgagtaacccccattaaagttgagagcgcgcgaaagggacggcgtgagcggcagaatatggagtttagggtggactgggtagccgggggcgttaattgctcggagttactggcagtggaagtagaaattttttgtcaatgttcaagcttatcgaggtcatcaggctgaagaattttggcccgggacaaacggtaaatgttgagcaggtcattaatgccatcgatcaacattcaacggtccgggagggattagctcggtgaaagcagcaaattgggtgaacgagggtgctgtcgcacgccgataccaattctgaatcattttttaattcgctttcttcaccgtgcaaatatggaagctgggcggtacatcatccgccaaagcaatgttgacgagtggcgggccaatgtacgaattttgagtccggaaggcgacgggcgggcaccgacaatgttgtccgacaattggtccctccgagctgtgcaaaatggacaagggaatgtcgccgc

SEQ ID NO: 92489 - DNA, 638 bp, Heterodera glycines
gaaaaaaaaccgctaaaaatttaatccgataattttgtaaaaatttaagagaaaatgcgatcaaattggagcaggagaaggagacaattctggacaaaattaacaacatcaaagcatcatcggcggctggcattaagccgacggcagcgcaattttcgcaaggcaataaatttttttttaaattttaaattctaaaaaatttcccaattttttttcagccgaacgtgacggactgatgttgaacatgcaacgaattttggccaggtgcaatactgtgaacatatcaattgaaacgccacgtgatcagcaccaattcaaggcattggagcaagtgaacaaggtgggtggtgcgattgttggtgccacactttttcaagcagtccaaccggcggggatatatgccagttttgaaagtccagggcgggtaggcatttgtgccaacgccatcaaaaacatttcggaaatcggcatttaggcggctcaaaattcggaaaccggattccgattctaaaatgatatttttccgagccatagggatcagatcaggacacaatgtgtttaaagttgcaccccaaaaatttggcattatgaaatttaaataaaaattacacaaatattttagaatttttagatccatg

SEQ ID NO: 92490 - DNA, 564 bp, Heterodera glycines
aacaacaatgatcaacccgtggctattcaagctcatcaccaatgccaatctgtacaacagtcgagcatttccaatggagcaaattctggcatttccaatgggacggcaccaatgccattgttcgagtcgaccccgagaaacgtgcttgttttcaaaggtgttcttttaaatcctttcaaaaaactctttcgttgaagaaaacgtcggacgcatcggctccgtttctttgacggtcacaaatcgtctttttcgtgccatttacttcaagatcaagtcgacctcaaatagcttttattcaatttgtccggaaaacggaattatccaaccaaaagaaaacgtcgaagtgattattaagccaaatgatgacagcttggccaatttgcaagaaataacgaccaaaaagcacaagttcttgatcatgtcggcaattgtttcgaatttggcagtgcaagcggaaaatttttggaaaggcaaaaagcacttctcagaaggtgtttattccaaaaagctgaagacgaaggtgcaaaaaactcatcacaatcagcaaaattccgaacaacggaa

SEQ ID NO: 92491 - DNA, 166 bp, Heterodera glycines
gcgatgtatttgacgtgcagcaccgagcggcccggctggatgatgtccctgccgctgaatagcacacggccccggccgcagtcgaacacggtcagtgcgccggagctgtgaccggcacagagccgctgctgttgcgggtcgggcgagaagtccaagcaggagatgg

SEQ ID NO: 92492 - DNA, 444 bp, Heterodera glycines
  unsure (1)..(444): unsure at all n locations
aaaaccgccgaattggcacatcggaggagagctgaaaactgcgcaagacaatcctcgacaacagcgaatttctctgcgaagccgtgcaaaggacctgaaggaaccaaatgaatatccccgaaatcggtggataatgaattttttgatnnnggcncccggaccggaagcgcaggcaccaagagaaataacgcaaaaagcaacaacaagcaagacgaaaaaaaaaaagcaacaaaaaaaagccacgcgagggtccgccgcgcgtccgcgcgaccaggtgggcgggggaggcgtagaaggcaggcggggacgcaagaggggatgggggggggaggcggggacgggaggaggggcgcaaaagggaggggggatggggagagggagggaagggaggagcagctgaattgcaacaggtgaggcagagtcacngaggcaaacaagagcgag

SEQ ID NO: 92493 - DNA, 632 bp, Heterodera glycines
gtttagtttcgcttcgcccttatgttcaccactcgcaaagtttgttcccacactcacaccgcttttgaagtcattccttcgccccttttgcccctctctcctccaaatccgctcaatcggcagcaaagagtgcggatacagctcggagctgatgagagtccccaaaaggccaaattggactcgcagccgcttctgctcgactcgccctcgtcgtcctctgctggcgcagttctgagtaactgcccaaggcgaaaccactcatatttgagtctgttcaatctcgctcatcctcagcactttgttggagagcatggctttctctcgtggagttccttgcgtaaaaaggcaaacacagaaacaacggaaaacggcgattttgccctttacgacaacgagccggcacacaattttattgctccgtatatcagcggctatacgacgccgggcccaatggaacgcgaggcgagcaaacacaaaaaggctaagctcggcgtcatgctcggcgtgtaccttccgaccatccagcacattcttggcgtcaccatgttcatccgtttggcgtggatcgtcggtgtcgctggcgtatcgcatacttttctgatgctcttcatttgctggctttgtacgtttct

SEQ ID NO: 92494 - DNA, 490 bp, Heterodera glycines
catcgtcgtcgccaccgccgccgctttagtcggccgattggtggtgccggtggtctgcgcctgttgaaagttcacattaccaatgggtggagaggggaggacggattattttggaaataaaaaaatattttgggcaaaaagtgtggttaaaagtgcgatttgcaaaggcatggattcatttagagcaattgaaaatgagtggtgcttcatgaagcgggcggtcaaagaatggatggacggaaactctctctacattttaggggtcaaaattgcgagactcggaaattttgaaattccgaacttttttgcggcctcttagaaccgcaatttcacccattgacgggggacaatgtttttccacccgttaattttcgctcagttcgcccaccctttggtctccgtcgtttgccacccgtccaattttgatcagttgcggtcgttcccgcacaacggaatggcacatcagcagaatggccgcagcgaatgccga

SEQ ID NO: 92495 - DNA, 639 bp, Heterodera glycines
agatggcaaaatcaccgaagaaatcgcccaccaaacgacacgtgagcgtcccttctcacaatcagtccttaactaaacggccaaaggttgaatttgccgcaattctcaataaaacgaatggaaccgcagacaaacagccgatgtcatttgagcacagattggcaaaactcgatggtgatgatggcggtcttcatagagcatccacgtcaagtggccacatttctgcccgacagcctggagcggaggcgaagtggccacggccagcgccggccaaatgggtcagagaggggcgaacagacgcgaacttggcctttcaactgattgacatcgacttttacatgggtccgacttttcattcgaatgactggtgggtgaatccgaggcaaaagaaggcggacggcacttacacacttgccgttccgttgatacaaacctcgaaaagcattgcctttttgtcctcattagcagagttggtcggcctccacttggctgaacaatcttgacaggacaacaataaccgtaatataaatgtggaaaattttgcctgccggggtttttggctgacaccctttatgagcaattttgaagcctgaacctatatttgaataaaaccaacaactcagaagttttaactttcaa

SEQ ID NO: 92496 - DNA, 597 bp, Heterodera glycines
aaattttttaaatattatacaatcgtgctttttgctctctattatttccctataaaaaaattcacttcccttcgaaattgaaggcagaatgctcatttgaagctacgcaaatataaattaatatttgctataagaactgactatttagtcaacagaaaacaaataaatcataaaattagaacaaaaaatgattttattttagaatgcacactgaagatgcataataagctaatatattcgaatttattttgaaataactgttcaacagattattagttgtttctaagaaataatgataggaagcttatctgaaatgtgtgctcacccaggtcggaatttttcatttcctgcaataaatgttttcatataaaggtttaaaaaattcgatcgggtttagaaacgttcaataaatgcatagataaattttttgaatattatacaatcgtgctttttgctctctatcaatttattataaaaaaattcacttcccttcgaaagtgaaggcagaatgctcatttgaagctacgcaaatataaataaatatttgctataagaactgactatttagtcaacagaaaacaaataaatcctaaaatt

SEQ ID NO: 92497 - DNA, 244 bp, Heterodera glycines
ggaggtgagcgccaatttccttcacaaagccatcgaagattttcgcccggatgagagtgtgcatttgctgtgcaccatttcaaaccaacagcggcaagaattggtacgcgaattcaaacaattgttcggggaagatttgtccgccaaactgaagaaggcactctctggtgactttgaggaactgattttggctttggtggaaccggcagctgtatacgatgagcagaaaatgcggcgagcgatg

SEQ ID NO: 92498 - DNA, 473 bp, Heterodera glycines
ctcaggccttccaaggcgaattgttcgggcgcaaattcgagttgtccccgaacgccattcggctgcgcattgtcaccgccatccgcgagtgcagcggcgtcaatttgggcgtcacaattccgtcggaggacatcgtccgctgcattatgaaagtgtcccattccaacgattacaaagcgcgttcgatgactctgctttttttcgcttcgcttggccgtttgatattcgacgacaaaaaggttcatatttttgtcattgagtcgctggactgtgccgatcagaccgaattttccgcggccattcgagcgggcaacgaattggcaaagcattccgttcccttttccgtcttggatatgaacaaaattgccgaactggttggctccaatagccttacccattgggtcagggccgaactgatggccgtcgtgggcaacctaagggacctttcgctgacaagacaatgccttgaactc

SEQ ID NO: 92499 - DNA, 539 bp, Heterodera glycines
atttatcatttcaatatatttttgtacaatttcatatttttgttctttctttctcatcaattcgttgttcttcttctttttcttcccatttttctccaaatatttcatcaaatgacttttgttccaattttttctttgctgatttaatttgattaattagggcaatgaaaattaaaattaaacaaaataatagagggaataatttcatttttttcaaaatattctcaaaatgttgtataattttctttttttttttccaatatgatttaattttatgaatgaatgggcatttattattcgtgaaatgattttcatattaataaattggatttttttttaattaaaacaaactacaaaatattacaatcgccaaaaaataaatcaactcattttttatttaaattttattaccaaatgctcaaaatattaaatgtaagaaatttttatgatttttttaaatcaaaatctgatagctttacaaacgaaatatgaaatccaaatctaaaattggcgaatccgttcaattaaaatgctatttc

SEQ ID NO: 92500 - DNA, 373 bp, Heterodera glycines
tatacatcccattatgaacgctaaaattatcagagtgccgaaaatcgcatgtgatctacgcctagaaaaaaatggtgtaagtaaaaatcgtaactacgctcaaaaagcttctcaaccaattttagcgcatccaattccttctacaatcgcctttatacatcccattatgaacgctaaaattatcagagtgccgaaaatcgcatgtgatctaagcctagaaaaaaatggtgtaagtaaaaatcgtaattttgctcaaaaagcttctcaaacaattttagcgcatccaattccttctacaatcgcctttatgcatcccattatgaacgctaaaattatcagagtgccgaaaatcgcatgtgatctacgcctaaaa

SEQ ID NO: 92501 - DNA, 610 bp, Heterodera glycines
cagcctctacaaacttgtcgatattggcgccaatttaggccatccatcgtttcagcccgattttgcggatgttttgaacagagcaaaaaaggcaggtatcgtaaaattgttgatcactggcgcaagcgaatcaatcacagatgaagcggcaaaattggccagcaaagagccggactttctctattacactgccggtgttcatccgcatgacgcaaaagatttcttttattgacgaacgttggatttccttcgctctcatttgaccacaaattcgcaatgtgtcgcggtcggcgaatgcgggttggacttcaacagaaatttctcgccacgggaccaacaacttcgggttttcgaggcccaggtccaattggcatgtgagcttggcaaaccgttgtttgtccatgaacgtgaagcgcaccaagaaatggtggccattttgagtcgccacagcaaatcgttgccgcccaccgtcatccattgcttcactgggacagaaatggaggccaagcagtacatggacatgggactgtacatcggactaacgggatttctgtggaaggaccgtgccgtggacggcgtaaaacacgcgttgcggcaacggaccattcga

SEQ ID NO: 92502 - DNA, 633 bp, Heterodera glycines
ggacgacgatgacgcaaacggaggcaaataaccgacagaatggaaaaagtggagcggacaaaagacgccaaaactcagcggaaaaaggacgacccgagacgggatatgcatcagtgttaacgacgaatgggtcggcgattttccatcggcacagaaaaagtctccaggacgacgaggtgaagggcaatggcagcaacaacaacggcatccatcagcacatgaaacaccggaacgattttgggagtagcacttcggttgaaaagagagagggactagtcgggagaaaatttggactgattaatggtgccattggcgcgctgctcaaccgatcggtcagcgaatcgaaggcccttaaccaacagcatcaaaatgggggcggacactacggaaagctgaaggcccaccaacaatttcctttttcccaatcatttcccgtgaaagaaaactcgaaaaagcaacagcaagcaccgattgctcagtcggagccatcggacacggactttgacgattcactatcagccacatcagcagtggagacgggatcaacaccaatgggaagtggcgcgacgaggacaccgatcggacaaggctcggcggagggcgacacttcgcaacacgaaaaacgaccatttg

SEQ ID NO: 92503 - DNA, 532 bp, Heterodera glycines
cgcggcttgagactcatcgcgtgttgacttcctttgtcggcaatctttgtgcgcccaaccattttttccgaccagaccacaacagcggccgtttctgtgtggtgtctatcaacacgcatgaagctaacagagagatggtccgcactttctttcacgacaacgaggctgggttcaccaaaaaatattatttctgcgaactgcaattttttcctatgaatgaattgccttgggacgttgccgtgttgaagttgtacgcagaaaccatgggacatatttgggaccccctttttacgtacctggacgaagtcatcacttcactggagaatggtgacatgccgccgtacatttccgaatcatcgccaaataattcggccaattcactcgagaatctcccgtcggttgaggcaccgcaatcggatgattagttggagtgaagacttttctggcatttctgttccttcaccaaaaatgcctttgttgttgttgttggcataataaacaatgaattctcaaaaaaaaaaaaaaaaaaaaa

SEQ ID NO: 92504 - DNA, 96 bp, Heterodera glycines
ccctaatttttgttgaaggccatggacgatcaaattttgttaatcgtattgggtcataaatttgttattgttgaaaaaaaaaaaaaaaaaaaaaaa

SEQ ID NO: 92505 - DNA, 367 bp, Heterodera glycines
  unsure (1)..(367): unsure at all n locations
gtcgtttttcctctggatgaacgaaaacaggcacagattctatcagccggggatgactcaggcggacgtggcaaaggccgcaggcgaggaatggcgtcgcatgtccagttccgagaaggccaagtggggagagaagtcggtggaggacaaagaacgctacgtccacgaaatgaacgaacagcgcgagaaagaagaaggggaggaagagggcgaatgagaaagagcgaagggacagaagatgagagagaggatatacaaacagaaagaatctttttggattccaaacttaattaatattaattggccatttcttttgccttttgtttctcaaataaatcattttgttnaaaaaaaaaaaaaaaaaaaa

SEQ ID NO: 92506 - DNA, 579 bp, Heterodera glycines
atgggaaagaaaatgtaattaaaatggaagagaaattgacaaatgcggagaaggaaattgtcaaactcaaggaaaatgcgccacacaaaaagttgggagttgtccaggatttggtggaccgtttggccatcctcgacgaaatggaacagtgtctgaacacgttgtggctgatgccgaccgacagcaaaacggagttttatccgctggcgaccacgcggacaattctgaggctgacggagctgtgcgccgcgttggaatcggagtcgtccaattatttggagtcgatcaacgagcgaattttgccacttctgttcgcggaaattgaaacgcggaagggcgaactgtgccagcaactgtccgacttttacgcatcgttcttccgattcactgaggacgaccgcgtttcaccaccactctattcgatgagcatcaattgtcccagcatcaaaacggcctctgattgtttctccgccatgcgtcaactcgatttgcttgaagaccgtttggaggaaatggtggacattatttgggagcatttctgtctgaaattgatttacgcggtcactgaggacggacaaa

SEQ ID NO: 92507 - DNA, 646 bp, Heterodera glycines
gtgcgattttgctgctttttcacattaattttcgcttttccgactttgcctaaattaatttttcctccgaattactttgtgcattatcgctttgttcttggtgttcaaatgaagaagttgtgcaggagtctctcccatgcgctccccgccgtgctcacttggtcgttaatcgtcggttgttccgccgctttcttctatgtgttggtgcccgcccttgttgtacagcttggcctcgtcggctacgtgctctgctgcttggatgttgtgctgtttgtgctctgtctgtccaatttgtgcctttccaccgccatggaccccgggattcacccgatcgccatttcatcggaggagaccagcgtcgacgattttcgttcaccattgtacagaaacgtcgaaattaatggcattacggtccgtatgaaatggtgcgtcacttgcaaattctatcggcctccccgttcttcgcattgttcggtgtgcaacaggtgcatcgactgcttcgaccaccactgcccgtgggtgcacaattgcattgggcgccgcaactaccgcttcttcttcctgtttctgctgttcctctctctgcacatggtctgcgtgttcggcctgtccctggcctacacaatgctcagccgccgggacattc

SEQ ID NO: 92508 - DNA, 471 bp, Heterodera glycines
cctaattacaaccgcaaccaatattttataagcattatcgacagtttgtcacagaagggacttctcgaagcgaatcgtcaaccgcccatcagtcactcgacactcagttttttgatggaaaggaaaaaggacccaatgtcaatggtcaacatttactgctcggcttcgggtgagcccaattttgagttttttgtctttcaacttgcagtcaggccaagcaaatttgttttcatttctgaattgagaagtcggcccgtttatggcttttgcgcagcgtcaaaaaaggaggccaaaaaggcttgcgcattgcgacttctcgacattttgatgacagaagaacgactcgaatgtgtcaatttgtccggacggaaagtgaggaaaatgccgccaaagccaattccgacaaaagcagcgaatgtcgaacaaagtcaacagcaggaaaacatgcacttgtcattctctgatgacatc

SEQ ID NO: 92509 - DNA, 545 bp, Heterodera glycines
cggttttcgaagtttctgtccatgtgggaacagaatgaactgcaacataacttctcagaagcactgaactccaacaatgtcaagacccattctcgacgaattaactagggcgctttttgcgcatctccgagggggaaatgcgtgctttgatgaagaaaacgaactcattgaactcttccgacggtgtccccgatgctcgcgcagtcttcgcccgatcattttggacaaattcaccgacgaaaaagatggtctttagtacgagcgaatgtggtggacatgtccgggcatagagcagaaggagtgtttcttccccctggacatccccaaggaggtgttctggactcgtcgctccatggatcagtcccttcgtggcattctccctttgcccaacctccatttgttgcccctctctttgcgcgccctttaccacaaactcttcaaaagcaaggtcaacattgagaaaattgtgcgcatttccgccttcgttccgtcggatggacagaagagtgccgtacaacaagcaaattttggtgccgaagaacagc

SEQ ID NO: 92510 - DNA, 578 bp, Heterodera glycines
tgtttaagtgctcgatatctgtttgttatggccggaactaatgctgctgttgaattggagtcatgggatgaaatggagattgacgaatcggcggcaacttttgcccctcgcgccgttcctgtcaccgaagatcggaccatcatgaagaatgtgatcgcatgggcaattgatggaaagttgaaatccctccggggcggggcaaacgacgaaaaagaaggagatctgtttaacgagttagcccaaagtggcgacttcatggcatggaccgtcttggcatactttgacacattgaagaagattgcggtggccgacactgtgaactttacggtcaaaacgacattgacacaatacttggcggcactcgacggggaacttccaacagctcaggcaaatactgtgtcagaaaccccgacatctcgcctgttggcccttttcatctcttttatctgcctcgccaagggcaatgaagcccgcaacaacccaaccatccagtccccggtctctcttgaaaatgcctcgattttccgccgatacagtgccatggtggcggggaagaacctgccaactgcaaacgctgt

SEQ ID NO: 92511 - DNA, 629 bp, Heterodera glycines
cccacttttgttcagtgcctctgccgggtcagcccgacattccgcacacgcgggtggagttaatgctctcggccagggatctgaaggacaaggatttgttgtccaagtcggacccaatgtgtgtgatttattcgctggtgccgggcaaaggcggcacggggcctgagtatgtggagatcgggcgaacggaagtgatttggaacaatttgaacccgcgatggaacaccaaagtgacgctgaattactttttcgagaccaagcagcagttgcgcttcgacgtgttcgacatcgacacggagaacacgcgcgacttgagcagccaggactttttgggccgctgtgagtgccatttggcggacattgtggccgccgcacacggcgtattgacgcttaagctgaaggatgagccaggccaagagggcaaattgatcatccgagcggacgaagtcgacgagggccaaaaagagatggtgcgcatggtgtgccatgggcagcaggtggcctccaagggcatttgctggtgcctttccgcgagggaccctttcctcgaatttcaccgcctctacgcggacggatcgaaacagctcgtctaccggacagaggtccaaactcggacggtggaccccgaa

SEQ ID NO: 92512 - DNA, 484 bp, Heterodera glycines
  unsure (1)..(484): unsure at all n locations
aattaagtcgtttattatggaaaaggacttctcaattaattgttacatcgccttttccaatcccatcttttgtcatcagaaaatgctgatgcggaagggcgagttcagcttcaattcacaagagcgttctttcacagcaaaaattcacaacaaaacgaggctccgcctttttccatgtgaattatgtgcggttggcaagaaaagatgtcctaacggccgatgtttgatcattcgctacaaaacgggtttttaatgatgacattaaggaattggtattgaaagaactcgaagagggagacaaactgaagattcattccgttttgctgggcattgccggatgaaattgacgttgaaatatcactttttcagggcttctgagtgtttttttttccaaaaatacagcaaatttggcaatgataaagttttgttgtttcttcaaaaaataaatttgagatcacgaaaaanaaaaaaaaaaaaaaaaaaa

SEQ ID NO: 92513 - DNA, 464 bp, Heterodera glycines
  unsure (1)..(464): unsure at all n locations
attgcccgccaactttgtgctccgcccgatggcccgtctgaaggtgtgggcccgtaaccagggcggcctgcacgccccgccggatcagctgatcttcgatggcgaagaatcgttcggcgtcggctcaaacgtgcaaaccattctctataatgcgcaaggagaagaacgtgccacgcacatccaacgttcaagccagacagctgcctgaagaggaagagagagataatgctgataagagtgatcactgggggacggaattttaaattttttaattatttttcgaaaaatcgaaaaatgcacccccccccccccctcctaagaattgattttcttttttaattttcaaaaaattccccttatataaaattgattttttcaatgaccaaccgacatttaaccattaaattttaacaaattggataaagtgacaaataatnnaaaaaaaaaaaaaaaaaaaaannaaa

SEQ ID NO: 92514 - DNA, 616 bp, Heterodera glycines
attaaactcgcttactctttattctgtattatcttattgtgctacattacgaattcttccgctgctcttggaaagtcgaaatcaattgcaaaactgcaaaatgacactaaaaacaatgaggtgatggtcaccgaacgcggcaaaatggttgttgacgaacagtcgcttgtcattgagaacccggagcagaacaccgcgggcatggagacagtgaacgatgagctcaaggcggtgcccagcggagggatcatcggaagtggtcagcagaatgccgaagcagcacaacagaaaccggtgccgagcagtgcactgaccgaaacggagggaccacgggactcgtcggcggtgacgaacggagggaccagcggaagtggaagcggtcagcatgaaagagcagcacctactggagcacaacagaaacaggggccgagcagtgcaccgaccgcagcggaaggaccacggtcgttgggccaacaggagcagcagccgcacgtggacaaagtcgaggcaggcggtacgtcgacatggatcattgttggctcgatcttcggaggcattggagccggagcgatcattgtttggatcgtcattagctgtgttaagagatgccaaagaa

SEQ ID NO: 92515 - DNA, 454 bp, Heterodera glycines
acagcagagaacggtggctgagccaaagaaacagccgcagaaagtggcagaggccgaggaattgccacaacagacgaaacagccacaacagcagcaggaagaaagcccaacgacgcaatgcgtacagcaaaaggtgcgcaaaccgaagagcctaaaggcactgacggagtacgaactatgcaagcaagaatgccgaaggaagcgcgaccaggaatcggcgaatgagtacatcgactatctgagggaagagctacggcttgccgaagagcgtgtcgaagctgaagcactgcagcagcagcaacaattgcaatacgcaaatggcctttgagagggaaggggcgaaggacaaacgaatgaatgccattgatggtagacagaaatgaagcaagaaaactgattttatgcagcaaaacatccggtgtcagccaattttaacgaaaagtacgatcaaaat

SEQ ID NO: 92516 - DNA, 205 bp, Heterodera glycines
ccgtgccactccagggcgggcctcggctcttattcggctgatcagcgagacaaatgaacgtgcactgttcaccggtgacacactgttcatcgggggaagcgctcgcttttctgagggcaccgcccagcaaatgcatcacgctctcaacgaacggcttgacactttacacgaccaaacgttggtttactgccaacactagtacacg

SEQ ID NO: 92517 - DNA, 78 bp, Heterodera glycines
cacttacctactttaatggttgcttagacgtaggtaagtgattctttctaaaccaagaaaaaaaaaaaaaaaaaaaaa

SEQ ID NO: 92518 - DNA, 632 bp, Heterodera glycines
ggcgctttatgccggcaacgaagaaaaaggcgcagcttgatcctttggtgaggcgatcgattgctttgttgtgggcttataatggcagtgatttggtccttttgacatttctgcctggagaatgtcgcttcgatgagtattgtcaggccaaccgaaagaattttcgggtgctcagtttgggcacatggttttccatcaaatatcagcgttatgtcaagtgcgagacacgaatcaacgttttggatgtgtcggtgctggtggagaaaccgccgcttgagacgagggttattgatgccgtcgtgcagttgtgcgtgccctttgtctgctcaagtgcgaatccctacactgatcagtacacctacaaaagctcactcggcaatattgtgctcagaaagtcgcagggcggtgggccaactcagttgctgatttggtgcagtctgcaaacggtcgcgtggtggaaagacccgatgttggcagaagttgtcatcagaaacaccgacgaaaggaaagtggcggaagaaagggacggatttggtggaagggatgaaaccacagcaaaaggaattgccacgccaaccaacgacaaaagtgcttctgtttggcggggtttcaaaccaaacatcaaagcaaag

SEQ ID NO: 92519 - DNA, 608 bp, Heterodera glycines
  unsure (1)..(608): unsure at all n locations
ccgcccaattctcgaataacataaaaataagttttggttagaattccttcgattcttatcattcattgccgatgcgagttcaaagtatcaaatcgtgcctcgtcgcctccgcctttttgtgcctcgtctccgcttttctcattggcttcgcctctcttaccccaggatggcgttcgataaaaggccaaattcgtcttctgcagaacccaccaattcgatcgttcagtgtcagcaccggcttattcggttttttgtgttccgaagctgaaaggacggcacaatctgccgatttgtgctccaattgggccaataatgtctctctcttcgaacggattgtctccattttatgtgtttttggtgtcttcgtcggactgttcgccttcctctggtcactggtcattctgtttgatttgttctccggttgggagaataaacctcggtgggctcttccggcattggcattttccactttttctttggcatcggtcgccgctgtcatttatttgttcagaggatgcagcgaanatgacaacttcgtctcccatttgacctcctccccgtcttcgccttcgtcgtctcccgtcgcaaagtgttccctccactacagt

SEQ ID NO: 92520 - DNA, 247 bp, Heterodera glycines
  unsure (1)..(247): unsure at all n locations
tttgctactgtcctcggcgccgcctgacgcgggtaatccgtgcgcatgactttgcgccttttcaatatttggcgcaagaatctctgagcgggtcgatgaagcagggcatctcacagtgttttaaatctgttttcccatttttcggggcgtcatctctctttcgtcgactcncattttgacganctgtttttgctgcttnatttgatcctggagaatcgctttctaaaacgattttccgcttcatttt

SEQ ID NO: 92521 - DNA, 529 bp, Heterodera glycines
  unsure (1)..(529): unsure at all n locations
cttttctttgccattttatggacagtgcagcgcaattcgaccaccatcagtcgtttggtggcggcacggcgccgacgagggtatcgacgggcggtggcattggcactgtttcacttggcaccgtcatgtacatttgcgtcgattgctacaggaaaacgaaatccggcccaaagacccgatccgttgccgggagtgtggttaccgtattctgcacaacaagcgcagtgccataacgatggcgtaccatgctcgataaagaaattcccagtattgggccttggtatgtggcttgtgggactgaatgttggttaagaaacaggaactgccatttanaaattgaaaatggaatgacaatccggttgagatatttgccaacattgctgcgtttcacttgcaattcgacgaacttcccaccgatccaaatgtgaaaaagtggagtgtgcatgtgttgaaattgtcctgtacgaaaaggcatttggaccgggcggagctgcacaaattttgggaaatgctcgacaggcacatttcc

SEQ ID NO: 92522 - DNA, 491 bp, Heterodera glycines
gaaaaatgatgcccaaaaatttttgcggcaaaacatcaaatttttctcccaagaaactccctgctcttctgctgatcatagtattgtcaatactaaattctgtgagctcttctcgtcgccaccattctcctgcttctggtcataatcggcggctgtcatcaatttcatcacccgccgttgcaaatggtggtagcctctttgaacatcgaacaaagcatcaaagtgttgccgcggctgatgagtcggccgggggttgtgccgttgttccaccatcgctttggtgcggctgtgacaagctgcagacacagtgtggcaccggacgattgtgcggccgatacaccggcgccatgcgaaatgagccgcttcacatcacactgatctatgaaagactgtgccccaactgtcaaaaaatcatcaccgaaaatctgatcgatggggaccaaaaattcaagaaaaacttgcgaaatgaatttgacccaattggcaatgca

SEQ ID NO: 92523 - DNA, 270 bp, Heterodera glycines
  unsure (1)..(270): unsure at all n locations
aaacccatgaggacgagcgcataccgccacactgcacttgccggtctggctgccgtcgcgctgatcaccgcgggctgcaccgatgacaaggacgtcgatgcgtcaatgtctccccaggtcggattgatctccacctcaacggttcaaaccccgccgcatcccgcggaagtaaagctcatcggggagagggacgtcgaggtgacgctgaccggcccgatcgctgctaagtacaaaataaaatatcgaataanaaaaaaaaaaaaaaaaaaa

SEQ ID NO: 92524 - DNA, 194 bp, Heterodera glycines
atgacgatgacctctacagctaaagtgtgaacattgattattcggaagtgatatcatcagatgatgagtaaaatatgtcattgtttaattgtattggctgcatttttgcgccttgtcggttattatgtgtattgtttttcatttatggaaaagtggaataaaaactcgactcaaaaaaaaaaaaaaaaaaaaaa

SEQ ID NO: 92525 - DNA, 540 bp, Heterodera glycines
accttttcctctttcagtctattgacatgtacatgtactctcgttgaatctaacacccaagagcccatcgccatcatgaccacgtccgcgacctgcatcttctgccgcatcatccgcaaggagatcccgtccttcaagctcgtcgaaaccgagcacgtctactcgttcctcgacattggtccgctttcgcacggccatgctctcgtcatccccaagcaccacggcgaaaaactgcacgagatccccgaaccgcaacttgccgccatcctgcccgccgccaagcaaatcatcgacgccctgcgcaaggaaacgggtctgtccgactacaacattttgcaaaacaacggtcgtgccgcccaccaggaagtaccccacgtccactttcacatcatccccaaacgcgaaaacggcgaggggttgggcgtcaagtgggtcccgtccgaaatcaacaaggacatggccaagttgaaggagttgcatgacaagttgaccgcgcagttgtaaaattggtcattgtgcgcgtgtgccaagggttgaaca

SEQ ID NO: 92526 - DNA, 614 bp, Heterodera glycines
caactttgttagtgatatgtctaccaactacaacaacagcaaccaacaacagtcagtttcaatccgttcatatcagaaccaaaagcagtccgttcctgtgcctattcaacattccgaggaaagccaatttaatgggtcgcaaggaccgcagacaattgaacccaatggcaatataaaaaatggttttctccaagagaatgatgtgaccttacagagacagcaacagcaaatggccgtcagttctccctctgattgtaatgctggattgggcaatggacaaaatggcatgcgacaacagtcgaagaaggtgttagcaacggcgacatttgccataatgcgcagcgacatcagctgcaattttctacgatgaacggccaaaatggcggaatgtgttttccatcgaatttgccatcagcaatgtcgatgttagcaaatgctcctcaaagacgaacatttttattcaattcggacatggcaaacaccgctgctaaatctatgcagcagcatttaaccgaagacatggccggttggcatttgcagcactgtcctattgctccctcaacttcacgtgcggcatttgaacagaaaaggacaacaataaacagcagcaacaa

SEQ ID NO: 92527 - DNA, 603 bp, Heterodera glycines
atattttgcaaaaactcagaatatgcctacggtggacatcccttccccttttccggaattttcgaaaatacgccacgcgatgctgaagaattgggggagaatttcaaattcagggaaagcattcctttgggcgaaactgatttttctgctgaagatgtgaacaaaatgattcagaatttgggccaagagtaccggggggacagctaccatttgatcactaaaaactgtaaccatttctctgccatccttagcaaggttctaacgggccaggagttgcccccgtggattaaccgtttggccaacatttccggttctttgccatttgtcgagcgatggatccctcaggaatggcttactccaatcgcccttcaacagtcgttggattcgcggtcgcgcagtattcccttacaaaatggcatcagcacggcggcactgagtgtcccggaggaaacgaaagcggacgtttcgactgattccaccgcaaggccttcgtcttacaccgtcggttggcggctgttccaacggcgcaaccccagctgcgatcaatcgtcgtcccctgcgaatgcgtcctcctcctcggcacccgccacctccagacagccc

SEQ ID NO: 92528 - DNA, 605 bp, Heterodera glycines
cattggtccaattacatacccaacacacattttttgatggattccaagtgcgtctcattgaacttttttgcgctcgtgaaacatgaacaaccggacgaagaagaagctgatgactacgcggatgagcagcaagactcggctaatacggactacaaaaatctcaatggtgcctcattgtcggcaccagaaatgcctcaaaatcagcaattttggcacgcttttccacccaacggcagcaatggttattgttacgacggtgccatgacaaattgcgacggtgaaaccaaagcgattccgtacgatgaaacgccgccgcccaaatttgtgtacacattccaaggccctggccgcggtcggtggaccttctcgtgccaattcacttctgccgacgcgttggacctgttcaggaaggggcacggaatgtaccagacaaagaaggacggatgccgctatttcttctgctcagtgaagcgatgcccgtacaaaatgatcggcattgaaaatgaacgccaatggtggaacatctatgacagaaatgcgcataatcataccgtcattccgattggcgcaaaaattggcgaaaagcgcaacagaaacgggagaaa

SEQ ID NO: 92529 - DNA, 462 bp, Heterodera glycines
cacacacgaacgcagtcccaacaaactccaacagcaccatgcccgtccaactctccaacaagctcaacatcacgtccgtcgacctcaagggcaagcgcgtcctcatgcgcgtcgacttcaacgtccccttcgccaagggcaccaccaccatctccaacccgcaacgcatcgtcgccgccctcccgaccatccagcacgccctcgccgccggcgcgcaagccgtgatcctcatgtcgcacctgggccgccccgacggcaagcgcgtccccaaggactcgctcaagcccgttgccgccaagctcgaggagctcctgggccaacccgtccagttcctcgacgactgcgtcggcaccgccgtcgaggccgcgtgtgccccgcgcaccgccaagggcgtgatcctgctcgagaacctgcgcttccacctcgaggaggagggctcgtccaaggacgagcagggcaaca

SEQ ID NO: 92530 - DNA, 597 bp, Heterodera glycines
cagtcctcgcgccaaagaaactcacctaaatacgagtcgaatatttcttttttaattggcgtgtggcttcaaaacagaaaagtgccaaattattttcgaatttgagaaatgaattccaattcgttgctcttctctctgttcactttactgttgagcatcgccgccaatggccatttttgcttcggaaaagccatgggccagcagcgctcgcgacgagtggcggctgtggacaatggcaattttatcgtcgtggacggatccgtcagtgttgtcaatggagtgatctccgggaatggctggtatttacatgacggaaaagggcggattttggaaaacgcggaagctgacgggccaaaacgggccaaattgaaaaattcctccaccaaatggacgaaaataaccgaaaatttccgcaaggaaattccaagggatttacaaggaattttttccgataggaccccacccggggagccccctcccagaattttattttaacaaaaaaaaagggcggagttttggatcaaataaaaaaagaggtgaaaaaaaaaaaaaaaaaaaaaagggaaaagcgcagagataaaaaaagggggggggaga

SEQ ID NO: 92531 - DNA, 480 bp, Heterodera glycines
cgacgtcgccggcggtgcgctcctcggcgtagcggtgggagcgtttttcctccgaaatgtcctccacaactttcggcccaatcgctactccgtcttggacacgcaaatgctcagttcggcggatggttggcaagacattgagggaatgccgaacggatcggaagcattgatcagcgaaaaactaacagtgccgaaaacaatcgtaacgaaagagcaacaaaaaagaccaatcggagggcaaagggcgaacgattacggaagcgtaagggaaatgagtggcggaaggagcgacggcaggacggagacggcacaaatcggctgacaacgatgactttcatccctcccttacaccacaagaaaaaacataatttttgtcccatttttctttttgctattgtccattttgaaagcgcaaattattatagttcatgtttagaaacggaataaaaaaaaaactataaaaaaaaaaaaaaaaaaaaa

SEQ ID NO: 92532 - DNA, 359 bp, Heterodera glycines
gtttgagcttaagttcttttttaatcttttcacagttcaaatggcagcttatagacccatttacaccaaggaaaaagaatgggtcaacacgggcacagcggacggagagataatggtttttcgaccgacgatggaggagttttcgaatttcagcaaatacatcgaaactatcgagcgcagcagagcgcatttatcttctggcgtttgtaaggtcattcctccgcccggttggcacccgcgtccgtccaaaaatccgtccgattactccgatctgaacgacttcgtcattcattgcccagtgtgagcactgcacattctgcaaaaaataatagtcatctgaaaaaaaaaaaaaaaaaaaa

SEQ ID NO: 92533 - DNA, 362 bp, Heterodera glycines
aaaagccgaagcgtgtccactttgtgtgcatggaccgcgcggagtcggaggcgcgccgtctgatgcgccaactgcggcgcggacaacgctcggtcaaagtcagcagcgcccagggcgagtccttctcggaaatgatggacgagccgcagcagtgctggcggcgccggaactgaacgcggacgaatgggacgcggagagtgcgcggagaagagtagaaattgatcattagtcagtcaacatacctaacactctccgataacttccccccccccccccgtctaatcagtgatcagtgtgatcaatgaccgtaataaaagtgccaattttattttgtttaaatgcaccgataaaataattgtagt

SEQ ID NO: 92534 - DNA, 199 bp, Heterodera glycines
gttacttgatcccaataaccaactcaggttcaagggaccgctgactgagtacgtgaatggccatctcccgctggcaaatccctcgcgggaggacgtttatttcattgtgaagacgacggtgcctaagttttattgcgtccgccctaactctggtgtgatcctagcaatcgataaaacccctatcaaccttatcctgcaa

SEQ ID NO: 92535 - DNA, 245 bp, Heterodera glycines
gttggcattgcttggctgcagcggatcaatggaaattgtggcggcgatctttccgtttttcggtgcgttcggtccgcccaacagttgcgatttggtgttccagaagtagaccgactttagcagttctattccgcggttcatcatgttctgtgcgtacgcctttagtgcgtacgtagcctccacatggaattggttcaggaaggcgctgcgctgcagcattttgcgttgctgttgagcgctgaacc

SEQ ID NO: 92536 - DNA, 402 bp, Heterodera glycines
agatgactttcctagcccattttatcgtttcgcttttgctgattgttccgtcattcattccaaatgtttttggagaggactgctgcaccaaatgttacaattccatgacgggctgtcttcagaagtgcatcattgagcacaagggggacccggcctgtcgcaagacttgcaagcccaatgtgtacaaatgcgctgccaaatgcgggccccactgtccgctaaattggacgacgacgacgccgaagagcggctaatgtggcgagggacgatcaaagaaaaagccattcattcattagcgagttaattaatgagttgattaaccattatttgtgcaaagctgttgttgatccgaaaaagtcatgaaataaaatgcttgtttaaaaaaaaaaaaaaaaaaaaaaa

SEQ ID NO: 92537 - DNA, 508 bp, Heterodera glycines
gttttcaaaagattcgaattttgcaaaagttgcacaatttttccatttttactgttcccaccccgccgctacccagtttttcaataatcagcacaacaaaatgaacgcaacagagcaacaacaaccacaatcacagaagcgggcacgccctgccgaggaaaacggcaacgatgatggcgcggtgttgacaaaaacgcagaaagtggacaacggcgatatacccgcagcaacagcaaataatgaagccagtgcgaacaacaacgtattaaaagccaaactgaccaacaatgaaaagcctggcggagcagcatcagctgatgaggagacggaagagcaagggcacgaggaagaggaggagagcgagggcgagtcgggcgccggcggagaggaggacgaccaggatgatgaggaagacgatgaacagggtgcagagggtgacgatgatgatgaagaaggcgatgatgatgacgaagatgccgagggggatgagggcggtgaacaggaggaa

SEQ ID NO: 92538 - DNA, 492 bp, Heterodera glycines
cccctcggggtacgacgaatagcgaccgaatcattgtgaaaggacgaacgcaacgcaaggcataggatagaactaagatgagagagaaagaacaagcatactaagcataagagataaagcagacggaaaggagagaagaaacggccattccttctgctgctgctactgttactggcgaggaaaccaagttcaaagtgccggtgcgacggaggcggtttttgtttaatgctaatcagctaattgctcactaattaccccaaataacaaaactgtgcctgcttctcccaacaatggtccccaaatgccttccgctcgaacttttgttcgaaattgtgccttttatccctgccgaaaaagccgtcccgaatgcgctctcgtcctgttggctgctgcacaaacttttgctgccacgtgtcatcaaatggaaagagataatgagcgacaatattaactttaaaaatgaaatccgggaagagctcaaaagaataaacc

SEQ ID NO: 92539 - DNA, 612 bp, Heterodera glycines
aagacacgaccatgggacgctcaaatcgccatgcagcccgccgcagtccgactgccggcctccgtaccattcccgacccacgcctcgaccctgcgaccgcccgcgtccactcggcgaccatgaccgacaccggcaccgcgaccggcatcccaatgcgccgcctcgacaatggccacgacaccacccgcaacagccggcgtctgcaggggtcgcccagcagcccactgagccgcgctctggctcggtttcaggccatgccccgcagcaagaagcgccgggcggtgctggttggcgccggcatcaccctcttcatcatcgccatagtctcgctcctggccacgtcgggcggcagcagcggcccaccctcggggatccttgatccgaaatcaccgcctttcaaccccacggaatccacggtcgccaacctgctgtcgtcggccaacgtgcctgacccgtcgcgcgtctgggacacgtacttgccgccgctgcttgttgagcggctgccggggacgccgtcgcacgccaaggccaaagatcacatcgtcagctcgctcaaggagctcggatggaccattgagctggatgcatttgaagactcgacgcccatgggac

SEQ ID NO: 92540 - DNA, 630 bp, Heterodera glycines
gtcaaccatcaacgttcatctaccacaatgtcgcaccgcaagttcgaacacccccgccacggttccctcggcttcttgccccgcaagcgctgccgccgtcaccaaggcaaggtcaagtcgttccccaaggacgatgtcaagaagcccgtgcacttgactgccttcctcggctacaaggccggtatgacgcacgttgtgcgcgacttggaccgccccgcgtccaagatgcacaagaaggagattgtcgaggccgtgaccatcatcgagacccctcccatggtcattgttggtgttgtcggttacgtcgagactccccgcggtctccgcaccttgaccaccgtctgggccgagcacttgtccgaggaggtcaagcgtcgcttctacaagaactggtacaagtccaagaagaaggccttcaccaagtactctgccaagtacgccgatggcgccaaggacattacccgcgaccttgagcgcatcaagaagtactgccaagtcgtccgtgtcctcgcccacacccaagtgcgcaaggtcaagattggccaaaagaaggcgcacttgatggaaatccagctcaacggcggctcgattgcccaaaaggtcgactgggccaaggagcacttcgagaag

SEQ ID NO: 92541 - DNA, 160 bp, Heterodera glycines
tgaacgctcgcccgtgaccgtcgaggtcaccatccacggtctcaagcctgggcagcacggtttccgcttccactaattccgtaacaacaccaacggatgtgtctctgctggcccgcactttcaccttgtcggtcacaagcgccgagcccccactgaccct

SEQ ID NO: 92542 - DNA, 474 bp, Heterodera glycines
  unsure (1)..(474): unsure at all n locations
tgagattataaaacgatggcaaaacgaaaatcgaagcgaaaagcgccgaccaaagtgaagtcaattgtggcattggagacgcagttcaattgtccgttttgcaaccacgagaatgtgtgcgaggtgaaaatggaccgtgaaaggaatgtcgggttcattcaatgccgcgtttgcatggaagacttccagtccaacatcaccgctttgtccgagccaattgacgtttactccgattggattgacgcgtgcgaggcggccaatcagtgaaaaacaaaagtggacaaatcaccaacagagaacggacattgtgtgcacagaccagggatcaccttattattcactgatcatattggcattattttccaacgcatttttttttgatttcctttttccattaaaagtcgtctcgtaattcgattttccccatttatgtgtatataaattttgaatgattaaaaaaaaaaaaanaaaaaa

SEQ ID NO: 92543 - DNA, 160 bp, Heterodera glycines
gcagcgaaacgggcgaatggcgcgcgtgctgcagacgcacggcataaatttgggggcattctatgcacatgccgactttttggacatcaacaccatttattccaacgacattgattttatgttgcggaatttcggaattgagggggccgctcgcacaatc

SEQ ID NO: 92544 - DNA, 346 bp, Heterodera glycines
gaggagcaaaagcctgctggtaagaaggagaagcgcgccgcagagaaagaggaaaagaagtcagaaagcaaggaagcagagaaaaaggagaatgaggagcaaaagcctgctggtaagaaggagaagcgcgccgcagagcagaacagtaagaaaggtgattaaaagtgagggaatgagaaacgcacgaaaagaagagacgcttttgaagatggtcccaagtcaaggactccataattaggagcaaagagggggcggttaagtgtaagaaacctcactcgccacaacacctgcggatgtgagcagaaatgatgctagtttttgctcaaataagaaaaaaaaaaaaaaa

SEQ ID NO: 92545 - DNA, 424 bp, Heterodera glycines
gcatgagacccaccttgttctctggattgcctcgaggagctctctgtgggctagcatcgccacacccgtcactctgccatcgctatacccggaacacagccaggtgaagcgtcaaatgcgcgacggagcctacgacttcggccgcctctccatctcggcctggactgactccatggacgatcgactacacacgacccagccttcgacgccccgatataacccctacaactccgtcttccgagcccaacatcgactgacccgaacactgccagtgcgctggcctccgacacccagtacagtcccacagggtcgcccggcccgttctgagggcctggcacagcctacaacgcctggaggcacacgacagccccgacagtctgaacagactggccatgccggcgcctcgttgcccgttccagaaata

SEQ ID NO: 92546 - DNA, 623 bp, Heterodera glycines
attttgttaaattgctatttttggcagaaaattttcatcaaatgttgcccagaatttgttgtagtagcagaagtttgttgctccggaatttgagaatttcccccgctctctccattcattttgcgatgcatcaaagcaccgtcgcgccgtcctccgccgctgctgcgcagagtttgggctgtaaaattgagcccccaaagccaagggttgacgccacgcgggcgaccgactcggacaaactttcgacagcaaaaaacactgtcacatgggcgctgaagggcgagggcattgctgtggtcaaaattgacatccccgacgtgaaggaaaacacactcaacgaggctgtgtcggacgacttgcgcaagacgttcgatgcaattgagcagaactcgtcagtgcgtggcgtggtgctgatgtccggcaaaccgaacagtttcattgccggtgccgacattggcatgctttcgcggtgcgcaacagcggaggcggcggcacgcatttcgcgtgatgccaaaatccattttgaacggatggaggccagcaaaaagccgatcgttgccgccatctccggctcgtgcatgggcggcggcttggagatggcgctggcgtgccactaccggatc

SEQ ID NO: 92547 - DNA, 565 bp, Heterodera glycines
atcgtgactcctggcgagcacctcttttcaacactcaacacgcactcgatccattcccacgcgctagccgccctttcctctcctcactactcccaccatgacccgccccacgacccgccgctcgtccctcaagttcgccctgggcgccgccctggtcctcgttgcgctcgccgcgccgcgcctcgcggccccccttccgaacccgcagcaggcctgccagggactcaacgacgacccggaagccggcgggtgctcgaccgtcggtggattcactgccccgattgtcgacgaggtggccagttccgaggccgcgtcgctcaagaagttcaagcgttcgcccgagcccgaggtctcgggtgtcagcgaggcgcctgccgtgttctttgagcctggtcaggacgacagtgatgacgatccggccacgctggccaagcgccaggccgaggcggaggaggaggaggacgacgacgaggccgatggagatgcagagttggccaagcgcgagccgcatgatgatgaggaggaacatgaccactttgtcaagcgtcaagcggccgaggccgag

SEQ ID NO: 92548 - DNA, 481 bp, Heterodera glycines
gtccaattaagttaaccttctgcttgctaattacgatggacgcggttggtactgataaattcggagtcgcgtggcgatcgcctaactctccgccccacaatcagtacccgcctacccaacgttggaggggtcctccccagcagaatgatccatcgattgctgaccaccaaccgctgccacgccaatgcgccgtcgttcctccgtcgctctcttcgcccgcccctttcgccgccgttgccccaaagtgccaattcggccccactcgccccccaatcgcctcagagcaaacgccggcgccatatgtccattatgccgagccaaactccgaacattttgccaatggcatctcttcgaattcgcactatcccctgaacagtgagcaccaatttcactgcaaaagttcgccaatggtcccaaaacaatcgcactttgatcagtcccattttgatcagtctcaacttggccggcaaaggtgcgttgt

SEQ ID NO: 92549 - DNA, 582 bp, Heterodera glycines
gctcttcggaccaacagcatcaacactatcaacagctcccgtcctgctccaactcgggccgaccgtccgacgcggccgaattttttggagtcgctgctgaacagtgctcactgcaccatgaacttgcacttgttgctgaacaacatgccgatgatgaacagcaacataatgacatgctgatgatgatggacggtggcagcggcggcgcacaatcgtacgatgtgccgtccaaggcattgtttgaggccgtgtgcaggacatttgaggaacgacgacagttcaagcggctcagcccgtcacggcgttcactccgacagcagcagcaaatgatggcattggacgaattggcacgggatgaggcggagacaatgacgacaacgctgcttgaagaaaaagatgtagatgaacaggcgacaccgatggcacatgatgaccgaacattgctcgtcggcggtggagagggacggggaacaacgacgaaagaacagcaacagaatcggaaccgagcaaacaccggcggcagcaatcaatcgacaccgacgaggcgaagggctggcacaactgctcattgtcgtgatgcgg

SEQ ID NO: 92550 - DNA, 498 bp, Heterodera glycines
acttttccatctctctgcaaaatgccaaagaatcgttggagatcagctgtttgccgggcacaagccaaattcgactgcgtgcaactgcggcgacatgcggcggttgcggcaccgtcggaagttccagcgacgacggcggaacgacggcatttgcaagcggcggaccgaccggtgccggggaagtggttctgctggacataaaaaatgagattgaggagttcaagaaggacctgaaattcctgcagttcatccaatccgacgacatttacaacatcgaacagttcatctccactttgaaagtgtaccatcccgtctccgagacaacgtttcgggaggaagtggcggcggtggtcgatatgttcatcgacgcggatcatttcaattactttttcactgatcgggacggcactttgaagtcgtacagctgctcgtacgtggccagcattcagcccgcctattctggcgtcatccaagcccaattcgctcgtcgttgtgctc

SEQ ID NO: 92551 - DNA, 163 bp, Heterodera glycines
tgcggcgttccaaagtggatttggtggtgctgctccaccatctgcgcgtgggcgtggtgggcctctcggtcgtgggcgtggcgctaccgcagggcgaggacgtggaaaggacgccgataaagaatgggtcccggttactaaccttggacgtcttgtcatggat

SEQ ID NO: 92552 - DNA, 479 bp, Heterodera glycines
gtttgagcgccaacaatgactcgccatgccaaaaatgcaaccgctgcttccgtctacacgtaccacgagcggagaaaggacgcgtcggcttccggttacggcacgctccatgaacgtcttggcaaggactcaatgaagccatttgattgctgttcgttgagcctacagccgtgccgcgaacccctgatttcgcctcagggcttcattttcgagcgggaggccatcctcaattacattctggaccagaagcaggcgtacaagcggaagctcaaaatttgggagcagcaacagcggacggagaaggaaaaacaggaggcggttttgcaacgtgaagaggaccaaatgaaggcaaagtttgcctcgctggaggcggccccggtgccgtggaagaccgaagtgccgcccgccacgcccgccggcaactcgcggcccccgaagcgggcggcggcgcgtgaagacgacaagtccgggccaaacag

SEQ ID NO: 92553 - DNA, 463 bp, Heterodera glycines
ttccttcttacaccgcttccggacgactgtgaatccgcccgagacgcaatcaacaaatattgtcccaacggttggatatgcgacagtagaactttctgctgctgggatgctttgtcctgcttatgacatgagcggagaggctcgctacacaaatctgtgggatactctatacgataatgttcatgggatctttttcgtcgtgtacagtacttactaattgcgacttgcagtggcccgggatgagttgtggatgttgttggaccacaaggacttaaccttcaaggggacccctttgctgatattggcccacaaatccgacctgaaagatgccgtcccggccaccgaaatccacctgaaccttggactcaatttgatcatgaaccgaagttggcacatcgtttccacgtgcgcattgaccgggtcgggcctcgtagaaggcatcgattggctggcgaataacata

SEQ ID NO: 92554 - DNA, 385 bp, Heterodera glycines
tgtcggctcgaaggttttcccctcgcccctgtccatcctccgttactctgtctccactttatatgccatctatgaccaattgaactgctcggaccacgaacaacgactgcttctactattggactgaccactcactcaaaaagaattgggcccttctgctgatgaaattgaccgacaaaatgaattcacaaaacttcgcgatttttggggattacttggccaacaatggcttttaagggtcacagtgacaaaagaccatggaagttcggatgcgcattatttggaacaatgcattgagatggaggaattgactcgagctaccgcatcaatcgctctcatttatggggtccattccaatctttgcgtcaatcaaatacgacaagga

SEQ ID NO: 92555 - DNA, 481 bp, Heterodera glycines
  unsure (1)..(481): unsure at all n locations
aggacgcggtggtggcggcggtggttacggaggtggcggcggttacgccggctatggggacggaggagggtacggtgcggcaccaaatgcctggggcggtgcaccgatgggacagccggcggcacaacaatggggaggttatgttggaacctacggcactccgagtggcacttacggtggtcagcagcagcaagcggcgccaatgggtggtcaatgggggtggcggtgctgccgcacctgtcncagcgcaaccggaacaaatgggttggcaacaacagccggccggcggaatggcctctgcaggcggcgcacaatggggccaacaacagccggtggacaccaaccaatacgcttggccatcaggcggtgcccagcagccccagcaatgggctaacgacccattctgagctgaagatgcgcgatattgatcgactataccttgaaaatggatgaaatctttttggcactttgccccatttaa

SEQ ID NO: 92556 - DNA, 615 bp, Heterodera glycines
cacaacttccttgaaacttagtgaaactttttaatttatgcctccctcctccccctgcattttcaaaaataatcgactccaataaaaacacatgtcatcgtcctcttcacacttgtgcaatgcctcgcgttttggccaacactctgtggacgacaaaaaaccaatgctccaacggatgttagacggagaattgtaccgatgcaacgacccgttggtgcagaccgagttggagcagaacgagttttggcttgctcgcttcaacgccgcgctttcattgccggtgacggaacgcaacaaaattctcagagaacggcttggccacctcggcgaagggagttcgattaggccaccgttcttttgtgatcacggcgaggatgtgttcctcaattacaactgttgcgtgttggacgtttgtcgggtggaaattggggacaaatcgatggttgggcccgcggtgcaaatttacgcggctgaccacccccgggaccgagcagttcgggaccagggctgggaatacggaaggccggtgagcattgggcgcggtgtgtgggtcggaggcggtgcggtcattttgccgggcgtgacggtgggcgacggcgcaatcattggagcgta

SEQ ID NO: 92557 - DNA, 481 bp, Heterodera glycines
aaaagactcgatgcatttctctgtgtcgccgacttgtcctccaaatcattagatcctattgccgattccgccatgcatccagacgccgcccatgagcccgctccggcaaggccatcactcgcaccacactcgctcgcaacgcccccagtacccgccgatcacaccagcaacggcatcaacgacgcagactcggccatcgttgcccgtgcgctgtcctcatcgccaaacgccccaccgggccacccggcatcaggcggcgactggatcgacattgatgcgcagattggcacccggctcgacccgccactgccgtccatcgccaacgtcctcatcacaggcggcgctggattcattgcctcgttcctcgtccgcaagctcgtccttctctacccggaatggcacattgtcgttgtcgacaagctcgactattgctcgtccctcaaatcgcttgccgacctcgaatcccggccaaattttgcct

SEQ ID NO: 92558 - DNA, 439 bp, Heterodera glycines
cctgtgaaacgcggtgccattcaacgagacgccggtgaatgcacgcaaatgtcagaccattctgtgcagattgctgtacttgctgcacacggggagaccattggcaagaccgaggacacacgactcatttttcgccatcaccaaactgtggcaggccaaggacatgacgctgcgcatgttggtctacttgtccatcaaagagttgtgccaaatgtccagcgatgtgatcattgtgaccagaaatctgacctaggacatgagcggccgtgacgacgtgtaccgagcgcccgcaatccgtgcgctttgacgtattctgaacgacaccggcatgctccaaggtatcgagcgctacatgaaccacgagattgtggacagaaccgatgccgtgtcctccgccgctttggactcatagctccatgtgatacgcaaaagacccgaa

SEQ ID NO: 92559 - DNA, 106 bp, Heterodera glycines
gtttgttctgtctgcaccccaccacgaattgctggcgatcggagaaaatatattttgtcttcattttaaaattgtctatttttgctacggaatgaacattttaaat

SEQ ID NO: 92560 - DNA, 224 bp, Heterodera glycines
atcaggcacaacttcacaataccagtggtcgcagtagcagcaatggggacagtgcatttgctcgccgtatccagcaacattttcagcctggcgacggtgcgcagcgtttgtacaaaatggtccagcagccatttcgggtcaaattcggaaatggcgaagttgagcaacaacgtgccggttcttctgccattcctccattaacaccgtttttcaaagatgcacac

SEQ ID NO: 92561 - DNA, 629 bp, Heterodera glycines
gtttttgtattaaattaataaaatggccacagaacagcagccgagtgataaagtgcttacaacaacaattgatgcagaagctgatgatggacgtgacaacaatccgatcagagacatacgccgtagagttcatttcagcgatcgctcccaaagggttctggacgactcggaccatttgctgaaatccatccgaactcgccgagcggcacctctcgccacttccatgtccatgtccacgctacccacctcgttggagcgcaacggtgatcaaagtctgcaggaccatgcgcggaaaacactgatcagagcgcagcgatcggtcagccccgaagagccactgctgagcgcatcaacgagccgttatctgcagcacaccccgaaatttccgagaatcgattttgacgattggattgaggaggaaacgcaagcgaaaaagccggcatggaaagtgctccaagagaatgtcaaatcgtcctacaacaaaccccgggcaaccgcggaaaggcatcgaaatttgaacgattttcaaagtgcacaaatggacaatttggaattcaatcgtgcccgacgacgacgcgaatcggcagaccttccgtttactgaacttacccatttggacggcgaaagct

SEQ ID NO: 92562 - DNA, 259 bp, Heterodera glycines
caattcgacaagcccctttttctcttcaactctttttggcactgaaatatgctagcgcaatggtcgtttcaagcgaatgctgcagctacagctcaagcggagacaggccaataaatgagcggacggacggcaaacaaaactcagccgaacgcggaaacggagggactggatgttgttgctgttttttttgttattgttgtcaaccgcccctttactcagataagatttgttgcaataatgatggaaaataaaaaaaaaa

SEQ ID NO: 92563 - DNA, 470 bp, Heterodera glycines
ccatttgaccggaccaagcgcttttacaacatcagcgactacataagcagtaagtgtttggtggtctctttcctctctcctttctgtgcgccggtgcggttgggccccaaaatttcgtttcccccacccgtttgagccaccgtcgtgtccattgcgcccgccagcgaagagttggaattggaaattgacgagaacgagcaaggcatcccggcgtattgcaggacttcgatcggaccacttttgaacacagcgaacacatccaatcgttgcgcgacaaccccaatttgtccgcccaactcggcgttccgttgggctgtgcccgttcctccggcctcccttcactcagtgccaaattcgccgctttcgtgcgccatgacagcggtggcatgtcgccctcatcatcggccatgccaaccgcgcaacagctgcgtgccgaacagtcggccaaattggcgatggcacacgtgcga

SEQ ID NO: 92564 - DNA, 590 bp, Heterodera glycines
catggtcaaagaaactgaggatggtcattaattggacgcattaactgaactagagctaaggtcatttgtgtttgcttatttattggtgataatgccttttatcataaaggaacaattccatgataaatgcaaaaagaaacgattattcctcttccaaatacctcttcccctttaggatccatcttcgccccgaagaatcgctctttttctttatcaacagcgttatcccccaggttttggttgctttaatgttttccatttatgaggtttaccctcagatgttttcctttcagacaatgacaaccatgggacagctctaccaggttcatttccatttgacctttaaaaggttttaagagggaagccaaacgagattcgaagtggcacaaaatcggcagttgtgccgataatccccactggttctttaaaacaaaaaatgggcaaattacaaagggacctttgcttttctattttgattcactttttttgttgcaagttttggtatgtcttttccaaatcgctttaattttttcttgggtttcaaaattaattcttttttcaggaccgccacgaggaggacttgttcatgt

SEQ ID NO: 92565 - DNA, 616 bp, Heterodera glycines
ctcgagtcaaacgatccgttgacaaagttttttgcgctttatctgcttcaacgaatgtgttcagccaacacttcgacgcggaaacccttcttcgcattgagtcaacctggtggacatccacgaaattggcattctctccgtgatgtcgccattgcgcacgtacgcaatgtccgaaatattttccaaatagccactcattgtaaaattctggtgcattcgccgggggttggaagtgcgtcgattagcaagtctttggccgatgcgtccgttttcgacaaatcggaggaagttgacgaagataatgctaataaatcattggtgaacagaaatggcagccttttgttgaactcctcgacgggctcaaccggcgtactgaacgaactttacgaggccaaacactccttttttgttcccccttcgctcaacccgcgctcagctgatgcttttctttccgaacgcgtccattgccgtcgtcgtctgattgttgtgccgcttttttgtgatttcattgtcaacagatgcaaagaattgctttttgctcctgcaccgattgtctcttcctacgacaccctttgcactttatatgcaattaaagctctttccaaagtgatctctc

SEQ ID NO: 92566 - DNA, 596 bp, Heterodera glycines
taagaaatcagcaaattcaatttaatttttctacctaattctttaaaattcttttcttttttccaccaaaaaatggtgtttttcatttgcgaccaatgcggcgagaccatgaagaagaagcaggtgctgcagcacatccaccggtgccgaaacgcgcactattcgtgcatggactgccaagtggtgttcgacaaaaacagttaccaagggcacaccaaatgcatcacggaggaccaaaagtacggaggcgcgagacatgtgccaaaagtgaacaagggtgaacaaaagcaggacgcctgggtgtcgcaagtgcgtgccgccatccgtcaggtggacgagccgcggctgaagaatttgttgcgctccgtccaatgccacaccaacataccgcgcaaggaggccaaatttgtcaactttttgcaaaattcgttgcgcattcgggaccgcgcgttgtgtgtggacgcgtggaatgcaatcaaacgggcggcggacgcggaggcggcaaaagcgaaacggacaacggcggaagacgccgttgtaacaacggcgacggaggagaaggagacggcggaacacaacggcgacgacgcggacaa

SEQ ID NO: 92567 - DNA, 621 bp, Heterodera glycines
cttaagcgcttacacattttttgccctctctctctgttgcgctatcacaacacaattccaattcgtcaacagctccttttccctcatcgacgagatgacttcttcaagatcgcgaactcgtcgtacgacttcaactgctgcttcaaccgctgctgctggccgtagtcggagccgttcaacacatacgggtcgtcgttccgcgagcagaagagcaaccggcaacagggcaacgggtcgttcaccgtccgtcaggaacgcgtctcgccgagtgtcgtccgcgaagaaaccgtctcgccgacgtcgccggattgtggcgcgcagagccacgccaaagaagcggttcaagtcgaccaagcagcgtggacgtccgagaaagccacagcgtggacggagtgcgcagcggagagttaccatcacgcaaggagtgttggatgtgcccggtcgtggccaaatgacggaagccgagctgagagaaatcttcatggcgggcacggaggcggcggataaacgtaataaaatgatgttttggtcaattatcggcctcctgttttttaaatgtattcatctgtttccctataaatttatcctccgtcaaatccatccatatttatataatttcac

SEQ ID NO: 92568 - DNA, 473 bp, Heterodera glycines
cttgaagagcaacgcatcgaagagcaacctcttgtcccggaccacgaccaccaccggcctcgtctctgtctctggctctggcccgctcccgaccaacccccgaccaactcgtttctccccacccaactcaacccgccatcatcacgtaccatcaacttcaacaactgcaacctgcaacctgcaaccatgtcctcctccctctcgctccgtgccgctaccgcctcatcggcccgccgcgccaccgccaccgtcgtcaccgtcaccgcgacctcgcgccgagccctcgccacggtcgcctccaccaccaccgccgcgcccgccgcgcccgccccaccccgcaagtacggcagcctcaaggaccaagaccgcatcttcaccaatctgtacggcttccacgacttccgcctgcagggcgccctcaagcgcggcgactggtacaagaccaaggaaatcatcctcaaggggtctgattg

SEQ ID NO: 92569 - DNA, 517 bp, Heterodera glycines
gtgcgctcaaccgtccatctggtcatggtccccgcaacattcgtgactacaagtggactggagacgacccgaccatcattcccgccgaggccgttctgctcttgatcccgtcgcttgcccgtggcccgcatcgcgatcgggccaaggctttcgccattgtccgtcagcgacttgccgagctcggaatcaaccgcgacaattgcgccgacaacccagcgtatccgggttggcggaagtcgtgtggccagaacggctggtggctagcgacgttgtctgcgttcgtgcgggacatcttgcctgtcttgcccgcaatgaggaaggccctcaaatgtcgggggtgcgaggcttgcagggccgcgcatgtctaagtggtcaagaatgtgcctgatcgtggccattcgcattgcttgcagacatatgatttgcttttgttgccacatcgtgccgagttgtccgcggtgtgtcggtggaaccccaaaatagttgtcacaatcgaagaaaaaatggtttcatcgaa

SEQ ID NO: 92570 - DNA, 216 bp, Heterodera glycines
atggcattcgggtttgtgccactgaatgcttttgtggcgatcactcggagaaacggaattgttttggtgagaaacacaacgtcaaaatattaccatcccgccagaatacacatccttttggttgatcaaaacgccatttgatcaattgttgttgttgttaattttgtttttttttgcaaaatttgaattataaaaaaaaaaaaaaaaaaaaaaaaa

SEQ ID NO: 92571 - DNA, 624 bp, Heterodera glycines
ctcgtgtttaagccaaacgcacaaatgggccgaccatttttaccattggcattttctttggttttgctgctgctggcggtggtgatcagcaccaattgcgcaaatgcttctccgatcgttggagaggaacagcccatggcaccggaacaaaaagcgacaaaaggcaccaacgacggacaaatgggcgacgacaatcggaccaatcggcgcaataacatggctgctgctcagcatcaacagcagaaccgcaacgccacatccttggtggcacttggctggttgggcttgcgtagcggcgcgagcagcgtcaacgcggtcaacgtggcgtcatgttacgacagccgactgtccagcttcataaacgacggcctccgctattattcgattaagcgtgtccgctactcgggctattggtttgtgcatgcggcaatgatcggcggacaaacacagggactccaatggcagtcgcaatcgaatggggacatttttgcgcagacgagtcggcacggatgctattaccacgacacacagacatacatcataatcatccgatactgagaaagaaaagaaaggaaagtaatgttatgcgaatcaaagaaacgaagtgacagaaaaatttatttt

SEQ ID NO: 92572 - DNA, 627 bp, Heterodera glycines
ctgaagatgaaaagtgccggtgccaccaccagcagccccaaaaacagcatctccgccatcaacaacgacagcggtgccgtcgccgctttcgctgccgcaacgccgccgacgaaaattgtcgctgccgccaaaccgtcaccgccgccaccgtcgcagcagcaacagcaacagtcgatccgcgtcagcagcttcatctcttccaacagcagcccgttcaacaacaccaatcagtacaccaactcgaacaggggaaccaccagcagcaccaacaccggtggtggtggagccaatgccatgagcactgtcagcaacaacaacacaaccagcaccaccaccgtcggcagggacctggcggcgacgacggctgcgaccattgcggctgtgccagcaaatgtgaaggacgacaaccgcgacgacagcaacaataacaacaaaagcagcaatattgccaagccgtacaccaacccaaacagtgccaagagcatcaccagctgcggcagggacgtggcggcgaccgttgcggctgtcgcgacggtgaaggacgacaaccgtcgcgacgacagcaacatcgccatgttgacgaacacctgcaccactggcaagagcaccagtggcagcggcggcgac

SEQ ID NO: 92573 - DNA, 618 bp, Heterodera glycines
gcgatatatgcgagatgcaaaaaagacggtgcacttttacgaatgcaatgcgcagggacaaatggtccatgagaagatggtcaaggattacagccgatcggctgctgatcaggtgcccttattgtaaattgaattcgatgtttggacagaatgttgcatctaatctctttgcttttcccttttaggatactccactcgcacatgagcttcgtccgctgaagacattgcaactgacaatggattatctcattttcaatgttcgcattggatttcccaaattatttggccttaaaatgacagatcgccggcgaaattccgtcaacttcgagcaatgatttggcgcgatggtacgactttctttggtcgaggacaagagcaatcagaaaagtaattgttggatgattgtaatatttattaccaaacctcaatggatgcttataggatataacgcagcaaatgttaaacaatgaaatggccgtggatttggttgagaaatgcgctcggcttcacatttttgcatcttttggacttgttgaactcgaagcggatctttttgatcacaaaatgaacacgggtattacagggacgtagccaggattttggtctggggggtggtac

SEQ ID NO: 92574 - DNA, 536 bp, Heterodera glycines
gctaagcctatgtgcaaattgtctgtgttgtatgagttgctattgtacgttttaccgtgacaccaatttcacaagagagcaataccatcatggttgaatgcaaataaaaaaagaaatgctaattaccggggcacttcctcactcaaggaaatccaccaatcattaatttgaacgacgccaccaaaaacccccaaaatcggcgggaatggcagggccggacagacgcggtccccttcgcgccctcactaccaaatgaaagcactcaaggccgcactgagtcactatttcagcccaaagaagcgctcccccggccgtccggcgcaaagaaaagtgcaatttgatgatacatcatcacattcggaagggtctgatggggaagaagttgaggaagaacgaaagtcggaaaaatgggccaaatgcgattccaacagaagcgatttcgccgctgtcaaatgttgctttgaaaaattggacaatcatttgccttggaagttcaaaaggaatctaaacggagaaacattcggcagacatttctc

SEQ ID NO: 92575 - DNA, 611 bp, Heterodera glycines
cctcgtgccgaattcggcacgaggcaataaagaaaaagaatagcttgggaatattcaattttttttataaagcagaaaatcgtgtaaaatggctaaaaaacgattaccattgtcggagaatcagcagccgactccgccgaagagaaaagaaatgctgcctcttcagacgtggttcggaacggacaaacaattcgtaactttttctgtcaacgaggatttgcgttgggccgcgagttcgaacaatccctcgacgagcggtgacgccaaaccaaacgaaaagcaaatgatgccgaaaagggacggcggaagtgccaatgcatcgcaacaaaaggcggtggtggaaagcgtgttctgcgcgccctcgcaactccagaagaatctccatgcttctgtcctgtatttgatgtctttgcgtgacaatgaacaacaacatttgttgcgtttgctgtgtaatcatccgattttgctgtatcaaaaagtgttggaaatgtccggcgacttgcaacacaaaggaaccaaaaaggcgaagaaggaatttgtcaacttttccggcgtcatttgccacttccccactcgctacgaactttgccaatgtcgaattgaggactcag

SEQ ID NO: 92576 - DNA, 400 bp, Heterodera glycines
gtggcccgtaccagaaagagatttcgggaggggagggacccgaagagctttttaacgaacttgggttctccccgaacatactaaatagaatgttaacgaatgggacttggtagaactctgggacagttggactacactagcatcagacgcaaacttcgaagacaacagtcgtgttggaaccataattctccagctgttagccgaaaattaacaatagcaaattgaccatactctacacgataaaagactgaattcttacaaaattatttacacataaacattcactcaattattatacagtagtcgtaaacttattcgttaatttaattcatttacaaattagcacataaaagtgtcaaatcgtacggaaatccgtgccattttcgcgcctttctctcct

SEQ ID NO: 92577 - DNA, 625 bp, Heterodera glycines
gagatttcctagcacagcatgagcgattatgacaaattaaaattgtctccttcaaaacttggcaatctgcagatccgccgaacgcaacgaacgaagaatgcgcgtgtttacaaaaaaatggcgaatggaaaagaaaattggtatccacttccggaggaccagctgcccgccgaagttacatcattccgattcattgaaataaaatacgtcgatttggatgtcattgcctttctgaaccgaatccaaaggttgctccaagatggtgagatgactttgcgcgttcggatcttccaccatcagcgacgcagcttgcaaattttctgcgcccaaatttggccactcatcaacaaaaacatcgtcaccgccgttgtctacccatcgatttggctcccaccgctccagcaggacaacgcgcaacaacacaccacgctcaacgacctgcccaatctgaaattgctggagtactgtgacgtatcgcccagccaggaggtgatcgattggctgcacaattcgagcgcggacggacggccgaaggcggtgcgctgcgggttacctcgtcaaatggtcgacgaactccgagcgcgatttgttgctgcatcatcgccgacaattttcattgttttgg

SEQ ID NO: 92578 - DNA, 374 bp, Heterodera glycines
tgccttttcatgacataaaagcattaaagatgaaactgtggttagccatccaaaacaaaacaatcgattgggcctcacaacatctccacacacaataatatatacttgttgagcaagatactacacgttactctctctcaaagaaaagaatctaaagtagcaaaactttaacaaaagagcttcaaatttgcttcggaccttccatttacacaagctcctacctcaagcaaaaaaaacaatcagagagaagatctaaagctctctcaaacaattccaacacaaaaatggaaacttctagaaactccaccaactcatcactcttccaatggttaggtcttctagaagattctgatcagcctcctgattctacccct

SEQ ID NO: 92579 - DNA, 359 bp, Heterodera glycines
  unsure (1)..(359): unsure at all n locations
gtcaaaatgaatttgttttcattgactccattggtcctctgttccctactttttgttggggcacctgttgtgcaaagtgccggaaaagttgcgccgccgccgccaccaccgccgcctccccctccgcctccagcgtacgagccaccagagccgccaagctatggcgcccaaccgccaccccaaccagcgtattagcctccaccaaagtcgaaaaagccgaattgatgagaacgagatgagaaacaacattttcccaattttgaagatgattaaatttctttgtgctcgattatttaacaaattatgaaattggctgtttaataaatatttgaatgacnaaaaaaaaaaaaaaaaaaaaa

SEQ ID NO: 92580 - DNA, 439 bp, Heterodera glycines
aatattaccacggcacggtggcactgtttgagagggccttgcccttaaggacaaactcaaaacaatggtttgcacacttgttcaggacgtgtgaaacaagaccgatgaggaaactggtgacggaaccgcttgtgccactgtgttggtacgtgccatcacaaaggaagggttcaagaacatctcccaaggggctaatccggaggaggggcgcaagggactgatgaacgcaatggacaaattggccaaggaactgaaggccatgagcaaaacagcgacaactcccgaagaaatcgctcaagtggcccctattgcaacgaacggatacaaaaccatcggaaaactgatctcggatgccatgaaaaaggtcggaaacaagggtggcatctcggtataggacggcaagaccttgttggacgcattggaaatggattgagggatg

SEQ ID NO: 92581 - DNA, 366 bp, Heterodera glycines
gttgatttggcggagaaaaacttgagcaacccgcatcggataaagaagatcctcgacgggaaactatttccgatgaaagcgctcggctatttcggcgttgtcaccggcatggacaagcgggacgcgagcattgcggagatccgcaaatacgaggaggacttcttcgagagttccaaactctttagggatggcgttttgaaggccacccaaatgacgacgcggaatatgtcattggcggtttcggactgtttttggcggatggttcgcgaatccatcgaagcgcaggcggaagctttccgcgcccatcgcttccatttggagaacggaaggaaaacaacttttgcgcaccaccccgacttgaccagg

SEQ ID NO: 92582 - DNA, 491 bp, Heterodera glycines
tctgttccccggcagttcgaccatcaaccaaattgagaggataatgaactcaattaaccgaccctccaaacaagacatcgaaagcattgggtcaacgtacgctgcgtcggtgctggacaaaatgccgcaaagacccaaaagaccgttggatgcgctgttggcacagtcattcccggaggccattgacctcatcaatagattgttggtttttgcaccgcacaagcgactgaacgttgagcagtgtttgacgcatccgtacgtcgtccaatttcacaacgcatcggaggagccatcgttggattacgaagtgaaactgtcgttgccagatcatattcagctttctgtgcacgaataccgagaaaaattgtatgaaataatttcgacacgcaaaataaatatccgacgcattcaatacgacaaattaacatcgaatgaatgcgaaggccaccagcggaaacaaatgatgacgaacggaagtcgggaagagaaca

SEQ ID NO: 92583 - DNA, 588 bp, Heterodera glycines
ttatgcgcgatttttattcgcttttaaactgtgataaatccgcatccgctgaacagcttaagcaagcgtatttccaacagttgaggaagtgccatcccgacaaaaacaattcgttgcaacagctcgacccatttttggatttggtcagagcttggaaagtgctaagtgacaccgttgcccgtgcaaattacgactgttggctctgcgagcagcaattccgtgtggacaaggagttgatttttgacgaaatttggctgaactcgtcggcgccgtttccgtcttcgccggtgccagttggtggtgattttgaggaggagtgtcgctgtggtggcatttatcaagtgtcggccgaggcggttgaacagcttgcgcttgactatctgctcgtggactgttcaaactgttcgctgactttgcgcgtttggcgttgtgccgcctctccgtctccaccccgtgaagaagcgtcggcaatctccaaggccaacgcttaattaagccttctccaaaatggtcgtcccctctgcgctcgccccaccgttttttgtcgtccatttgcgcccctttcgcccgcgcgcaatgccctcaaaa

SEQ ID NO: 92584 - DNA, 334 bp, Heterodera glycines
atgcgtttgctgtgctgttgttgctccaacaatgcacaacatcatcagcccatcaaccgggaaggacaagacgaattaaactgaagatttgatttttttgaacgcccgaaaatgaatcatatggcgaagatttttatacaaaattggcattttaaattttttttgatcccacattttttgctttatttttcttcgttttgcaacattttttcttctgcttttcctattctcgccttcttatacaaattgattgtttcaccttctcagaaaagaaaaattcttcttttataaaaaaaaaaaaaaaaaaaaaaaaaaaaaaaaaaaaaaaaaaaaa

SEQ ID NO: 92585 - DNA, 500 bp, Heterodera glycines
attaagtgctcaatgccaactgcgccttccataattgctcatcgtcatcatcagcacaacgaccgaattcaaaacgggcacaatgccaatgttgtcgtcgccacaaatggcaatggcaacaacagcagcagcaacggcaacggttgcgcaccgatcagccaccaccgatcagcagcagcgaacagggcactcgcaatgccaaacgttgaccaacaggcgaaaatggcaccgacatcgcgtaaaaaagggattattggcacgcgcgatattgttgatgcaaaattgtcagaaccccggtgctgttgtggccttgtgcagattaggcacgtggccattgtgttgggtgtcatggaattcatctttttcgccactcagctgatcgtttcccttgttgaccttttcggcaccgccgacgacctttggcctaaatccgcttccaccctgtccatccttctcacaatcatttcgctgattttggccattgcagctgcaatgcttct

SEQ ID NO: 92586 - DNA, 629 bp, Heterodera glycines
gtttgaggcgtccgtccgttatgaaaatgcttttgggcgctgctgccattttggcatttgcttctgctgactttgtattcggtggtggcaatcaaatggaatttgatccgacggcgccgatgttccccgattctcagttcatcgatttgatttcgcgtgacatcgaatcattctccggcccaatggcttttggccacaaatttatgagcggcggtgccggcgaaggcgaccaacagctcggccccgacggacccttcgagcatcggcagcaagtgaaaagtgacagcgtactgcccgcttattgtgagccgccgaatccgtgtcccgttgggtacagtgaaaaggacggatgcatggaacagtttgataatacggccgaattctcgcgcagttaccaaggccagcagcagtgcctatgtgaccaggaacacatgttcaattgcccgtcaaaggaaaacgccgaagagtacgcgcagggcctggagcaactgctttcgaacaacggactgcacaaatcaatgatcgccaaaaagttccatctgacgcgagcggaggaaccgcgccgtcggaaacgctccgtcgcttttgttggcccggcacacgcgacgcacagccgctacaacccgtac

SEQ ID NO: 92587 - DNA, 386 bp, Heterodera glycines
  unsure (1)..(386): unsure at all n locations
gtccaattaagttttgccatgcttttcctccctctctcccttttgcttttnctcctccatcgtccctttgccaatgccctcggctgtatgtncgccgtttgtgccgccggcggtccctccccctcttnccatgccgtcaatcgcaccattcgttgcncntccgaatctntttgtggccatttncgcgctttgcggcgaaatgaccaatttgncgaggcggtcgacctcagttgtcccgaattctccgtggtgcgngctccttctcgntggcgaaatttcggcttatcgtccgatgggagagagccgagcgcaggaggngacaaagggcgaatgtgtgccggatcagngagttcagatcgacggccgaagccaatggcagggcttat

SEQ ID NO: 92588 - DNA, 409 bp, Heterodera glycines
gggccgtaagaaccggatacgtggtacctacgagaaccatgaccagttccgatagctcaccttcatggaagatgggccataatacgcccaggacgtgaatatgctcgacaacggacgtctccaggccctgtgctttgaccgcgctagcatctcgccaacgtcctccgcaagatgcacaagatggtctggatcaaccatgggtgaccttatcctcctctccctccacgacttccagaacaacaagggagacatcatcattcagtacactgcctacgaggcccgaactctcaagtactaccgggaactccccgagaacgcatggatcgacgagaccgactcgtgcttccggtgttacgatggctaggcctacttcgagtttggtgactccgactcggaagaggagtccgac

SEQ ID NO: 92589 - DNA, 322 bp, Heterodera glycines
attctcggacgacaatgtcacgtcgatggtttgtgcaaaaaacttcaccgagaacagtgatcagatcaaccacatcaactacacaccggacggctctttgctcgtcacttcgactgccgaccactccatcactgtgtacgactgtgacagcggcaacaaacatcggtcggtgaacaggaaaaaatacggcgtcgacctgatccatttcgcacacacaaaaaccgacgcaatccatgcgtccaccaaaattgacaacacaattcgctacctgtccctgtacgacaacaaatacttgcgctattttggagggcacagcaaaaag

SEQ ID NO: 92590 - DNA, 583 bp, Heterodera glycines
aaaaatcattagcacaccgacgaagatcacaaaaggtttccgtttcaacggtgctgcaaaaaccgttgaaggtttctttctctttggcactcactaagccggactcatccagctccgaaaattgttcttccgatgagccttccattcgcaagaaaaaacgacggagtcgccgggtcaaactaccagtaaagcaggttgtcattccgtcctctgtcaaaaaagagacaaaaattcaatcgcttccaaaggaaacaacaaaaagtcaaaaacccaaaaaggaaagccaaacgcagccaaaaagccagaagaaatctcaaaaggaacatcaacaacctcaaaagaaaagtcaatcgcctcaaaaagaaagtcaaacgcctcatccgcctccggtggaggggccgtcggtctccgctttggtgccgaacactgcggactgcaaaaggcgcgttaattttggcaacgtggaagtgttcagatttgaatttgcgcaagggcacgacactgtgccggccaaaggaggcgtctctttgggaatgcagaacactcaccacgcgagacacctctttcagttgagcgaatacac

SEQ ID NO: 92591 - DNA, 608 bp, Heterodera glycines
ctgatgtccatggcgtcgccggttatgccgcaacatcaacaacagcagcagcagcaacatcagccgctgggcaaggagtcgtggcgtggcagtcagcgccaactgatggacatggaggtgcagcagccgaagtatggcggaggaggttaccaccagcagcgcgggatggaacgtgacattggcggcggtggtggtggctacgatatgcgtcgcagcggcggcggtggttacgactattttggtgcttccgccggcacgtcatacggcggcggcggtggtggtggtggtcatgggatgatgcagcaacagcagccgcctccgctcggctcttcactggcgtccgccggtcactacaacacctcgctgtacggcggaggcggtggccgcggtggtgccgggccgacaccgccgaagcgccatcgctacgcgtcgccgcaaccgccgcccgtggagcgcttcttttgaggagcaaaatggacggacaacaaatggacagacgtgcaatgtgtgagagagagaagaaaggctgagatttgggagagcagaaaaccaaaaaaatggttggatgaataaatggaaatgagtttttgcgcgtattttttgcgtcg

SEQ ID NO: 92592 - DNA, 630 bp, Heterodera glycines
gtccttcttcctccattaaaaattcatttattttccaacgaattaaattgcactgcgctagttctagatttagccttctcatcaccatttgatcgggccatcccatcaaatgacggatgatcttttcgatcaaccgccgcattcctagtcttctccctccattaagacgaattcccccctcactttttcccgcaccgatcagcatgctgttgatcccttccttccctttggcactccttccttttgctgttggccttccgtctgctggcattcgctctcttccgaatgtttcccccctctcccattgcttcggtctcagtccgccacggctcaaacgacaaaagtccgtcgtattaaaaagtgtggggacggaagaagccgagccgattgtccatagtgggaaaagcatttggattggtgcagggaagtaccagttctgggacagtgccgcttcgctggtcggccgtgggagttacgggattgtgttccgtggtcaccaatgtttctcttctgatcggccggtggcaattaaacgaatgcgtcgaatgaatgtccgtccggatgaattggaggcgatgaagcgagttcagaaccaaaacctggtcactttgctggacgtgtgcgatgacg

SEQ ID NO: 92593 - DNA, 630 bp, Heterodera glycines
gtgagcgatcagtggaaaagcgctttcttcgagattatggcgacattttggtttttgacccctcactaatgaccaatccgaaatcaatacactcgattatcacaaaatcccgaaaaagctgattgatggatccatccaaaatccgataatggctccacttgcctgattctgtgcttcgtcaaaagtgtgcgcagatggactgaccatattctggggaattgaatccaaagtattaattgctaattagttaattaattaattattaattctaattagtctcacccggttgataatttcgcgcacccgcgagtccaaagacacctccttgggtgacagaatggagatgaaatcctcgtagataatacgtgccttaaattggacaaaacattattatcggttcatcaatcaatcaatgatcggtgccataattgggccaaaagcattatttatgaccatcatttctaggatttattaactaattgatcatttctagggtagtccggggagaaccggtcccgagtgggtcaagtaattcaatttggcgtagaattataaaatcctgaatctcaagccccgatcgatcccggctttccttgtcccgatttttgatgaaaatcccggcacacggct

SEQ ID NO: 92594 - DNA, 611 bp, Heterodera glycines
cttcagtcgattcggtcaagtgacgaacattcaagtgcaatatgaaggacgaactgattctgctttggttacattcaaaacgcgtcgggaagcgatgtcggcctacaaatccaccgaaccactctttaataatcgttttgtgaaagttttctggcaaaatgatgcgaatggaaaagaaatagaaaacgaagatattggaggaggaaatgtaggagaaattgcctctactggtccaacaattccactcgttgactcaaatgctacaaatcggaagacagttttgaaggaacccattcaatttccacgttactttaccaaagtgtttgcacaacagaagaaggaaggtggagatggttccggatctgcggaggagtcgatgactgtcacggcggagccttctgacgacaaaaagtcccttccaacagaccttgccactgcggagcatcctccgcccgtttctgttcctggaatcactgcgcctcaacaccctgtacgaccaatatacaactcaaaattggcaactcagaagaaacgagcggcgatagagcgcgaccgactgaataaattggccgaagttcaacgaatgaagacggaactgtacaccaaacttg

SEQ ID NO: 92595 - DNA, 602 bp, Heterodera glycines
ctcgcatcagtttctaatcaaagctcaatgttttcgataatcttcaagtttatttaccattacggatttcatccaaacatcgcattatatgagtctttccagtcatgatggatttcatcagactttcttttatggcctcagccaccccccaggatcccggaatgcggaccttgagtccgcgcatccggccctggtggttggcgggggctgaaagcgggccggaccggaggagcaagtcaaagttgactagtgcttcggatggggttggccggccgcgtcgctcgctactcgtagggaggggcgctgcgaagtctgagtcccatgggtgcagtgggtaggactcggagcgccggcgtaacacaggactccttggagtcctggccgggtgccacctggaatcccccacacatccacgggaggtaacctttccgcttcagaggctccagtgctgacggacccctcggggtacggattcccatcctcagagctgctgggaggtttaaatccctcctggcgggggttaggtactccggaggcaacggggtgctcctatgagggtggggtccggctggacactgctgcggggggccctctcgcctgac

SEQ ID NO: 92596 - DNA, 376 bp, Heterodera glycines
  unsure (1)..(376): unsure at all n locations
attggtttgaaattcataatactcaattttatcctcctcattttgcgtgaatcgcaccacacatgtgaatttttcttgagcagagaatccatcaaaatatgcaaatttatgggccaatggcgacaaattttgcgaggaatggaacatctgaagggtggaaaaacatgctggcgcccaaccgtgagcgcccaactgacgtagaccgtttcctccacctgacaaagtgtgccctcaacaaattgccgacaatgccaagcgaaagaaggcacaaataagcggacaattggaattgcatgatgcaaaaagattgatgcgcttttgtatttctcaattagctgaaaatttttgaaaatcnnaaaaaaaaaaaaaaaaaaaa

SEQ ID NO: 92597 - DNA, 498 bp, Heterodera glycines
ctcgacaacacgaactgacgggtaattggagtgcagattggaacccggaatatgccgaactcaaaaggccgactcgggtggactcaaatgggaaatttggcattgagctcagactgaagaaggagaaaaagggattttcgtttttctcttcgaaagatgccaatgtcaaaggcaaaattgtgcaattcggtgctgaacacgtcgcgcaacgagtgttcgagcacattcttcgcgcctgggaatacggtgtcgcggattaacgtacttttgtacgaattaatccccccccccctctttcgtcttttttgcttttcaattctaatcactgcttttgaacttagttctctttttttgatcacggctttgtgcctttcgctttacattcttctcgctttttgctgaatctttcatggactatattatatattcataacacaaactacgtatcatttgtacattttattataaatgtccggcagaaaataaatgtgaaaatga

SEQ ID NO: 92598 - DNA, 462 bp, Heterodera glycines
atcagtcttttttatgccgacagaccgtccattgcttctgcccttcttcgcgatgtactgcttcaatttgccggccccaatccgtccgcccatttcgaatcgctcctctacaaaaccccgtccaacaacactgagtccctccgcctcttccgtcagctcactcagaatggccaagtcgatcggcaagtgttcaccccgcagttctctcgctatgcactgccttttcctggaaaacgcattttttcgatcagtgatcaacacgtgtctctcgtctgatcaattcttgaggacatatagtggatggaaaaggccaagagattcgacacacacacaaaagatccatttcattctttttgttcattatttatgcatttgactaaattttactttgaaaatatttacactttttatatatcttaaaattccatttttaattatctatttgaataaacaattgaacca

SEQ ID NO: 92599 - DNA, 273 bp, Heterodera glycines
  unsure (1)..(273): unsure at all n locations
gaactattgccagggggctggtcagcattggcacttgtatggacttggcagatgccactctgctcatctgcgtgcgctttttcgtctttctcatctgtaattctgtgacatacaatgcacagcattccatcataccaaaccaaaaacagattataattagtctcgaaaactcaatttcatcattttcttttattacatttccctcaaaatttttcattctttgtagctttataaatataaatttatttccnaaaaaaaaaaaaaaaaaaaaaa

SEQ ID NO: 92600 - DNA, 513 bp, Heterodera glycines
gaaatcatccaaatcaaagcagccaattcaaaatgccctctctccgcctccttccgcttcttctcgcccaattgcccttttgcgtcttcggatttggtttcgaaaacgccggcgcttcatgcagctcagatgaatattgtcccggcggttggtccgtcctgcgccgtcccaaggattactccgcgcacacgtgcaacccagctgatccgagacgtgcaaaatgcccgaagccgtacatgtgcgtggcggcgaagtgcggcatcagtttctgttgtgcaagtgacaaaatgttggacaagctgaaggaacagcagagtgttgaaagagaggcaaaagaagcagatgatgaagagagagaagaggccagacgacgagagaaagcgtcattggcggaagacgcagagaaagagagggagacggatgccatcgaacgaagcgcagggggcgacgatctttgaactctttgtcaagcccacccgttggaaattgctttttataaaacacacgtatttt

SEQ ID NO: 92601 - DNA, 653 bp, Heterodera glycines
gcgcattgtgctaattgacacaaaatgaaccgacgttgggtttgtaccgatgtttggatggacattctaccattttttaaccgtcttcaactcggcctcaaattggcacttctttcgccacgtttcgatgttttagtggacaaacattttgatggcaaatgcgaactgacaatttggagacatatcaatattctaaaaggcgctggaccagaaccagaattatctgtacggattgatcgcaaaactatgaagtttccattgcccgaccgtccgctgcccaccaaaatccgcattaaggaccttcatatcgagtacactgaccattccgtcatcacatttctccgtgccaatcagcaaatttttgacaaaggcatcgatttggatttgtattgggatgatgctctgcatgacaacaacagcgatgatgttcagcaaatttgggatgtttttgcacgtgaaatttggcccatttttgcgccaaacattcgccatttgaatttcatttttggttacgatcttgaaaatttgcgtcgccacatttcgccgacaattctctccgacctcaacattaattcaatccattccgctgatttgttgcccgaaatgatcgctgatgatgggccaaatgcaactgctggccaagcgctgtcaaa

SEQ ID NO: 92602 - DNA, 455 bp, Heterodera glycines
gacacgttgaaatgtgttcggcaattgattttgtacgggcacgagaatcgcatttcctgtcttcggtgcagtccggacggaacggccatttgcacggcgagttgggacgcgcccctccgaatttgggcctaacacttcgcattggccattctcttctgatcagtgatcacattttgtatttagtgcgctattgctttaacatccgttcgatttccttcccttttttctcctttttacctcagaaattcggtcccttccgtcaaatcatttttaattctcgtcaaatgttagctttttcggcattttggtcattcttcccctcccccactctctcttaatgctttagtcataatatttcttctattcagttatatccgacttccaattaatctctgtcaaaatagttttaaatgattagtaaaaaaaattggaaaaaaaaaaaaaaaaaaaaaaaa

SEQ ID NO: 92603 - DNA, 476 bp, Heterodera glycines
gacaaatcggtgatttgggtgatcgaattcttcacaacttggtcgcctgattgtcgttatgtggcgcccgttttcagtgctctcagcgaaaggtattcgctgccgaatttgcgctttggcaaattggacgtcggcaaacacccaaaagagggcgaccatttccgcgtcaatggccacgcgagcagcaaacagttgcccactgttgcactgttcagaaacggcgttcagacggagcggaggcctttggtgcagcagcgaagggccgtcccattcattttcaacgagaaaaacctcattttggccttgggcctcaacgacatttacgcggaatgcaaaaagacggagcgaactcggcgaaagaatgaatgaataataaagtgatttgctcagccaattgtgaatttggaagaatctcaacgacaaataggatacacaaaagccttttcccttttcaaccattgcttttccctttttaa

SEQ ID NO: 92604 - DNA, 287 bp, Heterodera glycines
  unsure (1)..(287): unsure at all n locations
aaggtgttgtagcagtaattgctgtttgcatgttcaacttctgctgcttcggtgccatcgccctcatcgtcgtccgttgaggtgccaatgctccgattgaaaattcggccgtgccctcaaaaggtgcggtggtgccaacttcggcctcgttgagattgtcctcgtcaatgtacttgaaagaagcaatttatgacaaaaacatttacgtgtatttattaatccattaaaaaatgtacttttatcattaaaatagcaattatnaaaaaaaaaaaaaaaaaaaaaaaaaa

SEQ ID NO: 92605 - DNA, 674 bp, Heterodera glycines
gggctgcaggcggctttgttggcacggatcagcgaaaagcgcaaggaactgagcacgaaagaggcattcaaacagcaactgattgaggaacgcgacttttgcttcaaagagccggccaaatggttctcctttctgaagtcgtcggctatgaaagcatacaacgacaacatggagagatacatcgaattagcaattcaagacgcagagctgagagagacttccaacgaaggccaatcgaactacgaggagcaaaaaaagaggaccgacgggacccgaaaattgttggagttttaccgcaaagagcgcgacatgttcacagagggactggagaaggcttccgtcaacgtggaggagttcaaatttccgaccgaaaatgttgaacaaatttttgacggacttttcgcattggaaatcaccggcaaacaaatgaaggccaattacgaaactacgaaggaggcgcagcgagagcatcagaagcaatccaatgccgaagcaatgcgcgcacaaaatttggtcaaggcaaagccaacgaaatgccaaagtgcgtacaaccaaaaggcgattcagtgctatttggacgaaatgactgagaaaggccaacaacagttgggccagggttggaaagcggacggaagtgccgaggcatcgtctaatgttgacatgactgatggagg

SEQ ID NO: 92606 - DNA, 488 bp, Heterodera glycines
tccttgacaatggtccgcttctctccgaagcattgctcaattttctattttcttcttttgactcgtccaatgtcgccaaattgaatttgatgaaaatgtgtgctgaagttcttcttcgaatgattgtcgccccggacagacgcaatttgtccgttattctttcgtcaataaaaagcagtggcagcgaatttcggccgttcgaattgctccattctttcaccaccggtagcaatttggacagcgacctttacttggccatgctcaaaatcataaaagagctttgcaagcgagagcctgccctaaagtcgcaatggtccaacctcgaaaatgtgcaattcctaagctcaaactcaatgatgtcgagcaattccgaaattgttaatttgtgctcagaagtgcttgagatgttgcaaatgggaggagaggaccaatttcacgatgcttcgctttttgatatttttatgaacgaatacacagggaaatgactc

SEQ ID NO: 92607 - DNA, 542 bp, Heterodera glycines
taagctctaccgaacacatatatacatattatacaataatccatctctgcaaacacattgtttcaatggcccgcagatcgaatgccaccggcacgaggaagccgcaccgttaccgtccaggcaccgttgcccgtcgcgagattcgccgttaccagagcaccactgaacttctgctgcgcaagttgccgttcaatcgtttggtgcgcgaaattgcacaggacaacaacttggagatgcgctttcaggcggtggcctttgcagctctgcaggaggcttccgaagcttatttggttcgacttttggagaacaccaatttggctgccgcgaacgcaaaccgtgtgaccatcatgccgtccgacattcaaatgtcccgtcacatccgcggagagaccctctgaagagccgaagcgagaaaacggagatgcgcaagaactattgggaaatcgaatgtgatcatgatcatatcctataattattgaatgtttgtaaatatacatataatcattcgtatgtgaatttattgtatgattaaagaatgtgct

SEQ ID NO: 92608 - DNA, 638 bp, Heterodera glycines
tgctttactaataaattattcataatgaaaaggccttcttcggttgtcgcttttggtagtcatttatttgtcggctttattctgttgtcgcttttcattggcactttgggcactgagaaaaaagagacgaaacctgccgctgctcattctcccgccgatgccaaacatccgccgccagtcgccgcccacgcggccgctggcgccggccacgcctccgatccgaaacacgcttctccttctcccgctggggctgctgctgctgcttcccacgctcatccgcccaatggcggcgccgcccacgcggccgaacagctcattagcttgttgatttttgtgctttttcagccaaaacatgctgcggctcccgctatcaaaataactgatgaggccaacaatgtttactcggtgtgtgtggagagagacgttctgccggcgccggaaaatgcgtcaaaggacaaattgaaggcaatcgctgcgaaatgcgacgaatgcggggcggcaaaatgcaaagcgaaatgcgggggcaaagaagtgaacgacgcatgccgaacatgcattatgcaaaactgtccaccggcaaaataaaaaatagcagaaatgaggagggaaagaaaggcaaaaacggcacggaaggagga

SEQ ID NO: 92609 - DNA, 643 bp, Heterodera glycines
caaaaagcaataagcacacacaaacatcgatcgacgacccaacaaaaagggaatgacgtcatcagctgcaaaaattggtggtggtggtggtgcatctgttgaagagttgaatcaactgttaagcaaagacgaagaatggctttccagtttccagggcattttggaaaaaagtgccacattgaccggctcagtttgctcactgatggacaattttcaggaaagaattgattcattgtccacgaatgtgcagacgttagtggccaaatcaagcgtcattcaaaaggaacaacagaacattcgaaaactgttgtccaccgtggacgcgaccattcaattccatgggaaaacgacggtgctggagaacaccattcgggacgggggcaatgtgctgttgaacattgacgactatttggaaaagatgcgcaacctgaaggaggcaatcgccttttttgccacccatccagtctacagaaaccacgagcacattaaacaaatttacgaaattggttgtgccaacattgagtctgagttcggcaatttggtccggacaagttgcgtgccggtcgacccgaccaaagtgttcgagtatttgggcgatgattacgaaatgccttccttccgcttatcctccttcgtcacactc

SEQ ID NO: 92610 - DNA, 628 bp, Heterodera glycines
  unsure (1)..(628): unsure at all n locations
gtcgctcatttgtcgccaaatcatgcgactgaatgtactgctcgcaatcctcgcccccctcctcctgctaattgcaacagcaacgctttgtggtgccaccggcaaagaagcggcggccaacaaaatcggtgtcgccgccgtcgctttgtcagaggcgngacnnaattcgnacggacgcntncggcgccaccgccgctctgcccttcgccggggtgggcagcggatgaccaagaaaaaggacgattaccgattagaaagaagccgggacgagatccggcaaaaaaggggnnnnnnnnnaaacgggaaagcggaaaaccgggggggaaaaaaaaacggggacannnannnagaaagnnttgtgcgnnnncgannanaggcgnagnncgggnnnannnnnnnnnnnnannnntnnnnnnnnnncgaggnnnnnnnnnnnannnnnnaaannnannaannnannnannncgannnnaaannaaaannnnanaannnnnntgaaaaaaanaaagnnnnnnnnnnagnaagnnnnnnnnncggnnnnnnnnnnnnnnnnnnnaannnnnntcaannnnnnnnnnnnnncggnnnannnnnnnnnnnncgnnnnnngnnnnnnnnnnnnnttnnn

SEQ ID NO: 92611 - DNA, 484 bp, Heterodera glycines
ttgggacgcacaaaaaccaaagggccgttctcctcgtacgccgagcgttcctcccgcgaataaccaatacgctcacgtaaaaagcaaagtccggtcaatcactgagtacactcctgcgcccacactcgtgaagattttccacgagtctgtccgagtgaccgcctctcccaaagtcggctcactacaaaatgtgtcccatgtgcacaccggtgaaaatgtggccatccagaacagaaaactcaacttccgggaggcagtcaatcctcgggtggacgaaaaatcggaagtgcccattccaaagagtgagaaaaacagtgcgactcaaaaactggaatggaaaggccagcccagagtccgttcgatggacaatgtgaagcactcacccgcgaggagctaccacaaaatattccaccagtccgtgcggatgaaatgcgagtccaaagttggctcccttgacacatcagacacgtgcccggggggcgca

SEQ ID NO: 92612 - DNA, 330 bp, Heterodera glycines
gctgctggcggtggcttaagacaacggcaagctggtggggcggcaaacactggtcgtacatcgaactgctggcggaggagggggcggaggaatgaacagcagctgactgtggcccttttatactgcaggactctgccgggttgcaaaattggacctgttcccgtgttggtcatgtcgctggagttcatcggttctgtgttttttttctacatttggggaaaatgcatcccgactcattgaattctgactttgccgattcattcggtctatcggcagaaatgcgattttattcatagtttttacaaatcacttccatttaatggaatattt

SEQ ID NO: 92613 - DNA, 250 bp, Heterodera glycines
agcgtttgtcaatgggttactaaagactaagccggttgtgatcgtctcgaaggagcattgtcctttttgtgtaaaggccaaggatgccattaattcgctcaaactgaagccaggcgcacttgaaattgtccagctaaaccaccgcaatgactgtgcccaaaccgctttttgtctcatggagctcaccggtgcccgctcggtgcctctcatgctcatcggtggaactttctttgggggcggagatgacaca

SEQ ID NO: 92614 - DNA, 220 bp, Heterodera glycines
tattgcctcggtgtgctctctgttggctatcatcgccgcagtcgtcgctctgccatctctgtactcggagatgagccaaatgaacagcaaagtgcgcgacggagttgaagccttcctcgtcaacacctactcggcctggactgacttgatggacgtgaaagtggtcgtgacccccccggccaacccccgtgataaccccttctactacttcttccgtgcc

SEQ ID NO: 92615 - DNA, 614 bp, Heterodera glycines
taaatttgcaagtccccgaaagcattttttcatcatcaaccatgtctgccgccaacaagatcatcaaggccgctggtgtcaaggctgacgagctcgagatgcaggtcgcccaggccatcttcgacctcgagaacaacgttgcggagctcaaggctgatctccgcgccgtccaaatctcggccgccaaggaggtcgatgtcggcaagggtcgcaaggctattgtcatcttcgtgcctgttccccaactcaagcagttccacaagatccagcagcgcctcgtccgcgagctcgagaagaagttctctgaccgccacgtgctcgttgtggcccagcgtcgcgtcatgccccgccccacccgtcactctcgccaaaagcagcagcgtccccgctcgcgcaccttgactgccgtccatgaggccatcctcgacgacctcgtttaccccaccgagattgttggcaagcgcaccaagctccgcgttgatggctccaagaccactaaggtcttcctcgacaagaaggatgccacgtacctcgagtacaagctcgacaccttctcggccgtgtacaagaagctcacgggcaaggatgtccacttcgagttcccccagtaccag

SEQ ID NO: 92616 - DNA, 601 bp, Heterodera glycines
gcatcaatgcccccggggttggcccgcggcgggtgatcaatgcgttcagttgcaatttgtgccgactcgacgagaacacgcggaagacaaatgcgaaagtatgggggcacaattagtcgatgtaacggacggagaaggcgaattgaacgaggcgatggtggaggacctatcagaactgcttcaagaatcgctggaggcaggggtcaacgaactgatttgggtggtcggggcgggaaagtggcgatcggagtgggacgagtcgggggagagagtgcgcttcagccgcagagaggcgcaacagcagcggcaggagggggaggaggaggagggcatggagaatgtgttggcactacaaaatgttctgctccatcctccctctgtgcaccctttcatttgccaactttggcccctttggcgccgtttgctgctctatgaacagtctctgctccccaaaggtgcgcctctcctggaagagcagccgcgtccctcctatttcttcgaccccaattcctccgcctccaattcgtcctttctcagtttgccatgttccgcttcgggcgtgccctccccgacggtccgttggtttcgcaacggaggcgaa

SEQ ID NO: 92617 - DNA, 617 bp, Heterodera glycines
atgaaatccttcactctcaagcaaggactgtaatgcaataatgtatcccggccaccacccggcttccgtccgcagcgccacccttggccggccgccgggcactgggcccagactgatggatgagaacgggctcgacgacaccgaccacagcagctcaagctcgtactccaatgcaacggccatggcaccgcccatgtcggcagtcaagcgcatggctgctggcacaccagtccccggcacgccatctttgcaccgaggcctattcaagaaaccggggcatctcacggccgccacgccgtccaaaccgcacgtcgcatccgcgaccccgcgccaggcatctcaaaccccgggatccgtgaaaccgcaaccatcagctgccaaactcaccggcggtgcgcctgcgcgccgcctcctgtttccctctggtacgactgccgtacctggtacgcccgccgccggcagctcgcacgcgtcatttgcgaccacgccgtcggcgcgccacttgcaaatgcaaacgccgcgtggtcccggtcccgcgagcgcgaaaccgacgcctgcgcgcagcatgtacgcagcagcgactccggcagcggctctgtcgacttcgatgagcagcg

SEQ ID NO: 92618 - DNA, 554 bp, Heterodera glycines
gtgaaagagaagggagggcaaaaaggagcagccgaagcagtagcagaacggagcgacacagacgacgacggtcatccgccgggtcgtcgaggcggagacggtcacgcgaccgaagtcgagagacaacgacgacgacggacagagcgcgtaaaaacggttctgctagttccatgatggcaccaccaaccgccacccaatcgaaagtggtaccctcaaagaaactgactgctgaagagttggaggaacggcgacgcgccatgttgacaaatgcctcatggcgagacgatatgcgtgagcggaatctgcgcgatgcggccgacaaattgagaaaggaacaggacgagatggccaataaccgaggtggcgccggatttatgcgtccaatgatgaacaccgcaactgaagacgcgtccattgagaaacgcttacaaagcaatcggatgaacattcaacgccaacatgatcacatggacaagtcattcgtcagaaaatgatatgattgccattgccgatttcgacacacttgtttttatttttaatgaatttttttaccc

SEQ ID NO: 92619 - DNA, 384 bp, Heterodera glycines
cttttgagtttggatacagtatcaacaattgaatgttaagtatttgctgttttttagatttccaaattccgaggaattaaatgtccagtccgagcgattcaaagttcgcctgctcaaccaataaaagttcggttgggattcctcccgccgccattcgttcctttctgtttgcttctgtactccgccccttcgcttccatccttatatactgttaccatttgccctccccacttctattaccgtgtttttcacatatccaccgatatcccgtttttgtgcctttctcccatttctttcatccattttctcaaaaattatttagaattactattatttttattgacctttatccagtaaatttcaacaaaatttcattcttatttc

SEQ ID NO: 92620 - DNA, 592 bp, Heterodera glycines
cacctctcgtgctctaactgcgcaacctgcaactcgctcgacaacgactttgcctcgctctcgctccatgacccggcagactgcctcttcttgcgctgcaatgtgtccaagcctcaaggaaacggctctatgggccggcattgacccaaccaaccaagcttccatccagcccatcttccgtgtgctggcaaatcacgagcaagccaagttcgatgtcgtggcggcacattcacctttggagaccacgtcccatggcgccgactccggccgtattgccaatgagatcaaggacattctcgtcaacaagctgcgcgctatccacttcaacaactggtcgggcgacacctcatccaacctcatcgaaaaccgcctctctactcaccgcctccttcacgaccacgaccacgaccacgatcacgaccaccaaaccgacgacacaaacaacaacagcccaatcccattcgaccaaatgccgcccgccatgtctgccctgctcgcctcgcccatcacccacccgcccgacagcggccgcgcctcctccgaagaactgtcacccgaccacgaccacgaccatgaccacgaccacgaccac

SEQ ID NO: 92621 - DNA, 181 bp, Heterodera glycines
acgatgcataagtagaaaattgcctaatcccgggaagccgccaattttgccacctgcaaaaacgaaactgtacactgtgacccaattcaagtggggaaacccggacgacattgccgatttgctgtggcgtcgtcacatttacaacagtgcctttctgtcaatgcgacgcctttttcgggga

SEQ ID NO: 92622 - DNA, 546 bp, Heterodera glycines
gcaagtttgagttgagattgtgccaacggtgtctattgtttgtctctttgcattaattattgtttttttgccctccatttgcttgctaattgcctctcctccatccttcacttgcaaatgccaaattcgaccgtcaaaaatgtcgctttgatgaacggcacttcccccgccccctctgccgctcttccgcgtttcaatcatccaactccgtccgcttctttctccttccccaagggcagctttttctcctccgcttctgcttccgttgagtcgccaatgacggcaactaaaaatcatcggccaacagagccattggcaacggcatttttgggggccagcagcagcagcagcaacggcacaattgaacatgccgaaaacggtggcaatggccatcaaccgatgacagtcattctgacagtgcgaatgctaatgcaaggaaaggaagtcggcagtatcatctgcaaacgtggcgattatgtgagacaaattcgggagcaaagcggcgccaaagtgaacatttcggacggttcgtgcccagaaagattg

SEQ ID NO: 92623 - DNA, 296 bp, Heterodera glycines
  unsure (1)..(296): unsure at all n locations
attccttgtgcgcttcgtctttttattctctttttgcaatatgaatccaacgtacccaatggtcttttttctgctcgttttggtggccgttgttctttcgtccgttcatctgaaggaagacaaaattgatgtgccgnagcgcgtttaacgcggagaaanggcggcggtgcctatggcggtgaccgcggtggcgttggtgcgcctgcnccgggcggtggcggcgcggcgaanattggcaatgttttcttataccaacngaacggatgcaacgggcggggaccgcagtaccaatgggg

SEQ ID NO: 92624 - DNA, 574 bp, Heterodera glycines
gcccacactcaagcccgaccaacatgaactcgctcaagtctgcctcgttcgccatcctggccaccctcctcaccttcttcacactcatccacgcgtcgcccgttcccacccctcaagatccgacgacgcgcaaccgccccggcccgtccggcctgccgcctccgtccccgaccgcgttcgtgcgctacctgggtgacggcaccgccttgatcgaaaatctcgggtattactacacgcaagtcttgcagcagtgtcgtggattgcagggaacgctgccgattgaaaatgtcgacatcaacacccggtacctagacggccggcccgcctacgcgttgcagttctttggcgattggggttgccgagggcccgtgattgcgcagacgacggggttcacgggtaacggcgagccgctgcgtgggaacaacgggcaggtgatcgtgccaaagtcggcgaggtttgtgcctgcctaatattaacggtcggcgtgtgcatactggcgttcaatttgggttggttagacgtcggcaccttgcagttggaatcacgagtggagttggcgggatatgcttgagcc

SEQ ID NO: 92625 - DNA, 595 bp, Heterodera glycines
gtttgaggcattaatattacttttgttgcaatgctgccatccaatcttttcttcttgctgatgaccatgctcagcagttccctcctccatcagacattggcaaataaattttcagcagagaccgacgcagtaaatccgacgcgattaatccagagacggcatttgattcgaagccgcgcaattcacaaagaaaaaatgcactcgaacgtaaatgaaggctatttacagtgggaaaaggataaattccacgaagcactgggagaaaagtgcggaaagaaatcaaattgggaacagagagattttggcattttaaggattttgccgaagagttcccgatctctgatggaccccaagtttttgggatcggtggaaccgcggcttttgaaaacatcggcggatgggacgcggacaaaaagcgattcggaagaggaaaattggcggaattggctgcgcaggcatttcccagctgcgagaacaatttctgatcagtgatcactgatcacttttcattttatcaaatgcaaatgatcgctcatctcacctttttgaattggatcggattttcaatcttcaataaactttatttattaaaaaa

SEQ ID NO: 92626 - DNA, 556 bp, Heterodera glycines
gaaaataatgggaacaaaaattgaggaaaactcatcaaaaagtgtgtcggaggacgacacatcggcggaggaagaggacgaggaaaacattgagaatttcagaccgaatggaaccacaaataggaaaagagcacaccgaaatcccacctcggactcggcccaatttagaaacttgttggacaaggcgaaggaggactttaagcagaagtgggaaaaagcgcgcaacatttcctcctcctccaccgccaatgcgtctctgatcgattttgaacgcattcggatgatcggcacgggctcatttggccaagttttgctggtcaaacacaggcggacgggcaaatattatgccatgaaaatgttggagaagcaaaaagtgctcaaactgaaacaggtggaacacaccatcagcgaaaagcgcattttacaggccaccgaatttccatttctcgtaaaaatgcactactcattcaaagacaccgccaatttgtacatggttttggagtttgtcagtggtggcgaaatgttctcccacctccgtcgcattggccgcttctcc

SEQ ID NO: 92627 - DNA, 613 bp, Heterodera glycines
tctgcgattttgttgccgattacaaaatttccggtgctgttgaagggcattggacgcacaaaattagaccaacaattggcttcacttggtgaatttgagtctttttacaaatggcaaagtcagcaaatgcaatcgttggacaatggctacacaaaaagttttacactgctcgacgggcccccatatgcaaatggtgagccccatgttgggcacgcgatcaacaaaattttgaaggactttattctgcgcagtcgcgtacagctcggccacctcgtccgtatgaaaagcagcacaagtgatccgtcgaagagtcctcaaaagatcgtggcagaagccgtcaaggagatggaactttatttcaacgcactgaacaacgcgctcattaagcatttgtctctcaacatcaacctaaaggcctatgaggatttgtctgtaacattggacaatggcgagacccatcggctggtcaagttcgcgcgaatttccctaaaaacacctaagggaccaattgtactcaatttcgcagacaatcctgctgcgataaagccggcacgaattgccatccaaaatatggcagaaaatgtcactccacaagtggacggcattgtcataa

SEQ ID NO: 92628 - DNA, 596 bp, Heterodera glycines
gacagtttgagacggtggactttttggacggcaaagggacggcggagaaaatcaacaagttcgtgaaagaagcgactcataagaaaatccgcgatttggtcacgcccgacaattttgacgggaacactcgtttggtgctgatcaacgcgctttacttcaaaggcacatgggcggacaaattcgactcaaaattcaccaaaaaagcgaaatttcatgtggacgcgaaaaacttcaaagagctggaaatgatgcatttgacagccaatttcatttatttcgaggacactcagctccaactcctcggcatgccctacaaaggcaaaaaggagttcatgttcgttttgttgcccaagaaacgctttggactgaccgaattgttggctcaattggacggcaaaaagctgatgaaactgatcaaaaagcgggacatagagaccgtgaaggtggtgttgcccaagttcaaattggaggccacgcacggattgaacaaaccgttgaccaacatgggcatgcccaccgcgttcaccgacaacgccaattttgagggcatttccggcaagaaaacgttgctgctcagcgaagtggtgcagaaggcg

SEQ ID NO: 92629 - DNA, 494 bp, Heterodera glycines
ctctcatctctcccctgggagtgactcgaggcttcctcgacgcggcgaagaccaaggtgggcgctgctcagggcatcaccaacgccgccatccaggccggcagcgacggcatcaacctgggtctggatgccgttcagggcgtggaagctgtcaagtccaacgctctccgcggggtcgtcaacatcaccagaaacttgggcactgaggtcatcacccagacccgaaacatcgccaaccacctgccctccgccctcggcatccgcggcgttgccaacctcggccttagtggtgctcagggcgccctggaccttggcgccaacgctgccaccggcgtctttaccggagctcaggccctcgtcaacggcaccctcgaaggtggccgcaccgtgagcaccggcgtgtctaacgctgctcagaccggcgtcaacttcgccggcaacgtcgtcggaggtgtgattggagccaagtccaacgccattggtgccgcccaaaac

SEQ ID NO: 92630 - DNA, 199 bp, Heterodera glycines
cagctgttgagaatgatcggctcaaaattcatcggcaataaagccggcatgagctccattgacaaggagcaagtggcgcgcataattgctgagaataccagcgcaaattttgagggttatgaaaagaaaagggcgagtcgcattgatgaacaaataaaaagaaaccgacaaaggcttgattcattgacggaacaacaaa

SEQ ID NO: 92631 - DNA, 645 bp, Heterodera glycines
ttctcttctcgtttctgttcttcattgcccaactgattttcactgattgccaatttcccgaaccgacgcgaagtgtcgatttgtgggactcttttggcacttctactgcgaatagtttcggctcggatgaatctcgggggaatgtgctggtgcgtctttcggttggcgaagtggtcggcctccgtgtgaccattccaaatttgccatggacgccttggcaagacccaaacgagcaaatcccagccgatcggacccattctgaactgaatcccctcccgggcaataataatgtgtccgttttcgcctttttgggaatgccttacgcggagccgccaattggcgaacgccgttttcgggcgccccagcagctgatccatctccccggcccttcgcccttcttggccaacactcttcccagtgcttgtgcccaagatatcgaggcccacccgtcccttttcgtcaacgacccctttccctattcggtcagcgaggactgtctccacctgaacattttcaccccttctgtgaagtctttttcctcttccgtgtcaaattctctccccgttttggtgttcttccacggcggcaacttccaaacgggcaccgccaacgattggcctggccacgtgttggcttctcggggca

SEQ ID NO: 92632 - DNA, 469 bp, Heterodera glycines
caattttcgcaactgtcctggcaccacccgggcggaatggaacaaatggggcgaattggcatttgacgagatggacggcactttcgctgtgcagcagtggattcagcaatgcattgggagagatgcgcatgggctggacttgatcttggactgccccgcgggcgtggacgagggcgtatggaagtacgaacagttgcgccagttttgcctggagctcatttttttgttcgtacttttacaggagcagtgtcaccccgaaagttgcacacaaatgaccgcgactgagcagtggatttttttgtgcgcggcgcacaaaaaccccaaggagtgcagtgccattgactacacgcggcacactttggactgggccgcctctctgctgaacagcaaccgctacttccccagccgagccaccatcaaagagtcgttcatcgcccaaattgggtcggtgtgccgacgactctgccgg

SEQ ID NO: 92633 - DNA, 535 bp, Heterodera glycines
cctaattattttttcagtttatcatttgttctgataatttctgttttcctcctctttaccccaaaagctatggttgccacgcgtcccttccgtttcgatcggcccgcgcctcaaccgcagcgagtccatccggtgtcactgattcaaatggtcactgctgcgaaaatcgttgacgaacagcagcgggccaaagaacgaacgcagacgccactagtttatcggatggatccgcaattgctcatccgatttgtcaccttcaacaaaatcgcacagaaacaagcggcggccaaatatttggcgaccaaaaagcgtcgggagaaggacgagcagagaatgcgcgagttcgtccgccgggcggtgacgccgcccgactttggccaaatggacgccgacgcaatggtcaaactgtcggattttatgcctgtactgaatttggaattctttttgagtgccatttccgaatgcttttttcatttgtttaggccgtgccggcccaatttgaccgctcttttcgctacgaaacgctcactgttcc

SEQ ID NO: 92634 - DNA, 634 bp, Heterodera glycines
atttgccaatacttagagcatggtcatctcttacatttggcaaatgtttgccctgctcattccaatggcacacatcgtcaacagtggacaaattagctacaacttccaaattcatttccggcactttggcctggatgcatgggctcagtttgaaaagccttgcgctaatggcaccaagttgctcatattgacaatgtcgcgccgggaaggcttcgacagcagaaagggcatccgaacttggatgaaagatgctgtggccgctgaagagcttcgttttctgatcgccgatcctggaaagaacgaagcggacgatgtgcaacaacaattagtgaatgaacaaaaagagcatggcgatttggtgctgatgcacggatttgtcgacgtttacgcccatttacatatcaaaatgtatagtggctttgtgtggcaacaacggcactgtgccggtaccgaatgggtgctaaaggtggacgatgacattgcggtccatgtccgacgtatggtcgaatggacggagataaaatttggaaaaatggctacagaacatccgttgatttattttggagtcccggcagatagaggactatctcgggacaagaacagcaaatggtacgtcccttatgaaatgttcccg

SEQ ID NO: 92635 - DNA, 643 bp, Heterodera glycines
tttttcatcaactacagctataacatgcactggattcgaaccggtgaccgcccattttttgactaactcacagaccactaagacgaaaaaaccaacttaatttgctaaaatggcaaaaattacgcaaataaaaaatggcgaagagcgacggattgaaagcattactcggagaaaaaatgagcttgatgagaggagacggcttatcaataaatcattgacgggagaattgaagataaacaaacaaactagatttgctgattccgatgaagaggaaccaacacaaaatagcaaaccatttagttttcttgcttcaatcggacgcatttatcccgaacaaaatgagaagagcaaaaatacgaatgttgtggatgattcagcagagcaattccttgaaaaaacgagacttaccaacgaaacagaaaaaagtgcacccaaactcaaaaatatttcgttgtataaaccacccaacggcgatggtgacatccggcaatgtttctttgtcaatgaacacacacccgaaatccgttcatccttttcttcatttcgtcggcaccaaaaagaagagacattgcgtaaggaatgggacaaaaagagagcgccaattgttaagttttacaaaaaagaacggaagtcagcacttaga

SEQ ID NO: 92636 - DNA, 525 bp, Heterodera glycines
ccatcaccaccaactccaccgaatggcacgactccatcagcgccaactccatcgaatggcacgactccatcagcgccagctccaccgaatggctcgactccatcaccgccaactccaccgaatggcacgactccatcaccgcttattccaccgaatggcacgactccatcgctgccgcagcaacctccgccagtcgccgcggctccgtcaccgtcgccaccggttggcaatgtgttgccgctgctcgccaacggacagtacgcagttggatgtgccgacattatgctttccgaaccttccgctgcctcctcatcttctgctggtggcgttggactgttcgcccgactgttttaccccgccgcttcgtccgtcgtcctcgcggatccgtcgacttcgtccgccacaacagcgtcggcgttcatgcgttggcgaccggactccgagtacatggttggggtggcaaattaccagggcgtgagcatgttcaagaagaacctcttcctcgattggggcgtcggcgacaaa

SEQ ID NO: 92637 - DNA, 544 bp, Heterodera glycines
ggaagagcgaatcaaaactgaattgcgtggtatacaaccttctgaagaccaagaccttctgctcgacagctgcaaagcgaatacaattagcgggctgacagaacagttcacaagtctcacaacactttcgctgataaatgttggattgactacattggatggtcttccgaagttgcagactttgggaactatcgacctccctgaccacaaactcagcggtggtcttgataaattggacgaatgttgccctcgtctctaccacgtcaatttatgcgcagacaaaattacgtccatggcagcacatgctcccgtgagcaagttggaggaattggcggcacttgatctgttcgactgcgctattaccgagggagaggaatatcgcagcatagtgtttgctatgatgccacagctgaaatacctggatggatttgacagaaacgatgtcgaggcagacatttcggatgaggaagaggaggagggagctgatgacgcgctcgaagatgaacaccactctcacgaacaggacgagggagtcgacactgac

SEQ ID NO: 92638 - DNA, 214 bp, Heterodera glycines
cgaaaaaaaaagcgcaagaggaaaggatggcaaggatggcaaggaaaaatagagaggaaagggaagctaacatgaaagaggaaatgaaaatgatagcgggagaggaaatgaaaaggcaagggctaacggaaatgggagtagaagcgacagaagaagcagtgcaaaaaatgcttaataagcctaatcttccattaaaaattgctaaaaaaataaa

SEQ ID NO: 92639 - DNA, 639 bp, Heterodera glycines
  unsure (1)..(639): unsure at all n locations
gtccaattaagcacaggggaatttacntttgggttacacagcttcaagggaatttactttgggttacaaagcttcaacaacatgcaaagtgtccaatcgtcggccaccgcggcagtgaccgccgcttccaccgttccgttgagcattcagaatgaaattttgtggatcaaacaggacgctctccaagttcgcaacgccgtcattctcttggagcaggagaaggacagtcttcgcaaagcaattcgcatactcaagttggagaatggccgcctgaagacaaaggtgaaaaccttgaacgaaaaggtggcaaagattagcaacgaggaaatggacgatgaagagggaaaattggcgcctgaatctgaattggactatgacgaactaaaccgaggggatttctacctaatcggaggtgtccatgacccgatcagtcttcgttttgaagctgcgatccgtgaccaaaatgccgtcgaacataaaagtgccgaacgctactactggtacaaaatggcggaattctttggcgacgaggaagccatgaagagcattctgcacgcgcagaatgtccaacaggccgaagaggccatgaaaaacatcaaaggcttcgacgttgccgaatgggacaaagtcaaacttaaa

SEQ ID NO: 92640 - DNA, 626 bp, Heterodera glycines
  unsure (1)..(626): unsure at all n locations
tattctcccattttcccacatgggaattactacaggctggggggaagagaaattcacatgaaagaacaattatagttcaagatgtgaccgacggtcccaaaatgcatatacggtcctaatcgaatacaactggtgcgatgtcttgggggacacataaacatgcgctcagtaactcttgataacgaaagactttacagagggcttttgaagggagattngttctttttctggtaatgcagactcgcgacaggcctgaccacacaacctcaatggtgatgatcagggtacatctcaggaggatgttggaccatgcttacgtcgcccaagcagctgtagaacctgttcacccgcttgggtggcggattttccgtgaagaaattgtcgattatccggacataaatgagcatttgaaggcgactctccttgggatgatttcgctagaacttaagaacgaaatcatccaatggattgaccttaaaaatgtgtgccaaatgttaattgcgttgggtttggacaatcgcgcctattacgagcaccaatttgaagaccttatcctccgatgaaactgccgaatttctatcgtcctgcaagtcaaaaagtttttggcggaaaacagcgcgtgcgtt

SEQ ID NO: 92641 - DNA, 465 bp, Heterodera glycines
aaacagttgggagtgaaatgtcgcgatgtgcggacacgagaagtgggcattcaggaaatccacgagaaagtccgcccctaccaagtcgaactcgttcgtcgcgactattcggcaaatggcggttgggaaacttttctctcctacgaggaccccgaccaggacattcttatcggaatgcttcgtttgcgaaaatgtactgagaaagtgcacagaacagaactgaagggaggggtcagtgtcgtcagggaacttcacgtgtacggcactgcggtgcccgtggccagcagagacccgacaaagtttcagcaccaaggctttggacaactgatggaggaggcggaacgaattgcactgaccgaacatttgtccatgaaaatatcggtgatctccggggtcgggacaaggcattattacagaaaactcggctatgaattggatgggccgtatatgagcaaaatgttagac

SEQ ID NO: 92642 - DNA, 572 bp, Heterodera glycines
ttggcgtttattaccgggacgactacgactatttgcgacatttgaaagaagtcggcgaggtactgaaaaggacaacattctcttccccgtttttccctctattttttgcgcttacgcttagaccgtcgatttgatcggagatgagccaattgtggagagggaagtgatcggtgcggacgagcaaacgacgtccaagcagttcaattcgtgcattttcgaaacgcacggcgtggaattgaggatgggcatgctcaaccgcgccgcgccttccaacgaactcctccccgactttgacccagacattgtggcggcattggacggtgaaattgaaaatttgggcgcggatgacgacgacgaattggacgacgattttgtggccaaagccaatgcgcccggaggcaaagatgacggcaaactgtttgactatagaaacgaaaatcgcgggaaggatgaaattttgcagcgttttggtcttcgcaatgtgcgggagaaattttcgggtgaaagttcggcggatgaggaggacgaagagatggcttcgtccgtcacacaatcggaagttgacgagcgca

SEQ ID NO: 92643 - DNA, 233 bp, Heterodera glycines
caactctctcaagcaaaaaaaaaaaaaaaagaggaagaaagaaaaaagcttcttctatcgattcaacattgaattataattttacagacacaatattcttcatctaccacccacaggattttcatttcatcccaatcgtattcccccacgcgaccccaaactctaaatacgtacattgacatacacttacgtgtacaagaatacgtatagaagtagcttctattggttaacct

SEQ ID NO: 92644 - DNA, 234 bp, Heterodera glycines
attctgctggctgtcacaatcatttaccagtactttgaaattttcgtcaaagaacagcaagaaatgggcggagttgccggactctttttctgagccaatttttcttgcgcagaatttatacatatataaacgacacattcactcatttccatctaaagttgaactttgttgttttccctcacttttggcatcacataattctcttttgttcatttaaatgcatttgagaaactg

SEQ ID NO: 92645 - DNA, 632 bp, Heterodera glycines
ctcaacttgccgctggccgacatttgcgacatttgcgacatttgcgtgtctcgcgtctcgctcgccccgtttcccacactcctcgactcaacccgtcgtcaactcaccaacctcggtcactggcctgaccctcctcctcaagttctcgcaagcaaatacgctggactgtattctcgccgccgccctccacgacctgtaacactagaagctccgtcgtctgttctctatctacccccttctcttcttcttcgtcttcacacacgcaaacccatccaaccccatcatgaagctcacgcacctcctcctcatctctgccctcctcgccctcgcgccctccgccgccctggccgaccaccccgccgacggcgccgtcgctccctctgcctccggccccgactacggctacggcgccggcggcgacgttgccaaagaagccgagcaaaccgcgcccgcacccgcgccgactggcgctgctgccgacggcggttacggcgcacccgcgcccggcaacgacaaggctgctcccggcggcactgcgtccgagtcaagcccgcagccgccctccaactactccaactcgccgcccggtcccgccaacgagtacgagtgtgtcgaggaagccgcgggcaaca

SEQ ID NO: 92646 - DNA, 604 bp, Heterodera glycines
atttctttcatccgttcaaattcgcttcaaatcaaccaaaattacaatttaaaattaaccattcttaatggttgagctgtccgctgtatgttttgtgtataaatccttcatccgtcatcttttgattacccgattatgcgctaccttgacaatggaaaaccctgacgcgaattcgtcgacgattcatcagctgaatggggttgggctcggtggacagaatggaagacatcggtcgagtgattggcgatacaaaattcgaaatcaaacggcggaaagggagggaagggacggagtcaattcgtcggttggattctctgctgctcggcgtcacatcagacccgaagacattctgtggtggctctgtcttctgctcacattccgttgctttgatttgcctgctgttttggtttcccattgccgcatcgatcgtcagttccttcgcttggccttcgtctgcgctttttgtctgccctttctttccgtcgcttatgcctttgtcaatttgacttatcggtcgactgttcccttttctcttctccgcattttccaatttttgtctattttttgcttaatttgtgcgtcaatttttttttgccttgcgact

SEQ ID NO: 92647 - DNA, 538 bp, Heterodera glycines
ccgaaagggaatgttctgagggatgagacacccactggtcaattatggcatgtaattatatccatgtttttgtgcccatcgatcggtcggcaaaagcggcgaataaaaaggacaaataaaatgaaaatcaaaaagtcattttaagacagtgattgggagaaaatgccatttgaaagcaatatagtaactgacaagtgccagcggacggcacagattgtgagaaagtgccgttggaagagttggcattggcaccaaaaaaggaattcacaattggttgaggtttaaaaagaagcttttgattttcactgtttcttttccttttgagcactttggtggtgattctgtcccccccctcattaaaaccaacccattttctgtctccccaatttttggataatccatccccctcccccccccctcggctcattgagccccaaaatctgtccggaaataagcagaaatgagggggaataaattgagatttgagatcattgaaagattaatgcatcgagaagagcttattttgcagggattgttc

SEQ ID NO: 92648 - DNA, 501 bp, Heterodera glycines
aaaagcagcactttgaagccgcgttggcactaagggattgggtgcgaaacaaaattagagaatcggcgaattcggaaaatggacgatttgaggaaggggagggggaggaggacgacgacacggacgaagtgccaccactgccaaaagtgccagcaaaaaaggcggaaaattcactgttgaagcgaaagtctgcaaaaagttcttcctcaaagaatcggaaaaggccaaaagttacgcacagtcataatgcattggtgccccaggcaaaagcgaatggcaattccatcgatggcacaaacaccgaaaaaaggggttccgcctgtgcatcttcaacagcagcagcgaagaatgatggatccattcctatggaggattttgtactgccggcacagattaaagaaatcgtgccgaagacagacgctgcggaagcgccccttttaatcagcgaagtggacgacgggggaacggcaatcgaagaaggcccaaagaatgatgggccat

SEQ ID NO: 92649 - DNA, 471 bp, Heterodera glycines
gtcgaaatggatgttcggaatcggatcaattgatgaaaaagtatttaatctaagttattgtataaaaattttaaaattaaataaattttttcagatagcaacactccaaaaagaggtgatgacgaacatggagaaagtgctgctgatattagccacccgaagagaaaacggacaacaaagcgaaaaccaaggatttcacttgacaaactgaaccaacattttgccaccaaaatggacataaacactaatctaagtcccaaaattccacgaaaagctcgttcaaaaaggccaattagtaaaaaagtggcagaacgccaaaacaatgcaagtggcggaggagaagcgtcatcaagttcaaaccgtacaacaaaggacgccgccaccagcactgtcatgccaatgccaaaagaatttacggaagagccgttacaacgaaaacggcgaacaccggacgaagaggaaagcgaacgg

SEQ ID NO: 92650 - DNA, 642 bp, Heterodera glycines
caactgtacgttaaactaccccatccattgaacgtgggcgcaagggctaaccaatggcggaatttacggaaataattgtcgcggcgaatgccagaactcccaatgaacttaacacctttgcgcgatagggagaaagcaaatgtaaatgacactgaggcaaggcaaaacctcggaaaactcagcacccaattgttgggcacatatccgatgcctctgtcggaacatgagaaggtcaaatacactgttcaaacaaagacaaatgcgcccgaatttgctagggtggaaatgtccgttgttagagagcatgacgaatttatttggctacacaattgtctcgaagacaatgaggaatacgccggattcattattccccccgcaccgcctccacccgattttgatgcatctcgcgagaaacttcaaaaacttggcgaaggcgaagcgacgatgacaaaggaggaatttgtgaaaatgaaacaggaattggagcaggaatatttggcaacgttcaaaaagactgtcgcgcttcatgaaaagtttttgactcggcttgctgctcaccccgtttttcaaaaggaccaaaactttcgcgtgtttttggaatatgaaaatgatctctcagttcgaagtcgaaacaagaaagaa

SEQ ID NO: 92651 - DNA, 591 bp, Heterodera glycines
atcccatcgagtatcccatcgacgtcaacgcactctctgcaatcaagcaacatcaccatgggagtcacaggcctgaccggcttcatcgaccaccacgccctggtgcgcaacctgaccttctccaaggccgccaaggccgcccaagatgccaacgagcacccgcacccgcaccggctcgtgattgacgggtcgtcgctggtccaccacctgtacttttgcaacctcgactgggccatgggcggccagtaccacgccatgatcctgctgctcgaccgcttcttcgggcacttggccgccgccggcattgaggtggccatggttgtctttgacggtggccgcgctaccgcaacaaaggaactcgtccgcatcaaccgcgacaccaagcgcgccgaccactcgtaccacgccatgaaagccatctctgtccaaccgcttgtgcacctgcgccacggcctgcccgtgctcgccacgggcgaaacctcgtcgcgcaaccgccggtccttcggcaccgacccgaccttacccgtgctcgccatctcgcttgccatccgccacatgcgcgacgtactcaacatccctgtgcgtgtggcc

SEQ ID NO: 92652 - DNA, 627 bp, Heterodera glycines
attatgctaaatttattgctgtttttgctgattgtgtccccaattttggcgatcgaaaagccatggattcgccgtgatccgatcactttgactaaattttcgtgccattttgcgctgaaagaagcgcccaaatacaaatggcaagagctgtggtacgacaacatgcccatcgatcacttttcgttcagcgacccgcgcagctttcggctgagatatcttttgaacacggacagttttcgtgataaaaatgcgcccattttcttttacaccggcaacgaaggcagcattgagggctttgccgagaatacgggcttcatgtgggacattgcgccagagtttggcgccgccattgtttttgcggagcatcgcttttacggcaaaacgcaaccgttcggcaatgagagctacacaaaattggaaaatttgggctacctgagctctgaacaagcattggccgactttgctcaactgatcgactacttgaaaaatgagaaattaccgaatgccaaacattcgccggtcattggatttggcgggtcttacggtggaatgttgacggcatggatgcgcatcaaatacccacacctcatggacggtggcattgcggccagcgcgccggtgttttgg

SEQ ID NO: 92653 - DNA, 453 bp, Heterodera glycines
gagtatgcgaaagaggtaataaatgcagacaatcagttaacaatggacccgaaattgtacttcgattcggacgatccccaatggctgagttggatcggacaattctcaaaagagatgagtcggtgttcgttgaacacggacgagctgaattctgtccgagtttgtaccagggaacagttttacggtccggcgggggtcgaagcgatgaaacgcagcggcgaattgtacgcagagcacagaaacgactatgtcctcgtgttggtcagcggttgcgtcgtctgtccctcggggttcaaccaaagtgttccatgctcacctcgtgctaccaagaatgggaaagtgtgaggtcagtgagcgaaggaatgccaacgacggatttaaaacattcgcaattgcccaacaactaaattcccatagttctaagcattgtcactctctctttttacttaattt

SEQ ID NO: 92654 - DNA, 587 bp, Heterodera glycines
caccaaactgcgccaggaagggacagccttttgtgccgtttggaacccgcaaaaccataacatagtggcagtgtgcaacaaaaagacggggctgttggtgtacgacctgaggatgagcaacaacacttacgccgaggcgggaaaaatcacgaaaagcgctatttgtgccgattggtccccctcgggtgaattgcttttttgtgctatcagccgttccaacccaatttgtttcaatttgcaaaattccgagcatttgcggctatcagacccaaaatactcaaacatttgcacaataaaatcgtgctcttttgctggcgatcagtatttggtcacaggaagtgacgattggaatatttacgtgtggaaagtgccgagcaattgggacgatttcgccaatggcactgtcaatgttcactccgttttggagggccatcgctctattgtgaaccatgtgaagtacggaccacgcagcaatttgcttttgtcttgcggtgtcgagaaaatcattaaatgttggagtgggctgcctttgcgtgactcgtaccaaaatccgaaaaaacgcgagcgcatttcgacgattcttcccg

SEQ ID NO: 92655 - DNA, 597 bp, Heterodera glycines
ttaagaatgaatgtccaacctcctcctaccgccactcattcgcagccgacaattttgccgatgccaattcagaattggtcccatgaattgggcattgaatttggggacgtgctcatcgctgatttgctgcgtcgtatgtgcagtcccgatttttcctcgtctttggcgccctcagctcgttggcatgacatcccattcttcgagcagttccgcagcgatctccaattccaatggactctgctccgatcggtgctcgtcgggggcaatcgtgggaaattaaatgccaaactgttgtccatccttttttggactgtgtcggatcgcgaggaatggcaaaaacgaacggttgcccgactcatttatgcggcaaaagacgacaaagagctggccaacctggtctccctcgtcattgctgtgttgccccaactttgccaacaccgacaacagtcgtcgggtgaacttggtctgatgagtgctgccattttgcttgctttggccgatgcccgtcgctttggcaccgaatgggaccaatttgtgatggccaccgatgccagtggaagcaccgacccaaaaaatggcagcaaagtggtggagaat

SEQ ID NO: 92656 - DNA, 420 bp, Heterodera glycines
attctgcgcgtccacttgacacactctacctgcgtcacactccaaaacgcatcatgccaaccaccgcaaccaccaccagctcaggcgccgtcgtcccagccaacgcgggcggcatctccctcgcggagcacctcccgccctggctcaccaattcgctcgccaacctctcgaaatggctcgtgtggccatttattggcggcatcatgtacggcgtgggcgaaattacggccaaggaactgctcgcgcgcaaggcaaagtggggcgtggccccctcggcacaggctgccgtggccaaggcacatgtcgaggcgcataggaagtttgaggaggagcaaatgggtggtgggaaggttgtggcgattggatcaacctcgttgcggcggtaaaagcagttccgagtctgtgatgcgtggtggagca

SEQ ID NO: 92657 - DNA, 318 bp, Heterodera glycines
gagaatttccatttataatggccttggcccattacggctttttggcacccaaacgacgcattgagccggccggcatttcttatgaattctcgttgatcaaagatcggctgatcctcggcctttccacacttcccgtccttcaaattgtctttcaaaacagcaggacgacggatggcgacgacattgacggagccgctgttagtggaacaaaaaatggcatatattggccgctttattttcttgatcaaattttttgtttggatttcaatgcgttaaaatcataatcaacgcgaaaaaaaaaaaaaaaaaaaaaaaaaa

SEQ ID NO: 92658 - DNA, 493 bp, Heterodera glycines
gtccatttaagaacaatgaaattgttgcttcacaatttcttttcatccaactttttgaagggtgtcaccaacggttacccacttttgcttcgtgcaaccaaaattgagcgaatcgacggcacggaattcaatggcgattttgtgaagaaaatgatgccccggcttgactacccggcgctgctccaagcagcaaaagcggtggacgaaagggcggcggacgaattgcccaaggaattgggcaccgattgggaaaaggacgacgacttcctcaaaaaggtccactctctgctggtcagttacgaaattgtggagggcgaattggagtgtccggagagccatcgaattttcaacatcaaagaaggcatcccaaactttttggtcggtgccgacgaagtcgaatgaatgaatgatcatcagtttatttgtacaccatttctcgaattttcaaatatttgtttttttcaataaaatgataaatgctgattgattaaag

SEQ ID NO: 92659 - DNA, 511 bp, Heterodera glycines
gtggtgccaccggcaaagaagcggcggccaacaaaatcggtgtcgccgccgtcgctttgtcagaggcggacaattcgacgacgccggcgccaccgccgccgccttcgccgggtggcagcgatgacaagaaaaaggacgatgactattttttgccggacgaggatccggcaaaaaaagggcaacggaacggacacgggcgacgacggcaaaaaaacggacgaagcgggcggagcatttggcgcggggtccatttttgttgccattcttttcggcatggctttgatgttcggactgatcaaaaatgtatgtccattgggagaagcggcgcgagtcgggaccccccgtactatcagatgtattgaaaaaacctggaaaacattggggccaaacaaacaaaaatttccttatttcatttgttcgtgttttttgcaccattttctatcaccttcccattgaaatttctcttaccaaaaaaaaaaaaaaaataaaaataaccaaaagagcctctagg

SEQ ID NO: 92660 - DNA, 214 bp, Heterodera glycines
tgagagtttattgcaacgatcggaacaagacattcctaaacgcgactacctttattatttggtcctcgatcactcgccaatctcacagtacaaccgctcgctcgactacatcaatttgcttctttctgccgaatccgataacccccaggcattgtacctgaaggaattgatcccacacaagatgaaacgggatggattgctcgacttggcactg

SEQ ID NO: 92661 - DNA, 526 bp, Heterodera glycines
gtccgaacgtccgaacgcccgccatggcttcacccatgttcgcagctctgctaatggctctcttggctacaactttggtggaaggaggacggctgcctctgaaacttcctccaaaactacctaagccgaagacttcttcactgccgcgagcctctgaagttgcaatcataaactcctgcatcacggtagcccagaagggattcaaacctaccgattcggctgttaagacttttaatgcctgccaccaggactattggggacgatccgcttccaaaccagccaccggggacttgctgaaaagtttgaaccagtgcactcgtcctgggggcttcaaaagccagagcacagtttacaaaaagtacgaaaagtgtgtcttgcggcgtgctggtcggtaaatatatcgagaattcctcaattctggaattaagttcacaactacttgagcacttgccactcttattggcagttttcagaaatagaacctaaaagccgtgcctttttcctacatagaatcaggtcaaactaa

SEQ ID NO: 92662 - DNA, 588 bp, Heterodera glycines
tcttcttcacaagtcaatacgaagccttggagatgaaagaccaagaagtgcagatggccagggaaccaaccgcggccggtgcgtttggcaacggcacagcggatcaacaaagtgccggggatgaaaccgtttggcgcagaattgggccaagaagtcaaacatcttccgcccaggtcctttctcccggctaccaagaccccttcacgggcacgaaccgatacatgccgggctgtaacaacggagtgacgacggcacaacaaaatacgaaacgtagtccgattgtgcctctgccagacaatttctgcacttttggcctcgacggtgtgtccaaaaaagtgattgaacggctgcgcgagatgaatttgctccaaccaaaagcgttgcaactgaacgatgacgaattcgcttcggcagaagtgatactctcccaagctgactttgccatcaatgagtgccaaatcgtcgcattagaaaaaggaattttgtggtcgcccgaaacgattgtgcccgcgttggatttgtttcgaattgctttgctccatccaaaactgaacgaaatcttttgctcattggagtccgttctcggaa

SEQ ID NO: 92663 - DNA, 344 bp, Heterodera glycines
  unsure (1)..(344): unsure at all n locations
ctcgcgtagtgttgtcagttgctgtctgtcccattctcgctgccccaattcattgacaaacttggccattctctcgccacctttcgtgcatcctccacactacgcatctgcacgactctcatttcgccgaagcggtctgtcaaccaagaaatcagaatctcatgtatgacaactgagaatcaccgccgacataaccagcaatttccctgcgcccttagagctttgccttgccgcttttgccctcctgatgcttcttgagatactggatcgtcttctccacgccacccgccttgccaattacaatacatacaattcaagattcnaaaaaaaaaaaaaaaaaaaaa

SEQ ID NO: 92664 - DNA, 572 bp, Heterodera glycines
cacactcaatattcacccgtcccacacacatctttcaccatgctcgctaccggcaacgctgcccacacctacggcaagcctaccatggctattacccacattgattcggtcgagatcaccgtcatcgaagcccgcaacctcatcgccggcgaccgcttcaccaagaacgacccctacgtcaagatccgctcgggcctgcacgacaagtcgaccaaggtgcagtcgggcaccaacccggtctggattttggtgctcaagatcgaggccagccacctctcggacaagctcgtattcgaggtttacgacaaagaccctggtcgtgacgacttcttgggcaagtttgagcttcccctggacgagctgcgccgctcgggtaacatggatcgctggttcacgttggctgacaagcacggcaagatgggtggcaatggcgagttgcatttgatcctgaggccgcgtggtcacaactaagggtcggtgtggttgtagttctcggctcgtgtgaggccgaagagtctatgtgtgtgatattccttgatgatggtgtcggttctagtctcgcttgatttgtg

SEQ ID NO: 92665 - DNA, 134 bp, Heterodera glycines
acagacaaaacatacacaatcagtggaacaccaacgaaaccacccatttgggagtaatgactaatcacccaatttgaaagcaaaagagagagattggacgaacgattagtgatggcattagaaaaaaaaaaaaa

SEQ ID NO: 92666 - DNA, 482 bp, Heterodera glycines
atttctttttgaaaattttacaaacggtttcttttctgcgaatggcacttccaacaaaaatccaccaaattcccaatttactcacagttttcatttcgtcgtcacgttgtatttacgagaatctcgcccttgaggaatggctttttcggaacaatggcgtgaaggaggacggtgattctcttctcatttggaggaattctccagcggttgtcatcggcaggtatcaaaatccgtggttggaaagcgatgtccgtttctgtgcggccaatggcattcgaatttcgagacggtacagcggcggaggcgctgtttatcacgacgaaggtaacctgaacattagtcttatgaccacacatgaacggcattcgcgcaaaaagaatttgcaaattgtggccgattttctgaatgccaaattgttaggcggttgtgcttctgccaccgctccgcgactgatcgcaaacgaacgcgacgatttgctaatt

SEQ ID NO: 92667 - DNA, 640 bp, Heterodera glycines
gtaatgaacaacgccaacgacaaatggacagcgaaaaggaggactcgaggttcgaatgcaatatttgttatggacatggccaaagatgcggtcgtttcgatgtgcggccatttgttctgttggccatgccttttccaatggatggacacgcgtccctatcgccagctgtgccccgtgtgcaaatcggcgattagcaaagacaaggtgattccgctctatggtcgcggtggtggggacagcgacccgcgcgagaaaattccgccacggccgcaaggtcaacgcacagaggagacaaatcagggctttcccgggatgttccattggggcggcgacaacggtggccatggcggcggcggtgtgcaattttcgaccccgatttctctttggccgaccaacttcgtccgacacggaagcgccatgtccattctctgtcttggcaaagtggccgatgtttatctgatcgacgagcccagcgcgtacttggacttcgagcagcgcttacatgccgccaaaggcataaaacgcaaaaagagtggcttcattgttgagcacgattttatcatgtccacttatttggcggaccgcgtcatcgtttttgacggccctcaaccgctggtgaacggaatgaaccgttttctga

SEQ ID NO: 92668 - DNA, 593 bp, Heterodera glycines
attgcaaaaagtagagaaattagtgaaaatcaaacggagagggaatttacgactccgcaagtaacaaatgggtcgacgggggaggagaagaagcgcaatgagaggagaaaagaagcagacaaagcaccggaccaacgatcgaagaaagggcacgacgaggaagccaatgctaacgaagtgcactccaccaccggtgcccagacactccctttcacagtcagtgcccgattgtttatattcacagctcggactttcacttatgaagtggatgttgcgcctgctgttgcggaacgatttgaaagtgctcaggttgttgacatctacaacagtttaccaccaccaatggatccacgaatgaagcgagaaaatgcgaatggcatttcaggttcagtgcccactcccgaccgtttggttctccggcagggaaaatgtcatcaacgtattgcccaagcctttttctgcggtggtcctttgtctgcattggcaatttgcccacgagcgacaaaaaaaggacgagaactgattgccattggcactttcgccgatgaaaaaatgctaaagatggaaagcgaaagtcaagacgcatttgtcca

SEQ ID NO: 92669 - DNA, 397 bp, Heterodera glycines
ccatcgaatgtacctgaccgtgtgcaaccgctacgtcaagggcaagaagattgatgccgccgtggacctcctgaccaacggcgccaagctgctgtgcgagcacaagcagtttggatccgcactctacatggcgtcggtcgtgctcaagacatggaccgacgaggaggtggacgtccatgataagacgctcgggcgcctgtttgagctcatggacttgtttgcgggttattcgcgcgagtttaacgagctgatgaagaatggcatcaaatggacatccaagtgtggcgagttctccaccggcgagccggccctccatcaccatgttggcgtcacctttgcaaacgttgccaaagtcgacgaggctcatcgccacttcatgctcggcaccaccgactcc

SEQ ID NO: 92670 - DNA, 637 bp, Heterodera glycines
taatttccgaccaagaaggagccaattgttgcgatgccaccgtcggatttggaagtgccgacttggagaacaaccgattttcaaacgacagccctgacattgaatatacgcttgagaaattggctcgtcttgagggttattccgtcaaattaacgtcagctgggcaagtttatgcgaattttgggcatcagttgatacaacagctgggcgatgaacgtgacaaacgcagaggacgaaactcattgagccgcgatttccgcaagctctacgagtacataatcgaagttgtggactcgtggtattgggagattccattgcaatatccaatgccggaaaaaacgcaattgcttgcctttttggatgacttgcagaacaaaatggacttcgaatgggcggaaaaacgcgagactgactttgtcaattttgtcgagcagtgcgttgctgaagttggccgaaaatttgatcaaatttgtcgctggtacatggactcttatttacccgcctttgattatatcgccgacacactgaaaaagagttttcaggctaatgaatttggctttttgttcttcgacttcaatttttcaaaagtgacactcgacgacttgctcataagggctggcaacaatttgcgattgcc

SEQ ID NO: 92671 - DNA, 497 bp, Heterodera glycines
  unsure (1)..(497): unsure at all n locations
ttctgcccacccataatgtttcacagcgaattcctcccattcgttgtgccattctttttctgcccttctttgccaattgccaatggttcgcttcctttcgctttttcctttcccttcgctttttctctcctttttctcctcccctcgtccgtttttcctttcccttctcccattttccgctttttgctatgatttggccgccatttgcaagtcgtcctttgattgtgacttcgtcgggggaatgacttgttcgatggccctttgtgtcccctcaaagtgccacctctcttctgaatgtcctaccggttgggtttgcaccagtcaattacaatgccggaggggctgcttttcggacgacgactgcgcattgatcggttggttttgcacggcccaaaatgtgtgtgaacaaggcgattgtggcgattgtcgaatgggggaaaagtgcgtggaaggaaaatgcattccgaaatggttcagagggatgaagcgaanataag

SEQ ID NO: 92672 - DNA, 469 bp, Heterodera glycines; identical to SEQ ID NO: 74222

SEQ ID NO: 92673 - DNA, 185 bp, Heterodera glycines
gtcaaattgatacgaaaaaacaaaagcctaaaataacgcatgaaggccagcttcggccggtgggctgatcgaatgaaagatgtttcggagacggcacattctcattggcacctccaatgttctaccaaataaattgtttccatttcttcattttgttaattattatatttaacgaaaaatttcat

SEQ ID NO: 92674 - DNA, 384 bp, Heterodera glycines
  unsure (1)..(384): unsure at all n locations
gaaggacaaactttgcgtgatagctgaacccagcttggctgagaagggagacagcggtggccctttgatgtttaaaactggcaaaaataataattgggcacaagtgggcgtcgctagcacatcgacgtgtaacccggaaaagcccaaaagcaccgacggtcttacaactgactacactcaaattgattgcaattggatagaagaagcgacaaatggagaagtgaagtgcatagaataatgaacgaagttgatatatttgattgaactgaaacttttttaatgcttttaaatgcactaaaatattctatttaaataatttttcaattctttcaaaaagcatatttaaaataaaaacgaanctccnnaaaaaaaaaaaaaaaaaaa

SEQ ID NO: 92675 - DNA, 546 bp, Heterodera glycines
caaaacccttccgaaaccagtgagtgcgctctgctcagcccaagcagagaaccctcgccgcaaatggcaatttgccatcgcctggcttctgatcgcctccaatttgttcgtcggcattacttttgcgtgcattgtgccctttttcccgatcgaagctgaagcgaaggggctgagcacctctttaggtcggcttcgtgatcggcatcttccaactgtgcagcttcttcgtttcgccagtcttcggcaaatacttggttgttctccgcgttcatcgtgccttcatcggtggccttttgttcacttctctgtgcacaattgcacttggtttgtccccatgtcttccgttcggcacgcctttctttgccggcgttttgcttctccgagtgggccaagcaattggcaatgcttcttactcgaccagctcctgggcactcattggccatttgtttccgcaacggattgtgctgttcacgggccttttggaagtggcatacggacttggctatgtgcttgggcctccgttgggcagcgctttgtttgaattcg

SEQ ID NO: 92676 - DNA, 558 bp, Heterodera glycines
tttctccttttgctttcgttcgctttcggcgccaccgcgcgaattcgccggcggtagagagtcaattgcccagacggacggtccttttgtccggagaaaaccacgtgctgtcagctgtcggatgagggccattacggctgctgccctctgccaaaggccatttgctgcatggaccatttgcactgctgcccgaggacacccaatgcgatttgccgcaactttttgtgtgaattcggacggaaattcgcagccattccatcggaaaatgccggcaaaaactcaaaacggagagacagttgagcaaaaaggaacggacaaagaagcgacagaagaagtgatttgccccgacggaagttcgaagtgtccgccccgtgccacgtgttgtccgctcggcgacggattcggacgccgtcgaaaagacttttggcgactcgaaactaacgctcagcaaagcatatcctacggctgctgcccagctgaacgggccgtttgttgcgcggaccacgtccactgctgtccccacgggacgcaatgcaacgcgagggggggcgagtgcga

SEQ ID NO: 92677 - DNA, 388 bp, Heterodera glycines
gtggtgccaccggcaaagaaacggcggccaacaaaatcggtgtcgcctccgtctctttggcagaggcggacgattccaccacgccgacgccaccgccggcgccttctgcgggtgacagcgatgacgagaaaaaagacgatgacgataaaaatccggacgaggatccggcaaaaaagggcaacggaacagacacgggcgacgacggggaaaaaactgacgaagcgggcggagcatttggcgcggggtccatttttgttgccattcttttcggcatggctttgatgttcaaactggatcaaaatgtatgtcccttgcaaaaagcagcgccagtcggacccaccaaactatcacatgtattaaaaaaacatgcaaagcattgggccaaaac

SEQ ID NO: 92678 - DNA, 499 bp, Heterodera glycines
tgaagaaccgacacagcagatttctcatcccattacgctgttggatggccattctgacgtcataatggctggggaatggctgatcggcggagatcagatcataacggcatcgtgggatcgaactgctaatttatttgacgcagaaagtgggaaaatcatcaaatgtttatcaggtcatgatcgagaactgacctcatgttctgctcatccatcacaaaaattggttgcaacggccagcaaagactttactttccgcttgtgggacttccgagacccaatccattcagttgcagctcttcagggccacaatgattttgttacatcggtcggcttctccgccctccaccacattgtgtccggcggcgatgaccgaacagtgaaagtgtgggacctcagaaatatgcgcagcctaatttcagggattcgggtaaacatcgcggctaaccggaatttcaatatggaacaacaaaaatttgatctgcaatttccccaagacaac

SEQ ID NO: 92679 - DNA, 528 bp, Heterodera glycines
gcaacaaatccaagcactgatcggcgccaatcgggagctaatttgggcgttcaacgaaagtcgaagggaacacgacgaactgatgcagcaattacgggtcatggccaaattggtgaacaacggaacttcaacgcgtcccgtgggggtttaaaacaccggcgaaacattgcaattcgaacagcaaaaaacgaagagtgttcgcccgaaacaaatcgccaaaaagaatgccaccactgcttctgctgctaacagtggcggaggagggggaggacgacagagaaaaaagcaatgcacgggaatggtttacgttgcgcaagaacagctgccgccttcgctggccatccttaagaaaaagccgaccacttccgcaccctttcccatttctccgagtgcgccttccgaagacagtgaccaacagccgacagcttttgacccaacgcccaatgaacagatgcgagaccgagtgaagaaggacatcatcgaggcggtggaacgtcgtcaaaatgcgaattcactggcaaacagaga

SEQ ID NO: 92680 - DNA, 652 bp, Heterodera glycines
acgcgagccaacttttgaaggatggctggaacaaggcgacactctgtacatcccgaaggggtggattttcaaggcgagtgccggtgacctccattcgctctgtgatttcgtgtccatttgtcgtggccattctttcgccgactttcttgagaaggcttacgccgaattccttaagacaatggtttcgggctcaaaacatcttcgtaagaatttgcctccgcttttgttcgacatggccgggaatagcgtaaacgattacccgggcgaagaaacgctcgaggagaaaattattcccgacacggaaattttctcccgtgaatctggtgagaatttcgctgccttcggtccctcttacagcgatttgacggcccgcgaattcttccgtctctctttacatccggttttgacccctgacgaagaaacaaacatttgctttggcggcgctattgactcctcgttggacattggcaatgaaacggaggtcagattggtgcgaaagcacacccaaccacttctttgtgaaaacgctgataaggcattcattgctcactgaatggcaaattctcgaagttgtgaaaaatatcccgaaggaacaattgattttaccattgacgtttgacgacggattcatgactttggtcgactcttatcc

SEQ ID NO: 92681 - DNA, 549 bp, Heterodera glycines
attttacccaagcagggcctcagttggccgctggccgccttttttatggtcactgacatggccatcggcggaatggtcactttgcccggggcgatctgccgaatcggtctctcccgcggattggcccttctccttctctccggtcttttctgctgttgttcggccattttactgggccaatgttggctgtttgtgctcgacaagtcgccccaattacgtcaaaagcattgccgaaggccatacgtttaaattggcttctgtgccctcgggcgttggatgagcattttggtgtccgtcggtgtcaatgtcactcagtttggcattgccacggtgtttttgctcctttgtgccgtcaatttgagccgcatttgttccacgttgttccatgtcgacctttcccagtgccttttgctgctcattttggcacttttactcctcccgctcactttgctaaagtctcccaacgaattttggccaattctcttcggcggaatgatttgtaccgttgcgacatttggcttcattttgttcggcatttccattgatttg

SEQ ID NO: 92682 - DNA, 200 bp, Heterodera glycines
cactaatgagaactcagtgggtgatgagcataatgcggcatcgtccattgtccgtgaacgccgaggcgatcgcccgggacattatcgaagcaaatgaaagatgatgaggttgtaaatggaaaaggaaaaaagcagcaattaaaagaatttttggaaaatatgtttgtcgaaatatgttttacaatttgcataagattgaa

SEQ ID NO: 92683 - DNA, 520 bp, Heterodera glycines
gacgaccgacacccgatggagtaccagcggagcattgtgacaaaagatttttaccgtccgatgggccctccccgcgacgcaattgcgcgtcgcccctctgaattagcagccgttatcactgaggactttcgtgatccgaatgtgttcgtcggtcctgacggggctctgttcatgacaacttcgagccgtttcaccaatgggacggggggcgtcgtgctgcttttccgacagaatgaaacagcggccaatggggggcccgaaggatgggaatttaagggcattctccacaaggacaaccgatggcataatgccgtgtgcgagtgcagtgggctaatccctttgggcgacccgctctcattgcagacattgtgggcatttgtctactcaatgtctaacagcgtggacgaggacggaagacaattcttaaacccagtaattgtcgggaattttaacgggagaaagttcacgccgttatttgaacaaatgttggacttcgccacgggttcttacgcttaccagg

SEQ ID NO: 92684 - DNA, 509 bp, Heterodera glycines
ataaactttaattggttgggtcctctggaaaaagacccatagaaattttcaggttcagagaatccgtttcttatattcgtttcgagccttgaaaatccgaactcgaacaaaattcgaaaattcattccgcaactggagatactttttttgatgcttacttcctcgagacgagcccatttgtataccattaactatcctcaataatttcgcgtgtttagccaatttttgaccatcaaatgaaattcaaatttttgttagaattcgtttgattataaatttgcttgagatttgttgtcttccttttcctgtatgtgtgcatttttctctttaggcgtgagtttctcactgctgttgatggttacggcacagttgacaattggaaacacccgagggcgacgatgggagcgtcgactttgtccagcaaactgttttaggaagaaaagcaaacaatccaaccttcgtttaatgcaattattaaatcggattaactccaataaactttttgtttg

SEQ ID NO: 92685 - DNA, 567 bp, Heterodera glycines
acgatctatcaatatggccactgtcaaggacgtcgctgccgctgatttcatcgccgctttgtcggcccacctcaagaagggtggcaagatccaagttcccgagtggatgcagtttgccaagactgccaccttcaaggagctcggcccctcggacgctgacttctactacgtccacatcgccgctgttgcccgccacatctacctccgcaagggcgtcggtgtcggtgaccttcgcaagcgtttcggcggcaaggagcgccgtggtgtgcgccccaaccactctgccgttgcctctggctcgctccagcgcaaggctctccagacccttgagaagctcaagtacgtcgagaagtctgctgctggtggtcgtcaaatcaccgccactggccgtcgtgagctcgaccgcattgccaaccaggttgtggccatcaagaacgccgaggctgcccgtcttgctgaggctgctgctgccgccgctgccgtcaacgttgaccaggagtaagatttttctggaaaatgtcttgaggtttcttgtttcgcttgcggatcaatgtaaatcttgatttg

SEQ ID NO: 92686 - DNA, 640 bp, Heterodera glycines
actaaaatcatttcacactaaagcgactccactgccatcggcagtattaccaaattgtttttacatttattcaaatggcactttccgcctggccaattctttcttctgaaagagatgagaaaaaccaacaacagatgttgccatatgcaaaatacgaatgtgccatttcgtttgatgatggaatcgaagtgccaattagtaaagaaggactcctgactcttattcaatccggctttcttcgcgatgcacttttcatgaccacaaaattgctgaacaatattggccaagggatgacaatggcgggacgacaaacgcaaaacagccaattctcattagaggtttgggcatgtcgcttccaactaatgatggccttgcgaatgcacaaccaattgttagacgaattgactgcctttggcgagttggactcatccgaacttttccttccaagtggcgccaatgaattgaaaggttcgatggtgcctttttctcttcgacttttgcatgccgaagcgtcctcattttcaccattgccttactcgtcgatggttcgtgtacacaaacttattgagaataccgtaaaagctatcgaaattgctcgtcggaattttgcggccactgattctgaacttggcatttggca

SEQ ID NO: 92687 - DNA, 403 bp, Heterodera glycines
  unsure (1)..(403): unsure at all n locations
gttttgccattgctgtggtcgcctccactcttttccatttggactaattgaaaacataagaataatttttatcccaaattatgttttctcatttgaccttttccccatttctctgttcatttgttttgtacacctcagaagcattagccaaaggacggcttaaattttgttagcattcccactgagcattagtaactgttatttatttactcataatataataattctgaattgtttgtccatttgtcttttccacttttctattctttgttatttattggttttcttgtcatttttccttttctggtgccattgtcatttatttttgaattttctattttttatttttctttaattttttaacaaaaataaaaacattttctnnaanaaaaaaaaaaaaaaa

SEQ ID NO: 92688 - DNA, 513 bp, Heterodera glycines
gaatttcatatctctgaattagcctcggcaatgcattctctcgccttaatttccctcgcttattggctctcactaacacacacttgtccgactcaatcctccagtcatccgggggtacactctctatgagttacgaaaagcactctgggtacacaaaattcaaactttacgaccactacaaacggccggacgccgactatttaatgggcacgacgacaacgtgatgaccatgtcacgaattccaaagatcagcgggaaagaccaccgaactgaccaccatcaacttccaactcctcatttaccacaactgcgatgatgtcatgatgccttgccaacgcaaggtgaccttcaacatccccgattcgtacgtcacgtcgggtgcggtgccggcgaaattctttgacattggcacagtgaacatgcaaatcatattcgaccacgaagagcgatcatgtattcattaattgacagatctttatttttttattgaacaatgaatgatttgtgagttaa

SEQ ID NO: 92689 - DNA, 235 bp, Heterodera glycines; identical to SEQ ID NO: 69107

SEQ ID NO: 92690 - DNA, 576 bp, Heterodera glycines
ctcgccgcaatggctcctccgccgccacctccagttgtctctcgcccgccaaaacctgtaccgcctcctcctggtggccacgatcccccactgtccatcacgcgcacgctcactctcgagccagcatccacccaagtcattcgcgatctcatcacacgcactggcccatatgcctacctgcccgtcgtgcccacggtcaccgtccacttgaaccccaatgacccacccacgcgccaactcctcgacttggtccccgatctcggccaagccgtcctcgtcgccgccgatttcgtttactctaccctctacggcagtgtgggaatcgctcgccacgaaccagccgaggacagagacgacgaggaaaatggcgcattcaactactctcaagccaacctggcacccaacactgacgacgcattcacgtcccgcccgccccacccatccgtgacaacaactgctgccgaaatcactcccttgccaccaccaccaccaccaccaccaaccgcctcagccctccccaccgcaccactcccaccttgcggcccaccgccctctctccacccaccgctcccaccc

SEQ ID NO: 92691 - DNA, 639 bp, Heterodera glycines
ataaagccatttttttcgtaaaactcttgcaaggaaaatcgtcaagaaaattcgcagtgatgtcatctgggtctcgaggttttggacgaggcagagggggcagaggaattgccccaagccaaactgagaatgggacgattcatctttcgaatgacagaattgttggagcatattcagaggctaatccgaacgaaggaattatcatcaatttttccgactctcagccatcgcagcagccgcccattgtcaacgttcagacgaggggaattttgcgtaattgcaacggcattgacgcagcatcggatgtgcagaaagcaaatggaactgccaccaatgaaggcgaacatcagcttcccatcgccgatcagcctgtgccatttggaggcgcttctgtgccgcgtgtcgcttccgtcactgggcgagggacgcgaggagtgcgcggcggattgggaagaggggcaccagcacaaaacaacaacatcagtcgtccaccagtgaatgcggagatttcgccacccaaatcggtcaccttcgactcgacgaccgttttcaacggtagcagggcgagaggaggcggaggaacgacgagtcgtggttttggaagaggggccaatgcagttgaactcggaccaggagacc

SEQ ID NO: 92692 - DNA, 303 bp, Heterodera glycines
attcgaaatagcatgtatgctgataagcaagctcaatctaggaaaaaaccaaaatatactacaaagtacgcatccaaataaaaaatgctcacttaattttggtagtaagattggttttataagtacaaaaggatcgtagccaatatgcataagactaaaggctaaagaagaaagaagcgctactaaaacatatagtttgcaactatacttttttgcttcatataacataaatcgggagataatttcttttataaatggacttataaagcacccatctagtatataattgcaaaatttagtttt

SEQ ID NO: 92693 - DNA, 578 bp, Heterodera glycines
agttccccgattcgggaaagcattgctccgtgccggactgtcgacaactcgactatttgcccatcacttgcgatgcttgttcgcgcattttatgcaaacagcacagaacgtacgactcccacggctgcacagagtcatacaaaaagaatgtccaatttccgatttgtccgttgtgccaacaaacggtgccaattaaacgtggcgaaaagcccgacctgcgagtcaatgagcacatcgaacgcgactgtcgttctgagttggcaaaaaagggacgttgggcacctaaatgcggcgtgaagaactgcttccggagagagcagctcgtgccgatggtttgcaaagaatgtgccgtccatttctgcctcagccatcggcaccgatctgaccaccaatgccccaaaatgccaatggtttcccatcggacgacaaagccaaaaaatatctcctcaaaaagtgccgctgaacaaatggacgccctttttgctgcgcaattgcaacgcgaagaatactaaagctcttcccgtgacggcggtggcactttccctccctcctccaacaatggcactcggaacaacgga

SEQ ID NO: 92694 - DNA, 172 bp, Heterodera glycines
gtccacgatggttgcctctgttcacattttccacatccacaagaacatccaggacgacgctctgcaggacttgctactgttcacagagtacgcccgactggcgctggacgaggacaaaaagaacaaaccgttccactcgcttttgttccttgcccatgactggagtgtgcca

SEQ ID NO: 92695 - DNA, 547 bp, Heterodera glycines
gacttggcccagctttttgctgcccgtctttctctcctccgttttaatgtgagcatgttgggacgtcggccatttccaattgtccttcctttggattgtcctcttcaccgttctttatgtgctcaaaacgcactcatggattcgtcgggagcagcatcgaatgagcatgcgcagcatgattatgcgctaacgcaagatggtcatggcgcattacagccgcttcgactacctccccgcgtgggtccaattcccggacaacgaacgcatcaaatgggtcaacaaaataattcaacaaatttggccccatatcggcgagtacaccaaagtgttcctgaaagagttcatcgaaccccaaatccgtgcccaacttccggcgccgttcaaatccttcaaatttgtcgctgtcgacatgggcgacattccgttcagagtgggcggtctcaaagtgtacacccaaaatgtgggccgtgaccgcgtgatcatggacatggacgtggtgtacacaggggacgccgagttcgctgtgcaagcgtgcggcttccgtggc

SEQ ID NO: 92696 - DNA, 484 bp, Heterodera glycines
attaatcaaaaatgactatccattatactgatgattgggtgatgtaacagcactgggtagggtgaaaaccagcaaaaaatcactgtccaattctaattgtaatacttggggatgtagctacatgtggtcccgtccgacccagaggagaatgagttacaacatctgcttgtgatgagtggagatgtaacagcagttgattacgaccggaccaagaataaatgacatcgaatgctgcatgcgatggttgtttttgtaacatcactcgtcttttttttaaccaagcatacatcacttccaattctactgacggttggatatgtaacacccactgtcggactgctaggcaagcaaaggtgaccaattctactgatgattcaggatataacaacaatatgaggagtccacgcgaatggtcgcccgagttcaatggtaccccaggatttaatcgcctacctgtgcctctaatgaacaagttacctccaat

SEQ ID NO: 92697 - DNA, 636 bp, Heterodera glycines
ttgagactgaccttttggtcaatcggcgcccggaaaccggaccgcaccgacaaattggcgcggcatcgacccttccgacgcagcattccccccgaaacggcacggcattcccccccgaaacggcaccaacccttccgacacggcaccggacctctctcccgcggcattgtccccgagacggcacaaacatctccccccgcacccttccatcccgaactagcgaaaaataccttttttttgacattattggcaacttcgaagcgacggtgtacaactacaagggccttagcttcgaaaccgccacacggacgaatctggatgggccgacaaagcgcaactgggagaagtacattaagtgctcggcaagccattcaaggcatcgacaaccgccaagaagttcgaagggatcgtcgcaatgagtgcgtcttttccattgcgcttcggcgttcttttggacatgctgcatgtgttcgagccgctgctgccccgcttctccaaattgcgcgggctgtgcaaaagccgtttgcctgagggctttccggtcaaaatggagctgcccttgttcattggagttaagacatccattttcaacaagacgcgccttcgcggagacaagacgtagagcaatcattcaaa

SEQ ID NO: 92698 - DNA, 578 bp, Heterodera glycines
gtttgagcactttttacattccttccacttcctccttctcttcttccgtctccgatgtttcctcccttccatcctccgtcttcctcttcccccttcttcggcccttcccattcgtcctcctcttcctcttcctcctcctccgtctttcttcactcattccctcccgtgcagcccttgcagaaaaagcgctcgtcggcaaatgatggcacttctcctcagctgaaaaacattgttggacccgttgcggcggagaagggcaccgatgggcagaaggagccgtgcatttgcgagagggaccaggcattggttgtgtgccgaagatgtggccacgatttgattgcacgtgttcaattgtgctgcccgcaacatccgaaacggatttcgctgatggatctgcgcgagtgtcccaactcggcgtgccgaagtgtgcagctgagcgaggtcaaattgccgacggacaaatgaaaggccaaaaggcaaaagcgacaacaatttttgacccaaacattcacatcgaatcgttcatcaattcacttgctcacccacccattcagaacacgatgcttaaattaattgac

SEQ ID NO: 92699 - DNA, 635 bp, Heterodera glycines
aattcggccaggaaactcgcaatgcttgtcccaacccgatgaaatagcccctcgcacccaccgtctaactgtccaacatggcatcatcagcaaagaacacgatttacgttggcggactggcgcccgaggtcaaccggcacatgctcgagaacctcttcattgcctttggcgacattgtcaacgtcgacgtgccattcgacccgattgcccagtgtaaccgcggcttcgccttcatcacattcgaagaccccgaggacgcactggctgcaatcgacaacctgcacctttcggaaatctctggccggaccatcaaggtgaatctggccaacgccgccgcaatgagcgcttcgggacagcgcattcataccaaagccgtgtgggaccaagccgccattccaaccgacgaccttgttcccgcttcagggcaaccacagtccgcaggcgcctcggtcgccaagttgccgaagcccgtctcggccagcaatcctcgtgtttggttccaggtctcgattggcgacgtgcccgctggtcggatcgtgtttgagttgcgagcggacgtggttcctcagactgccgagaactttcgtcaactgtgcacgcacgagaaggggtttgggtaccgcgggtcgcagttt

SEQ ID NO: 92700 - DNA, 547 bp, Heterodera glycines
  unsure (1)..(547): unsure at all n locations
tttgttcatggtggtcataattggtcatcgcggagtgggcaaaaccaatttgctccttcccttttaagacaacactatctccaccacttacttcacaaccactggtgagtattccgcaacagtgaccatttccgtgtggggcaacaaaattacatttgagatttcggactcaacctgtcaagaacgattcccatcaataccttccacttattaccgggggactcgaggtgatatccttgtgttcgacntgaccagcattgagtcgttcaacaccgtgaagcgttggcttcacgaaattgacaccgattgcgaaaacgtgcaaaaaatactcgttgggaacaaagtggacgagccgagcagacctgccattcccgaaactgatgctcgacgttttgcagagtccatgagaataaattatttcgaaacttctgccaaagaaaatctcaacgtggagcatatgttccaatgcataacccaaattgtgctcgagtcgtgcgtggaccgggagaagaacgatcctagacaggcgacggatgtgctcaaaatg

SEQ ID NO: 92701 - DNA, 598 bp, Heterodera glycines
gacctttccaactttcctctctccttctccaatcgtacgaaccgaagcttgacgctttcgctctcgaatcaaccatcaacccgaagctggtccttcaccacacacccaccatcaccgccaaatcgacacttgtgctgcgcactgtctcgagactcgctcacgcaatcaactgcgacaagatccatccacggctcccgactcgtctccctctctactcccacttccacactccaccctcaaccaccctctaccaccatgggtcaactcatctggtcactctggggctactacatggcgctcacgtcggcagcagccatcatggacggcggcctctggtccatcctctacaactacccaacggtcgaccaactgcgcgggcttcccatctacaatggcgtgtcatggcccggcatgttgtccatgatctttgccctcgtcacggtcgcggtcgaaaagtcactccggccacccgtcggattgcgtgccgtgttctacttgattgtctcgctgattggattcttgcaattctcgaccgtggtgggggcccagtgctacttttgcacatcgattgtgtttatgactgcggcattcaagggag

SEQ ID NO: 92702 - DNA, 644 bp, Heterodera glycines
cccttctcgtcgtattgcgagcctttcgatggctatttaaaatttgatggtgaatcgatttgcttctcgggttgggtccaactgccccaaggaatgttcaaacatcgcaaaaggggttgggctgttgtgcggaacaacacattctcaatcagccaagacgacgaaagtcgtactccgttctttgggccggttgaattgtccaagtgcgtttttcttggcaaagagtcagattccgaatctgtggtggtatttatactccgtgatttgtcaaagagaagcaaaaatcagaaacatttgctgaattcttcgggcgaacttaacactgtccgcttcacacctgaggagaatcacgagttttggctgtctctcatggcgaagtgctgttccccacgaaatgatctcttcggagagaaattgccgatggtcgaatgttgcgggaggctgtgggtgaagcaggggatcagtgggcattggaacgagggatgggcctttgtgcacggacactctttgacctattgggtgcaggcgccgaatgccattgcggaggtggacattcgaaaaatatttttggtcaagcaaaacgacattccctcctccgattggtgcaattacatcgaccattcgtcgtccggacctttgctgat

SEQ ID NO: 92703 - DNA, 535 bp, Heterodera glycines
attcgcttcctatacgtcaacgcgacaaagtctaaaaatcaacaaaaacacgaatgtggtcgtccaaggctttaccggcaagcagggcactttccacggccagcaaatgattgagtacagcacgaatgttgtggccggtgtgtcgacctcaaaagcgggcactgagcacttgggaaagccgatatttgcaacagtcaaagatgcccggaattttactggtgccgacgcttcagtgatttatgtgccggtgccctttgccgcggctgccatcgacaaagcgatcgacaccgaaatccttttggttgtgtgcatcaccgagggaatcccccaattggacatgatccatgtcaagaaccatcttctgaagcacaatccgactcagctgctcggccccaattgtccgggaatcattgcgcctgacaaatgcaatattgcgctaatgccgggtcacatccacaaaaaaggggttattggcatcgtttcccgatcgggcacactcacttaagaggccgttcaacagaacactgagaacggg

SEQ ID NO: 92704 - DNA, 613 bp, Heterodera glycines
gtgactcggttgtgctgtcttcttcatcttcgtcgttgtccaaaacaatggagagtgaaactaatgaggacgaaattgaccaagaagagcagggaaacgaacacactcaagcggaagaggacacttcccaccatcagcagaaatgttatgttgcgaaatgcttagactccattgcaaaactgcaaaggacgttccaattaagcaatgcctcggcggatgttttggaccgtgccgccgattatatgcaactttatttggaccgttatgcgaatgggaagttcggcgcagattgggttcggcgtatgcttttcatagcgcgaattcacggtgctccgttgtcaaggcttcgcttcattgacgtgaataaacacaaccgtaaaatggcggctttgtaccagtcgcttggcccgggctttcagacgcgttggctcagcggagccatcgacatggaacaattttttgctcgcatggattttttggagtcgaagtacggagagcgtctttgggaactccattttgtttatggctatgaaaatatcaaccgttctgaggggtcgtttttccgttggcaaatcatctcgactgtccgttcgctttataaaggaattctgcg

SEQ ID NO: 92705 - DNA, 413 bp, Heterodera glycines
cctcgtgccgaattcggcacgagggaactagtctcgagttttttttttttttttttttttttttttttttttataaaatatattaatcagattcaaacaaaaattaacaattaaataataaattggtctttccgggcggaagcaacaaattgattagtttatacacctttttgttctttcctcttttttgcttatcattcgtccgtccgattaagctcggcgatgtccaacgccacctcacaactttcgcgcacaactctctcttcatccccaacgaattgcctcagcaaccgttggcattcgtcggttgcaattgagccgagtgcctcggcacattcgtgcctaaccatgccattctctccgtgcatttgcagtcgagcggacaatgccgggatggcgacgggcgattgaat

SEQ ID NO: 92706 - DNA, 609 bp, Heterodera glycines
atctttatttatatttgagaatatgccaacaccaatttgcgatacgccttcgataagcggtgtaaagaaagaccaatttgaagcgacaaaaaaatggaggaaggccctcaaaaattttcacgagagtatgccattgtccactcaccggcgccagttgcgaacattcacagaaacattcactgggaaagatgcgttggattttgccgaacaaatctttccatcagtttttcctttatgcaacaccagggataagtccagacaacttttggaaagattcttatgctttgggtacattacaaatgtgcgtgatgaaaattgcaaaagcttctcagacaatgccactttgtataagtaggttttgcaacgaacgaattgcccaaatactctcgagtagtcaggaagacgaaatgaattggaggcgaaatgtttttttggcacggtcgtcttcagtgcgcgacaaagacataactgatcggctacaaattgaagaattcgcccccaccaaaaccactaatttgagggaagacttgtcaaaaatggcaaaactgaacggtcgcctttcaatctcatgtcaagacatctcggcaatggaaaaacagaaccaaggca

SEQ ID NO: 92707 - DNA, 624 bp, Heterodera glycines
tgaccggtctccaagtgcacggcaatgccaccgtctagggttacatttcggcacttcgccggggctcacggctgttggaattggatgtgtttgacggtgaacatggtgagccacaaataacgcacaaacgcacattcattggggcgatcagtctgcgcaatgtgttgaaatgtgtcaagaattacgcatttgtacaaaatccgtacccagtgatccttaccattgaaaaccatgtgggctttgtgcagcaacggatcatggccgacattttccaagagattcttggtgaccatttgctgattccatcggacgacttgcacaccaagccattgccatcaccgcagcaactgaagcacaaagtgttgttgcgtggcaaaaccgccggcggtgctaccactgctgacataaacggcggcggaacgcacgccgaaacgacagcggcgacaatggcaccggcgagtgttgccgcaaacaacggcacgccgtgcaccgcagcgccaccaatgggcactgattatgacaccagggaggagagggaggacagcccgaagcagtcgcaacgcaatctgccggtggacccaaaatttggccgactcatcgccttgccatccgtcaaactcagtc

SEQ ID NO: 92708 - DNA, 612 bp, Heterodera glycines
caacattcagatttaaaaaaggtattcagatttaaaaaaggtatagcgcttttattattgctttctacaacaatgctcgcatgtaatgcttctaaagaacgctgccgatcagaaaaacagcaaggatatatgcagaaaaataaaataaaaatacaaaaaacaagtaaagcagcacaagaaagaaaagaagcagcaaaagcaaaagcagcggaaagaagaaaagaagaagtaaaaagaaaaaaagaagaaaaagaaataataaaagaagcagaaagaagaaaagaagcagtagcaatagcagaagtagaaagaaaagaagcagaaataaaagaagaagtagaaagaaaagaagcagtagcaatagcagaagtagaaagaaaagaagcagtagcaatagcagaagtagaaagaaaagaagcagtagcaatagcagaagtagaaagaaaagaagcagaaataaaagaagaagtagaaagaagaaaaaaaaagacagaagcaaaaagaagagcaatagaaaaactggacccactaacagcaggggaactggaagcactaacagcagaagaacagcaggaaaatagaaagagagtagcaaaaagaaaaaaaactaga

SEQ ID NO: 92709 - DNA, 639 bp, Heterodera glycines
attggattgtggtcaattaccgcgaggcctaccaaatgtacgcctgcaatggcattctgttcaaccatgagagtccgcgaagaggcgaaacctttgtgacgcgtaagatttcgcgtggagtggccaaaatttcgcttggccaacaggaattggtcgagttgggcaatttgaacgctttgcgcgactggggacacgcgcgggaatatgtcgaggccatgtggatgattttgcaacaggattcgcctgacgattttgtgattgccaccggaaggaattacacagtccgacattttgtcgaattggcctttaaagagatcggcgaaacgattatttgggagggcgaaggcgtcgacgaagtcggccgcgaaaaagagaagggcactttgcgcgtccgcgtcaacccgaagttttaccgcccgacggaagtcgaacttttaattggggacccgagcaaagcgaagaaacaattgggctgggaaccgaaagtcgagattgaggaattggtaaaggaaatggtggccagcgacatcgaactgatgaagaagaatccgatggcatagacgcggaaccaatggattaatttaattatttttgactctgggccattttcacataattgcataactgtgattggctggg

SEQ ID NO: 92710 - DNA, 602 bp, Heterodera glycines
gtacacgccctcccattcatacaccacgatcggcttgcacaaataacgaagacacgccactacactcggccacccaattcctgtctttgcggacctttcttcaaatgccaactcaaaagtcttgcagccgctcagcaagttcaaccaggaaacagaacaattccgctgcgtctttggcgactgccacatccacctttgcgccagcccgctcgacaaggagtcgttccaagtctatctcgtgattgacaatatcgattggccaagcagtacccgacccgagcccttgacggcatccgtctatgtcgtcgttgaagccgggaaaagttcgtacgacaatgtcgacacggccatgctttatctcgttaccagcaagtggaccctggtcgatatgaatgttggcgacatttttactgcgtcccactcgctgcgggggttgcttccagcttaagaacaagatctgggctgcagcaggatggtccggtattacgacaacggatactacaacgacgggtatcgcttgtggctccggaaagtcaccctcaacttcgaatcggccgcaaccgacgctcgctctgcacacctacctcccagcccgaccgcaa

SEQ ID NO: 92711 - DNA, 181 bp, Heterodera glycines
aatgaccgtttccgacgacatcaaatggtggggcttgccccttctcgcgcttcatgaggcggctgagctttatctgagtgggatgcttgaggacaccaatttgtgcgcgatccatgcccgtccagtgacaatcatgccatatgatatgaggttggtcccctagattcgtggcaatacattt

SEQ ID NO: 92712 - DNA, 598 bp, Heterodera glycines
  unsure (1)..(598): unsure at all n locations
acaacccattctcgtattggtcactggcgcggctggaccacttggctattctctggttctgcacctctccaaacgggatgtttttggccaatatctccccattgtcctcgtccttctcgacatccctcctcttactgaaatgctcaccggcgtccattacaaattgattgactgtgcgcttcccaacctcttctgcgtctaggcaatgaccacggaagaggcggccttcacagacatttactacccttttctggtcagagcgatgccccgctcacaaggcatggatccaacggaccttcttgcggcctatgtccgaattttcggatcacagggcgaagctttggccactttttccaagcccacagtcattgtgctctgggtgggaaatcccgccaacacacacacattaatttgcgcctaatacccggccaacaaatttccggctaagaattttagtgccntgactcgtcttgaccacaaccgtgccatggcacaagtggcacacaagtgcgcacatggaaccaccgttgggatggtgaaaaatgtgatcatttggggcaatcactcgagcactcagttcccggatactcgacatgcc

SEQ ID NO: 92713 - DNA, 602 bp, Heterodera glycines
cttgcatttgggcctccaacttctgctccaacattgccttccgcaaccgatgacactgacagtgtccaagaaaaccaagtggagtcatgggtggagttggccccgagtcgggcaagtctgtgcagcagcattgaggccgtaatgttggacagtgcgagcggaggcgaaaatagcgtgaccagagactcgcgactcagcccggtcagtctgcagagtccgcacgtcgagttcgagacgtcgctggagcaggtcaaataccgcctggtcaaggacatgctgccctttgctgacggagcaaagcctagcgattggctttgggattggtcgtcccgctcagagacgggcaatgttcctcagaagtcgggcgccaaaagcaaaaactgtggagcgcaaatcggttccacgctcaccacccctccgaacagtcccgagccagagagctcagaatttgagttcaaatccaaatcatcaaaccgttcaattctgaagaaaacggcgagccgaaagtcggtgtttttgcgattcgatgtgatctttggattcgtcttctcgaaccttgtcactttctttcttggtgccgcgattgggtattgcatttgccg

SEQ ID NO: 92714 - DNA, 423 bp, Heterodera glycines
  unsure (1)..(423): unsure at all n locations
tcattggtgcccaaaaccaaacaaccgcacagctgcagcgaaagtacgccgcattggagacgcgtgtgcgagaatacgagacggaactcgaaaacgggcgggagcagatggaacgtgccaagcgctacattgttgaccaggagaacagaccggagaaggacgcacgtcgcacactgctcaaattggctgaaatgttcgagtcgcccattcccacaacatcgaatgtggcccgtttacgcaaacagtttgacgacgacgacaacgatgctgatgacaattagagaccggacactgcttcaatcgattaatcggggaaagatcgtcgatttttctgtatttttcttaagactaatttacataaaatgtatttttaaataaattaactgtttgcaaaananaaaaaaaaaaaaaaaaaaaaaaaaa

SEQ ID NO: 92715 - DNA, 377 bp, Heterodera glycines
aaaacgaaaagccgaaaagaaaagaacagaaaatggacgaaggaacaacggaaaataataataacagaaagagcggtgcaaagaaaaggaagcagaaacagaagcaacaaagcgttgttgctgaagtgactgaaccgcacaacaaacaatcggagacagaagaggcggaaaaggaaaagtcgaaaaacggcgacagcgagaaagacggaaaaaaagtgaacgaagcgtcaaaaccgattccttgccaatcaatttcggtaattggagatacagtcaaatcgacaatattattcatcacctttatcctttattccaaaattttgttttatttttctttaattattaaattttgtttagccaaaaaaaaaaaaaaaaaa

SEQ ID NO: 92716 - DNA, 650 bp, Heterodera glycines
tttgttatcagcctggccattacatcagtgactgtcccgctcgcttcaacagtccctatgaggagctgacgccgtaccaaggccgcaagaagtgctatggcgaatttcaatgtgaacagtgcaaacgcaaatggacatcgcagaacagtgtggcgaatgaagcgcaaagctgcatcaaatgccacgtgccggtctttccgcacaaacagcttcccgtggacaaggctgtcgcattgggattggttaaactgcagcggcttccggtcaccaacattggctccacttccaccgagaatctcatcgaccagtgcaccgccgctggcattttcattgacgacacaccgtccggcaacgcttttaatggactgaacagcgactcggcctcgtcttcgccgtcgtcgttggaccagccgatgccgatgatttctccggcgacctctctgatgatttgatactgtttcttatctccatcactgcgactgcttcattttctggcatgcaaatgttcctcctctcctcaatgacactgttcacttccgcccacctgccaatccaatcggctgtcctcagttagccgtttcccccaacgtcgtcgcgcccatccatccgttcactacacaaccaacaaaactcaacccatcccgcactcc

SEQ ID NO: 92717 - DNA, 476 bp, Heterodera glycines
aagaaatttaattaattgaaataaaataatttttaaaatgaaaatgccatttcattggacagaacaacacgggaatgtttgccggaaaatattgatcatagtctccaaactcaaaaatgctgaaaaacggtcggaatcgatgtgcgcaatgattggacttgcgaccaaagaaatgccattgtatggaagggttggcacttatccgaacagttacggacacagaaattccgccgattttgtggcactttttccttctgaagatggccctctttttgtttgtgtcactgcacgattccgagcacaaaattgaggcgaattttgggccggaattcaactttaatcgtaacactctctgaagaaaaaccttttaacgattttcattttttattttgtaaacgatttttcttaatcatttaaaccaatttaactttttttgtattattaatgcatttttgaaaaaataaatattaaattgc

SEQ ID NO: 92718 - DNA, 424 bp, Heterodera glycines
tctaaccgcagtagctgcatgaccacgggatcaactcggcgattcaatcctcatcccttatgcgaagcgctcgacgcagaggattgtcctaatctggaaaatttgttcccgcggaagttcacctttcgggctcgtcatgattcccctgggcgcttccgccctttggaagcccttcaccgaagggccggccatcgcagtgttcgccggcgtgcccaacgtttttctgtagctcttcgctttcacgccaattctgctccatttcctgaccaaacgttttgcccaaaaggtgttcttcaaaaaaagggagcagatgttccccaccctccactaggatttcttccaacgaaaacgcgctcttggctataccgccgatcaattggtcgatgcgtctgacctaccaaaggacaggcgcttttggctgcca

SEQ ID NO: 92719 - DNA, 628 bp, Heterodera glycines
ataaaattgcctgcaccgtaggcaccgagaagtgagaacctacttctcggtgcctacgcctgcacctctgtttttcaaattttcattttataaactgcagttcaactgttcagttaaatcctcctcgccactgtgttcacttgttgaaactacgaaactcttaatcgtctaatgataatgtagttgaaccataggcaacggttgaacctacctgctcttgttattctcctaactattttgcacttcacatcttccgaggccaacgttttgatacatactttccctttcccaacaggtaattcatccgctagtcaattgatggactcatttgctattaaaatggaaatcaacagattgtgtgaaaccagcccatattcttgttcatactcgctttagggccagctctaccatcactggattttttaaaatttctgtcattactcttgtcatcgcattcattgaaggctcataatcaggggtgtggaatgtctatattcaagtaaatgattgaccagcatggaacggtggttagaaatgtgagaagtccagaagtattttcttctttctctggttgttcaacttttttttaacatggaagcagacagcaatttcagcaagaatgaagcag

SEQ ID NO: 92720 - DNA, 476 bp, Heterodera glycines
  unsure (1)..(476): unsure at all n locations
ttttttaattatttaaaatggttgccaataattccgacaacgctaaccccaattcacatgaacagaaagtccaattttctgcaccgcgacgaaattcgatgaatgaactttcgatcaacgaagatattaacagaaaagaaggctcatcaacttcagcttcacatccctctgatttgtccaccaatttgacaattcatgttgatgaacagtcacaaatgcttatgattcatccaatgactgaaccatcggttgacggcaaaagtcaacaaaaaagtacggcttcagcaccagcggaatttcagcgtgccaaatgtttagctgaaagtgaagtgattaaggaaaagccgagcattcgaactcggctcattgtttttgtggtatgtggtgcgatcattgcgttctgtttgatcaaacttttcatatggaaatgattattttgttcaaaaaatgaagaaaaaaaatattnaaaaaaaaaa

SEQ ID NO: 92721 - DNA, 264 bp, Heterodera glycines
gttacctaagggataacagcgcaaaatttttgagaagttctcatttacaaaataaattgcgacctcgatgttggattaagaacaacttataaagaaaaatttataagagttggtctgttcgcccaaataaatcttacatgatctgagttcagaccggcgtgagccaggtcagtttatatctttgattaaataattctgcactacagtacgaaaggatctagagaagtaaagtttttatatagaaaaaaaaaaaaaaaaaaaaaa

SEQ ID NO: 92722 - DNA, 581 bp, Heterodera glycines
aagaagaaaaagtggcgaagaattggccaattgatccattcatttgaaaagaccgcaaacattggcaaaggtcaaaaagaacggcagaaagtcaaaaggacagcaaagggcagttcggcaatgcctcggcactccttttggcactttctttggtcattccctcgaaaattcgctccattttattcttccaaatgggccgactcattccgacccaaaatctttgcaaagtttgcggggataaaactttcgggcgccattacggtgcgtgggtgtgcgatgggtgcagctgttttttcaagagaagcattcgtcgaagtgctgaatataaatgcgttgcgggcaccggcaaatgtttggtggacaaatgccgtcgcaattggtgccaggcgtgccgttttaacaaatgcattgccgaggcgaatatggccaaagaacgcgtgcagaaggagaggggtccgagaaaggcgaaacggagcaaaagcggaaaaagaaacgaagtgccaaaggaagcggaaaagagccaaagggaaagcggagagacggacggaagggggcagcgaagcgttgtctcctcccttccc

SEQ ID NO: 92723 - DNA, 342 bp, Heterodera glycines
  unsure (1)..(342): unsure at all n locations
aattgttagcctattaaaatgcgctttttccttctcctaatgcttattattgcctttttatgcgcttcgccagttgttgctgcaaagaaagcgagatcggtgcctctggtaaacgtgccggattggaacattgagtcggcaaatggcggcgacgggacgaccgatacttaatgtgagatgtgccaaaaacatttggtcaataagtcaatgtgatatctgatatgatttgatggatttattgattgatcactttgattaagcaaagttaccctgcttaatgtgttaacaacctccacgaataaataaaacattttaggcnaaaaaaaaaaaaaaaaaaaaaaa

SEQ ID NO: 92724 - DNA, 142 bp, Heterodera glycines
tccccgtctgtcggccggccccgacctcaaccaaatggtgctcggcacggagggcactttgggcatcattgtgcgtgccaccatcaaaatattaccaatgcccgacattcctcgcttcgactccactccttttccccacttt

SEQ ID NO: 92725 - DNA, 630 bp, Heterodera glycines
aaggacagcgactggtcgaggaactgttcgatgccgttctcatctgttcgggcgcccgcctaaggcggtggcgccccccggagtaccgtatggagagggcgttcaaaggcacagttatccattcggaacagttcacacattcgtccgactttcgtggtcagactgtgtgcgttgtcggccttggtaactccgccgtggctatttccattgcattggcacacacagccaaacaggtgtttctgtgtactcgtcgtggtgaatggatattaccattgcttcaatccgacggacagaagccatgggattggcctttcagcagccgatggcatttttggggtcgccgatgggtgccgaaatgcctccgaaatttttgttgggaaatgagtgcccaatcagtatcaccagactgttcacaaaacaacggaattgggcgaccaatgcatcgattgctgagtgccaatttgacatttggagctgaacagctctgcccactgcttgcttccggccgaattcgaattcgcccaaacattttgtcattgtccgactcgaatttggtcgaattcgccgacagaactgttgaacaacacgtggacgcgctggtcatctgcacgggtttcgaattcgacttta

SEQ ID NO: 92726 - DNA, 628 bp, Heterodera glycines
catccgagtcctttttttgggtgttccttctgttcggccttctgtttgcgctggtggaggtgtctctgttcgctttgctcgtctctccgtacctttccaagctgcccaattccacaattgcccttctcgaccatgccattcccttcaaccctggtggcttggctcagatggaacaccgcttcggctgcatctttgaccagaatctttacgagactttcaaacgtcagatgaacccgcggaacacctgcgacccgttccttctgtcctccttcgtgccgcggcctctcctcttcgtcttcgtcctcctccgacttctgcccattctctgttttctctttttggtcgctgctccccaaaatgctttgagcatttcgctggccaaatgcattcttcgcgttaagcccaccatcagatacaaaaagaacgccaaaagcactccttcaaagagtttgccatcgtattactcgcacaattcgccgacaaagacaacctttggcgtcaaagagaatgtgccaatctcttccccgttgccttgcggcacacaaattccaccaaagactccgccgttgggttacatggatcacagaataaactataacaatgccgcctttttcgccgtctccggcgc

SEQ ID NO: 92727 - DNA, 609 bp, Heterodera glycines
gtttgagtaattttttattttgtttgccctccccccaccccaattaaatgaggccgtggacatttggcctggtcaagcccgatggggtggccaacccaattgccgtccgatggcttctcagcgcaatgcattgtgagggctttgtgatcacaaacggttgtcgtctgacggtgacaccggacttggccggcgagctgtactcaagccatcaggatgccttttattacggacgtctcatccggcacatttgcagtggaccgtcggtggcaatgcgaatggaattgcgcaagttgaacccggcacaaaacgcatttgatgaagatgatgaagaaggcgacgagcttcacggcttttcctcctcctcctccgctttccatcggtcggcgacggaatgccaagaaaatgcgaaaaaatttgacccattggaagcgatcaatcggtggcgcactttgcttggcccgtccaaactgttcgccaacatttatttgagcagctgtgccgagtttgatgagatcaaatgcaaaaatttgcgccaaatgttcgcagtgtcggacaccaggaatctttgccacggctccgactcgttggactcgctgtgccgggaattca

SEQ ID NO: 92728 - DNA, 309 bp, Heterodera glycines
  unsure (1)..(309): unsure at all n locations
gatgttcatttggctgttgttgctgccttcctttttgtttctcctccgcttaagtcatgccaatttgcttatccctggcattatgacggaacgcgtcgaattggcaccaaaatcgcaagaatacatcggctttcttcagtcggctttgaatggcactgaggtggaaattcgggtcaaatgtgaggaggacgttgaaatcgaattcgatgtcgaatttgccattcggagttcgccttgcgccaaggaatttattgtggacaaaatgcgcttctctcaagtcaacaatttgctgcaattttattnttgaca

SEQ ID NO: 92729 - DNA, 484 bp, Heterodera glycines
cgaccctttgacctgttggtttcgacaacagaccgacgtccgcggacgaatgttggcacgcattcctaacctggccagtgccatttccaagcgcatcgcctggtcatttctgattgagccgggacgtccgcccaccgatctttccaaattctttgccgaatttgacgtgctcgaatcatttttcgacaaagctgaactgtcagcaaccgaaagttcgcaaaaggcattcgacgcgaattcgttgttgaaagtgcgcaatcggagattgacttgtgccgatgggtcccgagttactttcaatgttccggctgaactcggtcgggagggcataacgcacgaggagttcgccgccacgaagcagcacctccgaattgttggggatctcgactgcccacagatttcgacacgcgttgaatttgggcatggcgacttcatcaatgccagctatgtccggggaggtccgcttctgaaacgttcattcttg

SEQ ID NO: 92730 - DNA, 615 bp, Heterodera glycines
ctcccttttcccctttttgaatttcaataaattattttccaatttttttttctaaattttgctgaaatgtcggccaaatacttgcgcagaatgcccccctctctttcgcttcttttggccctttcgatggccttttgcctaatcactttggtactgaaatgccccgatgaagaatgcaaaaacaatttgagggaaatcatttcatttccaatggacggcgacgaaacaaatggaacaaattcatcgtaagcaatggaaaaaacggcggaaaatgcacaagagtttttgctaaaaatgtccaatttcgacaaattcgcatgtaaaattggggacaaatattgaaaattaattgaatggattgatcatttgattattatttattttcttttctttcaatttttcgttttgttctgctgccctccggccataggccattcattcgttcattaagtcaattaattaattcaattgttttatatttgtttattttccttcgcttcgttttcattgtttttaattactttttttatttcctatcattcgctgaataatgtcataatttgaaagtgcatttcaattttggattcgttacataaattgactttttccccaaaa

SEQ ID NO: 92731 - DNA, 208 bp, Heterodera glycines
cattctgatcgttgttgctggcgcttcgggccttccggcgctgaaaacggcgttggaatacggcttggacgcggtgtgcatggaaaagtcggtggatattggagggctgtggcgctacatggaaaatccgggacaaggagaagggaccgtgatgaaatctgcggtgatcttttcgatcaaagacatgtcagcgtacactgatttatcc

SEQ ID NO: 92732 - DNA, 565 bp, Heterodera glycines
  unsure (1)..(565): unsure at all n locations
tcgtcgcctcgccatgaccaaagtctgcatgacgcgccctttctgatgtcctcctccaccgctaatttccctcggtcctccgtccgcgacattcccatccaacgttccgcgtccgcgttcgccccaatgtttggcagagccgcgggcggcacggtgccgccgctgccctcctcgcggacgacaacggccgcaccaacggaatactaccgcaaagaggtgctgacgcgcactctcgtcacgcgctcaaccgaggcgctcagtgcgccgcttccgcttggccgttcgtcccctgcggcgccttttctgacgttggaacagttgccaccgcagagggatgaaatgccagaggaatattggcttcgctactcgcgaaacgtcgaagaggaggagcggcgagtgcgcgaagggcaagagaggcgaaagcgcgaggaagaagaacgccgaaagcgcgtggatgagcagcgccggcgatgggagcagcangaggtggagcagttggagcggatacggcgtgagagagaacgaatggaacaggcattggaggcgcaagcgttggaccgcgaga

SEQ ID NO: 92733 - DNA, 581 bp, Heterodera glycines
accaatttgtgttagctgcccggatggactctttctccaccttccgtggtgccaaaggtggcgatttgtcagtgctcagttcgctcgtttcccttctgctcgttgcccattctgttggccaaaaaatggacatattcaatcggctcgccagtctgtcccgtcgtcagttgttgttcgcctttttgcacggcgagtcgctcggttacattggcagcatttttttggtgtgggacatgggacgagggcatttccctgccgtggcaaagaacttctccgaagagtcgaagaatgtccgacagattggcgtggacgaactgtcctttttcatggaacttcaacaaatcggcgcgtcccccaaactttacgcacacaccgacgcacaaatctacaagcaaaacaaaagcctgattgatacggttcttcataatgcaaaaggaagcggtgaacatttccatttcgtcgatccttcctcagtgccttttggtgccgctcctccgtccagttaccactccattatgaaggcatctgataaagtccccggtctaattctgagctcatttggatccgccgactacgaatat

SEQ ID NO: 92734 - DNA, 574 bp, Heterodera glycines
ctttgttccgtttttaattgtaaaatattgccattttcatgcataaaaattgcgtgccgatgtcgtcgaatgtgagcaattcgccatcaacaccaccaacaaactccgtgccacaaatacttctccaacagttcggcaaggattttgttgcgggcgctgtggccgcttgtgttgccaaaactgtcattgctccggtggagcgcgtcaaactgattttacaactccaaactgcccagcggaccatcgcggccgcgtcccgctactccagcatggtcgactgtttcgtgcggttgcctcgagagcagggcttcctctctttttggcgtggcaatctgtccaacatcgcccgggcggcgagtcaggcaggagtcgcttggcatggcttttaaggagttgttcaagcgttggtgtgtcactgagtctgatcgctctgcaaattatcgtcgttttgttgccggcaatttgttggccggcggtttggccggaagcgtcacctttttcttcatttacccgttggacttctcgcgcactcggctcgctgttgacatgggcaaagatgttgccacccgcgaat

SEQ ID NO: 92735 - DNA, 595 bp, Heterodera glycines
aactttttggatttaacccttccaaaactatccgttttcagcctgctatactcgcatcgccaaaacaaaactaaaaaaaatgttcccgagacttttcgccgttggtggtgccgttacggtaatggccgttttgctgtgcatgcatacggtggtggaaagcgcatacacctaccaaaaattggacgatttaatgccggaactgcgtcaatatttgggccgaacccatcttggcacactgaaggcgcgtcaatactatgacgatgacacggcatttcaacagcaaatccgtgagcgcaaatccaacaatctgcgcaacttgatgaggattggcaaacggagtgtgccaatgccatcacaatcattgccggctgactccggtgccaaacatgcggcagagctcggtgttggcgccgccctcggtcccatctactacatcccaaatgacttagtccaggcttttcgtcctcagtctgtgtggctccgtcgttgaatgagcggcagcacaaaaagctttgtgcaaaaaatccgttgatgaaaaaaaagaaaaaaaaagaaatgggaatttgcaatgatttggttttagaaaaaaatgggt

SEQ ID NO: 92736 - DNA, 636 bp, Heterodera glycines
ttatatttatttttcgccatgcaaaaatatgctgcagaatctttaatccgtttgcaaggggttcgtcctttgtttttatctctgcgaacattgaaggaactgaaaaatccttttgcagcggcgatccttgagacaccaatggaggggcaaagcaaaaccttcaaacagaggaacccaattccgctggtcgatgaaccaaataaaaaaagcatcaaagatattctcgaacccgcgaaaattaccggagatttgacgcaggaaattgatccgaacaaggaaatcatggaaatcggtggtgttcccgaggaacatagagaaggaagaaatgctcgaatttacatgccagcacggactgcgatgcaatcgggttgggacaacaccggggtgtggaagatcgaactggacgagcgagagcgatgggaaaatgctaccatcggatgggcgagcaatgccgaccctttgagcaacataagcatggcgctaagctttgcttctcgtgaggatgccattaacttttgcgagaaaaatcgctggtcctatattgtcgaagaaccaccgagccgtgaaatcaagccgaaggcttatggttccaatttttcatggaacaaacgcacgagagtcagcactaaatgaacc

SEQ ID NO: 92737 - DNA, 212 bp, Heterodera glycines
accttgattttcttaagcaagtcatagcctgtcatgccaggcatacagtaatctgttataacaagattcacctccacctcctataaagacacaaaaagccgaaaacaatctcagaatcccagaaaaagaaactgatctgtggccaaaaataaacactgaacacaacacaacaagttggttaaaatttttaaattactaaaaaaaaaaacaaa

SEQ ID NO: 92738 - DNA, 531 bp, Heterodera glycines
ctccggcagaggaggtgaagccatcggcagaagaagcagcagcgaatgcttctcccccgtcgccctcttcctccgcggacagtgccaaaggcgtcagtctgtggcggatttgcccctttctgtgccaagtgtcctccccctcctcccccgaggggtcgtccgtccgctgtttggagtgcggcgggaacgacgacgagcagcagcaccaattcaacgacttgggtagcacgtacaaccatctgaggaagcaccacccccaacagtttcagcagctgtacgaccattggaagagcgagccgccgcccaaacggcgcctttacgggcaccgacagcagcagcaacagaacgccaaccgacaaatggcggagggggagagaacgcatgtttccgtcaacattgaactgaaagagaaggctttcgtcgacccgttgtctctttttgcggccgatgatcagcaaatttattcggagaatgaccctttgcagcagaatggggcgctctgttcgtcggtcgtttggtccgtcggtctct

SEQ ID NO: 92739 - DNA, 638 bp, Heterodera glycines
gtccaattaaggtttgaaaatgtccgtctgtccgttgtgtgattcgccagtgccctttgggttggccatgctcgccccgtgtcaccacgttgggcatgccaattgcatcaataattttgtccgccacaatggcttctgttgggtttctaactgcgcaatgcctgtgctggaaagtgacgtgctcggcctgcacattgactcacctcagccgaattggattggcttgaatgaccaacaatcggtgcgtgaagtgatcggagtaattcgtcaacgtttggtcggtcaatcgcaatgtgcagcaaatgtaacggacaacgactttgaagaagtggccaacatctttgagcgtttgacttcgcctcgtgtcaacgcaaacacttcggggaaaactgctgccgatccttcagacgaatggcaaaagctgaaggatttgcttttaaaggcttcgcccatcatcgttttcgttgtgtttgcgctgctctgttggtacgccactccgttggttctttcggctggcgctgcactgttggaaggagtttcttcgttggtgatgggtttgggtgcctttctgcgcagttttttcccagaactcgtcgcctcggggctcgccttcttttccgcttacgttttgggcaaga

SEQ ID NO: 92740 - DNA, 558 bp, Heterodera glycines
atttattaaaaatgccgctgttttcagctcatccaattgctttaccacacgacggctgccattgtcgcaatttgctcaattcggccacgctcttttatgcccaaattccattttattgccactgccattgtttttccggcttcatttaccgtcgtcatgttattctggggactttatctgatggacccggcgacggtcacaaggaaggaggcgcgatttatctttgacttcaaatggttcaaccatgcactccacactttccccctcttcgccatgcttctcgacttttccatttggcaccatcgtcgcccctcaaaagtctctgcgctaaaggcgatcttgtgtttctccctgttttacaccatccacatccactttttctatgtctgcttcaacttttgggcttatcccatccttgcccaaatgtccttcagaggccgtgcgtggttcattctcttctgcactattttcatgttttgtgcttttgccatcggcgacgcttttaatcgggttcttccaagaaagttacgagtgtaatggatggtgtatctaatttga

SEQ ID NO: 92741 - DNA, 632 bp, Heterodera glycines
tgaataaactgcaaatttttgttggaaaattacgcttaccccccgctccggggccaacaaatgcgcatccttcggtgcgccacagtgagaaagccctcgtctgtccgtctgctatcttcaccgtcgatgagcagcaaatttattgggagaatgaccctttgcaacagaatggtgcactctgctcgtcggtcgtttggtccgtcggtctcttccaacggcaccgtttccgcaacggcacaattggggcactgtgtttggagtgtggccaagtgttgtgggagatggacacggacgcgcagttgacggaccacattgtgaacaaacaccccgaatacatgccgaattcgttggcagcgaacgtggcaccggcgacggctgactcccaaattgtgccaacgtacgtcgatgaacagggcgaactgtggcgatgtgtggacatcgcaacaaatggcgaattggccgaggaaatgttccaacgcaacggagcacaaccacttcagcagcagcaacagaatgaggaggtgggaaggaagggcaatttggacactaatttgctcattaattacaataattgcttttttactattattacgtttgtctccaaataaatttttttagctgaaaaaaaaaaa

SEQ ID NO: 92742 - DNA, 162 bp, Heterodera glycines
gtttgactcacttccgttcgttccgttggaatgtttaaattcgtccactttttctgctcattggccacttttcccctgctgatctctgccatttcttccaattgcttttacttgccacacattgtgctgaacggcggcacttatgacaagttcaatgcttct

SEQ ID NO: 92743 - DNA, 618 bp, Heterodera glycines
gttactaagctgaaagtggatagggttttccctgtgcttccgcccacggatccttcgtccgtttcgttagcttcgtcttcccaaatcccctcccccacgcatccaaaattcattctgtttgaccgattgttgcccaatgaattggtttgagccgcgcgtgttgcgttccgcccgtccctttgtgcccagcggcggcgaacggcgggacgaagtcggaaaaacgggcgatgaccaggcagtggttcatatgatgtgcgatttggtgttgggcgagattcaggcggagatcagccgagtggagaaggaaatggaacgacgacgacaggacgagcggagactgaccaatcagccagactattcctggcttatggactggcgactgcgtgcaaaacgacccctcagcttcagagaaagctccgaagtggaattgttatgttcaaaagtcagagccgaggaatggcggcgactactcaaagaatggcacataaaagttcgctttgcggaaagtcgggacgaagttttggacacatttcgggcattggtcgacgaaatggcgagggaacgaatgcgaagaaaatgcgtagtgcaaagtgtggacgaacagcaacaactcgggga

SEQ ID NO: 92744 - DNA, 181 bp, Heterodera glycines
ggcggagcgagacaattaccaaacaaaatccgtgttccaatgcgtctgttgtgccccaaaacaatacaattagcggaaaggagaagaagcgaagggacggcgaacggacagaacgatcgatcagcggaaaagtgatcaatcgatcgatcgatcagaaaccaatcacaaaaataaacaaacg

SEQ ID NO: 92745 - DNA, 223 bp, Heterodera glycines
agcggctcaaactttggacaagcgtgaagcgcacttttgtgtgctggtcaaaagctgtgacgaggcatcctttgagaaattggtgcgctcattgtgcaaagagcacatcattccgattttggaggtggaggacaaatccaaactctgtcaaatggttggccagtgccaatacgacaaagacggaaaagcgcgcaaaatcctccgctgctctgtggctgtggtc

SEQ ID NO: 92746 - DNA, 567 bp, Heterodera glycines
gtccaataaagatgtcttcttcggttcagcgttctcttcgtccgtacatcgcctcctctcatcaattaaattaccactctgaggacaacgggggtgcttctgctgtgaatgtttgcgcggaactctgcgcttttctctgtgctaatggattcgcacgcgcagccaaacggagaaaaacggcgccgagaatcgaagagaatgtgacgcgcgatggaaactgtttgcctgctgaaatgggcaacaaaaagggtcgtggagtgcagcttggacttcgttcgttgctgcgttttcacaacaaacgttacactgcgccaaagtcggaggagaaaacgcagcggcgtctcctcgtggtgctgctggacgccgacttcgcgaagcccatagcactgcgtcatgtgttcgctttgcttgcactcggtcccaactcgccctccttcttccttctccccggtctctctacgtctctctccgtccctttgaatttgccacgcatttccaccgtttctttcacttccgacgggcctccagaattagtctgtctgacagcgaagatacgaaaactgttaa

SEQ ID NO: 92747 - DNA, 460 bp, Heterodera glycines
  unsure (1)..(460): unsure at all n locations
aagaaatattcggggctgtgatgttgattttgccgttcaaaactgaacaagaagcgattgcacgagcaaatgccacacaattcggattggcgtcgggattatgcaccacgaatttagcacgagctcatcgcgttgctgctcaattgaaagttggcactgtttttgtcaacacttacaatgatgctgaggtgcacatcccattcggcggcttcaaaaattctggtcacggacgcgaaaactgtgttgaatgtttacacgaatattcacaagtgaaatcggtgtacgtgaacatcgacgaaggattgcaacacaatttgggatgaaggaagcggagagagaaaaatgcaatagaaagagctcaaatacaaatagaatatttttaaaattttttcacatgccttattttactaactaataaagagattanctnanaaaaaaaaaaaaaaaaaaaaaaaaaaaa

SEQ ID NO: 92748 - DNA, 597 bp, Heterodera glycines
tccgtcttcacaaatcctttgaatgtctgcgcccactaattttttgttggttttgacaaatgcgctttttgctaaaaagcttaataacaagagaaggaagagtaagcaaacagaaaggacgaggggcaaaagcagttctgcgcttccgttctgccgtccctccgccgctcgcccacccacacaaacagtgccccccccccctccgcttttcgcgataaagcatttttgccgcctgtgcctttattacaaatgtcccaaaaatcggccgctccctcttctccgcggccgttcacttcgtcggtgccagtgccgttgcaccgttccgcgagttattccccttcggtgctcgccaatgcgaacaaatttttaagtgataggccccaattgatcgattgccctcgctgtaagcagcatggcttcacagaattaaaacatgtcattggcctctttacttgggtctctttcctcgtccttctcatcacgggactctttgtactcccacttttctttctatgggtcccatttttcatcgacactttcaaagacgtggaacaccgatgccccaattgcaagacacacattggcacatttcgaaga

SEQ ID NO: 92749 - DNA, 631 bp, Heterodera glycines
atcaacgtcaacgactcggtcaccaagtccaagttcgacaacctgtacggctgccgcgagtcgctcattgacggcatcaagcgcgccaccgacgtgatgattgccggcaaggtctctgtcgtcgccggctacggtgacgtcggcaagggctgcgccgccgccctcaagggtatgggctcgcgcgtcattgtgaccgaggtggacccgatcaacgccctgcaggccgctatggagggttacgaagtgaccaccatggaggaggcgtgccgcgagggtaacatctttgtgaccacgaccggttgccgcgacatcatcacgggagagcacttcatccacatgaaggacgactcgatcgtgtgcaatattggccatttcgacattgagctcgacgttgcctggctcaaggccaacgcaaagtcgcactccaacatcaagccccaggtcgaccggtacttgctcgccaacggccgccacatcatcttgcttgccgagggccgtcttgtcaacttgggctgtgccacgggccacccgtcgtttgtcatgtccaactcgttctccaaccaagtccttgcccagattgccctgtggaacgccaagcccaacgagttccccattggcgtccacatgttgc

SEQ ID NO: 92750 - DNA, 627 bp, Heterodera glycines
gtcgtttccgccgttttcgacgagttcggcgctctccaaaaatgtggcaggcaaattttacaacagacggcatttgctgaagaaaaacgaaacattgcggctcacctacgacatgctgagacggccccatcacattggcaatcacaaggcgtggatggcgtggaacacgcagaacttgaaggagttcgagcagcagccggggctgaccattgctcaggacgaaatcatccggcgcttctgtcgcgcgctgttcttcgaatttttgcccgaaattgcggggcccaccgaattggtcatcaaacggcgtggcaattgcgcatttgtcaccggctttctctgctggaatgaccgaaccgtcgcaagccaacgcaaattgtattggctgtggggcttcaccgaggaaatcctgtccaatctgctaaagcacccgctgaagttggagctgcaatttgtgcgcagtttggaccatttgatcgtggccaatattgcgcccgcttcttctgtgtgattttggaccggaaaatgagggcgaaccgaccgcaccattcattctctcattttggcctctcatttagacaaaactctttatcatttgcttttttaaagtataaattgttttattttctt

SEQ ID NO: 92751 - DNA, 433 bp, Heterodera glycines
  unsure (1)..(433): unsure at all n locations
gtcgttcgtacctgctccgccaccaattccgccaatacctccaccacccgtgccgttgaacgccatccaattgtctggagttaatggaatgccaaagaagaaaggccgtcgtccgatcccatctcgctcaaatgccacttatatttcgcaggcgtcccaagacatttaccaatcaaatcttttgagcggaggaggcatcagccaaatatcccaatcaagccaactttctcagccttattttggcgattaaaccaacttccgatggatggaaagagaaaggggtcgacggagcaaacgacggaaatgaaggattgctgttgattaatggaaatcacgcgataaagatttcatcctcattttatatgaattctctgagtcaagttaatttcgataaatccattgcagtttncaaaaaaaaaaaaaaaaaaaaaaa

SEQ ID NO: 92752 - DNA, 623 bp, Heterodera glycines
attgagccgtccattatcacaatgaccgcgtccgaaattcattgcatgatgaccgccggctttgcatgcattgcgggcgctttattctccgcttatatcgcacttgggaattgtccaatccatctgttgtccgccactttgatgaattctgcaatttcgttgggcatctccaaattggtctatcccgaggtggaacattcacagcataaggaggccgaaaagatgaaatttgccgagcgagacaatgaggagacaattttggagtgcattacagcatcctcaattcgtacggtaacacagtgtcattcatttcaaatacagtaatcgccccccccctatccttctgactccgcccggttcagtcccattttgcaattgccattggtgccaatttggtcacttacattgccctgttggcatttttgaattcgaccattggttggcttggctcaatggttggaatagcggaactctcattcaataaaatcctcggcttttgcttcttcccattggcctgggccatgggcgtctctgacgcacaaaacactgaggtaatgttggacgaaacgatgaaagtggctgaactgatgggcatcaaaacggcactgaacgaattcattgct

SEQ ID NO: 92753 - DNA, 619 bp, Heterodera glycines
  unsure (1)..(619): unsure at all n locations
tgagcgaatgggagcgtttgtccgagaaattgcgccacccnggaaaatccaattgtcttttttgacattgcagaaggtggagcacccattggtcgtattacgatggaattgtttggggatgtgacgccaaagacggcggaaaactttcgacagctttgcaccggcgaattaaaaaaggacggcgttccaattggctataagaattcgcaattccaccgggttatcaaagattttatggtgcagggaggtgattttgtcaatggtgatggaaccggaatgacgtcaatttatgggccaaaatttgcggacgaaaattttgaagtaaaacattccgagcctggaattctttcaatggctaatgctggccctgacacaaatggctgccaatttttcatcacatgtaacaagtgcgattttcttgatgccaaacatgtcgtttttggacgtgttcttgacgggctgcttactgtgcgaaaaattgaaaatgtgcccaccgttcagaacaacaaaccgaaaataccaattgtcattgaacagtgcggcgagttatgaaataaatctttttggcacttatatagaatgaggggtcaaaaaccaattgggggaggcgagctttttg

SEQ ID NO: 92754 - DNA, 656 bp, Heterodera glycines
  unsure (1)..(656): unsure at all n locations
attaaaagaaaaagactaaataattantggagaatacaaaagaaaatgatggaaaaaccgaaggacattgttcttcggtgagtgagtcgacgtctaaagaagagagcatttgtaatgacaaaagcgaagcggaaggatccaatgaaaaaggaatgccaaacaaagaggaagtgccaaaaggatcggaagagaaagtgcaaaatgaagcggaggtgccaaatgttgagggagtgccaagtgaggcgggcagcgcttcacagccgagcttgtacagccaatttgtgaccagcttcgagagcgtcatcaacagtttggtctcagatgacgtggcgacgcgtccacagcaaaaattgccatctttggacttggagggcgttgcggcgttcatccgcgaagaacgacccgagattgtgttcatggtcggtgccggagtgtccacgtcagccggcatcccggactttcggacgcccggcaccggtctctacgacaacttgaagcagtacgacatcccaaatccgcaggcgatcttcgacataaattacttcagaaggaatcccgagcccttttttgtgctggccaacgcacttttccacgaaagcataatgccgacttccgcgcatcatttcattcgtttggtggcggacaaagggctgctt

SEQ ID NO: 92755 - DNA, 615 bp, Heterodera glycines
gaaagaaaaacgtaaagtacaaattgatggatcaaaacgccccacaatttggcattgatgtgctgccttcatgttcatccgttgatgagcagaaacccgcagaccaacaatcgtccgctgaaatcatttgtttcgttcggaaagatgccatcattcgtccgtccgccccttttggcgctgattttctccactggaaaagttctttttggcgtgagcgaattacatcgatcaaaaatgtggtggcaccgatggtggaccaaagtgagttggcttttcgtatgatgttgcgcagccattccgcccacctttgttacactccgatgatccacgcccatttgtttgttactgacccaacgtaccgcaaagcgtccttcacaacagtggacacggatcggccactgattgtccaattttgtgccaatgatccgcaaactttgctgagtgcgtgccgtttggtggagggaaagtgcgacggtgttgacctgaacttgggctgccctcagctgatcgccaaaaaagggcgttatggcgcatttttgcaggagtctcctgaactgatcgagtcgatgatctccgctgttcatcgccattgtcaccttccaatttcggctaaaa

SEQ ID NO: 92756 - DNA, 58 bp, Heterodera glycines
gtattgtttttatgtattcttttgtatttctcatgttttttaaatacataaatgtttt

SEQ ID NO: 92757 - DNA, 402 bp, Heterodera glycines
cactgaaagcggcgctgccgcccgaggcggacacccaacgcgacaccaccctttcgctgctgacccgagcacggaatcacattcggaccatcaaagagcaacatgcgcaactgttggccaaacggacggcacttttggcagagcatttgcgtcttaaaagcgttcagcaaagacagtaacaacagcagcagttgagctccttgccctccgtttctgtgaccagcaacagtgccactgacaataacaacaagcagcgcaaccacaaacaattgctggcggtgccagcgacgacaacgccaatgccgactaagtcagtgccagtgtttgttgtgccgacgacgacaatggcaccaccgccgccggcaccaacacaatacatgacgattgacgatgatgctgata

SEQ ID NO: 92758 - DNA, 550 bp, Heterodera glycines
ttcattttaaaaacggctctgtttacccgttagctcttgttctttttctcgtcataacttttctcaaacgtttttgaacaggaattcgtcatggagtccgctggcagcagctcacagccaattttaaacagagatttgcaaattttggtcggcgagcaaatatttactgggatatgtggtcctggccaatacattagcaatggatttttcaatttatttgaggcgggaccgactgttaaaagctctgtcgtctcagttcttagcaaaatgactgtttttacaatgaatgaatgccgggcacagatttcgtcgccaaccgacaaaaggaagtttctttgtatcgactttcgaaaatcgtcggggtatttgttcttaaataagttggtccaaattatgaatgaaagcaaagggaaattcttcgaagttttgcatctgatctgtctgaaaggggtttacattgagcgattgttcgatatttttttgatgctgaatgatttgaccatcattaatcttccgtacgaattcgattccttttctcgcaacggggaaa

SEQ ID NO: 92759 - DNA, 421 bp, Heterodera glycines
tccgggcgtcatcgacaacggcaccgggtacaccaagatgggatacgccgggaactcggacccgcaatacatcttgcccaccgcgatcgcgaccgcaccaactgccgctggtgcgtctggcgctggtgctgccaagaacctggcctccaagcgcgggatcgaagatctcgactttttcatcggtgacgaggccatgggtaatgccaagacgtacaacttgcagtacccgattcgccacggtcaaatcgacaactgggacttgatggagcggtactgggaacagtccatcttcaagtatttgcgctgcgagcccgaggatcaccatttccttcttaccgaacctcccctcaacgcgcccgagaaccgcgagtacacggccgagatttttttcgaatcgttcaacgtccctggaatgtacata

SEQ ID NO: 92760 - DNA, 263 bp, Heterodera glycines
atttcacacaatccttgggttaggtgatgcgcaacagaggcacaggggaggaatgcgaacagtggggtttcgaatacatcgaagtgccggtcgcctgtgagtgttatctgagcaagagatcgatgtggcttgaagcggtgcctccatcaatcggagacgaacatttcttataaattgtttctcgaatatttaaatttacaattctaacaaatgttggtttacattagaatacacagaattcaaaaaaaaaaaaaaaaaaaaaa

SEQ ID NO: 92761 - DNA, 631 bp, Heterodera glycines
ggcactccctcaaaactcaattttcaatcatgttggcctattgataatttgtcagcaaatggacctttgttcggagggtcttccaataatgccaacctctgccactgctaatgatccccaaatcgagcgggacgttgcggcaccgacaaagcaatgggagaggaggcggcacttcggcagagatggcactttccctttgtcagccgtttgccccccaattttctcagtcgccgcctttttccttctcctttccctttgcctttcagcagaagttgcccttgcacaggacgaatcccggcaaaagtgtctttcggcggaagcgtccaaaagttgcggcgcgtgcgtttccgccagcgtcgaatgcgcgtggtgctccgatttgcgcttcaacggcacccaaagatgcgatgccaaatgggcatttgcggagaacgaacggtgcgctgtcacgcagctgtactcgccaagcacggagatcaaagtggcgccgcaacacaatttgccattgggtgtcaaaagagcggacggagtgacagtgatccaattggaaccgcagcaagtggaaattcggatgaagcctggtgacattgtcgaggtgcccttccgctacctgcacaagcttccgctgagt
